United States Patent Application Publication US 2021/0199660 A1 - sequence listing, part 69

SEQ ID NO: 995942 - DNA, 120 bp, Artificial Sequence
  ENSG00000274766_8 (sequence is synthesized)
acgatgaccatcacgaggggaaaggcgggcctggccaccgtcctgtcactgacacacttgctcctggtaagaattcctgatgaacaacttggtgtcaggccagtccctgaaccccctttt

SEQ ID NO: 995943 - DNA, 120 bp, Artificial Sequence
  ENSG00000274766_9 (sequence is synthesized)
tgcctttgaaaacctgcttgcaacaaagggcccagggggcactccccaaggcaagctgggcatacgttggggaaagtcatcctcagctcagtgcaaataaatcacattagttttgcctca

SEQ ID NO: 995944 - DNA, 120 bp, Artificial Sequence
  ENSG00000274766_10 (sequence is synthesized)
tcaggcatgcgtgttcttccaagcttgcaaaagttacacaaatgtatgccatgagggttagaggtgaggacataactccaaagcagactccaggtcttcccaggccacacattctcttcc

SEQ ID NO: 995945 - DNA, 120 bp, Artificial Sequence
  ENSG00000274766_11 (sequence is synthesized)
catcattaattggaattggaattcgtttttgtgccatagcgtatgtttcaaagtcacgttcaggtgaatcattaaatgctaccaaccatagacaataaaataataaaatctaaaagttca

SEQ ID NO: 995946 - DNA, 120 bp, Artificial Sequence
  ENSG00000274767_0 (sequence is synthesized)
ttgcaggctgccaccctccaagtcctgcttctctctagagatgggcaggagcaccagccctcacctggcaccagcactctcttcatggaattttgtcggttcaagaagtcataccccagc

SEQ ID NO: 995947 - DNA, 120 bp, Artificial Sequence
  ENSG00000274767_1 (sequence is synthesized)
tccaagggacagggctcctgggagacctagggtgagctggagagtgaagaacagaccccactgggaagtaagcagccctggattctgcctcttgcaaactgattcgttttgaaccctgtt

SEQ ID NO: 995948 - DNA, 120 bp, Artificial Sequence
  ENSG00000274767_2 (sequence is synthesized)
tttctatctgtacaagggactgtaactcccctgcccctgcctagattctcatacctggagactaggagggctaagaccccttctagagataaaaataaaagttgtgaagaaaaagaccaa

SEQ ID NO: 995949 - DNA, 120 bp, Artificial Sequence
  ENSG00000274767_3 (sequence is synthesized)
ccgagccccatggagcaggcaagcgccggagtcccgaggctaaggcccggccggcgggcgctctggcaccttttcccgcccccgagggtgcctgtccggcccggccgggactggctggga

SEQ ID NO: 995950 - DNA, 120 bp, Artificial Sequence
  ENSG00000274767_4 (sequence is synthesized)
aaccgaggccggaagaggtcgcagtccagcaaggaatcgatacctgaatggactgttctcttagctctcttcatggaattttgtcggttcaagaagtcataccccagcccaagagaagcc

SEQ ID NO: 995951 - DNA, 120 bp, Artificial Sequence
  ENSG00000274767_5 (sequence is synthesized)
ccccgggctggggccggttcggcctcccgggtggcgcgcgggccgaagaactaggaggaccgccgggccgggccgcttgtcctttggaaaaaccttggcggttcctcctctggtgtccgt

SEQ ID NO: 995952 - DNA, 120 bp, Artificial Sequence
  ENSG00000274767_6 (sequence is synthesized)
gaggtcgcagtccagcaaggaatcggggcagctcttccgtggttccttgcagaccccaggtcaggccagaaaacacctctatggcccttccctgtgtcccaccaccagataggacctcaa

SEQ ID NO: 995953 - DNA, 120 bp, Artificial Sequence
  ENSG00000274767_7 (sequence is synthesized)
gccctcacctggcaccagcactttactggtggaacataatatggtctaagaagagatttttccagcaagaggccatctctgcaaatcacctgtgaggcagacctgtggcaattttatgac

SEQ ID NO: 995954 - DNA, 120 bp, Artificial Sequence
  ENSG00000274767_8 (sequence is synthesized)
tcagctggccaccgggattgtagctgggttctgccgcttgttgaaacctactcagtgttctccttccctaagtaggacaagaccgtatcctgcctttaagatttatagaataaaaactga

SEQ ID NO: 995955 - DNA, 120 bp, Artificial Sequence
  ENSG00000274767_9 (sequence is synthesized)
aaactctttggggaagaaaatcttcccgaacagatagcccagggcattttgaaaatcccttaggaagttctctgtttcacttgggtacctttgtccttggactttggtgatgtggtttga

SEQ ID NO: 995956 - DNA, 120 bp, Artificial Sequence
  ENSG00000274767_10 (sequence is synthesized)
ccccagccagagagtgcagggaacaacagcaaaaggcaggacaaagactgactcgtgagaggaggcccaggaacaggggggcatcgtgaatgaggaggacgtgggggcccaagaaagtga

SEQ ID NO: 995957 - DNA, 120 bp, Artificial Sequence
  ENSG00000274765_0 (sequence is synthesized)
tcagacaactcaatctttgtgtaaatacttggtaaagcaacaggacacagaagaggaatgctggaaaaatctggtttatgaaaacagaaatcaaaccaagttactaaccaacctccccgt

SEQ ID NO: 995958 - DNA, 120 bp, Artificial Sequence
  ENSG00000274765_1 (sequence is synthesized)
gctgtaaaaaaacccaacagaacagaaaccatttaacatctgaatagtgatttatgaacagatttcctctgacaaatggggccagctattcttaaggcttgccaaatagctgttagatgt

SEQ ID NO: 995959 - DNA, 120 bp, Artificial Sequence
  ENSG00000274765_2 (sequence is synthesized)
ctaaatttttgtatgtgcctgcgtttgtatgtggttacactgtaaagtaatgacagactgaggctttgatttcagaacttcagatgtatcaaaaatacagatttttaatatttgatttta

SEQ ID NO: 995960 - DNA, 120 bp, Artificial Sequence
  ENSG00000235403_0 (sequence is synthesized)
agaaaactcaacggatccgaggaatattttattctatctatatctgcttgaacctcgactttcaagaaaatttttaaaaacaaggcctgctgacacagttacgggcgccctgctatgtga

SEQ ID NO: 995961 - DNA, 120 bp, Artificial Sequence
  ENSG00000235403_1 (sequence is synthesized)
gaccactcttgaaaaagatacagctgaaaactcagtccaggaggagaaggacctgtgatatttggctttcccaggaaactcctacattccttctcaagatcaaatctaaaaacaggtttg

SEQ ID NO: 995962 - DNA, 120 bp, Artificial Sequence
  ENSG00000235403_2 (sequence is synthesized)
tagaatattcactccagctctaagagatggcagaaggtgccaggagtccattgccaggaacacactttcctcagtctcgtaaatgaaactgcacagatggcaaagctaagcaaagggcac

SEQ ID NO: 995963 - DNA, 120 bp, Artificial Sequence
  ENSG00000235407_0 (sequence is synthesized)
ggcggagggtggcagggggtacttcttgccgtggatctcgaagacagccgtgggaatgctgctcaggcgcccgcagtcgatgtcaaactaaagaaccaagggaggccctcttagaagcgg

SEQ ID NO: 995964 - DNA, 120 bp, Artificial Sequence
  ENSG00000235407_1 (sequence is synthesized)
cgagcccagccagagctcacagggatgctgggagcatttggctgtcaaggggagaagaacagactcgggggtggaggaggaagaaggggcacagcacagtccagcgcgtcagggagggca

SEQ ID NO: 995965 - DNA, 120 bp, Artificial Sequence
  ENSG00000235407_2 (sequence is synthesized)
ccactcccagaggaacaggaggtcagacggcagccgctacctgaggcatggaggctcccacggcaatgaagccaaagccaaaggccccagcagaggcctccggagaaaccccaacctcgg

SEQ ID NO: 995966 - DNA, 120 bp, Artificial Sequence
  ENSG00000235407_3 (sequence is synthesized)
ctgggaaacgggctccctaaccacccctgcatcatctcgtttgtgtgaaggggcccccacttcaaggcaaccttgtggggcggtggggcctgacctcacctcattgtactggcccgcagt

SEQ ID NO: 995967 - DNA, 120 bp, Artificial Sequence
  ENSG00000235407_4 (sequence is synthesized)
ggctccaatggcctgctggatgttgaggatgttgccgccaggccccaccagcagggaggtgccggtgtccaggatggcctgacagccaccgtcacaggccaccaccacgccgtcaatgat

SEQ ID NO: 995968 - DNA, 120 bp, Artificial Sequence
  ENSG00000235407_5 (sequence is synthesized)
gacacttccaaaggtatgcaagatggcctcatccagccctccctccccaggtccttcctaccctcccctgccaggatctgcagtagggagggaaggcccccagccctcagccccttccct

SEQ ID NO: 995969 - DNA, 120 bp, Artificial Sequence
  ENSG00000235407_6 (sequence is synthesized)
ggggccccttcctggaggccccagtactttctgagcccagagaaaaaacctaaaaccattttcttccaattcagtggctaaattgaggacatcccactttccatgggacagaaacttcaa

SEQ ID NO: 995970 - DNA, 120 bp, Artificial Sequence
  ENSG00000235407_7 (sequence is synthesized)
taaaacaacaaattcacccacattaaggagtagagcgagtagcatactggttgcctgagatctggtttcaagtttttgctctgccatttacttgctgtgtgtctccagcaagttacccaa

SEQ ID NO: 995971 - DNA, 120 bp, Artificial Sequence
  ENSG00000235407_8 (sequence is synthesized)
cctttgtgtactcaggcttcccttctacaaaatgggtacattaataaccccttctttgacttcctcaagaggtggtcctgaggttcaaactcaatgttagtccattataaagtggggtaa

SEQ ID NO: 995972 - DNA, 120 bp, Artificial Sequence
  ENSG00000235407_9 (sequence is synthesized)
ctagcaggcagtagatgccccagaaaggcagctggtcttgttcataaagcacaggtagaatatgtggcactagcaccgacaaaggtcaccaaccttggaagtgtctagttcagcttctca

SEQ ID NO: 995973 - DNA, 120 bp, Artificial Sequence
  ENSG00000235407_10 (sequence is synthesized)
tgggtggtcttaccagctactgtgctgcagtcctcagagtgtggtgggctgacgcccgggccctcacatccccacagctggatcagcctctggctgaggcccacacagtgtggccgctca

SEQ ID NO: 995974 - DNA, 120 bp, Artificial Sequence
  ENSG00000235407_11 (sequence is synthesized)
cccacctgtccacagtgaactgccagtattcttgcagtcatgggtatccagtgcagggagcctgtgtagtacgacagatcaatggccctcagcgtgagcatgctcccctggtcattcctg

SEQ ID NO: 995975 - DNA, 120 bp, Artificial Sequence
  ENSG00000235407_12 (sequence is synthesized)
aaaccaaggcgcagcgcgctgtttcagcgaggctcagaaaagcggtgcccagccccaccctggggcagacaccactgagatccagcccaccctcctccgccccacccctaccccacgctt

SEQ ID NO: 995976 - DNA, 120 bp, Artificial Sequence
  ENSG00000235407_13 (sequence is synthesized)
cagatgaggtctccagccccctctggctcctcctccgctgggctttctctgaagtcagcggcagcatcctttctcctgagcgctgcagcccccaccccaaccccagaggaagtaacccac

SEQ ID NO: 995977 - DNA, 120 bp, Artificial Sequence
  ENSG00000235407_14 (sequence is synthesized)
cccacaggtcctgggactgccaggctgtgccccagccacccttgagtgtgcccagctgtctccctaggctcctactccctgtcagccgccacccagggctttctgcctttagtaggaaag

SEQ ID NO: 995978 - DNA, 120 bp, Artificial Sequence
  ENSG00000235407_15 (sequence is synthesized)
ggggtcttcaacaaaatctacactttggattgaaactgccacccaaacgcaaatcccctctgttcctcgtggggccgtgtctcacacatggctgggaaacacacactgtacccacccact

SEQ ID NO: 995979 - DNA, 120 bp, Artificial Sequence
  ENSG00000235407_16 (sequence is synthesized)
tccggagcactgccttgggctcctagaactcatccagcccatcccagctcccggctctggtacacgctttctccccagacggcacccactcctccctcagcaaagactgccctggctgcc

SEQ ID NO: 995980 - DNA, 120 bp, Artificial Sequence
  ENSG00000235407_17 (sequence is synthesized)
ctcggctgggccttcccctgttactcagcctctgacacacccaaatctcccctgctgcacccttatcacactgtttgattacaatagtgtatgtaatggtgtgctgtctgcttctcctgc

SEQ ID NO: 995981 - DNA, 120 bp, Artificial Sequence
  ENSG00000235407_18 (sequence is synthesized)
taaaatgttaactgccagtttgtcttatctgctgatgtgtccccatctctggcagagcctctgcacatagtaagggcccagtaagtatctactgggtgaataaatgcatgagtgaatgca

SEQ ID NO: 995982 - DNA, 120 bp, Artificial Sequence
  ENSG00000234756_0 (sequence is synthesized)
tgaacgatgaaatgacatgcgtttggagaatgtgtggtggatacaagagcatattaatgttaaactccaaaaatatttttatctcaaagattgaaaacaagataaagatgaaggactcta

SEQ ID NO: 995983 - DNA, 120 bp, Artificial Sequence
  ENSG00000234756_1 (sequence is synthesized)
caaaatagaagtcaattgtggaaggaaatgtcatattcaacatcttaatgaggaatagggtcgaggagtgaaaagaagacaggattcagtcagaagagctgagttctggttcctccacat

SEQ ID NO: 995984 - DNA, 120 bp, Artificial Sequence
  ENSG00000234756_2 (sequence is synthesized)
agtaaactgctatgaaacactgtctattatatgttttcttgataaacatttattgagtgctgtctttcagttggtctcctgtgttagtagcttgtcatacagagcttcaagaagtcaagc

SEQ ID NO: 995985 - DNA, 120 bp, Artificial Sequence
  ENSG00000234756_3 (sequence is synthesized)
ttcaggccatagtcacaaagaattcagctctgatttggagagataaataagtacttagggtgaggttgtgtactaacaaacccactgtaaagtcaaaaaattgtaagccaaaccgtcaaa

SEQ ID NO: 995986 - DNA, 120 bp, Artificial Sequence
  ENSG00000234756_4 (sequence is synthesized)
agtaagagactgtatatgtaactatgtgtgtgtgtgttgttgtttttaagatgtgttttggacaaacgaaagtaaaatctcatttaaaagattgattttaaaagcttcctcaaagttttg

SEQ ID NO: 995987 - DNA, 120 bp, Artificial Sequence
  ENSG00000234754_0 (sequence is synthesized)
aaagtaaagatcagcagacaagaggaaaagtaactgaagagctgtttcctgtgcctgcccctgagagctgatggcttcccagagatgcctcacagtcctgcgcagacagagagaatgcag

SEQ ID NO: 995988 - DNA, 120 bp, Artificial Sequence
  ENSG00000234754_1 (sequence is synthesized)
aagctggcaaaggatcctccacacgcaagatcagaggacgtcccagatcatcttttctttgtggatactgcagccaggtgtacagtaaggagcagacaacatggcactggccaagtggaa

SEQ ID NO: 995989 - DNA, 120 bp, Artificial Sequence
  ENSG00000234754_2 (sequence is synthesized)
aggctgtttgcataataagattacgatggggtggcctgccttccctgtgtgctacgtaaacatcacacctgatccaaccaatctgcaggccctacataaatcagacaccgcctcctccag

SEQ ID NO: 995990 - DNA, 120 bp, Artificial Sequence
  ENSG00000234754_3 (sequence is synthesized)
tcagacaccgcctcctccagcctgcctataaaatctggtacactccacgtgggccagaagtcccatttggatgcccctctctttcgcaagagagagagctgttctcctttctctttcttt

SEQ ID NO: 995991 - DNA, 120 bp, Artificial Sequence
  ENSG00000234754_4 (sequence is synthesized)
aatcttcttgatgcaagacaatgaacccgggtatttaccccagacaacaacaccacttcactaggagttaaaagaacttgaaatgcaaattcatggtcatctggttccaaagcccatatt

SEQ ID NO: 995992 - DNA, 120 bp, Artificial Sequence
  ENSG00000234754_5 (sequence is synthesized)
aacaaaatttttttaattgtgataaaatacacataacataaagttgaccgtgttaactgtttttaaatgtacagtccagtagtgttaagtacattcacattgttgggcaatccttcttca

SEQ ID NO: 995993 - DNA, 120 bp, Artificial Sequence
  ENSG00000234754_6 (sequence is synthesized)
gaactttttaagtttcccaaactgaagctctgcgtctattaagaacaactctttcttccaatccccagctgttggcaactatcattctactttctgtctttatgcatttaataattctac

SEQ ID NO: 995994 - DNA, 120 bp, Artificial Sequence
  ENSG00000234754_7 (sequence is synthesized)
gtacctcatataaatgaaatcaaatggtatttgtaactggcttatttcacttagcataatatcctcaagattcagtcatattgttatatgtgtcataaattgcatttgtaatatcacaaa

SEQ ID NO: 995995 - DNA, 120 bp, Artificial Sequence
  ENSG00000234754_8 (sequence is synthesized)
ctacaccttgatatattgtctactgattagcatggatttataattatttttatgctttgccttctacattctataaaagaataaaaagttgagttaaaaaccaaaattataataatgaaa

SEQ ID NO: 995996 - DNA, 120 bp, Artificial Sequence
  ENSG00000234754_9 (sequence is synthesized)
gccattgaaggggctggctcagggtggccggtcattctgacattgttcccagttctccagtattgaccgtatcaggagaaaggttttcactttctcttggatcctgacatcaggggggaa

SEQ ID NO: 995997 - DNA, 120 bp, Artificial Sequence
  ENSG00000234754_10 (sequence is synthesized)
agaggacgtcccagatcatcttttctttgtggatactgcaggtctacgtgaaatagtgtgtttttgcggggtgctgtcccttaggacaagtgaagggctgatgagaaaggaaactgcgtg

SEQ ID NO: 995998 - DNA, 120 bp, Artificial Sequence
  ENSG00000234754_11 (sequence is synthesized)
aggtatcacaaagccatccatggggcagcctatgaaagtatgttcacacggagggaaaatatcagtgttcatatatcccttttagtgctgccttcccttttccactcccacaccaccccc

SEQ ID NO: 995999 - DNA, 120 bp, Artificial Sequence
  ENSG00000234754_12 (sequence is synthesized)
aaaacattttaaaaagttagttttggaagactgactttgtcttattctaaaatgtgtgcacagtaacagaagtgagaaagtcattccagtcttcatctagtcacctgagtcacaacttta

SEQ ID NO: 996000 - DNA, 120 bp, Artificial Sequence
  ENSG00000234754_13 (sequence is synthesized)
atgcagcttctttttgttcctcaatctttgattacataatcatttgcaaaaatacactcctgaaatgaaatcacagttagccttgcattttggagtagtattagaattaagacttgccat

SEQ ID NO: 996001 - DNA, 120 bp, Artificial Sequence
  ENSG00000234754_14 (sequence is synthesized)
caaagaggttgccatctagaatgtttattctctttactgtgccccaggggttttacatgcatttgcaactttatttttattttatcctacaggaaaaaaggctcagagtgaatggctatt

SEQ ID NO: 996002 - DNA, 90 bp, Artificial Sequence
  ENSG00000234754_15 (sequence is synthesized)
tttatcctacaggaaaaaaggctcagagtgaatggctattagcctaaggttactcagctagtgatataggagttaagctggagtcctcag

SEQ ID NO: 996003 - DNA, 120 bp, Artificial Sequence
  ENSG00000234754_16 (sequence is synthesized)
cctgtaaaatcgagctgcagacatagacaagcaagctagaagcttgcacaggcgaatgcctgcagttgtgccaacaggaaaaggctacctggaactaggcatgttcaaaatggcagctct

SEQ ID NO: 996004 - DNA, 120 bp, Artificial Sequence
  ENSG00000234754_17 (sequence is synthesized)
agacaagaggaaaagtaactggtgagttttggatttagaaaagttttggattcatctgtttatgaggaggaaaagaggccaagaaaaggcagcaatttgtccatgtgcttaattagtgag

SEQ ID NO: 996005 - DNA, 120 bp, Artificial Sequence
  ENSG00000234754_18 (sequence is synthesized)
tggcagtggcagtaacctggtctgctgagctccctggactccctgatcccagctcaaaatagtttccagttttcatctgccagttgcttcggaggcttttctaaggaagacagttcataa

SEQ ID NO: 996006 - DNA, 120 bp, Artificial Sequence
  ENSG00000234754_19 (sequence is synthesized)
aatgacccagaattcatcctccttaggtgataggatcattactccttatacaccccctaggtctcagcctatgaacaaacacttgtttgtttctctgtctaccctgttccaaaccaccga

SEQ ID NO: 996007 - DNA, 120 bp, Artificial Sequence
  ENSG00000234754_20 (sequence is synthesized)
aaattttatatggcctagcatccattcattttaacttaagggattctctttcacattccttacagaacaggtctagtagtaatgaatttcctcagcatttttttaaatctgggaagtttt

SEQ ID NO: 996008 - DNA, 120 bp, Artificial Sequence
  ENSG00000234754_21 (sequence is synthesized)
aattctttgcttttgaaggacagtattgctggatatagaattcttagtcacaactttttttttctttcagcattttaaatatattatctcactacttttttatttgcaaggtttttgctg

SEQ ID NO: 996009 - DNA, 120 bp, Artificial Sequence
  ENSG00000234754_22 (sequence is synthesized)
agaaatctgctgatagtgttattgaggacacattgtatagctatttttccatttctgttttcaagatttcctttgtctttgatttctcacagttgactatattttagttggatctctttg

SEQ ID NO: 996010 - DNA, 120 bp, Artificial Sequence
  ENSG00000234754_23 (sequence is synthesized)
gattatcatacttggagtttgttgagcttcttgtatttgtagattcatgtcttttctcaaatttgggcagtttggggtcattatttctccaaacacagtagtttaccatcacccacagtt

SEQ ID NO: 996011 - DNA, 120 bp, Artificial Sequence
  ENSG00000234754_24 (sequence is synthesized)
tcactttccacagtttccattgccaatggtcaacagcagtttgaaaatattaaatgaaaattccagaaataagcaatttataagtttaaatcacatgccatactgagcagtatgatgaaa

SEQ ID NO: 996012 - DNA, 120 bp, Artificial Sequence
  ENSG00000234754_25 (sequence is synthesized)
tcttgtgctatcctgctctgttctacctaggacatgaatcatccctctgtctaggatatctacactgtatatactacctgcctgttagtcatttagtagccatctcagttatcagattga

SEQ ID NO: 996013 - DNA, 120 bp, Artificial Sequence
  ENSG00000234754_26 (sequence is synthesized)
ctgtcatggtatcacagtgcttttgttcaagcaactcttagtttacttaacaaagtccccaaagtgtaatataggtaatgctggaaatttgggtatgccaaaaaaaaaatgttcatggag

SEQ ID NO: 996014 - DNA, 120 bp, Artificial Sequence
  ENSG00000234754_27 (sequence is synthesized)
tgcttcctttaagtaaaaagttgaaaattcttgacacaaggaaggaaaaaaattatgcgaggtttctaagatctacagtaaaagtaaatctatccatgaaattgtgatggaagaaaaaga

SEQ ID NO: 996015 - DNA, 120 bp, Artificial Sequence
  ENSG00000234754_28 (sequence is synthesized)
aatttgtaagtagtacatatagggtttgatactatatttgggatgttggaacatacccaattgataaaagaggactactgtaagttctctgttctttgtttctctcttctcctaaaactt

SEQ ID NO: 996016 - DNA, 120 bp, Artificial Sequence
  ENSG00000234754_29 (sequence is synthesized)
cataatgagtatattggttcatttggtagtatcccatagtctttcagtctctgtttacttttcttcattcatttttctattggcaccttagcctcaataattttaaatgatctctcttta

SEQ ID NO: 996017 - DNA, 120 bp, Artificial Sequence
  ENSG00000234754_30 (sequence is synthesized)
tctctttaacgttaaggattttttttctgcctattcaagtctgccattaaaacattaggctggatgcggtggctcacgcctgcaatcccagatttttgggaggctgaggtgggtggataa

SEQ ID NO: 996018 - DNA, 87 bp, Artificial Sequence
  ENSG00000234754_31 (sequence is synthesized)
caagggagactctgtctaaaaaaaaaatacaccgtagtaaatgtttgaattcagttatcgtgtttttcagctccagaattaatttct

SEQ ID NO: 996019 - DNA, 120 bp, Artificial Sequence
  ENSG00000234754_32 (sequence is synthesized)
aattcagttatcgtgtttttcagctccagaattaatttctgttaggttcttttttataacttttatctctgttttgctttgttttgagacagggtctcactctgtagcataggctggagt

SEQ ID NO: 996020 - DNA, 120 bp, Artificial Sequence
  ENSG00000234754_33 (sequence is synthesized)
gcagtggcacaatcttagcttactgcagcctcaacttccctggcatcaggtaaccttcccacctcagccctactagtagctgggactagaggtgcacaccatcatgcccagctaattttt

SEQ ID NO: 996021 - DNA, 120 bp, Artificial Sequence
  ENSG00000234754_34 (sequence is synthesized)
gatttttaatagaggcagggttttgctatattacccaggctggtctctaactcttgggctcaaatagtcctcccacctcaacttcctgaagtactgggattataggcatgagctaccagg

SEQ ID NO: 996022 - DNA, 120 bp, Artificial Sequence
  ENSG00000234754_35 (sequence is synthesized)
tctgactaatttccatttccttgtgaatatgtgcattttgttcatgtatcttttttatgattttctttacttatctgcctgtgttcttctttggctcatatttaagaatataagcatatt

SEQ ID NO: 996023 - DNA, 120 bp, Artificial Sequence
  ENSG00000234753_0 (sequence is synthesized)
aaccacgtgcaccaaactttaggggaggaaaaatgggaacgtggggagaagacgtgaggcggcagatctgaaaaagatggagattagctccgtttgacaaggcagtgaactttgggaggg

SEQ ID NO: 996024 - DNA, 120 bp, Artificial Sequence
  ENSG00000234753_1 (sequence is synthesized)
cccagggattcaccctggcctcggactaatcctatggggcgcttgcaaaccccggccatcccctggagtctgaaggtcattccggactcctgacgccgccagtcccgcggtgagacgtga

SEQ ID NO: 996025 - DNA, 120 bp, Artificial Sequence
  ENSG00000234753_2 (sequence is synthesized)
accattaattttcaattaaaggagacaaaaagctcgatgacagctccaggtctgctgaagatgtcaagaatctgtattaatatacagcaagagagcataattgtgtgtccatcttccaga

SEQ ID NO: 996026 - DNA, 120 bp, Artificial Sequence
  ENSG00000234753_3 (sequence is synthesized)
gcagcgaaaaatggagggataattaccagctcgaaagccactctgtaatttagttcttactgtcaccacagccctacacattagcataaattaaaagcagagtttattgttatcaaagtg

SEQ ID NO: 996027 - DNA, 120 bp, Artificial Sequence
  ENSG00000234753_4 (sequence is synthesized)
cgatggaaaaggggctgactggccctggcacttccgaggtgcgacctcagcaagacaagtcccctcttcaccagagacgacacggcgggtcattccggactcctgacgccgccagtcccg

SEQ ID NO: 996028 - DNA, 120 bp, Artificial Sequence
  ENSG00000234753_5 (sequence is synthesized)
ccctggttttctgtggaaagtgagcttctgggttcgacagtgggaccggcacagaccttcccgcagctacaggccatacgacaaccccgctgctctttctttctgcgggcactcgggcca

SEQ ID NO: 996029 - DNA, 120 bp, Artificial Sequence
  ENSG00000234753_6 (sequence is synthesized)
gtcctaacaattgcccctcaagctgtgtgtgctgccctaaccctcaatcccgaacccgaaacagtgcgtgctgggacgaatctaggcaggtctccgaaaccggggtgaagatgctgaagt

SEQ ID NO: 996030 - DNA, 120 bp, Artificial Sequence
  ENSG00000234753_7 (sequence is synthesized)
gcgagagaaaaccacgtgcaccaaactttaggggaggaaaaatgggaacgtggggagaagacgtgaggcggcagatctgaaaaagatggtcattccggactcctgacgccgccagtcccg

SEQ ID NO: 996031 - DNA, 120 bp, Artificial Sequence
  ENSG00000234752_0 (sequence is synthesized)
attgaattctgctacactttaaacaaaggatacaaattgctaaggaaaggacagtctcagccagcaatatcaattctcagaaccagaagagaaacaatgagattctttctctttagccac

SEQ ID NO: 996032 - DNA, 120 bp, Artificial Sequence
  ENSG00000234752_1 (sequence is synthesized)
aaactctgaaccggctgagcctggttagcccttgattcattgtataagttgacccccctaaaacaagaaaaacgatgaagatgaacaacctgaactggactcctgccaagtccacaaacc

SEQ ID NO: 996033 - DNA, 120 bp, Artificial Sequence
  ENSG00000234752_2 (sequence is synthesized)
gattttgcaagacctgacacttttgaagagtattggacagctattttgaagaatgtcctgcaattctgcctaatgtgtttcaatgaataaatgttacacgtgcattgttggccaagagta

SEQ ID NO: 996034 - DNA, 75 bp, Artificial Sequence
  ENSG00000286118_0 (sequence is synthesized)
gggattacaggtgagagccaccacgcctggcaaaacctggctaatttttaaaaattaaaaactcaggagttcgag

SEQ ID NO: 996035 - DNA, 120 bp, Artificial Sequence
  ENSG00000286118_1 (sequence is synthesized)
gcaacagagtgagaccctatctcaaaataaattatttttccagtccctcctcttagacaagatgaactcctttcattgccagcatattcttttttggagagaaaacaaaattataaggat

SEQ ID NO: 996036 - DNA, 120 bp, Artificial Sequence
  ENSG00000286118_2 (sequence is synthesized)
acaaaattataaggatatatcatattcaggaattgagccaagaaggcctccataatggatctgaggagcagtttgttatttggtcttctgttccttagtcgtaacatgggtcatccattt

SEQ ID NO: 996037 - DNA, 120 bp, Artificial Sequence
  ENSG00000286118_3 (sequence is synthesized)
ggacaggagagtgctgctggtcttaactagatgtgactggatagacttcatgaggagtattcctatgagaataaaaagaaaaattatcactatatcttggaaaagcagtgcatccccagg

SEQ ID NO: 996038 - DNA, 120 bp, Artificial Sequence
  ENSG00000286118_4 (sequence is synthesized)
actgtatccctgttgggaatattcaagggaaaaggtcatattctcagccacccaatgataacccagaggtcccagagatcaggactaggtggcaattcatcaaaaagacatcagaaaggt

SEQ ID NO: 996039 - DNA, 120 bp, Artificial Sequence
  ENSG00000286118_5 (sequence is synthesized)
ctagatctgcccggatgatggctaatgccagttgatgatggacaacagcctctggagttcttgcatttcttgagtgattgtgttaatatttttcgtgacatcactggtgacttggttggc

SEQ ID NO: 996040 - DNA, 120 bp, Artificial Sequence
  ENSG00000286118_6 (sequence is synthesized)
ttcatgaatgagagcatggaaaactcaggaattgggttgagcttcttcagtaacccacagagctggattgccagaaaagcctgcaacctgagacctgtccctgttgggggcgaacacatc

SEQ ID NO: 996041 - DNA, 120 bp, Artificial Sequence
  ENSG00000286118_7 (sequence is synthesized)
taaaaccattccaagtcttttagcttcttcagacagttcctgttgttttcctggagagaatggctgttttgcagagggatgttctcactcctgacaatggattgttctgtctaggagtga

SEQ ID NO: 996042 - DNA, 120 bp, Artificial Sequence
  ENSG00000286118_8 (sequence is synthesized)
gtctaggagtgagagttttactctacttctgaaaaggtgaatcgaatgcttgtgactgcagttttcccaaggtttcatagaagtggtctggaggctcttcaaggagaactacaaaccact

SEQ ID NO: 996043 - DNA, 61 bp, Artificial Sequence
  ENSG00000286118_9 (sequence is synthesized)
cttcacagaattggaaaaaaactactttcaacttcatatggaatcaaaacagagcccgcag

SEQ ID NO: 996044 - DNA, 90 bp, Artificial Sequence
  ENSG00000286118_10 (sequence is synthesized)
gaacagagatatagaccaatggaacagaacggaggcctcagaaatactaccacacatctaccacctctgatctttgacaaacctgacaca

SEQ ID NO: 996045 - DNA, 76 bp, Artificial Sequence
  ENSG00000286118_11 (sequence is synthesized)
gcctcagaaatactaccacacatctaccaccattccctgtttaataaattatgttgggaaaactggctagccatat

SEQ ID NO: 996046 - DNA, 120 bp, Artificial Sequence
  ENSG00000231980_0 (sequence is synthesized)
gatgccaggaggggcagatgtggattgacgtggctctcggcccccatgggctggtattgggcctccttgggagcagcctgagagtgctcattcttggccaaatcttgtgattcaacctca

SEQ ID NO: 996047 - DNA, 120 bp, Artificial Sequence
  ENSG00000231980_1 (sequence is synthesized)
atgcttctggaacccacaagccacccagcctcactttctaaaaatatgattgagaaagcaagacagagtttgggacggaggtttctccagcggagcagagccctggcatcctgtggaaca

SEQ ID NO: 996048 - DNA, 120 bp, Artificial Sequence
  ENSG00000231980_2 (sequence is synthesized)
tattgtgagtgttcacagccgagaaagtaagatgactgggatgtcattttcaaagaggaaatgggccccaccccaacagggccaccgagggagaatcgcaggaggcagctcccccaaaac

SEQ ID NO: 996049 - DNA, 120 bp, Artificial Sequence
  ENSG00000231980_3 (sequence is synthesized)
tgggagaaggtcaggcctgggttcccccataccgtcatggtcttgagtcagaaaccagagatttgtaaacagcatcaaaagccttcacttccttctgcagccttaaagtttgaactttac

SEQ ID NO: 996050 - DNA, 120 bp, Artificial Sequence
  ENSG00000231980_4 (sequence is synthesized)
atacattttagacatgaaaagtacaccaagaaagccaccatggtgagttttaggcagagaccctcttgtgaataattcgtctatgatccaagatggccagacaagaatcagggcccaagc

SEQ ID NO: 996051 - DNA, 120 bp, Artificial Sequence
  ENSG00000231980_5 (sequence is synthesized)
tttttctccccagtgtcacatccacgctgttgtctcctctccagctcagaccaaaattctctggacattttcatggctgaaaaccccaccagaacgctggccctgacaggaccctctcct

SEQ ID NO: 996052 - DNA, 120 bp, Artificial Sequence
  ENSG00000231980_6 (sequence is synthesized)
caagtcctgaggacccggctgcggccagccagaatgtaaactacagctcgcagaagcagcaggcatggaggaagaggcaggagagcaagagcagaagctcgaaaccttcaaagggagcct

SEQ ID NO: 996053 - DNA, 120 bp, Artificial Sequence
  ENSG00000231980_7 (sequence is synthesized)
gaagaacaaggccaggagaagcagcggccaggccccaccggtttcctcctttccctcctgaatctaggacagaggccatttcagacgagagaggaaagaacaacaaaatgaactgcagga

SEQ ID NO: 996054 - DNA, 120 bp, Artificial Sequence
  ENSG00000231980_8 (sequence is synthesized)
gaagcagccagagcctgcaaggcccagccagagacggcagaggagagaaccgcaagccaggagcaaggaggagacaggtggactccactaaccaaccgacgcagcccagcggagacaggc

SEQ ID NO: 996055 - DNA, 120 bp, Artificial Sequence
  ENSG00000231980_9 (sequence is synthesized)
ggactccactgaccaaccgacgccacctggagaaagtaaatatttaactgtcagaaggaaaacactgtttgaacagtagtggccttaggaagaaggccctaatttttttgaacactgacc

SEQ ID NO: 996056 - DNA, 120 bp, Artificial Sequence
  ENSG00000231980_10 (sequence is synthesized)
gggggccattctttacccagagctactatgtcccgcgcaaggcaacactggctgaagcccaggagggcggggcagctgcagaccctcaggagcctctgctggctcagggagcgtggggag

SEQ ID NO: 996057 - DNA, 120 bp, Artificial Sequence
  ENSG00000231980_11 (sequence is synthesized)
agtccagcgtgcaccagaaggagggaggccacctctccttgcggcattaggagaccagggtctctgaaagggcggggaccacggccaggccagaaccaccacatcaccaggctgaaggct

SEQ ID NO: 996058 - DNA, 120 bp, Artificial Sequence
  ENSG00000231980_12 (sequence is synthesized)
ggttaacctggtggaatcagctgtcttcatgttcaaaccagcacatggggctattttgctccagtcacctggtgtgacatgagccactgagactcgaacacccctgctctggagcaaaga

SEQ ID NO: 996059 - DNA, 120 bp, Artificial Sequence
  ENSG00000231980_13 (sequence is synthesized)
agaacccacacctctgtcctgcctggcagcctccccaccactcgccgtgggcacggggtccgtatccactcgccgggggcacggggtccgtatccactcgccgggggcacggggtccgta

SEQ ID NO: 996060 - DNA, 120 bp, Artificial Sequence
  ENSG00000231980_14 (sequence is synthesized)
tcctctcgccgggggcacggggtccgtatcctctcgccgggggcacggggtccgtatccacttgctagggcatggggttcatatcctgtcctctgtctcctctaagtgtcccttaaactt

SEQ ID NO: 996061 - DNA, 120 bp, Artificial Sequence
  ENSG00000231980_15 (sequence is synthesized)
aaggccaatcctatgatttccctctaaaagcattcttccgaattctaccccaaagaaaccagtgacatttctcaacatcaggcttcctaatctctgcaggccgcctgaagaaaaagaaga

SEQ ID NO: 996062 - DNA, 120 bp, Artificial Sequence
  ENSG00000231980_16 (sequence is synthesized)
gatatgtgtatggccatgccatttggaaatagaagaaaagcctttaaccgccttctaccttcagctgtttttgccaagcagagaaggtccagaaagcaccttcaaaggggctgggagctc

SEQ ID NO: 996063 - DNA, 120 bp, Artificial Sequence
  ENSG00000231980_17 (sequence is synthesized)
tggccctgcccatccacacagcaaatacagcaagcagaaataacacgttcacaggggctggaggctcctgtcctgcccatccacacagcaaacacagtaaccagaaataacacgttcaca

SEQ ID NO: 996064 - DNA, 120 bp, Artificial Sequence
  ENSG00000231980_18 (sequence is synthesized)
ggggctgggagctccggccctgcccatccacatggcaaacacagcaaccagaaataacacgttcacaggggctggaggctcctgtcctgcccatccacacagcaaacacagcaaccagaa

SEQ ID NO: 996065 - DNA, 120 bp, Artificial Sequence
  ENSG00000231980_19 (sequence is synthesized)
ataacatgttcacaggggctggaggctcctgtcctgcccatccacacagcaaacatagcaaccagaaataacacgttcacaggcttctcctccccactcccaactcagctgcaaaacagc

SEQ ID NO: 996066 - DNA, 120 bp, Artificial Sequence
  ENSG00000231980_20 (sequence is synthesized)
tgataaaatgaggatgggctctatgtaagtaaacagtactcgatctaccagtttacgacatcatcaaagacatgtagagagaaaatacatacacaggtaataataacaatgataattcta

SEQ ID NO: 996067 - DNA, 120 bp, Artificial Sequence
  ENSG00000231980_21 (sequence is synthesized)
atactattttgttagattagaagcatttttcctggacagaagcaacatcacctggggtcccagtggaaagcacgggccaggcgtgctccctgtgaccaggtcagagtgcagagcccgcct

SEQ ID NO: 996068 - DNA, 120 bp, Artificial Sequence
  ENSG00000231980_22 (sequence is synthesized)
ggtgacctcatttccttagggcaattgtaccttctgtctggagccaggtccctcttaaaggtagaagactgcagaaaataattcaccagaagcaggcatggtgcatccccaggacggatc

SEQ ID NO: 996069 - DNA, 120 bp, Artificial Sequence
  ENSG00000231980_23 (sequence is synthesized)
cttcaccgcacccgagaacccgcaggatgaggcagctctgcgcaagcacctgaccccctgcagagctgagatggctgctcggggactatgtcccccagcaaagcacagagctgagccagc

SEQ ID NO: 996070 - DNA, 120 bp, Artificial Sequence
  ENSG00000231980_24 (sequence is synthesized)
tgcttggggactatgtcccccaggaaagcacgtctgagtcttggctccagctcctgtgtatgggatgtgatttggaaatggtctccgaagagggaagccagttaaagatgaggccatcag

SEQ ID NO: 996071 - DNA, 120 bp, Artificial Sequence
  ENSG00000231980_25 (sequence is synthesized)
agtggctcctaatccagggactggtgtccctaagaaggagacactggacagagacagaagtgcccagtgggaaggcgaggccagaattcccgagaacacctggtgacccagcagaggtgg

SEQ ID NO: 996072 - DNA, 120 bp, Artificial Sequence
  ENSG00000231980_26 (sequence is synthesized)
gagggaggcccctgtaagccgaggaatggcaggggtgtcagggccaccagaggctggaggaggcaggaaggaccctctctggagccttcagagatgcacggccccgctaagaccttgatc

SEQ ID NO: 996073 - DNA, 120 bp, Artificial Sequence
  ENSG00000231980_27 (sequence is synthesized)
tcagaccctggggggtgcagggcctggagagctttgcactgttctaagcctgccagtgtgcggggctccgttgccaaagccttgggcactgcacgcgccatctcagaccctctggcccca

SEQ ID NO: 996074 - DNA, 120 bp, Artificial Sequence
  ENSG00000231980_28 (sequence is synthesized)
cacagccagagctcagcgatgagccaggcccacagctcttcctcagggccctcgttttctctctctgcaagccttctcctttctaaactgttgttgctaagtcagaaagagaagagaagg

SEQ ID NO: 996075 - DNA, 120 bp, Artificial Sequence
  ENSG00000231980_29 (sequence is synthesized)
catcacgttgaataatatcctcgagtgataaatctgcagtatctgctgaaggtccacagataatgtgtttaatttgacaaaccagggacaagaatgatgaataaaacactacttgctgat

SEQ ID NO: 996076 - DNA, 120 bp, Artificial Sequence
  ENSG00000231983_0 (sequence is synthesized)
tgatgagtcccagtacccagcacagagcacagtacactctgtctaaaccactaaggccacatgttggacggaggcactttcctgctggaatccgataaatcaccacacccaaatatagaa

SEQ ID NO: 996077 - DNA, 120 bp, Artificial Sequence
  ENSG00000231983_1 (sequence is synthesized)
gtggtggaggcctccagtccaccaaacacagccctaggcgtgtgaaccctgccacaaacatcggtgctcttcctgcacagggcctgggaccaaccgtggccaggacatcagctgctggaa

SEQ ID NO: 996078 - DNA, 120 bp, Artificial Sequence
  ENSG00000231983_2 (sequence is synthesized)
gccgagagagttcatctgagtggcgattttatgatctgcagagtggaaagtaatcataatcccttgagaagtttgcagaatcgaaccgaatgttgaatgccaaagatcttcacaaagcaa

SEQ ID NO: 996079 - DNA, 120 bp, Artificial Sequence
  ENSG00000231985_0 (sequence is synthesized)
ttctcattgtgatctggtgttctttacaagtctaactacagagaatgaatggctgatcctacagacttcaacaattttctgtcctcagacagtgatttatcataatgaattaataaaatg

SEQ ID NO: 996080 - DNA, 120 bp, Artificial Sequence
  ENSG00000231987_0 (sequence is synthesized)
gagaattactctggattgtaagcaaatatctctggaagaaagggaaaactaagtcagagcagaaggagaattgaaatggtgatgaggactgtggaagatgaaggcttggaactgagaccc

SEQ ID NO: 996081 - DNA, 120 bp, Artificial Sequence
  ENSG00000231987_1 (sequence is synthesized)
cctggaaaagacaggcacttgaaagcctattgcctcaaagaaaagaaggatgtatcctctatccagcaagcctttttcaataaaatcattatgtactccacctgcaacaaggaaagaaaa

SEQ ID NO: 996082 - DNA, 120 bp, Artificial Sequence
  ENSG00000231987_2 (sequence is synthesized)
caaagttccgtgaataactaaatcatcataatgaagcaaaacgataagcagaaagcaagagtgttttgaaagcattgatcacaatagccaagaaatgaagcaatccagtatccatcgata

SEQ ID NO: 996083 - DNA, 120 bp, Artificial Sequence
  ENSG00000231987_3 (sequence is synthesized)
aatggatggataaagaaaatgtggtacatacatacaacggaatattattcagccttaacaatgaaggacatccggacacatgctacaacatgaatggactttgaagacattatgttaaaa

SEQ ID NO: 996084 - DNA, 120 bp, Artificial Sequence
  ENSG00000231987_4 (sequence is synthesized)
gcaataagcaaatcacaatagacaaatactatatgacatatgattccacttatatcaggtacttagagtagtcacattcataaagacagaaagtagaatggtggtttctccggggaaggg

SEQ ID NO: 996085 - DNA, 120 bp, Artificial Sequence
  ENSG00000231987_5 (sequence is synthesized)
aaagagagactagggagctgttgtttaatttgtgaaatcaaaagaattttgaagattgcttgcataacattgtgaatatatgaacactactgaactatgtgctttaaaatggttaagtta

SEQ ID NO: 996086 - DNA, 120 bp, Artificial Sequence
  ENSG00000231987_6 (sequence is synthesized)
gtaatgaactatatgcttaaaaatggttaagatagtaaattctgttattttactgatgtttttttctctttcaagttttattttagaatcaaggggaacatacacaggtttgttacaaaa

SEQ ID NO: 996087 - DNA, 120 bp, Artificial Sequence
  ENSG00000231987_7 (sequence is synthesized)
gtatattgtttgatgctgaggtttgaggtatgattgaatctgtcaccccattagtcagcacagtactgaataggtagttcttcggccttcacgacagtttttttaaaagtacacaaacaa

SEQ ID NO: 996088 - DNA, 120 bp, Artificial Sequence
  ENSG00000231987_8 (sequence is synthesized)
cattgtttacagttcaatgagaattggcttctgttggctagcaataaatgtcaaactgttcaacattgattaatcatgaaggaatattgcttaacaaagaataaaatatctttctgaggt

SEQ ID NO: 996089 - DNA, 120 bp, Artificial Sequence
  ENSG00000231987_9 (sequence is synthesized)
tacaagcaacaactagctttctctgacttactgattgacatgatgcaaaatgccttcccagcctcagcatctgacttatatgatattctagtcacttacaaagatgacaactgtattagt

SEQ ID NO: 996090 - DNA, 120 bp, Artificial Sequence
  ENSG00000231987_10 (sequence is synthesized)
tttcatgctgctgataaagacatacctaagaccggccaacttacaaaagaaagagctttattggacttacagttccatgtggctggagaagccactcagtggcagaaggacaagatttca

SEQ ID NO: 996091 - DNA, 120 bp, Artificial Sequence
  ENSG00000231987_11 (sequence is synthesized)
ttcaggcacatctcacatggtggaagacgagagaagagagcttgtgtagggaaactcctgtttttaaaaccatcaaatctcttgagacttattcactaccacgagagcagcatggaaaag

SEQ ID NO: 996092 - DNA, 89 bp, Artificial Sequence
  ENSG00000231987_12 (sequence is synthesized)
tcacaacacatggaaattcaagatgacacaacagtcttccagatactaggtaaagaaaatctgacccagtttgttaaggtatgtttact

SEQ ID NO: 996093 - DNA, 120 bp, Artificial Sequence
  ENSG00000231987_13 (sequence is synthesized)
gtaaagaaaatctgacccagtttgttaaggtatgtttactcctttatcttaccttattggaggtaagataaaagataggtaagatcttaccttaagatcaggaagggtggttcatataat

SEQ ID NO: 996094 - DNA, 120 bp, Artificial Sequence
  ENSG00000231987_14 (sequence is synthesized)
accagtatggcttccaattggtatacccttgtggatctgagggaagaaataagaatgtctgccccataagaagctaggagacagattttggagtccctgagtccctgagaccctgacttg

SEQ ID NO: 996095 - DNA, 120 bp, Artificial Sequence
  ENSG00000231987_15 (sequence is synthesized)
gttacaacagccagagagaactgtgggaatccctgagatggcagcctcatcttaaagggtgattactagagataataagggggagaagccttggtgagcatcctggaccattttggttcc

SEQ ID NO: 996096 - DNA, 120 bp, Artificial Sequence
  ENSG00000234758_0 (sequence is synthesized)
agaaaattcaccaattatggacgtttctccaaaaacgtgtcaagagaaagagaaaaacaaaaatgcatgactatgaatctacccaagtcagaaattcaaggccctgtctaaagacacatc

SEQ ID NO: 996097 - DNA, 120 bp, Artificial Sequence
  ENSG00000234758_1 (sequence is synthesized)
ctgaatcaaaccatatgagaaaaattacaagacaagaacacatttcaaaatggaggtagaggaaacaacacttttgggtaaagtacaactgatgattgtgccaacatgtgctaacccaca

SEQ ID NO: 996098 - DNA, 120 bp, Artificial Sequence
  ENSG00000234758_2 (sequence is synthesized)
catcaacgagcttgatatgattgcagggaagtggcgcccctacgtgccctggaacaccggagcaagatggcatttgttagtgttcagatctgttttagcactgaagatgttccaagcccc

SEQ ID NO: 996099 - DNA, 120 bp, Artificial Sequence
  ENSG00000234758_3 (sequence is synthesized)
ttaaaatctctgagtggccaaagtggggaattatggatggaaagtaacacatctttaaaggggcatttgttactgcaagtgttggtaataaaacaaagtgctggagaaagcaaaggccaa

SEQ ID NO: 996100 - DNA, 120 bp, Artificial Sequence
  ENSG00000287016_0 (sequence is synthesized)
ccagagactataagtgggcttgagctcgaccgcgcgcctgtggaagttctttctctactcgaaaaagggaaagcatttccttgagtttgcgttttaagggaaacttacagcattgacact

SEQ ID NO: 996101 - DNA, 120 bp, Artificial Sequence
  ENSG00000287016_1 (sequence is synthesized)
ttatttaaaatattcactactgctgtagaaaaaaaaaaacaaaaccccgaaaaacagtggggctgtttctaagacgctgggaatcagtaaagaatagtgatccgggagatacaggaagca

SEQ ID NO: 996102 - DNA, 120 bp, Artificial Sequence
  ENSG00000287016_2 (sequence is synthesized)
aatgatctgcgctcaaaaagcgagctgctttcaaagatattagtattttatagatgcgatgcaggagagtgaactcaagcagagcccagccgattgcctgcgttggcaaaatagaacaga

SEQ ID NO: 996103 - DNA, 120 bp, Artificial Sequence
  ENSG00000287016_3 (sequence is synthesized)
agagcccagccgattgcctgcgttggcaaaatagaacagatattctggggagaccaagcaaacagctttcaaaaatgaagactaactaggctggatgcagtggctcacacctataatccc

SEQ ID NO: 996104 - DNA, 120 bp, Artificial Sequence
  ENSG00000287016_4 (sequence is synthesized)
aaagaaggctaactaaagacattcttaaacacacaaaaatggaaggaaattttcagcataagatcccacatgaaacaagaagttcttcaggcagaatgaaaatggcattagcttcaaatc

SEQ ID NO: 996105 - DNA, 120 bp, Artificial Sequence
  ENSG00000287016_5 (sequence is synthesized)
tgaatgtatacaaaggagtgaaatgtggtcctggctacttaggagtctgaggtgggaagatcacttgagcccagttcaaagctgtgatgagttggtcatgccattgcacttcagcctggg

SEQ ID NO: 996106 - DNA, 120 bp, Artificial Sequence
  ENSG00000287016_6 (sequence is synthesized)
taacaaagtgagaccctatctttaaaggaaaaaaaattgtgatgtgggttttataacatatgtaaaagtaaaatgtagcacaaagtgtgggagagaagaaataaaagtaaatttatatgc

SEQ ID NO: 996107 - DNA, 76 bp, Artificial Sequence
  ENSG00000287015_0 (sequence is synthesized)
cagacagacagagactggttcttcaatgatttagtgattgccagttctgccctaagcagtttttatagtgggaagc

SEQ ID NO: 996108 - DNA, 120 bp, Artificial Sequence
  ENSG00000287015_1 (sequence is synthesized)
attgccagttctgccctaagcagtttttatagtgggaagcagggggcagcagagtcccacctttcaaaagggattcagcccataaaatcacatttttctgcatctttttttgttgttgtc

SEQ ID NO: 996109 - DNA, 120 bp, Artificial Sequence
  ENSG00000287015_2 (sequence is synthesized)
aaacctcttttaaagaatctttgcctgctgtctagactgcctgtgaagcaagtggcacgaggcttcttctttctgtttctagtgcttggctgtggtgtcttccaccaggtgatgtcactg

SEQ ID NO: 996110 - DNA, 120 bp, Artificial Sequence
  ENSG00000287015_3 (sequence is synthesized)
ctgggccctgagcagtgggtcctactgttgcagagccatgctggactgtgcagaggtggggggcttgcttctcccttttctgccatactttgtttgatggacaaggaccgtatctactgt

SEQ ID NO: 996111 - DNA, 120 bp, Artificial Sequence
  ENSG00000287015_4 (sequence is synthesized)
gcattttcacatctgattccctacgatgtataggtgtttgacaattctttttgattgttgttaggcaccaaagacttttcagctccatctcatggaatttcaaattaaaaattgttaaat

SEQ ID NO: 996112 - DNA, 120 bp, Artificial Sequence
  ENSG00000268051_0 (sequence is synthesized)
caaatttccaaactttaaatatgtagctctagctacatatttcagtcaatttggaagctttttgagttgttgggtttggtttttgttttttaattttactttttagtatgaacaattgca

SEQ ID NO: 996113 - DNA, 120 bp, Artificial Sequence
  ENSG00000268051_1 (sequence is synthesized)
aacatataagaagtggagtttatattatccaggtgtgaccaagcttattttgtttatattctgactttgcccactcctcagcccattgttttgaggcaagtaccatatatcatatttccc

SEQ ID NO: 996114 - DNA, 120 bp, Artificial Sequence
  ENSG00000268051_2 (sequence is synthesized)
ataaatatttcagtaaatagttctaaagggagaagaggctgaatgcagtagttcatacctgtaatctcaacactttgggaggtggagacaggatggagtttgagactagcctgggtaaca

SEQ ID NO: 996115 - DNA, 120 bp, Artificial Sequence
  ENSG00000268051_3 (sequence is synthesized)
caggatggagtttgagactagcctgggtaacatggcaagaccccatctctacagaaaatttttttaaaaattaggcatggtggtgcatgcctgtgcctcccaagtagctaggattacagg

SEQ ID NO: 996116 - DNA, 120 bp, Artificial Sequence
  ENSG00000232184_0 (sequence is synthesized)
agaacgtacctactaatgataaaagtccaagtggaggtctgagtttgagagccaaatgacctgctgattgaattgcagaaccaggccaactttttcaagcactcttcagtctaggttaga

SEQ ID NO: 996117 - DNA, 120 bp, Artificial Sequence
  ENSG00000232184_1 (sequence is synthesized)
actgttcaacaaagtagccatgggccaaagtggctgttgagcacttgaaaggtaaaaattggctcatgaagacttttatttaaggagtattgccaaagatagtttcttgaagcatgtaca

SEQ ID NO: 996118 - DNA, 120 bp, Artificial Sequence
  ENSG00000232184_2 (sequence is synthesized)
tttatttttactgaaaactgcctttttctggtttaaagctgctctttgaaaattcataaaatgtttatatttttatggtactgtacatttgtgtgtatcatttataaaaattcagaagaa

SEQ ID NO: 996119 - DNA, 120 bp, Artificial Sequence
  ENSG00000170919_0 (sequence is synthesized)
gggggaagcggagtacgttggacccggctccgccctaccccacggggccgcctggagaggtgctgggagctgggtggagcttagaggaattaaactttggccctgcgcctcgtccagcct

SEQ ID NO: 996120 - DNA, 120 bp, Artificial Sequence
  ENSG00000170919_1 (sequence is synthesized)
aggttccacccttttctgggaacatcttcacttcaggtcagctccaaggaggctatccttgcccatcttcctaaaatagagctctcaaaacctggctgttttccttcagagcactggcct

SEQ ID NO: 996121 - DNA, 82 bp, Artificial Sequence
  ENSG00000170919_2 (sequence is synthesized)
gctctcaaaacctggctgttttccttcagagcactggcctccaatttaaatcccaagtaaggtacctgccgtcgagtcctcc

SEQ ID NO: 996122 - DNA, 83 bp, Artificial Sequence
  ENSG00000170919_3 (sequence is synthesized)
attgcaaatgacctgctttctttctgttcccgggcggcatcggacccgtcggagagtaaatcccaagtaaggtacctgccgtt

SEQ ID NO: 996123 - DNA, 81 bp, Artificial Sequence
  ENSG00000170919_4 (sequence is synthesized)
ccgggtggcatcgacccgtcggagagtaaatcccaagtaaggtacctgccgttggcagatttgagctttcttcttggacac

SEQ ID NO: 996124 - DNA, 70 bp, Artificial Sequence
  ENSG00000170919_5 (sequence is synthesized)
ttggacacctaatacccacagtcctccagtaaatcccaagcaaggtacctgccgtcctccggtagattgc

SEQ ID NO: 996125 - DNA, 120 bp, Artificial Sequence
  ENSG00000170919_6 (sequence is synthesized)
ccgggctgcgttcggacccctgtcggatagtaactcccaagtaaggtacctgccgtcggcagattggagctttcttcttggagacctaatacccacagtcctccaggctccggtagattg

SEQ ID NO: 996126 - DNA, 120 bp, Artificial Sequence
  ENSG00000170919_7 (sequence is synthesized)
tcggacccctgtcggagagtaaatccgaaggctggttgaaggctccatacagtatctctatctgccttggacacttcaggcatatgtgccatatatgacagaacatcttgcacaacagtc

SEQ ID NO: 996127 - DNA, 120 bp, Artificial Sequence
  ENSG00000170919_8 (sequence is synthesized)
tgaatttgctgcaacccttctcttgctctgggccccactcaaaaccggcagacttacaaattccttcgtaaatgggccagggcagcatggtaaaatgtgctgtatattacctcctaaaac

SEQ ID NO: 996128 - DNA, 120 bp, Artificial Sequence
  ENSG00000170919_9 (sequence is synthesized)
acccgtcaagtatttttttttaactctttcctagcataggagtacatgatgcagcaatttgttttcatttgaaggagataaccaacatgcctcaggccactgaactcctagaaatgtcac

SEQ ID NO: 996129 - DNA, 120 bp, Artificial Sequence
  ENSG00000170919_10 (sequence is synthesized)
atgctcaacatattatccatataatggactagttctgcattttatgggatgttgtgattatcaagacccctgaagccttgcttatgacagaacaggagagttgccatagacctgagctca

SEQ ID NO: 996130 - DNA, 120 bp, Artificial Sequence
  ENSG00000170919_11 (sequence is synthesized)
aatcgtgaagatgtactgctgtccctgccatgtgaaagcaaacaccttccaaaagtgcctgtaaccaatacagcaggaaaaaaagtatattttacataaatagctgcatcccacatgtca

SEQ ID NO: 996131 - DNA, 120 bp, Artificial Sequence
  ENSG00000170919_12 (sequence is synthesized)
aaagccattttgatttactctagtaagaataacatatttgaaacagcagcagcaatcaattaaatattgataataagcaatggagagataacaggaaatcacgtagaatatatcattgtt

SEQ ID NO: 996132 - DNA, 120 bp, Artificial Sequence
  ENSG00000170919_13 (sequence is synthesized)
tgccaaatattctggctcctttcctactgaggaatcatacttccttaactgcagtcttgtccacgtgacttgcaaatgaaatgtgaacaaaagtgacatgcgtcacctttagacagaaga

SEQ ID NO: 996133 - DNA, 120 bp, Artificial Sequence
  ENSG00000170919_14 (sequence is synthesized)
tgccacggccctcaaacatgaggggccatcctttagaaaccctctctagttgtttagacaactaggccaccggcctcagccagggccccagagtttcggttaaaagtccagctgccatct

SEQ ID NO: 996134 - DNA, 71 bp, Artificial Sequence
  ENSG00000170919_15 (sequence is synthesized)
tgaaagactttttgttcttgggatccccattccaaaggttccgttccccgccccctttgtgacctcataca

SEQ ID NO: 996135 - DNA, 85 bp, Artificial Sequence
  ENSG00000170919_16 (sequence is synthesized)
tctacaaaaccccacagctcccaagaattcccttacctgccttctgcccttaggctccggtagattgtaaataacctgctttctt

SEQ ID NO: 996136 - DNA, 120 bp, Artificial Sequence
  ENSG00000170919_17 (sequence is synthesized)
tcggacccctgtcggagagtaaatccgaagtgccaccatccaagtgaggatttcactgttcacaggcatttgagacacaccagcggccggcggttctcactgctcttcatatggaggcaa

SEQ ID NO: 996137 - DNA, 120 bp, Artificial Sequence
  ENSG00000170919_18 (sequence is synthesized)
ccatatatgggtaagtcatttagtctcttaggtaggcgaactgaggccaatctccccacttttagggctgtgaaactgttctgtatgatacaataatggtggatatgcgtcactatacat

SEQ ID NO: 996138 - DNA, 120 bp, Artificial Sequence
  ENSG00000170919_19 (sequence is synthesized)
tcgtccaaatccacagaatgtacaacaccaagagtgaaccctactgtaaactatggactctgagtgacaatgatgcatcaaataggttcatcagttgtaataaatgcactgctctggtgc

SEQ ID NO: 996139 - DNA, 120 bp, Artificial Sequence
  ENSG00000170919_20 (sequence is synthesized)
ctgggattacaggcacgcgccaccactcccagcaggaaactgctcaacagtcacatcttgaaagtaacttgaggcaactgcaggagggctgcatggcgggaaagaaattgctgaaaacag

SEQ ID NO: 996140 - DNA, 120 bp, Artificial Sequence
  ENSG00000170919_21 (sequence is synthesized)
agggctgcatggcgggaaagaaattgctgaaaacaggctgggtgagctggctcgtacctgtgatcccaacactttgggaagtgaagttgggcggatcacttgagggtcttactctgtgac

SEQ ID NO: 996141 - DNA, 120 bp, Artificial Sequence
  ENSG00000170919_22 (sequence is synthesized)
cacttgagggtcttactctgtgacccacgctggagtgcaatggcaccatcacgacttactgaagcctccacttcccgggctcaagtgattctcacacctcagcctcctgagtagctgaga

SEQ ID NO: 996142 - DNA, 120 bp, Artificial Sequence
  ENSG00000170919_23 (sequence is synthesized)
caggcacgcgccaccactcccagtttacaccccgccactcctgagcaccgcacaccggcttcctcccagtccctcatctgagaactcatgaagccacttggaatccctctctgctttgcc

SEQ ID NO: 996143 - DNA, 81 bp, Artificial Sequence
  ENSG00000170919_24 (sequence is synthesized)
gccttctgcccttagccgggcgtttggacccctgtcttggaccgctgtcggatagtaaatcccaagtaaggtacctgccgt

SEQ ID NO: 996144 - DNA, 120 bp, Artificial Sequence
  ENSG00000170919_25 (sequence is synthesized)
tcaggatgcagaaaggcagtgaactcctccggagtagctgtcaggtcaccattgaggtctgcagctttgaatcttctctcatcacgtggcagcatctttttaaaggtgtgatgatctgaa

SEQ ID NO: 996145 - DNA, 120 bp, Artificial Sequence
  ENSG00000170919_26 (sequence is synthesized)
gaatcatgaaactctgcggggtttcctaggttttcagctcctcagtagtgacaaagccatacccatcattgtcgattcgatcaacaatcttccctagcctctccttgctctcgtccgggg

SEQ ID NO: 996146 - DNA, 120 bp, Artificial Sequence
  ENSG00000170919_27 (sequence is synthesized)
tgagctcgtcgaagttcttggagtcctccttgcccaggaaggcctcgtggtcgtactggaagctctggttgtcctcagggggccgctcgcccagctccgagtcgggccgcaccacgcgct

SEQ ID NO: 996147 - DNA, 120 bp, Artificial Sequence
  ENSG00000170919_28 (sequence is synthesized)
ctttgcgcaccgtgggcttggcccgcagaacccgcggcgccagcaccagcgccagcagcagccccagggctaaccccaggcggccaccgcgcgccatcgtcccgaggagagggcggccgg

SEQ ID NO: 996148 - DNA, 120 bp, Artificial Sequence
  ENSG00000170919_29 (sequence is synthesized)
gagggagacgctgagcgagcgacaacagcggcagctcgggaatgggggctcggagcgcggcggccaagttttatgttatgtatattttacaagtaaaaaaattttttcacctcagcctga

SEQ ID NO: 996149 - DNA, 120 bp, Artificial Sequence
  ENSG00000170919_30 (sequence is synthesized)
ttttacaagtaaaaaaattttttcacctcagcctgaactgaacactagctgacagacgttttgatttctttgaccatcacggaatcgtggccaagcgcggtggctcacatctgtaatccc

SEQ ID NO: 996150 - DNA, 120 bp, Artificial Sequence
  ENSG00000170919_31 (sequence is synthesized)
atccaggtgtttgagatcagcctgggcaacatgacaaaaccctgtttctagtaaaaatacaaaaattaaccaggctcaagccatgaccatgcaccattgcactccagcctaggcgacaga

SEQ ID NO: 996151 - DNA, 120 bp, Artificial Sequence
  ENSG00000170919_32 (sequence is synthesized)
tatgggagcctctcacaagcatgaaaaatccaagtattcagatggaagttggggctcttattttccagcttgggcctgtaccagggctacaaggacatacaatgctaaatcaattaaaaa

SEQ ID NO: 996152 - DNA, 120 bp, Artificial Sequence
  ENSG00000170919_33 (sequence is synthesized)
ccaaaatctactcaaaaccatttatttcaaaaaagttctggagatggatggtggcgatggttacacagcaatgtgaatgtgcttaatgtcactgaactgtacgcttaaaaatggttagga

SEQ ID NO: 996153 - DNA, 120 bp, Artificial Sequence
  ENSG00000170919_34 (sequence is synthesized)
tggtaaagttttttttttttttccttagggggatcctttatttcattcacttcctccttacaaggtgaaatttcaatctgtacaggttgtgtctgccagttcagtccacagctcagagta

SEQ ID NO: 996154 - DNA, 120 bp, Artificial Sequence
  ENSG00000170919_35 (sequence is synthesized)
tcaccttgtcctcattccatggtataagctgttgtggggggacaggtctgagggtcgtggattcactggactggatgggacatgatccagaactccactccgtttggcttcccaaggatc

SEQ ID NO: 996155 - DNA, 120 bp, Artificial Sequence
  ENSG00000170919_36 (sequence is synthesized)
ccaccacctcattctaatcagtgatcattgaggaaatgcattgtattcctattcactatttcaaagatcaggcctacctcattggcatattaagaaagttttctcaagtatatttagtgt

SEQ ID NO: 996156 - DNA, 120 bp, Artificial Sequence
  ENSG00000170919_37 (sequence is synthesized)
ttatcattttactatagttcttcaaatgtctgacattcatcctttccctacctctacattcctttctttttcacattatctttcttgattgctttttaatagaaaaacaaacaaagacat

SEQ ID NO: 996157 - DNA, 120 bp, Artificial Sequence
  ENSG00000170919_38 (sequence is synthesized)
ggatttactgtgcatattagcagatccatactggaaaatgcatggaggtttcatatacaccacttacagtaagtaataactcagagtataaagtcgaaaagaaagaatctgaaatattag

SEQ ID NO: 996158 - DNA, 120 bp, Artificial Sequence
  ENSG00000170919_39 (sequence is synthesized)
acttgttctgaaataagcttacctaggatgataccactttcacttaatcaggatttcccaactatttaacagtggcaaatataaaaaatctggtagttaaaatacacagcagtcacttca

SEQ ID NO: 996159 - DNA, 120 bp, Artificial Sequence
  ENSG00000170919_40 (sequence is synthesized)
tattactgcctccctcaacccactcaacttctgaagaacagggctttttcaagttttgttcccctttaagttttaatagaaaaaaaaaaaaagttttaagtcatgttgtaccaatatatc

SEQ ID NO: 996160 - DNA, 120 bp, Artificial Sequence
  ENSG00000170919_41 (sequence is synthesized)
cccagcaagaattgcaatttaccaaggttttcacgtgttttgagagaaatcttactgaaagactagtgatgtccattttccagtaaatactgagcgaaaaacaatttttataccccaatc

SEQ ID NO: 996161 - DNA, 120 bp, Artificial Sequence
  ENSG00000170919_42 (sequence is synthesized)
gtaaattagacagttgtagcaacaatccaagacaataacagaatgcctatgacagtctgccatattctggtgagtgtctatcaaagctcatcatgattttttgtgagatcttccccgtaa

SEQ ID NO: 996162 - DNA, 120 bp, Artificial Sequence
  ENSG00000170919_43 (sequence is synthesized)
ttggtagcttggcttccaacaaacatgttccagttctccaatatttcctctttagttagcttctcatccttgtttttgtctgactcatataccagatgcctggcctcagcctgtgcatga

SEQ ID NO: 996163 - DNA, 120 bp, Artificial Sequence
  ENSG00000170919_44 (sequence is synthesized)
tcataatcttgagggaggatccagtggcgaatctcatctttgtctaacttcccgtccttgttcagatcccggaattcgttaaactgctcccgttctgataaaacccagtctggctcaggg

SEQ ID NO: 996164 - DNA, 120 bp, Artificial Sequence
  ENSG00000170919_45 (sequence is synthesized)
ccattctcctcatgggaaaacatatccgcaatatactcatcctgatccacaaacccatccccgttcttgtcgatgtcctccagggtttccaaagccacaatttccttcatatgttcaaac

SEQ ID NO: 996165 - DNA, 120 bp, Artificial Sequence
  ENSG00000170919_46 (sequence is synthesized)
ctggctgttttccttcagagcactggcctccaattgtaagtagatatttatctgtttactacgtgtctccatcactaggcgatacacttcaggaggggagaattttttgttttggttctc

SEQ ID NO: 996166 - DNA, 120 bp, Artificial Sequence
  ENSG00000170919_47 (sequence is synthesized)
tgccataagagtgcatggtatttactaagcatgaaataaatagttgttggggggaaaaagaatgagtaaacgaataaatgaagtgtgggaaactcctgaggatgcaactctctacctagc

SEQ ID NO: 996167 - DNA, 120 bp, Artificial Sequence
  ENSG00000170919_48 (sequence is synthesized)
ggtggccaaagctactggataaaccatgtatgtacccatctttttaacctatgtgtgttttgctagaatggagtgttctaattagaagtaaaaatttgtttgttctttaatagaatttaa

SEQ ID NO: 996168 - DNA, 120 bp, Artificial Sequence
  ENSG00000170919_49 (sequence is synthesized)
ttttttaaaaatgtttatctgcaagatcgagacggtatctcactatcttgttggtttcaaactcttgggctacagggatcctctcgcgtcggcttcccaaagtgctgggattacgggcgt

SEQ ID NO: 996169 - DNA, 120 bp, Artificial Sequence
  ENSG00000170919_50 (sequence is synthesized)
accttgcactttctcagtcagcgagtattatttactactcacctccacttagcagtagggagctgtattgcaaagggggctgatgagcgcggcttgacgcccctacacaccccgccaagg

SEQ ID NO: 996170 - DNA, 120 bp, Artificial Sequence
  ENSG00000170919_51 (sequence is synthesized)
gggttgctgcagttacggtttcgccgaatgtccggcagagggcgctgcgaacacgccgctccagccgccgggcaggggagagcggaatgatattcccaatgaccgcagtcagaaccatca

SEQ ID NO: 996171 - DNA, 120 bp, Artificial Sequence
  ENSG00000170919_52 (sequence is synthesized)
gcgcattcctaggacgctttccagctgctgggtggcttcataccccggtaaagtgaatggtttccaagttcccgctgagtactgggatctggagagcttttgaaaaacacggatttctgg

SEQ ID NO: 996172 - DNA, 120 bp, Artificial Sequence
  ENSG00000170919_53 (sequence is synthesized)
gcggcactctcaaagattctggttccatgggaattgggcgggccctggaccctcttgaagatgtttcctgttgattttgatgatcaggtttgggccccattggtgggaactccccaaggc

SEQ ID NO: 996173 - DNA, 120 bp, Artificial Sequence
  ENSG00000170919_54 (sequence is synthesized)
gactagggagccgaaggagagaggaggacacaaacctggtttccactcccaaccctgttgctttttagctgcgcgatccttctgtgtactaccccccatgacaacttgtaaaatggagct

SEQ ID NO: 996174 - DNA, 87 bp, Artificial Sequence
  ENSG00000170919_55 (sequence is synthesized)
tctgtgtactaccccccatgacaacttgtaaaatggagctaatggtaaagatagggctaggccaggccctgtggctcaggcctgtaa

SEQ ID NO: 996175 - DNA, 71 bp, Artificial Sequence
  ENSG00000170919_56 (sequence is synthesized)
ctgccgtctaactcccaagtaaggtacctgccgtcggcagattggagctttcttcttggagacctaatacc

SEQ ID NO: 996176 - DNA, 120 bp, Artificial Sequence
  ENSG00000170919_57 (sequence is synthesized)
cgttcggacccctgtcggagagtaaatccgaaaaaaacaaacaaagacatggatttactgtgcatattagcagatccatactggaaaatgcatggaggtttcatatacaccacttacaga

SEQ ID NO: 996177 - DNA, 65 bp, Artificial Sequence
  ENSG00000170919_58 (sequence is synthesized)
cagagatgggcgaagaatgtattttttacaacacaatcaaatcaatgccttaaaactaggctgtc

SEQ ID NO: 996178 - DNA, 120 bp, Artificial Sequence
  ENSG00000170919_59 (sequence is synthesized)
ttacaacacaatcaaatcaatgccttaaaactaggctgtcatcacatttttccccccgttttacatacttaaattggctaaatcaagaataggggctggctctcagtccctacctcgtgg

SEQ ID NO: 996179 - DNA, 120 bp, Artificial Sequence
  ENSG00000170919_60 (sequence is synthesized)
cctacctcgtggggggtgcctcccctccctgcgatgggggtcctaagagcctggggcggaagaggggctggctctcagccaccacaaaatggggagcctttatgttcaggttttgcccaa

SEQ ID NO: 996180 - DNA, 120 bp, Artificial Sequence
  ENSG00000170919_61 (sequence is synthesized)
ttatttgcttctggtactagcagggcagttgatgccgtggccttcaaacatgggggccatcctttagaaaccctttctatttgtttagacacgtaggccaccggcctcagccagggcccc

SEQ ID NO: 996181 - DNA, 120 bp, Artificial Sequence
  ENSG00000170919_62 (sequence is synthesized)
agggccccagagtttcggttaaaattccagctgccatcttttctctatctgacgcattcaatggaaaaggctttgtcagatctggtagccccggggctggggctgccagaagtttttcct

SEQ ID NO: 996182 - DNA, 120 bp, Artificial Sequence
  ENSG00000170919_63 (sequence is synthesized)
cctccaggtgagtcctaagtatcttaggatccgcgatgggggtcctaaggcagggggggaagaggggatggctgtcacccaacccaaaatgggcggcctttatgttcaggttttgcccaa

SEQ ID NO: 996183 - DNA, 90 bp, Artificial Sequence
  ENSG00000170919_64 (sequence is synthesized)
caaacaggggggccatcctttagaaaccctctctagttgtttagagacgtaggacattggcctcatccagggccccagagtttcatctga

SEQ ID NO: 996184 - DNA, 120 bp, Artificial Sequence
  ENSG00000170919_65 (sequence is synthesized)
ccctattccaaaggttcccggtccctgccccctttgtgacctcatacaaagacttggctaatactgcaaagtttgggatgcacagtctacaaaaccccacagcccctgagaattccctca

SEQ ID NO: 996185 - DNA, 120 bp, Artificial Sequence
  ENSG00000170919_66 (sequence is synthesized)
acggggccgcctggagaggtgctgggagctgggtggagcttagaggaattaaactttggccctgcgcctcgtccagcctaggttccacccttttctgggaacaatgaatctcgctgtgtt

SEQ ID NO: 996186 - DNA, 62 bp, Artificial Sequence
  ENSG00000170919_67 (sequence is synthesized)
gaggcggagacacaaggctccgttccactgggcacgccagcgatctgcccgcctcggcctcc

SEQ ID NO: 996187 - DNA, 60 bp, Artificial Sequence
  ENSG00000170919_68 (sequence is synthesized)
tcccagatcttcacttcaggtcagctccaaggaggctatccttgcccatcttcctaaaat

SEQ ID NO: 996188 - DNA, 120 bp, Artificial Sequence
  ENSG00000170919_69 (sequence is synthesized)
aaaaaaaaaaaaaagaagaagaaatctcagcaggctgagatggaactcattcttctcatgaagaacgtggcaagcattatacagaggggccatagtctggaaagcaggagatgcttacag

SEQ ID NO: 996189 - DNA, 120 bp, Artificial Sequence
  ENSG00000170919_70 (sequence is synthesized)
aaagcaggagatgcttacagacatataagttgtttccagtgttttgctcttggtactcatggttccactatttacatcaaccttttgagaaacatatttatacactgtcttatacttccc

SEQ ID NO: 996190 - DNA, 120 bp, Artificial Sequence
  ENSG00000170919_71 (sequence is synthesized)
tcctttgctacagaatgaatctacttgtaacctaccaaaaatttaccctgtcacatttccccagctgctggtttaaaaataaatatcctggatttaaagccaattgtgtctaacaggtgc

SEQ ID NO: 996191 - DNA, 120 bp, Artificial Sequence
  ENSG00000170919_72 (sequence is synthesized)
gggaatctccgtaccttccattcaattttgctaaaactactctaaaaaataaaattaaagaaaaaaaaaagctcccctctttccccagttttacgatttatttatgctttgtgaaatgga

SEQ ID NO: 996192 - DNA, 73 bp, Artificial Sequence
  ENSG00000170919_73 (sequence is synthesized)
ttccccagttttacgatttatttatgctttgtgaaatggagtctcactcttgactcccaggctggagtgcagt

SEQ ID NO: 996193 - DNA, 120 bp, Artificial Sequence
  ENSG00000170919_74 (sequence is synthesized)
gatggggtttcactatgttggccaggccagtctcgagctcctgaactcaagtgatctaccgtacccggcccccaatgttagtttttaaataaacgactatgtttaattcacatgctaaca

SEQ ID NO: 996194 - DNA, 120 bp, Artificial Sequence
  ENSG00000170919_75 (sequence is synthesized)
ttaaataaacgactatgtttaattcacatgctaacaggcacctagagaatactttcaagtaaaaagattaatgaacccacttcgcattgagttagctggttgttttctgccaaccaggtg

SEQ ID NO: 996195 - DNA, 120 bp, Artificial Sequence
  ENSG00000170919_76 (sequence is synthesized)
tccctgcctggtccacagttgaccaaggatccctgcatctgcctctagcaacacccaacactgtatgaagggctgagggggtctgacagttcacgtcactgacatcctctcactggtatt

SEQ ID NO: 996196 - DNA, 120 bp, Artificial Sequence
  ENSG00000170919_77 (sequence is synthesized)
tcgaatgccaagccagccctcaaatcaagttcactggcctcgactgagctgccaagtatttcatacatggggaggggggttggggggggggagggtagggggatcacacaggtgccaggc

SEQ ID NO: 996197 - DNA, 120 bp, Artificial Sequence
  ENSG00000170919_78 (sequence is synthesized)
aatgagtaagattatcccagcaacttctccatgcagagagaaatgtctgcagctgcaacactatttctactccagccttctagactccatgtagtttgcctttgtttgaatgtttctatt

SEQ ID NO: 996198 - DNA, 120 bp, Artificial Sequence
  ENSG00000170919_79 (sequence is synthesized)
tatctgaaataaccagaaatcatttttattattatatattactccagtttattaaataaatgaaacaaggcttatgccacatattccaacaatgtttaaataaagagcttgaaatataaa

SEQ ID NO: 996199 - DNA, 120 bp, Artificial Sequence
  ENSG00000170919_80 (sequence is synthesized)
tttctaccagacagatacaacagacagaaataacctcaagagcacagacactagtgaataattaggaagtggtgaagtttatttgcctttgtctttaatataatctatttaactatgttt

SEQ ID NO: 996200 - DNA, 120 bp, Artificial Sequence
  ENSG00000170919_81 (sequence is synthesized)
atataacttaattgttaataatgtctgtaataaccggcccacaaatttcctgaaagtgtgacaatctgctctcatacgctgctggaccagttccagcacgccactgttcctgccccagtt

SEQ ID NO: 996201 - DNA, 120 bp, Artificial Sequence
  ENSG00000170919_82 (sequence is synthesized)
gtgggatctgctctaacctccagctgccccacgcctcagcatacagtcacagcgaaggcatggtgggcaaacttctgagttacatggccacagcggttttttgtttgcttgtttgttttt

SEQ ID NO: 996202 - DNA, 120 bp, Artificial Sequence
  ENSG00000170919_83 (sequence is synthesized)
gtcccccaggctggagtgcagtggcgtaatcgtggctcactgcagcctcaaactcctgggatcaagagatcttcccacctcagcttcccaaggggctgggactacaggcacataccaaca

SEQ ID NO: 996203 - DNA, 120 bp, Artificial Sequence
  ENSG00000170919_84 (sequence is synthesized)
caaactcctgggatcaagagatcttcccacctcagcttcccaaggggctgggactacaggcacataccaacacacccagttaatgtttttaatttttttttaagacagagtctcactctg

SEQ ID NO: 996204 - DNA, 120 bp, Artificial Sequence
  ENSG00000170919_85 (sequence is synthesized)
cactttgggaggccgaagcaggaggatctcctgagcctaggagttcaagacctgcctgggcgatatagggagaccccatttctacaaaaaatttaaaaattagcagggtgtggtggtgcg

SEQ ID NO: 996205 - DNA, 89 bp, Artificial Sequence
  ENSG00000170919_86 (sequence is synthesized)
tgtagtcccagctactcgggaggctggggtgggaggattacctgaactgggaggtgaaggtttatctaggtgagagaccttgcttcaaa

SEQ ID NO: 996206 - DNA, 89 bp, Artificial Sequence
  ENSG00000170919_87 (sequence is synthesized)
cctgaactgggaggtgaaggtttatctaggtgagagaccttgcttcaaaaaaaaaattgagctcctgggctcaagcaatcctcctgcct

SEQ ID NO: 996207 - DNA, 120 bp, Artificial Sequence
  ENSG00000170919_88 (sequence is synthesized)
ttattacagaactcaaaagcaactgtgcactggaccactctgtattgtgttcggtgaggccatgcccgcgtatagatacaggaatgctgaggaacagcactgaagagtgacctaaacagc

SEQ ID NO: 996208 - DNA, 120 bp, Artificial Sequence
  ENSG00000170919_89 (sequence is synthesized)
aatcaccaactgctggtgtttggctttgttcctcatatgaaaggatttgaagcccagggagtaggctggttgaatgaaaaatatttgcttgacacgatagttgctatttctagatgaatt

SEQ ID NO: 996209 - DNA, 120 bp, Artificial Sequence
  ENSG00000170919_90 (sequence is synthesized)
tgttacttctgtcagagctgaacttgaaattgccatctcatttttggagacctacagttgaatatttgcatatctctggaatggtgtcttagtctgttttgtgctactataacagaagac

SEQ ID NO: 996210 - DNA, 120 bp, Artificial Sequence
  ENSG00000170919_91 (sequence is synthesized)
cacagactgagtcatttataagagcagaaaatttatttggctcatggagcagcctagaaccctactattaggtctgagtcagtcagatggaaagaaggcgaagtagaagcatcgaggtcg

SEQ ID NO: 996211 - DNA, 120 bp, Artificial Sequence
  ENSG00000170919_92 (sequence is synthesized)
aatcagtcacacatggacttccctagtggactcattgaaaaccagaccttctgagccacccttggtaggggctctggaagtggcttctgaagagaccccattctgcacctccaccaaggg

SEQ ID NO: 996212 - DNA, 120 bp, Artificial Sequence
  ENSG00000170919_93 (sequence is synthesized)
cctggtgggagaagtgtgccctgcagtgccctcagaaaggcccactgaaactgcaaacattccctttctgcactgccatttggttcatgaagacatatggctgggagaagttgagtatcc

SEQ ID NO: 996213 - DNA, 120 bp, Artificial Sequence
  ENSG00000170919_94 (sequence is synthesized)
tatgtcaccttttagtccaacaattttatggaggcttagcatgggcaggcctggtgccaggtgatgaggatgcacatgggagcagatctggccctgcacataggagcccacatttctgga

SEQ ID NO: 996214 - DNA, 120 bp, Artificial Sequence
  ENSG00000170919_95 (sequence is synthesized)
tagtggggcggaggtgacacatgtccacataactgcagtgtacagagatagcaaaacagtaagatacaggatgattgaaggtctgtctgtagctcatccaaatgatatggtgaccagttc

SEQ ID NO: 996215 - DNA, 120 bp, Artificial Sequence
  ENSG00000170919_96 (sequence is synthesized)
gtagctcatccaaatgatatggtgaccagttcccaagaggaatctctacacgtttcctgctattgagcctatggagcgtgataaaagaaatctgggctgggtgtggtggctcacgcctgt

SEQ ID NO: 996216 - DNA, 120 bp, Artificial Sequence
  ENSG00000170919_97 (sequence is synthesized)
gaggctgaggcaggtgccatcccagccaacatggcaccatcccagccagcatggtgctatcccagaaaatatggcaccattctaaccaacatggcaccaccccagcctcaggtattcctt

SEQ ID NO: 996217 - DNA, 120 bp, Artificial Sequence
  ENSG00000170919_98 (sequence is synthesized)
tatagcaatacgaatggactaagacactggcatagcaataacactaataaatatatattgactgaatgaaagaacaaacatgttatctttctgaaagaatatattttttggccaggcttg

SEQ ID NO: 996218 - DNA, 120 bp, Artificial Sequence
  ENSG00000170919_99 (sequence is synthesized)
atgggtgcagaaggaaaactaagctcatcacagacttacaaaaagccgggtttaaaagaaatcttcgaaattatcatctcgtttcacgttaattaactgagcccgcggtcacaaagcttc

SEQ ID NO: 996219 - DNA, 120 bp, Artificial Sequence
  ENSG00000170919_100 (sequence is synthesized)
gcaacggcaaagccaaaagcaagattcatgcctttcaactttctcactacccaagtagcaccgcaagccgaatccgcagggcagtgccaacattgtttgctactcttgcgcagaacaaaa

SEQ ID NO: 996220 - DNA, 120 bp, Artificial Sequence
  ENSG00000170919_101 (sequence is synthesized)
atgctaatcactgcaactgctttacatgaaagtgcacctagaaagacttcaaaacccagaggtacattaactttccaggcaagttcctcccagcctgtgtgccacgagcgattccgaatg

SEQ ID NO: 996221 - DNA, 120 bp, Artificial Sequence
  ENSG00000170919_102 (sequence is synthesized)
tggtgtgccctctcccacagtgcgaagctcgcgggcgctcaggctgccgtttgaatgaacgcacgagtgggagggacgcacaagcagggttgcaagcccggggctcgttagcagacgcgg

SEQ ID NO: 996222 - DNA, 60 bp, Artificial Sequence
  ENSG00000170919_103 (sequence is synthesized)
gccaccactccacaacctctgccttcttttttcttctgtttttaaaacttgtggtaaaat

SEQ ID NO: 996223 - DNA, 120 bp, Artificial Sequence
  ENSG00000170919_104 (sequence is synthesized)
ctagataacaaaaagtttgccattttaaccatttttaagtggacagttcagtggcattagttacattcccaatgttgtgtaaccaccactattatccatttccagaaggttttcatcacc

SEQ ID NO: 996224 - DNA, 120 bp, Artificial Sequence
  ENSG00000170919_105 (sequence is synthesized)
cgaaacagaaactctgtacccattaaatagtaactccccattctacccttctctccctccataacctctgttttaccttctgcatccatcaagttgcctgttatagataattcacataga

SEQ ID NO: 996225 - DNA, 67 bp, Artificial Sequence
  ENSG00000170919_106 (sequence is synthesized)
aaaagcctttgtgaaagactttctgttcttgggatccccattccaaaggttcccggtccccgccccc

SEQ ID NO: 996226 - DNA, 90 bp, Artificial Sequence
  ENSG00000170919_107 (sequence is synthesized)
actgcaaagtttgggatgcacagtctataaaaccccacagcccctgagaattccctcacctgccttctgcccttaggctccggtagattg

SEQ ID NO: 996227 - DNA, 120 bp, Artificial Sequence
  ENSG00000170919_108 (sequence is synthesized)
acacctaatacccacagtcctccaggctccggtagattgtaaataacctgctttctttctgttcccgggctgcgttcggacccctgtcggatagtaaatcccaagcaaggtacctgccgt

SEQ ID NO: 996228 - DNA, 120 bp, Artificial Sequence
  ENSG00000232188_0 (sequence is synthesized)
gggtttggtagtcacttgatgctccttagtcatacatttagcctctccagcacccagcagcaaggcaggagctgttcaaatggagaataattggcagaagaccaaacagaaacagtctta

SEQ ID NO: 996229 - DNA, 120 bp, Artificial Sequence
  ENSG00000232188_1 (sequence is synthesized)
ctctaaaaccctagaggacttgtgccttcggatcctgatttattaagtgagaagtccactatcctgaagctgctatgctggagagaccatgtgaaaagatcatatagaagtagaaagatg

SEQ ID NO: 996230 - DNA, 120 bp, Artificial Sequence
  ENSG00000232188_2 (sequence is synthesized)
ccccagccaccatgtgactgcaacctcatgaaaaccccacaccagaacagtggtatcagctcaaactttgcaagggctaggagactgagggcagctgaccagatttatgtgattgagcct

SEQ ID NO: 996231 - DNA, 120 bp, Artificial Sequence
  ENSG00000232188_3 (sequence is synthesized)
aataaactggcctgagtaagcttccctggttgacaatattctgcgagtattatcacacactggatgtcaggaaattaacactgtccacaactcatggaaaggacaactgggagttctgtg

SEQ ID NO: 996232 - DNA, 120 bp, Artificial Sequence
  ENSG00000250814_0 (sequence is synthesized)
attctgagcttctgggagttaagaccccaacatgtaaatctggagggatgcaattcaacacgtaatattccctaacacaatatttccataacagtctgtagcgtcttcttcaggctaagg

SEQ ID NO: 996233 - DNA, 120 bp, Artificial Sequence
  ENSG00000250814_1 (sequence is synthesized)
gattggggcctcatctatcagagttgtaataaggaacaaaggttgttgaagatagtgcttctgactttattgtgtggagcagattgtgctggggcaacagtgatgtaaccagacatcagg

SEQ ID NO: 996234 - DNA, 120 bp, Artificial Sequence
  ENSG00000250814_2 (sequence is synthesized)
atgtgagaggtcatggagcctcacaggactgggtcagaaggggcagagtctgaaagaagtggataccaagtcatcagagctggggtggggatccaacccaggctgacgaagcaagagagc

SEQ ID NO: 996235 - DNA, 120 bp, Artificial Sequence
  ENSG00000250814_3 (sequence is synthesized)
caacaaggactccgtggtctcagacctgaaaccagaatagccatgacatttgtgatgatatgcaagctgggagaaagaccaggcttggtggggagcgtgagtggctttctggcagcagag

SEQ ID NO: 996236 - DNA, 120 bp, Artificial Sequence
  ENSG00000250814_4 (sequence is synthesized)
tggaagacagcccctgagacccagagcaaatgggtcaaagtctcagttacatcagtataactacaaagacaataattcttacctctctcacaggatccagtgaaaaaatagtgcttctga

SEQ ID NO: 996237 - DNA, 120 bp, Artificial Sequence
  ENSG00000250814_5 (sequence is synthesized)
ccaaaaacaaggcacaatgtgagatgaaatgataatcaaagtggattactggaggtttgcttggaatcctggtcttccatgtggacatcgttttttggggacagcatctggggcttcctt

SEQ ID NO: 996238 - DNA, 120 bp, Artificial Sequence
  ENSG00000250814_6 (sequence is synthesized)
ctgctaccacaaccatcctcaaagtatagtctggagacctcggtaggtgcccatggcctttttaagggtccacaaattcaaacctaataacatgaagtcattatgtggcttttaaaatct

SEQ ID NO: 996239 - DNA, 120 bp, Artificial Sequence
  ENSG00000250814_7 (sequence is synthesized)
tccagttggtgattacatcattagaaggtggttcccagcctgtggtccggtccccaaatgaatcaatcgatttggttgttcccagtttttttctattacaaataaagctgaatcatacaa

SEQ ID NO: 996240 - DNA, 120 bp, Artificial Sequence
  ENSG00000250814_8 (sequence is synthesized)
attatctaaaaagaaagccaacattaaaatgcatgccccttttccagccacacatctggaaaacagcaaatcacaacagactgaatacagaagcagatgtaagcaggcagccatcttcta

SEQ ID NO: 996241 - DNA, 120 bp, Artificial Sequence
  ENSG00000250814_9 (sequence is synthesized)
ttaagcaggacgttaaagagctatgcaaaaatgtaaaacaatgccaatctctcatttcatgttctttcattttgggaaaaaaaaattttcataaaaagatattgttcatttagcatgtaa

SEQ ID NO: 996242 - DNA, 120 bp, Artificial Sequence
  ENSG00000250819_0 (sequence is synthesized)
gagtgcacaaaaaaggccatataggggcccagggagaaggcagccatctacaactcaagacctcatcagacactaactcttctggcactgttatcttagacttctgactttcagaagtgt

SEQ ID NO: 996243 - DNA, 120 bp, Artificial Sequence
  ENSG00000250819_1 (sequence is synthesized)
gaaaagataaatttctgtcgtttaggttaccaagtttgtggcattttgtgatggcagcctgaggagactattaggtagacattttgatgggtgcttaccatgaatggagcttgaaggact

SEQ ID NO: 996244 - DNA, 120 bp, Artificial Sequence
  ENSG00000250819_2 (sequence is synthesized)
ggaagttgctctggacatgaatctgaaatcactctaccccaaaacaacaataacaacaacaacaacaacaacaacagtctttgtttaagctagagtagcagtggaaaagttcactctatt

SEQ ID NO: 996245 - DNA, 120 bp, Artificial Sequence
  ENSG00000250819_3 (sequence is synthesized)
cttgggaagacataaaacttcacttgctatgctccatgaagtatccagaataattctatgcatagccattaaagaactctataaaaggcactgaatgttgagaccactcaagcaatctga

SEQ ID NO: 996246 - DNA, 120 bp, Artificial Sequence
  ENSG00000250819_4 (sequence is synthesized)
ttgcttaattaaatgtctagaaatgctcaatatgtgccaattgaaactgtatcacccataaaaaacagcgacatgctttctctttttcttttaatttttggtttataatagcaataacaa

SEQ ID NO: 996247 - DNA, 120 bp, Artificial Sequence
  ENSG00000250819_5 (sequence is synthesized)
cgttggctgtgggcatttcctggagattaatgactggttaggctttatggcccggactgcttctcctgtggacaatcaactcctccccacttgtcgttcatccactgaaaagcaccacac

SEQ ID NO: 996248 - DNA, 120 bp, Artificial Sequence
  ENSG00000250819_6 (sequence is synthesized)
agctccctctggtttgttaaggaatgtcagtatttgtcaaagctggtggggattggtttgtgaatagtgatttgtggattcttggaaactctctggcaatattgacatctgcgaagaaga

SEQ ID NO: 996249 - DNA, 120 bp, Artificial Sequence
  ENSG00000250819_7 (sequence is synthesized)
tggcctttgatacactcagtgtatacacaagagctcgctttcctccactgaacatttcagtgtgatggtttaaaggggcttacaatgaatttttctgctgtcgaagctttgttcttttgt

SEQ ID NO: 996250 - DNA, 120 bp, Artificial Sequence
  ENSG00000250819_8 (sequence is synthesized)
cttctgctatgtgattttcttaaacccatgtatggacataaaatgctttgaaatcacagaaaaaaagcctcttttgaagtcaaagatgttgatggctgcatgtaaggaaatggttctgaa

SEQ ID NO: 996251 - DNA, 120 bp, Artificial Sequence
  ENSG00000250819_9 (sequence is synthesized)
tacgtatagcacaatacaagcaagttaagtttccttcaccccatctcggtgaggctaagactgctggaaaatctacaactggttgcaattttaattgtgattctttgcttcttaattgcc

SEQ ID NO: 996252 - DNA, 120 bp, Artificial Sequence
  ENSG00000250819_10 (sequence is synthesized)
aaaagagagacttaatttaaaacatgaacacgctctctccagttccagaatgtcaacgtagcaaatctttagctactccttcccatttgtcaacagcaatgtcacagtgttgtcagcctg

SEQ ID NO: 996253 - DNA, 120 bp, Artificial Sequence
  ENSG00000250819_11 (sequence is synthesized)
tgttttcagtgaggcaggaactatcaccatattacaggagagaagactgtggttcaacaaggtcaaacattctagtggactcaggctctgtagatgagcctccaaaatccataatctttt

SEQ ID NO: 996254 - DNA, 120 bp, Artificial Sequence
  ENSG00000250819_12 (sequence is synthesized)
ggctgtgctgtcatgttactcaacagagactatcctctgtgggaatttgatggtttgacagcatctgatcccttaacatttgtgattccgaagtcccctgatcctggatatcacgtggat

SEQ ID NO: 996255 - DNA, 120 bp, Artificial Sequence
  ENSG00000250819_13 (sequence is synthesized)
gataacctttaatgaaaaaggccaccacttacggggtgtctactgtatgttgcatatttaccaatttggtcaggtcattgacagccaccagaaccactggaataaattaacatggcgcca

SEQ ID NO: 996256 - DNA, 120 bp, Artificial Sequence
  ENSG00000250819_14 (sequence is synthesized)
actctagtgctaatctcctgcggagggataagaaagcgacgggatcactgcttcctttgaaggcttcacttgcccacttcctccctaccctgcctgtctcctccctttcagggagtttca

SEQ ID NO: 996257 - DNA, 120 bp, Artificial Sequence
  ENSG00000250819_15 (sequence is synthesized)
ttctgtgatggtcccactgggccattttgttcctctggtgtccctgacagacatcagggctccccctgaaggttaaagcgaggaacagggcaatgtggtcaaaactgcatccagcaagga

SEQ ID NO: 996258 - DNA, 120 bp, Artificial Sequence
  ENSG00000250819_16 (sequence is synthesized)
ttgaagatcttgagaaatgagattgttttgtcagtttttcaagttgttaatttatatgattttattacacagcctcaggagaaaacaaaaataaaaccaaacaaaaacaaaattaaaaaa

SEQ ID NO: 996259 - DNA, 120 bp, Artificial Sequence
  ENSG00000261558_0 (sequence is synthesized)
aggtcttttcccacagggagcattgtgaaacatcactgggctcagccaccaggttatgtgactcttctgcctgtgccctgcttccagaaaatattgtgacattcctcatacagcatccag

SEQ ID NO: 996260 - DNA, 120 bp, Artificial Sequence
  ENSG00000261558_1 (sequence is synthesized)
gtgatgtgactcttctgctcattttctacttacaggagacatgcccaaaaaagggattgtggcatatctctgagcccagcacccaaatgttgtgactctcctgcctgagctgtgcctaga

SEQ ID NO: 996261 - DNA, 120 bp, Artificial Sequence
  ENSG00000261558_2 (sequence is synthesized)
gaaaatattataatatgtcaccggaccctgcatgcaagtgatccaattctccagtctgggccttgcccatagaggagattgagacatattccaggtggatggtgactctaagaccaggat

SEQ ID NO: 996262 - DNA, 120 bp, Artificial Sequence
  ENSG00000261558_3 (sequence is synthesized)
tcaacacacctagaaggctttgactctgataccagtcacagaaggctctgtgactcttctattttctctaggtcatgcaaatggaggcggattttgacatatcataaagccaacataata

SEQ ID NO: 996263 - DNA, 120 bp, Artificial Sequence
  ENSG00000261558_4 (sequence is synthesized)
ggaggtgttgacgctttttacctgaagctgggacatgtgtggaattgtgaatcctagccctagatcttcccacaggtcatgcaaatggagggggattgttacatatcatagggccaacac

SEQ ID NO: 996264 - DNA, 120 bp, Artificial Sequence
  ENSG00000261558_5 (sequence is synthesized)
aaaaataatgtaaaactcctgcctgagccatgcccatagaaggcattgtgacatatcacccgtcacagcactcaggtgggattttgacatataactgcacccagcacacaggtgaagtat

SEQ ID NO: 996265 - DNA, 120 bp, Artificial Sequence
  ENSG00000261558_6 (sequence is synthesized)
ctcgtatgctcatcctgccaaaagttatgagtgtcaccctcacacatggacagagacctctggttaggtcttgaatcttgtacatggacacagtccgcagttggaatgtcatatgtagat

SEQ ID NO: 996266 - DNA, 120 bp, Artificial Sequence
  ENSG00000261558_7 (sequence is synthesized)
ccagccacaggtgtgatgttgacctatttataaagttagctcacaggcacattgataactctcatacctggatccagccaataaaagatatgttgactattatagctaggcttgaggaaa

SEQ ID NO: 996267 - DNA, 120 bp, Artificial Sequence
  ENSG00000261558_8 (sequence is synthesized)
acccatgctttgtcaataggagagattgtgacatatctctggaaccagaaccttagtgatgtgacgcttctctcctgctgaagccatgcccacacaagggaaagtgacttatcactgggc

SEQ ID NO: 996268 - DNA, 120 bp, Artificial Sequence
  ENSG00000261558_9 (sequence is synthesized)
cattttcttcctgagccctattcacagggaaaataatgacacatctgtggggttctcaccgaaatgatgtgactctcctgcctgggctcacctctcaagggaattgtgacatattactgg

SEQ ID NO: 996269 - DNA, 120 bp, Artificial Sequence
  ENSG00000261558_10 (sequence is synthesized)
gccagccacctaggtgatgtggctctgacaaaggagaaattgtgatgtaccactgttccacacctaagagatttgactctcatcttttcatgagccctgcatttattgtgtattgtgaca

SEQ ID NO: 996270 - DNA, 120 bp, Artificial Sequence
  ENSG00000261558_11 (sequence is synthesized)
tatggcttgatccaacaccttggtgatgtgactctctacttcttcctgagctatgccaaaaaagaagattgtgacatatcactggatccagtacctagatgatgtaaatcttttcttttg

SEQ ID NO: 996271 - DNA, 120 bp, Artificial Sequence
  ENSG00000261558_12 (sequence is synthesized)
ctgagccatgcatatttttggtattgtgacatgtcgctggacccaacacctacaggattggatcagaggctactgaataagccctgcccataggcggccttgtgacatatgtctgcatct

SEQ ID NO: 996272 - DNA, 90 bp, Artificial Sequence
  ENSG00000261558_13 (sequence is synthesized)
aggaggactcctttgggagaccggtcccctgtcctcgccctcactccataaggagatccacctacacaacatctcaccaatttcaaattg

SEQ ID NO: 996273 - DNA, 120 bp, Artificial Sequence
  ENSG00000261558_14 (sequence is synthesized)
gctctacctacaagaagcactgggaaatatctttggaccccacgattaggtgatgtgactccccttcctgggctctttcctcaggaggtattgtgacatattcctggaccaagtacctag

SEQ ID NO: 996274 - DNA, 120 bp, Artificial Sequence
  ENSG00000261558_15 (sequence is synthesized)
gtaatgtaactcttttctagtgcttggactttacccaaggagagattgtaatgtatcactggacccagcacctaggttacatgactttcctcttttgactgagtcttgcataaattgtgt

SEQ ID NO: 996275 - DNA, 120 bp, Artificial Sequence
  ENSG00000261558_16 (sequence is synthesized)
attgtgacaaataactgagtctaaaagctaggtgatgagactcttctgaatggaccctgtctacaggggtattatgacatatctttttttatactgcctaggtgatgtgactttgtgtgt

SEQ ID NO: 996276 - DNA, 120 bp, Artificial Sequence
  ENSG00000261558_17 (sequence is synthesized)
gtgtgtgtcccggccctgccaaaagtggggatcgtaacatatcactaaacttagcaccaaggtgttatgactctccttgtttgcctgggccctgcatatatttggtaatatgacgtatgg

SEQ ID NO: 996277 - DNA, 120 bp, Artificial Sequence
  ENSG00000261558_18 (sequence is synthesized)
ctgagacaaacacctagggcatgagaacctcccgcctgggtcctggccacaaggagtcttttggcttatctctgcatccatcaaccaggagatgtgactcttcttttctgtctgggttct

SEQ ID NO: 996278 - DNA, 120 bp, Artificial Sequence
  ENSG00000261558_19 (sequence is synthesized)
acaaaaacaagtgattgtgacatattatcaaacccagcaactagatgatgtgatttttcttccctgcttgaactctggatatgctgtgtattgtgatatatggctgggtccaacattaag

SEQ ID NO: 996279 - DNA, 120 bp, Artificial Sequence
  ENSG00000261558_20 (sequence is synthesized)
gtaatgtgactctcctgaatggtctctgcccacaggaatattatgacatatctttacatttaacaccttggttacgtgaatctttttatctcccctcttgaattagggattgtgatatat

SEQ ID NO: 996280 - DNA, 120 bp, Artificial Sequence
  ENSG00000261558_21 (sequence is synthesized)
cgctgaacctagcacctaggtgatgtgactttgttttattgcctgtgtcctgcattttttaagtattgtgacatgtccctggccacaacatctaaagaattgggaggagagattgtgaca

SEQ ID NO: 996281 - DNA, 77 bp, Artificial Sequence
  ENSG00000261558_22 (sequence is synthesized)
actgcaatatctgcctcctgggttcaagaaattctttcacacttggtgtattttgtatttttagtagagacggggct

SEQ ID NO: 996282 - DNA, 120 bp, Artificial Sequence
  ENSG00000261558_23 (sequence is synthesized)
caggcatgagccaccgcgcccggccaatgcttctctttttcctatgttctgctcacacaaaagatagtggcccagcacaaaagtgatgtgagtctcttgcctggctcttgctcacagcgg

SEQ ID NO: 996283 - DNA, 120 bp, Artificial Sequence
  ENSG00000261558_24 (sequence is synthesized)
aagtgatgtgagtctcttgcctggctcttgctcacagcgggcattgtgaaatatctctgggtccatcaattatttgatgtgagtctcctctgttacctgggctttgcctatggaagacat

SEQ ID NO: 996284 - DNA, 120 bp, Artificial Sequence
  ENSG00000261558_25 (sequence is synthesized)
tgtgacatatcactgggcccagaacccaggtggtttgatttgcctcttctgactgggccatgccaacagataaataaaaaaaaaacttatcacagggtccagcacacaggtgctgtggct

SEQ ID NO: 996285 - DNA, 120 bp, Artificial Sequence
  ENSG00000261558_26 (sequence is synthesized)
cttctgcctgacccctgcccacaggtgtaattgctacatatctttggtcccaacatgtagatggtgtgactctttactttattctgggacctgtacacagtggggactatgacatatcgc

SEQ ID NO: 996286 - DNA, 120 bp, Artificial Sequence
  ENSG00000261558_27 (sequence is synthesized)
taggcctagcatttatgtgatgtgactctcctctcatgcctaggccctgcccactgggatgattatgacatttatctgagtgcagcctccaggttatatgactctcctcttttccatgat

SEQ ID NO: 996287 - DNA, 120 bp, Artificial Sequence
  ENSG00000261558_28 (sequence is synthesized)
ccctactcataacatgcattgtgacctatgtcaggttttctcacctaggttatgtgactttcttgtctttgcccttccatcagggggcattgtgatatattgctaggcccattatctggg

SEQ ID NO: 996288 - DNA, 120 bp, Artificial Sequence
  ENSG00000224326_0 (sequence is synthesized)
tgtgtctggaatctattccttctggtggattcgtagtcttgctgacttcaggagtgaagccgcataccctcgcaattccctaaatagcctcacaagatgatcattcctttccataacctc

SEQ ID NO: 996289 - DNA, 120 bp, Artificial Sequence
  ENSG00000224326_1 (sequence is synthesized)
gtgttggggtctgccttcaaatgttctgtgtcgtgtccaacacactttgtcattttctttctaatccttgtgattattattgttgttattgttagcttcctatgtaaaactagttctcag

SEQ ID NO: 996290 - DNA, 120 bp, Artificial Sequence
  ENSG00000264705_0 (sequence is synthesized)
tttaatttaagaagcattgatccaggaaatatcttaaacccaaacaaaaactcaaataaatttaactagagtacaatatgtaatgacatttaaactacaaaatattgcaagctacaaaaa

SEQ ID NO: 996291 - DNA, 120 bp, Artificial Sequence
  ENSG00000264705_1 (sequence is synthesized)
tattacaaactataaaagtatgggttagtattatatcctacttatcttttgtttaagccttaaattaaataggaggataatattaccattatggtaggaacaatgtgttctgtaacaaaa

SEQ ID NO: 996292 - DNA, 120 bp, Artificial Sequence
  ENSG00000264705_2 (sequence is synthesized)
atagcactcaaaatattcatggcgtctgttttcttcttccaaatcactttatacttgaatgatttagttatgaatagaggttaaggtagacagtcttaggaccagagaaaatgagtgttt

SEQ ID NO: 996293 - DNA, 120 bp, Artificial Sequence
  ENSG00000264705_3 (sequence is synthesized)
gtttcaaattctaattttgctgcttaagtttaataatcagtctgaacctccctttgttcatctggaaaatggaagtaaaaccacctggcatggtttcagtgaagactaaagacatgtaaa

SEQ ID NO: 996294 - DNA, 120 bp, Artificial Sequence
  ENSG00000264705_4 (sequence is synthesized)
acaccaagctctgtgcttggttcataagagacgtttaacaactggaaactcttaataccatttgcattcttttgagggtaaatacattgatttccacctccattttttagcatgctaaat

SEQ ID NO: 996295 - DNA, 120 bp, Artificial Sequence
  ENSG00000264705_5 (sequence is synthesized)
attatctactatataattttttcttatctagtgtgatactcttgatgaaatctaattcatcagcatgtcaatttgatctcttgaggtctttaacattgtggtatttccaactttatattc

SEQ ID NO: 996296 - DNA, 120 bp, Artificial Sequence
  ENSG00000264705_6 (sequence is synthesized)
tgcaaactgcaagcttccaaatcaaatgcactttgttctgatttagcgtattgaaattttctgtagaatggctagatccacatagtctatctgggccccagcatcacataatatattcat

SEQ ID NO: 996297 - DNA, 120 bp, Artificial Sequence
  ENSG00000264705_7 (sequence is synthesized)
gtaataaacctgcacatgtaccccctgaatccaaaaaatagttgaagttataaaaataaaaaataattattatagggtatattagtctgtgttcacactgctataaagatactatctgag

SEQ ID NO: 996298 - DNA, 120 bp, Artificial Sequence
  ENSG00000264705_8 (sequence is synthesized)
actcacagttccacatggctggggtgggctcaggaaacttacagtcatggcagaagtcaaaggggtagctagcaccttctgcacagggcagcaggagagatagagagagcaagcaaagga

SEQ ID NO: 996299 - DNA, 120 bp, Artificial Sequence
  ENSG00000264705_9 (sequence is synthesized)
gcattgccacactttaaaaccatccactctcttgagaattcactcactctcatgagaacaacatgggggaaatcgcccccatgatctaacatctaccaagtccctcccctgacatgtaag

SEQ ID NO: 996300 - DNA, 120 bp, Artificial Sequence
  ENSG00000264705_10 (sequence is synthesized)
gattataattagagatgagatttctgtggagacacagagccaaaccatgtcatagggtaatgactgatttaaaggttttattcagcttccaaatgccaataccgttatacatcaagcact

SEQ ID NO: 996301 - DNA, 120 bp, Artificial Sequence
  ENSG00000264705_11 (sequence is synthesized)
gtggtaagcagtggggacacgtatgaaaaccattaaactctcaccttgcaaagactgaatctctcagtattattttcaagaaaggccaaaaagagtatgtgtgtgcctgtgtgtgtgtgt

SEQ ID NO: 996302 - DNA, 120 bp, Artificial Sequence
  ENSG00000264705_12 (sequence is synthesized)
gtgtgtgtgtctatttatatatagaaagtatgaacaacatatcataaggacaaaaaatgaaaagagacacatagcactatatactatggttctggtgaaggagggaataaagaagttgat

SEQ ID NO: 996303 - DNA, 120 bp, Artificial Sequence
  ENSG00000264705_13 (sequence is synthesized)
acccaaaagccatagattgggcaagaaggattagagacttcctcagcacagttagttctgaaccagtaatagtaggattttcaaccagatgctgtagcaatgaaatttaaatgacaatct

SEQ ID NO: 996304 - DNA, 120 bp, Artificial Sequence
  ENSG00000264705_14 (sequence is synthesized)
aaaagataatctaaaaataataaaacaatctggaaataacattaactttctcttctggcgtctaaatcctgagtaattgtgccttagattgcagaagagtttaaattaatttagtgcaat

SEQ ID NO: 996305 - DNA, 120 bp, Artificial Sequence
  ENSG00000264705_15 (sequence is synthesized)
gaagtgaaataagctgtctttacttttatttccccaattcgatataagaaaagagtataaatctatagtaaatccttttacaactgtgacgtaagtaactcatttatatagtttcagtac

SEQ ID NO: 996306 - DNA, 120 bp, Artificial Sequence
  ENSG00000264705_16 (sequence is synthesized)
ttgataagtaaccaaaacatcctttgctaagaaataaagtcttacaatatatgtatggtatgtgactatataaatgtatttttatacttgtatttgaaataaagcaatttttaaatcaaa

SEQ ID NO: 996307 - DNA, 120 bp, Artificial Sequence
  ENSG00000273230_0 (sequence is synthesized)
ctgcgatctgtgctgggaaagatggggaagacgcctgagagggaaacttgactgcgcctggacagagaaatgggtagactggaatctgtgcctgcggcgggcacctggcaggggccggtg

SEQ ID NO: 996308 - DNA, 120 bp, Artificial Sequence
  ENSG00000273230_1 (sequence is synthesized)
tgagcagaagtgtgggtgttggaatgacggtgccgaccccaggttggacagggggctgcgaaatggaccagggagccctgggtcaggccacgatccacgcctggcctctccctccctccg

SEQ ID NO: 996309 - DNA, 120 bp, Artificial Sequence
  ENSG00000273230_2 (sequence is synthesized)
gctccccaagttcctcaccacggccactgggcccagggaccctgggaaccagccgtgtggggcacccagcaggacccctgtgccactgggtggctgctggcaggtcccgggccgtctgtt

SEQ ID NO: 996310 - DNA, 120 bp, Artificial Sequence
  ENSG00000273230_3 (sequence is synthesized)
ctggaacagtggaggatctgggatcagcaccttcctgtgtggctgtggctgtgagcccctcgcccagggtgaccactagagcccaggactcagagggtccagcccagactccacagttcc

SEQ ID NO: 996311 - DNA, 120 bp, Artificial Sequence
  ENSG00000273230_4 (sequence is synthesized)
cttcctttcaggagtggagggaggcccaggagtatgtctgagccaggccaggcagggtcccagcccctcccagtggttcccggcagtcccgggctgccttctccaggcggggacggggcg

SEQ ID NO: 996312 - DNA, 120 bp, Artificial Sequence
  ENSG00000273230_5 (sequence is synthesized)
gggccgggggatgccatagtgacaagctcacttgctgcttcagtctcaaaacaagtgcttctgggtttcattttcagctctggctggggatggaccctgaccttcaaacaggccagacgg

SEQ ID NO: 996313 - DNA, 120 bp, Artificial Sequence
  ENSG00000273230_6 (sequence is synthesized)
tggcagccacaggctgagtgtgggcacctggggcctgagcgccctcggcagcaggagtgcaggtctccccatgaggtgtctcccccattcaccccgggaagcccagacagtggcccgagg

SEQ ID NO: 996314 - DNA, 120 bp, Artificial Sequence
  ENSG00000273230_7 (sequence is synthesized)
tcatgtggcaggtagggtgcagggcaggagctgcttggggggcctgggcctcccccagctcccttcctcagagcaacccagacccctgacccaattaggcccaggcccagccagcggttg

SEQ ID NO: 996315 - DNA, 120 bp, Artificial Sequence
  ENSG00000273230_8 (sequence is synthesized)
gggtcattccaggtgcttctgaagagaagggtatggctgaagcctcctctggggacagcagcccctctgtcctgggaagtggcctgtaggaagctgagcatgggcaggcagaactggacg

SEQ ID NO: 996316 - DNA, 120 bp, Artificial Sequence
  ENSG00000273230_9 (sequence is synthesized)
tcccagttctttccaaaccccctcactgggccaggcccaaaaggacaccccatggcgggccctgctgggctcacgggggactcagggttggaccccagtaggcctccgccagggtgtggt

SEQ ID NO: 996317 - DNA, 120 bp, Artificial Sequence
  ENSG00000273230_10 (sequence is synthesized)
gggcaccctctctgtggaagttaggaagggctgttgagggaaggtggcatggcgggctgggtcttgagcggtggggaggagttgggcccatccacttgtagcggggcacagggctctggc

SEQ ID NO: 996318 - DNA, 120 bp, Artificial Sequence
  ENSG00000273230_11 (sequence is synthesized)
tgaccaccagcagggcaggcggagggaagggtccggcgccctcttttcccactggtgtcctcctgctgtgaagccaggcctgtaggagcctgcaagcctcggggggcacaggggacaggc

SEQ ID NO: 996319 - DNA, 120 bp, Artificial Sequence
  ENSG00000273230_12 (sequence is synthesized)
ctcatcctatagtagggagacgggccctgggaggggagggagccaggaggcagccatgcgccctccctaagatggaaaacgcaggggcctggtgagggcggtgctgaccacagtgctctg

SEQ ID NO: 996320 - DNA, 120 bp, Artificial Sequence
  ENSG00000273230_13 (sequence is synthesized)
cacaccaggctactgctggcgccccagctccggggaacatagagtccttggggacacagggcccaggggcctccagagctgggatacggtggaggggctgctggatcccaaacacccttt

SEQ ID NO: 996321 - DNA, 120 bp, Artificial Sequence
  ENSG00000273230_14 (sequence is synthesized)
aggcctccttcatccctagtcagcattccagccaggaccccgggggccccatccagagtcctgtcagcgggggccatagcctgtggctgcaggcctgggcaggtgggtgacacgaggcag

SEQ ID NO: 996322 - DNA, 120 bp, Artificial Sequence
  ENSG00000273230_15 (sequence is synthesized)
gaccgaccccagggttctaacgcctgctccccactggccttggacaaatcgctgcccttttctgagcttgattcctcacctgtgaagtgggcatcaaggtaatgcctgaggccgggtgcg

SEQ ID NO: 996323 - DNA, 70 bp, Artificial Sequence
  ENSG00000273230_16 (sequence is synthesized)
gctgaggtgtgagatagcaccactgcgcttcagcctgggtgagagcaagacttcatctcagaaaataaaa

SEQ ID NO: 996324 - DNA, 80 bp, Artificial Sequence
  ENSG00000273230_17 (sequence is synthesized)
tgcagtgagccgagatcactgagatagcaccactgcgcttcagcctgggtgagagcaagacttcatctcagaaaataaaa

SEQ ID NO: 996325 - DNA, 82 bp, Artificial Sequence
  ENSG00000273230_18 (sequence is synthesized)
tcacgccactgcactccagcctccaaaaaactgcctgagacttgggggcagtgaacaacctgtgtgacacacagtaggtgct

SEQ ID NO: 996326 - DNA, 120 bp, Artificial Sequence
  ENSG00000273230_19 (sequence is synthesized)
tgggggcagtgaacaacctgtgtgacacacagtaggtgctgagggccaggcatctgcactgttctctttctcctctgaacagagaggtgccatgatctggccaaggacacacagcaatca

SEQ ID NO: 996327 - DNA, 120 bp, Artificial Sequence
  ENSG00000273230_20 (sequence is synthesized)
acacagcaatcagaggcaggctggcttctctgccccggtcccgccacccggcgacacctgtcagcccccttgcaaactctgtgctccttgaaggtgggggggggggggagggcggggtgg

SEQ ID NO: 996328 - DNA, 120 bp, Artificial Sequence
  ENSG00000273230_21 (sequence is synthesized)
ttacaagggattcctataaatggcgtggagaggattaataatgtatttataacacattttggtggtagtcgaaaatgatctataaatgtgcagtaaatgttttataatgtttttgtaacc

SEQ ID NO: 996329 - DNA, 120 bp, Artificial Sequence
  ENSG00000273230_22 (sequence is synthesized)
cgttataaatgataaatggcagaccatagatgccggatcaaatatttataacgcactgtgcgcggcgttgggctgctacagttcagcaaagccattaataataaagtggatggaaatgca

SEQ ID NO: 996330 - DNA, 120 bp, Artificial Sequence
  ENSG00000264707_0 (sequence is synthesized)
ttctgctccaaggacagtgggtttcccgctgggcacccactcttaagtgcagatcgggagactaagacaggaacacccgccgtgggcaggccaggctggaaggatagaggactgtggtcg

SEQ ID NO: 996331 - DNA, 120 bp, Artificial Sequence
  ENSG00000264707_1 (sequence is synthesized)
aaccaaggcaagttcaactgtgacttatgccagtgtggtcacgaaggcagatgggttgaactgaaaagggggcaccggttcctggcatggaggcacccaaggtcttaggaggtggatgga

SEQ ID NO: 996332 - DNA, 120 bp, Artificial Sequence
  ENSG00000264707_2 (sequence is synthesized)
ctgtcacatgggcaaagaaatgtcccagggcaggactgcaaaggccacagaagaataatttgggagagagacaacccatgagaagtcactcagaccagggtcagaaacagaacaggaaca

SEQ ID NO: 996333 - DNA, 120 bp, Artificial Sequence
  ENSG00000264707_3 (sequence is synthesized)
acaatggaaagaggatgacaccattgatgggcacctaggtcaattcaatgtctttgctatagtgaatagtgctgcaatgaacatgcaactccatgtgcctttctttctctgcagccttgc

SEQ ID NO: 996334 - DNA, 120 bp, Artificial Sequence
  ENSG00000264707_4 (sequence is synthesized)
atgtgcctttctttctctgcagccttgcaagtatctgttgttttttgactttataataataagcattctggcttgtgtgagatggtatctcgttgtggttttaatttgcatttctctgat

SEQ ID NO: 996335 - DNA, 90 bp, Artificial Sequence
  ENSG00000264707_5 (sequence is synthesized)
ttcatgtcttttgcccacttctcctttctccttctccatctccttcattcttcttttgcccatttttaatgggttaattggtttttgctt

SEQ ID NO: 996336 - DNA, 120 bp, Artificial Sequence
  ENSG00000264707_6 (sequence is synthesized)
attcttcttttgcccatttttaatgggttaattggtttttgcttattgaatctagttccttatagattctggatatattagatctttgtcatctgcatagtttgtgaatattttctccca

SEQ ID NO: 996337 - DNA, 120 bp, Artificial Sequence
  ENSG00000264707_7 (sequence is synthesized)
gtaggttgtctctttactctgttgatggtttcttttgctgtgcagaagccctttagtttaattaggtctcagttgtcaaattttgtttttgctgtaattgcttttgaggatttagtcata

SEQ ID NO: 996338 - DNA, 120 bp, Artificial Sequence
  ENSG00000264707_8 (sequence is synthesized)
ctttctcaagaccaatgctgagaatggtgtctcctaggttttcttttagaactcttatagtttgaggtcttacatttaaattattaattcatcttgatttagtttttgtatatggtgaaa

SEQ ID NO: 996339 - DNA, 71 bp, Artificial Sequence
  ENSG00000264707_9 (sequence is synthesized)
tttttctgtcagctttgtcaaagataagatggctgtacatgtgcagctttatttctgggctctttattctg

SEQ ID NO: 996340 - DNA, 120 bp, Artificial Sequence
  ENSG00000264707_10 (sequence is synthesized)
gctgtacatgtgcagctttatttctgggctctttattctgttccattgttctatgtatgtgtttttgtaccagtaccatgctgtttggtttctgtagccttgcagtatagtctgaagtca

SEQ ID NO: 996341 - DNA, 120 bp, Artificial Sequence
  ENSG00000264707_11 (sequence is synthesized)
ggtaatacgatgctttgttatttttgcttaggattgctttcactatttgggctcttttttagttccttgtgaattttagagtaagtttttttggttctgtgaaaaatgacattggtagtt

SEQ ID NO: 996342 - DNA, 120 bp, Artificial Sequence
  ENSG00000264707_12 (sequence is synthesized)
gtaagtttttttggttctgtgaaaaatgacattggtagtttgataggaataatgtttaatctatagattgctttggggagtatggccaccttaatgatattgattcttcccacccatgag

SEQ ID NO: 996343 - DNA, 120 bp, Artificial Sequence
  ENSG00000264707_13 (sequence is synthesized)
ttcttttagccgtgttttgtagttctccttgaaaagatctttcaccttcttggttaaatgtattcctagatatttttctctgtgtgtgcctattgtaattgggattgtgttcttgatttt

SEQ ID NO: 996344 - DNA, 79 bp, Artificial Sequence
  ENSG00000264707_14 (sequence is synthesized)
acttttgtacatcccaggagccttttggcagaatctttagggttttctaagcatagaattaagttttattttcaacatt

SEQ ID NO: 996345 - DNA, 120 bp, Artificial Sequence
  ENSG00000264707_15 (sequence is synthesized)
gggttttctaagcatagaattaagttttattttcaacatttcggtgtcaaaagctgaagcgttccatctcagctggctgacctgaacaacattatactaatatttacacaatgaaaatga

SEQ ID NO: 996346 - DNA, 120 bp, Artificial Sequence
  ENSG00000264707_16 (sequence is synthesized)
acattaatagtcaaaaacacaatgtcaatataaaattgagtttagtctgatgctccttcttggaaagctgacatgaaccatctgcctttttgattatattaaaacctatttttaactata

SEQ ID NO: 996347 - DNA, 120 bp, Artificial Sequence
  ENSG00000273232_0 (sequence is synthesized)
gattgtgtcttctgaaatacagagtttcaacccctcattttatttccaaacaatcacttttatgttactctctagagaatgaggagggtcggatcttagatcatggggcatgctatagct

SEQ ID NO: 996348 - DNA, 120 bp, Artificial Sequence
  ENSG00000273232_1 (sequence is synthesized)
gagaacggaaaaaggggagcagaattacttaaagacttcatctcttcaatgcagaggatagtaattgatattacttatcaaagtatctcttttctagctatgcaacatgaagtttcaagc

SEQ ID NO: 996349 - DNA, 120 bp, Artificial Sequence
  ENSG00000273232_2 (sequence is synthesized)
cccttttcctgtcatttacgatactaaaatatactttagtaaaatatagtacatattttaggtttttatcgtattgttttcatggctaagagatttaacaatttcatcttttattataaa

SEQ ID NO: 996350 - DNA, 120 bp, Artificial Sequence
  ENSG00000273232_3 (sequence is synthesized)
tatgtgaaaatagtgaataatcagtaaataatctagcttctttttctaattgcaatgtttttcttaatatgacaatgtactgaaagctttgttgattaaaagtggaatgtaacacgttca

SEQ ID NO: 996351 - DNA, 120 bp, Artificial Sequence
  ENSG00000264701_0 (sequence is synthesized)
gagccccagacccctccatccccagggaagcaaggtgggcagtatcagccaccttgggagcagatggtgggaggagagaatgttagcctgggaagaagaggaataaagacacttagaagg

SEQ ID NO: 996352 - DNA, 120 bp, Artificial Sequence
  ENSG00000264701_1 (sequence is synthesized)
ggaaggagagctgaaaagaagagggagaaatttctatatttgtaggctcagtgaaaacattgcttcttggatgcctggatgctctttggcaagaaacacacattttgcagacatgtatga

SEQ ID NO: 996353 - DNA, 120 bp, Artificial Sequence
  ENSG00000264701_2 (sequence is synthesized)
ctcctcactcaactccactgctctctgggctaagaagatctcaagctgaggacagaagaaagattggttcaggctgtacatgatggctcacacttgcaattccagcactgtgggaggcca

SEQ ID NO: 996354 - DNA, 71 bp, Artificial Sequence
  ENSG00000264701_3 (sequence is synthesized)
gatgagaccctgtctctacagaaatgtttaaaattagccaaacatggtggtgtatgcctgtagtcccagct

SEQ ID NO: 996355 - DNA, 120 bp, Artificial Sequence
  ENSG00000261555_0 (sequence is synthesized)
ttgtaaacaacagcaagtgccatttatttatgacatattaaaagctttgcacacattatttcatttagttctcccaacaatcatatcaagtaggtacagttatctgccttattttattga

SEQ ID NO: 996356 - DNA, 120 bp, Artificial Sequence
  ENSG00000261555_1 (sequence is synthesized)
tgaaaaaagaatctcagaaggttaagcaacttgaccaggcacacacagcttctaagtgtgggatcagaagtcacatctctctgactccaaagcaggcaaattttcaccttggcattgaag

SEQ ID NO: 996357 - DNA, 120 bp, Artificial Sequence
  ENSG00000261555_2 (sequence is synthesized)
cagttttacagacctatgttgacttttcttttcaccaattgaccagggaacttctaactactcagcattaaacttcctaaattattccattcctcctctgtcagactacgagctcaaagc

SEQ ID NO: 996358 - DNA, 120 bp, Artificial Sequence
  ENSG00000261555_3 (sequence is synthesized)
cttagtcctggaatccagttttctgccccaggctccctgggcctatgggtccagaggagctacctcttctccagtccaaaagagttccctgacttcggagtccagttctgtctgggtaaa

SEQ ID NO: 996359 - DNA, 120 bp, Artificial Sequence
  ENSG00000261555_4 (sequence is synthesized)
acactctgctgaagaagggtccataagggattttactatggctatctttttggacatattaaggggcaagttctctaatgactcataaaggccattaacatgggttttgcagtgagtact

SEQ ID NO: 996360 - DNA, 120 bp, Artificial Sequence
  ENSG00000261555_5 (sequence is synthesized)
aagaccttcccatatgagtataactgaaaccctacacaaataatgtaatgtttaattgcatgtgcaaataaaattgtgcaaaactctctaagagtataaagttcgaaagactgtatttta

SEQ ID NO: 996361 - DNA, 120 bp, Artificial Sequence
  ENSG00000261555_6 (sequence is synthesized)
tatgtaaattatctaaaagcgagaggtgggagcaggggaagtacttgcagataaatacacaaaagtgctaacaatggttgctgatagatggtatgatggagacttttaattttctttttt

SEQ ID NO: 996362 - DNA, 120 bp, Artificial Sequence
  ENSG00000261555_7 (sequence is synthesized)
tatatactgcgaaattttccaaattctcctcggcgaaaatatttgtctttggcctagggggaaataaacatttatgaacaacaacatgttaggttataatattcaaatttacatagaggt

SEQ ID NO: 996363 - DNA, 120 bp, Artificial Sequence
  ENSG00000261555_8 (sequence is synthesized)
ctaatattgtagatttgatagcaaacttcgtgaaaggagaataaagctttcaggttttgcttctgtatctattcaccccattagacgacattttgttgacataatattttctgtttgttc

SEQ ID NO: 996364 - DNA, 120 bp, Artificial Sequence
  ENSG00000261555_9 (sequence is synthesized)
ctttccttcaccgctgatgcagttagaatatctgtgttaaacaagcctacctgaggccaattacagctctccttccaaccctagaagacaggagaagagaagcatctcatttctctctca

SEQ ID NO: 996365 - DNA, 120 bp, Artificial Sequence
  ENSG00000261555_10 (sequence is synthesized)
ccccatctgatacatatattcaggctgggcgcagatgacatctgtccagacaacggataatattgcaatcacttctgattagtttcctgttaccaccacgctgttcacctgtgttacagg

SEQ ID NO: 996366 - DNA, 120 bp, Artificial Sequence
  ENSG00000261555_11 (sequence is synthesized)
agtggctactggggtgtgctggaaggagggaagagtaggcgatgaaggcagttactgtaatttgagaatctgtgctattgttaccaaagccgtttcttcagaatccagatccatgcatcc

SEQ ID NO: 996367 - DNA, 120 bp, Artificial Sequence
  ENSG00000261555_12 (sequence is synthesized)
tcctttcctcacatacagacattctgcatgtgggatatgctaggcaaccagtcaaatttcctatgtttcagtgggatggactgtttgtcttaatttacattgctccaggaccttaggagc

SEQ ID NO: 996368 - DNA, 120 bp, Artificial Sequence
  ENSG00000267244_0 (sequence is synthesized)
tggccacgcgggcagctgcaacctgggcatgtacgtctgtgtggcaggggggcttctggactgggggctcggcaccgacccaggaaggggagctgtgagcagggacatctggccctagtc

SEQ ID NO: 996369 - DNA, 120 bp, Artificial Sequence
  ENSG00000267244_1 (sequence is synthesized)
tcagagcaacatccctcgaaatgccatctggccctggaaggtgcaagggaggcaggatgagtctgctcatgctaccgcgggccgcccagcaaggaagcaggctgcccgccaggctggcac

SEQ ID NO: 996370 - DNA, 120 bp, Artificial Sequence
  ENSG00000267244_2 (sequence is synthesized)
gcgcctcttgcagtggagggtttgctcttcaggaacggacagagaacctccagactccctcggctgcacgctgggggcgagcccaggcagccacaggagtcctccaagccagatgagccc

SEQ ID NO: 996371 - DNA, 120 bp, Artificial Sequence
  ENSG00000267244_3 (sequence is synthesized)
gccctgcggcactgccagcacttgggacgccagactcccttcaggcggcgggccccaagggcactgcgacagctcagcacccaccacagatcagcaacaggacaacccgagcgcggagac

SEQ ID NO: 996372 - DNA, 120 bp, Artificial Sequence
  ENSG00000267244_4 (sequence is synthesized)
acagacgggaagcgtgtggggtcctgggataggcccaactcaatgatttcccctccctggggctaaggtctcagccgtgagggggctctggggaggggaggtcagagtagcctggagagc

SEQ ID NO: 996373 - DNA, 120 bp, Artificial Sequence
  ENSG00000267244_5 (sequence is synthesized)
tctccctaaggagggccgtgggatccatgggatctgcaggggaatcgccggggctggccctaaggctctccagccagcgccagggaggcaggggctccaaaccagcaggctgctcagggt

SEQ ID NO: 996374 - DNA, 120 bp, Artificial Sequence
  ENSG00000267244_6 (sequence is synthesized)
ggtcctcggacagcagccatgccctcccagggagcttgccagacacacagacctttcccagcctccagaccagaacctgcattttttaggagctttctgggggaccctcatctgtgacct

SEQ ID NO: 996375 - DNA, 120 bp, Artificial Sequence
  ENSG00000267244_7 (sequence is synthesized)
gcctccagggatactttctcgctctacagacaccactgatgtgaagacgcaggagacaggacaaccccccgtgaagggtcctgtccacccaccactgaggcctggcccgactttctacaa

SEQ ID NO: 996376 - DNA, 120 bp, Artificial Sequence
  ENSG00000267244_8 (sequence is synthesized)
gaccctgctgggggggaagtgcccctcggagtaaaggaaatacagccccactcctgggaagacagcactcatttccatcagaggccacgccccccactcacacgccaggagaaagccaca

SEQ ID NO: 996377 - DNA, 120 bp, Artificial Sequence
  ENSG00000267244_9 (sequence is synthesized)
gtaaccccggagctgggtcagggaaggaaggtgctgggccaggcctcctgcacccctcaacagtccccatttcacagacaggcaggctgagggccccagggagggggcccaaagtcatcc

SEQ ID NO: 996378 - DNA, 120 bp, Artificial Sequence
  ENSG00000267244_10 (sequence is synthesized)
catgagcaagcaccatgtggttcaggtgagctcagagacctcagggtgccacctctcctgcccacatgcccacggccccccggcacaggccccctgggccaggactcacctgcagccagg

SEQ ID NO: 996379 - DNA, 120 bp, Artificial Sequence
  ENSG00000267244_11 (sequence is synthesized)
cgggggttggggatgtgggcgatcctcctcttctcgccaggggcggaaatgtggacggagggcgacttctctgccagcctggcgggggcctgcagcaagctcgccgatgccctctgcgcc

SEQ ID NO: 996380 - DNA, 120 bp, Artificial Sequence
  ENSG00000267244_12 (sequence is synthesized)
tgctgggcccgcaggtagcacacctcctgcgccgtcgggggccgggccgggggcaccgcgggacccctcctcgggggctccacctgcgtcaccacaaatgctaaggcctggcagcacagc

SEQ ID NO: 996381 - DNA, 120 bp, Artificial Sequence
  ENSG00000267244_13 (sequence is synthesized)
gggggcacctggagcaggcgaccccgggcaggcttgggagagggtggctggagctcgggggccggaggcaccacctccctggctgccttctgagctgctgggcacactggggggaagcag

SEQ ID NO: 996382 - DNA, 120 bp, Artificial Sequence
  ENSG00000267244_14 (sequence is synthesized)
cagggggcagtggtcctcaatgccatgtggctccaggctcccccactcccagtgtctcccggtgcccaggctatgtcctcagccctgataaggcacgggtgggcgggactaccccgatta

SEQ ID NO: 996383 - DNA, 120 bp, Artificial Sequence
  ENSG00000267244_15 (sequence is synthesized)
cactggcactccaatccaatcccactacgcctaatcttcctcaaagcccctcctctggggaggctctgggactggagcaactgggactctcctggctgctgaccccggagccaggctctc

SEQ ID NO: 996384 - DNA, 120 bp, Artificial Sequence
  ENSG00000267244_16 (sequence is synthesized)
tgcttgtcctgcactacctcgccacgtctgcacaggggcctgacaagcgctactgtctccgggctacagaggacactggagctcagagctggacaaccggcccaggcccaggccgcacac

SEQ ID NO: 996385 - DNA, 120 bp, Artificial Sequence
  ENSG00000267244_17 (sequence is synthesized)
ggcgcagcaggccgtctgccgcactctgggggaggtcaccctggggctgctgacctgctctgtccctcgccccagcaccgtggcaatctaacaggaaggggcagggccagctccctctgg

SEQ ID NO: 996386 - DNA, 120 bp, Artificial Sequence
  ENSG00000267244_18 (sequence is synthesized)
aactcgggcagcgtcaaagataaggtgtcttcaaaaagctcatggaaaacgtgcgttgtgacgaaacttgcatggctttcaagtttttttgccccaaaataaactgatactaacttgtca

SEQ ID NO: 996387 - DNA, 120 bp, Artificial Sequence
  ENSG00000267247_0 (sequence is synthesized)
ctgaaagccccgccctggatggccccggggtgaccctgagagcggcaggcttgagtggactgctcccgggaagccactttcatggcgtcccctctccagggtgcccatctacctggagcg

SEQ ID NO: 996388 - DNA, 120 bp, Artificial Sequence
  ENSG00000267247_1 (sequence is synthesized)
tcatcatcgtcactgctggagtcttgtctcctgttgccaatccaagctctggagacacaagtaccacaagaaaggtgttacccagaggcactcgcccatcctccctgctgcaccggaggc

SEQ ID NO: 996389 - DNA, 120 bp, Artificial Sequence
  ENSG00000267247_2 (sequence is synthesized)
cagctgccacagcaactccctgctccgtcctctgctttctcagaactaacctgggctctctggaatcagagaccttcaacaagtcactgctcacatttgcaaatgttcacgtcaagagag

SEQ ID NO: 996390 - DNA, 120 bp, Artificial Sequence
  ENSG00000267247_3 (sequence is synthesized)
gaccccctttccacgtgccactcccctctcttccggatcattgcagctctccccaccagccttatcaatgtggggctccaaccctacaggtcagtgattcacaaacaggcactgtcccag

SEQ ID NO: 996391 - DNA, 120 bp, Artificial Sequence
  ENSG00000267240_0 (sequence is synthesized)
tggttccactgagaaagtgtgcctatagggaagcagaattacctggagattcatccaagttactgcatttgtcaataattcatttcttgttattgcttggcctctgcaggaatgagcaaa

SEQ ID NO: 996392 - DNA, 120 bp, Artificial Sequence
  ENSG00000267240_1 (sequence is synthesized)
ccatgctagacttttctcactgtcatcatctttgcaaaggcagtttcatttctggtagccctgtctttcagctgggtccccaagtgagacacctaagcagagctccacctgctgccttga

SEQ ID NO: 996393 - DNA, 120 bp, Artificial Sequence
  ENSG00000267240_2 (sequence is synthesized)
agacccacagcctaaagcaaagcttctcctgcggaccctagactcacatctcaaagaaagaagacaaacccagtgtgacccacagcctgggaacttgggagtaaatggctattcttttaa

SEQ ID NO: 996394 - DNA, 120 bp, Artificial Sequence
  ENSG00000267243_0 (sequence is synthesized)
tttttctctctcctcatttaaacaggatagccactgagcaagcctgtaaggctattggtctgcccattctggtttcttcaccaatgagaaaactgggacctggggagtttgcagaagcca

SEQ ID NO: 996395 - DNA, 120 bp, Artificial Sequence
  ENSG00000267243_1 (sequence is synthesized)
tccaagggcacctgcttctcacagcacagcagcttcctgcagccctccctcctgtcttgtttctcccttaattgagaggagaggccagaaccagatgcaggcagttccaacagtaatgaa

SEQ ID NO: 996396 - DNA, 120 bp, Artificial Sequence
  ENSG00000267243_2 (sequence is synthesized)
gttcagagctctgaggagatggtaaaactcatttgcaacgaaacaagatattttccaactctgcagccagctcctcttcccctcaggctgtgagtggatgcagcctgagtcctccccaga

SEQ ID NO: 996397 - DNA, 120 bp, Artificial Sequence
  ENSG00000267243_3 (sequence is synthesized)
agcagatcctggcgccatgctttctgtacagcctgcaaaactgtgcagaaagctggaagtgatgctccagggagtttatgtctccccatcttgacccacaccaatacctgaggctcgttg

SEQ ID NO: 996398 - DNA, 120 bp, Artificial Sequence
  ENSG00000267243_4 (sequence is synthesized)
cacagaggccatctttggctcatttatgtaaccattcatcccttgaagaacatctgggttgtttccagtgggcaattataaacagagcctctatcaacattcctgtaccagttttagaat

SEQ ID NO: 996399 - DNA, 120 bp, Artificial Sequence
  ENSG00000267243_5 (sequence is synthesized)
acaagatattttccaactctgcagccaggtgcagaaagctggaagtgatgctccagggagtttatgtctccccatcttgacccacaccaatacctgaggctcgttgctttgattcaagtc

SEQ ID NO: 996400 - DNA, 120 bp, Artificial Sequence
  ENSG00000267243_6 (sequence is synthesized)
cggacaagctctaaggttcagctcacactgggagtcacgctgcaggagctcctgggagtctgtgaacggtggtgatgcagaaaagcaaagcgtgtatatctgttttagtcctccctcaga

SEQ ID NO: 996401 - DNA, 120 bp, Artificial Sequence
  ENSG00000267243_7 (sequence is synthesized)
tctccgtgggtctggagtcttgaggagccaggactggactgggatgtaaggttgggtcttccgagctgtagatgggagcaggaagatgtatctccattcacgatctcagtacaaggctca

SEQ ID NO: 996402 - DNA, 120 bp, Artificial Sequence
  ENSG00000267243_8 (sequence is synthesized)
gctatctcccggcaactcgcccatcatctgtttctgagttcttctgacatacagatgagtgttttccaaactgtggagccatgaaattgatttagagggtcatgactcagtattacaaga

SEQ ID NO: 996403 - DNA, 120 bp, Artificial Sequence
  ENSG00000267243_9 (sequence is synthesized)
ttctgacatacaggttctttggaggcggcatcaagaaaatacatttggacaaatccttcatctcaaatattttcccctcatgaaaccaaaggcattgctccaaagtcatttccattaatt

SEQ ID NO: 996404 - DNA, 120 bp, Artificial Sequence
  ENSG00000267249_0 (sequence is synthesized)
gagagacccccccctatttctctaaaagaataaatctactttgttttatttttatgtataataaatattcaatttgtttaaaaagtctgaaatattatgatccctcttctacaattttca

SEQ ID NO: 996405 - DNA, 120 bp, Artificial Sequence
  ENSG00000267249_1 (sequence is synthesized)
tcaaaaatggtaatcagatgtttcttgtgagactgacatgactgtagaaaattagcaaaataataattgaagctttttttaaagcatagtggttcacacctataattccagtactctggg

SEQ ID NO: 996406 - DNA, 90 bp, Artificial Sequence
  ENSG00000267249_2 (sequence is synthesized)
taagaccagcctgggcaacatagcaagaacccctctctacaaaaaatgtaaaaaattagcagggcgtgatcgtgcacactgggtgaatca

SEQ ID NO: 996407 - DNA, 65 bp, Artificial Sequence
  ENSG00000267249_3 (sequence is synthesized)
agcccagaaaaaaaaaactttttaaaaaagttaaaaaaaaccactcttttgccaaaattacaaaa

SEQ ID NO: 996408 - DNA, 120 bp, Artificial Sequence
  ENSG00000267249_4 (sequence is synthesized)
aaaagttaaaaaaaaccactcttttgccaaaattacaaaaaaagctatcaacagaaaattgcttgtaattttcaacttttgagacaaactatgaggtatgtactaagagacagactatat

SEQ ID NO: 996409 - DNA, 120 bp, Artificial Sequence
  ENSG00000267249_5 (sequence is synthesized)
taagatcaaggctgtattaacattgaggctgagcttcccaccttattgtaccagagtaacgtgtatttcaaatgtgcttttggtgtaaactctgtaataaatatgctttttatgcaccaa

SEQ ID NO: 996410 - DNA, 120 bp, Artificial Sequence
  ENSG00000267248_0 (sequence is synthesized)
ggaagggactcccgcggccctaaggtgctggcgggcgtttggcgttgcagctgtgtgggcgctggtgcgtgcgagtagcgctcgaagaaacccaaaggcgtcgtggggctgccgtgtgcc

SEQ ID NO: 996411 - DNA, 120 bp, Artificial Sequence
  ENSG00000267248_1 (sequence is synthesized)
ccagagagcactgcaggccgggtaggggctaaggctccccgcagtcttctgtgtgtcgtccagtacgcagttgaaatcgttctccaacctggccagtcctccgaggcccttctcaggcga

SEQ ID NO: 996412 - DNA, 120 bp, Artificial Sequence
  ENSG00000267248_2 (sequence is synthesized)
ccagactctgttaacagagtccattgctaaaactcctcgttagtatttaccactcctccagtctgtgttttgaagcagtggttttcaaccactgcccgttttcagaagaaatcatctcaa

SEQ ID NO: 996413 - DNA, 120 bp, Artificial Sequence
  ENSG00000267248_3 (sequence is synthesized)
gcgtccgtgtgctgctagaagccgggccgggaggtcttggtgccggactccaccctgcagcccttccctttcgccaccgccctgtgcttagagaaaccttagagtggagcaatgagtcgc

SEQ ID NO: 996414 - DNA, 120 bp, Artificial Sequence
  ENSG00000267248_4 (sequence is synthesized)
ccttgactgagtaactcttcggggtcaacttctccttccacgccaaggaaaggattccagggcgatgtttctggaaatagagatctgaccaagccactgctctggtgaaaattcagtggg

SEQ ID NO: 996415 - DNA, 120 bp, Artificial Sequence
  ENSG00000267248_5 (sequence is synthesized)
tccctagcacctagtgcagcggctcctagcctgagtattgccgtctttcggtggggaggggttgggtttttttgtagcatctgttgatctgatctccaacatcctccacgtcaattccca

SEQ ID NO: 996416 - DNA, 120 bp, Artificial Sequence
  ENSG00000267248_6 (sequence is synthesized)
tttccagccacggtgctggcttgggtgggggtgcgtgcggtgctgacaccaaaatggaggtcccgtgtttctgagagtctctttcagagcaatgcaaacctgaaactactcctgccaaga

SEQ ID NO: 996417 - DNA, 120 bp, Artificial Sequence
  ENSG00000267248_7 (sequence is synthesized)
aacgattgcagctcttcccggaaaagttaaagcctttgagaaacaaagctgaggttgaaagtattagtccattttatagatgaagaaatggaggcccagagagatcacgtgacttagcca

SEQ ID NO: 996418 - DNA, 120 bp, Artificial Sequence
  ENSG00000267248_8 (sequence is synthesized)
agtccaccaactaatattgggaagctcagcagggtcctgggggcccacaggaatgtgaataaacacgcttggaaagtctgcagaatttccagtcctagcctcctgctggtgtgaacctgg

SEQ ID NO: 996419 - DNA, 120 bp, Artificial Sequence
  ENSG00000267248_9 (sequence is synthesized)
gctcctgtgcctgggaccctgggagatttgggattaagccttattttgcattgggtttaatctcaacagacaccgaggggcacctggagtccctgcaaaaccttgtctggtatcagctac

SEQ ID NO: 996420 - DNA, 120 bp, Artificial Sequence
  ENSG00000267248_10 (sequence is synthesized)
ctatcagaggatgcagaggacaaggtcagggcctaggggatgccaaattccagggtccagaaagagcttgggataaaatgaacatccaaggggagggctttgacctgggctgagtctgcc

SEQ ID NO: 996421 - DNA, 120 bp, Artificial Sequence
  ENSG00000267248_11 (sequence is synthesized)
cagtgagaggaaggcagggggagggcatggaaggagcactggaaatggggtgggaaaaccaaagctccctccatgcagggctacttaggtgagtcccttccctgtctgggctcccttcct

SEQ ID NO: 996422 - DNA, 120 bp, Artificial Sequence
  ENSG00000267248_12 (sequence is synthesized)
tgacctctggagttctgtctctaacataccctagttctttcttgattgtccataatatacaaacacagtggcctgagaatatttactcccctggtcactatttcttcagctggaaaggga

SEQ ID NO: 996423 - DNA, 120 bp, Artificial Sequence
  ENSG00000267248_13 (sequence is synthesized)
aacaaattagtaacatttgaaaaaacaaaaaccccaacaactaaaaaagtattactaaatgcaatgctgtttgagagaacaaactgtcaacaaaaataatacttaattctctggaagtga

SEQ ID NO: 996424 - DNA, 120 bp, Artificial Sequence
  ENSG00000267248_14 (sequence is synthesized)
aattaattaaaaattcagaggagataccagaacactagctggtaggattaaataagtgaaggaccagctggagcaacatagcaagacctcatctcctcaaaaacaaaaaagaaaagaaaa

SEQ ID NO: 996425 - DNA, 120 bp, Artificial Sequence
  ENSG00000267248_15 (sequence is synthesized)
taaaaaaatacagagaggagtttcaagtagactaagtgggaagaaaaggaaagagtcttgggtggggcagggattcagggcaccagcttccttatcgctgagcctggggggtgggggagg

SEQ ID NO: 996426 - DNA, 120 bp, Artificial Sequence
  ENSG00000267248_16 (sequence is synthesized)
ttgcagctcttcccggaaaagttaaagcctttgagaaacaaagctgagtaagaaggagaactaagaaagagactgaagcatggtctgtggagaaggcacttgtgcaaacaccaggagaat

SEQ ID NO: 996427 - DNA, 120 bp, Artificial Sequence
  ENSG00000267248_17 (sequence is synthesized)
gaggggcctgagttgtcttcgtttctcctaaaagcatgcattcccggctgggcgcggtgactcatgcgtgtaatcccgccactttagaaggctgaggcaggcggatcacctgagatcggg

SEQ ID NO: 996428 - DNA, 85 bp, Artificial Sequence
  ENSG00000267248_18 (sequence is synthesized)
ccatctcaaaaaacaaacaaacaaacacacaaacaaacaaacaaacacattccctcccaggccacccaagtgagggcatgaagca

SEQ ID NO: 996429 - DNA, 120 bp, Artificial Sequence
  ENSG00000267248_19 (sequence is synthesized)
cagtggacaggatgtgggagggcagctgcagctccaagctgcaagtctttctgatagaatgcttaaaactccttggaccacagcaagagagtgttttcatttgcacccatttttattagc

SEQ ID NO: 996430 - DNA, 120 bp, Artificial Sequence
  ENSG00000267248_20 (sequence is synthesized)
gtttgaacctgtactttttgtagcatgtaaaccttaagctgcttaactattccttgaagcatttacaccagcggttcccaacctttttgctacctgagaccagttttcttgaagacaatt

SEQ ID NO: 996431 - DNA, 120 bp, Artificial Sequence
  ENSG00000267248_21 (sequence is synthesized)
aattcttccacggacccgggagaaggggaagggatgatgtggagatgattcaagcccattacatttattgtgtgcttcatttctattatttcactgtaatatataatgaaataattacac

SEQ ID NO: 996432 - DNA, 84 bp, Artificial Sequence
  ENSG00000251176_0 (sequence is synthesized)
caaggcatttaatggttgaaaagttgatattttccaagataatttaaaaattattgatggagtgtcactctgtctggcaacctc

SEQ ID NO: 996433 - DNA, 120 bp, Artificial Sequence
  ENSG00000251176_1 (sequence is synthesized)
agctgggactacaggcatgagacccattttgtttatattataacccatcagatgttgttatccccattgtaaaagtgagacaactgaggcaaaaagatacaaagtaattttcctacaaat

SEQ ID NO: 996434 - DNA, 120 bp, Artificial Sequence
  ENSG00000251176_2 (sequence is synthesized)
gcacagctaaaattagcaaagctgggctttgagagctggcacactggcttgaaaccataaaataattgcctctattcttaaaaaaagtaagtctatttctcattaataaacacaattaat

SEQ ID NO: 996435 - DNA, 120 bp, Artificial Sequence
  ENSG00000263952_0 (sequence is synthesized)
accatttcttcttcttacctacttcatcattcatgctcatctcaatgttggctataaggtaaagggaagcacgcctcaagtgatcatgcaaacaactccagtgaagacactgcgcatgct

SEQ ID NO: 996436 - DNA, 120 bp, Artificial Sequence
  ENSG00000263952_1 (sequence is synthesized)
caagtcaaaagctcaaaccacacatctgtcctccaagatgcctacttggccccttccaagagtaatttactttcgtttcattcctgctctaaagctttttaataaatgttcactcttgct

SEQ ID NO: 996437 - DNA, 120 bp, Artificial Sequence
  ENSG00000263952_2 (sequence is synthesized)
accatttcttcttcttacctacttcatcattcatgctcatctcaatgttggctataagatgtgatccctttaaaataatccgctggcaaccaggttgatggatgaacttcaaagaaggac

SEQ ID NO: 996438 - DNA, 120 bp, Artificial Sequence
  ENSG00000263952_3 (sequence is synthesized)
atagtgatgaaaagatcgatagcttttaagactgctctaaagaaccagatagctgtatttaagatataattggaatttccctttaagagaaagaacaggttaaacttgagaagaaaaaag

SEQ ID NO: 996439 - DNA, 120 bp, Artificial Sequence
  ENSG00000263952_4 (sequence is synthesized)
acatttagtctttgcaactgtaaatatacaagaacctcaaagatcactatctgtcctgtatttgaaggcgcttgttgtgatgtgcagaatactgttggcccttaaacgagaaaacctgag

SEQ ID NO: 996440 - DNA, 120 bp, Artificial Sequence
  ENSG00000263952_5 (sequence is synthesized)
atgacatgggaaaacacaggatgacatgttaagacatccaaaaaccagaatgatcaccaaaggccctcaatggacccatactataagtactgaaaagtaatggttgaaactctaggctca

SEQ ID NO: 996441 - DNA, 120 bp, Artificial Sequence
  ENSG00000263958_0 (sequence is synthesized)
ggacggaaggcgtggaagcgggaggggccttcgtgtgaaaatcccttgtggggtttggtgtttcactttttaaaggcatacaacttaggattcataactacatatatacggatagaagtg

SEQ ID NO: 996442 - DNA, 120 bp, Artificial Sequence
  ENSG00000263958_1 (sequence is synthesized)
aagtgactacaagcagaatttggagaaaaaaataaaagatgcaatatagtttttaaaatcattgttaaaatataatgagtctgtactttgcttaaacaataaaaaagtcttcgatttata

SEQ ID NO: 996443 - DNA, 120 bp, Artificial Sequence
  ENSG00000263958_2 (sequence is synthesized)
cccgccggaccccgggactacggaagccatcccgtccggccacccacacccgcgccgcggctggggcttgggttggggactgtggcggcgaagaagccgggggagggagttctcacaaga

SEQ ID NO: 996444 - DNA, 120 bp, Artificial Sequence
  ENSG00000263958_3 (sequence is synthesized)
gtttttaatacaacagcactaaatacttggtatagaacacatagtaaactcaagaaaaaggaaaaatacataaagaaattactagaactcaagcagaccaatagaagaagaatatttatt

SEQ ID NO: 996445 - DNA, 120 bp, Artificial Sequence
  ENSG00000263958_4 (sequence is synthesized)
aaaagtaaattctagttaattgaaaaaaaaaattagccagataaacttgtagcaagatgatgaggagcaataaaaaaatagaagtcctaccaacaacataaagaatgaaatgctgagaaa

SEQ ID NO: 996446 - DNA, 120 bp, Artificial Sequence
  ENSG00000263958_5 (sequence is synthesized)
atagagataaaaacagcgtagagaatatgagcaactgcatgtaaacaaatgtgaaaaccaggatgaaatggataaagttattttttaaaaaaaactgtaaagtgcaaacattcctgaaga

SEQ ID NO: 996447 - DNA, 120 bp, Artificial Sequence
  ENSG00000263958_6 (sequence is synthesized)
aaaaaaataatttattgatatacccataaccgtaaataaatggaattgctgattctgctcactacctctcactccaccaaaataaatacctaaacgagtgactgcaggctgattgaatgg

SEQ ID NO: 996448 - DNA, 120 bp, Artificial Sequence
  ENSG00000263958_7 (sequence is synthesized)
acgaatacacaaatgaatgagtccctggacaaaaatatattacatctaaagtttatgacatgttgtacttctaaggatgtgataatcccctttgcctacaaggtgttccagaaaattttg

SEQ ID NO: 996449 - DNA, 120 bp, Artificial Sequence
  ENSG00000263958_8 (sequence is synthesized)
taaaaagaggaaaaactgtaacactaatttcaagaaggtggtgtagccttggcatcaaaatgagatgcaccgaactctggtgttgtgtccagcattatcctcctgggcatatgtcaaggt

SEQ ID NO: 996450 - DNA, 120 bp, Artificial Sequence
  ENSG00000263958_9 (sequence is synthesized)
ccattgacctgatctccaatggcctgcaactgcagacattttctaagggcttcttctagctgctggagcccactttactcagcctcacagcagggagaagtgccaacaaccttcaaacaa

SEQ ID NO: 996451 - DNA, 120 bp, Artificial Sequence
  ENSG00000263958_10 (sequence is synthesized)
tgactgctggggttttgtctccctcacccatcacatagtgcaggcctccagagttcccagcagggtgaccgactagttttgcatagtactgatgtgcttgataacaaacagttacatggc

SEQ ID NO: 996452 - DNA, 120 bp, Artificial Sequence
  ENSG00000263958_11 (sequence is synthesized)
tgtcttcctgtcctggtctcagttcccaatagtctctgctagtatattctggaagaacctccgaaaaaactatacttaattcttatcccagggtttttgtcattgtttttcttgggaaag

SEQ ID NO: 996453 - DNA, 120 bp, Artificial Sequence
  ENSG00000263958_12 (sequence is synthesized)
gcaattggtacccaaagtgttcccaggagggagattgcctggctggattctggatgtggaccactccctgcctgtatagagcaggcattccattgatgggattattggaacagcagtgcc

SEQ ID NO: 996454 - DNA, 120 bp, Artificial Sequence
  ENSG00000263958_13 (sequence is synthesized)
ccggcatgttatcccatcacaattgctaaggcttttgcctgtggaaaactgggatagaaaatagaacagtgtgccctggtttatgtcttatctctagtgtttctatattaaagtcagact

SEQ ID NO: 996455 - DNA, 120 bp, Artificial Sequence
  ENSG00000263958_14 (sequence is synthesized)
ctgatagggaagaagtaggacgttaagacctggggtggagactccagggtggctgtgcttgagaatgttgaacgctcagattcccctaagtcctttgcatcagcacaagtgtctcatcta

SEQ ID NO: 996456 - DNA, 120 bp, Artificial Sequence
  ENSG00000263958_15 (sequence is synthesized)
aatctatacttgctgtcctcaagatctgacctcacctcccttgattgattctaaaccaattatgaggttcaagtctcagcatgtcctcactggggaaattctgtttctgtctggggaaaa

SEQ ID NO: 996457 - DNA, 120 bp, Artificial Sequence
  ENSG00000263958_16 (sequence is synthesized)
aataaagattattagcagaacctgagaatggatcttgtgggtgctatatgcattcaaaaccagcatctctagcagattcactgagagccattattttcttgaagtttcaaggaaacctcc

SEQ ID NO: 996458 - DNA, 120 bp, Artificial Sequence
  ENSG00000263958_17 (sequence is synthesized)
cagtagtttaatagtagtttattattagtgcttacgtacttcaggtgtccttgcttaattcaatcctgagtcacaagcaagttccccaacatcaaaaatatcttactgatgcctatattt

SEQ ID NO: 996459 - DNA, 120 bp, Artificial Sequence
  ENSG00000263958_18 (sequence is synthesized)
tgtccccaccacccctgtatcccagcctggtaactgcctttatatctaggttttgctattaatagtaattctgttactatcaagttgagttcagaaataggaaaatagaactagtcatac

SEQ ID NO: 996460 - DNA, 120 bp, Artificial Sequence
  ENSG00000263958_19 (sequence is synthesized)
tttctcacgccgaacacatagtttattatattcacacacagttttctccttttgccccacaaaacaatgttacgttcaaagttcaatgaggcattcctcataaaatttagatagctggca

SEQ ID NO: 996461 - DNA, 120 bp, Artificial Sequence
  ENSG00000263958_20 (sequence is synthesized)
tgacaattcctcatgaaaccttatatacaatctgaaaaattgtctcaactttaaaaatgggaaaatatttgtaacattacatctatagaagtttatagcacatgttagagaagattctca

SEQ ID NO: 996462 - DNA, 120 bp, Artificial Sequence
  ENSG00000263958_21 (sequence is synthesized)
agaattccgggtgatggtcaaattaatgcccaatacattatttgtgggaatctgtggtcataacactcaccttagtgagtaggtatttatcttttgttgttattttggtttctcctgaat

SEQ ID NO: 996463 - DNA, 120 bp, Artificial Sequence
  ENSG00000263958_22 (sequence is synthesized)
tatttttcaaagtgacaaagtcatccagggaagaacaaagctcatatataaaatattttttttagttttatcttttcttttcaataatattctgtattgaataaacaaagtaaatttgca

SEQ ID NO: 996464 - DNA, 120 bp, Artificial Sequence
  ENSG00000263958_23 (sequence is synthesized)
tttggctctgtgtccccactcaaatctcagctcaaattgtcaaccccatgcacatgtcgagggaagatcctggtgggaggtgattggctcatggaatccatttccccgattatgttcccg

SEQ ID NO: 996465 - DNA, 120 bp, Artificial Sequence
  ENSG00000263958_24 (sequence is synthesized)
ggaatccatttccccgattatgttcccgatgctgttctcatgatagggagggagttctcacaagatctgatggtttaagcgtggcagtttcccctgagctctccttcctgctggtatgta

SEQ ID NO: 996466 - DNA, 88 bp, Artificial Sequence
  ENSG00000263958_25 (sequence is synthesized)
acacatacaacttaggattcataactacatatatacggatagaagtgcatgaacagaaaatctgcccttctggaataccaaatgcaaa

SEQ ID NO: 996467 - DNA, 120 bp, Artificial Sequence
  ENSG00000251175_0 (sequence is synthesized)
tcatgggagaagcgctaaactttacctcaacatttatgtaaagttaaagctgcacagattctgagtcttgaaagtttatttcaaagaaaagacaatgcctgtgccacatatttgacttgg

SEQ ID NO: 996468 - DNA, 120 bp, Artificial Sequence
  ENSG00000251175_1 (sequence is synthesized)
gaaatatgctttaagatgtcaagcctcctctgctgatgctgtatggagaacagacaagctttcccatcaagccctaaccaaactgcagaactgtgaataaaatcaataattgttatgaaa

SEQ ID NO: 996469 - DNA, 120 bp, Artificial Sequence
  ENSG00000251175_2 (sequence is synthesized)
gctaaactttacctcaacatttatgtaaagttaaagctgcacagaataaaccaagattctgagtcttgaaagtttatttcaaagaaaagacaatgcctgtgccacatatttgacttggtt

SEQ ID NO: 996470 - DNA, 120 bp, Artificial Sequence
  ENSG00000251175_3 (sequence is synthesized)
ttaatttgcagtagaaagaataagaacaagaagaggggaggaaaggaggtgtcagaaggcaaaaagaagagtactttgaggctctttggagacctagagtaaaaaatactgccattaaat

SEQ ID NO: 996471 - DNA, 120 bp, Artificial Sequence
  ENSG00000251175_4 (sequence is synthesized)
gtttcatgggagaagcgctaaactttacctcaacatttatgtaaagttaaagctgcacaggagacacacgttgaagtattttgcggtgaaatgttatgatgtctgcaaggaactctcaaa

SEQ ID NO: 996472 - DNA, 120 bp, Artificial Sequence
  ENSG00000251175_5 (sequence is synthesized)
aagagggaagagaaaacattattttttcctgtccctcattgcttctggatgactctcaacactgagaagtatatacacttgacccacaggtttgaaatgctctgccacccccaagactgc

SEQ ID NO: 996473 - DNA, 120 bp, Artificial Sequence
  ENSG00000251175_6 (sequence is synthesized)
aagaccaacccctccacttcctcctcatccttaacttacctaaaatgaagatgatgagaatgtacaccttgatgatgagccatttccacctaataaatagtaaatatattttctcttcct

SEQ ID NO: 996474 - DNA, 120 bp, Artificial Sequence
  ENSG00000251396_0 (sequence is synthesized)
acctcagccctgtcaccctgcgcgtgtctctgccatgcttccttggatccctatctaccccgttttgggtgacaggacgagttgggccagttaccaggatcttgtcgcctggttctgatg

SEQ ID NO: 996475 - DNA, 120 bp, Artificial Sequence
  ENSG00000251396_1 (sequence is synthesized)
gtgtcttggttcccggctggggttttgtgtttaccacgagcgttgcctgctgtcggggagctgcgtgtgtttcacaacaaacagggagccagggagaccaccctgcggggctgccccttc

SEQ ID NO: 996476 - DNA, 120 bp, Artificial Sequence
  ENSG00000251396_2 (sequence is synthesized)
tacgcgctaacagtgaattagaaggagaaaacgctctgcgagtgcagcggaaggtcaatatggagcctggtttgcttttagaatcttcccaaggccgatgggcttcctcttccctcctga

SEQ ID NO: 996477 - DNA, 120 bp, Artificial Sequence
  ENSG00000251396_3 (sequence is synthesized)
ccagaggctttgatgcccctgccctgggctgcctggttcctgccccgagtcttcagaaagatccccgggcctggagactgtgagttcaggttcagatgccttgcgtggcctgtgaatcct

SEQ ID NO: 996478 - DNA, 120 bp, Artificial Sequence
  ENSG00000251396_4 (sequence is synthesized)
acaatgcgttctcctttcttcctctccactaatctgtacttctaagaggtgttgagtttcggccaaactttctgctcggctcgcatcaaaggctgccctcttgtgaatagccagctctca

SEQ ID NO: 996479 - DNA, 120 bp, Artificial Sequence
  ENSG00000251396_5 (sequence is synthesized)
cctaatgatctccctactcactcctgaccaggacgcaggtcattccccataataattagctcacaggcagagtttccaggcgcttccaggagcatcaatcaccgggatgaatgggaagcc

SEQ ID NO: 996480 - DNA, 120 bp, Artificial Sequence
  ENSG00000251396_6 (sequence is synthesized)
cgctctgcgagtgcagcggaaggaggaagtccagagccacggaaattcggtaaggatcggataagggcaataaaatcgcagctctaaatcttttcatggagttgaagacagacgtttgac

SEQ ID NO: 996481 - DNA, 120 bp, Artificial Sequence
  ENSG00000251396_7 (sequence is synthesized)
tgtgggagccatctcatctttataacctgcctgagtcgaagctgttaaagaggccaagaattcccaagctttcccaggcaaacggggaagaacactgggatgccttttcctcctcctctg

SEQ ID NO: 996482 - DNA, 120 bp, Artificial Sequence
  ENSG00000251396_8 (sequence is synthesized)
tccatctgcaggccaagtgtgcatcagtcacaggcaaactctgaattgagctttgtgcaagtctctggaaagagacccaagatcgtgtgatgagcaaaagtgacagtgctggaggcagcg

SEQ ID NO: 996483 - DNA, 120 bp, Artificial Sequence
  ENSG00000251396_9 (sequence is synthesized)
acatctgcagagccagccccatccctatctgcagcagaatatgtatggggatcctttatgtgaacaatccacccagggtagaatggggcttttgacatcagctgagacccaggcggcctt

SEQ ID NO: 996484 - DNA, 120 bp, Artificial Sequence
  ENSG00000251396_10 (sequence is synthesized)
acaatgagagggctgttggtcaaaggaaggactgtttaatgaactgagaatctgaggccagctctggccatctgcacttggaatcattagagcaactctactgtaactggcaaccttgaa

SEQ ID NO: 996485 - DNA, 120 bp, Artificial Sequence
  ENSG00000251396_11 (sequence is synthesized)
taatgcagcaaattcatattccaaaattgtgaactttaaaattttgtgtttgtgtctatgatgaaaagcattatataaacatttgatactacaattttattagtaaggaaggctgaaaaa

SEQ ID NO: 996486 - DNA, 120 bp, Artificial Sequence
  ENSG00000251396_12 (sequence is synthesized)
gggctgcagtcatttgaaggcttgactggggctggaggattttcatccaagatggctcactcacccagctgttggcaggagacctcggttctttgacttctccgtaagactgtacggagt

SEQ ID NO: 996487 - DNA, 120 bp, Artificial Sequence
  ENSG00000251396_13 (sequence is synthesized)
aggcttacgcgctaacagtgaattagaaggagaaaacgctctgcgagtgcagcggaagggaggaccctgtggctggagaaatcccgccgcgaacacccagcgaccaggtctacagcagca

SEQ ID NO: 996488 - DNA, 120 bp, Artificial Sequence
  ENSG00000251396_14 (sequence is synthesized)
tgtatttaagtcggtttcgacagtgaggaattaaaattaaatttatttaaactattttgacttttacccaagtttttcttacagttccatctcatttttccctccttacatagtttgggg

SEQ ID NO: 996489 - DNA, 120 bp, Artificial Sequence
  ENSG00000251396_15 (sequence is synthesized)
gcccggctccggttgttccgccacgtttgagcgggcgagcccggcggccgggagacgccagggaacggggctggtgggggtacaaaggctcggttccgtcgccttcagccctgcggtggg

SEQ ID NO: 996490 - DNA, 120 bp, Artificial Sequence
  ENSG00000251396_16 (sequence is synthesized)
ggcacggggcaagtgaggggacggcagaggcggcgttcggtgtgaggctgcgccctgggctcctgaaaatccagggctgcagtcatttgaaggcttgactggggctggaggattttcatc

SEQ ID NO: 996491 - DNA, 120 bp, Artificial Sequence
  ENSG00000251396_17 (sequence is synthesized)
cattaaagcccttaataatcaggtagggaaggcaggtgctcacaattgtcacctgttggtgagtgaacaccttaggctcggggaggacaatgactcaagaacaaggtcgaattgcaggtg

SEQ ID NO: 996492 - DNA, 120 bp, Artificial Sequence
  ENSG00000251396_18 (sequence is synthesized)
gggggtgaagctgatccctaacagtgtcctccagcccctggcactgaggaaggacatggagggcttgcatcgacttttcctggcaggcttgtgattcccagccagaatgcaggtggcaat

SEQ ID NO: 996493 - DNA, 120 bp, Artificial Sequence
  ENSG00000251396_19 (sequence is synthesized)
gttgtgattcctggcgtaaccttcaatgcttcaatgataatctctgctggtgccaggcaccagctgagtgtcactgtgcagctcccaggcttaagtgatgcatgccgaggttttcagagc

SEQ ID NO: 996494 - DNA, 120 bp, Artificial Sequence
  ENSG00000251396_20 (sequence is synthesized)
agtctctcatttattagttgtgttggaaagaaatctgtactacctaactgggtacctctggattttaacagctgtggtttataagagatatgagagggggtttgttttcaaagtgccttt

SEQ ID NO: 996495 - DNA, 120 bp, Artificial Sequence
  ENSG00000251396_21 (sequence is synthesized)
cacaaagtaacaccttagactgtagtttacattccattccagtaggataacttgcaacacttctgtgctcagaaatccaactgtgcaagaaaagtcaggttatattttcatacagcccgt

SEQ ID NO: 996496 - DNA, 120 bp, Artificial Sequence
  ENSG00000251396_22 (sequence is synthesized)
tctggcaaatatgccttcacaccactttccctcctcctcaccgctattggcaatagtcccaatggaagagttttatgtcaaatgctgagtatcttggaagctgtcctgcacagacacgac

SEQ ID NO: 996497 - DNA, 120 bp, Artificial Sequence
  ENSG00000251396_23 (sequence is synthesized)
tgcttggctgcgtgttggagagtcgcggttggactgggagaccaggaaggtcccttctggtctgagatgtgatgactctagaactaattagtttcaactcataacacgaaatgatactag

SEQ ID NO: 996498 - DNA, 120 bp, Artificial Sequence
  ENSG00000251396_24 (sequence is synthesized)
ctaccatttggtgggctttttctgtgttccaggctctgtgctaagatcttagcattactctaattacaaaatccctgccaatattatcctcagtttacgcaagaacaaatgggtttaggg

SEQ ID NO: 996499 - DNA, 120 bp, Artificial Sequence
  ENSG00000251396_25 (sequence is synthesized)
aaatcaaaaacttgtccaatgacacagatttaagatttagcaactgatggccacgtggaaatggattacagattattctaattggacactctaaacgtgcaatttaaccagaatgaaatt

SEQ ID NO: 996500 - DNA, 90 bp, Artificial Sequence
  ENSG00000251396_26 (sequence is synthesized)
ctgtaatcctagcactttgggaagccaggtgtatcccttaagcccaggagtttgagagcaacttgggcaacatggtgaaacctgtaaggt

SEQ ID NO: 996501 - DNA, 86 bp, Artificial Sequence
  ENSG00000251396_27 (sequence is synthesized)
ggtgtgatgggaggattggttgagcctaggaggtcgaggctgctgtgagctgtgatggttccactgcactccagcctgggcgacag

SEQ ID NO: 996502 - DNA, 120 bp, Artificial Sequence
  ENSG00000251396_28 (sequence is synthesized)
taccttgtggttgcactcgtctgagactagctcatggctccagctctcagggtggtgagtaatgattctgtggtcagacgcagttttgaagtcaggcaagaaaaccttcaacaagagtta

SEQ ID NO: 996503 - DNA, 120 bp, Artificial Sequence
  ENSG00000251396_29 (sequence is synthesized)
gagatgtcctgtctatgaatttctcctctaggcttagggatagccctgggattcatgtcatgccagttagggatccactcattgtaagcaatacaagtgcccccgaagagacagtgcatt

SEQ ID NO: 996504 - DNA, 120 bp, Artificial Sequence
  ENSG00000251396_30 (sequence is synthesized)
aattgtcaccccttaggagcattgtgtgaattagtgtgatttagcacatgcccagagggatgaaactctagctccatagggtaggtcctgattactcctggagcaggcagccagctcagc

SEQ ID NO: 996505 - DNA, 120 bp, Artificial Sequence
  ENSG00000251396_31 (sequence is synthesized)
tcatggggagctctgagaagtctctcaatgcctcgcatgcagcccctgctcaggagtcatgtgtcacttcacagtcttgctttccagtgggtcaaagcatgatgtttatgagaaacaaat

SEQ ID NO: 996506 - DNA, 120 bp, Artificial Sequence
  ENSG00000251396_32 (sequence is synthesized)
acacaaaattctgacttgtgtgaatacagaacacgtgcaataaaacgactgcaatctatttttaaaatgtggtctgagaagtcaggtttaatatgactatgtaatatataaacaatatat

SEQ ID NO: 996507 - DNA, 120 bp, Artificial Sequence
  ENSG00000251396_33 (sequence is synthesized)
tttccacagaaaggaaaatataaataataaaatatgtctatttcttttttttggtggaaaattactcccacaatttggtcccaagggggtcttaatttgtcatcaggtctgtggctaaat

SEQ ID NO: 996508 - DNA, 120 bp, Artificial Sequence
  ENSG00000251396_34 (sequence is synthesized)
gtcttataaaggaatgcttctttctttcgagaagtgtacaggaacagtctgcactgactgcttttacctgtaaatgttttgagaattcagaagtcactttccttccacaataggtgctag

SEQ ID NO: 996509 - DNA, 120 bp, Artificial Sequence
  ENSG00000251396_35 (sequence is synthesized)
gcattttatttaaataaagcaaaaacatttctgtcataaagaaggtgttaataacctcaaagctatgcgaaatatactagtacaatctaatactcatggtgaaaaatacagtaattaaga

SEQ ID NO: 996510 - DNA, 120 bp, Artificial Sequence
  ENSG00000251396_36 (sequence is synthesized)
aggcaatagcttgacttctgaaaagggctggactgaaggtcagccacatgggcagtgtgaaggatccccagcaaaactctggacatcagtggctgggcaagcttctctggttggcggtac

SEQ ID NO: 996511 - DNA, 120 bp, Artificial Sequence
  ENSG00000251396_37 (sequence is synthesized)
tctgcatattgtcacacatcaactctgggagaagatcatactgttcatgtctccacaaggggaggacagctggaaactcagtgtctggacctctttccttggctgattttattgtgtatc

SEQ ID NO: 996512 - DNA, 120 bp, Artificial Sequence
  ENSG00000251396_38 (sequence is synthesized)
cttctccgtaagactgtagacagagctgccccgtgttgcccaggccggagtgtagtgatgcgatcttacctcactgcagctttgagttcctgggcgtggcacaagcagttcttgaactcc

SEQ ID NO: 996513 - DNA, 87 bp, Artificial Sequence
  ENSG00000251396_39 (sequence is synthesized)
ggaatgcacattctaagttacaagatcaaataacaagggaaagaagacttgattatgtatacacacacaaaaagaaagtgttatcaa

SEQ ID NO: 996514 - DNA, 120 bp, Artificial Sequence
  ENSG00000251396_40 (sequence is synthesized)
cttgattatgtatacacacacaaaaagaaagtgttatcaaaactgacaagaaaaatgagaagacagccatctgcatgtcaagaagaggacctcaccagaaactgagttggctgaaacttt

SEQ ID NO: 996515 - DNA, 120 bp, Artificial Sequence
  ENSG00000251396_41 (sequence is synthesized)
gatcttgaacttcccagcctcaagacctgtacttctgtcctctgtggtggagaataaagggaagccaggaagtgtgggtcaggatctctgggaaactgctggcttctagcaaggctggca

SEQ ID NO: 996516 - DNA, 120 bp, Artificial Sequence
  ENSG00000251396_42 (sequence is synthesized)
cgggtgtgttcccatggaaggaaagaaccaaaggtgctggtgagtagctcaccacaggggtcagccctgcagccctctctgtgagattgtcctcagcctgtgccttgggaagtagaattt

SEQ ID NO: 996517 - DNA, 120 bp, Artificial Sequence
  ENSG00000251396_43 (sequence is synthesized)
cctatatgttctccacttagcatgttatcaacaatataccccatcaggcactccataaataaatgaatggaaatcctccaaatcaggataaagctcaaatactgtctcttctgtgaagac

SEQ ID NO: 996518 - DNA, 120 bp, Artificial Sequence
  ENSG00000251396_44 (sequence is synthesized)
tacttggatcccccaatcaagaacaatcctttacacttcccttctctggctgcctgacatgagacatatttcctggtgttgactaaatccagggctcaccctaagatttttaccagagag

SEQ ID NO: 996519 - DNA, 120 bp, Artificial Sequence
  ENSG00000251396_45 (sequence is synthesized)
taagaatgtgggaataattgtatatcccatgggtggccacatgtatatatttatcccatcccacatgctcttcttgcagtctgacagacactcccccaccaggagctgggagtgacggga

SEQ ID NO: 996520 - DNA, 120 bp, Artificial Sequence
  ENSG00000251396_46 (sequence is synthesized)
gtgatgttctctactctttaattggggtatagtcttgtgcatctcttgactgccgcaacagggtatggtggaaggaatcccatgtggcttctgaggctaagaggctagatcacaaaaagg

SEQ ID NO: 996521 - DNA, 120 bp, Artificial Sequence
  ENSG00000251396_47 (sequence is synthesized)
ttgttttgttttgttttgttttgttttctctctatctctgtctcccatgaagcttacccttggaactcagctgctattttgtaaggaagtccatgcctctgctagatctgcagccaatag

SEQ ID NO: 996522 - DNA, 120 bp, Artificial Sequence
  ENSG00000251396_48 (sequence is synthesized)
tgcagccaatagccagcctcaccaccagatgtgtaaatgagcctcagatgatgccagcctcacccttcgagtcttccagttgaggccccattgtgcagaagacataaggcattcccacat

SEQ ID NO: 996523 - DNA, 120 bp, Artificial Sequence
  ENSG00000251396_49 (sequence is synthesized)
gccctgtctgaacttctgacccacaaacactatcagagataataaatgatcattgttttaagttactaagttttaagttacttaattatgcagcaataaatagataatcaatacaaaggc

SEQ ID NO: 996524 - DNA, 120 bp, Artificial Sequence
  ENSG00000251396_50 (sequence is synthesized)
gcatactgttccatgtataaatgtctaccgtatctttcatgccttcttccaaccctaacttgtaacacttttgtagcaattagtgcccaatttgcacatgaaatacaaatcatatttctg

SEQ ID NO: 996525 - DNA, 120 bp, Artificial Sequence
  ENSG00000251396_51 (sequence is synthesized)
aataaagatcatacatgaaagagccaggcagggtgttcagtaatatgaagtactcagtaaatgttaactacacacgaatttgctgaaacatgtttcttatgtttaaataatgaatttgct

SEQ ID NO: 996526 - DNA, 120 bp, Artificial Sequence
  ENSG00000251396_52 (sequence is synthesized)
tttccttgtatatcttgcctgtatgacacaaaaggacacagtctgatcacatcagttcagcaaaggcaagcctcatcagttggtaaaaaaaattggtttaatgaattgcaatcacacaaa

SEQ ID NO: 996527 - DNA, 120 bp, Artificial Sequence
  ENSG00000251396_53 (sequence is synthesized)
caaaactacaacttacttgattaagttttccacctctcatctggtttctctaccttatatttgtattctgattctgtccttttattggttttcctttccttttaagtccttggatgaatt

SEQ ID NO: 996528 - DNA, 120 bp, Artificial Sequence
  ENSG00000251396_54 (sequence is synthesized)
tttaaatatctattgcatttttttatgtggccaaagtctcttgaataaggtcttattgaaatttcttcaatggctggataaaattgcatcccaactcaatttttgcatcctggcacagga

SEQ ID NO: 996529 - DNA, 120 bp, Artificial Sequence
  ENSG00000251396_55 (sequence is synthesized)
agtggtctcaagtattgcagaactggatggagactcgtaggccctctgggcaggctaatactttgctttcccatcacatggatattcataaaatatttgttagatgttatgtaggagtga

SEQ ID NO: 996530 - DNA, 120 bp, Artificial Sequence
  ENSG00000251396_56 (sequence is synthesized)
ggctagagaaggctagcaggaccagggcttactcacattctggctctgtaagacagtgatctggctgtgatggccacagttgattggctgtcttctcagccctccgcaaatgcactcatc

SEQ ID NO: 996531 - DNA, 120 bp, Artificial Sequence
  ENSG00000251396_57 (sequence is synthesized)
gggagcaggttaaccttctcaagtagaggatgttcctgtgttctgtcaaggatatacaggacacagtctgtgccgatgcttttttcgtgcatgaaacatatcatcttaagaagatttgca

SEQ ID NO: 996532 - DNA, 120 bp, Artificial Sequence
  ENSG00000251396_58 (sequence is synthesized)
agtccgtttgtgtgtagtacagcagcaaggatcgtagacctggtgtcagcaagcctggacacacagtttctctgagcctttcaaatgaaggtcttggataaaatcacttttaaagctctt

SEQ ID NO: 996533 - DNA, 120 bp, Artificial Sequence
  ENSG00000251396_59 (sequence is synthesized)
gcctgctatattatttcatctctttcttatatgagctgcatgataaatgagtatagaaaaaagaatacacatgctttacaagagaaattcaaaagaattaacctatatatccttttaggt

SEQ ID NO: 996534 - DNA, 120 bp, Artificial Sequence
  ENSG00000251396_60 (sequence is synthesized)
taattaaaatagaattctgacttacgaggtttccatctaattcagagctaatactttaaagtttttacaaaatcttcgtaaaacaaaaccagtgagtaatatattaccaactataggatt

SEQ ID NO: 996535 - DNA, 120 bp, Artificial Sequence
  ENSG00000251396_61 (sequence is synthesized)
catgaaaaaatgggagtcaaatgaagcactgccacattgatcaaatcattgtacaatttttagaaataacagcatgtgaaccttgatgtcactgctgcaaatgcatttctatattttgtg

SEQ ID NO: 996536 - DNA, 120 bp, Artificial Sequence
  ENSG00000251396_62 (sequence is synthesized)
tatagttttgaaaaatttgtagcctgatgctacaaatatgtaatataatttccttcagaaaataatatttataattatcagtacccaatgattgcatgcaagagaagtttacttgttggc

SEQ ID NO: 996537 - DNA, 120 bp, Artificial Sequence
  ENSG00000251396_63 (sequence is synthesized)
tgaattacatttattgagaagtaagaaaataaaagatcctggaacgatcactacagtaacgaaacggctgagttgcccacagttaaactgctgggactaccagttggaaatcagacaatg

SEQ ID NO: 996538 - DNA, 120 bp, Artificial Sequence
  ENSG00000251396_64 (sequence is synthesized)
aagaaggagaagacatgagttctaataaggtgaaaattgttcttcagggaaaatggaatattaaacatagtttggttttgcaaacactctaggttatgtaaaatgtaaagatgaagctag

SEQ ID NO: 996539 - DNA, 120 bp, Artificial Sequence
  ENSG00000251396_65 (sequence is synthesized)
aaattcaagtctggaaagaactatagatacctagatacactgagctttgactacagtggcctatttatacatagctactggttacttccactgaattgtatttacgatttaaaatttatg

SEQ ID NO: 996540 - DNA, 120 bp, Artificial Sequence
  ENSG00000251396_66 (sequence is synthesized)
ggacgagttgggccagttaccagagtacaggacatttactttgtggactgccattcaatttgacaacagatttgtttttaatgtgcactttctggaaacaagatattgttcctcaaagaa

SEQ ID NO: 996541 - DNA, 120 bp, Artificial Sequence
  ENSG00000251396_67 (sequence is synthesized)
catcaagggataaaatctgaaaacttataaaggatacttattacagaaaaaatttaaggggaaactggtgctgtggagagacccatgtggaaaggaactgaggactcccggcaaaagtca

SEQ ID NO: 996542 - DNA, 120 bp, Artificial Sequence
  ENSG00000251396_68 (sequence is synthesized)
ccaaggaccgaggttgctgacagctgcatgtgaactcggaagcagatcaatccttgcccaagcccacactttgtctacagccttggggaagaaagggtgtgatatgtttcctcacccatc

SEQ ID NO: 996543 - DNA, 120 bp, Artificial Sequence
  ENSG00000251396_69 (sequence is synthesized)
atgagggtcactgccgatactcctgtgacaaaagacagacaggagaggggatcttacatgctgcatgcagcaggaagtcagcagcgatttttcatcaggaaagagatatgatgtgaactc

SEQ ID NO: 996544 - DNA, 120 bp, Artificial Sequence
  ENSG00000251396_70 (sequence is synthesized)
gagtgtgggcgcactcgtccagaaagctcatatctcaaaagatcttctggccttcttcctatgacctcagctccatgatggacccgctgattacctctgtcactcttgaaatgaagtcag

SEQ ID NO: 996545 - DNA, 74 bp, Artificial Sequence
  ENSG00000251396_71 (sequence is synthesized)
gacccgctgattacctctgtcactcttgaaatgaagtcagggaccccaaacggagggaccgatttattagttcc

SEQ ID NO: 996546 - DNA, 65 bp, Artificial Sequence
  ENSG00000251396_72 (sequence is synthesized)
ttttataatttcttatgtctgtctttactgcaatctctaaacataagttgtgaagatttcatggg

SEQ ID NO: 996547 - DNA, 76 bp, Artificial Sequence
  ENSG00000251396_73 (sequence is synthesized)
catgaaatctgggcaccttgaaaaaggaacaggataacagcaatgtttagggaacaagagagataaccttaaactc

SEQ ID NO: 996548 - DNA, 88 bp, Artificial Sequence
  ENSG00000251396_74 (sequence is synthesized)
aaatctgggcaccttgaaaaaggaacaggataacagcaatgtttcaccagtgagccgggaggaacagagccatatttctcttctttca

SEQ ID NO: 996549 - DNA, 74 bp, Artificial Sequence
  ENSG00000251396_75 (sequence is synthesized)
gcctgggggtaggtctatagatgaccccctgggtgtggccgtcttttatggtctgtagactgtaggggtgaaat

SEQ ID NO: 996550 - DNA, 120 bp, Artificial Sequence
  ENSG00000254060_0 (sequence is synthesized)
cgttgagtacagaaaaaatggaagcagcaagaaagagtagttcacagagctgccaaaagaggccactgtgaagataagatgaaggcaaaatataataataatcagatttctttaggcatc

SEQ ID NO: 996551 - DNA, 120 bp, Artificial Sequence
  ENSG00000254060_1 (sequence is synthesized)
aaaaagattataagtatgacaccggaaaaatagttctttctgcaaatcctcttcagtggtgtggtttaatgaaaactctgtaatctcctttccaagaggaccataattttcttgaattct

SEQ ID NO: 996552 - DNA, 120 bp, Artificial Sequence
  ENSG00000254060_2 (sequence is synthesized)
ggacacccacacagggagaatctcatgtgaagcctgaaggtatgctgccataaggcaaggaactgcaagcaactaagagacagacctggaacagatccttgcctagagccatcagaggga

SEQ ID NO: 996553 - DNA, 120 bp, Artificial Sequence
  ENSG00000254060_3 (sequence is synthesized)
acacggccctgccgacgctgggatctcagacttgcagcctccagaatgactaatggcattttaaatgagatgtgaaatttggactttactactgcagacctttggctatctagtcaaaga

SEQ ID NO: 996554 - DNA, 120 bp, Artificial Sequence; identical to SEQ ID NO: 823376
  ENSG00000270450_0 (sequence is synthesized)

SEQ ID NO: 996555 - DNA, 120 bp, Artificial Sequence; identical to SEQ ID NO: 823377
  ENSG00000270450_1 (sequence is synthesized)

SEQ ID NO: 996556 - DNA, 120 bp, Artificial Sequence
  ENSG00000225742_0 (sequence is synthesized)
atgctacatgctgagactacaaagatgagttagaatacattcctgtctctcaaaagctcaccttcacgtggaggagagacttaggcaagcccatgatttcagttccatgtggtcgagtga

SEQ ID NO: 996557 - DNA, 120 bp, Artificial Sequence
  ENSG00000225742_1 (sequence is synthesized)
agcccagtgagacagtggaggagaggggtcatgccactgcagttcctcgctatgccattcatacagagcattctccatgctcaggagtccaggagtccagtgggcccatgatgcccagga

SEQ ID NO: 996558 - DNA, 120 bp, Artificial Sequence
  ENSG00000225742_2 (sequence is synthesized)
gctcgtcgagactcagggaggtgcggaagacctacttaaaacctgagagtctcgaataggagaggcgctttcagatcagcccgagtcttctgcagcgcacaggagctagtcgtactgaaa

SEQ ID NO: 996559 - DNA, 120 bp, Artificial Sequence
  ENSG00000225742_3 (sequence is synthesized)
agaatgaagttggacttgtccaggcgagtttcggacagtgctgggctgccctgctctgatctcctgggtgtcttcacctcctctggttcctaagtcggctgctgcaccagcacccatcaa

SEQ ID NO: 996560 - DNA, 120 bp, Artificial Sequence
  ENSG00000225742_4 (sequence is synthesized)
aagaggaagtgacagctcaccggtagcctagaaggcccctgtgggcagaagcatggacttactcctcctcatggagatgcggctgagccatatttccttggcacctctctggaaccttcg

SEQ ID NO: 996561 - DNA, 120 bp, Artificial Sequence
  ENSG00000225742_5 (sequence is synthesized)
acaaccaccacctcagacactaaccagactttaggtccattcctttcatggctaaaatgagacagtccacaatgttgattttatttgtaggggatgtcaggattccagaaaagcagactt

SEQ ID NO: 996562 - DNA, 120 bp, Artificial Sequence
  ENSG00000225742_6 (sequence is synthesized)
ggaaagcaacaaaacgttaacttgcagctcactgaggcccttacacttgttctgggcacctctgtatgttaaaagaagtccaatatctttagctgctggttataggtggccatatgtttc

SEQ ID NO: 996563 - DNA, 120 bp, Artificial Sequence
  ENSG00000225742_7 (sequence is synthesized)
tgcacagaaatggggctccccttgctagactaattttctaatttttcctcaagcttcattgattcatattcttctacttgaccctgactgtcaggaccaacaacaccaaataacaccaaa

SEQ ID NO: 996564 - DNA, 120 bp, Artificial Sequence
  ENSG00000225742_8 (sequence is synthesized)
ggctccccacgaggcagcaaacattagagtcactcttttgtgaaattatggggaggctgagtgggccaagcacttgtgtgtgtgtgtgcatatgtgtgtgcatgtacgcctgtgtgtgag

SEQ ID NO: 996565 - DNA, 120 bp, Artificial Sequence
  ENSG00000225742_9 (sequence is synthesized)
gagacacacagatgtgtataaagagaggaatgccgtctgttagcaactgtggcattgatttataatcacttcctgtagtcacagaatgactgagtggcgtctttcaattctcacgattaa

SEQ ID NO: 996566 - DNA, 120 bp, Artificial Sequence
  ENSG00000225742_10 (sequence is synthesized)
aaaaaaaaagagatggtgaaaaaaaatcctaagtgctaaatatctatgtattatgtattattattcttaagagcttgcaaaagccttataacatgtatgatttacaattaatgggcctaa

SEQ ID NO: 996567 - DNA, 120 bp, Artificial Sequence
  ENSG00000225742_11 (sequence is synthesized)
ttcttccaatacagatttcttccttccatgactatataattcaagttatactgctaaatattttataatgagagtacaaattatgatggcctttgtaactgttttcatgggagcatttat

SEQ ID NO: 996568 - DNA, 120 bp, Artificial Sequence
  ENSG00000225742_12 (sequence is synthesized)
tattgggctgatgttgatgggttagtagatttgtgcatatccgtctctcttatccattgctttatgagtggacaagaagtgtgggaatgcgtgctgtgaacatgtggtcactctagactt

SEQ ID NO: 996569 - DNA, 120 bp, Artificial Sequence
  ENSG00000225742_13 (sequence is synthesized)
atgctgagactacaaagatgagttagaatacattcctgtctctcaaaagctcaccttcacgtggaggagagacttaggcaagcccatgatttcagttccatgtggtcgaggtgcggaaga

SEQ ID NO: 996570 - DNA, 120 bp, Artificial Sequence
  ENSG00000225742_14 (sequence is synthesized)
ggagggaggagtgtggaaagcagggctttatgtccacattgatggcagctctgaaaagccgacctacatgcagagaaaggcgggaggggctgctgggagaagtctgctggagcttgttca

SEQ ID NO: 996571 - DNA, 120 bp, Artificial Sequence
  ENSG00000225742_15 (sequence is synthesized)
tgctcctgtcctcagaacctctcagaggcatcctctgccctgttggagccattttatttcaggttgatccttaattaaattcagcgagatgcaggacctgtgtgtgtgagtgtggatctt

SEQ ID NO: 996572 - DNA, 120 bp, Artificial Sequence
  ENSG00000225742_16 (sequence is synthesized)
gtgtgtgaatgtggacctgtgtgtgtgaacgtgggcctgtgtgagtgtgggcctgtgtgtgagagtggacctgtgtgtgtgagtgtgggcctgtgtgtgagtgtggatgtgtgtgtgtga

SEQ ID NO: 996573 - DNA, 120 bp, Artificial Sequence
  ENSG00000225742_17 (sequence is synthesized)
gtgtgggcctgtgtgtgtgagtgtggacctgtgtgtgtgagtgtgggcctgtgtgtgagtgtgcaactgtgtgtgtgtgaatgtggatctgtatgtgaacatggacctgtgtgtgtgtgt

SEQ ID NO: 996574 - DNA, 120 bp, Artificial Sequence
  ENSG00000225742_18 (sequence is synthesized)
gtggacctgtgtgtgtgaatgtggatctgtatgtgaacgtggacctgtgtgtgtgtgtgtggacctgtgtgtgtgaatgtggatctgtatgtgtgaatgtggacctgtgtgtgtgagcat

SEQ ID NO: 996575 - DNA, 120 bp, Artificial Sequence
  ENSG00000225742_19 (sequence is synthesized)
ggtatttacaatcagcaggaagaagcctggaaatgagtcctgattaaatgagaatctaaatacagaacaagtaccctaggagttctagaaagatgaataattctcaacccagcatagtaa

SEQ ID NO: 996576 - DNA, 120 bp, Artificial Sequence
  ENSG00000225742_20 (sequence is synthesized)
cagcagcttacaatatgtttgtgtatgtcataatggagtggtttctgttacatgtgtaatgctggtatcataagaagagtattgtcatgctcacaggatgtcaggtacagaaggttataa

SEQ ID NO: 996577 - DNA, 120 bp, Artificial Sequence
  ENSG00000225742_21 (sequence is synthesized)
gcgtctcgggctttccccgcccggtcgtcggctccagcgccgcccccgcggctgccttcgctgctgccctcgctgtcagggaccgaggccaggagaccgcctggcacttcgccctgtccc

SEQ ID NO: 996578 - DNA, 120 bp, Artificial Sequence
  ENSG00000225742_22 (sequence is synthesized)
aaacctgggactccaggggcctcctgctggggccgcgagcatcagactttcagagctgaaatcacttcatcaagaaatgccagttaacccttgcccagttcagcctcttgctggggtttt

SEQ ID NO: 996579 - DNA, 120 bp, Artificial Sequence
  ENSG00000225742_23 (sequence is synthesized)
ggaggggtcaccagggatgcccctgggaagtttacccaaatccccctggctcaatgaaccgagactgcccccttgcctttgttcatcagccctgctctgatctcctgggtgtcttcacct

SEQ ID NO: 996580 - DNA, 120 bp, Artificial Sequence
  ENSG00000225742_24 (sequence is synthesized)
attaaaaggagggggctggccaatgaataaacatgcaggttaccgtgttgatatttcgctgaatgctgttctgaagtggggtgtttggggcctcggaggccggcgcccctgtattgtgct

SEQ ID NO: 996581 - DNA, 120 bp, Artificial Sequence
  ENSG00000225742_25 (sequence is synthesized)
tggccacgctactgatttcctcacatccgcaggggcggccccagcacgtggcccatttttcatccagtcactttgctggcacttggcgaacgcctgtctctccctgggctctgtcccggg

SEQ ID NO: 996582 - DNA, 120 bp, Artificial Sequence
  ENSG00000225742_26 (sequence is synthesized)
acccacagcaaactctcatccttcttcccgttggcacttcttcagctcccaagtcctctctgtgttttctcttctccaggcaaatccctgggttttccatccatgcttcactggatgcag

SEQ ID NO: 996583 - DNA, 120 bp, Artificial Sequence
  ENSG00000225742_27 (sequence is synthesized)
tttccaaacccttcttccttgtagtttctctcccctggatatgctccagctgcccagggcccatttcaagaatttcttgaacacttttgctgatgaacttgacttctgccttcaaagcga

SEQ ID NO: 996584 - DNA, 120 bp, Artificial Sequence
  ENSG00000225746_0 (sequence is synthesized)
gtgctcatgaatttaaaaaaatattattgtaaaagaatcaagggcaggatgaataaatcagtgtataaatgaagaagataaggagaatggatgcactgagctgattatgaatttagccct

SEQ ID NO: 996585 - DNA, 120 bp, Artificial Sequence
  ENSG00000225746_1 (sequence is synthesized)
gatgaagacttgtgttgctgtcatgatatgaaagattccagtaatgaacgcacttgagttgattcaagcacgcttccatggtcatgagctctgtggttgcatctgtgtgttaggagcatg

SEQ ID NO: 996586 - DNA, 120 bp, Artificial Sequence
  ENSG00000225746_2 (sequence is synthesized)
cagaccaatatttttgtgtatttctttgttaatacattaataaataaacaaatttagatgggaatagagaaagagggctgatcctggaccagtgatgaccactggtggcatatgagtcat

SEQ ID NO: 996587 - DNA, 120 bp, Artificial Sequence
  ENSG00000225746_3 (sequence is synthesized)
acacatgaacaccatgtttctagaactctgaggtccaacacaaatgggatctagtccattcctcctttgtgaagggatccaatggacagatatcaggatatgcaaggatctttttcggga

SEQ ID NO: 996588 - DNA, 120 bp, Artificial Sequence
  ENSG00000225746_4 (sequence is synthesized)
tttttgtgttagtatttaaaaaatattattgtaaaataatcaagggcaggataaataaatgaatgtataaatgaacagaaatgaagagagtgaagcattgtttattgctaaaatatgtaa

SEQ ID NO: 996589 - DNA, 120 bp, Artificial Sequence
  ENSG00000225746_5 (sequence is synthesized)
taaagaaaatggattattagtataagttagaatggataatatatggatcgagtttattatgtcttggattaaagatgagtcaactgtgatggataatagttattactctcagttacatgt

SEQ ID NO: 996590 - DNA, 120 bp, Artificial Sequence
  ENSG00000225746_6 (sequence is synthesized)
tagttattactctcagttacatgtttgaagttcattttattgagagaaaaataagcaaatattcctataaattattattattattattattactttgagatggagttttgctcttgttgc

SEQ ID NO: 996591 - DNA, 61 bp, Artificial Sequence
  ENSG00000225746_7 (sequence is synthesized)
gcagtggcacaatcttggctcactgcaccctccgcttcctgggttcaagtgattcccctgt

SEQ ID NO: 996592 - DNA, 120 bp, Artificial Sequence
  ENSG00000225746_8 (sequence is synthesized)
attattaaaaaccaaaaagatgatacaaacgaatagtggaatatatcagtcagtggagagaaattctccattttttatcatcttctctggtttgtgtgaagatgaatcagaatggatgca

SEQ ID NO: 996593 - DNA, 120 bp, Artificial Sequence
  ENSG00000225746_9 (sequence is synthesized)
cacagtattattaaaaattttaaattattataaaattaaccatggcccaatggttaacataatatagaacagtatgtttattaatcaataatgtgccacacagaggtgaatgaatgaaag

SEQ ID NO: 996594 - DNA, 120 bp, Artificial Sequence
  ENSG00000225746_10 (sequence is synthesized)
cgacattgtctaatgtggaaaaggattctgtagacagatgcttggtatgtctggcatcatgttcataggtttttgtgaatcatgttcttattttactcttataaattgattaatgattta

SEQ ID NO: 996595 - DNA, 120 bp, Artificial Sequence
  ENSG00000225746_11 (sequence is synthesized)
ttcaaaacaaaggtagaaatgagtgaaaattgagaccaatgatggcgtgagccatatacaatgagtaaaacatgtctggactttgatgtccaacacaaaagacatatagtccatattctt

SEQ ID NO: 996596 - DNA, 120 bp, Artificial Sequence
  ENSG00000225746_12 (sequence is synthesized)
gatataaggcatcctctaggcccatgttgggaatatccgaggatcttgggcttgatctttgtgttcatatattttcattctagtattataattggaccagtgaaataaccaatcaataag

SEQ ID NO: 996597 - DNA, 120 bp, Artificial Sequence
  ENSG00000225746_13 (sequence is synthesized)
taaataaattaatgaagtattgttcaaattaaaaatatgtagtgagcaaagaaacactactaatatattatgaaaacactaaactctaatttgaaatacattttacatgactcttacctc

SEQ ID NO: 996598 - DNA, 120 bp, Artificial Sequence
  ENSG00000225746_14 (sequence is synthesized)
cttagctcaggatggtgtagatggtataacttacagacactgttcatgttctggatagatggcgattttgaatttgttcattctcttaagagaaaaaagtaatctaaatgtgtgattact

SEQ ID NO: 996599 - DNA, 120 bp, Artificial Sequence
  ENSG00000225746_15 (sequence is synthesized)
gaaatgactgactaaaggtgaaaagcaaggattaatggagagaacgtctcagatgtctgttcttcttcattttaaaatcatctattctgttctgtatttctcacactggacccatctgag

SEQ ID NO: 996600 - DNA, 120 bp, Artificial Sequence
  ENSG00000225746_16 (sequence is synthesized)
ctgatttaagaattctcccatggttatgactgtatgattgaatctctgttaagaccaatgtgagtaagagtcaaaatttttgtcatggcttgggtggtttgtttaaggatgttcagtata

SEQ ID NO: 996601 - DNA, 120 bp, Artificial Sequence
  ENSG00000225746_17 (sequence is synthesized)
ttattaaaaagtgtgaaatataatcacaaaaggcctaatgtaaacatcgtaatttgggattaatatgaatcattatattgattaatgcatatatgaaaaactgaggataaatgataaaat

SEQ ID NO: 996602 - DNA, 120 bp, Artificial Sequence
  ENSG00000225746_18 (sequence is synthesized)
ttaaatactgacatgtgaataatgatggctacctaacaaattggtatgcttttgttggaggtttgtgaatcataggctttaaaaaatattatcagtgaatttatgaattaatcaataaac

SEQ ID NO: 996603 - DNA, 78 bp, Artificial Sequence
  ENSG00000225746_19 (sequence is synthesized)
ctccatctcaatgttccaatagtttcccaaatcatgctgatgctgcctcctgagaaatattttcagaatcactgagaa

SEQ ID NO: 996604 - DNA, 120 bp, Artificial Sequence
  ENSG00000225746_20 (sequence is synthesized)
gatgctgcctcctgagaaatattttcagaatcactgagaaaaatgtatgaaatagttaatgtccttgctctgtgtcagtggtggaggctgtctgcagtaggagcatggagaccaacaatg

SEQ ID NO: 996605 - DNA, 120 bp, Artificial Sequence
  ENSG00000225746_21 (sequence is synthesized)
gatgctcttaaactgatttaagcacgcttccatggtcagaagccttatggttgccacagggtattaggagcatggagaccaataatggatgtccttgttctgatttgaggatgcctccaa

SEQ ID NO: 996606 - DNA, 120 bp, Artificial Sequence
  ENSG00000225746_22 (sequence is synthesized)
ggtcacatactctgtttgcaccacgcttaggaaggagcgtgaagaccaagggaagatgataaacacagatcatggaggactgttttatctgtttgtgatctgccgtcctctgtgagcctc

SEQ ID NO: 996607 - DNA, 120 bp, Artificial Sequence
  ENSG00000225746_23 (sequence is synthesized)
atagtgataatctcgaggtgatttatgcattcttccatggccaccagccttatgattgcatctgtgcgtcacagcttagagatcaataatggatgcaacaagctctttgaatcattctgt

SEQ ID NO: 996608 - DNA, 120 bp, Artificial Sequence
  ENSG00000225746_24 (sequence is synthesized)
agaatggatacgctcaggtgatttaagcagtcttccatggccacgagctctgtggttgcctctgtatattaagagcacagagattaaaaatggccccattccagctgatataagcactct

SEQ ID NO: 996609 - DNA, 120 bp, Artificial Sequence
  ENSG00000225746_25 (sequence is synthesized)
tccatggcatgtgcactatggttggttctctgtgttaggagcacacaaaccattgcgagtatgcattcatttcctctctttacaagaatgggtgcacttgagccgattgaaacattcctc

SEQ ID NO: 996610 - DNA, 120 bp, Artificial Sequence
  ENSG00000225746_26 (sequence is synthesized)
cttgcatctttcttctgtgattgcatctatttgttagtagcatagagaccaataatagatggcttgtgctgatggaaggattcctccctggtgacatgctgtgtctgcctcttgattggg

SEQ ID NO: 996611 - DNA, 120 bp, Artificial Sequence
  ENSG00000225746_27 (sequence is synthesized)
agcacgcagacctacaatgatgcactttttatgatttgagaattccttcatggtcacgtgctctgtttttatcatggttgggagcctgcagagcaataagggacatgcctttgctgattt

SEQ ID NO: 996612 - DNA, 120 bp, Artificial Sequence
  ENSG00000225746_28 (sequence is synthesized)
gaggattcctctgaggttgggagctaagtttgcatcatgcttagaaaggagtgtgcagacctgtaatgattgcactttgctgattgaaggattccttcaagtccatgtgctccacttgca

SEQ ID NO: 996613 - DNA, 120 bp, Artificial Sequence
  ENSG00000225746_29 (sequence is synthesized)
ccatttttaggatggagcctggagacctataatgaacaacttgtgctgtgttaaggattcctccatgatcacgcgccccatttgtacaccatgcttgggaaggtgcatgcagaccaataa

SEQ ID NO: 996614 - DNA, 120 bp, Artificial Sequence
  ENSG00000225746_30 (sequence is synthesized)
tggacgtacttgtgatgatttaaagatgcctccaaggtcacgtgctctgtttgcaccatgcttaggaaggagcgtacagaccaaaaatggatgaattgtgcaccttgaaaagttcttcca

SEQ ID NO: 996615 - DNA, 120 bp, Artificial Sequence
  ENSG00000225746_31 (sequence is synthesized)
tggtcacctgaggcatctgcgtcatgattaggctccggatgactaataacagtcactccctgcactgattctgccatgaccacttgctctatggttgttttaaggaacctacagacaaat

SEQ ID NO: 996616 - DNA, 120 bp, Artificial Sequence
  ENSG00000225746_32 (sequence is synthesized)
tctgcgtcatgattaggctccggatgactaataatggacgtacttgttctgatttgaggacttcttcatggtcacatgttctgtttgcaccatgcttaggaaggagcatgtgtaccaata

SEQ ID NO: 996617 - DNA, 120 bp, Artificial Sequence
  ENSG00000225746_33 (sequence is synthesized)
atggaagcacagaagctggttttaatagttaagagctgtatggtccatctctgtgctagaagctggagaccaataacagtcactccctgcactgattctgccatgaccacttgctctatg

SEQ ID NO: 996618 - DNA, 120 bp, Artificial Sequence
  ENSG00000225746_34 (sequence is synthesized)
cattggtgaagatcttagctgttccatagaaggaacacacttatcactacagtgattctgtaatgatgaagacctttatgggatgggtagaccagagctgattaaattattctcccattg

SEQ ID NO: 996619 - DNA, 120 bp, Artificial Sequence
  ENSG00000225746_35 (sequence is synthesized)
atgaggaactttaccttatccctcagagtaaggagaatgtcatataatgtaagtaataaagttcttgagttgggttgttggttcatgatttctactgtcatttaaaaagataattaaatt

SEQ ID NO: 996620 - DNA, 120 bp, Artificial Sequence
  ENSG00000225746_36 (sequence is synthesized)
ttaaaaggtcatactaggcctatgatgagaatgtgttgtggaccgaaattaatccaatttagcacaaatgaagtgtaagaaaaaatttagctttcccattcattttcaatagttaaatgt

SEQ ID NO: 996621 - DNA, 120 bp, Artificial Sequence
  ENSG00000225746_37 (sequence is synthesized)
cacattgtatgtttgtctcattgattatttaaagactcttctcttgataaaggctgttactcatttatggagtcagtattctagttgttgagtaggatggtggttcaagtttgttcattt

SEQ ID NO: 996622 - DNA, 120 bp, Artificial Sequence
  ENSG00000225746_38 (sequence is synthesized)
gatatctaaaagttgttcaaattaaatgtagaggggccatgtctggaccaatgatgtgaatggaatgcatctgaataaaaattatgatcaatcagtttttggaacaactgaggtccactg

SEQ ID NO: 996623 - DNA, 120 bp, Artificial Sequence
  ENSG00000225746_39 (sequence is synthesized)
ataaaaagtgtgtgacattatcaaagatgtccgcctgcatcccagtgaaagatatggaaacgatacgaagcgttgtattgataatgcatatataaaaacctgaagatagttaattaagag

SEQ ID NO: 996624 - DNA, 120 bp, Artificial Sequence
  ENSG00000225746_40 (sequence is synthesized)
gtgtatcaatgttggaataattcagtatacaaattaggaatattaaagttattctcaggatttttttgaactataaagtcttaaaattgctattagtgaattaacaaatcaatccataga

SEQ ID NO: 996625 - DNA, 120 bp, Artificial Sequence
  ENSG00000225746_41 (sequence is synthesized)
cagggtagaaatgaatagagaaagagatgaacaatcctggatcgatgatgactgctggtggcgtatgagtcatatgcgatgaatacgtgtctagaactctgaggtccatcacagaagaaa

SEQ ID NO: 996626 - DNA, 120 bp, Artificial Sequence
  ENSG00000225746_42 (sequence is synthesized)
gaatctagttctggagcttgagagggttcacaggtactgattttatatgattagcagatccacttgtgtggatcaacacacaagtatattcatgagtaaagaaaaagaggttaagacatg

SEQ ID NO: 996627 - DNA, 120 bp, Artificial Sequence
  ENSG00000225746_43 (sequence is synthesized)
gaccaattctgagggcatgttgtaaagcaaggaatataattaattcaattctgaaataccttggtccatcaagaaaaaaaacagattaaatttgtcaccactttgggtaagaagcatcta

SEQ ID NO: 996628 - DNA, 120 bp, Artificial Sequence
  ENSG00000225746_44 (sequence is synthesized)
gatagaagtacttaatagtcaatgttctgttcttagtttgctgtgggttcccagatgtttgattcattaagacaaaaaaattaaaattaaacaaacaaatacgtgtataactaaataaat

SEQ ID NO: 996629 - DNA, 120 bp, Artificial Sequence
  ENSG00000225746_45 (sequence is synthesized)
gggtgccaagtatgaaccaatgataagggtacttcattattttctatatctgctttgtaaccccacagaacagaggtaacttggctgttttaataattatttaaaggatgaagatcttga

SEQ ID NO: 996630 - DNA, 120 bp, Artificial Sequence
  ENSG00000225746_46 (sequence is synthesized)
ctgttacccatgtggcaaggagagtgtagaacagggtgagtcagattaagtttttattcttggtttagccttttgttagagatgatgattaattattatttgaaaagaagaaatgacttt

SEQ ID NO: 996631 - DNA, 120 bp, Artificial Sequence
  ENSG00000225746_47 (sequence is synthesized)
atgcagtcataaaatccaagaagaccatgcctgaaccaatgataagaatgaatcctgccaagtgtcatggttaattcattttgcaaaacgagatccatttaaaaagaggtttggtttgct

SEQ ID NO: 996632 - DNA, 120 bp, Artificial Sequence
  ENSG00000225746_48 (sequence is synthesized)
atctcttagattaaggagattataggcagattctagccttggtcaaagatcttgtttttgggttagttgtggttctcttgagttttgttattttattaaaaataataaatagttaaacaa

SEQ ID NO: 996633 - DNA, 120 bp, Artificial Sequence
  ENSG00000225746_49 (sequence is synthesized)
gtacaaagcatttatgctagtaaaattacaatggccactcatgaccaatttggagattatatcatgaaacaaggatttgtttaactttggttaactgttttatcactgtttgaggaggtc

SEQ ID NO: 996634 - DNA, 120 bp, Artificial Sequence
  ENSG00000225746_50 (sequence is synthesized)
atggaaagatttaaatgatagtcaatttctcccctctttcttgggagtagattctttgttgttgactttgtttttgaaaatgagtgactgactaaattaatgaacgacaaaaacactaga

SEQ ID NO: 996635 - DNA, 120 bp, Artificial Sequence
  ENSG00000225746_51 (sequence is synthesized)
atggacaagaatattcaaatgatgacatttcatgaagcaagaattatgatcaacacaattctgcttccctgaaatccatttaacagaaaagagtcaatctgttttctctgtgtataatga

SEQ ID NO: 996636 - DNA, 120 bp, Artificial Sequence
  ENSG00000225746_52 (sequence is synthesized)
ggtcagaaacaggtgttaaaatattcagtgttcttgtttttgtattttggtgggttcatggagttgattattatgattaaggaaataagtatatgaaaaagtaaattacaagagggtaaa

SEQ ID NO: 996637 - DNA, 120 bp, Artificial Sequence
  ENSG00000225746_53 (sequence is synthesized)
tcatgaaccagtgattaaaatgtgttttgaaacaaagattgtaggtatttcagttctgcactgtggacttttatgaaatgaaaccttaatcttttgtatctttattttaatagtacatag

SEQ ID NO: 996638 - DNA, 120 bp, Artificial Sequence
  ENSG00000225746_54 (sequence is synthesized)
taccattctgcatatactatggatatattttagacattttctcatgctacttacattcagtttttttcactatctgagttataaattctagtgaattgatttatttggaggtggtggtag

SEQ ID NO: 996639 - DNA, 120 bp, Artificial Sequence
  ENSG00000225746_55 (sequence is synthesized)
gaaacccctatgccccatattttaaaattttctggcagctgatatctaagagagtactaaaatgactaatattaaggtattaatttcagctcaacaagtattgatgctaactcttgtcag

SEQ ID NO: 996640 - DNA, 120 bp, Artificial Sequence
  ENSG00000225746_56 (sequence is synthesized)
accccatatgaggagtgaaatttatatatgaatttagtctagttccactcattgagtagctctgtgagattagatggagacccacttacaaatgcagcaattcaatagaatagggcaggt

SEQ ID NO: 996641 - DNA, 120 bp, Artificial Sequence
  ENSG00000225746_57 (sequence is synthesized)
agatgggttctctgtgagactagagggagacccacttatacatgcagcaatttgataaaataggacaggtagatgggctttctagaagcacagaaggtatgccttcagctcaatctcagt

SEQ ID NO: 996642 - DNA, 120 bp, Artificial Sequence
  ENSG00000225746_58 (sequence is synthesized)
gtcagttgagttgtggaagagatgactcctgagccagtgacagactcattagtccatagctccgcaaagctggggaccacactcctctccttcactgctctgccccttgtgccttacatg

SEQ ID NO: 996643 - DNA, 120 bp, Artificial Sequence
  ENSG00000225746_59 (sequence is synthesized)
gacagcacatgcaataagcatctgttgaatgaataggtgaatacatggtgaataaaagaatggaggagtgaagcagtatatgaacaaatgagtctttgagtagacaaaggaacgaataaa

SEQ ID NO: 996644 - DNA, 120 bp, Artificial Sequence
  ENSG00000225746_60 (sequence is synthesized)
acatcatggaccagtgatgaatatcatggggtttctgaaacaacatttttgattaaacccatctgcaactctgaggtccattacaaagagacacctctttattcttcatggaaaatgagt

SEQ ID NO: 996645 - DNA, 120 bp, Artificial Sequence
  ENSG00000225746_61 (sequence is synthesized)
ctaggaccttgttcatgggccttttgtggtttgaggaatgaacgcactctacctgatttaattatagtcttctggtgaagatcttgctgttatctctgtgaatcaggagagaagagattg

SEQ ID NO: 996646 - DNA, 120 bp, Artificial Sequence
  ENSG00000225746_62 (sequence is synthesized)
ataaggaatagacgagattggatttggtcatttccccaaggtgaagagcatggcgatttcttctgtggtaaggagcaataatgaagaccatggttgatttaatcagtctctgctgatgaa

SEQ ID NO: 996647 - DNA, 120 bp, Artificial Sequence
  ENSG00000225746_63 (sequence is synthesized)
gatcttggctgttacctttgtgtaatgaatgcgcaatgattcaattattctccagcgaggaagatcatggttgttgtctgtttgagtaatgagtgtagaaacctataatggaggcgtgat

SEQ ID NO: 996648 - DNA, 120 bp, Artificial Sequence
  ENSG00000225746_64 (sequence is synthesized)
gatgcaatcattttccactgatgaaggttttgatggccacctgtaatgaacagccccatctgatttaatcactgtgcaatgaccgtgaactgtacagttacctccgtgtgtcacaggaag

SEQ ID NO: 996649 - DNA, 120 bp, Artificial Sequence
  ENSG00000225746_65 (sequence is synthesized)
actcttttgacttaagcacccttccatggtcatgaggtttctggttgcctctgtgtgttagaagcttggagaccaatgccttctgctgtgatcgcgttctccacagttgcctctgggtag

SEQ ID NO: 996650 - DNA, 120 bp, Artificial Sequence
  ENSG00000225746_66 (sequence is synthesized)
gagcctggacactaatagaaaatggatgcactggagctgatttaaacattctttggtggtcacaagatgtatagctgcctctgtatgtttggcgcatggaaaaaaatatgagtttttgtg

SEQ ID NO: 996651 - DNA, 120 bp, Artificial Sequence
  ENSG00000225746_67 (sequence is synthesized)
gacatacactctttatttgaaaagtatgaaatataatccaagaaagccagccatggctcagtgataaatatggaattgatatgaaacattatattgattaatcacctttgaggatgatta

SEQ ID NO: 996652 - DNA, 120 bp, Artificial Sequence
  ENSG00000225746_68 (sequence is synthesized)
ataaaagagagaaagtgattctatatagagatgcaggactatttcaggctcattcatgatctaggtttttgtgcttcatggttattttattatcatcaataaaaagaaaaaagaaaaaaa

SEQ ID NO: 996653 - DNA, 120 bp, Artificial Sequence
  ENSG00000225746_69 (sequence is synthesized)
ttagggtaaatttttcattaatgttcactgaattatttaaagttaaggcatatgtagatcaatgagatgaatgtgttatgaaacttagattgtggttagtccaattaagcacaattttgg

SEQ ID NO: 996654 - DNA, 120 bp, Artificial Sequence
  ENSG00000225746_70 (sequence is synthesized)
ttaaaaataagatgaaagacattttattcatttttttatctgattaataattcatcttattttgtactgcatttaatttaagatttattcactaataaaatctatggctgcactgttcaa

SEQ ID NO: 996655 - DNA, 120 bp, Artificial Sequence
  ENSG00000225746_71 (sequence is synthesized)
ggaccaatgatgagattggagggtgtctgaatcaaaaattttgattaaagccatctgtaactctgaggtccattttaaaaagaggcccccatttttccctctagggaaatgagcttataa

SEQ ID NO: 996656 - DNA, 120 bp, Artificial Sequence
  ENSG00000225746_72 (sequence is synthesized)
gcctggacactaatagaaaatggatgcacttgagccgacctaagcattcatggtcatgagatttgtggttgccactgttggttaggagcatagagatcagtaatggacacacctgggctg

SEQ ID NO: 996657 - DNA, 120 bp, Artificial Sequence
  ENSG00000225746_73 (sequence is synthesized)
gcagaacatcttgccttgatctggagccccatgtctgcccctctgtagaggtgcacatgggccaatgatggatgcaatgagctgatcattttgctgtgatcaaggctatgttgcctctgt

SEQ ID NO: 996658 - DNA, 120 bp, Artificial Sequence
  ENSG00000225746_74 (sequence is synthesized)
gttaggccaatggttgatgttcatgggtgattgatcatcctgtagcgacggtggtattgactgttccccagaggacaaggagtgtgttcttataatggacatcatgattgggattgtctt

SEQ ID NO: 996659 - DNA, 120 bp, Artificial Sequence
  ENSG00000225746_75 (sequence is synthesized)
tattaaactttgtcaggagagtaaagatcaatgtggccacatgttgtggctcatgcctgtaatcccaacactgtaatcccagcactgtaatcccagcctgtaatcccaggctgaggtggg

SEQ ID NO: 996660 - DNA, 120 bp, Artificial Sequence
  ENSG00000225746_76 (sequence is synthesized)
tacctgttaaagttcttgctatggttccagtggtttgcttcctaactgtgttatttagaaatttgaagtatatttaatgaatgtcctcccttcccactggccctgccaggcatgctgcca

SEQ ID NO: 996661 - DNA, 120 bp, Artificial Sequence
  ENSG00000225746_77 (sequence is synthesized)
tctgttctctgggacttgtgagtagtacactgctcctgttatttcatgtgctttgctaagttgtttcttctgtgtctcaactgatcaacacacccagacctaactgatttccaggttggg

SEQ ID NO: 996662 - DNA, 120 bp, Artificial Sequence
  ENSG00000225746_78 (sequence is synthesized)
gctctcctagagagtgcctctcttggtaggaataaactggacacagacaagagcctccatggtgtctgcctgtataaccaagttttctatgagagggacaatgggtcatagattgaacac

SEQ ID NO: 996663 - DNA, 120 bp, Artificial Sequence
  ENSG00000225746_79 (sequence is synthesized)
ttgggcattacatctgtgagaataagtctatagtaaatttcagtaaatttgagggatctaattatggggtttcagtagatcctggggatttattgcattattcgaaggaaataaatgaaa

SEQ ID NO: 996664 - DNA, 120 bp, Artificial Sequence
  ENSG00000225746_80 (sequence is synthesized)
gaatcagcaaaacatacagacacacatataaataattaaagatgaagaggataaagctggattaattgaggaaaatgctatcagacaggaatttttggttctgtaattctgaaacactgc

SEQ ID NO: 996665 - DNA, 120 bp, Artificial Sequence
  ENSG00000225746_81 (sequence is synthesized)
aatgcattaagaaacctgtacatcaagggtgtcacctgtctagggtagggtaatatagagtagttgttctcaaatgcgagcattggagtgacctggagggcttgtaaaatacagaaggtc

SEQ ID NO: 996666 - DNA, 120 bp, Artificial Sequence
  ENSG00000225746_82 (sequence is synthesized)
tgtttgcaccacgcttaggaaggagcgtgaagaccaaggggagtaatagtcaaagtccttacctttgtttgggtggtttgtttaagagtaatcaacgtattatttaaaagtgtgaaatac

SEQ ID NO: 996667 - DNA, 120 bp, Artificial Sequence
  ENSG00000225746_83 (sequence is synthesized)
agtcaaagatggccaatgttattccagtgatatgggagtgacatgaagtattatattgatgatgcatatataaaaaacaggatagttaatgaaacacccaatgtttgagtgattctgtat

SEQ ID NO: 996668 - DNA, 120 bp, Artificial Sequence
  ENSG00000225746_84 (sequence is synthesized)
actgatagggaatatcaagagtgttactgggttttgtgaatcacgggccttgaaagtattattaatgaataaatgacataatcaatagacaaggtagaaatgaatagcaaaaaaaaagaa

SEQ ID NO: 996669 - DNA, 120 bp, Artificial Sequence
  ENSG00000225746_85 (sequence is synthesized)
cttggaggggtgaggggccctgttagtctgactttgaagaagaccagccttccagactcgcttggtgccctgacagcagcttgtgtttcttccttcaagagtctgcttagagataataaa

SEQ ID NO: 996670 - DNA, 120 bp, Artificial Sequence
  ENSG00000225746_86 (sequence is synthesized)
gatcaacactattccttataacaacacctcagtatcctgcgagctgtacacaccagagtttatttaaccaccttgctgctggcatgaaagcctcaggagccctgggctcccccagtgttg

SEQ ID NO: 996671 - DNA, 120 bp, Artificial Sequence
  ENSG00000225746_87 (sequence is synthesized)
cctgggtctgactttgcctcagtgaaaactgcctcgaattctttcttgcaccgatgggcagatgggcagtgtcggaggatcgtgtcatctgtcccgtggcgctggttggcttggtcaagt

SEQ ID NO: 996672 - DNA, 120 bp, Artificial Sequence
  ENSG00000225746_88 (sequence is synthesized)
cagtgttcaaactatctcctgctctttcaaggggatctggggctctagaagattagaggacttggagaggttagtgacttgctcgaggtcggctaggaagcaagacccaggattccaact

SEQ ID NO: 996673 - DNA, 120 bp, Artificial Sequence
  ENSG00000225746_89 (sequence is synthesized)
caggtctgtgtgattcctctgcaaaatggagaggtggaaggatggatgtcaggtctgatggatggatggatgcctacatcaagatacatgcatagatggagagatggctggctacctcat

SEQ ID NO: 996674 - DNA, 120 bp, Artificial Sequence
  ENSG00000225746_90 (sequence is synthesized)
gaatgctggactgttgtgagaatcaaacgagataatgtatgctgaggcatgctgtgaacactacgtgctgggtacaggagaatggaggctccagagtgaaattaatgacactttgtcgat

SEQ ID NO: 996675 - DNA, 120 bp, Artificial Sequence
  ENSG00000225746_91 (sequence is synthesized)
gaagatcttgattgtgacctctgtggaaaatgagccatgaaccaaccaatgataagtctacttttcttccacgtaacaaccacaggatagatgacattcattttctaagaaacaaaatct

SEQ ID NO: 996676 - DNA, 120 bp, Artificial Sequence
  ENSG00000225746_92 (sequence is synthesized)
tggcagttagatccgtggggtaaagaatatagatactaataatgaaaaccatgtagctggtcttattattctctaatcatgaagaccattattgttatttgtggactaaggagcagaaag

SEQ ID NO: 996677 - DNA, 120 bp, Artificial Sequence
  ENSG00000225746_93 (sequence is synthesized)
ctttgtatttacatgttttaattctatttttgtaattggccaatataaaaaccaataaacaaatgtataaataaagatgagtaaggttaatcattgtccagttgtaaaaaatatttggtg

SEQ ID NO: 996678 - DNA, 120 bp, Artificial Sequence
  ENSG00000225746_94 (sequence is synthesized)
aagagaagtacatgtacatgtctgtcacctctttggctatggtgatatagacaggataattatagacaatgttcaaattcttggttaattgtaagcttgaaattgttcattttttaaaga

SEQ ID NO: 996679 - DNA, 120 bp, Artificial Sequence
  ENSG00000225746_95 (sequence is synthesized)
ggaaatgaaataagtttactccaaataatgatagcttagatgactaactaatgataggtgaaaagcaaggattgatagttaaaatgcctctcttttgttattatcttctttgctctgtac

SEQ ID NO: 996680 - DNA, 120 bp, Artificial Sequence
  ENSG00000225746_96 (sequence is synthesized)
tttgggtggtttatttaagaggactcaatgtactgtgaataaacatgtaatataatcaaagatggtgaattttatctagtgagggatattggagtcaaaagaagtattatattgataatt

SEQ ID NO: 996681 - DNA, 120 bp, Artificial Sequence
  ENSG00000225746_97 (sequence is synthesized)
cacatatgaaaaacaggataactcatgaaacattaatataggaattatttgggatatctttttgggttttgtgagtcataaggtttaaagttattattagtaaattaatgaattaatcaa

SEQ ID NO: 996682 - DNA, 120 bp, Artificial Sequence
  ENSG00000225746_98 (sequence is synthesized)
cagacaatgtagaaaataacagagaaaagaagggccaatcctggatcgatgatgactactggtagcatgagtcatatacagtgaatacatgtctggaactctgaggtctgtctcaaaaga

SEQ ID NO: 996683 - DNA, 120 bp, Artificial Sequence
  ENSG00000225746_99 (sequence is synthesized)
tatctagtctatttcctgtttcaaatgatcctacagacagatggcaaaaaatagaatgtatatgtgtttggttttcatgtttatgaatttttattttacatttatgattggctcaatcag

SEQ ID NO: 996684 - DNA, 71 bp, Artificial Sequence
  ENSG00000225746_100 (sequence is synthesized)
acgggtagatcacttgatgacaggagatcgagacctacctggccaacgtggcgaaaccctatctctactaa

SEQ ID NO: 996685 - DNA, 90 bp, Artificial Sequence
  ENSG00000225746_101 (sequence is synthesized)
tgtgcctctaatccgaggacttgggtggctgaggcacatggattgcttgaacccgggtttcaaaaattgcttgaacctgggaggctgcag

SEQ ID NO: 996686 - DNA, 120 bp, Artificial Sequence
  ENSG00000225746_102 (sequence is synthesized)
acccgggtttcaaaaattgcttgaacctgggaggctgcagtgatccgagatcacgtcactgcagcttggcaacagagcaagattctgtgtcaaaaagaaaaaaataaaaaggataagatt

SEQ ID NO: 996687 - DNA, 120 bp, Artificial Sequence
  ENSG00000225746_103 (sequence is synthesized)
aaggattgtccaactataaaaatatgtggaaagacaaaaaacactattaatacatactgaaattggtaacaactaaagagaaatcttgcatacctgttacctctttgaatgagatagaca

SEQ ID NO: 996688 - DNA, 120 bp, Artificial Sequence
  ENSG00000225746_104 (sequence is synthesized)
gtataaattttgaccgtattcaagttctgggtcagggacaattccaaagttctttattttcccttcctttcttccttcctttctttctttcctttcttccttcctttcttccttcctttc

SEQ ID NO: 996689 - DNA, 89 bp, Artificial Sequence
  ENSG00000225746_105 (sequence is synthesized)
tccttccttccttccttctttctttttgagatggagtcttgctctatcacttagggtggagtacaatgcatgggttcaagcagttcttg

SEQ ID NO: 996690 - DNA, 120 bp, Artificial Sequence
  ENSG00000225746_106 (sequence is synthesized)
ccgcaacctctgcctcatgggttcaagcagttcttgtgcctcagcctccctaatagctgggattgcagacgcgtgccatcatgcctggctagtttttgtattttcagtagagatggggtt

SEQ ID NO: 996691 - DNA, 72 bp, Artificial Sequence
  ENSG00000225746_107 (sequence is synthesized)
agtgatccacctgcctcagttattcataaaaaaatgaaatatacctcaaattaatgaacatataaatgagta

SEQ ID NO: 996692 - DNA, 120 bp, Artificial Sequence
  ENSG00000225746_108 (sequence is synthesized)
aatgaacatataaatgagtataaatgtttatacatttattaatttgaggtatatttgaaaagcaaggatcaatggagagaaggtctcatttttgttgtcatctcttctgctctgtactca

SEQ ID NO: 996693 - DNA, 120 bp, Artificial Sequence
  ENSG00000225746_109 (sequence is synthesized)
gaatggaagcacagaagctggttttaatagttaagagctgtatggtccatctctgtgctagaagctggagaccaatgtgagtaatagtcaaagttcttgtctcatcttgggtgttttgtt

SEQ ID NO: 996694 - DNA, 120 bp, Artificial Sequence
  ENSG00000225746_110 (sequence is synthesized)
taaaggtttatagtgcattaacaaaaaatatgaaatataatccaataaggccatgagtagcccagggataaatatggaatggatgtggaatgttacactgagggatgcttatatgaaaag

SEQ ID NO: 996695 - DNA, 120 bp, Artificial Sequence
  ENSG00000225746_111 (sequence is synthesized)
catgtcctgtattattaagaaaggtaataatgaggggatatggtattgtgaggatgagtgtatatacaaattagagatatcaaggctcctcttggggttttgtgagtgatagtgtttaaa

SEQ ID NO: 996696 - DNA, 120 bp, Artificial Sequence
  ENSG00000225746_112 (sequence is synthesized)
agttattaatggtgaattaatgaagtaataaataatgtaacaatgaatgaagagcaccagagctaatcctggatcaatcatgactactggtattggatgggtcttcgtcagtgaatgcct

SEQ ID NO: 996697 - DNA, 120 bp, Artificial Sequence
  ENSG00000225746_113 (sequence is synthesized)
atctggaactctgaggtccatcagaaaagaaatatagtgttttccctcttttggaagtgatcctatagacagacgtcaggaatatgcaagggtcttgtttttgctctttgtgagcacgag

SEQ ID NO: 996698 - DNA, 120 bp, Artificial Sequence
  ENSG00000225746_114 (sequence is synthesized)
ttttcaatctattattataattcaatcaatgaaggaaccactaaacaaatatacaaataaagtatgttggatgcgactaagcgttctctaactgtaaaaataatttgtgaggcaaaaaaa

SEQ ID NO: 996699 - DNA, 120 bp, Artificial Sequence
  ENSG00000225746_115 (sequence is synthesized)
tgttttaataattatttaaaggatgaagatcttgactgttacccatgtggcaaggagagtgtagaacagggaaagatactgatctctgttcttggttaagttccaagaaccatctaagtt

SEQ ID NO: 996700 - DNA, 120 bp, Artificial Sequence
  ENSG00000225746_116 (sequence is synthesized)
tcgtgcccctcagctgtaaaagggaagtacatttcatttgtttattctgtaaaactctcggtgtgtgccatggccatgcactgatgatgagcacatgtgtgcggcccctgcccccgtgga

SEQ ID NO: 996701 - DNA, 120 bp, Artificial Sequence
  ENSG00000225746_117 (sequence is synthesized)
gcgcatgcatggtcctccagccagagaccgcgctgggagaaatcaggggttcactcctggtcggaggtgagcatctgcctctgcatgtaggaaggcatctcatgaaaccccaaaggcctg

SEQ ID NO: 996702 - DNA, 120 bp, Artificial Sequence
  ENSG00000225746_118 (sequence is synthesized)
gcagcccctgcacatggaaggagtcactctcctccatgtggggtgagccacgctggccttgtggcattcacatgttccctccacctgcttctccagcgtgaaggggacctcaatgtcctc

SEQ ID NO: 996703 - DNA, 120 bp, Artificial Sequence
  ENSG00000225746_119 (sequence is synthesized)
tgatgaccttcttgaagagagacatttccttccttcattggaggctttagacggagccagtgacagctcagctctggctgtttcccatctgtgaaatgggaagagggaggatggcacgag

SEQ ID NO: 996704 - DNA, 120 bp, Artificial Sequence
  ENSG00000225746_120 (sequence is synthesized)
tcccttgccctcaccaaactggccgctagagagaggaaagatgtttccattctgatccccactcacctccaccccatccttccaggcttctgatcctcattgtaattttggagctatttg

SEQ ID NO: 996705 - DNA, 120 bp, Artificial Sequence
  ENSG00000225746_121 (sequence is synthesized)
attttggagctatttggtgatattgtctttgtccttggatccgaggcttctcctaccaactcattgttttttcaacgtgacaaaataaaagccctgagctgggcgcggtggctcacgcct

SEQ ID NO: 996706 - DNA, 120 bp, Artificial Sequence
  ENSG00000225746_122 (sequence is synthesized)
tacacatgatgaatacatgtctgaaactctgaggtccatcacaaaagaaatctggcccattccttctgattcaggtgatcctatgaatatacaatgtgtttgcttttggtctttgggttt

SEQ ID NO: 996707 - DNA, 120 bp, Artificial Sequence
  ENSG00000225746_123 (sequence is synthesized)
actatggtcaactatgtcccagtgatatttatgagagggatctgaagtatttattgataatgcatatatgaaaaacggagaagaattaatgaaacagatatatctgtgttagaatgattc

SEQ ID NO: 996708 - DNA, 120 bp, Artificial Sequence
  ENSG00000225746_124 (sequence is synthesized)
tgtataaagatagggaatatcaagtctgttcttagtgttttgtgaatcacagagtgtaaaattattcccagtgaattaatgaataaatttaaagacaacatagaaatgaatgcagaaaaa

SEQ ID NO: 996709 - DNA, 120 bp, Artificial Sequence
  ENSG00000225746_125 (sequence is synthesized)
gaccaatgatgagacagtgtttatgaacaaaagatcatgattaatccagttctgcacaaaacactgaggtccattagaagacaataggtcttggctgtttcattccttttaagagctgtt

SEQ ID NO: 996710 - DNA, 120 bp, Artificial Sequence
  ENSG00000225746_126 (sequence is synthesized)
ttcaggagtgtttagtggtatttcaaaggaatcaatatctataacaaattaaaataaccaggaatggaccagtgatggaaatgtgttccgaaaatatgtttaatataatttggcacaact

SEQ ID NO: 996711 - DNA, 120 bp, Artificial Sequence
  ENSG00000225746_127 (sequence is synthesized)
gaagtgataaaaatatagtagttagaccatttatattcacaattatttaacattgtatcttattttctacctcaaatgatttaatcttttccatattggtatggtcctggccgataactc

SEQ ID NO: 996712 - DNA, 120 bp, Artificial Sequence
  ENSG00000225746_128 (sequence is synthesized)
tttgtgtggcagcctgagagaatatggaagacactgtcagtgttggaagatggtggttttatcacttttcattgcactgtctttaaaacatgggcaaattgactaaaagaagactacaga

SEQ ID NO: 996713 - DNA, 120 bp, Artificial Sequence
  ENSG00000225746_129 (sequence is synthesized)
agaaataatggtgattgtgaatttggtatgaagcatggatgttaattaatcacacatgttctctgaggtccattgtaaaaggagacctagtcttcagggagagagccactaatggggaga

SEQ ID NO: 996714 - DNA, 120 bp, Artificial Sequence
  ENSG00000225746_130 (sequence is synthesized)
tcttattcctagaattttgtggttatattattattcatgaaccaatgaataataaatgaatgatataaaggaagaaaaacgtgcttggaccaatgatgagtaccatggggtatctgaaac

SEQ ID NO: 996715 - DNA, 120 bp, Artificial Sequence
  ENSG00000225746_131 (sequence is synthesized)
aggatttttgattaaacccatatgcaattctgaggtccattacaaagagacacgtattattccttttttgggaagtgagcctatggtaccttttccttggactttgtggttcttggggat

SEQ ID NO: 996716 - DNA, 120 bp, Artificial Sequence
  ENSG00000225746_132 (sequence is synthesized)
ggattgcatttttgttataaaatcagcccatgaattaaaaatttatcaatgagtaaaacataaagcataagtcatgtacttattatcagtgactgtaatgaaacatggattattattaaa

SEQ ID NO: 996717 - DNA, 120 bp, Artificial Sequence
  ENSG00000225746_133 (sequence is synthesized)
acttatctgagactcccaataaattaatacccaaggcttctaccattctggtaaggagcatatggtcatttgtatgcaagagtcagtttttgttctgtgttggtggtgggttgctgacta

SEQ ID NO: 996718 - DNA, 120 bp, Artificial Sequence
  ENSG00000225746_134 (sequence is synthesized)
ttttatgaagaaaatgaagcatctttaatcatataaatagttggttaaataaccacttaattgagaccaagcagagaccaatgatgagtgtattaatctattttttaatggatttttatt

SEQ ID NO: 996719 - DNA, 120 bp, Artificial Sequence
  ENSG00000225746_135 (sequence is synthesized)
aaacaaataataaaagaaacacagtctattcttcctgagggcaataactctagacagatgtaaatattcttcagtgttcttgtccagtgctgtgagatcacagatactgatgtcttttgt

SEQ ID NO: 996720 - DNA, 120 bp, Artificial Sequence
  ENSG00000225746_136 (sequence is synthesized)
atatgagaaggaacttgcatttttatgtctcagtttatattttagagtcagcaaaccatggaccaattaggaacaaatgttatgatatgagaatgctgattcttgtttttttttttcatg

SEQ ID NO: 996721 - DNA, 120 bp, Artificial Sequence
  ENSG00000225746_137 (sequence is synthesized)
atagacattctaagaaaaactctaggctctctcattgtttttggaatacatacatggttctttccaagtagtttcttagaaaaatgtttttaaaaagaggcttttaaaaagagcctttta

SEQ ID NO: 996722 - DNA, 120 bp, Artificial Sequence
  ENSG00000225746_138 (sequence is synthesized)
ctgtgtgagtagggaggacataggctgctgttagtaattgtcttaagttcttaagtctaatatcaaggattttgttagtaaattttgattttattattataaagagatcaatgacaaatc

SEQ ID NO: 996723 - DNA, 120 bp, Artificial Sequence
  ENSG00000225746_139 (sequence is synthesized)
caacaaacaagcatataaacaagtaaaaaacgagactgaagcattgttcgcctatgaataaatgtgattaggcaagaaaaactactaatataaatggaaaacactgacgtctcaagaaat

SEQ ID NO: 996724 - DNA, 120 bp, Artificial Sequence
  ENSG00000225746_140 (sequence is synthesized)
acatgtatcaagcatgctactttgtctaagggtcttaagacactgcatataagaaatagtcaatattattgttctggatcagttcaagttcaagtttgttaattttttaaaagaaaaata

SEQ ID NO: 996725 - DNA, 120 bp, Artificial Sequence
  ENSG00000225746_141 (sequence is synthesized)
gcattattaataagtagaaaatataattaaagaagactaaccgtgtccccaaaatgaacatggggttgatatgaaacattttgttgagtaatgcatgtttgaaacaatcaggtcagttca

SEQ ID NO: 996726 - DNA, 120 bp, Artificial Sequence
  ENSG00000225746_142 (sequence is synthesized)
agaaacatgtctaatttctgtaggaactgctctacagatagacaacagggttatcacagctcttgtcctattttttttctgattcatgtctatttctttattataaagtagtaaattaat

SEQ ID NO: 996727 - DNA, 120 bp, Artificial Sequence
  ENSG00000225746_143 (sequence is synthesized)
aaataaatgaaatagacaaagtctaaatgaaaaaaatgattgatggtctgtggcctggcccagagatgatgactcgtgggtatgagtcaaggatgatgagtaataggagtcaggaagttt

SEQ ID NO: 996728 - DNA, 120 bp, Artificial Sequence
  ENSG00000225746_144 (sequence is synthesized)
ggaagtttaagctccgatataaaagaaatctagcctattgatcagttggaaatgatcctgtagacagtagttaaaaatattcagttatcggctgggcacggtggctcacacctttaatcc

SEQ ID NO: 996729 - DNA, 70 bp, Artificial Sequence
  ENSG00000225746_145 (sequence is synthesized)
aggccgaggtgggcagatcacaaagttaggagttcaaattagccgggtgtggtggcgagtgcctgtaatc

SEQ ID NO: 996730 - DNA, 120 bp, Artificial Sequence
  ENSG00000225746_146 (sequence is synthesized)
cgaaaaaaaaaaaacaaaaaaaacccccaaaaaatcagttaccctattcttgtgctcttgtaattcacggataatgaattaatgcgtgaagaactcaagtaaaagaaataagtgaataaa

SEQ ID NO: 996731 - DNA, 120 bp, Artificial Sequence
  ENSG00000225746_147 (sequence is synthesized)
ggaccaatgatgacaactgccggcgtatgagtgttgggtgatgaataatacgtgtctagaactctgaggtccaacatacaaaacacctcaataagcaaggatcagtggaggaatatctag

SEQ ID NO: 996732 - DNA, 120 bp, Artificial Sequence
  ENSG00000225746_148 (sequence is synthesized)
actaaggatgatacaggtggtagttatagataatggtcaacctctgggtcaaggaaagttgcacaaagtgttcattttcttaagagaaaatgaaataattatccttcagatagtgatttc

SEQ ID NO: 996733 - DNA, 120 bp, Artificial Sequence
  ENSG00000225746_149 (sequence is synthesized)
aaccctggatcgatgatgagcactggtggagtatgagtcacatacgatgaatacgtgtctggaactctgaggtccatcgcagaagtcagtttcctctgtttcaactaactctgtagatag

SEQ ID NO: 996734 - DNA, 120 bp, Artificial Sequence
  ENSG00000225746_150 (sequence is synthesized)
cctctgtttcaactaactctgtagatagatgacaagaatagagaatgaattttttttgtttatgagtttttattttataattggttcaatgaaagaataaaacatatatgaataaataaa

SEQ ID NO: 996735 - DNA, 120 bp, Artificial Sequence
  ENSG00000225746_151 (sequence is synthesized)
acatacctaacctttttggccaataatgaagagatagtataaattatatgctattttcgtgttcttggttagtggcaagttcaaagttgttcatacttcaaataacgattgcctaaatgt

SEQ ID NO: 996736 - DNA, 120 bp, Artificial Sequence
  ENSG00000225746_152 (sequence is synthesized)
ttaatggtattcctgatattattaaaaattatttaatataataaaaagttaattggcttaatgacaatgtgcaacattgaggttaattaatgaaagagatgtagtctctgtgggaaatta

SEQ ID NO: 996737 - DNA, 120 bp, Artificial Sequence
  ENSG00000225746_153 (sequence is synthesized)
ttgtatagacaaatgtaaggattcttcaaatatcttgttcttgggttttcaaaatcatgtattcattttattatcaaagaagaaatgatttattcaataaatatttagaaatgaatgatg

SEQ ID NO: 996738 - DNA, 120 bp, Artificial Sequence
  ENSG00000225746_154 (sequence is synthesized)
aaaggtgtatattataatcaaagatgagcagttgtatttaaataaacatgggcctgatgtgaggattatattgaagatatatacatgagaaactgaggataattaataaaataaatattc

SEQ ID NO: 996739 - DNA, 120 bp, Artificial Sequence
  ENSG00000225746_155 (sequence is synthesized)
ctatatgttaggaatatcatggctattcttgtggttttgtaaatcatagggcttaaagttatggttagtgaattaacagattagtcaatagacaaggaggaaacgaacccaaaaatagaa

SEQ ID NO: 996740 - DNA, 120 bp, Artificial Sequence
  ENSG00000225746_156 (sequence is synthesized)
ggtattatcaaaaagcctataatataatcagaatggtcaactgtatctaagtgatagaaattggagtgatatgaagcattatattgataatgcatatatgaaaaattgagggtaatgaaa

SEQ ID NO: 996741 - DNA, 120 bp, Artificial Sequence
  ENSG00000225746_157 (sequence is synthesized)
cagatatatcgatgttagaatgattccatgtacagattgggaatatcaagactcttcttggagctctttgaatcagactctttaatgttgttattagtgaattagtaaattaatcacaaa

SEQ ID NO: 996742 - DNA, 120 bp, Artificial Sequence
  ENSG00000225746_158 (sequence is synthesized)
aatacaggcatgaattgagaaaaggaagaccaatcctggatcgatgatgactactggtggcgtatgagtcatagacaatgaatacgtgtctggaactctgaggtccatcgtccatcacaa

SEQ ID NO: 996743 - DNA, 120 bp, Artificial Sequence
  ENSG00000225746_159 (sequence is synthesized)
ggaccaatgatgacaaataccggcgtatgagtcttggatgatgaataatacgtgtctggaactctgaggtccatcagaaaagaaaaccagttctttctgctcatgtattttcattctgtt

SEQ ID NO: 996744 - DNA, 120 bp, Artificial Sequence
  ENSG00000225746_160 (sequence is synthesized)
attataattggatcaataaaagaatgaatcaacaaatatataactaaataaagatgattcgtgtgaagcattgtccaattataaaaatagatggtgtggcaagaagtaatattaatatgt

SEQ ID NO: 996745 - DNA, 120 bp, Artificial Sequence
  ENSG00000225746_161 (sequence is synthesized)
tcaaggatgctgaataatgtgtgtctagaactctgaggttcaatagaggaggaaatatagtctattgcttttgaagtgatcttatagttaggttttggaaatacaaaagggccatcttct

SEQ ID NO: 996746 - DNA, 120 bp, Artificial Sequence
  ENSG00000225746_162 (sequence is synthesized)
tggattgtttttgtgacttttgtttcttctttaaaataaattcattgatgtaataatcaatgtacacatgtaaaaaattaaagatgaggagtgtgaagcatgtccactcaatgtaaatgg

SEQ ID NO: 996747 - DNA, 120 bp, Artificial Sequence
  ENSG00000225746_163 (sequence is synthesized)
tgagacaacagaaatcattaaaatgtattgaaaatatgaataccatttaaaaaacgaacaattcaagtgtaatctttgactacggatgacataagcagtatagtgaagtttcttattttg

SEQ ID NO: 996748 - DNA, 120 bp, Artificial Sequence
  ENSG00000225746_164 (sequence is synthesized)
catcagaacaagtgtgctgttgttcatttttttaaaagaaaattgataagtattaccacaattaatagatacctgaatgactaagagaagggtcaaatgaatgaatccgtgaaaaatatt

SEQ ID NO: 996749 - DNA, 120 bp, Artificial Sequence
  ENSG00000225746_165 (sequence is synthesized)
actatgaatcaatggtgaccactggtggcatataagtcatggatgatgaatatgagaagaaaagaatctaggtttttgcttctgttggaaatgatcctgtagacaatgtcagaaacatac

SEQ ID NO: 996750 - DNA, 120 bp, Artificial Sequence
  ENSG00000225746_166 (sequence is synthesized)
aaagatcattttcttatcttggggtcatagatttaggtttattattactaatatatgaatgatagaaccattaaacaaatataaacagattacaagtagagatttaagctacagtgtcca

SEQ ID NO: 996751 - DNA, 120 bp, Artificial Sequence
  ENSG00000225746_167 (sequence is synthesized)
gctatgaatataggagatgagataaattattactaaaaataggagatactgattcctcttatcaaagaaatggatcacagtgtttcctctttgactaaggattatatagaatctaacaag

SEQ ID NO: 996752 - DNA, 120 bp, Artificial Sequence
  ENSG00000225746_168 (sequence is synthesized)
taagagtcagttttattttcttggtcagagattgtttcttctgttaagagagaaagacacctataatatgaaaaattagtaaatacccaaatcactgaataaatgctatgcagaaaggca

SEQ ID NO: 996753 - DNA, 120 bp, Artificial Sequence
  ENSG00000225746_169 (sequence is synthesized)
ggatcaacagagattaggtctcaatgtttttagtctgctctgtactcctcagaatggacagacccgggctgattttggtgttctgtggctatgagatcagtggttgcctccatgtgttag

SEQ ID NO: 996754 - DNA, 120 bp, Artificial Sequence
  ENSG00000225746_170 (sequence is synthesized)
gaacatggagactgacgtaatagtcaaacttcttgtctcagtttcagtgttcttctgaagggtatgcagtaagtgcaaaatgtaatcagtgactgccaaccattacccaaatgtaaaaaa

SEQ ID NO: 996755 - DNA, 120 bp, Artificial Sequence
  ENSG00000225746_171 (sequence is synthesized)
cctggtccgtgggaagattctcttctacaaaacccatcctgggtgccaaaaatgttggggaccattggtatagacagtgataagtaacagtcagtgttattgttctgcatcaatggcaag

SEQ ID NO: 996756 - DNA, 120 bp, Artificial Sequence
  ENSG00000225746_172 (sequence is synthesized)
agagaatgtctcaactttttaatcactggttctcctttatattcctcaaggtggaggctgtctgcagtaggagcatggagaccaacaatggatgctcttaaactgatttaagcacgcttc

SEQ ID NO: 996757 - DNA, 120 bp, Artificial Sequence
  ENSG00000225746_173 (sequence is synthesized)
gcccaagcctgtatcaagtctggggcgcatctcacatccccacacctgcctccagtactgctcaccgcacccgggacacacagtaatcctgaaaccaaggtcggctgcatcttcttcctc

SEQ ID NO: 996758 - DNA, 120 bp, Artificial Sequence
  ENSG00000225746_174 (sequence is synthesized)
cctgcaccctccaggagcaatccatcagtcatcctgcccagagcttgtgaaggtgcagtggcctgagccaggcttccaagaggacaaccgtgatgggctctgtgtgcgttgctgggtaaa

SEQ ID NO: 996759 - DNA, 120 bp, Artificial Sequence
  ENSG00000225746_175 (sequence is synthesized)
aaaaagggtcattcatatctatatataatgcaatttttgtctgtcactttatctcatctatttcttttcctttgactagatcttctaaaacattatattattgataacagaaatcttgtc

SEQ ID NO: 996760 - DNA, 120 bp, Artificial Sequence
  ENSG00000225746_176 (sequence is synthesized)
ttgtttctggttcacttttaagtatggttgcaaatcattttttagttgagattttttaaataaatgaagtatttatacctagttaatataagactttaaatcaggattggagttagaatt

SEQ ID NO: 996761 - DNA, 120 bp, Artificial Sequence
  ENSG00000225746_177 (sequence is synthesized)
ttatgaaatgcttttttgatatctgcagatatcatgttgtttttctctgttgatctgttgatacaataagctaatgtttcgtaactttgaaacatttttgattgaattctacttgattat

SEQ ID NO: 996762 - DNA, 120 bp, Artificial Sequence
  ENSG00000225746_178 (sequence is synthesized)
aaatctaggttttttcatcctttttaatatcagccttgtgttccacagaatggaggctccagagtgaaattaatgacactttgtcgatgaagatcttgattgtgacctctgtggaaaatg

SEQ ID NO: 996763 - DNA, 120 bp, Artificial Sequence
  ENSG00000225746_179 (sequence is synthesized)
tgttagatccagataactgccttgtacagccacctccaggatactgcctccctaaaaaacagctagatacactgaccccacagcctatgtggaccacacagatatagtggcttgctctaa

SEQ ID NO: 996764 - DNA, 120 bp, Artificial Sequence
  ENSG00000225746_180 (sequence is synthesized)
atgcaccagtgagaactctctgcaggaaacctgcttgggaaatgccatagcctgcaatacaggctttccccttcccgctggccctgtgaggcatgcaggatctgtaagtaataaactgct

SEQ ID NO: 996765 - DNA, 120 bp, Artificial Sequence
  ENSG00000225746_181 (sequence is synthesized)
cacatacctaaagaaaatcaaaggggacaaaaagtgagagtctgttataaactaaggattataattaatgtaattcagtacaactgtggacaattttgaaaagataaagattgatgtcat

SEQ ID NO: 996766 - DNA, 120 bp, Artificial Sequence
  ENSG00000225746_182 (sequence is synthesized)
ggtctgaaaaatgatattcattgtcctaatgtgtaaatttcgacaatttgcaaatttgtagattctttagaatagaactaactcaagcccttcattctgcagctgaggctcactgccccc

SEQ ID NO: 996767 - DNA, 120 bp, Artificial Sequence
  ENSG00000225746_183 (sequence is synthesized)
gacaaagtgcgtgtcaacagttgcatgaaatggtatttcacttcttgattattgtttgtttttattctttttttagaaaaaatgaataaatgatcaaattattttgggggtaattaaata

SEQ ID NO: 996768 - DNA, 120 bp, Artificial Sequence
  ENSG00000225746_184 (sequence is synthesized)
aaagaaagaacacaagtgagtcagtaaatgcttaaattaaggtagatcttggatcattgcttcatggcacactctcagaaatgctcaaatatggtgccttaaaaaaattaatgaggtttg

SEQ ID NO: 996769 - DNA, 120 bp, Artificial Sequence
  ENSG00000225746_185 (sequence is synthesized)
ggtgttgatgtggttagggagtatacagatagatagttgttagtggttacatttattactcttgcattgggtggatttaagggttcattatattaagaattaaacagtaagtaaattcat

SEQ ID NO: 996770 - DNA, 120 bp, Artificial Sequence
  ENSG00000225746_186 (sequence is synthesized)
acataaaaggtatggttattcttgagtcaataatgagaatgtgttaggaaccaaggtttatgattaatctaaaataatttctaaaagaagttaagtctttgctgtttcgttctttctaaa

SEQ ID NO: 996771 - DNA, 120 bp, Artificial Sequence
  ENSG00000225746_187 (sequence is synthesized)
agagtcaatcttggacctatgatgatgactggtggcgtatgagtcattgacggtgaatacaggtctggaagtctgaggtccaatataataaaaaatctagtcttcaccttctatcctagg

SEQ ID NO: 996772 - DNA, 120 bp, Artificial Sequence
  ENSG00000225746_188 (sequence is synthesized)
gatagacattaggaatatttgaggatgttgttcttggtcttcacgttcatgcattttccctctatttttataattggatcaatgaatcaataagcaaatatattttaactgcataaagat

SEQ ID NO: 996773 - DNA, 120 bp, Artificial Sequence
  ENSG00000225746_189 (sequence is synthesized)
aaaaataggcgttgtccaattatggaaatatatggtgaaataagaaatactattcacatttattaaaaacactgaggtcttctttctattaacaaataaatgactcagaggtattactcg

SEQ ID NO: 996774 - DNA, 120 bp, Artificial Sequence
  ENSG00000225746_190 (sequence is synthesized)
cttgctgcaggatggcatatacagtaaaaataataataacgtatgtgaggtcatttgggtcaggaccatgttcatggttgtttgttttctcaagaaaaaatagtttcacacatacttaca

SEQ ID NO: 996775 - DNA, 120 bp, Artificial Sequence
  ENSG00000225746_191 (sequence is synthesized)
ggaccaatgatgacaaatggtggcattggagttatggacgatgaatgatatgtgtctgaaactctgaggtccaacacagcacataattagtgtattctctctgttgaaattgacttacag

SEQ ID NO: 996776 - DNA, 120 bp, Artificial Sequence
  ENSG00000225746_192 (sequence is synthesized)
tgaaattgacttacagagaaatgtcaggaatatatagataatatctatgtattgattccatagattgatatttattattaccattggatcaatgatagatccattaaactaatataaatt

SEQ ID NO: 996777 - DNA, 120 bp, Artificial Sequence
  ENSG00000225746_193 (sequence is synthesized)
gagggtcaagcattgtccaatatgaacatatgtgtggagtcaagaaatattactaatcaaaatttaaagcactgacattcatttacaaataaatggataaaagatattaccacttttagt

SEQ ID NO: 996778 - DNA, 120 bp, Artificial Sequence
  ENSG00000225746_194 (sequence is synthesized)
accacttttagtaagaataatatagaaattgataagtaagagttgattttattgttctgggttagtctcatgatagaagtgttcctttgcgtaagataaatacacacacacacacacaca

SEQ ID NO: 996779 - DNA, 120 bp, Artificial Sequence
  ENSG00000225746_195 (sequence is synthesized)
cacacagtgaacaaataataaatacctaaatgacctagtaaatgaaatacagaaagcaggaatcaagaatcaatggagataaggtcttaattttgttatcatttgctctgcttcataccc

SEQ ID NO: 996780 - DNA, 68 bp, Artificial Sequence
  ENSG00000225746_196 (sequence is synthesized)
taattaagcaattaatatttatttatttatatttgagatggagtctcactctgtttgttgccgacaga

SEQ ID NO: 996781 - DNA, 120 bp, Artificial Sequence
  ENSG00000225746_197 (sequence is synthesized)
agagtcagtttcattttctggttaagtctcatttgacattgttccttttgttatgagagaaaacatttccattctgaaaaattaatcaatataaaaataactgaataacagaaatatgga

SEQ ID NO: 996782 - DNA, 120 bp, Artificial Sequence
  ENSG00000225746_198 (sequence is synthesized)
tcatcctgcccagagcttgtgaaggtgcagtggcctgagccaggcttccaagaggacaaccgtgatgggctctgtgtgcgttgctgggaggacttttcaatgtgatggcagcctggggga

SEQ ID NO: 996783 - DNA, 120 bp, Artificial Sequence
  ENSG00000225746_199 (sequence is synthesized)
agacagtgtcaccacgacagtgtcacggaacatgcaggaggacttcctggacatgaagctagattccggcagggccactggtgtcagcagcactcctggaggacaccctgggctctggaa

SEQ ID NO: 996784 - DNA, 120 bp, Artificial Sequence
  ENSG00000225746_200 (sequence is synthesized)
gagagacagcaccccagaagccggccaggaatggttggagggaggctattggtgatgtgttcactctgtgtgtggcagataccccacagtggacctcctaaagcactgagtgcctccttg

SEQ ID NO: 996785 - DNA, 120 bp, Artificial Sequence
  ENSG00000225746_201 (sequence is synthesized)
aaggacttgctgtacgtggtgtgaagttcaggaacacagtgtgggtgtctgtcagcccctcgcagagggtatgtgcgcagatggtggaacagctgggcctcgtggaggcagccccgacct

SEQ ID NO: 996786 - DNA, 120 bp, Artificial Sequence
  ENSG00000225746_202 (sequence is synthesized)
gggggaagtggccttgctctggctgtctgtcacaccaacatgaccagtcctgccgattgaaactttctggacacaagcttcagtctctggaagattcttgggtgtccttctccctccaag

SEQ ID NO: 996787 - DNA, 120 bp, Artificial Sequence
  ENSG00000225744_0 (sequence is synthesized)
cagactcacagcctcccatcccctccagccccagcccacctgacctacatcagccaccttctgattgattctgttttttcctggggaaaaggccaaaaagccatctaggcctcaacccca

SEQ ID NO: 996788 - DNA, 120 bp, Artificial Sequence
  ENSG00000225744_1 (sequence is synthesized)
gcatctctgaacctctgacccagccctggacttccaaatttcagacttctttcagctcctgcttcttcgtcacaggtacaccagggcatccagcacattgatttgtccccactcgcctta

SEQ ID NO: 996789 - DNA, 120 bp, Artificial Sequence
  ENSG00000225744_2 (sequence is synthesized)
gcctgtctcctgccacagttgtctcattttggtgaagtgcgtgtccagatttccccatgctcccagctgcaacatggatctgtgaaagacagtacagcagaaaagtattcacatcctggc

SEQ ID NO: 996790 - DNA, 120 bp, Artificial Sequence; identical to SEQ ID NO: 964119
  ENSG00000225744_3 (sequence is synthesized)

SEQ ID NO: 996791 - DNA, 120 bp, Artificial Sequence; identical to SEQ ID NO: 964120
  ENSG00000225744_4 (sequence is synthesized)

SEQ ID NO: 996792 - DNA, 120 bp, Artificial Sequence; identical to SEQ ID NO: 964121
  ENSG00000225744_5 (sequence is synthesized)

SEQ ID NO: 996793 - DNA, 120 bp, Artificial Sequence
  ENSG00000254064_0 (sequence is synthesized)
cggaaggagcgctgggagttatgtgaacctcagcgttaaaatgtgttagggtttggagatcctgactccctttctgggggcaactcctataaacagatttagcctaagactcgcgtgttg

SEQ ID NO: 996794 - DNA, 120 bp, Artificial Sequence
  ENSG00000254064_1 (sequence is synthesized)
aaattgacttgccccattcctgccagttaagaggattagcgatacaggtggtgaaaaagaaacgatgacacccctaagacctgagccccttctgggccccacactccacctgtagaactc

SEQ ID NO: 996795 - DNA, 120 bp, Artificial Sequence
  ENSG00000254064_2 (sequence is synthesized)
agaggtgttcacatcatgtgtcgctagccacagccatctcaaggggaaatgccccaaatgtagaagtatctgacaccaggactgggggttggagcactggatgaacagcgtgtgtgccac

SEQ ID NO: 996796 - DNA, 120 bp, Artificial Sequence
  ENSG00000254064_3 (sequence is synthesized)
tctttcactgtgcaccgtcctaagaaagaagcctgtttccctttgaagagcctagtgctgactgcccaattcaatcggaccacgcagggcagtctgaggattaaaagatgctacctttaa

SEQ ID NO: 996797 - DNA, 120 bp, Artificial Sequence
  ENSG00000261471_0 (sequence is synthesized)
gcaaagtgcgcagccacaggcggctggtgcagacttggagtgtgggggagcagcgctttagctcgagagcatttctcagcagtccccgtggtgtctgggaagccagggctctgttttgag

SEQ ID NO: 996798 - DNA, 120 bp, Artificial Sequence
  ENSG00000261471_1 (sequence is synthesized)
gagtgtcgtcagagcatcaacaccaaagtgcttaattaaatggcagccttgacctgagggggaggaggggctgaacatccgcctccgactgcatttcacaagcaaaagaacacggtgagt

SEQ ID NO: 996799 - DNA, 120 bp, Artificial Sequence
  ENSG00000261471_2 (sequence is synthesized)
gtgtttccatggtaaccgctctcgggttcccatttccacattggtcagcccggacttggatccaaactacccatccctggcccaagcctccatggaggtaagttaccagccctgctttgg

SEQ ID NO: 996800 - DNA, 120 bp, Artificial Sequence
  ENSG00000261471_3 (sequence is synthesized)
gccaacgcagtttttggggacctcaaccatgtgttcagcccatggccaaggcttcgggctgagccagctctcccagcctctctctcttctcagtgtcgccccctcccacggctctggctg

SEQ ID NO: 996801 - DNA, 120 bp, Artificial Sequence
  ENSG00000261471_4 (sequence is synthesized)
gctcctctgcggagctccatggcttttccagcgtctgccctctctgctggctgccaagtgcctccacatgccggccatgctctgcgcacctccaaccctccacatccacccttcccctct

SEQ ID NO: 996802 - DNA, 120 bp, Artificial Sequence
  ENSG00000261471_5 (sequence is synthesized)
ttcagacctccccaggtctaccttgggcaacaccctttgcccccggagggtcacagattcttgttgaagaaccacaggcattgtccctgtgtcccaagtaccagcccagggcctggcaca

SEQ ID NO: 996803 - DNA, 120 bp, Artificial Sequence
  ENSG00000261471_6 (sequence is synthesized)
agatagatgtacaataagtaagttacacccacaaccccaaggacactgggaaccttccagaaccacagcctgatgtcatttaaatgatcgtgggggagcggggtaaagagggacgtggtt

SEQ ID NO: 996804 - DNA, 120 bp, Artificial Sequence
  ENSG00000261471_7 (sequence is synthesized)
tgctaggtgactgctgcgtgcttatccgacaatggtttggtcaacaagattgctgacaggcctgtttttgaaaatccgagtcacgttatgcttacaaatgtttgctgctagagatctggc

SEQ ID NO: 996805 - DNA, 120 bp, Artificial Sequence
  ENSG00000261471_8 (sequence is synthesized)
acgacagtgacgggtcagctgagtcggagacggaaaacctgttggtctgcgcaccgtttttgcagctgcccggcagactggaggcctctccccaaccctgctcaccctgaaggaggttct

SEQ ID NO: 996806 - DNA, 120 bp, Artificial Sequence
  ENSG00000261471_9 (sequence is synthesized)
cggtcccttttgacctcacactgggcagtggaaggggaatcgctagttcttcatccctggtttagttactttccctcttctgaacaaattgggtccacaaaccccagtggcagtcacagc

SEQ ID NO: 996807 - DNA, 120 bp, Artificial Sequence
  ENSG00000261471_10 (sequence is synthesized)
gtctatgtcgggctattgtcactcctgtacgcgggaacactggcatatctactaaagggcacagagaaacgctgtcctgtatatattagtgtgatatgtgtgtgcgtatatatttgtgta

SEQ ID NO: 996808 - DNA, 120 bp, Artificial Sequence
  ENSG00000261471_11 (sequence is synthesized)
tgtgtatatatacatatatttgtgtgtataatatgtgtctatatgtgtacaggtgtgtttgtatatgtgtgtatatacatacatttgtgagtacaggtgtatatatgtgtgtatatatat

SEQ ID NO: 996809 - DNA, 120 bp, Artificial Sequence
  ENSG00000261471_12 (sequence is synthesized)
tcatgtatttgtgtatgtgtgttatatatacatgtatgtgtatgtgtgtgttatatatatacatgtatgtgtatgtgtatgtgtgttatatatacatgtatgtgtatatgtgtgtgtgta

SEQ ID NO: 996810 - DNA, 120 bp, Artificial Sequence
  ENSG00000261471_13 (sequence is synthesized)
tgcactaagacggcaaaactgcccagaagaaggttggtacctgggctttccatcaccctcactgtgccacttggtccccaacagggccaatggtccatctcttcaaactgaagctgagag

SEQ ID NO: 996811 - DNA, 120 bp, Artificial Sequence
  ENSG00000261471_14 (sequence is synthesized)
tccaggtctacgcagaggagacagggagactgggcaaccccagtgggggacgggggacccaggacttcacccaaacacaggtaccagagacagatgccatgagctccttctgctggagcc

SEQ ID NO: 996812 - DNA, 120 bp, Artificial Sequence
  ENSG00000261471_15 (sequence is synthesized)
ctcagcacaggggagtggtctatacccttaaccttctctgcaatgtccagggtgcaagttcaaattccagaatcctttagaaacttacccccacatgtactagccttgtgacccagccca

SEQ ID NO: 996813 - DNA, 120 bp, Artificial Sequence
  ENSG00000261471_16 (sequence is synthesized)
gagtcctgaatgtctctaagcctcagtttcctcatccacaaaatgggtcaaatacttacctcataaagtggttgggaggattacatgaaaaagaaatgagatctgaagggttggctgatg

SEQ ID NO: 996814 - DNA, 120 bp, Artificial Sequence
  ENSG00000261471_17 (sequence is synthesized)
ggaatcattgctgatttttgacccccaacacctctccagtgaaactgccctcaggggtccacaggggcctcctaattgccaaagccaacagcatcttctccatgcccactggtggcgttt

SEQ ID NO: 996815 - DNA, 120 bp, Artificial Sequence
  ENSG00000261471_18 (sequence is synthesized)
cacgccattatcaattctgccctccttgaacctctcccttcccacggcacccagggcatggtgccatcttggttctcagagcactgatcccgccttctactttctccccggctcttccac

SEQ ID NO: 996816 - DNA, 120 bp, Artificial Sequence
  ENSG00000261471_19 (sequence is synthesized)
cccctctgtctccacacacacactccccagggttccacctcatcctctcctttcccctgacactctctccctgggagatctcagctaccaccacagaacactgacgcaccagcccctgcc

SEQ ID NO: 996817 - DNA, 120 bp, Artificial Sequence
  ENSG00000229630_0 (sequence is synthesized)
tgaggtcagacgggcccttgggctcccgggcaggagcacccggcctcccagctccagaagctgcgcctcctccagctcgcctgcccccacgctgcccagtgactctcaggaggagaggag

SEQ ID NO: 996818 - DNA, 120 bp, Artificial Sequence
  ENSG00000229630_1 (sequence is synthesized)
ctgatgttcctgcacccatgatgaggaaatcaagactcggaatgtcctggtccctttccacaaggcctcgccttatccgctcccacaaagggcttacctcttcaggaggatctggcccca

SEQ ID NO: 996819 - DNA, 120 bp, Artificial Sequence
  ENSG00000229630_2 (sequence is synthesized)
tatcagctgtggggcacccagagcagttgccatcttctgctctgtctagcctgggagtcctggaaggagactgcagcctgagtgcctcccgagccagctcctctccaggacatcaccttg

SEQ ID NO: 996820 - DNA, 120 bp, Artificial Sequence
  ENSG00000229630_3 (sequence is synthesized)
gcccctgggtgtcccaacagacagtcagcacacaaaggttacctgatgcccaggtaggaactgcagctatttttaaactgagatttcctacaaattaaaattgctttgagtatgtgtgaa

SEQ ID NO: 996821 - DNA, 120 bp, Artificial Sequence
  ENSG00000229639_0 (sequence is synthesized)
gatgctgagttctctaaattgctttatgtgagatgtaacacaaaaccacatgttcaccactacaggaatagtgtggaaaaccaggtggtaataagggtctgccaaccaagacaaggaact

SEQ ID NO: 996822 - DNA, 120 bp, Artificial Sequence
  ENSG00000229639_1 (sequence is synthesized)
aatgtcttctggtctccattccaccttcaaaatcatgctccagtgcaccttgttgttagaacataaattgtattctattccacagagtcaagagaatctagagaatttgatttctaaatt

SEQ ID NO: 996823 - DNA, 120 bp, Artificial Sequence
  ENSG00000229639_2 (sequence is synthesized)
cccagctccttcaaaacagaagaaaccttagaagggttttgctgcttgcaaaatgaaattaaacctgcacacttatttctgttctcttaataaagactttgaagagattaattcatgata

SEQ ID NO: 996824 - DNA, 120 bp, Artificial Sequence
  ENSG00000269949_0 (sequence is synthesized)
aattagccaggtgtggcgctgtgtgcctgtaatctcagctactggagaggctgagtcaggaggatcacttgagcctgggatatggaggctgcagtgagctatgatcacattactgcactc

SEQ ID NO: 996825 - DNA, 120 bp, Artificial Sequence
  ENSG00000269949_1 (sequence is synthesized)
taccacagctgtgtcatgaagaattggcaagtcaagtcccagatcctaatgttgaaataaatgctggtaagataagctaggctgaaacgcagttagagccatgaaattcctgagaggacc

SEQ ID NO: 996826 - DNA, 120 bp, Artificial Sequence
  ENSG00000269949_2 (sequence is synthesized)
atgttctgtcccaacatatgggagcccccatgtatttcacactctcctgtcttctccccactcctcagtcctcttctaagtcctcttagattaaatataatggagaattttttaagatga

SEQ ID NO: 996827 - DNA, 120 bp, Artificial Sequence
  ENSG00000269944_0 (sequence is synthesized)
ctctactgtgctagctaatgcaaagctacctttgcatatgtaaggtctagcaggggagaaccaggaggtaggcagcagaagatcctttataaaagaccaagcctgaaatctgaaaatccc

SEQ ID NO: 996828 - DNA, 120 bp, Artificial Sequence
  ENSG00000269944_1 (sequence is synthesized)
tgaaattccttagaaattgatcatcttaactctttctttgccaagcccgcatttcctgatttatatccttgttacagctgaaagaagctcatcatgtaaaggtttatagcaccaccattt

SEQ ID NO: 996829 - DNA, 120 bp, Artificial Sequence
  ENSG00000269944_2 (sequence is synthesized)
ttgcatgaagttaggaaggttatcttcagaggctccaagttttaatgcattccagtgttgtcaaatccaaaagcaattaaatactgttgtgtggttttgaattatagcctgcttgttaaa

SEQ ID NO: 996830 - DNA, 120 bp, Artificial Sequence
  ENSG00000269944_3 (sequence is synthesized)
atagctactgtttcccctaaggacagcctgcatttttacctgatgtcatctgactctgggtctcaagagagtggggaacctaatagaacaactgaataaatgtagttctaagacagtgaa

SEQ ID NO: 996831 - DNA, 120 bp, Artificial Sequence
  ENSG00000269945_0 (sequence is synthesized)
tctcacattccatgaaacattccatgtttcccaggcacaaggtaactgcctctttcacccatttttttccctctctttctgtttttggtttgttttttgttgttgttgttgtttggtttt

SEQ ID NO: 996832 - DNA, 89 bp, Artificial Sequence
  ENSG00000269945_1 (sequence is synthesized)
caatagtgcaatctcagctcactgcagcctcagcctccgggggtcaatgggacaacaggcatgcacaaccatgcccagctaattttgtt

SEQ ID NO: 996833 - DNA, 89 bp, Artificial Sequence
  ENSG00000269945_2 (sequence is synthesized)
atcggaaagctggatctcatacaagaaagaattcaaggcaaatccatagaggaaagtgaaagccagtttactaagggagtaaaagaatg

SEQ ID NO: 996834 - DNA, 120 bp, Artificial Sequence
  ENSG00000269945_3 (sequence is synthesized)
caaggcaaatccatagaggaaagtgaaagccagtttactaagggagtaaaagaatggctactccataggcagaaaagccccaagagctgctggctgcccatttttatggttatttcttga

SEQ ID NO: 996835 - DNA, 64 bp, Artificial Sequence
  ENSG00000269945_4 (sequence is synthesized)
tctgacctctatctcatcctgtgatttagaaggtctaactgtctgggaatgcagcccagtaggt

SEQ ID NO: 996836 - DNA, 120 bp, Artificial Sequence
  ENSG00000269945_5 (sequence is synthesized)
agcccagtaggtctcagccttattttacacagcccctattcaagatggagttgctctagttcaactgcctctgacaattttattttttgtagatacaaggtctcactatgttgcccaggc

SEQ ID NO: 996837 - DNA, 120 bp, Artificial Sequence
  ENSG00000269945_6 (sequence is synthesized)
ctttatttaccattttagtcagctggagcacttgttaaaagactcttataaatctctttttcctctgacttccattcataatacagagctgagccgctcaccatcccataggttgtccag

SEQ ID NO: 996838 - DNA, 120 bp, Artificial Sequence
  ENSG00000269945_7 (sequence is synthesized)
aatgtctcttccctggcttccactgcctctgttgagtgtccatggggtcctgtggatcctgtggtgcaaaggctgagacctcagccctaaagcagagcccagaacaggagaccaccacca

SEQ ID NO: 996839 - DNA, 120 bp, Artificial Sequence
  ENSG00000269945_8 (sequence is synthesized)
aggcctcttgcttggatttttggtttcttttggtgaaaacttcactcactgttctcactcaccctgccagtgggaaaataaacccatacgaaaatggtcttgggactgggagccctgcta

SEQ ID NO: 996840 - DNA, 120 bp, Artificial Sequence
  ENSG00000269945_9 (sequence is synthesized)
aacccttgttcaggttaaactcccttaagtaacagagaacagacctgactgagcttgatctcctaggatatttctctgtgctgagagcctaaccaggaaaaacgttaaacagatcactta

SEQ ID NO: 996841 - DNA, 120 bp, Artificial Sequence
  ENSG00000269945_10 (sequence is synthesized)
gctgatggcaaatatatgtgaccaattctcagcctcagccacagaagggacttgatgggtgggaccttggcaccaccccttcccccactgcccccactgccttggtctaaatctgcatct

SEQ ID NO: 996842 - DNA, 120 bp, Artificial Sequence
  ENSG00000269945_11 (sequence is synthesized)
cgtagaattctttgcacaacagcagacctattgtgaggactttccttctccctaaccccatccccctatcaagtaagatgtttacttccagtactagaagggggcgggcatgcaggcaga

SEQ ID NO: 996843 - DNA, 120 bp, Artificial Sequence
  ENSG00000269945_12 (sequence is synthesized)
aatagaaggaattctaaccatagctaaccaaagtcagatttccaggccactccactcaccggggtctgctttaacctctgggaacaaagtaaacaaaaagctggattgttgcatcctgct

SEQ ID NO: 996844 - DNA, 120 bp, Artificial Sequence
  ENSG00000269945_13 (sequence is synthesized)
gttaaagttttgatatcttctgtgcctcacagccttttgtttcactctgatgctattatttactcatccttttgcacaggaggtcactttgcatagacgagaagaacttgaggctgagcc

SEQ ID NO: 996845 - DNA, 120 bp, Artificial Sequence
  ENSG00000269945_14 (sequence is synthesized)
tctacctatggtctgttggaacctaaggaagccagttcatttctcccaatctcaatgccctcatctgtaaaagtagggaaattatactgggcttgctgggttggtttgtgtgtgtatgtg

SEQ ID NO: 996846 - DNA, 120 bp, Artificial Sequence
  ENSG00000269945_15 (sequence is synthesized)
tgaactataaatacttgaaaacgactacccctttcagaaagggttactattgctattactgttatctgtgcctttatgtatgtataactgatctgtctcctctactaggctatgcatttg

SEQ ID NO: 996847 - DNA, 120 bp, Artificial Sequence
  ENSG00000269945_16 (sequence is synthesized)
agagcaagaattgtgtctgtattgctaacagcaattccagcgcctaacaaagaggaggtgctgtggaggccaaagcaactccaacttggatgctaatccatcactttaacttctgattaa

SEQ ID NO: 996848 - DNA, 120 bp, Artificial Sequence
  ENSG00000269945_17 (sequence is synthesized)
cccttgttctaggaagtcctctaagatttccagtttatttgatgtttcttgtgtgagagtaggtacctactgtaaatcctgccctgaggtcaaaacaaccttgatgttataggacttcaa

SEQ ID NO: 996849 - DNA, 120 bp, Artificial Sequence
  ENSG00000269945_18 (sequence is synthesized)
ttgttctacacaaacattctgaatcacatataccctttcccagtattatataagccctggtcatgagaataaatggtgcaggatccaccatcttgcctcactgctgcctgagacacagac

SEQ ID NO: 996850 - DNA, 120 bp, Artificial Sequence
  ENSG00000269945_19 (sequence is synthesized)
atggcttctgtttgtaagtccctattaagtgtatatttctgaggaactggatatgtcagcctttttcttcagcctctcagcttccttggatttttgggggtaggtttgctgaggcctggc

SEQ ID NO: 996851 - DNA, 120 bp, Artificial Sequence
  ENSG00000269945_20 (sequence is synthesized)
ccccatggaacaggtgctccatcaaggagtaagtgctgagcatttagattcaggtgaggggcagcagccaccaggaaagaagagtctatgcataattacctgccctacttcctgagtcag

SEQ ID NO: 996852 - DNA, 120 bp, Artificial Sequence
  ENSG00000269945_21 (sequence is synthesized)
gggttctcaaattctttgtgttcaggacacatttgaagagccggcacattcagacaacagtgactcagcaatcattgcaacttaatccctactactgaagaacaacatctcataatgtct

SEQ ID NO: 996853 - DNA, 120 bp, Artificial Sequence
  ENSG00000269945_22 (sequence is synthesized)
acaaaagcaaccactatgaccccaccatttactgggatgcgcttcagcactacagttagaaggtggaacgctgactgcccgaatgtccttcctctaatatacacaagaagatttctcacc

SEQ ID NO: 996854 - DNA, 120 bp, Artificial Sequence
  ENSG00000269945_23 (sequence is synthesized)
tgtctagttaaccactatatttcttggtccctggcttgacaacatacctcttacctcctcacagcactacatagtgtgttggcatgcagtcatgtttcaggcaggcacttcaaatttgcc

SEQ ID NO: 996855 - DNA, 120 bp, Artificial Sequence
  ENSG00000269945_24 (sequence is synthesized)
tgcccttggaattccaggattttgcttttgcagtttctaattgtcaacaatcctgaaggcccttgacatgtggtcatttgtaattttgctgagatgtaattttttttttttttttgagac

SEQ ID NO: 996856 - DNA, 120 bp, Artificial Sequence
  ENSG00000269945_25 (sequence is synthesized)
ggattacaagcatgagccactgtacccggcctgagatgtcaatttttaaaaattagtttataagtaatacataagtatatgtatattccaaaatgtctatacaataaaaaaatatggaag

SEQ ID NO: 996857 - DNA, 89 bp, Artificial Sequence
  ENSG00000269947_0 (sequence is synthesized)
agccattgcattccagcctgagcaacaagagtgaaaaaaaaaagaaaaaagctcaattatgtgtctcaaaaaaaaaaaaaaagaaagaa

SEQ ID NO: 996858 - DNA, 120 bp, Artificial Sequence
  ENSG00000269947_1 (sequence is synthesized)
ggcagttccactgggtttcagacacagagatcccagcctggattgtcgtggaggatgaagctgctccatcttggatgctgatccgccatgttgtcctctggttaacccctgttctggaat

SEQ ID NO: 996859 - DNA, 120 bp, Artificial Sequence
  ENSG00000269947_2 (sequence is synthesized)
gcctcctctaagattgccactttatctactgtgaccttaaatcctgctcttaggtagattcacatagcattctgcgcctttccctgaggggttgacttcagtggtgccacacatttctac

SEQ ID NO: 996860 - DNA, 120 bp, Artificial Sequence
  ENSG00000269947_3 (sequence is synthesized)
tgaggcatgtgtaccttttgcatcaggtatatcagccctgggactcggggataactgactgacggctgcctggcttctgtttctaagttgctattaaatgtttctttctgagaaactgga

SEQ ID NO: 996861 - DNA, 120 bp, Artificial Sequence
  ENSG00000259362_0 (sequence is synthesized)
ccgccccgaggaaagaatcagcaggctttgtgtaaagggattaaggcattagcctgctcagcagggagaagggctcttgactctgtggcagtgtggccacgtttccatgtgtccatgtgt

SEQ ID NO: 996862 - DNA, 120 bp, Artificial Sequence
  ENSG00000259362_1 (sequence is synthesized)
ccatgtgggctgctgtaggccctggctcactggtcccaggacctgtggctaaaaggaggcattgctggaggcctctcttgagaggtgggtacgtgggccatgctgcctatgccctcctca

SEQ ID NO: 996863 - DNA, 120 bp, Artificial Sequence
  ENSG00000259362_2 (sequence is synthesized)
ggtccccagaaggagcacttccaaggggtgctgagtcgggggaggtgggcaggaaaagatgccagggaaagttctgagcccaggtaggagtgacagtgatgtgtggtggagatcctacag

SEQ ID NO: 996864 - DNA, 120 bp, Artificial Sequence
  ENSG00000259362_3 (sequence is synthesized)
ccaaacgaggagcagttaacaatgccacttcaaaaacagcgcctgaggctcagaaagaaggtgtatcttgccaaccatcacacagcaagtcaccagcagagctgagaccagaacccaagc

SEQ ID NO: 996865 - DNA, 120 bp, Artificial Sequence
  ENSG00000259362_4 (sequence is synthesized)
tcctggtccagggctcagtcattgattgttccagccacacgtggctggtgccaggggcccgtccggtctactccctgcggtgactctttctcctgcctcccaactccagaaaaggatcct

SEQ ID NO: 996866 - DNA, 120 bp, Artificial Sequence
  ENSG00000259362_5 (sequence is synthesized)
gctggggagcctggggtgagatcccaagagcctttccgtgtggacgtggacatagtggggtaggtcgagagaccaaagcaggattctaacaggcctggacatatgtcatgggccatcaag

SEQ ID NO: 996867 - DNA, 120 bp, Artificial Sequence
  ENSG00000259362_6 (sequence is synthesized)
accatctgcatgaaggtcttttgctacagaagtgaggtggctttttgcagctgctcaggagaacaatctggcgtagaagtgggaagggaccagagaatggggcgttggaagacctaggtt

SEQ ID NO: 996868 - DNA, 120 bp, Artificial Sequence
  ENSG00000259362_7 (sequence is synthesized)
ggagcctcacctctgccctatcttcgctgtgtgaccttgagcaggtcactctaactcttgccgcctcagcttcctaacagcgcccctgcccggcctctcttgcaggcccacagaatgaaa

SEQ ID NO: 996869 - DNA, 120 bp, Artificial Sequence
  ENSG00000259362_8 (sequence is synthesized)
agagaggagttccaggaaagggtttggcagatggcatccctgcaggactgcctcgcggcgctctgccccatccagcccctacgtactggccatgtgacctcaatgtttgatggactcact

SEQ ID NO: 996870 - DNA, 120 bp, Artificial Sequence
  ENSG00000259362_9 (sequence is synthesized)
tggcctctctgaggctcgctttctccatctctaaaatggaggatgaagcaggttcagccccacgggcaggcagcactatgccagggacatggcgagccctctggaaaagttcacctgatc

SEQ ID NO: 996871 - DNA, 120 bp, Artificial Sequence
  ENSG00000259362_10 (sequence is synthesized)
cagacgttgctgggtcaacgggaaggaatgactttcactcctctgcttcaaaccaccagactgtccttggccctccctaatgaaggagcagagaacagcagagtgggcagggaccttgga

SEQ ID NO: 996872 - DNA, 120 bp, Artificial Sequence
  ENSG00000259362_11 (sequence is synthesized)
ggtcagcagggtggctgctcagcccagaggcaaccgggagctcgtcccagggtgtgacaattcagtcagccctttactgaacactcggctttaaaccgcctcatgcctggcatgaggaag

SEQ ID NO: 996873 - DNA, 120 bp, Artificial Sequence
  ENSG00000259362_12 (sequence is synthesized)
gcaccgtgctggagggtttcaccacggttctctgtgtgtctccggggagctcactgtcctgtctgaggcccgtccggggtccggacagtggagctttcaggttcgtgcgcaccctctgcc

SEQ ID NO: 996874 - DNA, 120 bp, Artificial Sequence
  ENSG00000259362_13 (sequence is synthesized)
tgcctcttctccctgtcagtaaggacgtgggtgtggctgggaggcagatcctgggtggagaacggagctcctggttctgaacagtttgagggtctggaagtcctttaagaagatggtgaa

SEQ ID NO: 996875 - DNA, 120 bp, Artificial Sequence
  ENSG00000259362_14 (sequence is synthesized)
aactatggaccttctccccaaagagaagcacacatccacatccagaggcaaaaaccccatcgctcagaaccccgtggatgaggcagtcattatccagtggtgctgtcactatggctgggg

SEQ ID NO: 996876 - DNA, 120 bp, Artificial Sequence
  ENSG00000259362_15 (sequence is synthesized)
ggccattgccatgatcttgtccacgggtccactttcagcagctgggccctggagggcagcacacagctcatgattgggttggagatgggggagtcaggggcagatggtgggagctgtccc

SEQ ID NO: 996877 - DNA, 120 bp, Artificial Sequence
  ENSG00000259362_16 (sequence is synthesized)
cagccctgcctctcttaggaccctcctgggactcaggtacatagggtccctgagaaagacccagtttgatgagacaggcaggaggaataaggaagagtgtagtttaagaaagttttctcc

SEQ ID NO: 996878 - DNA, 120 bp, Artificial Sequence
  ENSG00000259362_17 (sequence is synthesized)
agctctggttcatgcatccgtcctgaaagaaggcagggaaaggattattcacccatttcacagatgaagaaattgaggcttggagaggtcacggagcacacagagcaaagaagtcaaaac

SEQ ID NO: 996879 - DNA, 120 bp, Artificial Sequence
  ENSG00000259362_18 (sequence is synthesized)
caggatttgaatctactctgattacctccagagcccatgtcttgtcccaatggatggaaaattcttaactatttaactcaatattgagcagctactgtctacagaattctgtgccagaca

SEQ ID NO: 996880 - DNA, 120 bp, Artificial Sequence
  ENSG00000259362_19 (sequence is synthesized)
gcttgggagacacagacctacagggagatatagttcccactggaagcacccagggcagtaataattatcatcataacaaaggaataataatagctaacattttggagcacttactaggga

SEQ ID NO: 996881 - DNA, 120 bp, Artificial Sequence
  ENSG00000259362_20 (sequence is synthesized)
ccagcattatgctacacagttttcatggattatctcatttaagctctcaaatattttggggtgtaaataacagtatgcccacaatttttgtttgttgttggtgttcagaagtgtatatcc

SEQ ID NO: 996882 - DNA, 120 bp, Artificial Sequence
  ENSG00000259362_21 (sequence is synthesized)
gtttttgagaatggaggctcagcgagattaggagccttgctctcaacgagggaggaattctggctgcgactctgtcccttactacctgggcatcacctctgtcaaacctggacaggtgcc

SEQ ID NO: 996883 - DNA, 120 bp, Artificial Sequence
  ENSG00000259362_22 (sequence is synthesized)
acttagacctggctgaggttggctgaggcggggaggatggggaggttgtgggtaggcagcacctattcatacccacagtccagggactgttccagaagaatagtattccctgtgcccttg

SEQ ID NO: 996884 - DNA, 120 bp, Artificial Sequence
  ENSG00000259362_23 (sequence is synthesized)
ccgcctctgagccttggtgtcccagcctttcgatcctctcacttctgatgtccttgagccataatctgagccattctctaggataaggagatgcttgaggttgagtgaaaggttgacatt

SEQ ID NO: 996885 - DNA, 120 bp, Artificial Sequence
  ENSG00000259362_24 (sequence is synthesized)
tctgcaggagcaaagaatgacttgatgcaggagagaaaggctgtggggggaaagtgagtgaggcaaatccccaaggcagagcagagccttccaaagggtgcaggggagagtcttggtgga

SEQ ID NO: 996886 - DNA, 120 bp, Artificial Sequence
  ENSG00000259362_25 (sequence is synthesized)
gggggccagccttgctcagcagccccaacctcaacaaggacccctacccaagaaggcctgcaaaatagcaaatcaatgaagacagcaatgaaagcaatgaggagggaagagggaccagaa

SEQ ID NO: 996887 - DNA, 120 bp, Artificial Sequence
  ENSG00000259362_26 (sequence is synthesized)
tcccagtcacatcatcacccctcacccctttttctggcctcagttttccttctgtgaacagagggagctggcccttctgtcatttgcaggattttcatctcaggctggcagcaggagctg

SEQ ID NO: 996888 - DNA, 120 bp, Artificial Sequence
  ENSG00000259362_27 (sequence is synthesized)
gaaaagtgagggaggtccctcccttccccggcccggggtctgtgattggcagcacctcctcctctcttcctctcctgtcccttccttccccttccctcccctgctttcctttcccttccc

SEQ ID NO: 996889 - DNA, 120 bp, Artificial Sequence
  ENSG00000259362_28 (sequence is synthesized)
ctcctccccttcccttccccagtcttcccctcccactctttcaagcccccagcgtgctgtgcagttattagtttaggttcatttagaatcggcttagcaaccccacacccctggaacctg

SEQ ID NO: 996890 - DNA, 120 bp, Artificial Sequence
  ENSG00000259362_29 (sequence is synthesized)
gaagcttaaagcacaagatgtctggcaaatggaaattcaattgctttaatatagagactattttgctgcagtcgaactggagcctcttattaagaatctgatggaatttctaaacaggga

SEQ ID NO: 996891 - DNA, 120 bp, Artificial Sequence
  ENSG00000259362_30 (sequence is synthesized)
gagaggccccaaggagggggcatcgcccatcacacaccaacattgctcttgacatatttatggctccaataaaatctcacatctggtatattttaaaataaaattgaaaatttatcactt

SEQ ID NO: 996892 - DNA, 120 bp, Artificial Sequence
  ENSG00000265073_0 (sequence is synthesized)
tggtggagacagcggtctcgctatggtccccaggctggtctcccaactcctggccacaagggatcaagggatcctcctggccaaagcactgcctatgcaggtgtgagccaccgccgccgg

SEQ ID NO: 996893 - DNA, 62 bp, Artificial Sequence
  ENSG00000265073_1 (sequence is synthesized)
gagggagcacctcccgggttcaagggattctcttgccttagcctccagagtagctgggatta

SEQ ID NO: 996894 - DNA, 79 bp, Artificial Sequence
  ENSG00000265073_2 (sequence is synthesized)
ttcagcctttttatggcaaggctctggaggccaccctgcttccaaaggctaggtctgccttctaactctagccaggctg

SEQ ID NO: 996895 - DNA, 120 bp, Artificial Sequence
  ENSG00000260737_0 (sequence is synthesized)
ctggcagaggggcccagtctagtctgtgacctgagccatcatggtagggtgtccagggtgaggggagggtggtgtgaatccccagtaatgcaggtcctttccaggccaggcccctggtcc

SEQ ID NO: 996896 - DNA, 120 bp, Artificial Sequence
  ENSG00000260737_1 (sequence is synthesized)
ccaggagtgcggggatgcctgaggtctactgctgccttatccagagctgccatccccggcgatgactcagagttcctgtggccccagcatcatccctccatccctggctgtgaggcagga

SEQ ID NO: 996897 - DNA, 120 bp, Artificial Sequence
  ENSG00000260737_2 (sequence is synthesized)
gcagagttgcagacctgagaggccttgaatttgtttgatataggactttgccaccagacaaagtgctttgcctgtgaggtctggcttggcctggcctctgagaaagaacaaacacagacc

SEQ ID NO: 996898 - DNA, 120 bp, Artificial Sequence
  ENSG00000260737_3 (sequence is synthesized)
tcactggaaggaacctggagaacgggagaggagaggctgctgctgtctgccctcccagcagcagatataaagacaatgggcttctaagtcccctagagtcccagctgtgtaatttaaggc

SEQ ID NO: 996899 - DNA, 120 bp, Artificial Sequence
  ENSG00000260737_4 (sequence is synthesized)
gagttcatctctcacagcctcagtttcctcatttgctggcacctgtctttctccttcatagccattgtcactgttgcaatgatatcaacaatgcttacatttcagatagatccccagctg

SEQ ID NO: 996900 - DNA, 120 bp, Artificial Sequence
  ENSG00000260737_5 (sequence is synthesized)
ccctccacttggagcgagttctagttggtgaaatgtagccagaggttcctggaaaggctttccttctcaagtaaagcctggctcagagaaaaccactggtctctttccttttcttcctcc

SEQ ID NO: 996901 - DNA, 120 bp, Artificial Sequence
  ENSG00000260737_6 (sequence is synthesized)
tgacatgaacatggggcaggaaggagcatggagaagacaagaacaaggctctcagaaggaaatggtgtggctggagccatgagaactggttgtggagggggtgaggaaggcaaatataat

SEQ ID NO: 996902 - DNA, 120 bp, Artificial Sequence
  ENSG00000260737_7 (sequence is synthesized)
ttctgacctacgtaatgatgtatgcacaagaagcctctcttgaatgtattaattcagtaaacagttatggagtccttacaatgtgctagtgggactttgaagatgaatccaaatttggat

SEQ ID NO: 996903 - DNA, 120 bp, Artificial Sequence
  ENSG00000260737_8 (sequence is synthesized)
cctggcctggaaaggctcaaagcccaatatgggagcctggatacaaatgtgaaacttatcttcttttattaaccaatcaatcacctcctgccaaaacaacatcagcaaaaacaacagaaa

SEQ ID NO: 996904 - DNA, 120 bp, Artificial Sequence
  ENSG00000260737_9 (sequence is synthesized)
aaaacaaaaacaaaaacaaaaacaaatctgtgtacacaagacctttgtttccacagcagacttggctaaaggtttgggcatgcatatgcatacccccaaaattaaaaatggaaaattgaa

SEQ ID NO: 996905 - DNA, 120 bp, Artificial Sequence
  ENSG00000260737_10 (sequence is synthesized)
acagttggaattttgttctaaggatgatggaagccattggaaggttttctttgccaaagtgatgtgatctgatagaaggttttatgaagcccacgttgtctactgtgcagagaatggagt

SEQ ID NO: 996906 - DNA, 120 bp, Artificial Sequence
  ENSG00000260737_11 (sequence is synthesized)
ccatggcatgctacatccttgaataaatatgcccaaggcagatgtggtaatgaagattggttgagaattctgaaggcagacgtcccagacgccaatcacacaatttctctgtggctcact

SEQ ID NO: 996907 - DNA, 120 bp, Artificial Sequence
  ENSG00000260737_12 (sequence is synthesized)
tttcttatctgtgaaaagggagctagttaccaccagccccaaccccaatcctcttcccacctcacagaatggggagaggattcagtgggcagtccctggcataggggtcacagaatctac

SEQ ID NO: 996908 - DNA, 120 bp, Artificial Sequence
  ENSG00000260737_13 (sequence is synthesized)
accaccaaatatcattcatattctaattctgtattctgtgtcccctattgccccaagataagttcatttaaaacaaaaaagcttctatctcaggtagaaaacccatcatcactgggcatt

SEQ ID NO: 996909 - DNA, 120 bp, Artificial Sequence
  ENSG00000260737_14 (sequence is synthesized)
ctccccgccccttaagatctagttatgagtagctgcaattcctgtgaattccaaggtagtttcaccacctcaagttcacctttagatctgacttctggcttcttttaggaagttcccatc

SEQ ID NO: 996910 - DNA, 120 bp, Artificial Sequence
  ENSG00000260737_15 (sequence is synthesized)
agaaaacccatcatcactgggcattgtcttccagtgattctgagcagaaacaaaggggaacgtatgtcttcattgtgactcagcgagcaaagagatggagtcttttccaagaagaaagtg

SEQ ID NO: 996911 - DNA, 120 bp, Artificial Sequence
  ENSG00000260737_16 (sequence is synthesized)
ggagatttgggaccactgacatatttggcccactgattccattcccctagaccaacacgtgttcatcaaattgcatcactcttatggggaacttaatgcaactccggtgcccattgcatt

SEQ ID NO: 996912 - DNA, 120 bp, Artificial Sequence
  ENSG00000260737_17 (sequence is synthesized)
agtttttgatgatggaattctctttgtgaacttgaacttgaggggtctggctacccctctgagacttcttttttgagataaaatcatataacataaaattcgcccttttaatgtgtacaa

SEQ ID NO: 996913 - DNA, 120 bp, Artificial Sequence
  ENSG00000260737_18 (sequence is synthesized)
tctagcaagaccttgtttatgttggaaactgttagcagacgccgaagctgtccggggctgagtgagtaccacgttactcaggcttcactgcgctgaaggaagaggttgagatgagggcag

SEQ ID NO: 996914 - DNA, 120 bp, Artificial Sequence
  ENSG00000260737_19 (sequence is synthesized)
tcactcacctgtgatgaagacccactctgcagcttcatttcctgtcattacagacagtgcctgggcccaatcaggaggggcttatggggaatggggggcaggtggcactggggtgtctag

SEQ ID NO: 996915 - DNA, 120 bp, Artificial Sequence
  ENSG00000260737_20 (sequence is synthesized)
ggagagcaaatacaaattggataccacctagaggtcgcgaaatggagaataagtttctaagaacagctaaaaaatgaaagagacatgacaaccaaatgcaacatgtgacccttgataggc

SEQ ID NO: 996916 - DNA, 120 bp, Artificial Sequence
  ENSG00000260737_21 (sequence is synthesized)
ccttagactttttttaaaaaaaagctataaagaacattattgggaccactgtgtcaatttgaatatgattgcatgttatatgatattattgcattaatattaaacttcttaagtatgaaa

SEQ ID NO: 996917 - DNA, 120 bp, Artificial Sequence
  ENSG00000260737_22 (sequence is synthesized)
tggaaaggctcaaagcccaatatgggagacggaccttgcaggtggcaatcgtgcatgggaggacatggtggtggcagggttcctgactgtggctgtgggtggcctggacttggcagtgga

SEQ ID NO: 996918 - DNA, 120 bp, Artificial Sequence
  ENSG00000260737_23 (sequence is synthesized)
gggagattcattcagagaagagcgatggagctgctatgttcacccactttcccaattatagcccctctcctccagggcatttgctgggggtggggggtggcggaataaagtcccctgact

SEQ ID NO: 996919 - DNA, 120 bp, Artificial Sequence
  ENSG00000260733_0 (sequence is synthesized)
ggggattctgtgtccctgcatccagaaaagggacagatatagaaagggaggatgcggtctcaccgggccataaacatatatgaatccttcttggaaggaatcagaaatactcgcaggcct

SEQ ID NO: 996920 - DNA, 120 bp, Artificial Sequence
  ENSG00000260733_1 (sequence is synthesized)
tctagtttctgggtaaactgatagaacacaggctctttaactggacagtcaaaccacaatgccccctggtggtgaaatcatgcatatacacatgtcatcacagataggaaattctccaat

SEQ ID NO: 996921 - DNA, 120 bp, Artificial Sequence
  ENSG00000260733_2 (sequence is synthesized)
atttttttaagcaacgggaaaatgaaaaatgaacgggaggagggaacactgctgccttctgaggacagaagtcgtgtttcaagtagtcaggagtgatggggaggtgggacgagaatgaag

SEQ ID NO: 996922 - DNA, 120 bp, Artificial Sequence
  ENSG00000260733_3 (sequence is synthesized)
atttaggggaatctgaacaaaacaaggtggtgtatggggaatgagggcagtcagtaaagccaaatagtaccaggtggaaaaatagcctaaaagaagtacaagtctaatcatccaaaaatt

SEQ ID NO: 996923 - DNA, 120 bp, Artificial Sequence
  ENSG00000260733_4 (sequence is synthesized)
ctaaagcaaaactaaaactccatagttcagcaaaagacaccctttcaggtgtttagaagactgtggttatccgtttaaagatgttcctctctcaaggaatctctgagaactataaatgtg

SEQ ID NO: 996924 - DNA, 120 bp, Artificial Sequence
  ENSG00000251022_0 (sequence is synthesized)
gtgcatttgaccgctcctccctccgcgttggaggcggaatagtgggttttgctgcaaccggtttattttccttctgttttcacccattctggcacaatctggcgccatcgtccttcttgt

SEQ ID NO: 996925 - DNA, 120 bp, Artificial Sequence
  ENSG00000251022_1 (sequence is synthesized)
gaggccaagcctgaaaatgcgaagcagagaggcaggaccaaaattgaggcgaatccaggaacctgccaatgggtctccgggtgcggtctctgaaactggaggatatcgggaggaaaggct

SEQ ID NO: 996926 - DNA, 120 bp, Artificial Sequence
  ENSG00000251022_2 (sequence is synthesized)
agtcaaataggatacgccgacttttaattcaaggaacccttttctgaaacactttgccacaatgaaggaaataagattacagccgaagatacatattaaggaattgtactctcagagatg

SEQ ID NO: 996927 - DNA, 120 bp, Artificial Sequence
  ENSG00000251022_3 (sequence is synthesized)
ttgagaaaagatacatgggtcttggaagataattactcaaaatatgcagggaaggtagtatatctttctattttaaatgtattaagtattcctggaactatagcagtgagttggaaatgg

SEQ ID NO: 996928 - DNA, 120 bp, Artificial Sequence
  ENSG00000251022_4 (sequence is synthesized)
gggtgtttttcttagagaacatcatttgtcatatttatttgatcaagaagttgaagatttatataataaggtatgggacttacacatttattttgataaaagaacacagaaaaggtcagg

SEQ ID NO: 996929 - DNA, 120 bp, Artificial Sequence
  ENSG00000251022_5 (sequence is synthesized)
tatgagcagaaaattgacatttatttcagcctaatgtggatactgtactctgaattaaaaatttcttttccttactcttccagcttttaaagataagtattatttcaaaatagtattttt

SEQ ID NO: 996930 - DNA, 120 bp, Artificial Sequence
  ENSG00000251022_6 (sequence is synthesized)
ttttaaagataagtattatttcaaaatagtatttttttaattaatagattcaattcaggaaaggcattggagggggtggagcttttaactttgacagtctcactctgttgcccaggctgg

SEQ ID NO: 996931 - DNA, 89 bp, Artificial Sequence
  ENSG00000251022_7 (sequence is synthesized)
agtgcagcggcgcaatctctatagttattgtggcccagcttcccaagtggctgggattagaggcgcatgccaccacacccagctaattt

SEQ ID NO: 996932 - DNA, 120 bp, Artificial Sequence
  ENSG00000251022_8 (sequence is synthesized)
tcagcctcccaaagtgctgggattatagtcataagccaccacacctggctgttggttatcttttcttagaaataatgatataatcttttcagcacctgatattcttaaagatccagggtt

SEQ ID NO: 996933 - DNA, 120 bp, Artificial Sequence
  ENSG00000251022_9 (sequence is synthesized)
tcagcacctgatattcttaaagatccagggtttacaaatgactgttagatatgccaaggatgactagcctataacttaaggatctgttcaggaacagtagaaaagaaggtgataggaaac

SEQ ID NO: 996934 - DNA, 120 bp, Artificial Sequence
  ENSG00000251022_10 (sequence is synthesized)
tgggaatcttaaatctaatactagttctgtcatgaattaggcttgttattgtagttgtttctcaaatttaagaaaatatgaggggtcttgaaaaagtgcatggaaaatgcatatcatgaa

SEQ ID NO: 996935 - DNA, 83 bp, Artificial Sequence
  ENSG00000251022_11 (sequence is synthesized)
ataacatgtctgaacaggatctagtttgaagcactaagaagaataagacatcagtttgaaaagaggctctatcagaacaacac

SEQ ID NO: 996936 - DNA, 120 bp, Artificial Sequence
  ENSG00000251022_12 (sequence is synthesized)
tatatgttgacacttgggtggaagaatggtgaactaattgatgctttatgaaaagttgatagggacagtgctccaaagaaatcagtttacaaatggataactcgttttaagaaggcataa

SEQ ID NO: 996937 - DNA, 120 bp, Artificial Sequence
  ENSG00000251022_13 (sequence is synthesized)
ggtaatgttgaagaagaagcccacagtggcagatcatccacatcagtttgtgagaaaaaagttagttcatggcgtaattgaagaaaaccaacaattaacagcagaaacaacagccaacac

SEQ ID NO: 996938 - DNA, 120 bp, Artificial Sequence
  ENSG00000251022_14 (sequence is synthesized)
catagacatctcagttggttcaccttacacaattttgactggaaaagttcagcaaactttatacctgataggtaccaaaaccattgcacccagatcagctacagacaagaatagagcttt

SEQ ID NO: 996939 - DNA, 120 bp, Artificial Sequence
  ENSG00000251022_15 (sequence is synthesized)
caatggaaattttaaataagtgggatcaggatcttgaagcctttcattgaaaaattgtaacaggagatgaaacatggctttaccagcgcaatcctgaagacaaaacacaaagcagtggtt

SEQ ID NO: 996940 - DNA, 120 bp, Artificial Sequence
  ENSG00000251022_16 (sequence is synthesized)
accaagataagtagttcagttaaagcacaagaggactggttgagagcaaaggtcatggcaacagcttttgaatgctcaaggcattttgcttgttgactttctgtagggccaaagaatggt

SEQ ID NO: 996941 - DNA, 120 bp, Artificial Sequence
  ENSG00000251022_17 (sequence is synthesized)
aacgtgcttatcatgggagtgttttgagaaacttagccaaagcttcagcagaaaaatccccgagaaagaccagagagttcttcaccacaacaatgttcctgctcatccctctcatcaaac

SEQ ID NO: 996942 - DNA, 120 bp, Artificial Sequence
  ENSG00000251022_18 (sequence is synthesized)
aaggccattttgcaagagttttgatgggaaatcactaggcatccaccctacagtcctggtttggcaccttctgactttttgtttcctaatcttaaaaaaatttttcagggcagtacattt

SEQ ID NO: 996943 - DNA, 120 bp, Artificial Sequence
  ENSG00000251022_19 (sequence is synthesized)
ttctcaagttaatgtataaagaaactgcattgatgtagataaattcccagaactctcagttctttagggatggactaaatagctggtatcatcacttacaaaagtgtcttgaatgctata

SEQ ID NO: 996944 - DNA, 120 bp, Artificial Sequence
  ENSG00000251022_20 (sequence is synthesized)
gagctaatgttcaaaaatatagtttatattttttatcttttaaccatttttccacaaactttttgaagtctccttgaatatgtaccatttataaaggggaaaaattctgtgactactcat

SEQ ID NO: 996945 - DNA, 120 bp, Artificial Sequence
  ENSG00000251022_21 (sequence is synthesized)
gttgacttaatgctgacttaattttctgttttgtaaatatatacaaacaagttgatacaaattttgtttatagcccttaaacaaatttgtgaaataaatgcattcagaaacaaactaaaa

SEQ ID NO: 996946 - DNA, 120 bp, Artificial Sequence
  ENSG00000251022_22 (sequence is synthesized)
aaatctacctattttatggtatataatctcattaattgtccacttggaaagaataataacagatatttatttattggccagttactatgggccacaaattatgctgagctttttttaatt

SEQ ID NO: 996947 - DNA, 120 bp, Artificial Sequence
  ENSG00000251022_23 (sequence is synthesized)
ggccccgccccacgccacgccacggcccgccgggccccgcagggagttcgaaggcttcgaggctgctcccatacgcactggtggaaggagaggccgcgctcccggctgagcacggtgtca

SEQ ID NO: 996948 - DNA, 120 bp, Artificial Sequence
  ENSG00000251022_24 (sequence is synthesized)
cgggtgctgcagcccactgcggagcaacttcgggtcatcttcttgttacgtggggccccaccttcggggttcccgcgacagcatgaatcacgaccactttagctccgcccgttgactctg

SEQ ID NO: 996949 - DNA, 120 bp, Artificial Sequence
  ENSG00000251022_25 (sequence is synthesized)
cggctacgacctttatttgtcacgaaaggcgggctttagaggcgcgggacttccacacttcctctccgaaggccctgcgccggtgccgtagccaatgacaggccacgttgtgtcccagca

SEQ ID NO: 996950 - DNA, 120 bp, Artificial Sequence
  ENSG00000251022_26 (sequence is synthesized)
gaaaaagttacataaacattcatgtatcttgtgatgattgttttgtctacaacttcactctttgcagacatcaagactgttgaaatgaggggaagggatctgaattcccaaaagaatgtc

SEQ ID NO: 996951 - DNA, 120 bp, Artificial Sequence
  ENSG00000251022_27 (sequence is synthesized)
aaatgggcatggaggctcatgcctataatccttgcactttgggtggctaaagcagaaggatccctggaggccaggagttccagaccagtatgggcaacaaaatgagtccctgtgtctaca

SEQ ID NO: 996952 - DNA, 78 bp, Artificial Sequence
  ENSG00000251022_28 (sequence is synthesized)
cgccctggatgttgaagctgcagcgcgctgtgatcattgccaccacactccagcctgggcaacacagcaaaaacctgt

SEQ ID NO: 996953 - DNA, 120 bp, Artificial Sequence
  ENSG00000251022_29 (sequence is synthesized)
gccaccacactccagcctgggcaacacagcaaaaacctgtctctaaaaaaacctagaatatctttgtgctatgcaaatcctaatttgaaaaatttgtcattaaattctctccaaacattc

SEQ ID NO: 996954 - DNA, 120 bp, Artificial Sequence
  ENSG00000251022_30 (sequence is synthesized)
atatgatttactgagatgcgtgtcgtgttcttgcgctttatcttgtagctctccgatgcggagataatggggaagctcttggcatggttggctgtaggtatgtgataccggaggagcagg

SEQ ID NO: 996955 - DNA, 120 bp, Artificial Sequence
  ENSG00000251022_31 (sequence is synthesized)
tctgaatggaattaatagcttttggttatggttccttaaaagtcacatggcctaaggatagatggtcaaggaactttggaaaaattggtccctgggggatgtgcagggcaaatacttttt

SEQ ID NO: 996956 - DNA, 120 bp, Artificial Sequence
  ENSG00000251022_32 (sequence is synthesized)
gctcctcagtagtaataggggcaggggacaaggggcaattaagtggttttggttgggaatgaggcattatgaatagctttcaggagatagagcttagaacaatgtcttagttataagctc

SEQ ID NO: 996957 - DNA, 120 bp, Artificial Sequence
  ENSG00000251022_33 (sequence is synthesized)
ttatgtttgaggaagagatttcaatttgcttagagaaggaaacgggccagtgggtttttgtctctgagaaggagatccttagcatacagaaaacagagaagggtttgcaacttttccgtt

SEQ ID NO: 996958 - DNA, 120 bp, Artificial Sequence
  ENSG00000251022_34 (sequence is synthesized)
gtcttggaagataattactcaaaatatgcagggaaggaataaaattgaagggtgtttttcttagagaacatcatttgtcatatttatttgatcaagaagttgaagatttatataataagg

SEQ ID NO: 996959 - DNA, 120 bp, Artificial Sequence
  ENSG00000251023_0 (sequence is synthesized)
tgaagatatgtgtcatatttctttcaatggataattttaagtgatattaaattatgtcaatagtttgaatagcaatagcaaccattgagctaaaattatgcaacaaatagttgcttgtta

SEQ ID NO: 996960 - DNA, 120 bp, Artificial Sequence
  ENSG00000251023_1 (sequence is synthesized)
acctaagatatttcaacatttttgaaagattagtaataaaacatgccatatttaaaaagccttaatgtgaatcttctctccactgtagttcaggggacactcaggatgctagagtaatgc

SEQ ID NO: 996961 - DNA, 120 bp, Artificial Sequence
  ENSG00000251023_2 (sequence is synthesized)
tataaaaaaagccactcagacaggtgcagtggctcacacatgtaatcccacctactcagaagactgaggccggaggatcacttgaagccaggagctcaagaacagcctgggcaaaatagc

SEQ ID NO: 996962 - DNA, 120 bp, Artificial Sequence
  ENSG00000251023_3 (sequence is synthesized)
aataccctcctctctaaatatatataaatatatatatatagataattagttgggcatggtaatgtgccggtagccccagctactcgggaggctgaggtggaaagatggcccaggaatttg

SEQ ID NO: 996963 - DNA, 120 bp, Artificial Sequence
  ENSG00000251023_4 (sequence is synthesized)
aggctacagtaaactatctcactgcactccagcctgagcgacagaatgagactccatcttttaaaaaaaaaggcactgaaatgaccccatcaaatccaaccagctatgccaggctctatt

SEQ ID NO: 996964 - DNA, 120 bp, Artificial Sequence
  ENSG00000251023_5 (sequence is synthesized)
tccatcctatttctgaggagtttttgtccttgctgggtttcctttggcttcatacccagattctgcttgccctatataacatggatggtctgtctgtcctttgttcagtacctgctcaag

SEQ ID NO: 996965 - DNA, 120 bp, Artificial Sequence
  ENSG00000251023_6 (sequence is synthesized)
atgccacttgcccagagctagagcccacgaggcaaggggcatctcttctctcactggtcaaaggtaggtggttggaagtggatattctggattcatctctccaggcccttacttctagga

SEQ ID NO: 996966 - DNA, 120 bp, Artificial Sequence
  ENSG00000251023_7 (sequence is synthesized)
aaacaaacaaacaaaaacaagcagtttctctaaattaatatgttaatataattctaaaaattagcacagaaaaattacccatttaatttataatggttttttaagacatttggaaggaaa

SEQ ID NO: 996967 - DNA, 120 bp, Artificial Sequence
  ENSG00000251023_8 (sequence is synthesized)
tatttctttcataatactcaaacacttaaaggttgaacattataaagaagcatcagtattatcagagatttttcaagattctgttaaattctaaacatcatctagaaagttcttgtctta

SEQ ID NO: 996968 - DNA, 120 bp, Artificial Sequence
  ENSG00000251023_9 (sequence is synthesized)
tatctaatacctaaccttaatgtcccctcctttgttaaaacttttcttgactctctctcttcccgtgcctgtacaaagacatgcatgtgcatgggaacacacacacacatacacaaacac

SEQ ID NO: 996969 - DNA, 120 bp, Artificial Sequence
  ENSG00000251023_10 (sequence is synthesized)
acacacacactagtaatcacagcctcccttttgccagcatgtatataacataatttttagcattttcccacattaaagaaataattgaaagcttatatatttattccccaaagtagatat

SEQ ID NO: 996970 - DNA, 120 bp, Artificial Sequence
  ENSG00000251023_11 (sequence is synthesized)
ctaattatttaaaagaaaggcttatatttaatgcatctatgttttcagggcttgaataaaagtctgtttagcaaggttttctttgatggaattatttgattcatactggaatctctggtt

SEQ ID NO: 996971 - DNA, 120 bp, Artificial Sequence
  ENSG00000251023_12 (sequence is synthesized)
catttttctgtttacagaagtaagttcagattgtagtatattgcacagattgtccaggtaaacctggttaagactttcaggggaacttatttttgctgctattgtgatgtggaaatgctg

SEQ ID NO: 996972 - DNA, 120 bp, Artificial Sequence
  ENSG00000251023_13 (sequence is synthesized)
attaacaagaaatgtgtagatagtagctccagtacttgaagcatcattaaatttgaatgaattttctatttgtaaatatactctgtcataaataccattgaatatatttcactatgtaat

SEQ ID NO: 996973 - DNA, 120 bp, Artificial Sequence
  ENSG00000251023_14 (sequence is synthesized)
tttaaaatcaaggaagtaataaatcataacatttaattttaagattaagaatattggcaaagatttgtttatttttacctgtctttattcaaatgttctaatatacattagttccaagtt

SEQ ID NO: 996974 - DNA, 120 bp, Artificial Sequence
  ENSG00000251023_15 (sequence is synthesized)
agttctctattacttctaaatagaatatacatgatcaaaagagtatgcctctttctaaatgagaaaaactttatattataaatccagtgatacggatactatccatcattttgttttgta

SEQ ID NO: 996975 - DNA, 120 bp, Artificial Sequence
  ENSG00000251023_16 (sequence is synthesized)
tggcctaatgtatatcagtaaactaaatagacttaaatgtggctggattttgactgggaatatgggaagaacaaagcaggtgagatcatgtatgtgactaaatatagcgttgatgcttaa

SEQ ID NO: 996976 - DNA, 120 bp, Artificial Sequence
  ENSG00000251023_17 (sequence is synthesized)
cgatggcctctgagcatgttagtgtaacttatattttgcagccaaaaactgtatgtatcaagctccaaccatctataataaagtttatggttcagttctaagattgctaaccaagtgatt

SEQ ID NO: 996977 - DNA, 120 bp, Artificial Sequence
  ENSG00000251023_18 (sequence is synthesized)
tttttttcagagacgttaaagaaaaagtaccttcaaccaataaattcttaaacatttcatcaaatagttattgaacagcactgtgctaggcacgtgggatgtgaaaatcaaagaacacat

SEQ ID NO: 996978 - DNA, 120 bp, Artificial Sequence
  ENSG00000251023_19 (sequence is synthesized)
gaccctacccatagcaactcagtgataacaatgataaaggactatgctagattccacatcgtacctggagtgggggcagaagtggtacataatccagttagggggtgaagtggaaaatcc

SEQ ID NO: 996979 - DNA, 120 bp, Artificial Sequence
  ENSG00000251023_20 (sequence is synthesized)
agtggtacataatccagttagggggtgaagtggaaaatccagggcaagtttcgtggaggaagtgatgcctgaaatgtatctcaaataagttagcagagctaaaaaaaaaaaaaaaaaaaa

SEQ ID NO: 996980 - DNA, 120 bp, Artificial Sequence
  ENSG00000251023_21 (sequence is synthesized)
gtgtagaagggtattcagaacagaagaaattatataagcaaagacaaagaagcaagaaatagtatgcatgtttgggttcaggagaagatggtttgactagaaagtttaacattagaaata

SEQ ID NO: 996981 - DNA, 120 bp, Artificial Sequence
  ENSG00000251023_22 (sequence is synthesized)
aaattattcctttacaaaaaaagaaatacttaaaagaatatgttggttttcaaaacagatatagtgatttttgcttagttgcttatacatcttgaaaccaaaactggagttcagctattt

SEQ ID NO: 996982 - DNA, 120 bp, Artificial Sequence
  ENSG00000251023_23 (sequence is synthesized)
gttcagctatttattgtgttcattttagcataagcattacaaagtccttctctagttaatcaggttcacactttgcaactaagaaaacagaagtgggccaggcacggtggctcacgcctg

SEQ ID NO: 996983 - DNA, 120 bp, Artificial Sequence
  ENSG00000260738_0 (sequence is synthesized)
ggtagcaggcggaagtgcggccctcgaggcggtcgcggcctgtcggggcttggagcgaatggctccaaggccgcaggctgggcctgggccgcagccgtgggaagccgacgatgcctgagg

SEQ ID NO: 996984 - DNA, 120 bp, Artificial Sequence
  ENSG00000260738_1 (sequence is synthesized)
cgctctgtcctcggcccaccctaggaacttgtatgaccgcaggaaaggatcaggagaggccgctgcccgtctcccaccggctctaggctccctcggccgaccgatgtggggaaggggaag

SEQ ID NO: 996985 - DNA, 120 bp, Artificial Sequence
  ENSG00000260738_2 (sequence is synthesized)
gggcccgcgccgaggctctaggggaggctcctaggccgggttctctgacttaaggccctcttggctgtggttttgcgggagtgagttgagggagctgcattcactcaagtccctcacatg

SEQ ID NO: 996986 - DNA, 120 bp, Artificial Sequence
  ENSG00000260738_3 (sequence is synthesized)
agggcccgggaatcgtgaagccgggcctgcggacccggtgggaggaaggagtgcgaagcgcggccgccgtgctcggccggcgccgggctaggtcgggcggtggggaccgcgccggcatag

SEQ ID NO: 996987 - DNA, 120 bp, Artificial Sequence
  ENSG00000260738_4 (sequence is synthesized)
ataggacaacgcggtggagggaagcacctgcccccgcccaccttgactcagggccgccgcgcccctcctgggccatccgcgcgggggtctcaggatggcgaaacccgggacctcgcggcc

SEQ ID NO: 996988 - DNA, 120 bp, Artificial Sequence
  ENSG00000260738_5 (sequence is synthesized)
ctctagtgctcccctgccagggtgcgacctaggtaccctttatcgagccccactccccaaggcagagagagttcgacgttcccaaggagggagtctccatggaggaattcgtcctgcttc

SEQ ID NO: 996989 - DNA, 120 bp, Artificial Sequence
  ENSG00000260738_6 (sequence is synthesized)
acttccagagttgaaagcccgtcggttctgcaaagaggagcagtcgggcgcgggctagcaagcagctgatgaaaataattgtcctcgcacacacagccctgcgcccaggggcgcgcgcgc

SEQ ID NO: 996990 - DNA, 120 bp, Artificial Sequence
  ENSG00000260738_7 (sequence is synthesized)
acacacacacacacacacacaacttgcctcctctagccgcccaaccttaatattccgggcatgcagttttcaacaacttgcctgacacaataacaaagacatttaaatgccaggacgcag

SEQ ID NO: 996991 - DNA, 120 bp, Artificial Sequence
  ENSG00000260738_8 (sequence is synthesized)
atttaaatgccaggacgcagacttcactttttaacctgctgagaggagctactttcaaagcttccccaccgcgaataaactgacaaaaaatatggggtgcacttataaattaaacacctt

SEQ ID NO: 996992 - DNA, 120 bp, Artificial Sequence
  ENSG00000260738_9 (sequence is synthesized)
accctcaaagcaatatacgttaatcaggtttctaaggcaatagccatctctgtcttttcctattcacccaaataatgcccccagaaggaacccctttacacaagagagaactggaaaaaa

SEQ ID NO: 996993 - DNA, 120 bp, Artificial Sequence
  ENSG00000260738_10 (sequence is synthesized)
aatgaattatacccattgctagtaaaaaatcatcttaaatcaatagagcaccacttgaacttgagtttctattgtttcactgaatcatcaatgtttttaattaaacagagctaccctttc

SEQ ID NO: 996994 - DNA, 120 bp, Artificial Sequence
  ENSG00000260738_11 (sequence is synthesized)
tgttaaaacattacataaaagggttaggtttctacttttgttgaggcagctggcgtttgttggctgttgtgtttgagcaacagactgttcaatggaagcgagaaatagctcaacgcgctc

SEQ ID NO: 996995 - DNA, 120 bp, Artificial Sequence
  ENSG00000260738_12 (sequence is synthesized)
gtttcaacaatgtatcttgaaaaggaatacattgtgttattgtgttagtttgctacaaacctattaaaagaaaaatagcatccatcaggtctaacaagacgcatttgtattatacgtact

SEQ ID NO: 996996 - DNA, 120 bp, Artificial Sequence
  ENSG00000260738_13 (sequence is synthesized)
tatctgcttcaaatacacttcttggcacaatgtctagaattcaactagatcatcaggagctgggcagaagaacgcataccagttaggtaatgatacacgggctaaaaataataataaagg

SEQ ID NO: 996997 - DNA, 120 bp, Artificial Sequence
  ENSG00000260738_14 (sequence is synthesized)
aaggactaagcagacggtaattgctacttttttgtgtatcatgagaaataacaggcaaccctacttcaattaaaaatatattgcaaaagtgtggactcctacgacaaaaacaatttaaaa

SEQ ID NO: 996998 - DNA, 120 bp, Artificial Sequence
  ENSG00000260738_15 (sequence is synthesized)
aatatttgtagcatgggaatattgatccatatcccatatttggaacgaatctgatacactttcgataggaatttgtttcagagaaggattcagggcagaagcgatgcatttttaaagcag

SEQ ID NO: 996999 - DNA, 120 bp, Artificial Sequence
  ENSG00000260738_16 (sequence is synthesized)
aattaaaacagcgcaaagagcccggctctttagggaaatgcgcgaaacaaacaaatcgaaagcaagcgttccagccaagtggttggggagcaccgttgtctggcactaggaaaggaagtg

SEQ ID NO: 997000 - DNA, 120 bp, Artificial Sequence
  ENSG00000260738_17 (sequence is synthesized)
cttcttgaaagtgttctcttaaaaatgattttccagacttattttattgcattttaatcacaaagtgaaacttaaagcaaagaaacaggacattcccgctaccgaacagaacctatcgtc

SEQ ID NO: 997001 - DNA, 120 bp, Artificial Sequence
  ENSG00000260738_18 (sequence is synthesized)
tattgcaggaatgactgctacttggaccacagacctttagaaaaaacagagaggcaaatgattaggctaatttaacgcggagatctgcttagcagaaaagacacccaaagtagcatctgt

SEQ ID NO: 997002 - DNA, 120 bp, Artificial Sequence
  ENSG00000260738_19 (sequence is synthesized)
cagaggaaaacatcttttgcttccacacaaggcactcgatttggtttccaaccttgagtcctcaacattcaactttcaagtgcaacaatgttggaggcacaagagaatagtagattacct

SEQ ID NO: 997003 - DNA, 120 bp, Artificial Sequence
  ENSG00000260738_20 (sequence is synthesized)
acaagtgaacacaattgtacggaaaagagacttacataagttacaatggcaccctatgtgagatatctactttaacaaatatgtagagcaatattttgcccaataaagtcaatcatttgt

SEQ ID NO: 997004 - DNA, 120 bp, Artificial Sequence
  ENSG00000260738_21 (sequence is synthesized)
tacatttttgaataagtaaattatcacatgaagatttagaaaaatgttaccctgaaacattaaacgatagttttgccatattacaaaatagctattttaaacttttgtataaggcatttg

SEQ ID NO: 997005 - DNA, 120 bp, Artificial Sequence
  ENSG00000260738_22 (sequence is synthesized)
aagccaaatggctgatatgactgttctcttcagctggaacattttttttcttctcaagaagggtgtgtgtgaatgatgtgtgtgcatactggaggtagttgagaagaatttgattaatac

SEQ ID NO: 997006 - DNA, 120 bp, Artificial Sequence
  ENSG00000260738_23 (sequence is synthesized)
ataagacttttcactaatgtctcccctctaatccaaatttactttttaaattaattcacttggatttaaaaacagaaatgagataataaaccacaaattacacattataaaaattagttt

SEQ ID NO: 997007 - DNA, 120 bp, Artificial Sequence
  ENSG00000260738_24 (sequence is synthesized)
ctccaatgtatatgatttttggaagagtgcattttcaaggtgagaatttttgatgtgtctgataatctgccagatatgagaggaatgtcacaataaaattggttttgccatgatatgaaa

SEQ ID NO: 997008 - DNA, 120 bp, Artificial Sequence
  ENSG00000260739_0 (sequence is synthesized)
agagtctgagccaccctattagtgtctgagccaccctattagtgtctgaggaccctggtggtgtctgagcacaggaaggaaagcagaccacatggaagcagatgaaggaaaaagcagacc

SEQ ID NO: 997009 - DNA, 120 bp, Artificial Sequence
  ENSG00000260739_1 (sequence is synthesized)
acgtgggagccggatgaagggaaggtttctatgaaattgaaacagcctatctgccagtggagaaagttatttcatccttttttgcctgcagtgagaaagggggaaatcagagccacagag

SEQ ID NO: 997010 - DNA, 120 bp, Artificial Sequence; identical to SEQ ID NO: 846184
  ENSG00000260739_2 (sequence is synthesized)

SEQ ID NO: 997011 - DNA, 120 bp, Artificial Sequence; identical to SEQ ID NO: 846185
  ENSG00000260739_3 (sequence is synthesized)

SEQ ID NO: 997012 - DNA, 120 bp, Artificial Sequence
  ENSG00000251026_0 (sequence is synthesized)
atcttcaaggcagaaacgtgttgtatttgcatgctgtttagaaggcagtgtactgaatagtaccagttttttcagagacaaatatggtgtacttatttgaaaagaaaggatgatacacat

SEQ ID NO: 997013 - DNA, 120 bp, Artificial Sequence
  ENSG00000251026_1 (sequence is synthesized)
acatagccatccaaaaaatcctgcaaccagtagcaaattatattacacattggacacatcctaaatgatgcaaggttgctaattctctctgttggtaatatcttttgatgctgttgtgtc

SEQ ID NO: 997014 - DNA, 120 bp, Artificial Sequence
  ENSG00000251026_2 (sequence is synthesized)
ggtctcactgacttcaagaataaagctgcggaccctagtgttattaatccatgttgtgagaagggaggtgaataaaggaggtgtgctaagacacaaatctgctgttgcagtcacaggatg

SEQ ID NO: 997015 - DNA, 120 bp, Artificial Sequence
  ENSG00000251026_3 (sequence is synthesized)
acaggatgattcaatgaagccggctggccatatgcaggcctccttggactccttcacccgctaataatggagagttgcagaattctcagttgagcacaaagagtgaactgattcaaaagg

SEQ ID NO: 997016 - DNA, 120 bp, Artificial Sequence
  ENSG00000251026_4 (sequence is synthesized)
tgtgactgatcacttgcacatgctactgccaattattccttcagctagagcttatgggatagttttcctcaactaactgtatactgacggtagtaacttggtatgaagatctggaaaagg

SEQ ID NO: 997017 - DNA, 120 bp, Artificial Sequence
  ENSG00000251026_5 (sequence is synthesized)
acacatgtggtaataagacttcctaaatttcagttttgaactccgtaaaatgtactaactgaacctagactaactactatagaaacatgggatccagaggcaatcatacatttcatatat

SEQ ID NO: 997018 - DNA, 120 bp, Artificial Sequence
  ENSG00000251026_6 (sequence is synthesized)
ttggtctcactgacttcaagaataaagctgcggaccctagtggtagcaacaagatgacttgttggaggatattttacttaaagaatgagttgtaatcaaagacaagacaaaatgtgaaaa

SEQ ID NO: 997019 - DNA, 120 bp, Artificial Sequence
  ENSG00000251026_7 (sequence is synthesized)
ttcagagaacagcaagaagccccagtgttctggtttgaattgactgactatgaaggcaatagaggtatgtatacacactcagacacacataagatatacacacttatatattacaccact

SEQ ID NO: 997020 - DNA, 120 bp, Artificial Sequence
  ENSG00000251026_8 (sequence is synthesized)
atatataaaaaaaatctatatatcactcatgtgaccatttacacatgattttagattttattctgtgataaagtggatgctagtataggtctttgggcaaagaaaataccatgataagat

SEQ ID NO: 997021 - DNA, 120 bp, Artificial Sequence
  ENSG00000251026_9 (sequence is synthesized)
attatctacataaagattaacttagtgatatacaaaaatgaatgttgatgggaagaagtgtaggtagagagattattgcagttatataagtactgagctctagatctgggaggaaggcta

SEQ ID NO: 997022 - DNA, 120 bp, Artificial Sequence
  ENSG00000251026_10 (sequence is synthesized)
ggaggaaggctaagaatgaatgacaaaactgttttgaacttaaatatagaaattataaatttaaattcaagattttttgtttctcatttgaaaaattattatgaataaaaatttctagca

SEQ ID NO: 997023 - DNA, 120 bp, Artificial Sequence
  ENSG00000251026_11 (sequence is synthesized)
caaataattttttgaatatttagaggaggatagcaaattgtttctaaaattacattttattgtatcttgctgttcctttcatacagtaagcataaaaatgttttgtggctgggcgcggtg

SEQ ID NO: 997024 - DNA, 120 bp, Artificial Sequence
  ENSG00000251026_12 (sequence is synthesized)
atgttcttcccctggttaaatgctatttgaaatatttttaattctttgtatcttttttgcaacatgtaactaatgaaaaaatgttgtttattagacaatttcagcctcagaacatgcaaa

SEQ ID NO: 997025 - DNA, 120 bp, Artificial Sequence
  ENSG00000251026_13 (sequence is synthesized)
accacgacacactggtatggtcaaaccaggctcttcactctccattcaacttgacatttgcatttcttctccttcagcctctataattatattgttgtttatttaacataccttttttct

SEQ ID NO: 997026 - DNA, 120 bp, Artificial Sequence
  ENSG00000251026_14 (sequence is synthesized)
aatctctactcacagtgacatcctaaaatgtcacttgaaagtctatgttgacagaagaattcctctctttaaattctgggaagctattttttgggaacctattatgtctcaaatgctatg

SEQ ID NO: 997027 - DNA, 120 bp, Artificial Sequence
  ENSG00000251026_15 (sequence is synthesized)
tacaattagagttgcttcagttccagaatattcagttttgccatgcaattcattgattaattgcagaattagctatatccttttgtgtgttatttggtttacagattcaaactctgtata

SEQ ID NO: 997028 - DNA, 120 bp, Artificial Sequence
  ENSG00000251026_16 (sequence is synthesized)
tttggtttacagattcaaactctgtatatagtaaacttcttatgggaagaaatcatttctcaaactaatatgagtgtaatagttaaaaaagaaacaatttatacatttttaatttaataa

SEQ ID NO: 997029 - DNA, 120 bp, Artificial Sequence
  ENSG00000259235_0 (sequence is synthesized)
gtaaatgtctgtgtctgttggtgagacagaggacgtgggcgcccgccgaagtacgtgtgcgcgcgcgcgtttgcaggaaaacgtgcatggatttcttcggtgtggcagtgtgagaaggcg

SEQ ID NO: 997030 - DNA, 120 bp, Artificial Sequence
  ENSG00000259235_1 (sequence is synthesized)
cctaggcgctgtccgtagtgctgaaatggtgcgtggtgagacctgtctccccaacacaagctagaagacaacaaaatagcagccaggaaacgctctgataaagctctagatagctgccag

SEQ ID NO: 997031 - DNA, 120 bp, Artificial Sequence
  ENSG00000259235_2 (sequence is synthesized)
gccaggaaacgctctgataaagctctagatagctgccaggtgatgccagagattactagttttgggaccaattaaagtagcaagatgcagccaggagtggtggcttatgcctgtaatccc

SEQ ID NO: 997032 - DNA, 120 bp, Artificial Sequence
  ENSG00000259235_3 (sequence is synthesized)
gagctcaagggagcagaactaagttacatgattctgctgcggatgtataagcaccactccaataatttattatcacggttggagactttgacttgtcactttatgacttgaaatatggct

SEQ ID NO: 997033 - DNA, 120 bp, Artificial Sequence
  ENSG00000259235_4 (sequence is synthesized)
tagcaattagatttcatcattatctttgtttactaaggcagtgagggtttaattgatttactgctgaaatccttgttttgctctctttgctgcattcctggctgtgctgcgggcattttg

SEQ ID NO: 997034 - DNA, 120 bp, Artificial Sequence
  ENSG00000259235_5 (sequence is synthesized)
cacttagtttaaaaggtagaataggcttcttgtttcatagatcatttgtgtgaatgttgatttgttatgtcattgacatcatacacacatgcttacattttgaaggttgctagcgtttcc

SEQ ID NO: 997035 - DNA, 120 bp, Artificial Sequence
  ENSG00000259235_6 (sequence is synthesized)
cattaatgcttctgaattgatgccaaaggaaagcattgattataaattaggttccttggtattagttggtgcatgaccctgacccttttcaagctatatgaaaggtaatgatgctctcaa

SEQ ID NO: 997036 - DNA, 120 bp, Artificial Sequence
  ENSG00000259235_7 (sequence is synthesized)
gatttggtctctgccctcgaggagatacgtggcaaaataatatggtaagttctacaaagttctatacaaacacagattaatatgctattcatgttttattagccattgccaaagaaggga

SEQ ID NO: 997037 - DNA, 120 bp, Artificial Sequence
  ENSG00000259235_8 (sequence is synthesized)
tgaagaactgcaaaaagataaaacacagaatacttgtacttcaggtccttgccaatatctactgcccaacttttacaaaaaaaattgctgaaaggcatgaaatatatgaatgcctttcta

SEQ ID NO: 997038 - DNA, 120 bp, Artificial Sequence
  ENSG00000259235_9 (sequence is synthesized)
aagcacatgtggataatctatacttctggagcatctatgatttattttcagaacaatccaagttattagaaaggtaaatatgttggtgacattgtttagaagttcctcaagcagaattgc

SEQ ID NO: 997039 - DNA, 120 bp, Artificial Sequence
  ENSG00000259235_10 (sequence is synthesized)
ctttactatgctttgacattatgctctcagcttatatacagtaattctatgtgaaacagtagccagcttacacaacctgctctatatctactacagagctgttactaaagtgttggtcaa

SEQ ID NO: 997040 - DNA, 120 bp, Artificial Sequence
  ENSG00000259235_11 (sequence is synthesized)
catataacttactatttcttatataaagatgcccaagaaatttagatttcatagatatatccccaaaagcatttctttcaataccagtttaatgaattgaactttcatacctcacttaaa

SEQ ID NO: 997041 - DNA, 120 bp, Artificial Sequence
  ENSG00000259235_12 (sequence is synthesized)
tcaacccagggtaaagtggtatgttctgttcttacacacaatgaaaatcatgtaactaattaaagttagcatttattttagctactagggatgccagagtcaaattaacagctgaaaatg

SEQ ID NO: 997042 - DNA, 120 bp, Artificial Sequence
  ENSG00000259235_13 (sequence is synthesized)
aataactacataagaccttaagccttttatatcttttctttttttttaatcaccttaactactgcaattttggtttcttaggtaatgataatattattttcttttaattatttgttttaa

SEQ ID NO: 997043 - DNA, 120 bp, Artificial Sequence
  ENSG00000259235_14 (sequence is synthesized)
gtgtctgtggcagcatctgtgtgtgtatgtgagactgaaaggaggtgggagatgaggaggggaagggaatcagctccagcagcaacaggctctattcttcagttctgctaaaagaaagag

SEQ ID NO: 997044 - DNA, 120 bp, Artificial Sequence
  ENSG00000259235_15 (sequence is synthesized)
ttgattattgggtgagtgtatatggttgttttataaatttattctaaataggatactaaaatacagaaaatgtatcatctaattagctatgaagataaaaatctaaactataatgaggaa

SEQ ID NO: 997045 - DNA, 120 bp, Artificial Sequence
  ENSG00000259235_16 (sequence is synthesized)
ggaaatattaaaatgtcaagatgacgaagaaatttttcagtttatataattatagatcagcttaatttcaaaccactttgttaccctattgctatttttatactctaaatagtgtccctt

SEQ ID NO: 997046 - DNA, 120 bp, Artificial Sequence
  ENSG00000259235_17 (sequence is synthesized)
atatgactaagactttttgttatctcagagattggaagtgttaattgtccaccttgttagaagacatggtaactataggaatttagaaagcatgatagcccaactgtaatgaatatattc

SEQ ID NO: 997047 - DNA, 120 bp, Artificial Sequence
  ENSG00000259235_18 (sequence is synthesized)
tagaatgaggttgtcacaaagaaactgaaaacaagaatttcctctaacaactgagctcaggattcttttcagaggaaaatttagcttgcataaattcttgccatcttggctctagttgac

SEQ ID NO: 997048 - DNA, 120 bp, Artificial Sequence
  ENSG00000259235_19 (sequence is synthesized)
ttcttgctctcaacttttgcaaagtgagatcacctttacctcttcaacctatgaggccaacatgttactttcaatttttcaggaaaatctacgtcttgtttggctgaggtttgattatta

SEQ ID NO: 997049 - DNA, 120 bp, Artificial Sequence
  ENSG00000259235_20 (sequence is synthesized)
ttccttaactaaaatattttaatgtagctgtgctttttaatttgaatattgctattgattcaaacattgggtagcatatctttcaaatgtgaaattttaaaacatgtattaaagacaaac

SEQ ID NO: 997050 - DNA, 120 bp, Artificial Sequence
  ENSG00000259235_21 (sequence is synthesized)
ataaattagttttggtataactattttttaagattaatccaatgcttttttggctttagatgatgtttggtaattagctatattcaaaagtcaaccttttttttttttcaaaaaatgaac

SEQ ID NO: 997051 - DNA, 120 bp, Artificial Sequence
  ENSG00000259235_22 (sequence is synthesized)
tcctatgtatatgagtgttatttttatctacccatgtcttttttgtctacatatacagttttaatcattgtttcggggggaggaataagaatgattttgaaatttcactaagaaagatat

SEQ ID NO: 997052 - DNA, 120 bp, Artificial Sequence
  ENSG00000259234_0 (sequence is synthesized)
agccgggctgttccacgctcactgtgcgcctcgggcggcggggctcgggctctgtccgaggtgctgaactccggggctccggccgcgccggcagagtgtgccagcgtccattattgccag

SEQ ID NO: 997053 - DNA, 120 bp, Artificial Sequence
  ENSG00000259234_1 (sequence is synthesized)
tgtctgtgggcatcttccagaaggccgagcatgggggtcaggtgaaaccagggcgctcccaagcaccttgcccagtagagcccccttgcaccctgcttggttggtcagcaccccatggac

SEQ ID NO: 997054 - DNA, 120 bp, Artificial Sequence
  ENSG00000259234_2 (sequence is synthesized)
atgcagccttgaccttggcatgggaagcctccactgtgtcaagcccaacatccaggcctctgaagacagtcattcagccatgtgagactcgcctgcttctcctttgcctcccaccatgac

SEQ ID NO: 997055 - DNA, 120 bp, Artificial Sequence
  ENSG00000259234_3 (sequence is synthesized)
tgtaagtttcctgcgacctccccagccgtgcttcctgtacagcctgcagaactgttcataggcagaagtaacttgccttgtctcagatgaagctttggactgtggacttttgagttaatg

SEQ ID NO: 997056 - DNA, 82 bp, Artificial Sequence
  ENSG00000259234_4 (sequence is synthesized)
agttaagactttgggggactgttgagaagacatgattggtttgaaatgtgaggacatgagatatgggaggggccgaggtgga

SEQ ID NO: 997057 - DNA, 90 bp, Artificial Sequence
  ENSG00000259234_5 (sequence is synthesized)
atgctggggcgggtctttttcgtgccattctcatgataacaaataagtctcatgaggtctgatggttttataagggggggtttccctgca

SEQ ID NO: 997058 - DNA, 120 bp, Artificial Sequence
  ENSG00000259234_6 (sequence is synthesized)
gataacaaataagtctcatgaggtctgatggttttataagggggggtttccctgcacaagttctctcttccctgccaccaagtaacacatgtcttttgccttctgccatgactgtgaggc

SEQ ID NO: 997059 - DNA, 120 bp, Artificial Sequence
  ENSG00000259234_7 (sequence is synthesized)
ccaatctcaggtatgtctttatcagcagcacaagaacagactaatacactatgggtgccccaaattctgcacactgaggaaatctcccttgattaatgttctacatgcccatgtattaga

SEQ ID NO: 997060 - DNA, 120 bp, Artificial Sequence
  ENSG00000259234_8 (sequence is synthesized)
aatctcccttgattaatgttctacatgcccatgtattagataggttttgggagggattccccttctagaggatacactgccctagaattctattttctggtggcataattaagggggtct

SEQ ID NO: 997061 - DNA, 120 bp, Artificial Sequence
  ENSG00000259234_9 (sequence is synthesized)
ctaactcctttaaaattctggtcttttacctgaaaattgttttctggtatctcctttgagctgaaatacccacaagagaaatcctgctaagttatagtctttgaatctgaacacatctat

SEQ ID NO: 997062 - DNA, 120 bp, Artificial Sequence
  ENSG00000259234_10 (sequence is synthesized)
tgtcatttctgtcattcagaaataatcttctcagaaaatttggactgaattgacttttggtaaataaaattctggtgcattttcatattgaatctgtatttcctctaaaattgtttaaga

SEQ ID NO: 997063 - DNA, 120 bp, Artificial Sequence
  ENSG00000259234_11 (sequence is synthesized)
acaacctgatttaagtgcacttgaaaataacacaatgaaaacattttctaagctatccaaaccttagttctgttataatcacatgcaagcagaaaaaacccacccactctccagaagttc

SEQ ID NO: 997064 - DNA, 120 bp, Artificial Sequence
  ENSG00000259234_12 (sequence is synthesized)
agtggggaataaacatcgactttttgtataatataagatgactgataggcacaatcataactatattgtcaggcatttttgccactatattcagagtcaaagttagctagccaagttaac

SEQ ID NO: 997065 - DNA, 120 bp, Artificial Sequence
  ENSG00000259234_13 (sequence is synthesized)
tttgtttgaaaaccaaatgaaatgtcaatctatcaaacttttggggttctgtctctaaagctggagttgaaactcattcatgtctgtagaacaatttccccactcttccttaatcgtata

SEQ ID NO: 997066 - DNA, 120 bp, Artificial Sequence
  ENSG00000259234_14 (sequence is synthesized)
gcagtgtctgtacaaaataaataagtttgtgagtatataaattaaccatccttcttttggatggttatattttcatttgacaaagcagtctgggagttatctggttatttttattagcac

SEQ ID NO: 997067 - DNA, 120 bp, Artificial Sequence
  ENSG00000259234_15 (sequence is synthesized)
agatcactgcattgattagaattctgggctgcaagcaacaaagaccaagtctagctgatgacacagaaaattagttcattaaaggagagtgcattgctccctaaacttttggaaaagctg

SEQ ID NO: 997068 - DNA, 120 bp, Artificial Sequence
  ENSG00000259234_16 (sequence is synthesized)
aagcttgagtctaagatttacacatcaatgaccaaaccacaccatagaactgtcctactgatgagtcctccttcacttcttccaccaccactgtccccctggttccactccaccttgcag

SEQ ID NO: 997069 - DNA, 120 bp, Artificial Sequence
  ENSG00000259234_17 (sequence is synthesized)
attgacatgatttggttgtatccccacccaaatttcatatcaaattgtaatctgaattgtaatctccacctgctgaggagggacctggtgggaggtgactgggtggtttcccccatgcta

SEQ ID NO: 997070 - DNA, 120 bp, Artificial Sequence
  ENSG00000259234_18 (sequence is synthesized)
aagggctgaagcctgaaaatctggcatgactagagctcaaagtcatggctgcttggggcactgttagaaatgtgcctccttgtgttctcccagtgatgtgataaaggtggcatctcactg

SEQ ID NO: 997071 - DNA, 120 bp, Artificial Sequence
  ENSG00000259234_19 (sequence is synthesized)
aaaaggaccagggttaggagggctcaggagctatggggtggcccagggacagagagctgctcatcaaaatcagtgtcaaagctgcatgtgcagccctggtgctcggggggctctggtgca

SEQ ID NO: 997072 - DNA, 120 bp, Artificial Sequence
  ENSG00000259234_20 (sequence is synthesized)
tgttccccggggcaagggtatctcaactttggcactactgacatctccacgtaggttttccaggagagaatccactttttgttttatctgggtcaactccttcataatggcctgaaggtc

SEQ ID NO: 997073 - DNA, 120 bp, Artificial Sequence
  ENSG00000259234_21 (sequence is synthesized)
atctcctctcaactttccagacttggaagatccctgctgtccactcttagaattgaggccacttttgccccttcatgaggtgtttcctgatacacgctgacgttttgagagcactacagc

SEQ ID NO: 997074 - DNA, 120 bp, Artificial Sequence
  ENSG00000259234_22 (sequence is synthesized)
tatctcaactttggcactactgacatctccacccatgaatatcaattattacagaaatgaaaagggatcctgcacccaaattcaaatcaagcaagttcacctagaggttgccgtggggtg

SEQ ID NO: 997075 - DNA, 120 bp, Artificial Sequence
  ENSG00000259234_23 (sequence is synthesized)
gagggcccagatctgggctgtttggatctctctgcaggatgaaagggatttcctggacctggctttgctgtcccttgctccttttgtaagcatctgactcttcctctatccataaagatg

SEQ ID NO: 997076 - DNA, 120 bp, Artificial Sequence
  ENSG00000259234_24 (sequence is synthesized)
aagacattctttcgcagggatttaatattggggctgcatgcctggcccctgagaaagcccaagcttcctcctccttttgaatcgaacccagtgcagctttatgcgctccagacgagcctg

SEQ ID NO: 997077 - DNA, 120 bp, Artificial Sequence
  ENSG00000259234_25 (sequence is synthesized)
cattccccctaatgcccctggaattgcttactcacaccaaaatccgctgcctcaggcgtttccagccagaggtaagccttcttttcatgggcaatcaggcagtagcctggagcacagagg

SEQ ID NO: 997078 - DNA, 120 bp, Artificial Sequence
  ENSG00000259234_26 (sequence is synthesized)
ggaaggggggcacctgcatgcccggctgggtctctgtagacagtggatcatgcgaggcctcccctctccttgaccctgtgtgatgagccctgggaggaggcacccaggccaggggaggag

SEQ ID NO: 997079 - DNA, 120 bp, Artificial Sequence
  ENSG00000259234_27 (sequence is synthesized)
ctgcgtagtgacagaaagggcatctacatctctaccacgtaagtggggaaactgaggctgggcctagcaccagatcactcatgttgaaacctaggtttgaactgggtctctgaatcccca

SEQ ID NO: 997080 - DNA, 120 bp, Artificial Sequence
  ENSG00000259234_28 (sequence is synthesized)
gctgacttacagtctgggtaaagaaggtgaatgcagtcagaggagtagattcaggtgtcagacatttgcataaaataccaattgctcctcatgttggggaggtaattcacaagcttgaat

SEQ ID NO: 997081 - DNA, 120 bp, Artificial Sequence
  ENSG00000259234_29 (sequence is synthesized)
ctctaaaaggctgcatctggtggagggcggggctatgtgtctgtgcacgtctggtctttggagttcttattcagcaaatattgattgcaagcccaccatgtgccaggcatcatgcctggg

SEQ ID NO: 997082 - DNA, 120 bp, Artificial Sequence
  ENSG00000259234_30 (sequence is synthesized)
gcttgggatccagagatgaagagacagtcaaccaagtccatcaggctctgccaacccctgtagtgtgagtggtggttggagcacgtgttatacccccaaaaggtgggcttggccaagccc

SEQ ID NO: 997083 - DNA, 120 bp, Artificial Sequence
  ENSG00000259234_31 (sequence is synthesized)
ttccacttaccagccatgtgtccttctggatggcagtttcctcatctgcaaaatgtgtgtagccctaagacctgtcacccaggaccatttgggaggtcagctgttgttttgcaggtgaaa

SEQ ID NO: 997084 - DNA, 120 bp, Artificial Sequence
  ENSG00000259234_32 (sequence is synthesized)
agatccatctggtctctgggcctggcactctatctataaaatgaggctctactccagcatgtacccacggtgtgctctgggtagtaaactgtggtggtttagcactttgcctttgggtct

SEQ ID NO: 997085 - DNA, 120 bp, Artificial Sequence
  ENSG00000259234_33 (sequence is synthesized)
gacagtcctggattcaaatccagactctgccctctactgtgtaacctggtgcatgtcacttaacctctgtggaacccagtattctcaactattaaatgaggatgataatagtagtaatca

SEQ ID NO: 997086 - DNA, 120 bp, Artificial Sequence
  ENSG00000259234_34 (sequence is synthesized)
tagtagtacctagctcagactgttggtgtaaaaattaaatgagctaattaaaattaaaaagtaaagtgttttgcacagagacactcctagtaagccctgaagaaatgagagctatgcttt

SEQ ID NO: 997087 - DNA, 120 bp, Artificial Sequence
  ENSG00000259234_35 (sequence is synthesized)
tgattattaatattcttataatccaaaggatgatgcaggattttttaaatctttccacatgtatgtttttggaccagtccaaaaaagaattggaaacacacttatgccgcataaagacag

SEQ ID NO: 997088 - DNA, 120 bp, Artificial Sequence
  ENSG00000259234_36 (sequence is synthesized)
ataatcaccttgatagtcatagcccaagtgaaaagaggagctatacatctccactgcagatcgtttcacgcctgcttttccacggttcacttttggctctgcagccaggttaatatctaa

SEQ ID NO: 997089 - DNA, 120 bp, Artificial Sequence
  ENSG00000259234_37 (sequence is synthesized)
gcagcagctgtggccagagggacaccagtggacacagaggcccagggagaggagcagaggccagcaggaaacagcaaatgcagaggcccaaagtgaccaggacaccgtccttgtgcacat

SEQ ID NO: 997090 - DNA, 120 bp, Artificial Sequence
  ENSG00000259234_38 (sequence is synthesized)
agttagaagcagatcagaaatcgaacacgtttgcttttgcgattcgagagccctttctggcgcggagctaggggcggtgttacgtagctgccctgaactgagagcagcgttggccggggg

SEQ ID NO: 997091 - DNA, 120 bp, Artificial Sequence
  ENSG00000259234_39 (sequence is synthesized)
cgacgatgttgctttactgggggaagtatcctggtactggcagggtcagaagagggtagtgaggagtgtggtgcttctgggagccatgtgaattgaagtggaataattagccaggcatgg

SEQ ID NO: 997092 - DNA, 90 bp, Artificial Sequence
  ENSG00000259234_40 (sequence is synthesized)
caggagaatcacttaaacctgcgctgcactccagcctgagcgacaagagtgaaactcggtctcaaaaaagatatagatagatatagatag

SEQ ID NO: 997093 - DNA, 120 bp, Artificial Sequence
  ENSG00000259234_41 (sequence is synthesized)
gaaactcggtctcaaaaaagatatagatagatatagatagatacagatgatagatagatagatatctgaaagattcacagagagtaaatgacagtgtccaaacaaaaagtgtcctttccg

SEQ ID NO: 997094 - DNA, 120 bp, Artificial Sequence
  ENSG00000259234_42 (sequence is synthesized)
cccttgcacagtgccgcccccattccaaaaactccctttccactgacctgctgcctgtgtgcattgtaatccagctcactctctcccactcagagctgccaggcagggctacaaacacag

SEQ ID NO: 997095 - DNA, 120 bp, Artificial Sequence
  ENSG00000259234_43 (sequence is synthesized)
ggcacgaagctgccgtcctccctacctggccagtggcaaacatcactaaacccagccacccttcccaccaaacctgcccgaggccttgggcttcttcccatcacagcggtccacacagcc

SEQ ID NO: 997096 - DNA, 120 bp, Artificial Sequence
  ENSG00000259234_44 (sequence is synthesized)
accgcctgccagtcagcattagttacagccacctgacgcttgtcttcaaatccaagagagaggtgcaggtcaactgtgaccctggggccgaggccaagtcaaccacacccatttgtttgg

SEQ ID NO: 997097 - DNA, 120 bp, Artificial Sequence
  ENSG00000259234_45 (sequence is synthesized)
gtatcacctatgctgtgctcatactgcaaaggccaagttgagcagttgagacagagactgtgtggcccacaaagcctaagatattgaccacctggccctttacaggaaaagcctgccaac

SEQ ID NO: 997098 - DNA, 120 bp, Artificial Sequence
  ENSG00000259234_46 (sequence is synthesized)
cccagttagaagcaaagcatgctcaaatttgtattttttttcccagaataagattgtcattaaacttataaatagggtttcttaacctattcacacagtgaaatgcagacagcccgagag

SEQ ID NO: 997099 - DNA, 120 bp, Artificial Sequence
  ENSG00000259234_47 (sequence is synthesized)
ttgttatctaaactaaaaaagaagagaatgggaaaacctaattatcctggatgtcacatgctgactccaggggtgactatactttagttgactcaaccttggtttggaaacttgctttca

SEQ ID NO: 997100 - DNA, 120 bp, Artificial Sequence
  ENSG00000259234_48 (sequence is synthesized)
ctccctccctggagtcagaagccttcccagacagcatgttctctggtcttggtcttcgaagctacggggagttgtgccaaggaagctcaccctccacaggcctagagcacgacgatgcca

SEQ ID NO: 997101 - DNA, 120 bp, Artificial Sequence
  ENSG00000259234_49 (sequence is synthesized)
gggtcaggtgttgctaacagcccttccctctcttccacctcctcaagccccctccccaggaacagtggagggagaatgaaagaaggcacagtttcaccttctccatctgccttggaagcc

SEQ ID NO: 997102 - DNA, 120 bp, Artificial Sequence
  ENSG00000259234_50 (sequence is synthesized)
gcaacatctgccttccaattaggatggagttaccggggtgacggggttggctagcaggcccctcggctcctgactcctctggggcagccccctgctctaatgaagagctaattaacatga

SEQ ID NO: 997103 - DNA, 120 bp, Artificial Sequence
  ENSG00000259234_51 (sequence is synthesized)
aaagcattgatttagccaactgctgcttgtataatcacaaggcactctcagcagcagcttcaaagctgtctctcccttcagaacacaggattcgcataaagcgtgggactaaaccctccc

SEQ ID NO: 997104 - DNA, 120 bp, Artificial Sequence
  ENSG00000259234_52 (sequence is synthesized)
cgtgtttttaaacagtgatttccccacactcctgaagtgaaaacaccagctctgtaagtcgaccacgtaggcgcccctctcgctgccttcaaggggaactctggtgggtttggtaaatgt

SEQ ID NO: 997105 - DNA, 120 bp, Artificial Sequence
  ENSG00000259234_53 (sequence is synthesized)
tagtacttgcccgtgtgacccagagattgggttaggaatcaggttccatcttctctcctggctcacaaacgtgtgtgttgccaagaactagtaggaggccatggctgtgctctagctgtc

SEQ ID NO: 997106 - DNA, 120 bp, Artificial Sequence
  ENSG00000259234_54 (sequence is synthesized)
agagaagtagcttaaacccttacagtgaggggtggggtgccttaactataaggaacaaaggcatgagaggcctctaagacaacatctgcatggatttgtttgactccctcatcccaaatg

SEQ ID NO: 997107 - DNA, 120 bp, Artificial Sequence
  ENSG00000259234_55 (sequence is synthesized)
atgatcattcatctccctgatcatccatgtgggaaagtttgaggccagataccagctcgaagcaagaccaagaaattcaggctctggcttggtagacttctgaggtagagtgccgtatga

SEQ ID NO: 997108 - DNA, 120 bp, Artificial Sequence
  ENSG00000259234_56 (sequence is synthesized)
accatacttttactgtctgaaaattgatctttaacatctacaggatggctactagctgctcccatgtaaaccctgcagtacccgaaaacatccagagactttagatagcccccaaaccag

SEQ ID NO: 997109 - DNA, 120 bp, Artificial Sequence
  ENSG00000259234_57 (sequence is synthesized)
ccacaatggatgggattttgcaggggcaccacctccaaacatagcgggccagtctgccttatggccaacccttgtgttccagtggcccagcttggtgtgccatgttctcaccaaaggact

SEQ ID NO: 997110 - DNA, 120 bp, Artificial Sequence
  ENSG00000259234_58 (sequence is synthesized)
atcagtgtcataaaactgtgaaactctttctagtttctctcttgacctgcatctgacctcagcagacttcacccaaggtagcattggttagaagaaagcaagtggagcccatgattctaa

SEQ ID NO: 997111 - DNA, 120 bp, Artificial Sequence
  ENSG00000259234_59 (sequence is synthesized)
aactgtgacgacggaagggtcattcatcaaaggttttgactgaaggaagtgaattggaagccaagggaaaattccaagaaagaaaaggacttaactgaaaaaaggtcattatagactcaa

SEQ ID NO: 997112 - DNA, 120 bp, Artificial Sequence
  ENSG00000259234_60 (sequence is synthesized)
tccctttcctttatttataagtttaatagattagtttggaatttgttgaagatacttttcatccagatttcagggaggtacatagcatggtaaccctgtgaagacattggagcaatggat

SEQ ID NO: 997113 - DNA, 120 bp, Artificial Sequence
  ENSG00000259234_61 (sequence is synthesized)
agttatacatccaggtagatcggaaaccagttcaacaactctagccaaaggctattgataaaagacaactgacatctagaaggaggtcagagccactaactagacggtagctgtgccttg

SEQ ID NO: 997114 - DNA, 120 bp, Artificial Sequence
  ENSG00000259234_62 (sequence is synthesized)
gatgaagcttatctaatttgcagctgtcatgaagttgagtacaatactgaacaagtcgacgacagactcctctgtacggcagcatcactttgtcattaagcacacagactctgagctgaa

SEQ ID NO: 997115 - DNA, 120 bp, Artificial Sequence
  ENSG00000259234_63 (sequence is synthesized)
tctgcccaggatcggatcccagctccagcacttactagctagttatgtttcgcaaattacttaggctgtgagtattagttccaacactcaactgagcctctccctcattaaaccaacaag

SEQ ID NO: 997116 - DNA, 120 bp, Artificial Sequence
  ENSG00000259234_64 (sequence is synthesized)
agaatttaaagggattgtataggccaggtaaggtggctcacacctgtaatcccaatactttagggggccaaggtggcagagtcgcgggagtccaggagtttgatgccagcctaggaaaca

SEQ ID NO: 997117 - DNA, 120 bp, Artificial Sequence
  ENSG00000259234_65 (sequence is synthesized)
tagtgagaccatgtctctagtaaaaataaaaataaaataaaaatgtaattagctaggcatgatggcacacccttatagtcccagctactcaggagcctgagggaggaggatcaaggatgc

SEQ ID NO: 997118 - DNA, 120 bp, Artificial Sequence
  ENSG00000259234_66 (sequence is synthesized)
agtgagccgtgttcatgccactgcactccagcatgagtgacagagcaagaccacatctcttaaaaaaataagaaagagggctgggcatggtggttcacacctataatcgcaacactttgg

SEQ ID NO: 997119 - DNA, 68 bp, Artificial Sequence
  ENSG00000259234_67 (sequence is synthesized)
ggaggttgcagtgagctgagatccgtaaaaatataaagaaaagaataaaaaggatagtatctgtaaag

SEQ ID NO: 997120 - DNA, 120 bp, Artificial Sequence
  ENSG00000259234_68 (sequence is synthesized)
aaatataaagaaaagaataaaaaggatagtatctgtaaagtgcctggaacagagttagtgttcaacaactgtcagcagtgttgttagctgaggctggtcactgggtgactgtaatatcag

SEQ ID NO: 997121 - DNA, 120 bp, Artificial Sequence
  ENSG00000259234_69 (sequence is synthesized)
tcagggtctcagtgataacagaaaatacactcaaattgggataatgtgaggatggattgctttctaaagggactatttacaaaggtgtgcttgagatttaaagaatctgaagatagtgct

SEQ ID NO: 997122 - DNA, 120 bp, Artificial Sequence
  ENSG00000259234_70 (sequence is synthesized)
ataacccagggtagcaattgcaaagccattaccactcctaagcctaagggccgaggggaggaagcagttgttaaaacccagagggagagagaagcatagaaaggaggccaccaagggaaa

SEQ ID NO: 997123 - DNA, 120 bp, Artificial Sequence
  ENSG00000259234_71 (sequence is synthesized)
cagtgtcctttggttgaaggacacaggtgaccaccctgggaggaagtgagcggagtaaacacccccaccctctctctgattccagctggagcacccattggccaaacccaacaagaagcg

SEQ ID NO: 997124 - DNA, 120 bp, Artificial Sequence
  ENSG00000259234_72 (sequence is synthesized)
caagaatgggtgagcctggccatacaggtcagtttctggggcagaaagcggggtggaaaaaggtgacagtgggtctggagggacagaaagacacctggtacgagcatgttacatttgttg

SEQ ID NO: 997125 - DNA, 120 bp, Artificial Sequence
  ENSG00000259234_73 (sequence is synthesized)
gggacaaagttaaaatcctgcctgtcatttcaatgaagcgactacaacaatattcaggatggcagatatttaagagcagcatctagaaacaatgattaaaagggttcagtcggctacaag

SEQ ID NO: 997126 - DNA, 120 bp, Artificial Sequence
  ENSG00000259234_74 (sequence is synthesized)
tccaatattcagccattcattcatttactcagcaaatgcagggaatgcacactgtgtgtccagacctgcactaagcatgacaatacaaaaataaacagaacaagaatgtatcctgagcag

SEQ ID NO: 997127 - DNA, 120 bp, Artificial Sequence
  ENSG00000259234_75 (sequence is synthesized)
cagcaatcattctatcatcctctcctgctccagcagcccgggcatttctctcactaaaatattgaacaaaggcaaagcccttatgaacagcacagcccattttgccatacttcgaaaaga

SEQ ID NO: 997128 - DNA, 120 bp, Artificial Sequence
  ENSG00000259234_76 (sequence is synthesized)
ttgcctccacatcagatttcttgaccacaagagtgttgagattcccaatgaacacatgggagttcatggagcaaggatttgtcttgttggtaacgttgctggccattgtgtttgctgata

SEQ ID NO: 997129 - DNA, 120 bp, Artificial Sequence
  ENSG00000259234_77 (sequence is synthesized)
gggagaagagattcgattctgagtctcctactcccgggttctacatggagaagccaactgctgctcaaggtcaccaacacggccacaaccactcagtcttcgtctcttcacaaaaaaatc

SEQ ID NO: 997130 - DNA, 120 bp, Artificial Sequence
  ENSG00000259234_78 (sequence is synthesized)
aatagtaggtttttttcctcacctgtgtaacatcttgtcactccagataaacaccaccatccctgagctggacttgacccaagttccctggtcacatctccatggcttccaagtagatga

SEQ ID NO: 997131 - DNA, 120 bp, Artificial Sequence
  ENSG00000259234_79 (sequence is synthesized)
cagcatcctggctgggctatcaggtcccaggatgcaatgatattacagaaatagttcctgtggccccataagtctacaggattgaggctgcttctcacctctgtctccttccaaattggc

SEQ ID NO: 997132 - DNA, 120 bp, Artificial Sequence
  ENSG00000259234_80 (sequence is synthesized)
tctggaacagggataggctgtaatatatagatgggaccctcagaacctctacctgaggggttcaggggagccagaggcaggtaacaccaggcaggatcctccttgaattcatcctttatg

SEQ ID NO: 997133 - DNA, 120 bp, Artificial Sequence
  ENSG00000259234_81 (sequence is synthesized)
cctttaacaaagtaaccaagcacatgctctagcgataatcaatttaggcacatcccacagattccagcttctctgccaccaaccaccaggcatgatctaagcaagctctttcacctcttg

SEQ ID NO: 997134 - DNA, 120 bp, Artificial Sequence
  ENSG00000259234_82 (sequence is synthesized)
gagccttaattttctcatctacaaaatggaataacgcgatcatccttgaaggtgagttacatgtgatcatgggtgtgagcagctctttgtaagcaatgaaggcccaagcaattggaaggg

SEQ ID NO: 997135 - DNA, 120 bp, Artificial Sequence
  ENSG00000259234_83 (sequence is synthesized)
gtggtgatcatggaactgtcaaaggtacatttgttgctgtgaaaaactgaaggtactggaccattttctcatctttctacaggttgctggaatcacaacttataattaatgcacagtgat

SEQ ID NO: 997136 - DNA, 120 bp, Artificial Sequence
  ENSG00000259234_84 (sequence is synthesized)
atggcttgacccagtttcctaaattggaatgtttcagctaaaactgatgaaaaattcttgtcttccaagcagaactagctagatgaaccccctccagagctagtgagtaaatatatacag

SEQ ID NO: 997137 - DNA, 89 bp, Artificial Sequence
  ENSG00000259237_0 (sequence is synthesized)
aaaccctcaccagacccagagctgactagatcgctagctggccctttgatttaactcttcatctaccatagtcaggtgccacagcttga

SEQ ID NO: 997138 - DNA, 120 bp, Artificial Sequence
  ENSG00000259237_1 (sequence is synthesized)
tttaactcttcatctaccatagtcaggtgccacagcttgatgaacgagatagaatcgcacaatgggatcaaagggacagccagcccagtttatttccagaggaaaagcttaccaggacac

SEQ ID NO: 997139 - DNA, 120 bp, Artificial Sequence
  ENSG00000259237_2 (sequence is synthesized)
aaggaggaaaaaagactcggcttgaaaccaattcttccctgaagtacaaatgtaagagaaaagacatcaccaggagcagttacgtctatggcaatcgtagctctgtaagcctggcctgct

SEQ ID NO: 997140 - DNA, 120 bp, Artificial Sequence
  ENSG00000259237_3 (sequence is synthesized)
cacgtggaagtaaattatttgatgagctggggaaatataagcagtttgtgtggattaaaaggaaatcctcacccaaactatatctttaaaaattatctagataattcaggtgaaagcagg

SEQ ID NO: 997141 - DNA, 120 bp, Artificial Sequence
  ENSG00000259237_4 (sequence is synthesized)
ctttctcccttgtgaattattaaagtaattgattacatccatctgctcctcgtcagagaattcaagggccaaatgctttttcggcgtctccttttctatccttccctttcatgtgactta

SEQ ID NO: 997142 - DNA, 120 bp, Artificial Sequence
  ENSG00000259230_0 (sequence is synthesized)
ccggacggccgggccgccgcctcctctgggcctcgtctccccttcaagcccccggccttgtggggaagggggaatccttgacgcattttacagacggcacatagggtcggggcagtgctt

SEQ ID NO: 997143 - DNA, 120 bp, Artificial Sequence
  ENSG00000259230_1 (sequence is synthesized)
taaccggagaccaggagcctgactcttccagggctctgtgagacagcctggtgcctggcgggggtgacacagccccactgtctgccccgcgtttacagccaggaaccacacctgagccat

SEQ ID NO: 997144 - DNA, 120 bp, Artificial Sequence
  ENSG00000259230_2 (sequence is synthesized)
ttccaagggtgacatgtgtcacagaactgtggggaaggggctatccagagattcccagtaggagacacggggagacctgcaggaatgatctctcgcagcacccaagtctgcaccctgctt

SEQ ID NO: 997145 - DNA, 120 bp, Artificial Sequence
  ENSG00000259230_3 (sequence is synthesized)
cactcactcagcaatctgtccaggagctccttcaatgtcaagacatccagaaagatctgtcttcctccttttccaggcccctgtgcaggaaccccctgcacctggtcccccgtgatgggt

SEQ ID NO: 997146 - DNA, 120 bp, Artificial Sequence
  ENSG00000259230_4 (sequence is synthesized)
gctcaggctcaggaccctatgggattgcacaggtcgcagcccaagcgcagtacttgcgcacaggtcccagccccttccctctctgggacttgtcttctggcccctcactcctgcgatgag

SEQ ID NO: 997147 - DNA, 120 bp, Artificial Sequence
  ENSG00000259230_5 (sequence is synthesized)
cttttctttcagctggtgaaaggccgcagacttcgaacctctgggcctttgtccaggacgttccctcagcgctcagtgcccttcctggtggcctcctacatcttcagatcccggctgagc

SEQ ID NO: 997148 - DNA, 120 bp, Artificial Sequence
  ENSG00000259230_6 (sequence is synthesized)
ggctggggcgaggccacctcgctttgggtcttgtcgcgcccaggccagcgccagcccaggcttgccatggactggctcctgggcgttagatgaatgaatcgactcaacccgggccgccac

SEQ ID NO: 997149 - DNA, 120 bp, Artificial Sequence
  ENSG00000259230_7 (sequence is synthesized)
gttgtgttcagaacaccgacagtcgctcccaggcaaccagcacctgctgcgccccgtttccagcgacctccccaaccgcgtggactcgcatccacgtgcccggcggggccgcagcagaaa

SEQ ID NO: 997150 - DNA, 80 bp, Artificial Sequence
  ENSG00000259230_8 (sequence is synthesized)
gaaaggctcggaccccccaggacgatcggccggtgggggccggtggggccgcagactcggggggcggggggcgccaggct

SEQ ID NO: 997151 - DNA, 120 bp, Artificial Sequence
  ENSG00000259230_9 (sequence is synthesized)
gaggccgtttcgctttcctccgcgcccatttgccgggaggggaccccgtgctccgacctgaaggtgacggcagagcctgcgggaggcctaggccggtcccgccctacgggtcccgggggc

SEQ ID NO: 997152 - DNA, 80 bp, Artificial Sequence
  ENSG00000259230_10 (sequence is synthesized)
gaccctcgcgctgacattggcgtccaggccgcggcccctgcctccgcgcccacccacgccgggcctggccctcgctcccc

SEQ ID NO: 997153 - DNA, 120 bp, Artificial Sequence
  ENSG00000259230_11 (sequence is synthesized)
cagccgtagtgaccgcgagacaaagacccggcggcgggggaggcggcggagagaccccgccagcgcggagaccccagggaagcttctctggaagacctggtgctggtccgctctcccggg

SEQ ID NO: 997154 - DNA, 120 bp, Artificial Sequence
  ENSG00000259230_12 (sequence is synthesized)
acctcattttccttatgtggacaacgggggcggggtcacagcagcccctcgggcttatagccgggttgttctttccttaaatctcctccctctgccaaaataaaaaaccccacagggcaa

SEQ ID NO: 997155 - DNA, 120 bp, Artificial Sequence
  ENSG00000259238_0 (sequence is synthesized)
acagacaagtaactctccagcggcatgaaatgcatccagaaatccaaaccattttgccaggccggttcccagtccagctccggagccaccgtgccgagttctcccaggccgcactcaccc

SEQ ID NO: 997156 - DNA, 120 bp, Artificial Sequence
  ENSG00000259238_1 (sequence is synthesized)
ccggcgacgtggggctgacggccaggtcgcaaaaagcagggccgagcggagcccgctcccctcggtcggcggtggagaccccggcccaatcccccggccgcagcggtacggcgtcggcgg

SEQ ID NO: 997157 - DNA, 120 bp, Artificial Sequence
  ENSG00000259238_2 (sequence is synthesized)
cagcagctgacccggacacagtgagaagccccggcggaagtgataacatcccgacctcctccgggcgcggcagccggcggtggaggcggcgggggcgtggcggcggcggaggcgtggcgt

SEQ ID NO: 997158 - DNA, 120 bp, Artificial Sequence
  ENSG00000263041_0 (sequence is synthesized)
agttctgcgaaaaattaggctatctttcattagctatctatcatgcggcctccaccaggctgcaggatatgagggccatttaattaggccctgcaccactctcgggtgtgaaaaggctct

SEQ ID NO: 997159 - DNA, 120 bp, Artificial Sequence
  ENSG00000263041_1 (sequence is synthesized)
caaacgctttgattccccgctgcttcgcagcaggaagttgttggcgataattgacataggatttccttgttaaccagcagcagacacgccggattaaagcgacagagatctcgagaagaa

SEQ ID NO: 997160 - DNA, 120 bp, Artificial Sequence
  ENSG00000263041_2 (sequence is synthesized)
agtgaaagagataagaagctcggaagacttctgcttatttggcacttgaggatggcaggaaacagcaataacctactcaagtggcgactctagagtggaagggcgtccccttatcagacc

SEQ ID NO: 997161 - DNA, 120 bp, Artificial Sequence
  ENSG00000263041_3 (sequence is synthesized)
tatttcagcttggctgatcaaagattgactccccgcaaaatcacataggcctggggtttgttagtttattaagcagcaggttttaggaattatcacaggtttaaagatggattgcagttt

SEQ ID NO: 997162 - DNA, 120 bp, Artificial Sequence
  ENSG00000263041_4 (sequence is synthesized)
atgtgaagggggagaggattatcgggttttcatcttaacaattataaaatatcacagctgaaagcttgcttgcaaatgacataattttccactgccaactaaacaggtcattgtgaggct

SEQ ID NO: 997163 - DNA, 120 bp, Artificial Sequence
  ENSG00000263041_5 (sequence is synthesized)
cggaagacggtgcgatctcattttgccctgtgcgattccttaggtataacatccaattgctcctgttggaagggacactctgcatgtaaatggcagagacactctggttcactcaaatgt

SEQ ID NO: 997164 - DNA, 120 bp, Artificial Sequence
  ENSG00000263041_6 (sequence is synthesized)
attgttcctgaaagaaaggaagtggtctgcagagaagatactcagctagaagattcctctgtgaggctgctagtacttctccagcagaccaagccaggagagctttctcaaagattctac

SEQ ID NO: 997165 - DNA, 120 bp, Artificial Sequence
  ENSG00000263041_7 (sequence is synthesized)
cagattttccaggggttctcaaagattgtctgcaaaccagctctgataaatgattgcagcttcttgagtctatagagagagacctttatgctctctctactaggaagtaatgcttttttc

SEQ ID NO: 997166 - DNA, 120 bp, Artificial Sequence
  ENSG00000263041_8 (sequence is synthesized)
cctgagattatgttctttttaaaatttttatgtgcttttaaaatctcatgtgtgtattaacatgtcctttctttatagaatgttgaagacaatatataaatttctgaaaagatttgaatg

SEQ ID NO: 997167 - DNA, 120 bp, Artificial Sequence
  ENSG00000263041_9 (sequence is synthesized)
atttgatttggcaaaataaagaattgccaatcctacatagagctccatacaccaatttttaaaaataattttattgcttcacaaaatctgggaaccactggatatatgaagtatctcttt

SEQ ID NO: 997168 - DNA, 120 bp, Artificial Sequence
  ENSG00000263041_10 (sequence is synthesized)
tagctaaagcaaagtcaactctcaccctcgaaaaaagttcattttttgatctgtttttatttttctgtggcaaaaagtgcttttgtgatgcctctatgaataaaagactcattttcctaa

SEQ ID NO: 997169 - DNA, 120 bp, Artificial Sequence
  ENSG00000263041_11 (sequence is synthesized)
agagtctaaaacttactacattgaaatcacaccaagcatgaacatagggtaccatgtgccagaaattagcctgtttctgatggggaaaaataaactggcatgaaatttatttttcctaaa

SEQ ID NO: 997170 - DNA, 120 bp, Artificial Sequence
  ENSG00000263041_12 (sequence is synthesized)
cgccttgttccacttcggaagacggtgcgatctcattttgccctgtgcgattccttagttttactcatctgaagggctgaagagtaaccagtctcctgtcccctgatcctgctgatggaa

SEQ ID NO: 997171 - DNA, 120 bp, Artificial Sequence
  ENSG00000263041_13 (sequence is synthesized)
gagacttagaaatcatttcatcagccagggctgctttgcccagagaaacatctgtccaagaaggcagacaaaccaggggagtatcagtaactgaaatgaaatatagcaaggacatcacct

SEQ ID NO: 997172 - DNA, 120 bp, Artificial Sequence
  ENSG00000263041_14 (sequence is synthesized)
cttgggaaggattgtccctggacctcttgtaatttagagtagagaaatcagagtcaaaagggccttgttgtaaatagttttctcgttaccgtcttggaaaatttccagcaaagttctggg

SEQ ID NO: 997173 - DNA, 120 bp, Artificial Sequence
  ENSG00000263041_15 (sequence is synthesized)
aaaataacatgatgccctgatgctagtaatatagtctgactcgcaattccaccttccatgggactgtacacataaatgaaaacaaatttctaagcttgagtttaagactgtatctataaa

SEQ ID NO: 997174 - DNA, 120 bp, Artificial Sequence
  ENSG00000263041_16 (sequence is synthesized)
gaatatccacagagaaggtcagggagttctttctaaatacagtaatcaactctgctttttcaaataaggaagagtttgtacttccaatcttctacggagaagaactgcaatgctcaaact

SEQ ID NO: 997175 - DNA, 120 bp, Artificial Sequence
  ENSG00000226212_0 (sequence is synthesized)
tctactaacttggaagcgaaaataaagtcaggcaccaggcagatggggtcatctgctgtaatcacctgtgatcttcctgtagaaaatgccttctacatccactggtacctacgccaggag

SEQ ID NO: 997176 - DNA, 120 bp, Artificial Sequence
  ENSG00000226212_1 (sequence is synthesized)
atcaggagtcagtcaggaaagcatgatacttatggaagtagaaggataagctggaaatttatacctccaaaactaaatgaaaatgcctctggggtctattactgtgccacctaggacagg

SEQ ID NO: 997177 - DNA, 120 bp, Artificial Sequence
  ENSG00000226218_0 (sequence is synthesized)
ttcaaatctcttaaatttggatttccaggttacctacagaaatgatgtcgaacttgagatgatttcacggactcaaggacaccttcattggtcttcccaaatttggagtgcactcttaac

SEQ ID NO: 997178 - DNA, 120 bp, Artificial Sequence
  ENSG00000226218_1 (sequence is synthesized)
gcactttcaactatcagaggtgaacatcctgatggagggcaacaaaagtcaggggtgtgtgttctccaaaaggggcatgacatcttatgcattttgaccattccaagattctttaggact

SEQ ID NO: 997179 - DNA, 120 bp, Artificial Sequence
  ENSG00000226218_2 (sequence is synthesized)
tttgccagaggtacaaagaaggaaacagacaaacaggaaatttaaatctctcaaatggtattatttgtttgcctcttttataaaattatggagatcagagattgaagattatgcttgcaa

SEQ ID NO: 997180 - DNA, 120 bp, Artificial Sequence
  ENSG00000266677_0 (sequence is synthesized)
ctggtgcacccactcggggatctcgtccacgtcgcccggcgggtagaggcgctcctggccgggcccgcgcttctgcagctgggcgccgtaagtgtagccttcgccgaagaagtacttgtt

SEQ ID NO: 997181 - DNA, 120 bp, Artificial Sequence
  ENSG00000266677_1 (sequence is synthesized)
gcgcagtggggcccggtccaccgtgtgctcgttgtacaggcccttctcagcgcgggacaccacctcgtcaatgcgggcctcgatcttggcgcactcgtcctggctgaagaggcgcatctg

SEQ ID NO: 997182 - DNA, 120 bp, Artificial Sequence
  ENSG00000266677_2 (sequence is synthesized)
gcggatgccgctcttcaccttgcgcgcctcctcctccttctgcagctgctgctcctcatagtcgctgcgctcggggtccgagtcctcctgatacttgcgcttggccccggacacaggatg

SEQ ID NO: 997183 - DNA, 120 bp, Artificial Sequence
  ENSG00000266677_3 (sequence is synthesized)
caggcatgagccaccgcgcccggccacgtgtaaattctttagatttaaaaaatatgaatccaatcaataaatggtaacagtttctaactgtctgttgccatggttaccgcctggctccca

SEQ ID NO: 997184 - DNA, 120 bp, Artificial Sequence
  ENSG00000266677_4 (sequence is synthesized)
ggctcccacagtgcacaatgggcagtgacccaggcttagtgctcccaattggagcagggtaggggaaggcatcagggaattgcggaaatcaatctgtgaatgtggttctcagacgaaagc

SEQ ID NO: 997185 - DNA, 120 bp, Artificial Sequence
  ENSG00000266677_5 (sequence is synthesized)
cattgttggaatccccccagggaagctgctctgagaaaggataaaatcatgttagaggcgcactctgagtgttaactgtgtgccaggccttgtcctaaaggcctgatgtgtcctacctgt

SEQ ID NO: 997186 - DNA, 120 bp, Artificial Sequence
  ENSG00000266677_6 (sequence is synthesized)
acctggatggtaagaggcttgaggatcacactctgaagtgctctctgttgaggttagctgtgctggccctgccttgggggccacctcgactaattaaatcagcgtgtgcaaatggagtct

SEQ ID NO: 997187 - DNA, 120 bp, Artificial Sequence
  ENSG00000266677_7 (sequence is synthesized)
tctcctccagccaatcctttacctacctacatgctgccatgttctaggccttgctgggattgttgctgcatttgacagtgtggaacctgaggctcagtgagaatcagggacacctcaaga

SEQ ID NO: 997188 - DNA, 120 bp, Artificial Sequence
  ENSG00000266677_8 (sequence is synthesized)
tcccctcacacagcctgtcaaaggtaggcaggatagggacccaggtctgttagtgcaacactgctgcacttagacatcacctcctcctggaagctctccctgattacctcccagatagct

SEQ ID NO: 997189 - DNA, 120 bp, Artificial Sequence
  ENSG00000266677_9 (sequence is synthesized)
caggtcccctgtataccctcccagcactgatcaaggtatattttatatctgagacctgaggctctgtgagggccagagctgagggggtctcagtcacttcagtatctttgctacacagag

SEQ ID NO: 997190 - DNA, 120 bp, Artificial Sequence
  ENSG00000266677_10 (sequence is synthesized)
atgctcagtggatctatactgaatgagtgaatgaatgtagcccctgacacatacaggccagaggcagagagggcagcataaggaggtcaggtggtgctgcaaggaagtgggaaaagcaaa

SEQ ID NO: 997191 - DNA, 120 bp, Artificial Sequence
  ENSG00000266677_11 (sequence is synthesized)
gaggccttcatccatccatctatccacccacccacccatgcaaccaacaaatatgtatggagcatctactatgtgccaggcgctgagttatggacacagcatgaacaagatggatacggt

SEQ ID NO: 997192 - DNA, 120 bp, Artificial Sequence
  ENSG00000266677_12 (sequence is synthesized)
cggtcctgctctcttggagctgacattctgatgggggaatgatacagtttggatatttgtcccttctaaatcttgtgttgaaatgtgatgcccagccaggcatggtggctcatgcctgta

SEQ ID NO: 997193 - DNA, 87 bp, Artificial Sequence
  ENSG00000266677_13 (sequence is synthesized)
acatgcctgtaatcccggtatggggaagcagaggttgtagtgagccgagattactccagcctaggcaacagagcaagacactgtagt

SEQ ID NO: 997194 - DNA, 120 bp, Artificial Sequence
  ENSG00000266677_14 (sequence is synthesized)
gataccagggttgtgcgcacacagaggaaaggccatgtgaggacacagtgaggacagctgtctgcaaaccaccaaagaaaccaaacctgctgacaccttgaccttggaccgccagcctcc

SEQ ID NO: 997195 - DNA, 120 bp, Artificial Sequence
  ENSG00000245729_0 (sequence is synthesized)
gggtttttcatcggggagtgggagtggactgaaggcttggccgctccgcctcactgagccggctcagccagcgcagctgttcctggaacgccagtcccttaggatgggagagagcggaga

SEQ ID NO: 997196 - DNA, 120 bp, Artificial Sequence
  ENSG00000245729_1 (sequence is synthesized)
aggcaaagaggaacagactgggaaagagactggatagattctaatatggctacatcctggtgggaggcaggacactgaagtacttagaacccctcagaatggccagatcctgctcatgct

SEQ ID NO: 997197 - DNA, 120 bp, Artificial Sequence
  ENSG00000245729_2 (sequence is synthesized)
tgggctagaagaatggaacctttgtaattctggacttgtaaatggaaacacatcacttactgtgaaccacatcccagacagacatgggcaggtgaaaacaaattcttccagatggcctga

SEQ ID NO: 997198 - DNA, 120 bp, Artificial Sequence
  ENSG00000245729_3 (sequence is synthesized)
cagcacctgtctacagtacagtattgaggcacacaggaccttggaaataaaagggaatattacaaatactgcagagacacaaggattagttgtttgtttgtttaagggagtaacatccag

SEQ ID NO: 997199 - DNA, 120 bp, Artificial Sequence
  ENSG00000245729_4 (sequence is synthesized)
aagaaacaattagtaatatttctttactgcttgagtacattttatcatcagatggccaatcatataactgggtttattcaagaaatttttttctgtaaaatataaagtgaatcacctatc

SEQ ID NO: 997200 - DNA, 120 bp, Artificial Sequence
  ENSG00000245729_5 (sequence is synthesized)
taattttgataacagaaagcccagggagcagcagcttaaaccataagagcatatactgtttacctgaagagagagaaggtggttccaagtgctctccaaagccccatgatgtcaggacat

SEQ ID NO: 997201 - DNA, 120 bp, Artificial Sequence
  ENSG00000245729_6 (sequence is synthesized)
ttctctctcatgggtgcaaagtggcttctcacatctcaacatgccaaggcaggaagctgggatacaagggcaaggagagagctcctctcttctacagagaaggaaacatctttcccacaa

SEQ ID NO: 997202 - DNA, 120 bp, Artificial Sequence
  ENSG00000245729_7 (sequence is synthesized)
gcctggcaccctgcccttcactctccatgtgatgggaccacaaggcccctcccagctgcagaatgttggggaagagggtgcctgattctctggcttctgtagctggaggcaggcactgga

SEQ ID NO: 997203 - DNA, 120 bp, Artificial Sequence
  ENSG00000245729_8 (sequence is synthesized)
gaaagagatgggaatggccaatgggtagccatttctatcgtgatacagtcaaataacaggacttttaaaaggaaataatttcttgagaatagcagagcacaccagtatgctcgaataaaa

SEQ ID NO: 997204 - DNA, 120 bp, Artificial Sequence
  ENSG00000245729_9 (sequence is synthesized)
atggtaactggatttcctgaactgttaaattaaacatgcattgctgatttcctctttctgcagctgctctgcttctaactatccgtctcttctgtctgtggctcaagatccatcatcttt

SEQ ID NO: 997205 - DNA, 120 bp, Artificial Sequence
  ENSG00000245729_10 (sequence is synthesized)
agaatataaaatccttcttatggttttatttgtcctttgtttgctggtccctccttgcctgccttcaatatttttggctttcttcccttgctttgctgggatgtgtgatttatcctatca

SEQ ID NO: 997206 - DNA, 120 bp, Artificial Sequence
  ENSG00000245729_11 (sequence is synthesized)
ccggagatctctgtgagaaagtactggatgtttatttgcctgcatatgtcagaagctccaggcagggctgcctcgtcccacaacttcaggggagccattcatttccatgtgccttgcaca

SEQ ID NO: 997207 - DNA, 120 bp, Artificial Sequence
  ENSG00000245729_12 (sequence is synthesized)
gcctgtgcggccacaatcggcagcactgagtttgggcaacagagaaatggtttcactggaaaagacacagttttaaattcccctttccaaaataaatctattttcagcattatcactccc

SEQ ID NO: 997208 - DNA, 120 bp, Artificial Sequence
  ENSG00000259499_0 (sequence is synthesized)
agaaaagccaatatgagaagcaatttgatcaacaatcactccctactgtttggagtaaccaccctcatgactttccatatgggagctgacatttgaagtaaattcttatctctattcaaa

SEQ ID NO: 997209 - DNA, 120 bp, Artificial Sequence
  ENSG00000259499_1 (sequence is synthesized)
gcatctaaatacaaatggtatgtccctcctagctggcaaacatgtaggcctcgcctggattttcagtttcaactattttggaagatgtctgtttctttgaagtatccctaaactatattt

SEQ ID NO: 997210 - DNA, 120 bp, Artificial Sequence
  ENSG00000259499_2 (sequence is synthesized)
cttccaaatatggtgaaatataccccaaaatgttctagccacttttgcatgatgtggtaatacaaaattaaatttacaaaaatatgcagctctttataaatatatcaatataagtatgat

SEQ ID NO: 997211 - DNA, 120 bp, Artificial Sequence
  ENSG00000259499_3 (sequence is synthesized)
atattaagctataaaacaaaaatactaaagttaaagctgccaaaaaatttgtagtgaggtcaggaatggtggccaggccaaaaatcagtcatatttatatgcactagcaagaagtctaaa

SEQ ID NO: 997212 - DNA, 120 bp, Artificial Sequence
  ENSG00000259499_4 (sequence is synthesized)
aggaaaattaagaaaacagttcgatttacaatgacatcaaaacaataaaatgcttaggaataaatttaaccaaggcagcacaagacttgtgcactaaaagctacaaaacattgctgaaag

SEQ ID NO: 997213 - DNA, 120 bp, Artificial Sequence
  ENSG00000259498_0 (sequence is synthesized)
gtcaatgtctgtctaccgcctcggagacacaggccgccgggaaaccacagggtcgacgggaacggcggagtgtagcatccccgggccccaagtccacagtgcctctcccacttgacctgt

SEQ ID NO: 997214 - DNA, 120 bp, Artificial Sequence
  ENSG00000259498_1 (sequence is synthesized)
cggcgccccttctcaaagtacggatctccaagaggaaggacctcctccctctccactctcagagtaaagcaagccagcagcgcaaagtgcacctcccggggacgcacagacacgactgaa

SEQ ID NO: 997215 - DNA, 120 bp, Artificial Sequence
  ENSG00000259498_2 (sequence is synthesized)
agccaccaccccagaaacagacccttcctgggaaaatgctccttccagaaccttctcaacaccacccgtttcccctgggagcgtttactttggatcagcgagatggaaaacaaaggctca

SEQ ID NO: 997216 - DNA, 120 bp, Artificial Sequence
  ENSG00000259498_3 (sequence is synthesized)
ggagaacaggccgggcccctccccagagcccgccgccagctggcccagcttcctctcgtggtccagctcgcgctgcagggtgcccgcgcgctcctcagcggcgtccgcctgctcctgcag

SEQ ID NO: 997217 - DNA, 120 bp, Artificial Sequence
  ENSG00000259498_4 (sequence is synthesized)
gctccggatcttcctgcgcaccgcctccagcgagctactccccgccatcgcgccggacggtaggcgggcgggagggctgcagtgggagaggccggctgctgccctgcggacccggctgcc

SEQ ID NO: 997218 - DNA, 120 bp, Artificial Sequence
  ENSG00000259498_5 (sequence is synthesized)
gtccggaagtcgcagcctccagggctgcgcagacaaaccgcaggcgggcgcgcgcggctgggaggggcgcgcgccgtggatcccgggactggctgggggcactgcgcatgctcgcggcgg

SEQ ID NO: 997219 - DNA, 120 bp, Artificial Sequence
  ENSG00000259498_6 (sequence is synthesized)
aaggcgctcccggcgcgctgcgggggtacctggtgagctgggcgctccgggaggccactgcactagggctctggcttccacttctagggcccctccgcggcgcggtggtgacccggggta

SEQ ID NO: 997220 - DNA, 120 bp, Artificial Sequence
  ENSG00000259498_7 (sequence is synthesized)
acggagctggctgctaagggcaatagcgactcctgctggccgcgggagcgctccgctcccgagtccagattcccatgcccgggagccagagaagctgagcggcgggtctggagccggaat

SEQ ID NO: 997221 - DNA, 120 bp, Artificial Sequence
  ENSG00000259498_8 (sequence is synthesized)
atgccctaaagggcctgatcccaaccgcaagattataacccaagcactacccccattccccaaaacttcacgaagtgaaaaccacccgcgtgtagagcacagtggttagacctcctgttc

SEQ ID NO: 997222 - DNA, 120 bp, Artificial Sequence
  ENSG00000259498_9 (sequence is synthesized)
taaatgcagttttcctaggttgactctggctcctagtttcctgctgcgtgacttcggacacattacctgtcttctctgggcgtcatctgtaaaagtgggaataataatagtactttcccc

SEQ ID NO: 997223 - DNA, 120 bp, Artificial Sequence
  ENSG00000259498_10 (sequence is synthesized)
atggggctgctatgagaattatgaaggactgtaaagcgcttagcacaataccttgtacatagttaaaaactcaaatgatagctacgattaagaaatacacaagcattgttttaagagtca

SEQ ID NO: 997224 - DNA, 120 bp, Artificial Sequence
  ENSG00000259498_11 (sequence is synthesized)
aactttttccaagacttggtaacaaagcattatctatctgtatgagagaaaaggggaggaggactgctgaaaaaagggacgggttaagggttttgcactatagtttagctcttccagcag

SEQ ID NO: 997225 - DNA, 120 bp, Artificial Sequence
  ENSG00000259498_12 (sequence is synthesized)
ggggaagcaggagggccctgcggggctgccccgggaggatgcgcctctgggggctgcggggtgatgggtgtatcccttacggtctccctcagcttcctctcgtggtccagctcgcgctgc

SEQ ID NO: 997226 - DNA, 120 bp, Artificial Sequence
  ENSG00000259498_13 (sequence is synthesized)
tctttggtgtcagaccagcctctgagatctcctggaatccagtcagtcctgggctggactgggatgcctttaaaaggcaccccaaggaaagccacagaaccctatgagagagcctctggc

SEQ ID NO: 997227 - DNA, 120 bp, Artificial Sequence
  ENSG00000259498_14 (sequence is synthesized)
tacaggtggagaaaaccaccgcagatacagtctccaccgatttcccccttgagctgtattcttaaatgccttctaagtctcagggctttttctcctcaggtttgtcacagaaagctctta

SEQ ID NO: 997228 - DNA, 120 bp, Artificial Sequence
  ENSG00000259498_15 (sequence is synthesized)
aagccagctcccttatgtgtgggaataataaagaaaacatgcttgacaaccctctcctcctccaagccctaacaaggaacttttgctttcctgcctcattttctgtggagttcctcacag

SEQ ID NO: 997229 - DNA, 120 bp, Artificial Sequence
  ENSG00000259498_16 (sequence is synthesized)
cctctgctgagactctcacaaatcccagcttgggtccttgcatcctgtaggtgggagcttctcgctttgtttccccgcggttcatctggtcaggtggggaggttacagctggtcccctaa

SEQ ID NO: 997230 - DNA, 120 bp, Artificial Sequence
  ENSG00000259498_17 (sequence is synthesized)
gtgcagagactgtgggcctccaacattgagaatgggggaaccgggtgtctggcaacctccaggagcagccaggaaactgctggacactggcaagtgccataagcagccaactagtgactt

SEQ ID NO: 997231 - DNA, 120 bp, Artificial Sequence
  ENSG00000259498_18 (sequence is synthesized)
aatgtcctgggaaggtcagtttcaggtgagttcattttcatgccgatgtcattatacaagagtttaggagagttttctcatccttgtctgtaggttggaatcacttgggtattttttaaa

SEQ ID NO: 997232 - DNA, 120 bp, Artificial Sequence
  ENSG00000259498_19 (sequence is synthesized)
tgctgccgcctgggttgcatccccagggattctgatttaactggctttgggtgcatcctaactttgggttttaaaagctccctaagtgattatgtttagagaaggttgagaatccctaag

SEQ ID NO: 997233 - DNA, 120 bp, Artificial Sequence
  ENSG00000259498_20 (sequence is synthesized)
ttaagaagtaaagacctacaaagggataaagactcatatgctataaatatcagatatatcacagttactggggaagagattgggggccagaaaaaaatggagtcttcgatccccttcagc

SEQ ID NO: 997234 - DNA, 120 bp, Artificial Sequence
  ENSG00000259498_21 (sequence is synthesized)
ctcacttttgacttaggtggaaagacaacacaaaattcgaaacaagaccatcagggatactactcctgaatgacaatcttctaagctaggtagagcccacttccagaataggatttgtaa

SEQ ID NO: 997235 - DNA, 120 bp, Artificial Sequence
  ENSG00000259498_22 (sequence is synthesized)
agtagtagaaaaatgtttttagtaataatagtagaaaaatgtaaaagtgttttacactggtgaataatgacaatgaaatgtcctaatcccaaaggtaatacgattccacctcaggaagct

SEQ ID NO: 997236 - DNA, 120 bp, Artificial Sequence
  ENSG00000259498_23 (sequence is synthesized)
gacttctcccttaccggacttctccctttttctagtgacatctgtctcttcctcctcaagttttgactattttttagtaaataaaaaacgaatactctcaatatggtcatgcactgcata

SEQ ID NO: 997237 - DNA, 120 bp, Artificial Sequence
  ENSG00000259498_24 (sequence is synthesized)
atgatgttttggtcaatgaggggctgcatatatgagagtagcctcataagattacaatagaactaaaaaattcctatcgcctggtgatttgtgttacaattgttgacagtattcagtaca

SEQ ID NO: 997238 - DNA, 120 bp, Artificial Sequence
  ENSG00000259498_25 (sequence is synthesized)
gtaacacactgtacaagtttgtagcctaggtgtttagtaggctataccctctaggtttgtgtaagtaccatacactctatggtgtttgcacaatgaataaatcacctaacgacacatgtc

SEQ ID NO: 997239 - DNA, 80 bp, Artificial Sequence
  ENSG00000259495_0 (sequence is synthesized)
acggcgggacccccaagttgggcgccggcgactggcgggggcagagggccgggcgctccctcgggctcgcgcaggtgctc

SEQ ID NO: 997240 - DNA, 120 bp, Artificial Sequence
  ENSG00000259495_1 (sequence is synthesized)
tcgcctagcccgggctgcccccgcacgcccacgccccaggtgtccgggcgcgctttacccaggggcgccgtgcccaggccaggaggccagggcggagcgggtgagggagaagcccattta

SEQ ID NO: 997241 - DNA, 120 bp, Artificial Sequence
  ENSG00000259495_2 (sequence is synthesized)
tttagattcagagggaagccggtcctgggagacggccgcgaggaacaaaggcgccccagtgctgcccacttagcatgccagagccgcgctgctcggctcccaggccggggacacggcccg

SEQ ID NO: 997242 - DNA, 120 bp, Artificial Sequence
  ENSG00000259495_3 (sequence is synthesized)
gtgttaagcggagggtgcccgaccgcgggaattcctaaggccacgcgcacctccaaggccaccgccgcacacagcttcggagtgcacagtgcacacgcccaggcacaggcagccggcccg

SEQ ID NO: 997243 - DNA, 120 bp, Artificial Sequence
  ENSG00000259495_4 (sequence is synthesized)
atcctggcgaagtttggatgcagagaacttggagctgttgttttctaccagacactaggatccctgagagaggtgtcattctttcgcgctgcacacaccttcctccacgtggtgaagata

SEQ ID NO: 997244 - DNA, 120 bp, Artificial Sequence
  ENSG00000259495_5 (sequence is synthesized)
catcgctcctgacagcctcatgcctgactggacactgaaaaagaggtgaagagatgaggcgatagaacaaaagaacagaaagataatgaagctgagactaacataattatgtatgcagcc

SEQ ID NO: 997245 - DNA, 120 bp, Artificial Sequence
  ENSG00000259495_6 (sequence is synthesized)
acaaatggagcacaaagcaattactgcttgtgggaatttgagagatgctctttgaagaggtgtgagggaatcagtaatacttgcagtgacttttaaggaggtggagtgtgctgatgaaga

SEQ ID NO: 997246 - DNA, 120 bp, Artificial Sequence
  ENSG00000259495_7 (sequence is synthesized)
tgccacaaagaactgatgggaagttattcctctccccaactgctattgtatccttcctgtagtgctgtctctgctttttgcatcttgcccagtatattatgacacaaataaaaattctct

SEQ ID NO: 997247 - DNA, 120 bp, Artificial Sequence
  ENSG00000259495_8 (sequence is synthesized)
tacactttctccttttaaactgctgtgctggtctattaagacatgcctaatacccaaagctgaggggcaaaaggggagagaatgaagtttatgcgtctgtgtcatagagaaaagctgcca

SEQ ID NO: 997248 - DNA, 120 bp, Artificial Sequence
  ENSG00000259495_9 (sequence is synthesized)
aaatgtgattaagctttttgagttagaacttaacaaaatgcctttgctactggtttccatggttgtccagtgaaaagagtgaatacatttataggaaacacaaaaggtggtttcagagct

SEQ ID NO: 997249 - DNA, 120 bp, Artificial Sequence
  ENSG00000259495_10 (sequence is synthesized)
tgggcaggatggaagacgtatttcttctactattcgctcctgtgagtttagtgccacagacctgctcaggcatctgggagatgccggtgggagatgccagggctgagcaggtttgaattt

SEQ ID NO: 997250 - DNA, 120 bp, Artificial Sequence
  ENSG00000259495_11 (sequence is synthesized)
cttcctaaacagggaataaagaccttgaggaaggaatatagatattgaggaagacccagctcctcactaatgagcttacctgcttttcttgggacagcttgccttaaagtagacagtgct

SEQ ID NO: 997251 - DNA, 120 bp, Artificial Sequence
  ENSG00000259495_12 (sequence is synthesized)
gtcatgggcttctggatcttagaaaatgcttctcattctaggggattttggccatggagaccatcgcacagctcttctcccttctcctcttggctgccatcccagtaaacaggtccttcc

SEQ ID NO: 997252 - DNA, 120 bp, Artificial Sequence
  ENSG00000259495_13 (sequence is synthesized)
cagaacccacagaggagaaaggcgttggagaggtggtaaagatcgttggcgggctaggtggcaatgttaagtcctgaaaaacgctgtgcgttggggagtttcttagaacacttgtgttac

SEQ ID NO: 997253 - DNA, 120 bp, Artificial Sequence
  ENSG00000259495_14 (sequence is synthesized)
cttgaggctgggtaatttataaagaaagaggttactttggcttgcagttctgcagcctgtacaagaagcaaggcacctgcatttgcttctggtgatggcttcaggctgcttccactcatg

SEQ ID NO: 997254 - DNA, 120 bp, Artificial Sequence
  ENSG00000259495_15 (sequence is synthesized)
cttccactcatggtggaagaggaaggggcaccagtatgtgcaaatcacaacaaggtgagagagaaggcaggtggggagatgccaggctcccttttaacaatcagctctcatgggcactag

SEQ ID NO: 997255 - DNA, 120 bp, Artificial Sequence
  ENSG00000259495_16 (sequence is synthesized)
tagagtgaaaactcacttattgctatgaggatggcactgagccattcatgagggggtccaccctcatggccctaacacctcccttcaggcctcacctccaacatatgagtcctatctgtg

SEQ ID NO: 997256 - DNA, 120 bp, Artificial Sequence
  ENSG00000259495_17 (sequence is synthesized)
cccttacttttttggagtcagcatctaaaatagtcactgctttgctccaactggtgtctccagtaacttgatggggacaaccttcatcttcttccacctgctccattcatgaaccatgtc

SEQ ID NO: 997257 - DNA, 120 bp, Artificial Sequence
  ENSG00000259495_18 (sequence is synthesized)
tccttgtcctgaaaggaccaaagggtttcaattttcttaagctgtgcctcagtttcctcatctataaaatgagcataataggagtacgtaccttagtttaagaggactaagtagtttata

SEQ ID NO: 997258 - DNA, 120 bp, Artificial Sequence
  ENSG00000259495_19 (sequence is synthesized)
tgtgaccacatattaactgaactcatttcatatctccaaccacctacacaacatctttatgtctaacagaatcttaagtttattgtggcagtatggaaaccttgattctccacttcccaa

SEQ ID NO: 997259 - DNA, 120 bp, Artificial Sequence
  ENSG00000259495_20 (sequence is synthesized)
acctgctcttccctgatggttcctcttactggttagtggcactgttgttcacccagctactctggccaaaacctttgcctcctctcttttgctcacaccccacatccaatcccacaggag

SEQ ID NO: 997260 - DNA, 120 bp, Artificial Sequence
  ENSG00000259495_21 (sequence is synthesized)
actggacctcttctcgcctctcctatcacaaccctagtccaagccagtagccggtcacctggattgtgcactggacatttccactctccctgcgcccacccttaatccctttactgctgc

SEQ ID NO: 997261 - DNA, 120 bp, Artificial Sequence
  ENSG00000259495_22 (sequence is synthesized)
cagagggacactttgaaattactagccagcccatgagcctctacttccaatcttctaatggtctcccacatttacagtagaatccactgtccttaccaaggccaaaacatcccacctatc

SEQ ID NO: 997262 - DNA, 120 bp, Artificial Sequence
  ENSG00000259495_23 (sequence is synthesized)
tggcccctggctgcctctccagcctcatctccctcttctctcaccattgctttttctgccttagccacgctggcctgactgcctccagctcaggggacaccttgctgtctccacaacctt

SEQ ID NO: 997263 - DNA, 120 bp, Artificial Sequence
  ENSG00000259495_24 (sequence is synthesized)
gtgctccctgagctggatatcattctcctgatatctgcgtacttcacccatctcacttctggtacatctctcaccccctggatacctcaccttaaaatagtaccactggaccccctctgc

SEQ ID NO: 997264 - DNA, 120 bp, Artificial Sequence
  ENSG00000259495_25 (sequence is synthesized)
catgttacactgctttagttttctcatacttgcttattactcctgaaacagcaatttgtaaattgtctctagcaccagactgtaagggcggtaaggacaggggctttgagtgtcttgttc

SEQ ID NO: 997265 - DNA, 120 bp, Artificial Sequence
  ENSG00000259495_26 (sequence is synthesized)
tctgctctgtcttcaactcctagatgtgtctctaacgtgcagtaggtccttagtaaatatttatagaatgcatgaatgaaccagtaagtatagtgcctggcacatgattaagtgttgaag

SEQ ID NO: 997266 - DNA, 120 bp, Artificial Sequence
  ENSG00000259495_27 (sequence is synthesized)
aagtgttagtaattattatgggcattactcacactgccaaactacttcgtgaattttcccaggggtagggaactcctcatcttcatattttaaacagaacatcactttattgagctagta

SEQ ID NO: 997267 - DNA, 120 bp, Artificial Sequence
  ENSG00000259495_28 (sequence is synthesized)
ccataatgggaactttaacaaccattacttcatttcatccacacatcagccttatgaataagtgttactgttcccactttgcacatgagaaaaagaaggatcaaaatgtcaaatgaccac

SEQ ID NO: 997268 - DNA, 120 bp, Artificial Sequence
  ENSG00000259495_29 (sequence is synthesized)
caactactccattcaggatcacttatacggtttggctctgtgtccccaccacagtctcatctcaaattgtaatccccaggtgtcttgggagggacctgatgggagatgattggatcatgg

SEQ ID NO: 997269 - DNA, 120 bp, Artificial Sequence
  ENSG00000259495_30 (sequence is synthesized)
gggcagttttcccccatactgttctcgtgatagtgagggagttcttgtgagatctaatggtttaaaagtggcagtttctcctgcgctgtccttctcctgtcgccttgtgaataaggtgcc

SEQ ID NO: 997270 - DNA, 79 bp, Artificial Sequence
  ENSG00000259495_31 (sequence is synthesized)
ctgtcgccttgtgaataaggtgcctctagccatgcagaactgtgagccaattacacctcttttgtttataaattaccca

SEQ ID NO: 997271 - DNA, 120 bp, Artificial Sequence
  ENSG00000259495_32 (sequence is synthesized)
gtatgagaacggactaatatattcacaaagctggaggagggagtgctgtgagttaaacccatcagtcccaaatccgtttctctttcaaccactcccagcattggttccgggaaccccagg

SEQ ID NO: 997272 - DNA, 120 bp, Artificial Sequence
  ENSG00000259495_33 (sequence is synthesized)
catggagctctccttcctcaagatgcccatagcacctgcttttcgtatttgatgaatcttgccttgcactgtcatcaggggtctctccctccgctccatgagttccttgagagccgagac

SEQ ID NO: 997273 - DNA, 120 bp, Artificial Sequence
  ENSG00000259495_34 (sequence is synthesized)
aggagctcagaaacatcttgacttgggctagtgtgaggagtgggagaaaaaaggggaggattgtgtgtgcatgtaagagtgggtcctttgcctcttaaaaaagtatctactgcagcttgt

SEQ ID NO: 997274 - DNA, 120 bp, Artificial Sequence
  ENSG00000259495_35 (sequence is synthesized)
gctgaatatgagtgtttggaatcctcagtatgatcagggagggcactcagagagaagagctggaatgatctatgtgagggttccccattcagtgtcatctggagcaaatagtcttcccca

SEQ ID NO: 997275 - DNA, 120 bp, Artificial Sequence
  ENSG00000259495_36 (sequence is synthesized)
gagtttacaagtatatgcaagcccaggggacacaagaagccaaggtagccaaagttcacctacctgctatgacagccccctgggatgagtcttctcctcatttaataaaataaattagga

SEQ ID NO: 997276 - DNA, 120 bp, Artificial Sequence
  ENSG00000259495_37 (sequence is synthesized)
gggctggatatgccctaaaataatggttccataactgcaaagaagctgactgtaactctgccacctgttaggaacaggatgtcactgtcactgaaacagaagactgaaaattagcccatg

SEQ ID NO: 997277 - DNA, 120 bp, Artificial Sequence
  ENSG00000259495_38 (sequence is synthesized)
ctatatataaattaggagggtggcgggggggcggggaactgggaacatcttgttttgacattcagcaatattttcaaggctctctaaagaaacttggaagaaaagaatgtaaaagagtcc

SEQ ID NO: 997278 - DNA, 120 bp, Artificial Sequence
  ENSG00000259495_39 (sequence is synthesized)
aggacctaaagggaaataaggacctgattttcaatcacattttgacctgaaaatgaaatcaaggcctatattgtgatgacttgagtagcttgctgtcctacagctgcacaattgaagtgg

SEQ ID NO: 997279 - DNA, 120 bp, Artificial Sequence
  ENSG00000259495_40 (sequence is synthesized)
tttcattgctgtgagtaccttctgccactcactagattctggaattaatcctctgccaggctaaaagcagaaacagctacggatctaacacttcctaggaagaagtatttagcagaagca

SEQ ID NO: 997280 - DNA, 120 bp, Artificial Sequence
  ENSG00000259495_41 (sequence is synthesized)
gtggtgttcaatgtggaggcattttaacacagggttccggaaggttcatttgcatcctgcactgacccagcacagggtctgtagtggtcacagtggttgaattcccaccatctattcctt

SEQ ID NO: 997281 - DNA, 120 bp, Artificial Sequence
  ENSG00000259495_42 (sequence is synthesized)
accaaataatcagactaagccagtggttcttcatgagaggctattcccctcccctactaaggtgacattggcaatatctagcaacgtttttagttgtcatatctggggaggtgctactgg

SEQ ID NO: 997282 - DNA, 120 bp, Artificial Sequence
  ENSG00000259495_43 (sequence is synthesized)
catctcatgggtagaagccagggatgatgtttaacatcctacaatgcacaggaaagcacttcaacaaagacttacctgccccaaaacgttaagagtgccgatgttgagaaaacttggtgg

SEQ ID NO: 997283 - DNA, 120 bp, Artificial Sequence
  ENSG00000259495_44 (sequence is synthesized)
tctatggggtttgatttgccaatgcctgctttaagaatgagtgtaagacttcatcccagcaaacagtcttgaagcaaagtctgttggaagctatttgagaaaggttctctcattcttaag

SEQ ID NO: 997284 - DNA, 120 bp, Artificial Sequence
  ENSG00000259495_45 (sequence is synthesized)
aagaaccagaagaaactgtctcttttcttttggctgttgcagtgtttgaatatgacttctggacctgttgtagccactttgagtccctgaagggaataattttgagagcaatccagccat

SEQ ID NO: 997285 - DNA, 120 bp, Artificial Sequence
  ENSG00000259495_46 (sequence is synthesized)
atccagtaaagccgtaggtgtgcataacttgcgaccagcaattcagcccatagacatatgccctggagaagtctttacacaagtgcaccagaagacaagtacacaagtgttcctggcaac

SEQ ID NO: 997286 - DNA, 120 bp, Artificial Sequence
  ENSG00000259495_47 (sequence is synthesized)
ctggcaacattgtaatactgaaaactcaccaatatttgtttgtgaataggcaaatggataattaaattgttacataactattaaaaataaatatttagggccgggcgcggtggctcacgc

SEQ ID NO: 997287 - DNA, 120 bp, Artificial Sequence
  ENSG00000259495_48 (sequence is synthesized)
actccgtctcaaaaataaaaattaaaattaaaaataaataaataaatagcagtgacagtaaataaattatgcctgtggatgcatgtcacaaatataaagttgagtgaaaagtacaaattg

SEQ ID NO: 997288 - DNA, 120 bp, Artificial Sequence
  ENSG00000259495_49 (sequence is synthesized)
aatttttctcccccgggcacgtctttgctgcaaaggccctggtggccgagaccaaggctggctgtttacgtgaggccagccttgcaggtggggcagagaggaggaaattttgttgtaaga

SEQ ID NO: 997289 - DNA, 120 bp, Artificial Sequence
  ENSG00000259495_50 (sequence is synthesized)
actgggacaaagttggcttctggaactcccaaagaaaatatttttctggcaaggggaatgcaaggcaaggcttctctgatgtgtaactgatagcctcagaaggtgtaaggttaaataatg

SEQ ID NO: 997290 - DNA, 120 bp, Artificial Sequence
  ENSG00000259495_51 (sequence is synthesized)
atctcatcagtataacaggagctggacagtattaatcagtggtccaattcaaaataaagccacactgctataagcaaagtaatgaaggcttattgtgacctggggctccttaatgacaca

SEQ ID NO: 997291 - DNA, 120 bp, Artificial Sequence
  ENSG00000259495_52 (sequence is synthesized)
gatttgattcccacttaatgggcaactgaataatgcagctgatagcacagaccagtggggaaggcagaccagaggggtacaggaggctgcctgggatgaggcatctaaaggctgttatca

SEQ ID NO: 997292 - DNA, 120 bp, Artificial Sequence
  ENSG00000259495_53 (sequence is synthesized)
catgtcacatcatcagaccttgaatttgctattaaacagcaaataagcaaatatgccacttacagaagacctttccaaacttcaaggcatctactaaaattatatttatctctctttgat

SEQ ID NO: 997293 - DNA, 120 bp, Artificial Sequence
  ENSG00000259495_54 (sequence is synthesized)
ataccaatcacgcaactctaaactatttatgcagaaactaatctacatattaaattgtgccaataaatgttgtcttctctgtttacataaaatgaattgcaagtcattcccatatggttc

SEQ ID NO: 997294 - DNA, 120 bp, Artificial Sequence
  ENSG00000259495_55 (sequence is synthesized)
cttaaatctgtggcctaaatatattttttttaatttcagagaaacttttatatcttgtgatctttattctcagatatgtaattttttttctcactgcttattttcctaatgtaaatttct

SEQ ID NO: 997295 - DNA, 120 bp, Artificial Sequence
  ENSG00000259495_56 (sequence is synthesized)
cagttattatagtggggaattttttttaattggataacctttgggagcatgatgaggatagaaaaatgattgagtattgtacacattatcattaaatggataaacttctaaaatcaggat

SEQ ID NO: 997296 - DNA, 120 bp, Artificial Sequence
  ENSG00000259495_57 (sequence is synthesized)
tgtgcatgctgaaaataagtttaaaatattgcaaatttaagtatcttttgtcagaacatgagaaagttgagggaaaaatagtggaaagttcctaaaagggaaacaaaaaaaacagcttac

SEQ ID NO: 997297 - DNA, 120 bp, Artificial Sequence
  ENSG00000259495_58 (sequence is synthesized)
actattagtgatgactattttctttctgttacgatatctgaatctttaataccagtagaaattaggttccaaactaaaattgttcattataattgctcagcatcaagtaatttttatgtt

SEQ ID NO: 997298 - DNA, 120 bp, Artificial Sequence
  ENSG00000259495_59 (sequence is synthesized)
ggataaagacacaactcaattgctctctctgatatcaatgtggggaacaatccactatgtttctcatttggtgttaatattgtggcctcagatttcctctcataattgcttcaataatta

SEQ ID NO: 997299 - DNA, 120 bp, Artificial Sequence
  ENSG00000259495_60 (sequence is synthesized)
caatctatacataaaaactgaaactcattatttatgagcttgtagttctgttgtatgtgtacaagagctattcaaagaatagttgaaaaggaaaactatgaataaaatattattctcatg

SEQ ID NO: 997300 - DNA, 120 bp, Artificial Sequence
  ENSG00000259495_61 (sequence is synthesized)
ggtggaaaaagaagacatttcaagtaaaaaataaagcaggtgtgcacccagccacaagataggccaggcccagacagagaaaccagggtatcagctatggcccgctcttgtgccccgtat

SEQ ID NO: 997301 - DNA, 120 bp, Artificial Sequence
  ENSG00000259495_62 (sequence is synthesized)
caaagttgactgttcctgattccaacatcaagccaaatgagaattcagcctctcttctacataccccgaaaagcaacacactcaaaataccaacttaattaatgtataacgtatactgga

SEQ ID NO: 997302 - DNA, 120 bp, Artificial Sequence
  ENSG00000250777_0 (sequence is synthesized)
ttggtctcaccgacttcaagaatgaagccgtggatcctcgtggtcagcttttggtccagtgactcactcacagaaactccaagacagattaaactagcaagagttgaatatctgaatttc

SEQ ID NO: 997303 - DNA, 120 bp, Artificial Sequence
  ENSG00000250777_1 (sequence is synthesized)
tgaatatctgaatttccaaaattatgaggctacaaaaagaagcatagattaaagttaggaccaaatgctgctcagaaattgttttaatctcaaaagtagttggcaagttttcagagttca

SEQ ID NO: 997304 - DNA, 120 bp, Artificial Sequence
  ENSG00000250777_2 (sequence is synthesized)
acattcagagctatttcattttcaaagattctcacatccaacagagagaagaaggtcatacgaagacacgcagaatttggacttatgcggtcacaagtcaaggagtgcttggagctaccg

SEQ ID NO: 997305 - DNA, 120 bp, Artificial Sequence
  ENSG00000250777_3 (sequence is synthesized)
ggagatggaagagtcaaggcaggattttccctggaagatttggaaggaacatatttctcctgaaaccttgattctagccttcactaatgacagagaataaatttctgttcttttaagcca

SEQ ID NO: 997306 - DNA, 120 bp, Artificial Sequence
  ENSG00000250777_4 (sequence is synthesized)
attcatcagcgagaggggacctgaaagcaggtcgccatctgtgaggattaaagttaggaccaaatgctgctcagaaattgttttaatctcaaaagtagttggcaagttttcagagttcat

SEQ ID NO: 997307 - DNA, 120 bp, Artificial Sequence
  ENSG00000250777_5 (sequence is synthesized)
tttcaaggcctggtgtatggggctgttctaaactgtcatcacactcctcaagccattagcaacctcaacatcagcaagtgatatgccctacttctccccagataaattatgatattgagg

SEQ ID NO: 997308 - DNA, 120 bp, Artificial Sequence
  ENSG00000250777_6 (sequence is synthesized)
atgaccttctcttccctgcttctgcccctggactttgcatacaaccaactctgcccatcagggaggtgtaactgtggctaaaacgtcatgtgctaaaaattccttccctatttatcctcc

SEQ ID NO: 997309 - DNA, 120 bp, Artificial Sequence
  ENSG00000250777_7 (sequence is synthesized)
tatgtcttgcccaccaaatttttgtcttcctatttctctttaatcctttccttttcagtgatttctttcctttggaacataaacatatttctttacctcaaaagtcaaacccctgacttg

SEQ ID NO: 997310 - DNA, 120 bp, Artificial Sequence
  ENSG00000250777_8 (sequence is synthesized)
atcctgtagtctcctctaactacctttctctttctttccacttatgcttctggaaatgttgtcacaattttctgtcatgtttttctcttcccattgaattttgattcttctgctgtgtgg

SEQ ID NO: 997311 - DNA, 120 bp, Artificial Sequence
  ENSG00000250777_9 (sequence is synthesized)
atttcctccttgaaatcttcagtgaaacaactgaacattcagagctatttcattttcaaagattctcacatgtgagtattcctctttctgaatataatcccctttctatctctttaattt

SEQ ID NO: 997312 - DNA, 120 bp, Artificial Sequence
  ENSG00000250777_10 (sequence is synthesized)
caggctgagattaaagtttatttcttatggcttctgagacatctctccctaagagagcagaaaggcctattcatgttaatatgtccaaatcaaacccactacacagatgtactctcaaac

SEQ ID NO: 997313 - DNA, 120 bp, Artificial Sequence
  ENSG00000250777_11 (sequence is synthesized)
ctacatctttatttcctatctcagctaatgagataacaatctctccctctcccaaagtagagaccttggatccatctttaattatttcctaactctaattattaaatccaatcatacacc

SEQ ID NO: 997314 - DNA, 120 bp, Artificial Sequence
  ENSG00000250777_12 (sequence is synthesized)
aaaaaatgatgttctgaatactctctctttcatttgtgcactccttctttgtcgtatctctcctggactaaaataatagtttcttgcagggtgttgaatagtgtcccctaaaaaatcatg

SEQ ID NO: 997315 - DNA, 120 bp, Artificial Sequence
  ENSG00000250777_13 (sequence is synthesized)
cccacctggaacctcagaatgtgaccttatttggaaatcgggtgtgcagatgaaattagttagggatctcaaaatgaagtcactgtattattattgtagatgattatgtacactaagttc

SEQ ID NO: 997316 - DNA, 120 bp, Artificial Sequence
  ENSG00000250775_0 (sequence is synthesized)
agttttatcccatgcggtttctccatagtgagtgtgttctcatgagatatgacagtttaaaagtgtgtggcagttcccccatcttgctctctctcccgtcaccagttatacacaagatga

SEQ ID NO: 997317 - DNA, 120 bp, Artificial Sequence
  ENSG00000250775_1 (sequence is synthesized)
atggattaaccactggaagacctgcactactacaaatgttaaagaaagtccttccaagaaagaaaaaaggcaacttaatggaaacttgtgtctaccaaatggaaagaagagcaatgggaa

SEQ ID NO: 997318 - DNA, 120 bp, Artificial Sequence
  ENSG00000250775_2 (sequence is synthesized)
tcctaactacgtgatgtgagaaaaaaagttgaatgtggtgatggggaaaacactgaagttcaaaagaagcgaagacaagaagctactcatggcagcagcttttcccataaatcaagaaat

SEQ ID NO: 997319 - DNA, 120 bp, Artificial Sequence
  ENSG00000250775_3 (sequence is synthesized)
gctacagattataaatgagatgagactatcaagaagagacctaataggagtgtgaagaccaaaaatttaaaagacgtggttatatactttgagtaaactctatatataggacaatgttat

SEQ ID NO: 997320 - DNA, 120 bp, Artificial Sequence
  ENSG00000250775_4 (sequence is synthesized)
ttctgtgttcctcactcaaatctcacctcaaattataatccccatgtgtcaagggcaggaccaggtggaagtaactggatcatgggggaagttttcctcatgcttttctcatagtaagtg

SEQ ID NO: 997321 - DNA, 120 bp, Artificial Sequence
  ENSG00000250775_5 (sequence is synthesized)
agttctcataagatctgatttttttataagcatatggcatttcccctcctagcattttgcctcctgctgccttgcaaagacggcagttgcttcccctttgccttccgccatgactgtaag

SEQ ID NO: 997322 - DNA, 120 bp, Artificial Sequence
  ENSG00000250775_6 (sequence is synthesized)
cggcagttgcttcccctttgccttccgccatgactgtaagttccctgagtcctctccagccatgtggaactgtgggttaattaaatctctttccttataaattacccagtcttgggcagt

SEQ ID NO: 997323 - DNA, 120 bp, Artificial Sequence
  ENSG00000250775_7 (sequence is synthesized)
gtaccaggagagtgaggcactgctgtaaagacatcactataaaggcacctgaaaatggaagcaactttggaactagctaatgggcagaggttggaaccatttgcagggttcagaagaaga

SEQ ID NO: 997324 - DNA, 120 bp, Artificial Sequence
  ENSG00000250775_8 (sequence is synthesized)
catgaagatgtgggaaagtttggaaattcctggagacttgttgaatgctttgacgaaaatgctgatactgatatggacaataaatttcaggctgagatgctctcagatacaaataaagaa

SEQ ID NO: 997325 - DNA, 120 bp, Artificial Sequence
  ENSG00000250775_9 (sequence is synthesized)
actgaagaacacttttgcagctgactaacaactcttgatattgagaaagttatcagaattatttgcaaatctcctctcagatttgcaaaggatgctggcatttctccatgaggcaggtat

SEQ ID NO: 997326 - DNA, 120 bp, Artificial Sequence
  ENSG00000250775_10 (sequence is synthesized)
acaagcaacattttgtgaaattgtttgtctgacaaaattgtgtgaaattttccagaattaaaacagcatgtaaaatttaacttctataactttctttaaaataaaggaaaactgaatgtg

SEQ ID NO: 997327 - DNA, 120 bp, Artificial Sequence
  ENSG00000250772_0 (sequence is synthesized)
aataaagacacagctgttaaaagcacagcatttagaaatatgaaggaaaacatcagaagaaacaggttaaagaattagatgtggtcctcacagggaatatttgcccctggccgcagatac

SEQ ID NO: 997328 - DNA, 120 bp, Artificial Sequence
  ENSG00000250772_1 (sequence is synthesized)
aaaggatgcatttcaagctctcccaagaactcttgcagtgctccatccctgtgtcctcagaaatggccctgagtctcagcagctcaaaaagactccagttggatagtgagaagccactgc

SEQ ID NO: 997329 - DNA, 120 bp, Artificial Sequence
  ENSG00000250772_2 (sequence is synthesized)
gtaggaaaggaaagcaatgaagaagccaagaaagagacaaggaaccccggaaagagagtcagcaaagagagaaatagaaacattaatttcaggtgaagaaactgaagactttagccagag

SEQ ID NO: 997330 - DNA, 120 bp, Artificial Sequence
  ENSG00000250772_3 (sequence is synthesized)
ccaagtggctaattcagagtttaatacacctttgacctcaaaccctttgtggtcacctttgaacagtgcctccctctctgaaataaaatactggttctgtcattaattattaattattga

SEQ ID NO: 997331 - DNA, 120 bp, Artificial Sequence
  ENSG00000250772_4 (sequence is synthesized)
tagcaaaagtagctgcatgcagaagtaaaattgttaagaatgtcacataaaatgtgagggtgagctcagcatgaaggaacagcctcttccattggtgaggtgaagaaactgaagacttta

SEQ ID NO: 997332 - DNA, 120 bp, Artificial Sequence
  ENSG00000258545_0 (sequence is synthesized)
agatcgcagcccagagtctgcggaggcgcaccgtttcatcaacagcagggactgaaacttcagcccaggagaagccaagatggcaccgttatcgcaccctgggaatcgaggaccgggaag

SEQ ID NO: 997333 - DNA, 120 bp, Artificial Sequence
  ENSG00000258545_1 (sequence is synthesized)
aacttaatgatgcgattcctcccgtgatctcagtgattgtatcaggcgaaaacgaggagggcaaaataccgtccagatgtaaactaggagcagccgcaccagcagcaccagcagaatgcc

SEQ ID NO: 997334 - DNA, 120 bp, Artificial Sequence
  ENSG00000258545_2 (sequence is synthesized)
cgtcagtggcagtggccacgaactcagaaagcctgaggacagtcagcagctcctctggctcttcactttcacactggtgcaactacaggagctgaagaacatttttcaactcgttccata

SEQ ID NO: 997335 - DNA, 120 bp, Artificial Sequence
  ENSG00000258545_3 (sequence is synthesized)
cccggacgtgttagaaagggacttgtaagatgcatgagcatgactgaaaccagtgtgcaggtcactatacctgaaaaaacttatttggcagggcagccattctacaatctgcttcaagag

SEQ ID NO: 997336 - DNA, 120 bp, Artificial Sequence
  ENSG00000258545_4 (sequence is synthesized)
aacaatataaaacaatatgagagggtccgtctcttccctcaccctgatctccccaaatttggtcgatatctaaggtttttttttgctgtacaactccttttctggagttttactcacttt

SEQ ID NO: 997337 - DNA, 120 bp, Artificial Sequence
  ENSG00000258545_5 (sequence is synthesized)
tctggagttttactcactttcaacaaggaaggtgagttttcctgcttccatgatgatggagggcaggcaactcctttctggagtttcagctcaattccaacagggaaggcgagttggagt

SEQ ID NO: 997338 - DNA, 73 bp, Artificial Sequence
  ENSG00000258545_6 (sequence is synthesized)
tgcaacctccacctcccggtttgcctcagggatatggaattaagatccacctggtgtgatgaataaacccaga

SEQ ID NO: 997339 - DNA, 120 bp, Artificial Sequence
  ENSG00000258545_7 (sequence is synthesized)
atggaattaagatccacctggtgtgatgaataaacccagactctcagcaacgcaggaaaaaaaaaacaaaaactggctggcgatctggagtaaaggatcctcacatccacgtgaaccagg

SEQ ID NO: 997340 - DNA, 120 bp, Artificial Sequence
  ENSG00000258545_8 (sequence is synthesized)
aaactctgtgcccaaatcgacgaaaaaaaaacactgggagagccgaactaaaagtcttttagcacgggtaccagccctagaatttccagtacaccagcagcagcctggaaaccacatcct

SEQ ID NO: 997341 - DNA, 120 bp, Artificial Sequence
  ENSG00000258545_9 (sequence is synthesized)
aaccactgagactgccatcctcacagctgagaaaggatggacccaccatactcaagtcaagaaaacatcttcctcgtcagaatcatgggttactgtactaggattaagccttactaagtt

SEQ ID NO: 997342 - DNA, 120 bp, Artificial Sequence
  ENSG00000258545_10 (sequence is synthesized)
aaagttaaagaaagcttaattttcatataccttctatattgcttcttttcctttccttattctgttactagctcctttgttattaatgtaactaagtctgagtcacctcagaccattgcc

SEQ ID NO: 997343 - DNA, 120 bp, Artificial Sequence
  ENSG00000258545_11 (sequence is synthesized)
ttttatgcttgctctgtcataccttgtggaaatgtaaaagatcaatgacagctagccttttcacacaattatttatgcctcggccctctaattgacacagttacccctagcactcatcgt

SEQ ID NO: 997344 - DNA, 120 bp, Artificial Sequence
  ENSG00000258545_12 (sequence is synthesized)
tgtgatcacctgcagccaagacgctgattttctgctcctatagcctggcaaccttgtggtacatgggactacgtcctttaaactacccaggagcaaagttggacttccatgaaaaaggtt

SEQ ID NO: 997345 - DNA, 120 bp, Artificial Sequence
  ENSG00000258545_13 (sequence is synthesized)
tgtgcagatctaaaacctctcatctatttcactaaaaggacttccccttctaactgtcacccttaccaatgtaaccctgtcctctctatcaccacctccacctgtctttaactaactcta

SEQ ID NO: 997346 - DNA, 88 bp, Artificial Sequence
  ENSG00000258545_14 (sequence is synthesized)
cctctctatcaccacctccacctgtctttaactaactctagacctgtccttaattgcttttatggtattggaagagaaactcagttgt

SEQ ID NO: 997347 - DNA, 63 bp, Artificial Sequence
  ENSG00000258545_15 (sequence is synthesized)
acatgtttttccttgaaaagtaagaaatgctgtaatgcatttctcaattaattcccaccctac

SEQ ID NO: 997348 - DNA, 120 bp, Artificial Sequence
  ENSG00000258545_16 (sequence is synthesized)
cagatctccacccaccctacaaaatgcttaaaaggtaacttaactctttgttctgggctcagtcctttgggctgagtactgggccggtgcacctaaataataaatatcttcctgaacccc

SEQ ID NO: 997349 - DNA, 120 bp, Artificial Sequence
  ENSG00000258545_17 (sequence is synthesized)
gcggacctcaaatgtgcaccttttaagccctttccttcactcctgactgattgatttgggatccactgctaagtcagacttttgaaccattgttccaggcaaacttctgttaaagctggt

SEQ ID NO: 997350 - DNA, 120 bp, Artificial Sequence
  ENSG00000258548_0 (sequence is synthesized)
gaggagtagctgactctgaagcccaggctgttgctatccagtctggtggtgaatcctccacagtctgtttagagcaattggacgaagtatatttttgtgagcaaatttacctttctctct

SEQ ID NO: 997351 - DNA, 120 bp, Artificial Sequence
  ENSG00000258548_1 (sequence is synthesized)
gaattctccaaaattcagaaaccaggaagtctttaagacagttatagcagggagcagttacaatgtaaacagaggtggtgccttgacattattggttcaccaacagagcagaactgcctc

SEQ ID NO: 997352 - DNA, 120 bp, Artificial Sequence
  ENSG00000258548_2 (sequence is synthesized)
agccatcaataataattcaacgcatcaggatgaggcctacgcatgggccacagaggatatgtaatgacttaagataccaactccacattctgtggtaagagatgaagatccaggaaatgt

SEQ ID NO: 997353 - DNA, 120 bp, Artificial Sequence
  ENSG00000258548_3 (sequence is synthesized)
atggacacctatagcctgaagaatattgtcagaaaaaaacactgggatctggaagcgaaaaggaaacatagaaaacgagacaggaaggtgaagaaagttgaagataaactttctttttca

SEQ ID NO: 997354 - DNA, 120 bp, Artificial Sequence
  ENSG00000258548_4 (sequence is synthesized)
caatgtttttatggacaagttcagcccataaatcaaaaattacctttatggatgaaatattagttaagtcaagatcatctttttcatttcctacatgcaggttgaatctcatttatggag

SEQ ID NO: 997355 - DNA, 120 bp, Artificial Sequence
  ENSG00000258548_5 (sequence is synthesized)
tgagatgtcaaataacaacaaaaaatgcacttaatttgcataaagatgcttgtaaggtaacattgctccacactttgctttattcacatcattagaggaaatatcttattcctctagctg

SEQ ID NO: 997356 - DNA, 120 bp, Artificial Sequence
  ENSG00000258548_6 (sequence is synthesized)
tttctggccatggctcaaggaattaaaaacttccattcattccttcagacagtacagttaacaagaggataactttttttattatctctgtccttctccctcaggaagcagagaattatc

SEQ ID NO: 997357 - DNA, 120 bp, Artificial Sequence
  ENSG00000258548_7 (sequence is synthesized)
agattggtgagagaaaggaaataaaggtctgaacatgtgtctcaagtcacctcttttgggagcactctgttctcagtttattttaattctgtttctcaatttaatgagtttactagagca

SEQ ID NO: 997358 - DNA, 120 bp, Artificial Sequence
  ENSG00000258548_8 (sequence is synthesized)
gggtccactattaccctgtggagatccttaatgatacatggatatgtttaattctgggaataaagtagttaaactggctagtgattatgccacattgttagagtcatctttgtcaataag

SEQ ID NO: 997359 - DNA, 120 bp, Artificial Sequence
  ENSG00000258548_9 (sequence is synthesized)
aaagttgttcatatttatgacatctgtatccatttcttcagaagtgtgactattattcatatatccccaatacacacaaaatatatagttttaactaaatttttaatctgttacatattt

SEQ ID NO: 997360 - DNA, 120 bp, Artificial Sequence
  ENSG00000258548_10 (sequence is synthesized)
ttctaggttactagctagagacatcctggttgtttccaatttgttgtaaactggaaatttgatgctaaacaagtagtgttatgacaagccttcttattcataacttgacatgcttttgcc

SEQ ID NO: 997361 - DNA, 120 bp, Artificial Sequence
  ENSG00000258548_11 (sequence is synthesized)
agtatattttagatgaaattttgagattatggtggagtcaaatcatatgaacactttaaattttgctccgttattaccacattcctgtgcaaaagtgacaccaatttacaatgccatatt

SEQ ID NO: 997362 - DNA, 120 bp, Artificial Sequence
  ENSG00000258548_12 (sequence is synthesized)
gtatagacgtgtttcatggtaccttaaaacaattacaatgttaataacaaagataagtaatcacagagcactatgtcagatataatactaatttaaaaagtttgaaatataatgacaatt

SEQ ID NO: 997363 - DNA, 120 bp, Artificial Sequence
  ENSG00000258548_13 (sequence is synthesized)
aacaaaatgtgactaggaggctcaaagtgagcacatgctgttggtaaaatgatgctaacagacttgcttaatgtagggttgccacaaacagaagtaaaaagtgcttatttgccgacaacc

SEQ ID NO: 997364 - DNA, 120 bp, Artificial Sequence
  ENSG00000258548_14 (sequence is synthesized)
aattatttatattacagatactttgctttgctatttctaattctcttattttgtaaacagtgttattttagccacatatgtatttctttcgctctggatttctcatttcattttaatttt

SEQ ID NO: 997365 - DNA, 120 bp, Artificial Sequence
  ENSG00000258548_15 (sequence is synthesized)
gtgtgtatgtccttgatggattctttgaatttttgttttcattgcatctttctgtataattattcctgggatattgtgtcatttttaaaaattgcatttcgtaggatggattcctaatac

SEQ ID NO: 997366 - DNA, 120 bp, Artificial Sequence
  ENSG00000258548_16 (sequence is synthesized)
tttctttgcatgtgcttttatgttattttatttccttgtcttattactaaaaagtgattttatacttgccatgattttcaggtttcccagcttaagatggacagttcttacactttgatg

SEQ ID NO: 997367 - DNA, 120 bp, Artificial Sequence
  ENSG00000258548_17 (sequence is synthesized)
tagcatgggcaaatttgtctctactttttcacatcaagctatagtttaagcattgagttttgaaatgtgcccactttttccctagcctgagtgtgtagagaataagcagatgagctcaat

SEQ ID NO: 997368 - DNA, 120 bp, Artificial Sequence
  ENSG00000258548_18 (sequence is synthesized)
tggtgtgcaatttaggtaaaagacctggactctttctcttgcctaaaattttattaagtatctaatcccatagcttgctctctttccaggaggcagttttactgccgccagggaaatagc

SEQ ID NO: 997369 - DNA, 120 bp, Artificial Sequence
  ENSG00000258548_19 (sequence is synthesized)
cttgctttcaaatctcttccttaattcagcgcagagccaccaaggctttgcttgtatcaatgagccatctcatgtaccttcatcccccatttcaccagtcttttcctggcactttctccc

SEQ ID NO: 997370 - DNA, 120 bp, Artificial Sequence
  ENSG00000258548_20 (sequence is synthesized)
tctattcctcactctaagactgagtggggaatcaatatttggctgtaaaggagtatatggtgtcttaccttgtgtgctgaaacaatgtatttactcaaagtgttatggattttctttttt

SEQ ID NO: 997371 - DNA, 120 bp, Artificial Sequence
  ENSG00000258548_21 (sequence is synthesized)
ctctacattatgccaagacataaattctgagagtgtttatgatggtgcctcttttcccctctgctttctttccaagttagagacatcaaaataataagccttaaccattttcctgttttt

SEQ ID NO: 997372 - DNA, 120 bp, Artificial Sequence
  ENSG00000258548_22 (sequence is synthesized)
aaaagaaatagttaatttttatgggaattattaggtgtctcccgggctactcatgtaaatcctcattttatctgtttttaaattgagttattcatgagatgctttctgcattttgttttt

SEQ ID NO: 997373 - DNA, 120 bp, Artificial Sequence
  ENSG00000258548_23 (sequence is synthesized)
taggaaattttaggaaacaaagataaatgtcatatggtctttcaaatgtcatatggtctctcaaatatcatatggtctcacatcccctccaaactattttaaatatggcctgactttggg

SEQ ID NO: 997374 - DNA, 120 bp, Artificial Sequence
  ENSG00000258548_24 (sequence is synthesized)
aatgaaggctttacttggacatggatatgactgtaggcattttcctttatattcctttataacttactgttatgcatctactagcagctgttaaggtcactccaaaactgacattctctc

SEQ ID NO: 997375 - DNA, 120 bp, Artificial Sequence
  ENSG00000258548_25 (sequence is synthesized)
cccatgtttgcttccactaaaacccatctggtgatggaactgtgcataccttcatcaagtattttgaaaacaaaacaaaacaaaataagcaaaaacaaagtaaacaaaagacagatatct

SEQ ID NO: 997376 - DNA, 120 bp, Artificial Sequence
  ENSG00000258548_26 (sequence is synthesized)
gaatcagacagaattagttttggatcccagtctgtcaccagttacttgtttaaaatggagcaggttacttaacaactctgagaaatatttacttaaaacactcaagtataatatgtattt

SEQ ID NO: 997377 - DNA, 120 bp, Artificial Sequence
  ENSG00000258548_27 (sequence is synthesized)
tgcagacattttgtgataagtaaatgaggtatgtgtgcatgtgtgggcttgtgtataaaataaactctcttgattggcctatataactgtctttttcattcaggatgaatggtgggtaac

SEQ ID NO: 997378 - DNA, 120 bp, Artificial Sequence
  ENSG00000258548_28 (sequence is synthesized)
ttttttactcactcaagctacatcgtattctattcagattaatctaatttcttatctgaaatagttaaaatatgtgatatactttgacaaatatcaaggtaataaacatttgaaaaagga

SEQ ID NO: 997379 - DNA, 120 bp, Artificial Sequence
  ENSG00000258548_29 (sequence is synthesized)
taaaacaggattatttgagacactggttattttaccagggctttaactagaataacatattgttaggtaaactttcagaaaagccaacttagaaagagcctatatggcaatcaattcttg

SEQ ID NO: 997380 - DNA, 120 bp, Artificial Sequence
  ENSG00000258548_30 (sequence is synthesized)
gaaaggagggctagagagaggaagaaattgtttcaaagtaaaactattatactttttactagatttcagccctgacttttgtttttgagtgtagattgaatcatgaattatttcttggct

SEQ ID NO: 997381 - DNA, 120 bp, Artificial Sequence
  ENSG00000258548_31 (sequence is synthesized)
acaagatgcaaatttccctcatttggcattccactgggcctgatctgtttttcactgcaaataccctgctgtttaaggctatagaagccccctccctctaggcccagagactatcatgga

SEQ ID NO: 997382 - DNA, 120 bp, Artificial Sequence
  ENSG00000258548_32 (sequence is synthesized)
agaggttggcacataagattgtaagggctggttttgagggatagaagtagatcaaggtcagacactccaaatcaaagatgggtacaaatacaccgaaacggctagtaaaacaaaggactt

SEQ ID NO: 997383 - DNA, 120 bp, Artificial Sequence
  ENSG00000258548_33 (sequence is synthesized)
tgttttctgagctattatgtagcaccttttcattcacctcaaccataaggaatttcctgcttcccatacaattaagagaaaataattactaagaggattatgatacctcgtgaccaagcc

SEQ ID NO: 997384 - DNA, 120 bp, Artificial Sequence
  ENSG00000258548_34 (sequence is synthesized)
agtgcgaatcacgttgttcgaggcgttagttcagctgtctgttgaatcccctgaaactaatgctcagtctatattaatgtctcagtcccgagaaacctcagcctattctctcctataatt

SEQ ID NO: 997385 - DNA, 120 bp, Artificial Sequence
  ENSG00000258548_35 (sequence is synthesized)
catgtgaatagcagttccaaggtgaacaaaccacatcttgtttggaatggtgctgctccaaggaaaattctagaaaatctttttcttttctgttttttatagtttagagcaattggacga

SEQ ID NO: 997386 - DNA, 120 bp, Artificial Sequence
  ENSG00000282961_0 (sequence is synthesized)
aaatctcagcctcccactcccatatttacagtttgattagggaggcacatttagatatgcagtgataattgctttgcttagagaaattcaaggtgatagaatgcatggtgacacctaacc

SEQ ID NO: 997387 - DNA, 120 bp, Artificial Sequence
  ENSG00000282961_1 (sequence is synthesized)
cagactggtagagaaagggaattcttccactgggaatgacatgattatctaaataagtaggctcaatcaggtcaggaaagggcctgaaagactatttcaagcagagggaaggtatttgcc

SEQ ID NO: 997388 - DNA, 120 bp, Artificial Sequence
  ENSG00000282961_2 (sequence is synthesized)
aaggccagggtgtgtagtggagagaatgggcagtggcagagaattatgaagtgttccaatgactaaaagtaaagtaacaagttccttgtccaagagcttggattgtatcctaactgaaat

SEQ ID NO: 997389 - DNA, 120 bp, Artificial Sequence
  ENSG00000282961_3 (sequence is synthesized)
gagtatacactaagtgtttgaagaagagggatgaaatggtcaagttttcattacacaaaaataacctgttcctttcattttatgtttatttatttttttaattttctgactgctcctttc

SEQ ID NO: 997390 - DNA, 120 bp, Artificial Sequence
  ENSG00000282961_4 (sequence is synthesized)
tggaaatctcaaatttatatttgccaaatattgtcacattttcgatggagaatacaaactaagaatgggttagggaactgagtcagaaagtccctgttgtacaattcaatcatgtttttc

SEQ ID NO: 997391 - DNA, 120 bp, Artificial Sequence
  ENSG00000282961_5 (sequence is synthesized)
taaggatgtgcttttggacattatggaaactatcttaggctctcacttggatcctagaaaagaaggcacctgttaaaaggaatgtccagccccacctaatttggcagctgcccctccaag

SEQ ID NO: 997392 - DNA, 120 bp, Artificial Sequence
  ENSG00000282961_6 (sequence is synthesized)
ctaatgacattagggatgtagtggattcaagaggctgatgatgccatctggtcaactcatgtgactatttctatcagctttatttctgcaacatcctgtgcccacagaggggacacaaaa

SEQ ID NO: 997393 - DNA, 120 bp, Artificial Sequence
  ENSG00000282961_7 (sequence is synthesized)
tcgctttataattccttcaccatgtgaagatacagatacacccagaaccttaaaggcaagaatatgattgaaatgtcaaatggggacttggtgatctaaattatgtcccccaaaagccaa

SEQ ID NO: 997394 - DNA, 120 bp, Artificial Sequence
  ENSG00000282961_8 (sequence is synthesized)
tgtcttgccaccaccagtgccctatgggtggagtttctaaacagattactcaaaacacaaactttcaaaaagggaaagtcataaccctctagtcatcagggcaattacggaataacattg

SEQ ID NO: 997395 - DNA, 120 bp, Artificial Sequence
  ENSG00000282961_9 (sequence is synthesized)
ctggagtaaggttttctcaatgcccaagagatgagctggcaatgccacaacaatgtccaattcttagtgggtccaagaccatgtgttacatttccctcccatgattactcacagcttcac

SEQ ID NO: 997396 - DNA, 120 bp, Artificial Sequence
  ENSG00000282961_10 (sequence is synthesized)
agttctgctgtcctcttcgcctctctgccacctcttaactgcacctttgacctcctacccctaagattcaaccctgtgagattacttgtcttttcatctacactctggtcactctgaccc

SEQ ID NO: 997397 - DNA, 120 bp, Artificial Sequence
  ENSG00000282961_11 (sequence is synthesized)
ccattctttagattcaggattttctcttttcctggcttactctccagcacaagtagaaaaatattgtgcttcattggaaaatgcatgttgtttgaatcacactctttcagattatacaat

SEQ ID NO: 997398 - DNA, 120 bp, Artificial Sequence
  ENSG00000282961_12 (sequence is synthesized)
tgtagtctttcattatctttgagccattttataatgctgtaaactaatattaatgcatataattcttgtctatagacatgtaaattgtgtccaggggtgatttaattgacttttcttccc

SEQ ID NO: 997399 - DNA, 120 bp, Artificial Sequence
  ENSG00000282961_13 (sequence is synthesized)
cattgtggaaaaggctagtagttttgcctccatttgcccatttatttctatattcctgatctgtaaatgcatttctgggttttcccttggactcattctaacatctcttctttttcctca

SEQ ID NO: 997400 - DNA, 120 bp, Artificial Sequence
  ENSG00000282961_14 (sequence is synthesized)
ttaattaaattaaatctttaacacctcttcatatttttgtcagtatgagagtataaaaaaaaatctttttttgaaaattatcttttaataggtgacaaaaagaataaacactgaacaaga

SEQ ID NO: 997401 - DNA, 120 bp, Artificial Sequence
  ENSG00000282961_15 (sequence is synthesized)
aagaagtcctgagctcctactacaatccaaagtgaactagttgcagtgccataggatgatgtttctcctgagacttctttactaggatcatttagactgttataaatgcagattcctggg

SEQ ID NO: 997402 - DNA, 120 bp, Artificial Sequence
  ENSG00000282961_16 (sequence is synthesized)
cctctccttagacccactgaatcagacactctaagaggagggtcagaaatctccatcttagcaagttaatgtccaggagagttagagactcactatgacgtatgataaaaagtagaagga

SEQ ID NO: 997403 - DNA, 120 bp, Artificial Sequence
  ENSG00000282961_17 (sequence is synthesized)
aggactttccagcaccttaaactacttggaaagatagattaatgtctagatgaaacttgatgagactttagactaatatgttacatatacatcaggagatgcatgtataaaccaaatcca

SEQ ID NO: 997404 - DNA, 120 bp, Artificial Sequence
  ENSG00000282961_18 (sequence is synthesized)
aataacccaaagcaaaatttcttttagaaatagtgataaataaatgagtgaggagtttgtcactcacatcccccaggtaaaacatacctttttagcctaaataaatgctatagtttgaat

SEQ ID NO: 997405 - DNA, 120 bp, Artificial Sequence
  ENSG00000282961_19 (sequence is synthesized)
gtgttccctccaaaattcaggtactgatagttaacagcagccgatatgatggtattacacaaaatagtaggttctttaggaggttgttaggccatgagtgcctcccccaagaatgggatg

SEQ ID NO: 997406 - DNA, 120 bp, Artificial Sequence
  ENSG00000282961_20 (sequence is synthesized)
aaggacctcataaaagaggcttctcacagcattgtgacctctagccctcccaccttccataagtgaggacacagtgttcctcccctctggaggatgcagcaacaaagtgtcatcttggaa

SEQ ID NO: 997407 - DNA, 120 bp, Artificial Sequence
  ENSG00000282961_21 (sequence is synthesized)
gcagaggagccatcaccagacaacagaaccagccaacagcttgatcctggacatctcattttctccagaactgggataaaataaattcctgttttttaataaatttcccaatttcaggta

SEQ ID NO: 997408 - DNA, 120 bp, Artificial Sequence
  ENSG00000282961_22 (sequence is synthesized)
ttttgtgatagcagcaaaaacagactaagacaactagtatgaaaatatacattaacaaataaaattaatcataatatatgtttgcttttaaaagaaaataaataagccaatatgctttct

SEQ ID NO: 997409 - DNA, 120 bp, Artificial Sequence
  ENSG00000282961_23 (sequence is synthesized)
gttgattgattgatttactaaacattgattggccatctccactggggatatggcatttaagagatctctttgatcttagtacttttactgctttttaaataggatcaaatacacccaagg

SEQ ID NO: 997410 - DNA, 120 bp, Artificial Sequence
  ENSG00000282961_24 (sequence is synthesized)
taaaaaatagaacacactatacgttacattttggaactgttagaaattcctttgaagctaaaattactgctatcatttgacaacttttacccctaaaataatgtggtgctcaccagcttg

SEQ ID NO: 997411 - DNA, 120 bp, Artificial Sequence
  ENSG00000282961_25 (sequence is synthesized)
cttaagttacagcacttgctgtcttctcagatacaatatcagaaacttataatccaagaaaaatctaaatggcaagtgtgagttaatggaagcctcataaagcaagaggtgttttggaag

SEQ ID NO: 997412 - DNA, 120 bp, Artificial Sequence
  ENSG00000282961_26 (sequence is synthesized)
tgtatggaagacatcaataaatgatatgtataacatcaagtgcaaaagtgtgtgctaggaaagttcaaaaaagaaaaaaaatatggtaaggtaagaccagagattggggagtatatagct

SEQ ID NO: 997413 - DNA, 120 bp, Artificial Sequence
  ENSG00000282961_27 (sequence is synthesized)
tttgggaattcaggaaatgctaacgtctatggagaatttgcataggtgaaagatcagattggaagcctttctctgtggaagcattgtggatctaagtccagaagtgatcctgagccacct

SEQ ID NO: 997414 - DNA, 120 bp, Artificial Sequence
  ENSG00000282961_28 (sequence is synthesized)
actatggaaaggtgtcagtgagcaagagactgtctgacaaaggtggaagctgagcagacttctactgcgcatcgcctatgtacaggccagattccaagggctgatattacactgctagtt

SEQ ID NO: 997415 - DNA, 120 bp, Artificial Sequence
  ENSG00000282961_29 (sequence is synthesized)
tgatctttctcagatagctgggtagagagggaaaagtttcaccccaaataccagatgcctccaaacatctagatgcttggtgttatgtatttcaaacagcaggtttgataaagctgtttt

SEQ ID NO: 997416 - DNA, 120 bp, Artificial Sequence
  ENSG00000282961_30 (sequence is synthesized)
tactctccagttggatgttggttgtcaaggctgtcattaacttctgggagttcccaaatcctcagagagagagaaataagcagttctgcctgcaatcagaagctggctttgagccccaca

SEQ ID NO: 997417 - DNA, 120 bp, Artificial Sequence
  ENSG00000282961_31 (sequence is synthesized)
tggcaacatgcctgtatttaattagaagtggcttagttcttgggatttactgtggattgagtctacgaagctggaaggttttatcctgagtattccactgtctcctcatgtggattttat

SEQ ID NO: 997418 - DNA, 120 bp, Artificial Sequence
  ENSG00000282961_32 (sequence is synthesized)
caaatttctcctttaaccatataagcgctttcaaagttgacatatcacacttagttatgaggggaacctagaagtatgattgtgacgtgcattgttgagagaccatgctttgtaagtgtt

SEQ ID NO: 997419 - DNA, 120 bp, Artificial Sequence
  ENSG00000282961_33 (sequence is synthesized)
aataattaaaattattttgaacactaattatgctgaagactggattttctactccttcagatgttttccagtggacatattttgcccttttaataaattgattgcgaacttatcttcatt

SEQ ID NO: 997420 - DNA, 120 bp, Artificial Sequence
  ENSG00000282961_34 (sequence is synthesized)
tcacctttatgatgttataccttttcatttttgtcttctcatagctagggtctcctggtccccaaatgtagacacacatcttacaccaatcccagagccattttgtataagagccaccat

SEQ ID NO: 997421 - DNA, 120 bp, Artificial Sequence
  ENSG00000282961_35 (sequence is synthesized)
ggatttaaccagctttagctccagtatttgaacataatgttcagcatcatcacctggccaccaaatcaaaactgagcaccctttaatccatcaacaagttctctgcagccatgcaaggtt

SEQ ID NO: 997422 - DNA, 120 bp, Artificial Sequence
  ENSG00000282961_36 (sequence is synthesized)
atgaaatgggcacagacatcaatatacagtctttgtgtttaagaggttcatggtctacctgagaaatgcatctttaaacctaaagtagacgctctgtttattccataaatgatttttaag

SEQ ID NO: 997423 - DNA, 120 bp, Artificial Sequence
  ENSG00000282961_37 (sequence is synthesized)
catcaatggtatatcaagcactgtactggcttctgggctataataaatatataaagaccacaagtttgaatttcatgacattgaactataatgtttaaatgttataataatcatagtaaa

SEQ ID NO: 997424 - DNA, 120 bp, Artificial Sequence
  ENSG00000282961_38 (sequence is synthesized)
tgtccttgaggagctacggaagattcctgcatgaagcagaaacaagaagctgaagaaaaaacaactggctttgggggctatataaatataaccctcaaattaaaaactcaatagtttgat

SEQ ID NO: 997425 - DNA, 120 bp, Artificial Sequence
  ENSG00000282961_39 (sequence is synthesized)
tgattaccaaatcaatacagccagaaaataaatgtattaccccaaaagcttgagtgaagaaagacttctgtaagttactagaaagcgctaaggaagaaataaaagaatgatattcctgag

SEQ ID NO: 997426 - DNA, 120 bp, Artificial Sequence
  ENSG00000282961_40 (sequence is synthesized)
agccaggtgctttctgtaggacacacagatacagaatgagggaaaacagaaaattctatggttgtggattcaaaatagaggcatcaccatgtctatctcatcagggtttaaccagaggaa

SEQ ID NO: 997427 - DNA, 120 bp, Artificial Sequence
  ENSG00000282961_41 (sequence is synthesized)
accaaaccagtaagatatctgtattaagagatttcttgcaaagaattgacctatgtgattgtgggcactggctaggtaaatcctaagtccacagagcaggcaggaagaaaacaggctggg

SEQ ID NO: 997428 - DNA, 120 bp, Artificial Sequence
  ENSG00000282961_42 (sequence is synthesized)
acttgtaggcacaggatgaagctgcaatactcatgtggatgctgctcttcttcagggaagacttggctctgctctcaaggactttcaggtgattaaatcaggcccactcacattatctaa

SEQ ID NO: 997429 - DNA, 120 bp, Artificial Sequence
  ENSG00000282961_43 (sequence is synthesized)
aataatctcccttactcaaaaccaagtgattatggactttaatcacatctataaaatatcattatagtaacacctaaattagtgtttgaataactgagagttgtaactgatatggtttgg

SEQ ID NO: 997430 - DNA, 120 bp, Artificial Sequence
  ENSG00000282961_44 (sequence is synthesized)
ccacccaaatctcatcttgaattatagttcttataatccccatgtgttgtgggaggaaccaggtggagataattgaatcataggggcagtttctcccattctgttctcatgatagtgagt

SEQ ID NO: 997431 - DNA, 120 bp, Artificial Sequence
  ENSG00000282961_45 (sequence is synthesized)
ctcccattctgttctcatgatagtgagttagttctcaggagatctcatggttttataaagggcttccctctttgctccactttcattctccttcttcctgctgccatgtgaagaaggaca

SEQ ID NO: 997432 - DNA, 74 bp, Artificial Sequence
  ENSG00000282961_46 (sequence is synthesized)
cttctgccatgattgtaagtttcctgcggcctccccagccacgctgaactgtgagtcaattaaatctcttttct

SEQ ID NO: 997433 - DNA, 120 bp, Artificial Sequence
  ENSG00000282961_47 (sequence is synthesized)
tacagtaactttaccaagtggacacataaaactgatcattacaatgtacagtgaatatttggtgagttaatagatatattcataactgaatgaaagaggatggtgattcctacttcaggg

SEQ ID NO: 997434 - DNA, 120 bp, Artificial Sequence
  ENSG00000282961_48 (sequence is synthesized)
tggtattatgagagttaaaagggttagcatagatagaacacttttctatgattgatctaaggttggcttttagggactacattatacatatgggttttgtcttcatgtttttgcttgcat

SEQ ID NO: 997435 - DNA, 120 bp, Artificial Sequence
  ENSG00000282961_49 (sequence is synthesized)
ttctctctctgcccactcttggggctatttggatgtcacctcttcttcttctgagctccagtctatgtattccctgttccatcatcacaaccactgaagtctacactcctcattagattc

SEQ ID NO: 997436 - DNA, 120 bp, Artificial Sequence
  ENSG00000282961_50 (sequence is synthesized)
agggaacccagatgccagccaaagacatccctttccctcatgacccagttgaaaaaattctccacccttctgttaattctagaatatttaggagtaaagatcttttccctcagatatctg

SEQ ID NO: 997437 - DNA, 120 bp, Artificial Sequence
  ENSG00000282961_51 (sequence is synthesized)
tcaattcccggccttatatctcaaagccccttttcatccaggtttcctagatcatttcttgtcgtccctgtgctataactcattaacccaggcataaaactcatcagctactaatgtcct

SEQ ID NO: 997438 - DNA, 120 bp, Artificial Sequence
  ENSG00000282961_52 (sequence is synthesized)
cttccatcccagactcccctcacaccaataattcttgaatagagcaacccaaattgagaattttaagtaaaattgaaggtaaatttaattgcaggaggacatacaacattaacctttaaa

SEQ ID NO: 997439 - DNA, 120 bp, Artificial Sequence
  ENSG00000282961_53 (sequence is synthesized)
cctaattcttaaaaaaaaaagtcctcattgatctcggggccgtttcacgcaggtgcttttctaaatcatcaaggttatcttcagcttcactttcagtctccttcttcggctctggcgctg

SEQ ID NO: 997440 - DNA, 120 bp, Artificial Sequence
  ENSG00000282961_54 (sequence is synthesized)
ccactggctcttcctgtgctaatgtggttgtggcagctgcaatggctgcaggggtcacagcagctgcagcagctgcagccacagccttttccttcttgtgttttttgtgcttcttgtgct

SEQ ID NO: 997441 - DNA, 120 bp, Artificial Sequence
  ENSG00000282961_55 (sequence is synthesized)
tcttatcctttttgtgtttcctgtccttctttttcttctttttctttccatctccttcttgatctgaatttcttggcagtgatgggctcggtgttgggcttttggcctttttgaccggta

SEQ ID NO: 997442 - DNA, 120 bp, Artificial Sequence
  ENSG00000282961_56 (sequence is synthesized)
cagctggtgaccagtttgtagacggtgactgagactggatgggggatggagatgctgggggctttttagctgctggctcaggagacccagagacagatcgggaggatgagaccctcctta

SEQ ID NO: 997443 - DNA, 120 bp, Artificial Sequence
  ENSG00000282961_57 (sequence is synthesized)
cagactgtgggcttggggaagcagcctttttttatctttttaggttccggagtcctggagactctcctaatgggcctagtacttggagacggggactgccttctttggggtgatgacgac

SEQ ID NO: 997444 - DNA, 120 bp, Artificial Sequence
  ENSG00000282961_58 (sequence is synthesized)
gctcctcttcgaacgggtggaggacttgaggtctgaggagctcgaggccgtgatgagggcgaatgccatttgtttggatgcggtgatcgggcctcccgggtagagcggcttggggaagac

SEQ ID NO: 997445 - DNA, 120 bp, Artificial Sequence
  ENSG00000282961_59 (sequence is synthesized)
cctttcctatgcttggatgatagtgaaggtgaacgtctcttggtgactggggagcttctttggaaggtggagaatgggagacccgccgctttggtggtggaaatggtgatgctcttcgtt

SEQ ID NO: 997446 - DNA, 120 bp, Artificial Sequence
  ENSG00000282961_60 (sequence is synthesized)
taggagggggaggaggtgaagccgttcttctctttggaggtggagaaggagagtatctcctctgtattggaggagagtatcttctaggagaaggtgagcgccgacgtaggggaggagaag

SEQ ID NO: 997447 - DNA, 120 bp, Artificial Sequence
  ENSG00000282961_61 (sequence is synthesized)
gagtccttcgtcgtggtggtggtggtgtgggagtcctgagccgtcgaggatgaggggcgggagaaggagaccgtcgccttctggtgggtggtggggatggacttctcctccgtctaccat

SEQ ID NO: 997448 - DNA, 120 bp, Artificial Sequence
  ENSG00000282961_62 (sequence is synthesized)
gaggggaagtctctttttggtgctttcgtggtgatggagaagcactccgggaaggggaatgtctccgccgcttgccaacctcaccattcttcacatgggatctcttgggtcgttcatctt

SEQ ID NO: 997449 - DNA, 120 bp, Artificial Sequence
  ENSG00000282961_63 (sequence is synthesized)
ctgaggagaaggaggaaccagagtcagatgaagactgctggttttgtcgtctgtattggcgtctctgctgagatcaatgaggaaggcccaagtgtccccacagtcttagggggaaatgtt

SEQ ID NO: 997450 - DNA, 120 bp, Artificial Sequence
  ENSG00000282961_64 (sequence is synthesized)
tgttatgatgtaaattttatttggtttgtacgcagttcaatttcaaaattgctaaaatgtgtttgagctttagactataacatttgttgtaataattgctaggttgaagttcaacatgta

SEQ ID NO: 997451 - DNA, 120 bp, Artificial Sequence
  ENSG00000282961_65 (sequence is synthesized)
aaaaaagggggcatggatttacattgcaaaaggtgtccacagtgtattagtgacattctttcattgacagctgacataattcattgagtgaaatattttaagccaaaaaaaattcccttt

SEQ ID NO: 997452 - DNA, 120 bp, Artificial Sequence
  ENSG00000282961_66 (sequence is synthesized)
ttaaaaaagggggtttaaatactgttgacacttttatggttcctttaaatgctctggctattcccagaggggtttttttgtttgtttttttggttttgatttgctttttgtttttctttc

SEQ ID NO: 997453 - DNA, 120 bp, Artificial Sequence
  ENSG00000282961_67 (sequence is synthesized)
ttcttcttacatttttttccatttgagtcttagctcccatttaagttatgcttctgaccttgtatggtctgtaagcttgcccagaaataagaccactgttttgaactaccacaaaagtat

SEQ ID NO: 997454 - DNA, 120 bp, Artificial Sequence
  ENSG00000282961_68 (sequence is synthesized)
aaatgaatattttaatgccacagtctttcctgttgcctgtggagtctctgctgaaatgaatcaggattcgagctctaggataagacagaaaatgaaagcatgttgtttgccaggacactg

SEQ ID NO: 997455 - DNA, 120 bp, Artificial Sequence
  ENSG00000282961_69 (sequence is synthesized)
aaaatgaaagcatgttgtttgccaggacactgtgggtttatattgatgtgtaacaacttgatttggaacactggactctcattctgttcttctggttttgtttttttgttttgttttttt

SEQ ID NO: 997456 - DNA, 120 bp, Artificial Sequence
  ENSG00000282961_70 (sequence is synthesized)
ggattccttcagttacatacaatttgtttaatgaaatgtcatggctctgttcatatttttgtcttgttcttccaattggtgtatacaactttcagagcctcttgtatttggaaggctgga

SEQ ID NO: 997457 - DNA, 84 bp, Artificial Sequence
  ENSG00000282961_71 (sequence is synthesized)
gtatacaactttcagagcctcttgtatttggaaggctggaagggcccagactttggaatagtgtctcggtttcacaactaaagc

SEQ ID NO: 997458 - DNA, 120 bp, Artificial Sequence
  ENSG00000282961_72 (sequence is synthesized)
ttaaaaatttaaaaaaaaaaaagtctattgtcttccctcccctaccctaagcaatatgcaatagtggctcttcaatagtcccagactcttcttctcttcctggactgcccatctcctgat

SEQ ID NO: 997459 - DNA, 120 bp, Artificial Sequence
  ENSG00000282961_73 (sequence is synthesized)
caacccttaatttctcttccttctctcacccttcttttcaggattgaattaatgaatcctttcttctcactcatgcagagtaagtttctgcctccctgggtctttctgtttactgaccgc

SEQ ID NO: 997460 - DNA, 120 bp, Artificial Sequence
  ENSG00000282961_74 (sequence is synthesized)
aacaacttcagattatacctcttctactccaagtgctttcaaagaaagtcctctgccaagacaaattcattacgttttttccctctacctgtttgcctttattctcttttgtatttcatc

SEQ ID NO: 997461 - DNA, 120 bp, Artificial Sequence
  ENSG00000282961_75 (sequence is synthesized)
ttctcatctagattgaataatctttgagagcacagatgtttatttatatttttcctttccatttctactcagcatgaggtgtccattgaacaaacttgatgaatttttattgcttaatat

SEQ ID NO: 997462 - DNA, 120 bp, Artificial Sequence
  ENSG00000282961_76 (sequence is synthesized)
cttgctagaggtggggagagaggttgggggcggttaaggaactatcagctagcctaggagatattagagctgcagagatttggctatcttgttcaacgttatatccctagggattagtac

SEQ ID NO: 997463 - DNA, 120 bp, Artificial Sequence
  ENSG00000282961_77 (sequence is synthesized)
ataggcttgcaaatagcaggtatgaataaaaaattattgaatgagtaaatgaatttaaaatataagttacttaggcggtatcttcaggcatatctgtgtttatgtggtattcaatggccc

SEQ ID NO: 997464 - DNA, 120 bp, Artificial Sequence
  ENSG00000282961_78 (sequence is synthesized)
acaaatgtctacatcctaattcctaagatctgtaaacattaatttgcatgacaaaagagactttacagatgtgattaaatgaaaggattttgacatgcagataatatcctgtattcttca

SEQ ID NO: 997465 - DNA, 120 bp, Artificial Sequence
  ENSG00000282961_79 (sequence is synthesized)
tgtggaaccaatgtatttacaagggtccttataagtaaaacagagaagcaggaaaatgagggtcgcaaaaaaaaaaaaaaaaacaaacatgaagacagagaagaggttagagtgatgttg

SEQ ID NO: 997466 - DNA, 120 bp, Artificial Sequence
  ENSG00000282961_80 (sequence is synthesized)
gctttagagatggaaggagtcacaagctgtcttaaaggaataagacaagctgtcttaaaggaattgttataaaggaatagctgaagctgggtaatttattttaaaaaggtttattttgct

SEQ ID NO: 997467 - DNA, 120 bp, Artificial Sequence
  ENSG00000282961_81 (sequence is synthesized)
cactattctcatgtctggaaaagtttaatattgggtagctgcatctggcaagggcctcaggctgtttccactcatgtcagaacgtaaaggggagctggtgtgtttagagatcacgtgggg

SEQ ID NO: 997468 - DNA, 120 bp, Artificial Sequence
  ENSG00000282961_82 (sequence is synthesized)
agagaggaagcaagagagagggaggaggggccaggctttttttaaacaaccagctctttttttaaaaaaaaattatactttaagttctggtatacatgtgcagaatgtgcaggtttgcta

SEQ ID NO: 997469 - DNA, 89 bp, Artificial Sequence
  ENSG00000282961_83 (sequence is synthesized)
taagttctggtatacatgtgcagaatgtgcaggtttgctacataggaatacacatgccatagtggtttgctgcacccattaacctgtct

SEQ ID NO: 997470 - DNA, 61 bp, Artificial Sequence
  ENSG00000282961_84 (sequence is synthesized)
tccctgtgtccatgtgttgtcattgttcatctcccacttatgaatgataacatgcagtgtt

SEQ ID NO: 997471 - DNA, 79 bp, Artificial Sequence
  ENSG00000282961_85 (sequence is synthesized)
ctattgtagtacagtgatttataatcctttgggtatatacacagtaatggaattgctgagtcaaatggtatttctggtt

SEQ ID NO: 997472 - DNA, 120 bp, Artificial Sequence
  ENSG00000282961_86 (sequence is synthesized)
ttctggttctagatccttgaggaattgcaacattgtcttccacaatggaacaaccagttctcttaagaataaaagtgagaactcacttccctggccccagagagagcaaaagcaattcat

SEQ ID NO: 997473 - DNA, 120 bp, Artificial Sequence
  ENSG00000282961_87 (sequence is synthesized)
ccccatcacccaaacacctcccattaggccctacctccaacattgggatcaaatttcaacatgaggtttttaggggacaaacatccaaactatgtcacaagacaattcatgtaagcagcc

SEQ ID NO: 997474 - DNA, 120 bp, Artificial Sequence
  ENSG00000282961_88 (sequence is synthesized)
tctaaaagatggaagaggcaaggaaacagattctcccctaaagcccacagaaggaaagcagccctgccaacttcttgattttaacccagtaagacccgttttggactttggacaccaaga

SEQ ID NO: 997475 - DNA, 120 bp, Artificial Sequence
  ENSG00000282961_89 (sequence is synthesized)
gctataagatgattatgttgttttaagccattaagcttgaggcaatttgttacagcagcaattggaaactaatacagatcacattctaattcaattagtattgttcccagttctctggac

SEQ ID NO: 997476 - DNA, 120 bp, Artificial Sequence
  ENSG00000282961_90 (sequence is synthesized)
ctcagatttctttcctgaaaaacattaaaaataatacctgaaagttttgcacacgagtgcagagtgcctatttactagagagatcagcatttgtttaggctctgaatagatttgaggatg

SEQ ID NO: 997477 - DNA, 120 bp, Artificial Sequence
  ENSG00000282961_91 (sequence is synthesized)
aaattaaatagcataaataaagttcctagtgatgcttctgataaaaaaatatctccttcaaaatgccagaggcaggtcctaaaaacccacaaagcaggtgaactggcaaaagactgtaaa

SEQ ID NO: 997478 - DNA, 120 bp, Artificial Sequence
  ENSG00000282961_92 (sequence is synthesized)
tagaggttcctcttcaaagactttcctctccatctaattaggaataaatagtaacttatcttagaaacaaaatttattcaaagacctgtgctaacattctgaaatatctgctagccgtaa

SEQ ID NO: 997479 - DNA, 88 bp, Artificial Sequence
  ENSG00000282961_93 (sequence is synthesized)
tttattcaaagacctgtgctaacattctgaaatatctgctagccgtaataaataaatcgacctaaatatttgccctggcatgcttata

SEQ ID NO: 997480 - DNA, 77 bp, Artificial Sequence
  ENSG00000282961_94 (sequence is synthesized)
agcattaggtcatagcctgttcctcttctttattttaaggtgtttttacctttgtcagcatactcttttaaagagtc

SEQ ID NO: 997481 - DNA, 75 bp, Artificial Sequence
  ENSG00000282961_95 (sequence is synthesized)
gacaaatacagaatgtgaggtcccgtttcagccaatggaaagtggacacagcaggaaggtggatggtggcaaaac

SEQ ID NO: 997482 - DNA, 78 bp, Artificial Sequence
  ENSG00000282961_96 (sequence is synthesized)
ggggaacaagcatttctaacaagactatgtaatttaatttcaggaacctaaaaaagtgggatgaagaactgaggttgc

SEQ ID NO: 997483 - DNA, 120 bp, Artificial Sequence
  ENSG00000282961_97 (sequence is synthesized)
ttcaggaacctaaaaaagtgggatgaagaactgaggttgctaataaatctatacaacttataagtaaatatttaatttactaacatataataataaagacatcattgtaagacaatgtta

SEQ ID NO: 997484 - DNA, 120 bp, Artificial Sequence
  ENSG00000282961_98 (sequence is synthesized)
aaacattttacacattttaaatgtgcaatagtaaatccttcactattcagggattatttggaatcccttgtcaccagaagctcttaaggaaataacttctacttcgttgcaaatatgttc

SEQ ID NO: 997485 - DNA, 120 bp, Artificial Sequence
  ENSG00000282961_99 (sequence is synthesized)
ttggcttagttgaggtaatgcaaatactagaatacttgtttgtttaacagcttattcttccctgaagctgttcctccagtccctgccagtgggatcttatgtctccaggagtacttaaca

SEQ ID NO: 997486 - DNA, 120 bp, Artificial Sequence
  ENSG00000282961_100 (sequence is synthesized)
cccctaatagccccatcttttaagcctccctgggacctgccctcgcagtacctcttatacctactccacttcctcctcatggcctcctgcagaatgccattctaaaattaggttctattt

SEQ ID NO: 997487 - DNA, 120 bp, Artificial Sequence
  ENSG00000282961_101 (sequence is synthesized)
tcctcgcccgcattctcttttgcaaagcctccaaaaaatttactttgcttctctgcgcctgctttatctctattttctacactcgctccttctttttctaattatctataataggcgtca

SEQ ID NO: 997488 - DNA, 120 bp, Artificial Sequence
  ENSG00000282961_102 (sequence is synthesized)
caaaatttgcatttgttggaaccaaaatttccatggttgcctcaaaatatacagatgtaaatttgcatataattaaattttgcataagggaaactctcatttggggagatatgcaatgcc

SEQ ID NO: 997489 - DNA, 120 bp, Artificial Sequence
  ENSG00000282961_103 (sequence is synthesized)
caataaatggcagtttccttcaatgtccccaggccagcctcccagtctgtgtgtttccccctggctgcagctaccaggactctgctctggggatttacggacaagggtatcaagttttaa

SEQ ID NO: 997490 - DNA, 120 bp, Artificial Sequence
  ENSG00000282961_104 (sequence is synthesized)
ttaaactaaccctctcaaactgaatgagtggcttaaaatcttcctgtaaagaaaccgcaaaataataatgctggcattgagaagtaagaaaagagcgagccagcacccccaccccccaaa

SEQ ID NO: 997491 - DNA, 120 bp, Artificial Sequence
  ENSG00000282965_0 (sequence is synthesized)
cctgccaaacccggagggcggcgcgcgcgaaccgtgtccgaaccgcacggcggcgtcctggggggtccactgtgaggacggggggtccactgtgaggacggagcttcctctcctcaggac

SEQ ID NO: 997492 - DNA, 120 bp, Artificial Sequence
  ENSG00000282965_1 (sequence is synthesized)
ccacccaggaggggccggggcttgggacacctggggacacctggggccgcgtccgctgtgaggacagggagacgctgctgcagctccgggacacctggggccaccgaggcgaagcaggcg

SEQ ID NO: 997493 - DNA, 120 bp, Artificial Sequence
  ENSG00000282965_2 (sequence is synthesized)
aaagggctaatcctactctacagaagactccagctaaatcagacgcctgactatctccaacacccatagcttactgcgggtttgaactgctccaaagtaaaacgtataattaagtcctgt

SEQ ID NO: 997494 - DNA, 120 bp, Artificial Sequence
  ENSG00000282965_3 (sequence is synthesized)
tgagttaacatatggaaggcctttcctaaccacagatctcctaatagatgaaatgaatctccattacaaaaatatcaatctaggacaggtgcaaaggcactccgtgcatatggaaacaag

SEQ ID NO: 997495 - DNA, 120 bp, Artificial Sequence
  ENSG00000282965_4 (sequence is synthesized)
tgacccaaacggccagcaattttctccttctccagttaaacctgtccaaaattgaggaacctatccagtttcagctcagctagggatctagtcttactaaagacgtgggaagaagttctc

SEQ ID NO: 997496 - DNA, 120 bp, Artificial Sequence
  ENSG00000282964_0 (sequence is synthesized)
cattcagtgttctgtcttgtcatgagggtgggggagtgggaaggacaaagcactgatcccctttggtgagtatcacccagagtacagacattgcagaaagataagaaggcttctctttct

SEQ ID NO: 997497 - DNA, 120 bp, Artificial Sequence
  ENSG00000282964_1 (sequence is synthesized)
cctccaatacaataagggacttaatttctgcaccttcagacccctttcctatatcagaacactctggagctgaaccatacttcagattagactttatcttcattcagcatcaggatctgt

SEQ ID NO: 997498 - DNA, 120 bp, Artificial Sequence
  ENSG00000282964_2 (sequence is synthesized)
agtctcctgccaccttaatttccattcacagctgaaggccaggccagtaccacctttgctgaagctcaagacctatgtatgttctcttgattgtgtgttgtctctctgtaaaaagaagat

SEQ ID NO: 997499 - DNA, 120 bp, Artificial Sequence
  ENSG00000282964_3 (sequence is synthesized)
atgactcatctctttgaaaaccaatttatgctttctctttggggagagggattgatattaaaagtgaaactaggattttcattggacaaataatttaataaagttatatttttaacttta

SEQ ID NO: 997500 - DNA, 120 bp, Artificial Sequence
  ENSG00000232307_0 (sequence is synthesized)
tcaaccactcatagactgcttttgttcaaactgcgttcaaataaggcaaacgccgagctggaaccaatctcactgtttctgtacctcgcttctaattccttttcagaaaacaaaaactcc

SEQ ID NO: 997501 - DNA, 120 bp, Artificial Sequence
  ENSG00000232307_1 (sequence is synthesized)
taagagaatgaatagaaattttcttaaggaattataaagaaccatctcagaattttactctgttactgcaaaatctcatgcaaagataaccaagtacgaagaattaactgaaattcatcc

SEQ ID NO: 997502 - DNA, 120 bp, Artificial Sequence
  ENSG00000232307_2 (sequence is synthesized)
caagatgaggcatcttggctgagttgcaggtccacattcgttctagaggctgcctgcggtccttagaggcctcataggcaaggaactcatagtttcttgccatgaagacttttccaacat

SEQ ID NO: 997503 - DNA, 120 bp, Artificial Sequence
  ENSG00000232307_3 (sequence is synthesized)
ggctgcttacttcttcaagcctgtaaggagatccggtctcagttggccaggtcttgtgaaaggtaacctcatcaccggagtcaagtgtcatcacctttcccatgttccattggttagaag

SEQ ID NO: 997504 - DNA, 120 bp, Artificial Sequence
  ENSG00000232307_4 (sequence is synthesized)
tcccagctcctgcccacattcaagggaacattcaccctgggagctctgtgctgccatgcaaatgtcacattgcactgaggccgccatgctgtaaaaaaccccaagctacctacctgaaaa

SEQ ID NO: 997505 - DNA, 120 bp, Artificial Sequence
  ENSG00000232307_5 (sequence is synthesized)
gctggagagaatcagcacccatcagcttttccagcattttgggtcctcccagctaaatcatcggcattgtgaagcagagatgagacctcctgccatgccctttccaaatcctggaccaac

SEQ ID NO: 997506 - DNA, 120 bp, Artificial Sequence
  ENSG00000232307_6 (sequence is synthesized)
agaatcatcatatacactaggttttgtgcatctctaagatgatcatcttggtgtggggtcctgatcttcccagtgacttagcagcacagtaatttggctgaaatgttgatgagttcagac

SEQ ID NO: 997507 - DNA, 120 bp, Artificial Sequence
  ENSG00000232307_7 (sequence is synthesized)
aagaagaaggtgatgatgacaagagagcgtcacggggaaattctgccctgaggaaggaatagtttgaggctggagagatgtgctacccccgccactctttctcaaatggaaagacaacct

SEQ ID NO: 997508 - DNA, 120 bp, Artificial Sequence
  ENSG00000232307_8 (sequence is synthesized)
gtaggcacagaaatcattgctctgcttacactgaaatctcctgctgactttgagagctgagcattggattttgatgggagagtgaaacttagtgaagaaatgatttgaacctttgttgat

SEQ ID NO: 997509 - DNA, 120 bp, Artificial Sequence
  ENSG00000232307_9 (sequence is synthesized)
ctaatacttctgtgatacagttatctaaacagaatgagtctaaagtcagtataaagacctgtgtctctccatgttttgctgcttataattgcagaggaacattttgagatagaaaatttt

SEQ ID NO: 997510 - DNA, 120 bp, Artificial Sequence
  ENSG00000232307_10 (sequence is synthesized)
gtaactgaacagcaagggattgtagccataatgttcttgaccactttagattgacaaatagtatctcaaaattgatcaggttctggagaatctattgaggttgtatggagtaaccaagtg

SEQ ID NO: 997511 - DNA, 120 bp, Artificial Sequence
  ENSG00000232307_11 (sequence is synthesized)
atggaagaggttggaagtgaataattttatgtggtattatgtgattttttttggtgggggtagtgtctggagctgagcatgatggagcctagatggggcagccttctaatgctcccagta

SEQ ID NO: 997512 - DNA, 120 bp, Artificial Sequence
  ENSG00000232307_12 (sequence is synthesized)
tttcgcaaatcatatgtcacgtcaaaattgtaatgacaaagctcacagcagctgcctacgccaggtttggtgccagctctaattagagcattgatcatttctctccccttcatgaatgca

SEQ ID NO: 997513 - DNA, 120 bp, Artificial Sequence
  ENSG00000232307_13 (sequence is synthesized)
catgagtgcacattttcatatataagggcaaaggacatttcaaagtttggatggaatctttcctacttagaagtaataaaaaacaatactttgaaatcttaccaaatgttaaacaaatag

SEQ ID NO: 997514 - DNA, 120 bp, Artificial Sequence
  ENSG00000232307_14 (sequence is synthesized)
caacaatttttccatttgaagatgtgtgtcttaaggtctgttggatctttcaaatttctattttggacatggaaactacagatgaaatttaacttactcaaagttacacagaactcctgg

SEQ ID NO: 997515 - DNA, 120 bp, Artificial Sequence
  ENSG00000232307_15 (sequence is synthesized)
ctggctgatctcttttacttaattcttctaaaatctaaagtaagaataattttgaaattttattggtaatgcttaaataacaaaagttactttaatatgttacatgtttgaagtttcatt

SEQ ID NO: 997516 - DNA, 120 bp, Artificial Sequence
  ENSG00000232307_16 (sequence is synthesized)
cttaatatctaatttaacgcttgtgaaaatattattcagtatttttttttcttttctaaaatgacttgttcagggctccttttgggattttaagtgagaaaaactctatttcataatatt

SEQ ID NO: 997517 - DNA, 120 bp, Artificial Sequence
  ENSG00000232307_17 (sequence is synthesized)
gttaccatgctcatccaataacacttcatagatggttagccatctctaaaattaaattttgtagttgaggagcattgaaaatatcacctatatttggatttctgtttaacacttcaaaat

SEQ ID NO: 997518 - DNA, 120 bp, Artificial Sequence
  ENSG00000232307_18 (sequence is synthesized)
gcattttatcataatttaaaatttgatttaaatacaaacctctttatagaaaacctgataaatgtagttttatttgtttgcttgcttttttttgcagggagggatattcccttgatacca

SEQ ID NO: 997519 - DNA, 120 bp, Artificial Sequence
  ENSG00000232307_19 (sequence is synthesized)
ctctgtctttatgactcatcggttatttataaatgttatcatcgtttttctgatttttaaataagtttcagaattaatacatttaactgaataaatcaaccaataatgtcaaacttaaaa

SEQ ID NO: 997520 - DNA, 120 bp, Artificial Sequence
  ENSG00000182648_0 (sequence is synthesized)
ggctcgcgcagcgggcgtttttggggatcgcctggcgggggtgttcgggagccgcgggctgaagcacgggggcgtgcaggcgcccaggcctcgtgtagtgagggccgagccccgcgccgg

SEQ ID NO: 997521 - DNA, 120 bp, Artificial Sequence
  ENSG00000182648_1 (sequence is synthesized)
cttcgctgtagtccgcagcccccggcggctttgtgggcgcagccacgctcctcagccgcccgcccacctgggcctgggccccggttgtttccctgcggtggctgtggtcgttcccgttcc

SEQ ID NO: 997522 - DNA, 120 bp, Artificial Sequence
  ENSG00000182648_2 (sequence is synthesized)
agggtctcgagcgcaccgccccttcgctgcgctgttagtcgagggcagttttctgggggatcccccgatccccccgcgccgctcaggcgtcttggctcgcggaagcgcaggcgccgactg

SEQ ID NO: 997523 - DNA, 120 bp, Artificial Sequence
  ENSG00000182648_3 (sequence is synthesized)
cctggcgtcgtccgtgactcctggcccttctctgtggatccctttgcttctcgttgcgggttgtgtttcctgcttcgtgggcctggccgtttgcgtttggatgcaggcccgggtgagccc

SEQ ID NO: 997524 - DNA, 120 bp, Artificial Sequence
  ENSG00000182648_4 (sequence is synthesized)
tgcgtggcccgctggccttttcctgctccctaggtgactgagccgcgtgtgtgacacatcggagtgaattgaggcaacgcgttcctttccaggcttgcagcgggcggtgtcgttcacgct

SEQ ID NO: 997525 - DNA, 120 bp, Artificial Sequence
  ENSG00000182648_5 (sequence is synthesized)
cctgagcagagccttccggtgctttactcgacgccacaaatagtgcagggttcctcccaggggctgtcgcgagctagaactcttccccgcccctgtgagctcgggctgttcttcctcctc

SEQ ID NO: 997526 - DNA, 120 bp, Artificial Sequence
  ENSG00000182648_6 (sequence is synthesized)
cgcgtggctcactccagcctcggatgtttcctcgctgcacagacctgctcgggaagactcgagaaggccaccccaggactccagctctccccggaagggcttcccctcggattgcgtctt

SEQ ID NO: 997527 - DNA, 120 bp, Artificial Sequence
  ENSG00000182648_7 (sequence is synthesized)
ggcccctggaaccctccctctgtatcctctgctgttcctctcttggcctccatttgggttgtggcctggatactctggctcgctgcttcccttctcttaaggatcacagccctgcactgc

SEQ ID NO: 997528 - DNA, 120 bp, Artificial Sequence
  ENSG00000182648_8 (sequence is synthesized)
ctgtcgtccggtgcctggaaaccattgtattttttggtctgattttgtagttgtttgagaacttaagtctggtccctcacactccatgcccagaagcagaaatgagtaaagtttgtttta

SEQ ID NO: 997529 - DNA, 120 bp, Artificial Sequence
  ENSG00000182648_9 (sequence is synthesized)
tcttttcttaatatgacaattattgtgttggttcaacttatgttgtactttaattagaagaaatttggccgaaaatacaaggaaaatatacaaatgcaagtaattttttttaaacttccc

SEQ ID NO: 997530 - DNA, 120 bp, Artificial Sequence
  ENSG00000182648_10 (sequence is synthesized)
tgaaagcagggtctaaagaaattaccaaccaacttagactggatctagaagaaaaggaagggtctttgcagtcttaggactcttccgttccgcgacgtaggtgttaggataacagccata

SEQ ID NO: 997531 - DNA, 120 bp, Artificial Sequence
  ENSG00000182648_11 (sequence is synthesized)
aatggttgtaagactttgggctcagataagtagacttaagttcaaattttgacttattttacaagtgtgtgatttttggcaagctcatcttcctaaaccatgagctccttatttgtaaag

SEQ ID NO: 997532 - DNA, 120 bp, Artificial Sequence
  ENSG00000182648_12 (sequence is synthesized)
gggacattagccactctccagcaacagccctggtacttcttcagtcctgggatgggacgtatgattagcctaagcgaaccagaaaatccaggcccgtgaccagtgacttgatcagggctg

SEQ ID NO: 997533 - DNA, 120 bp, Artificial Sequence
  ENSG00000182648_13 (sequence is synthesized)
gcgatatatctaggccctcctggtgagatcccatcacgtcccctggcctccagtgtcatctgctctgcatgatatctccagggggacctctctgctgggctccaggccgcatggctgtgg

SEQ ID NO: 997534 - DNA, 120 bp, Artificial Sequence
  ENSG00000182648_14 (sequence is synthesized)
gtgaccagcatcatgtcccaccgggtcccctgcagtcccagtgcacctgcctgctcatccagggacctgtcctcactgcctgctgcctgcactgtgtggaaggacagaggctaaacgacg

SEQ ID NO: 997535 - DNA, 120 bp, Artificial Sequence
  ENSG00000182648_15 (sequence is synthesized)
tttccaaagaacctgttgatggtcttcagattcctggaggcatttagggagggagcaagtttgggagaggagtgaattcacctgggctgcagcccactgctgaggacagaccctccaggg

SEQ ID NO: 997536 - DNA, 120 bp, Artificial Sequence
  ENSG00000182648_16 (sequence is synthesized)
atacaggtgtcaagtccatcaatgggctctgacccactggagaaagggcagcatcaaccattggccaggctgcgggaccaaagctgacttatgatggtgtcatcgggtaagacctcgcct

SEQ ID NO: 997537 - DNA, 120 bp, Artificial Sequence
  ENSG00000182648_17 (sequence is synthesized)
gcccttggatctctcctgcctcccacagccccttgaaccccaacaagaaagacatacttggtggtggctgatggcatcaggcacctaagctgccagctggaggaggagcgtcatgaaccg

SEQ ID NO: 997538 - DNA, 120 bp, Artificial Sequence
  ENSG00000182648_18 (sequence is synthesized)
tggagctgcagcaggagctgggtggccatagcggccttggtggggtggcaaaggtcgatttattcagggcagagtttttggtgtctggagcagactgggcattttaaattgctgactttg

SEQ ID NO: 997539 - DNA, 120 bp, Artificial Sequence
  ENSG00000182648_19 (sequence is synthesized)
gatgcatttgttgacttcacgtggccaaagcgcttcttatttcctgggactgattagaaaatgtatacgtcccacctgggttttcatccagggacagagagtgtccagagaacaggttta

SEQ ID NO: 997540 - DNA, 120 bp, Artificial Sequence
  ENSG00000182648_20 (sequence is synthesized)
aaagggacagtaggaaacaagccaaagctgtctcaggttacatccagagcacctgcctgctcctcacgcagctcctcagacgtctccacctaatcacagaatgacggagcctcacgtttc

SEQ ID NO: 997541 - DNA, 120 bp, Artificial Sequence
  ENSG00000182648_21 (sequence is synthesized)
ctctcatggccaccaacgccgtggggcagccaacttaaagaatgtcttcacttcaagatgggatacagcctgaaaacacgagcagcgagtgtaaaatgggtggaagaggtatggctaagc

SEQ ID NO: 997542 - DNA, 120 bp, Artificial Sequence
  ENSG00000182648_22 (sequence is synthesized)
ctttcgaggttggcactgggacagcagtggcacctcctcctgacacatctctgaaggtgaaggctgggcttccacggagcatgcggatgcctaacgtggtgtgttttcttactttttcgt

SEQ ID NO: 997543 - DNA, 120 bp, Artificial Sequence
  ENSG00000182648_23 (sequence is synthesized)
gagtgaggttgaatttactattttccctggcccgcgctgtttcatttctgagggtgcttttgcgacagtgtctgctatggagcagtctatcagcaaggatgatgtgttatctctccaaaa

SEQ ID NO: 997544 - DNA, 120 bp, Artificial Sequence
  ENSG00000182648_24 (sequence is synthesized)
gctcagatgcttggcatatgtctgcacaatttaaacattagtaaccaattagctgcacagaacccatttttattttaaaaatgtcctaccattatttcattccctactttaggaaatttt

SEQ ID NO: 997545 - DNA, 120 bp, Artificial Sequence
  ENSG00000182648_25 (sequence is synthesized)
ggaactcccaaataaatagcagtcagatattttgaatgatagtgtctccgacaggaaactagcccgagaagttctttacccactaagaacatctctaagtcaccctgcagattctgtttc

SEQ ID NO: 997546 - DNA, 120 bp, Artificial Sequence
  ENSG00000182648_26 (sequence is synthesized)
tatgtcttagaatatcttttcccctagggattctgcagtagcttgtgcacccttatttggaagaagcacttgccagaaagtgaaccgggtaaagtacaactcaattctccttcacccttc

SEQ ID NO: 997547 - DNA, 120 bp, Artificial Sequence
  ENSG00000182648_27 (sequence is synthesized)
ttagaacctcatgtgtcctggaatggagcttattggctgttacttgggtttgggattcccttttgagcaattctctatctctggaaactttcagaatcgcattccctagccatctaaaca

SEQ ID NO: 997548 - DNA, 120 bp, Artificial Sequence
  ENSG00000182648_28 (sequence is synthesized)
tacacacacacgcacactcttacacactcatcattgtgacactgaaagggctgagtgtctgaccacacgcttcaagtgttcaagataactatccccaccccaacctcccccttctctctc

SEQ ID NO: 997549 - DNA, 120 bp, Artificial Sequence
  ENSG00000182648_29 (sequence is synthesized)
tcttccttctttcctccctctgtcttcatctccttctctctctctcccctcctctttctttttcttgtttcactagcccagccattatgcctctacttgcccaagagagtgtcatttaaa

SEQ ID NO: 997550 - DNA, 120 bp, Artificial Sequence
  ENSG00000182648_30 (sequence is synthesized)
acactgtcagtaagagctgcacgttattacttaatttgggggatattgctacatcctttgctttaagggaagtgttaactgatgttacagtgctaatgatacaggtctgcctctcccaaa

SEQ ID NO: 997551 - DNA, 120 bp, Artificial Sequence
  ENSG00000182648_31 (sequence is synthesized)
cacaccacactgcgcatgctcgccggcccccgccccgcgcacggcgtcagcgtctagacgcagggaagaatatttctcagccctccgttctcaagacagatgagtgctttagaaagagga

SEQ ID NO: 997552 - DNA, 120 bp, Artificial Sequence
  ENSG00000182648_32 (sequence is synthesized)
ctctgcagcggtgaggaggatggaatgacaggcaaagcacgcaggaccaggagatggcttcgttccctcaatcactcatccaaagacgtttaatgagcacctattgtgtgtcaggcattg

SEQ ID NO: 997553 - DNA, 120 bp, Artificial Sequence
  ENSG00000182648_33 (sequence is synthesized)
taccgggcaatggggatatcgtagtcagtaataagtgaggagagatgagttcatttgtgagaggctctgaccagtggaatcagaggaagggagttcccctgggtgggccaggttcaaaga

SEQ ID NO: 997554 - DNA, 120 bp, Artificial Sequence
  ENSG00000182648_34 (sequence is synthesized)
cattttggaagtagaatctgcagaacatgatgatcttttggaaacagggcagggacgtgaatgagcacgtaatgtccccatgggtttgtctttccgaaggtttaaaatcctcaagaataa

SEQ ID NO: 997555 - DNA, 120 bp, Artificial Sequence
  ENSG00000182648_35 (sequence is synthesized)
ggaacataggcatgtgtcgtaacggtctccacagtgggggagtattatgttagtgcacctgcatgttaactctgctcatgaaggggccacgtcttcaccaccacaaagcctcaagcatgc

SEQ ID NO: 997556 - DNA, 120 bp, Artificial Sequence
  ENSG00000182648_36 (sequence is synthesized)
atatctggtccctccaaccccctccctattgaggtgcaataaaggcccatgtttctcctagtatgggaacagaactaagtcctttgttctattatttgacatgtattgactcaagcattc

SEQ ID NO: 997557 - DNA, 120 bp, Artificial Sequence
  ENSG00000182648_37 (sequence is synthesized)
gatgagtattgatgaagtgtgttctaagcttgtaccgggctaggtcttctactgcaatccccacgcttataaaccttgccaacctgagccacctgcaagctttctgaccttgggcgtcct

SEQ ID NO: 997558 - DNA, 120 bp, Artificial Sequence
  ENSG00000182648_38 (sequence is synthesized)
catctcttcacctccactggtaaagatgagctaactggtaaagatgagctatggaaagaacgtggagtagtcctcggcacatagtaggaatttagtgaatatcagttctcttcattcaca

SEQ ID NO: 997559 - DNA, 120 bp, Artificial Sequence
  ENSG00000182648_39 (sequence is synthesized)
agcacttaataggccaggtactggaacaaaagacaaatcagatggaaagaggctcatactgcatcccggcctggcagaatgagagcggctcctggaaccgggattccacgtcagctttca

SEQ ID NO: 997560 - DNA, 120 bp, Artificial Sequence
  ENSG00000182648_40 (sequence is synthesized)
gctttttttctgctttttccttcttctcaggcctttcaggatttggttcttgttttaaagcttctgacggagagagccaagtagcctgtccttgctctacgggctgggaagcaatgagtg

SEQ ID NO: 997561 - DNA, 120 bp, Artificial Sequence
  ENSG00000182648_41 (sequence is synthesized)
attgctgaagaggctttttctcagcaaagggcagaggcaaaggagagaagaaaggaagggccctgtgctgtgaagcaattttctcattttctgctgctggtgcttgcgttgttgtcttcc

SEQ ID NO: 997562 - DNA, 120 bp, Artificial Sequence
  ENSG00000182648_42 (sequence is synthesized)
ctcaaccacttactttcggtgttagcggtgagtctcaaaggaacattgtgctgaactgttctccatctcaactacatgatcctgcagccctcaggatgaagggtttcggtctttgattcc

SEQ ID NO: 997563 - DNA, 120 bp, Artificial Sequence
  ENSG00000182648_43 (sequence is synthesized)
ggcgacctggaggcttgcttactgtcaactccatgcggagaactgtagaaaacaggataaagacgaagactaggccgagccgtccaaggcagtgagtccacagtgtattcaggagtccat

SEQ ID NO: 997564 - DNA, 120 bp, Artificial Sequence
  ENSG00000182648_44 (sequence is synthesized)
gcagcaggaagtggagccatcatcacagggtacgaagggaggacaagtgcagtgtcgtgagcatgtacagagggaagttgacagcggggagaggctttgctgaggaagtggcgtttggaa

SEQ ID NO: 997565 - DNA, 120 bp, Artificial Sequence
  ENSG00000182648_45 (sequence is synthesized)
tggcgtttggaagaacgagaatgagatggggttttgccgtgttacccaggctagtcacgaactcctgtgctcaagcgatctgtctgcctcggcctccaaagtgctgggattgcaggcatg

SEQ ID NO: 997566 - DNA, 120 bp, Artificial Sequence
  ENSG00000182648_46 (sequence is synthesized)
cagccagaaagccactgctttatagaccaccacttaaatgcacctggcagcttcatgtacgcaagaactttcctgcagctcctttaaatttaagaatcttttggcaaaatgaagaataca

SEQ ID NO: 997567 - DNA, 120 bp, Artificial Sequence
  ENSG00000182648_47 (sequence is synthesized)
agcgtgtttcttcttcatatgctttgttttaggaacattaaaaaaatatagttactacaatcagaaagcagttatatttgtatgttttgtaacaaatactgtggcctgatagaatgagct

SEQ ID NO: 997568 - DNA, 120 bp, Artificial Sequence
  ENSG00000182648_48 (sequence is synthesized)
tctgacaaaggcatgtgctttccaagtgggccaagttcaaaagttgtccgctgagttgtctcactggctcatccagccaatcattcaaatatttaaaggccccactaagggccatgttac

SEQ ID NO: 997569 - DNA, 120 bp, Artificial Sequence
  ENSG00000182648_49 (sequence is synthesized)
tcattgtacatctttaaggatgggtgtaacttacttatctgtttattttcaatttcagaatactttatattgactcctaaaagtatggtgtagtgtatgtttgttttgggagtttcaata

SEQ ID NO: 997570 - DNA, 120 bp, Artificial Sequence
  ENSG00000182648_50 (sequence is synthesized)
caatccctaaatttatgtatctcaaatgtacagggactgatcaaattagtgctaattttcctaaaacagtgtcaaaaacaagggaatcaatcatgaacacactaagcatgagcatcgact

SEQ ID NO: 997571 - DNA, 120 bp, Artificial Sequence
  ENSG00000182648_51 (sequence is synthesized)
gtcacaagacatggctcagtttattttttcttccttcttactacaccgtagaacagagctcttttgtttgcttatgacctgggcaaatatgctgtatgataaaaaaaaatcatgtatgca

SEQ ID NO: 997572 - DNA, 120 bp, Artificial Sequence
  ENSG00000182648_52 (sequence is synthesized)
tttgattctcatccagatgcccttaggataagaggttcattttcatcttctgttttccaaatgaagctttaaatctaattagatcttgaaagaaaataactgcaatagggtttctgtaag

SEQ ID NO: 997573 - DNA, 120 bp, Artificial Sequence
  ENSG00000182648_53 (sequence is synthesized)
actaccatgaagtgagtgtgtcagagaaacctggtctgaagaaggaggccagggagccggccaggccttggtggggacagcagatggacgggcgatgcctcagacaggcaggcgtctctc

SEQ ID NO: 997574 - DNA, 120 bp, Artificial Sequence
  ENSG00000182648_54 (sequence is synthesized)
tcagggtcttcagggcattttctcacgcagcctcataggaggctcaaggcagaggaggcgctgcctcagtggagcgctcaaggcgggctcttctgtccgatggagtggattacgagccaa

SEQ ID NO: 997575 - DNA, 120 bp, Artificial Sequence
  ENSG00000182648_55 (sequence is synthesized)
gaatgggacctcattcggacaaaagggtctttgcagatgtaattaaggacctcaagatgaaatcctcctggactaatcaggtaggcccgagaccccatgacacagacagagacacaggga

SEQ ID NO: 997576 - DNA, 120 bp, Artificial Sequence
  ENSG00000182648_56 (sequence is synthesized)
gagttccatgtgacagtggaggcagggactggagtgatgtatctgtgcccaaggaacaccaaggattgccagcagctcccaggaggagatgggatggagctgacgctctccagagccttc

SEQ ID NO: 997577 - DNA, 120 bp, Artificial Sequence
  ENSG00000182648_57 (sequence is synthesized)
agaaggaaccaaatctgatactggatttccgtcctgcagaactgggagaaaatgcatttctgtttgaagttaccaagtttgtggtcatttgtgagagcagccccaggagatgaacacagg

SEQ ID NO: 997578 - DNA, 120 bp, Artificial Sequence
  ENSG00000182648_58 (sequence is synthesized)
gtggctccatgccaggacaggggggcaagaggctggggctctgtgctcctccaggtctcactcaggctcactctgagcattcagcgcagtgtttggggcacccggtgaccctgggtgtga

SEQ ID NO: 997579 - DNA, 120 bp, Artificial Sequence
  ENSG00000182648_59 (sequence is synthesized)
ggagacgtggtctgtgccttctggcccatcgtcatttgctctgggtgctgatatcaaccacaggcaatttaattctagactggaatggagctgggaagggcgcaccttcctgccaaaagc

SEQ ID NO: 997580 - DNA, 120 bp, Artificial Sequence
  ENSG00000182648_60 (sequence is synthesized)
aatttcgtccaaagtctgcacctcggtggctgagcatggcgggccgggatgttttcacactgccactctagaaagagcggaaatgcagacgctttcctccttcacaatttttgattgctt

SEQ ID NO: 997581 - DNA, 120 bp, Artificial Sequence
  ENSG00000182648_61 (sequence is synthesized)
tgacttttggtgtgtccgagaggctgtaactcaaataaccgttccccacctttggttagatcctagagtctctggtacattgtccgtcagcggtgctgcttggaggcttcccaaaggccg

SEQ ID NO: 997582 - DNA, 120 bp, Artificial Sequence
  ENSG00000182648_62 (sequence is synthesized)
ccattttggtaggctcattgagagatacagaagaaataggagcaaacggctccacagtagagatacaagcagcttctaccttcaaattactgtggtttttatttgacctgttggaagttc

SEQ ID NO: 997583 - DNA, 120 bp, Artificial Sequence
  ENSG00000182648_63 (sequence is synthesized)
tggggtttctgtaaaggataaaaactctctttgggcaggcacagtgtagatctgaaaagtcctgactacggccccttcagtttatggcctgaggagcttgagggcctgagggaagccagt

SEQ ID NO: 997584 - DNA, 120 bp, Artificial Sequence
  ENSG00000182648_64 (sequence is synthesized)
ggccggaacacacgggctctttagctgaggagggacttgaacccaggtgttccgacgcgaggactctctcccaccacatacagcacagcactgcttgcgttgtttggttttgtattgctt

SEQ ID NO: 997585 - DNA, 120 bp, Artificial Sequence
  ENSG00000182648_65 (sequence is synthesized)
tggaattagtccaactatcatcatcgatgtgaataaatagacatatatcttttcagtttgcacaactacaaccataaatgaatatttattagtgtgaagacacccccaggtcctggaaca

SEQ ID NO: 997586 - DNA, 120 bp, Artificial Sequence
  ENSG00000182648_66 (sequence is synthesized)
gcactttgagttagttataaaccattctacacacagaagcatttaattgttagaacatttcatagtgtaacagcatttctcattgcctagcatgggccttctccatatcgaaggcccaat

SEQ ID NO: 997587 - DNA, 120 bp, Artificial Sequence
  ENSG00000182648_67 (sequence is synthesized)
aaatatttgtagaataaaggaattcacacccatccattgcccagatcataattgagcggctcttctattaaagtttagccttttcatgttaatttaaagtggggaatttgaagggagaaa

SEQ ID NO: 997588 - DNA, 120 bp, Artificial Sequence
  ENSG00000182648_68 (sequence is synthesized)
tgcgaatttcagactctaaaaaagacaagtcccgtatagaacgaggtcccagagactctaagacgtctgtgttgatagacgtagggctgcaggaattgagaagtggttgacgagggagag

SEQ ID NO: 997589 - DNA, 120 bp, Artificial Sequence
  ENSG00000182648_69 (sequence is synthesized)
tctgtttcagacctgctgtttgcaggttgtatttgttccacagctgtttttgaaggatgtttctactcttaatggaatcaggtacttcactaagaggcccaaaggtaaaccttaggctgg

SEQ ID NO: 997590 - DNA, 120 bp, Artificial Sequence
  ENSG00000182648_70 (sequence is synthesized)
atttatggctcaatccagcatcctaaaagaaaatgtctgcctaggcatttttttttccataaaaatatataccctcatcatcataaattcagatttccatggtatttgccttgtggtaga

SEQ ID NO: 997591 - DNA, 120 bp, Artificial Sequence
  ENSG00000182648_71 (sequence is synthesized)
acccaaatgttagggcagtcttaccagggacaggactaatgcagaagcagctggctctgctggccctggctgaaccgcgatgtggatggggcaccctgtgaagtgctctgagttcctggt

SEQ ID NO: 997592 - DNA, 120 bp, Artificial Sequence
  ENSG00000182648_72 (sequence is synthesized)
tcaaggttagggagatggtgaaaaaggctgagcacctgtcagtgcattaaaaccatcgaccatccccgaacggctttggaatgaaggcttcctactccttaggaattctgcccttgcttc

SEQ ID NO: 997593 - DNA, 120 bp, Artificial Sequence
  ENSG00000182648_73 (sequence is synthesized)
atttcattttaattttttctcccacttggtgaacccaatgacactcgcccagtggactcacgctctgaggggatttgtaaatatttgacagagttgaattgaagatcaaaaataaaacct

SEQ ID NO: 997594 - DNA, 120 bp, Artificial Sequence
  ENSG00000182648_74 (sequence is synthesized)
ctggacgatatgaagatgaataagaaagaaatggccctcacccccatgggacttagattacagtggaggagacagactttacttacaaaactgtacgaaccatttttaattaagatggaa

SEQ ID NO: 997595 - DNA, 120 bp, Artificial Sequence
  ENSG00000182648_75 (sequence is synthesized)
taaataccaggaaggaaaatactgtttgcaaaatttaacagtacggagtgacttcccacagaggaggtcggcagaatttattgatttatccagaatgagctctgaggacgcgtttgctta

SEQ ID NO: 997596 - DNA, 120 bp, Artificial Sequence
  ENSG00000182648_76 (sequence is synthesized)
ttgttttttccctcttttcataactattgagtaaaacaacagtagcagtcatgatggcgagtattatattccagtgaatatccaacgataccaccaatcagtaattccatgcttaacttg

SEQ ID NO: 997597 - DNA, 120 bp, Artificial Sequence
  ENSG00000182648_77 (sequence is synthesized)
tggggaacaagctattctccatagcagctgtaccactctgcattcctgctgcactgtgtgaggacctccattctccatgtcctcaccgacacttctttcccagtttttgattatagcatc

SEQ ID NO: 997598 - DNA, 120 bp, Artificial Sequence
  ENSG00000182648_78 (sequence is synthesized)
ctagtgggtgtgaggtgctatcttactgtggttttgatttgcattttcctaatgagtaatgacattgagcatctttttattgtgaattacataaaattggaatggaaaaataaataagaa

SEQ ID NO: 997599 - DNA, 120 bp, Artificial Sequence
  ENSG00000182648_79 (sequence is synthesized)
gctctggtctcatggaaatggcagcctgcccaccacccacgcttgcccagcctttcttcacgcagtgcgtaaaacacttttaaaaatacaagtattatcctgtcctgtttatgagtaaaa

SEQ ID NO: 997600 - DNA, 120 bp, Artificial Sequence
  ENSG00000182648_80 (sequence is synthesized)
tgaatgtagaaacagcaacagacatgaaatggcagttgtattgctgtcttatcatgaggtgagggcctgaagctatggtagccaccctgtgaaccttggaaggagggttctacaggaact

SEQ ID NO: 997601 - DNA, 120 bp, Artificial Sequence
  ENSG00000182648_81 (sequence is synthesized)
ggcagagctgagactgggacgcaacccatgtcctggtgacgtatttgagtcctgaggctggccctcctgttagtcttttctcttactggcttcagccagatggggtctggttttctgtta

SEQ ID NO: 997602 - DNA, 120 bp, Artificial Sequence
  ENSG00000182648_82 (sequence is synthesized)
cttgcaacaggaaaaattggaatgatatctatgcatgctattaccgccttatggctgtggtgagattaaaacatgatactgtgggtgaactgcttagtacagtgcctgctattctttatg

SEQ ID NO: 997603 - DNA, 120 bp, Artificial Sequence
  ENSG00000182648_83 (sequence is synthesized)
ttggttttaaggtatttttcttgaactttaaagttctaagaaaaattaccgttttaaaattcctaccctctgttcacatgtttaaattttcatgatagtttttctgtctgcatgttttct

SEQ ID NO: 997604 - DNA, 120 bp, Artificial Sequence
  ENSG00000182648_84 (sequence is synthesized)
gccccgcgcacggcgtcagcgtctagacgcagatttgtgtacgttgaaccattcttgcatccctgggataaagacaaataaaatcagaaacgaaagaggagacattacaacagataccac

SEQ ID NO: 997605 - DNA, 120 bp, Artificial Sequence
  ENSG00000182648_85 (sequence is synthesized)
agaaatacaaaggatcataagagactactgtgaagaattaaatgccaacaaattggacaacctagaagaaatggatacgttactagacacgtacagcctactaagactgaatcacgaaga

SEQ ID NO: 997606 - DNA, 120 bp, Artificial Sequence
  ENSG00000182648_86 (sequence is synthesized)
accagaacatctgaatagatcaataatgagaaaggagatttgaatcagtaatgaaacatctctcatcaaagaaaagcccaagacctgatggcttcactgctgaatcttaccgaacaattg

SEQ ID NO: 997607 - DNA, 120 bp, Artificial Sequence
  ENSG00000182648_87 (sequence is synthesized)
tagaactaatacccatccttctcaaacccttcctaaaacattgaagaagagagaatactttcaaactcatttcacaaggctagtttaccctgatactaagtcagacaaggacactacaag

SEQ ID NO: 997608 - DNA, 120 bp, Artificial Sequence
  ENSG00000182648_88 (sequence is synthesized)
aaaagaaaattacagaccaatatccctgatgatcatagatgcaaaaatcctcaacagaatactagcaaaccaaattcaacagcacattaaaagaattattcaccatgatcaagtgggatt

SEQ ID NO: 997609 - DNA, 120 bp, Artificial Sequence
  ENSG00000182648_89 (sequence is synthesized)
ttcctacagatagaaagtaaaaagtagtgagtttaatttttagataatttattttgtttctaaaggatctttctaaaatatagaaaaaaatgaaaagacaggcattgatattctgatttt

SEQ ID NO: 997610 - DNA, 120 bp, Artificial Sequence
  ENSG00000182648_90 (sequence is synthesized)
attatgaaaattttctaatgaaacatttataagaatattgctattcaaatatcccttcccacttcccactggcaactgtgccatcggtatctttgtcaacttgtttctcaccagtgcagg

SEQ ID NO: 997611 - DNA, 120 bp, Artificial Sequence
  ENSG00000182648_91 (sequence is synthesized)
aaaagattgcaaagaaaaaactgcaaattccatgaaaggttcaggatttaatggaattgacggaaatgacgtggcaggctcttaggtaaagctgttactgattaaagatctggcggaaat

SEQ ID NO: 997612 - DNA, 120 bp, Artificial Sequence
  ENSG00000182648_92 (sequence is synthesized)
agacctgataattttagaagagaaaatgacaagactgatggccaggagcttcagaagagaaaagacttgcatactgaaggattaaggaaggcttcaggaatgcattgaagagcctcttga

SEQ ID NO: 997613 - DNA, 120 bp, Artificial Sequence
  ENSG00000182648_93 (sequence is synthesized)
tcatctgcaacacaatggaagtcaaagttgaatgaataccacaatgcagtttttcagtctggcacatattaaccatgcttatgccctgtgacccatccatttggctcctatgtctgttgt

SEQ ID NO: 997614 - DNA, 120 bp, Artificial Sequence
  ENSG00000182648_94 (sequence is synthesized)
ccatccatttggctcctatgtctgttgtagcttgtagtattgtcagaggcgtgtgaaccagagcaactccatcttaaacaggagctgggtaaaacgaggctgaaacctactgggctgcat

SEQ ID NO: 997615 - DNA, 84 bp, Artificial Sequence
  ENSG00000182648_95 (sequence is synthesized)
cggccaaaacccaccaaaaccaaaatggccacgagagtggcctctggtcgtcctcactgctaggttcccaccagcgccatgaca

SEQ ID NO: 997616 - DNA, 80 bp, Artificial Sequence
  ENSG00000182648_96 (sequence is synthesized)
caaaacccaccaaaaccaaaatggccacgagagtggcctctggtcgtcctcactgctaggttcccaccagcgccatgaca

SEQ ID NO: 997617 - DNA, 120 bp, Artificial Sequence
  ENSG00000182648_97 (sequence is synthesized)
atgctcgccagccccgcccggcccacattgcgcatgcttgccaaccacgccctgtccacaccacactgcgcatgctcgccggcccccgccccgcgcacggcgtcagcgtctagacgcagg

SEQ ID NO: 997618 - DNA, 120 bp, Artificial Sequence
  ENSG00000182648_98 (sequence is synthesized)
agccactcaaaatgcgagcttctggtcctgacatttcacggggaaaggaaggctcatgaaccgactgagacatggttgagcggctaagatttctgtagctatgatgctgccatccaggcc

SEQ ID NO: 997619 - DNA, 120 bp, Artificial Sequence
  ENSG00000182648_99 (sequence is synthesized)
cattcccttcactactcactggcgagctcagttggaaattcactcccaataggagttccacggcagacacatcgtgagtcatggcagaactttgtcttttaattgcagaatgttaaagaa

SEQ ID NO: 997620 - DNA, 120 bp, Artificial Sequence
  ENSG00000182648_100 (sequence is synthesized)
agagtcactcaggtagcaaagattggcttttcaggggcgattttatggagctattaactcagagacaccattacttaaatgtaatttttattattacaattaaagactgatttgatttta

SEQ ID NO: 997621 - DNA, 120 bp, Artificial Sequence
  ENSG00000182648_101 (sequence is synthesized)
acatctccccgactccggagcgagctgcttcctcccctgtgcccttacctgtgtgcaagtgcatgattgcctgaccacatggatcagtagtgaattcccaaatgggctgagtttggaaag

SEQ ID NO: 997622 - DNA, 120 bp, Artificial Sequence
  ENSG00000182648_102 (sequence is synthesized)
gcaaggtcagcatgctctacaggaaaactgggttggcgataaccttgttggtcaatggcactgcctggagacttcccaagggctgccattttgttaggctcattgagagatatagaaaaa

SEQ ID NO: 997623 - DNA, 120 bp, Artificial Sequence
  ENSG00000182648_103 (sequence is synthesized)
aagctgttctcttcaagagcaggcttggaagctagagaggactgagattgcagctgtggtctgaagggctgtgtgtgaacgggggagccagagagacttggatctatcagtcagggtttt

SEQ ID NO: 997624 - DNA, 120 bp, Artificial Sequence
  ENSG00000182648_104 (sequence is synthesized)
ctagagaagcagaaccaataagaaggaaagaacaagagttatgatgaggaattggctcacatgattatggaggctgatgagtcccaagatccgtgggatgagttggggagctgggggccc

SEQ ID NO: 997625 - DNA, 120 bp, Artificial Sequence
  ENSG00000182648_105 (sequence is synthesized)
gtgagagccaatggtgcagtgcagcaaggtgctacggaccccggcagacaggtgtggatgatattctttgccaactgcctttggacaacctcagatttcaccacggtcaacaaatagagt

SEQ ID NO: 997626 - DNA, 120 bp, Artificial Sequence
  ENSG00000182648_106 (sequence is synthesized)
tacctctgacttcagtttggaaatttttttttttttgcagggaattctttgtagattttcaaactgctgttgattagtttgtcaataaaatttattgagtgccttcccatgtgccaagaa

SEQ ID NO: 997627 - DNA, 120 bp, Artificial Sequence
  ENSG00000182648_107 (sequence is synthesized)
gctcaaatgactgaccccacgtttctttaggtgcacacgagctgtctgtcacctgtctgccatgttgtgagctgccctactgaaaatctccttgcagtaccggcctacaaatgtaccgtt

SEQ ID NO: 997628 - DNA, 120 bp, Artificial Sequence
  ENSG00000256325_0 (sequence is synthesized)
gtgactctgtctcaaaagaaaaagtgtagggtactgaagaaattgaaacattaagaataccatatgagtaaattaaacactttggctcttttcggaaaaaaacagatgagctcttatatt

SEQ ID NO: 997629 - DNA, 120 bp, Artificial Sequence
  ENSG00000256325_1 (sequence is synthesized)
tgacagaaaaaaattcctagattttttggttaataaaaactttattagatagattaaattgtgatgtatggagataaagttctgaaagaagaatagaaagctttttaaaaatagtattct

SEQ ID NO: 997630 - DNA, 120 bp, Artificial Sequence
  ENSG00000256321_0 (sequence is synthesized)
agtttttaatcctgggccacaagaggccctgacacttcctctgttgctctcttgaaaccttcacgaaaggaagccaacctaggcagcatccaacactgactgccagacatgtaagtgaga

SEQ ID NO: 997631 - DNA, 120 bp, Artificial Sequence
  ENSG00000256321_1 (sequence is synthesized)
ccatcttggatttccccgcccagacgaccatctggctgaataagtgaaatcaagtgaaggcagaagaggagctgcccagcaacccacagaatggcctccaaagaagtctacaaattccat

SEQ ID NO: 997632 - DNA, 120 bp, Artificial Sequence
  ENSG00000256321_2 (sequence is synthesized)
cagtcagtaacggcttggagttccaaagcttatgactcaaaggtgatcagagcatggacctggggctagtctggattggtaactgctaaacttggatacatggcttctgatggccctgct

SEQ ID NO: 997633 - DNA, 120 bp, Artificial Sequence
  ENSG00000256321_3 (sequence is synthesized)
ggggagaccatgtggagagatggcatagagccagagattcacgttccaggagccctgactgtctcatctcagggaattgaatctccttgtgctccagaccctatgagaggatgccatccc

SEQ ID NO: 997634 - DNA, 120 bp, Artificial Sequence
  ENSG00000256321_4 (sequence is synthesized)
ctgctaccatctgactgcaacctcaggagacaccccaagccagaactgagcagccaagccactctcatattcttgacccatagacattgggagataaaaactgattgttgtcaattttag

SEQ ID NO: 997635 - DNA, 120 bp, Artificial Sequence
  ENSG00000256321_5 (sequence is synthesized)
tcagtacattttagggcaatttgatgtcctagcaatagactagtatatttatccattgctgcatcttcttctgcttagattatgatgcatgttttttagctccaactagtatctaaactt

SEQ ID NO: 997636 - DNA, 120 bp, Artificial Sequence
  ENSG00000256321_6 (sequence is synthesized)
atttgttttggtttagtttaaggagattgtaaacaagtatgcctacaagggccatgcaacaaatgctaaaaagagaagtagacctgggcagggaggcaagggagcggaaagatgtgtagt

SEQ ID NO: 997637 - DNA, 120 bp, Artificial Sequence
  ENSG00000256321_7 (sequence is synthesized)
acgttcagctcaggtcacgttcatcatccagctctggaagatggatccagtgggcatgtgtgcctaatgatgccacattatctgatttttttctccaaaagaaaaatcaagatttttatt

SEQ ID NO: 997638 - DNA, 120 bp, Artificial Sequence
  ENSG00000256321_8 (sequence is synthesized)
aaaaatcttctggtttaaaaaaatttaaatgctattcaaatttcaataacaaccatgccagataaaaaatagctactgactgaacttagccatgatctgccaacttgcaacctccaaatt

SEQ ID NO: 997639 - DNA, 120 bp, Artificial Sequence
  ENSG00000256321_9 (sequence is synthesized)
agaagtttttagccactatggatgttaggaagacctgaaacacagaatagagagattccaatttttctagtgacaatgagtcctgagaaaggtgacaaaatcagaataacctttggagaa

SEQ ID NO: 997640 - DNA, 120 bp, Artificial Sequence
  ENSG00000256321_10 (sequence is synthesized)
agataaatgctactatcagtggaatgggattcagtcttcagcctgttgtagtaattcagtaagcacatgtggtcattgagtgaactcgcatggccaatacaagactctaaccacaattga

SEQ ID NO: 997641 - DNA, 120 bp, Artificial Sequence
  ENSG00000256321_11 (sequence is synthesized)
actctctgctttccatcagtcgcccaccctgttgtgtacaaagaagcagatatgcaatatagcaggagccccaagaaaagatgcatgaagatatatgggatggaacgtacctcgtttcca

SEQ ID NO: 997642 - DNA, 120 bp, Artificial Sequence
  ENSG00000256321_12 (sequence is synthesized)
atggtaaagcttttaaaaatgttgttgaaagcatcagtgctgaaagattacctcatactttaccagcttatcataatccctgtacagtataaaaataacaacaatgaatacatattgagc

SEQ ID NO: 997643 - DNA, 87 bp, Artificial Sequence
  ENSG00000260091_0 (sequence is synthesized)
gttgggactagagaggcttctgggacaggagctgtgcctggagaggtcactgtgaggcatgagctggatgtagagaggccagtgtga

SEQ ID NO: 997644 - DNA, 82 bp, Artificial Sequence
  ENSG00000260091_1 (sequence is synthesized)
agatgctgggcctcaagaatctgctatgaggcagatgttgggactgtagaggccgacgggaggcagaggctgggcctggagg

SEQ ID NO: 997645 - DNA, 80 bp, Artificial Sequence
  ENSG00000260091_2 (sequence is synthesized)
taagcacatttacatttattaggcacttcgtttccattattacactgtaatatctaataaaataattatagaactcacca

SEQ ID NO: 997646 - DNA, 120 bp, Artificial Sequence
  ENSG00000260090_0 (sequence is synthesized)
ctctctctctctgtacttacttacttaatttatttatgtatttattttactaaattaagagggtatataactgaacaagctctcatgatgcctcccttttaatgtaggagggacaaataa

SEQ ID NO: 997647 - DNA, 120 bp, Artificial Sequence
  ENSG00000260090_1 (sequence is synthesized)
tttaaaaagtaaacaagaaaatagcaggtggtgataaatgcagaacaatgacaataatcagtgtgatgtcttagagagcccctaggggccatttttggcagggtggtcaaaaaaggcttc

SEQ ID NO: 997648 - DNA, 120 bp, Artificial Sequence
  ENSG00000260090_2 (sequence is synthesized)
tccaaaaaggggatttcagctgaagctttcgtgataagaaggagcatgctttctgagcacgtgggcttaccaggtaaaaagggcagctagtgcgaaagccctgtggtaggaataagcttt

SEQ ID NO: 997649 - DNA, 120 bp, Artificial Sequence
  ENSG00000260090_3 (sequence is synthesized)
ggcaaatacaaggaattagaagaaggtcaatgtaccagaagcacagtcgttaaggtggacagtaaggaatggaatatgagacagtcagacaaatcctaagaaggcagggccttcataggc

SEQ ID NO: 997650 - DNA, 120 bp, Artificial Sequence
  ENSG00000260090_4 (sequence is synthesized)
caggcgaagagttcagattgtactttaagtgttacagaaagccattggagggtttcaagcaggggagtgacatgacctgactcacattttaaaataattactttggcctctctttggaga

SEQ ID NO: 997651 - DNA, 120 bp, Artificial Sequence
  ENSG00000260090_5 (sequence is synthesized)
acagaaggtaaggggtaaatgtggaagcaggaaggccaagtaggaggcgagtacagtattttacacgagactcgataaaatctggactgtggttgtagcagtggagatagaaaaatgtaa

SEQ ID NO: 997652 - DNA, 120 bp, Artificial Sequence
  ENSG00000260090_6 (sequence is synthesized)
aagaaaaaagaattaagacacatttttgaggcaatactaatattctaccttacaatctaccgcctccttactctgccaaatctcacacatacagcatgcattcatttatgctgtccatta

SEQ ID NO: 997653 - DNA, 120 bp, Artificial Sequence
  ENSG00000260090_7 (sequence is synthesized)
acgatagtttattgtacacttactatgtgccagatgtagagccaggtcatggtatcacaccaaaagatagaagtcagctcagtctccaacaaataattttgcttagtcatcaataccaga

SEQ ID NO: 997654 - DNA, 120 bp, Artificial Sequence
  ENSG00000260090_8 (sequence is synthesized)
cctcatcctaagtaaccagttctgaataagatattattttatattaaagtttcaccaagaaggcatttaaaaaatgcaatattaaaactgaaagccagaagaattctacctgttagttta

SEQ ID NO: 997655 - DNA, 120 bp, Artificial Sequence
  ENSG00000260090_9 (sequence is synthesized)
atttttctgcttataataagcaataattccacataattctattagctagtttcatgtcattaatatcctctcacccatcttcacagtcaattggaagatcaactagaagagcttcttcaa

SEQ ID NO: 997656 - DNA, 120 bp, Artificial Sequence
  ENSG00000260090_10 (sequence is synthesized)
atgcctgctagaagaattgtttctattttcagttttcgtgacctgctatgctggggagattgaatgagatactcaagtaccttgctttttagactggaatctttaatacatggtactatc

SEQ ID NO: 997657 - DNA, 120 bp, Artificial Sequence
  ENSG00000260090_11 (sequence is synthesized)
acccatagtgatgcctcatttttttaggtgactctctgccccctttttttaggtgactcttttcagcacctaatcttggttctggtaagtaggttgagaagctaatccttcagtcctaaa

SEQ ID NO: 997658 - DNA, 120 bp, Artificial Sequence
  ENSG00000260090_12 (sequence is synthesized)
ttgaatttgcaaattgtcaatgagaagcacagtgttcttcaaacaaaaacagacaatactaggcttagggttttttaaaaaaacttcaagtcaggtataacataacaacctttccagata

SEQ ID NO: 997659 - DNA, 120 bp, Artificial Sequence
  ENSG00000260090_13 (sequence is synthesized)
ttagaaaggctgtctcaaatttctttataagctctttgaagaattagcaatgaccatttcctttccattttataagctaaaccttttcactttctattactttctttttttaatgtgttt

SEQ ID NO: 997660 - DNA, 120 bp, Artificial Sequence
  ENSG00000260090_14 (sequence is synthesized)
tacaagagtcctttctattattttccactttcatcatctataatatgatgctttcttgactcaaaattatccaacttcctgtggttaatatggacaaaattctgtaaattgtgcacgtta

SEQ ID NO: 997661 - DNA, 120 bp, Artificial Sequence
  ENSG00000260090_15 (sequence is synthesized)
tgcaactcccctgtcctctgccctgacactttagtgcagccctagccaggacaggccccagcccaagagtcctcagtagttacccaaggctcttctgggaatccactggataaatgtgta

SEQ ID NO: 997662 - DNA, 120 bp, Artificial Sequence
  ENSG00000260090_16 (sequence is synthesized)
tcattggtttttctctggcttccctatataattgataaacatagtagtgttatttctaattcaccatttacagaaaaataattgcaatattttaggctgtgtgatataaaaacatattat

SEQ ID NO: 997663 - DNA, 120 bp, Artificial Sequence
  ENSG00000260090_17 (sequence is synthesized)
tgacaattgattaaatggtgtatttgtgtcttgttctattaaaaaattaagagtaggttcttagttagaaaagtagtcccctatgactttgagtctcaaatgtattatttaactggtaga

SEQ ID NO: 997664 - DNA, 120 bp, Artificial Sequence
  ENSG00000260090_18 (sequence is synthesized)
gcaactgaaaatcataacataagatatgatgaaatattcagatatcaaatttaaattaatttagtactgattgagatcctattttctcattctctacataatgagaatagagaaggttta

SEQ ID NO: 997665 - DNA, 120 bp, Artificial Sequence
  ENSG00000260090_19 (sequence is synthesized)
agaaaaaatgagggttaagttttagtggagagaatttcagtaattaatttaattttcttcctaaaaatttggaaaaggctattgtcattaagtgttaatactgaagtagtgacgctctat

SEQ ID NO: 997666 - DNA, 120 bp, Artificial Sequence
  ENSG00000260090_20 (sequence is synthesized)
ggtctcaaatgggaacagagctccaaattcacgatcctgttacaacattgtttatatgcagaaatcaattaaatttatatcgtttacattcaggggctgttaagctgccacaatgctgag

SEQ ID NO: 997667 - DNA, 120 bp, Artificial Sequence
  ENSG00000260090_21 (sequence is synthesized)
aattgcctgtagtaaaatgtctgtagcatgagagagccacatttaaggaaagaaatcagttttactacatacatcatgctctgtcctaatgaatttcaaacacattgaggaattggacta

SEQ ID NO: 997668 - DNA, 120 bp, Artificial Sequence
  ENSG00000260090_22 (sequence is synthesized)
gatgccctcagtagtcccttttagccctgaaattttgtgatttcatattaaatgtctttggtcaccggataaccttgcatattgaaaaatgttgcacattttgataagcccagggtgcaa

SEQ ID NO: 997669 - DNA, 120 bp, Artificial Sequence
  ENSG00000260090_23 (sequence is synthesized)
gagttctttctgtaagcagccttagagaattgttgttgaattcttcggaaaagtaagtctctagaaaaatctaacgtctgaaaataaaagcagattagagagaggtgagcagcagaaatt

SEQ ID NO: 997670 - DNA, 120 bp, Artificial Sequence
  ENSG00000260090_24 (sequence is synthesized)
tacacaccagaatgctaagaaaacattgcagaaaagttctttttaatcttctgataattgcaaagcaagtaggtcactagttgagatagaaacatctttttcaaagcttccttttccagc

SEQ ID NO: 997671 - DNA, 120 bp, Artificial Sequence
  ENSG00000260090_25 (sequence is synthesized)
caggaaaatgtagaaatgtgtcagggatcaaatatatttgcagaatatttactatggaaacttgtagactttgatattttaaaatgcaactgcaataacaggtactttataatcattcaa

SEQ ID NO: 997672 - DNA, 120 bp, Artificial Sequence
  ENSG00000260090_26 (sequence is synthesized)
atgaattatgaacatgtttctaagcagaggccctgccaggcctgatttttatgggtactgggaccctcaattattgctgcagaaaaaacttggcattggtgtctgaaagacttggttttg

SEQ ID NO: 997673 - DNA, 120 bp, Artificial Sequence
  ENSG00000260090_27 (sequence is synthesized)
gatttgggcattttgctacttaactagctatgcaagttactagcttaggcacgttaacttaagttttctgtgactttaccgactgtaataatataatagctaccgcatagttgaggatga

SEQ ID NO: 997674 - DNA, 120 bp, Artificial Sequence
  ENSG00000260090_28 (sequence is synthesized)
aagaaataatatgtgagaaaatacttaaatacaagtttcctttctctttcctctcatctgccatcactgcttctcaccaatggccacactcaggagaaaacacaggcactagtgcccttc

SEQ ID NO: 997675 - DNA, 120 bp, Artificial Sequence
  ENSG00000260090_29 (sequence is synthesized)
gaaagaatttgtactcttaccatccttttatatttttttgttgactcctctaatgtacagcaagtgagtaccatatcaaataaaagaaaattaagttagtaaaattctgaattaacatta

SEQ ID NO: 997676 - DNA, 120 bp, Artificial Sequence
  ENSG00000260093_0 (sequence is synthesized)
ggacgaagttctcggacagagaacaagtgcgctcctgtcgtacgaagtacgtgaagctgcagaggccaaaaaacacgccgagcccttggggatgcggtttgattttaaagttgctgccgt

SEQ ID NO: 997677 - DNA, 120 bp, Artificial Sequence
  ENSG00000260093_1 (sequence is synthesized)
gtcgccccgacttcgcagtttagcagtgcccagtaagatagaagaggacctgccttgcagccagctagactgtcagtttttattggagacattgtcatgacggccatcagaagggttgct

SEQ ID NO: 997678 - DNA, 120 bp, Artificial Sequence
  ENSG00000260093_2 (sequence is synthesized)
attcgtccaaagtgaaaactaagcacagttctcaaaatgcgcggaatagggaagatgaattcaatattaagttatgtatttacaaacatatttaagcccattttgcagcggccaaaatac

SEQ ID NO: 997679 - DNA, 120 bp, Artificial Sequence
  ENSG00000260093_3 (sequence is synthesized)
gggagcaaggcaccaacagcaccattaaggcagtgtaggtggacttaatggtggtgttgtattattcttgtttctcaaatcataggagatgacatttgttcctgtgacattctcaaacta

SEQ ID NO: 997680 - DNA, 120 bp, Artificial Sequence
  ENSG00000260093_4 (sequence is synthesized)
aatgtaaagtggttggagcgaggtgagtgacttgggagttcatctgtgtgagattttggcttaacacatgttctgccaaaatgggcaggtcgtctcagatgagggagggaacttcagatt

SEQ ID NO: 997681 - DNA, 120 bp, Artificial Sequence
  ENSG00000260093_5 (sequence is synthesized)
agcacccacagaaaggaggctttcacccagcttcttgcatggatttagttaccactttgttttcatgtggtctggactgtaaggagggcaggaggcttagcagtgctatagtgtagaatg

SEQ ID NO: 997682 - DNA, 120 bp, Artificial Sequence
  ENSG00000260093_6 (sequence is synthesized)
aggtgtgttgccaggcatacaacactaaaaaggctctagctttgattttgtaatttgtatttcccctggacaaaatgatacctaaactgtttgttattgctatgaggctataccaagtcg

SEQ ID NO: 997683 - DNA, 120 bp, Artificial Sequence
  ENSG00000260093_7 (sequence is synthesized)
gttccacaggcctttcatgaaaacacccccaggagtcccttctaggcttgcgaaggcctggtcactattaagggtctgaaaaaatagtcattctgtcaaagacaatattttgtgtttttc

SEQ ID NO: 997684 - DNA, 120 bp, Artificial Sequence
  ENSG00000260093_8 (sequence is synthesized)
agttacttctttttgatacatactgatttgtctgtgttttgtggttgattgtatgaagtttcacatgctagaaatactctgcaactaagagctgaagaatgtttagtgtgaagaaataac

SEQ ID NO: 997685 - DNA, 120 bp, Artificial Sequence
  ENSG00000260093_9 (sequence is synthesized)
tgagaggctgaggcaggaggattgctggaggccaggagtttgagacgccatctttaccaaaaaaaaaaaaaaaaaaggtatttaagtagttgggcatggtggtgtggtagcgcacacctg

SEQ ID NO: 997686 - DNA, 120 bp, Artificial Sequence
  ENSG00000260093_10 (sequence is synthesized)
tttaagtagttgggcatggtggtgtggtagcgcacacctgtggtcccaactacttgggaggctgcaccaggaggaacgctggagccagagaggtagaggctgcagtgagctatgatcaca

SEQ ID NO: 997687 - DNA, 120 bp, Artificial Sequence
  ENSG00000260093_11 (sequence is synthesized)
caagaccttgtctcaaaaaaaaaaaattaattttgatgttaaatgaaaaagtaaaacaaatgcagtgtgcgtgtatacatgtagtatatatgaaaatgcatgtactcccagttgcacagc

SEQ ID NO: 997688 - DNA, 120 bp, Artificial Sequence
  ENSG00000260093_12 (sequence is synthesized)
aaaatgcatgtactcccagttgcacagccactgaacaattcgaaaaaaatgcaattttttttgttcagaatagtgggattctactgcttttcattgtctttaaactgttttaagtgttct

SEQ ID NO: 997689 - DNA, 120 bp, Artificial Sequence
  ENSG00000260093_13 (sequence is synthesized)
gtattgttacaacgttctcgagtattccaatggctgttacttttataattataaaagaataagcatttttaaagaacagatatatcttatttcaaaaacaagggtttttcgtttaccaga

SEQ ID NO: 997690 - DNA, 120 bp, Artificial Sequence
  ENSG00000260093_14 (sequence is synthesized)
atagctgcaagaaaagttatattagtttctttggtgttttgaggaaagaattgaacatttttgccttcagtggtgcctttttcaccactaggacttccttttcttcagacattcccccta

SEQ ID NO: 997691 - DNA, 89 bp, Artificial Sequence
  ENSG00000260093_15 (sequence is synthesized)
cccccacctttttggcaccgtggacgagtttcgtggaagacagtttttttccacagatggggaaggggagatgggggatggtttcgggg

SEQ ID NO: 997692 - DNA, 120 bp, Artificial Sequence
  ENSG00000260093_16 (sequence is synthesized)
acatgcacagttcacgatagggtttgtcctctgatgagaatctaatgtcgctgttgatctgacagccacatctaacttgggaaggtgggagatgaggttctcttgcggagtgactataga

SEQ ID NO: 997693 - DNA, 120 bp, Artificial Sequence
  ENSG00000260093_17 (sequence is synthesized)
tacaactaatacttggatatttggcagttctaataataaaacaggaatgttctttggacaactgtgacacaatctactcctctggcccctcaaatatccatggatacccttgtgacacat

SEQ ID NO: 997694 - DNA, 120 bp, Artificial Sequence
  ENSG00000260093_18 (sequence is synthesized)
agaacacaccctgtttgaagagagaaaacccagcattctaagcagttactgcatccagctcagcgtccatgatctaaagatgtaacagtcccttacaagtctgatataactcctcatggt

SEQ ID NO: 997695 - DNA, 120 bp, Artificial Sequence
  ENSG00000260093_19 (sequence is synthesized)
ccaatgacctacagagtaaattatgttatttattcccctttctcttccccacacagccagtatgcagtggtgaagtagggcacgaaaactaatttggaagaagagtgaggacaaaatagt

SEQ ID NO: 997696 - DNA, 120 bp, Artificial Sequence
  ENSG00000260093_20 (sequence is synthesized)
agttctttgtctaagcgaatgtgaagagcagattagactacaaaggtaatgaagtaaattcttggttagaccccagttctgttttccaggaggaactctggtttgttgcatccaaaggta

SEQ ID NO: 997697 - DNA, 120 bp, Artificial Sequence
  ENSG00000260093_21 (sequence is synthesized)
ctgtctttacccattgggaggttcttacccatgatctatgattccatctgaagggcatgctaaagagtgtgctccatgagaggctacacatctttttatatccagtttcttactggtgcg

SEQ ID NO: 997698 - DNA, 120 bp, Artificial Sequence
  ENSG00000260093_22 (sequence is synthesized)
cttttgagggactgtgggttactttagtagggtcagatagacacaggcattggcaagctaggcttaatagcttctttgtcaattcaatttttaaaagataccgaatggatttcttatctg

SEQ ID NO: 997699 - DNA, 120 bp, Artificial Sequence
  ENSG00000260093_23 (sequence is synthesized)
tttgttccttgtatagttccttttacaaataaccacagatagagatctcaattagtcatatttcttatgcctaactactcttcatttttatttacgagactctctcatatctcctgtacc

SEQ ID NO: 997700 - DNA, 120 bp, Artificial Sequence
  ENSG00000260093_24 (sequence is synthesized)
tactaacttagtggctatatgcttgcacccagcaaaaacagcagtcatggttaggaaggcagtgcccttaatatgacctctattgcttgtctgggttccactgtccagcagagaacactt

SEQ ID NO: 997701 - DNA, 120 bp, Artificial Sequence
  ENSG00000260093_25 (sequence is synthesized)
tgctgatggcctttgagaagtgccttgggtcacagttttatcttacactgtcagaagtgtaatagcttttggctttatcagaactagaaggcttgaaatcaccactcagtcaatttgtat

SEQ ID NO: 997702 - DNA, 120 bp, Artificial Sequence
  ENSG00000260093_26 (sequence is synthesized)
tgcagactacaggcagagaactccatcttagtatgactttatttccttccagctctgttaacaaaatgactagtttttacctgagttcatctttctcaaagtactttgctaaagagacag

SEQ ID NO: 997703 - DNA, 120 bp, Artificial Sequence
  ENSG00000260093_27 (sequence is synthesized)
gaagaaggcagtactgtctcactgacccagagattcactcccaaccattttccctgctactacagattcaaagagcaggtagtctgcctgctaaggtactgagttgacaattttatcaaa

SEQ ID NO: 997704 - DNA, 120 bp, Artificial Sequence
  ENSG00000260093_28 (sequence is synthesized)
tgtcttgtggcgggggaaaaaaaaaaggaggggcttggtcaccagcttttcacctgtaatacctgtgctgcctgtcagttaattaataccacataatttaggttaatgtcatggtctcta

SEQ ID NO: 997705 - DNA, 120 bp, Artificial Sequence
  ENSG00000260093_29 (sequence is synthesized)
cagaaaatctggagctaatactggtttagcaacattgcagctacaaaatctatatgcaaaaatcgtatttctataagacaaaataatggaaatcaaaattttaaaaatactacttattta

SEQ ID NO: 997706 - DNA, 120 bp, Artificial Sequence
  ENSG00000260093_30 (sequence is synthesized)
ttaacatcaaaaatatttaaaatttgtatctgactgaagatatgttagacctgcacatcaaaaccgcaaaacattgctaagagaaatgtaaaagacctaaataaatgtggagctatacca

SEQ ID NO: 997707 - DNA, 120 bp, Artificial Sequence
  ENSG00000260095_0 (sequence is synthesized)
tcatggcaggactgttcacaataggcaaaatgtccaccagctgcgggatggataaacacatgtggtccatgcaggggaatattattcagccatgaaaaagaacaaagcagggacacacac

SEQ ID NO: 997708 - DNA, 120 bp, Artificial Sequence
  ENSG00000260095_1 (sequence is synthesized)
atcacctagacacagaaggccacttgtccgatgacgccatttatatggaatgtacagaatgggaaacatccatggacagaaagtagactactgggggtcatctagcgctgaggaagttgg

SEQ ID NO: 997709 - DNA, 120 bp, Artificial Sequence
  ENSG00000260095_2 (sequence is synthesized)
ggggaacgggagggtgacagctgaggggtgtgttgtccctttggggaaagtgaaaatgtcatcaatttgattgttgtgatgacaagcacaactgtgtgaataaaagcccgttaaatcaca

SEQ ID NO: 997710 - DNA, 82 bp, Artificial Sequence
  ENSG00000260094_0 (sequence is synthesized)
tttgggtctgcactgcctttatgagctgtaacacttattgtgaaggtctgcaggttgactcctgaggccagggagaccacga

SEQ ID NO: 997711 - DNA, 120 bp, Artificial Sequence
  ENSG00000260094_1 (sequence is synthesized)
tgtgaaggtctgcaggttgactcctgaggccagggagaccacgaacccaccggtaggaagaaactctggacacatccgaacatcagaaggagcaaactccagacacaccatctttaagaa

SEQ ID NO: 997712 - DNA, 120 bp, Artificial Sequence
  ENSG00000260094_2 (sequence is synthesized)
gcgagaccaagaacccaccaattccagatgcagtctcacctgtatatggaatttaataaagccagactcatggaagcagagagtagagcagaggttgccagaagcttggattggaggtaa

SEQ ID NO: 997713 - DNA, 120 bp, Artificial Sequence
  ENSG00000260094_3 (sequence is synthesized)
gagtagagcagaggttgccagaagcttggattggaggtaaatggggagctgttggtcaaagggttaaaaaaaggcaagagtgacaaattgtattaaaaaaattatttaaaatgtgttttg

SEQ ID NO: 997714 - DNA, 120 bp, Artificial Sequence
  ENSG00000260094_4 (sequence is synthesized)
taacctaatataattcaaatttatactgacatcctcccatctgctccttctgaaggacaaagtcatctgtcattgatttagagttcccagggtattatttaattagggctttgtaattaa

SEQ ID NO: 997715 - DNA, 120 bp, Artificial Sequence
  ENSG00000260094_5 (sequence is synthesized)
taacaacaaggaaacatatttttgacatttttgacaaaaatattttttccccttctagcctggcagaatcaattatgtatccacattcattctaattgtcttcctttcttaagattggaa

SEQ ID NO: 997716 - DNA, 120 bp, Artificial Sequence
  ENSG00000260094_6 (sequence is synthesized)
acttagaaaataaaaatgtcacttagctctcaatatgaaattaaattgtttcagaagacaagtattatttttaaaataatattagctgttttgtattaaaattttttcgtttgcagttat

SEQ ID NO: 997717 - DNA, 120 bp, Artificial Sequence
  ENSG00000260094_7 (sequence is synthesized)
agttagtaacatatctttgtaactagcaaagaaattaagaacagtatcataaacagctgtttcatttaaggataatctaatgcatttcattttttgactcagattttaatatacacatgt

SEQ ID NO: 997718 - DNA, 120 bp, Artificial Sequence
  ENSG00000260094_8 (sequence is synthesized)
caaagtaaaactggattttatgtagaggttaatttgagaaagggttttaaatgtgtaatttaaattttctcaagttgtgccatcctgtattttaagtcagagtaaaagttataacacaaa

SEQ ID NO: 997719 - DNA, 120 bp, Artificial Sequence
  ENSG00000251620_0 (sequence is synthesized)
agcttctccttgctggttcaatgaagtaagcaactatgttgaaaaagtccacatggcaaagaactgctggtggcctgtaagacctgagggcagcctccagctgaaaactgacaggcagaa

SEQ ID NO: 997720 - DNA, 120 bp, Artificial Sequence
  ENSG00000251620_1 (sequence is synthesized)
aaaagtcagggtcctcagtccacagctacagtgaaatgaattctgcaaccacctgattgagcttgaaatctgatgctttcccagctaagcctccagatgaaaatgcagctcggttgaaac

SEQ ID NO: 997721 - DNA, 120 bp, Artificial Sequence
  ENSG00000251620_2 (sequence is synthesized)
cctgcaaaaatgagcagagaacccagccaagttgtgactggagactcctgacttacggacaataagagaggaaatgtcttttgaaagcttcactgacgccaagcagatttcttccaacaa

SEQ ID NO: 997722 - DNA, 120 bp, Artificial Sequence
  ENSG00000251620_3 (sequence is synthesized)
tttcttgcttcttgtgatgttagaagagcaattatgttcctgtgagcagctgatggaggacattatcaacatggaagtacttctttgtgagagaactgtcagcttacgtttatattaata

SEQ ID NO: 997723 - DNA, 120 bp, Artificial Sequence
  ENSG00000251620_4 (sequence is synthesized)
gatattacctttggactatatctgtgggaaaagaaaagctatttcagctggagtgcaatgatgtgatctcgactcactgtaacgtcttcctctcaggtccaagcgattctcctgtgtcag

SEQ ID NO: 997724 - DNA, 120 bp, Artificial Sequence
  ENSG00000251620_5 (sequence is synthesized)
cctcccaactagctgggattacagataatggaatactattcagcaagaaaattaaatgagctaccaagccatgaaaagacaaggaggagccctaaatgcatgttactaagtgaaagaagt

SEQ ID NO: 997725 - DNA, 120 bp, Artificial Sequence
  ENSG00000251620_6 (sequence is synthesized)
caaacggaaaggctacatgtgattcatcctatatgtcattctggaaaagataaaactatggtgacaataaaaggatcattggttgttgcgggaagtcagggaccctgaatggaggaacag

SEQ ID NO: 997726 - DNA, 72 bp, Artificial Sequence
  ENSG00000251620_7 (sequence is synthesized)
ggttgttgcgggaagtcagggaccctgaatggaggaacaggctgaagccatgttagaagaacatagattgtg

SEQ ID NO: 997727 - DNA, 120 bp, Artificial Sequence
  ENSG00000251620_8 (sequence is synthesized)
cctgagaaagagaatgcgcccctgagggtaggcctcgaaaatggcccccttgggtgtggccgtcttctatggtcgaaaccgtagggatgaaatcagccccagtctcccatagcgctccca

SEQ ID NO: 997728 - DNA, 86 bp, Artificial Sequence
  ENSG00000251620_9 (sequence is synthesized)
aatgcgtgcccgaaacttcattaacaattttaattttgccccggtcctgtgctcctgtgatctcgccctgccacgtgatctctgtg

SEQ ID NO: 997729 - DNA, 73 bp, Artificial Sequence
  ENSG00000251620_10 (sequence is synthesized)
acaccctattcacacggctcagggggcatcacggaacctactgacaagtgatgtctcccccggatgcccagct

SEQ ID NO: 997730 - DNA, 120 bp, Artificial Sequence
  ENSG00000251620_11 (sequence is synthesized)
aacctacatgaaatatcgggggtgaattttgcctgatatctggctgagtttcccctgataattggtcccagaggttagggaggaaggaggtggagaatagagggtttttttttgatcact

SEQ ID NO: 997731 - DNA, 120 bp, Artificial Sequence
  ENSG00000251620_12 (sequence is synthesized)
aggaggtggagaatagagggtttttttttgatcactgaaactattctatataacaatgttggatacatgtcattatacatttgtcaaaacccatggaatgtatactaagagtgaacccta

SEQ ID NO: 997732 - DNA, 120 bp, Artificial Sequence
  ENSG00000251620_13 (sequence is synthesized)
atgtaaactatggactttagatgataatgttgttgtctcaatgtaggtttattgattataacaaatgtactactatggtctaggatgttgattgaagggttgtctgtttgtgggaactgg

SEQ ID NO: 997733 - DNA, 120 bp, Artificial Sequence
  ENSG00000251620_14 (sequence is synthesized)
cctcccaactagctgggattacaggtctccttctgaagagggtgaagatctctaccccgaaatatggtcaagacctcataacaacaccaagaaatccagggaagatttattttcccacct

SEQ ID NO: 997734 - DNA, 120 bp, Artificial Sequence
  ENSG00000251620_15 (sequence is synthesized)
tcccacctctgtgttggctcaagaagaaaagaatagatttcaatggcagctagtataaatattatctagaaatataacctagtaattttttaaaaaatacaatccaatattacacattgg

SEQ ID NO: 997735 - DNA, 120 bp, Artificial Sequence
  ENSG00000251620_16 (sequence is synthesized)
ataacctgttcttgctaagaccaccaatagttccctacttggcaaagccaatgcgttctttcagtcttctttctacttaacctctcttcagccattggcaatattaattattccctctct

SEQ ID NO: 997736 - DNA, 120 bp, Artificial Sequence
  ENSG00000251620_17 (sequence is synthesized)
ctcttcctaatttccatgccattacttatattctactactctgtttgccactttattagattctcttcctccatccctcccaaaaatgatagccattctcagcctctatctgtacattcc

SEQ ID NO: 997737 - DNA, 120 bp, Artificial Sequence
  ENSG00000251620_18 (sequence is synthesized)
cactaagtaattggttacattatagagacactaggataacagtttttaaaaactcagtgaaggagtactcgcttccctgtacctcctggtttcactgttataattgaagtaacaatacaa

SEQ ID NO: 997738 - DNA, 120 bp, Artificial Sequence
  ENSG00000251620_19 (sequence is synthesized)
atgaaatatgaaaactaacatgccaatttccactgccccttttctgtgttcctaacctttaacacttctaaacatctctccttcaaagagcttagatttaggacttcccatatcttttct

SEQ ID NO: 997739 - DNA, 120 bp, Artificial Sequence
  ENSG00000251620_20 (sequence is synthesized)
cttttctgatgttgaagttcccatttcctaaacaccagtcattggcaaaaagcacacaattaaacctattaaaaggcaagtaaatatgtagctaaacccatttacagcataaggaattta

SEQ ID NO: 997740 - DNA, 120 bp, Artificial Sequence
  ENSG00000251620_21 (sequence is synthesized)
gttaatatgacctcagtttactcagcaaatgcattattttattctctttctgattcactaacttgcaattttttggattattttttcctaatttttatacttaggattactgtctttctt

SEQ ID NO: 997741 - DNA, 120 bp, Artificial Sequence
  ENSG00000251620_22 (sequence is synthesized)
aacatattctaactctggtgaggtgttaacctcatcttgactgagacctaagtccaccatttcaaattctggcagaaaattttcatttaaagttactccaaatccatactccctgagatg

SEQ ID NO: 997742 - DNA, 120 bp, Artificial Sequence
  ENSG00000251620_23 (sequence is synthesized)
gagtaactttaaaagaaagttactccacagaaagcccacatattggcaatcttgggcttttttacccaaggagaaaacaacttgccctcagcttcttaattttcctctttaaaatccaaa

SEQ ID NO: 997743 - DNA, 120 bp, Artificial Sequence
  ENSG00000251620_24 (sequence is synthesized)
agatgttaaataaatttccagcttcttcttacctcacccccacaacagcattagattacctacctcaaagaacttattcctttttaaagttatcaaacatttatttggtaaaatttgggc

SEQ ID NO: 997744 - DNA, 120 bp, Artificial Sequence
  ENSG00000251620_25 (sequence is synthesized)
accaaatgctttgtacttggtgccagacttacagaaatgcagaagacatagtagagagtatcaaaaagggtcacttggcagaagctatacatagaaagaaatggcctctcagaggagata

SEQ ID NO: 997745 - DNA, 120 bp, Artificial Sequence
  ENSG00000251620_26 (sequence is synthesized)
aagcatcagctgaatctctgaataataaacaggcattatattagtttatatgaagaagggataggagaatgcttagcatgaaagcaagagtacatgcaaaggcacagagacttaagaagg

SEQ ID NO: 997746 - DNA, 120 bp, Artificial Sequence
  ENSG00000251620_27 (sequence is synthesized)
catgatgcccttaactaaagattttaacttacagctaaagagtggtgcaagtgtaaggaagaaagtcagataggtaggcaaaggaaagcttacaatactctctgtataatctgaaaacaa

SEQ ID NO: 997747 - DNA, 120 bp, Artificial Sequence
  ENSG00000251620_28 (sequence is synthesized)
atgtgaaatttattctgaaagcacagaaaacctaatggacaatttgagaagaaaagtaacatgatcagatttgcaaagaactcttgagtggcagtgataaagatgaactcaatggggcaa

SEQ ID NO: 997748 - DNA, 120 bp, Artificial Sequence
  ENSG00000254878_0 (sequence is synthesized)
ccagttctcctcaacttgctcctcaagcccccctaggctgtgcaactgtttcatatatggttaattcttatgcggctttagaggacttatcattggagatgcacacccaagagctcctgt

SEQ ID NO: 997749 - DNA, 120 bp, Artificial Sequence
  ENSG00000254879_0 (sequence is synthesized)
gacagagtctcactctgttgcccaggctgttgtgaggggtaaagcagataatgtgtgataactcacatgcctaatacacagtaggtgctccataaaaatgagttcatcacttctgctaga

SEQ ID NO: 997750 - DNA, 120 bp, Artificial Sequence
  ENSG00000254879_1 (sequence is synthesized)
acctggagcagtcactagcacataacagatgctcaacaaatattttttgaataaatgaatttcctacagcaggttcctaaaaacattagtctcatgagatgcttctaaaaagagacagct

SEQ ID NO: 997751 - DNA, 120 bp, Artificial Sequence
  ENSG00000277566_0 (sequence is synthesized)
tataccatggggacatcacgttccctgccctcagtttccccatctctaaaagctgggcaatgaattaggtggtctctaggatctgctcctgacctgacagtcgttgcttctaagacaaca

SEQ ID NO: 997752 - DNA, 120 bp, Artificial Sequence
  ENSG00000277566_1 (sequence is synthesized)
gcagaaagtgcctacaattcacgcaggagagctacgcagcagcgcttcccatactctgcagcagaggacctctacttccataaaacacaacaaaaacgaagtactaggagaaggaagtgc

SEQ ID NO: 997753 - DNA, 120 bp, Artificial Sequence
  ENSG00000277566_2 (sequence is synthesized)
gaccatgtggaatgacaccgcccacagttagagtggttccaagcacagacctcatttattctccagctccgtcactttctaaatgtgggagcccccggacaagctgaccaatctctgtgc

SEQ ID NO: 997754 - DNA, 120 bp, Artificial Sequence
  ENSG00000277566_3 (sequence is synthesized)
ttctgtcccatcacccttcttctgaaatggggatgctgatggtatccacctcctaaggttgatgcgaggatgaagttatttcacctataaagtgctgagactagtgcctgcctcacagaa

SEQ ID NO: 997755 - DNA, 120 bp, Artificial Sequence
  ENSG00000254872_0 (sequence is synthesized)
aaaatggggacgtcgggagcattctctggacagcaggagatgcatgtcgacaggctggccctgcctcttcccaccccagagtgatgcagcggtgtcctggacccctggggagaggtgacc

SEQ ID NO: 997756 - DNA, 120 bp, Artificial Sequence
  ENSG00000254872_1 (sequence is synthesized)
cccccagcaggaagctgggcctggtttctgtccctctgcagccacaaggcctggctaggatgctgggagcaccacaccctggagactcagctcaccaaggactcaggggcgggggctccc

SEQ ID NO: 997757 - DNA, 120 bp, Artificial Sequence
  ENSG00000254872_2 (sequence is synthesized)
ctggcacctgggaagctgggcccccggccccctggactcccacccagacaccatctcaacccaggcacttcccccgggccagagggcagcctggcagccctggactccgggagggccgag

SEQ ID NO: 997758 - DNA, 120 bp, Artificial Sequence
  ENSG00000254872_3 (sequence is synthesized)
tctggggagctggacgacgtcacattccactcttgatgatgccgccccagtcctacaatctggacagcaggagaagctgcccatttcctccatctccggtccctggaggttccccggatc

SEQ ID NO: 997759 - DNA, 120 bp, Artificial Sequence
  ENSG00000254872_4 (sequence is synthesized)
catgggccctaaacgatcttcataacaaaactgagaagtggcctggcttcttcactgcgtgcctgtgtgctgggatctagcgtggcccgactgggcagctcctttccttccctgacgctg

SEQ ID NO: 997760 - DNA, 120 bp, Artificial Sequence
  ENSG00000254872_5 (sequence is synthesized)
ctccaggggaaagaaggaccagggtcaatccggggtgccccaggtggatcagcgaatgcccctgaagccaggtgccagttgcatccccgtcagatgcccccaccccagtctcctgagcct

SEQ ID NO: 997761 - DNA, 120 bp, Artificial Sequence
  ENSG00000254872_6 (sequence is synthesized)
cattagtcacccctcattttcctctggggaccccaggccccagctcctgtctggttagaggctgaaggggtctgagcgacacctaccctaggggacctccggaggggtcttggtgtcctc

SEQ ID NO: 997762 - DNA, 120 bp, Artificial Sequence
  ENSG00000254872_7 (sequence is synthesized)
tgacttctgtcctcagaagggagctcagaatgcagctgaggcttcccctggggcccagggtgtctgtgtccgagccacagccagagtgtgccctggagagtcgctgggatgcacggtggg

SEQ ID NO: 997763 - DNA, 120 bp, Artificial Sequence
  ENSG00000254872_8 (sequence is synthesized)
ccagagtgtgccctggagagtcgctgggatgcacggtgggctctcgtcatcctgtccccactccaggctcaggctggagccgtgatggcaccgctgcactccaacctgggcaacagagtg

SEQ ID NO: 997764 - DNA, 120 bp, Artificial Sequence
  ENSG00000254872_9 (sequence is synthesized)
cctgggtttcctgtgtcctcaccgcccgcttatcagcaagatggggatgtggatgacaggagtgctggccacggagggcctggtgtgggtggccgtcgggacgagggtagtgtgggcggc

SEQ ID NO: 997765 - DNA, 120 bp, Artificial Sequence
  ENSG00000254872_10 (sequence is synthesized)
cacggcagttggtgctactgctgggaggggccgaaggtgaggccctcctgggctgtgggtccctgtaagccactgcccccgtggggtgtgcagtcaccaagccgacctgctgccggggtt

SEQ ID NO: 997766 - DNA, 120 bp, Artificial Sequence
  ENSG00000254872_11 (sequence is synthesized)
ccgccccctccctttcccttctgcttccccggcacctgtgtcccaagcctgaagccctgtccgtgtcagaggtggcacctccctgggcacgggcacttggacgctggtgcctcccctgct

SEQ ID NO: 997767 - DNA, 120 bp, Artificial Sequence
  ENSG00000254872_12 (sequence is synthesized)
gcggacccctttgctgtggtcagggcctcctccctgcactggccccgcctgtgaccgcaggcctggcggggccctcaatggccacagagggcacaggccggggccaggagggcaccgtct

SEQ ID NO: 997768 - DNA, 120 bp, Artificial Sequence
  ENSG00000254872_13 (sequence is synthesized)
cctggggcacagatatgctggagtgagctatggaattgtccatcagcagcggcaagctttgctgagcgccagctgtatgcagagcaaaggcgggccagccgggaagggccagtgaggacc

SEQ ID NO: 997769 - DNA, 120 bp, Artificial Sequence
  ENSG00000254872_14 (sequence is synthesized)
tggagtccccagcatccccaggagcctgcacccctacgcgggggacgcctgggcagctcctccctcctccactccccgccctctcctcccctccttcctgcagttcccacagctgtttgg

SEQ ID NO: 997770 - DNA, 120 bp, Artificial Sequence
  ENSG00000254872_15 (sequence is synthesized)
gtgcctcccgtggcgcctggttgagctgcagggggagatgtgtgtggacactgcaaccctcccgaagctgggcctggaagaaatgacttccccagaaccttatctgggccggagaggggc

SEQ ID NO: 997771 - DNA, 120 bp, Artificial Sequence
  ENSG00000254872_16 (sequence is synthesized)
gttggcagcgggggtcttgccgccttccggtcctctgcatgccaggcaccacctggggccgggccagggcaggctgcctggacaccatggacctgcccagctgtaggggaggtgtgtcct

SEQ ID NO: 997772 - DNA, 120 bp, Artificial Sequence
  ENSG00000254872_17 (sequence is synthesized)
gcagccctacccgaggcccaggcctgcgtggctgagaggactgaggacggctgacccccttggtgactgcctgggcccagaggggagttgggggagtggtcagctgggtgtggccagccc

SEQ ID NO: 997773 - DNA, 120 bp, Artificial Sequence
  ENSG00000254872_18 (sequence is synthesized)
tgggggaaggatccagggactgtgtccacttagggataggaggcagctagcagagccctcccagctgaccaggggaggccctgtgggcacaggaggggccccaggtgtaggtacaggtgc

SEQ ID NO: 997774 - DNA, 120 bp, Artificial Sequence
  ENSG00000254872_19 (sequence is synthesized)
agggctgtgcggctctgtgtcacccaggtggagcgtcttgccccgtttgatggctgacaaagtgcccttgaatgcgtcagacccagcgtggtcccagggtcctgaccctaacataccacc

SEQ ID NO: 997775 - DNA, 120 bp, Artificial Sequence
  ENSG00000254872_20 (sequence is synthesized)
ccaaattaccctcaccccagcctacccctgccctaaattcaccccaagcctccacccaaaccccttagtcccaacaccttaaccctagacccaaccctacaccccaagccctaatcccta

SEQ ID NO: 997776 - DNA, 120 bp, Artificial Sequence
  ENSG00000254872_21 (sequence is synthesized)
accgctagcctcaccctaaccttcctaccggatgccacctggcaaacatcctcctggcccctatctgcccctcccccggggatccgggaggcagtggggtccctgggaggctgctccctg

SEQ ID NO: 997777 - DNA, 120 bp, Artificial Sequence
  ENSG00000254872_22 (sequence is synthesized)
gctcttgggtccctaggttcctgctgcccctgccagttcctggaagatgccagcaggagggagggcagtggagctggacttgcgcccacaacaggatctggccataaacgcagtcagggc

SEQ ID NO: 997778 - DNA, 120 bp, Artificial Sequence
  ENSG00000254872_23 (sequence is synthesized)
gaggctgcggggtgggtggctgagcctcctggtggactatctcccctcccaccccccgccctggcccgcagctgttggctcttcctgggaagccacagcctttgtttgttccttgaagga

SEQ ID NO: 997779 - DNA, 120 bp, Artificial Sequence
  ENSG00000254872_24 (sequence is synthesized)
gctggtgcgttgcctgcgagctcctctgcaggcttgggggtcgcacctgctgtccacccccctcgaaaccagctccatccagcagcaggctgcaagcctggagaggccaccggggaccag

SEQ ID NO: 997780 - DNA, 120 bp, Artificial Sequence
  ENSG00000254872_25 (sequence is synthesized)
gcagggaaactgaggtcccaaaaaggcagggaacaggtgcagggggcctgtctgacctgcgctgggactgggccaggtgagtctcctccagggcccagccccatcttggacagaggaagt

SEQ ID NO: 997781 - DNA, 120 bp, Artificial Sequence
  ENSG00000254872_26 (sequence is synthesized)
tgatagtcaggaaaggcaggagtggcctcttctaacaatttcagctctgaaggggccaagggtggcgatgctgacagcatttcctccagctcccacctgcctgctccggggaactcccta

SEQ ID NO: 997782 - DNA, 120 bp, Artificial Sequence
  ENSG00000254872_27 (sequence is synthesized)
cccaggcattgatattcacctggtgatactaataattgtctcaggtgataaattgtctcagctgctctcccacatggcccacaggtccctggaggttccccggatcctttcagggaagac

SEQ ID NO: 997783 - DNA, 120 bp, Artificial Sequence
  ENSG00000254873_0 (sequence is synthesized)
gctattttgcgtagggtgctttcgccgcgattctgagaacctttgaagtcagtactggagaaggattcgctgagattcttctagtccaacacgatcgttgtacagaggttcatttcctgt

SEQ ID NO: 997784 - DNA, 120 bp, Artificial Sequence
  ENSG00000254873_1 (sequence is synthesized)
tgagcagttagagcatgtgcattatttcctcacatgacatcaacagtgcagcatcagcctctggcatgtaaaggcacccagtagacttatgctctgtgcaatggctgcttagcaaccacc

SEQ ID NO: 997785 - DNA, 120 bp, Artificial Sequence
  ENSG00000254873_2 (sequence is synthesized)
atcaaataaagtaatgaagcttttgtagagtgtgatatcaaatagcaactggcaccttcacttgcaccattaaaaaacctttaacatttccttcagttttcacatatccattaaaaagta

SEQ ID NO: 997786 - DNA, 120 bp, Artificial Sequence
  ENSG00000254873_3 (sequence is synthesized)
tattaaaaaacaaaacccagactgcttgataaaacatacttaaacaattttccaagtttagtattagcctcttggtaagttatgagcaataccagagctgagtaaaagagtcttcatttt

SEQ ID NO: 997787 - DNA, 120 bp, Artificial Sequence
  ENSG00000254873_4 (sequence is synthesized)
gctatcatactccagcaaagccaatacacaaaactaggtatgttagaaagtctgctctactagatttagagctgcttctaagttccagacaaaacacctttttaagcttccaagtgtata

SEQ ID NO: 997788 - DNA, 120 bp, Artificial Sequence
  ENSG00000254873_5 (sequence is synthesized)
tacacacggtgttgtaccaagataactttttaaagtctaatttttttggatattcttaaattacttcacagaaagaaaaaaggcacagaggacacttggtttccttaccagtagtggcct

SEQ ID NO: 997789 - DNA, 120 bp, Artificial Sequence
  ENSG00000254873_6 (sequence is synthesized)
taagctacacacttgcttgtgcagagtttaaagatattcagcagcattaatggtgccatagccattcataaaaagtttcaggaaaagagtttaaaaaaagaagaaaagcttgccagaaaa

SEQ ID NO: 997790 - DNA, 120 bp, Artificial Sequence
  ENSG00000254873_7 (sequence is synthesized)
ggcttacaatctgaaggttaaatacagaagaatacagacaaagactggaggcagcatgggggttgttaactaggaagctgctgggaatagctgccttctgagtttttgtgcccattttcc

SEQ ID NO: 997791 - DNA, 120 bp, Artificial Sequence
  ENSG00000254873_8 (sequence is synthesized)
cctcgtttttaaaatgagaacatcctactagattgggtttggaagataaatgcaaataggcagaagcttattttatacatagttcattctcagagagggaaaggaggatgataaatattg

SEQ ID NO: 997792 - DNA, 120 bp, Artificial Sequence
  ENSG00000254873_9 (sequence is synthesized)
aatgaagctaattttagaaaataaacaaatcctgtcaacccatgccataaaggcccagggagcacactgaatgaatcttacattctggcatttgcaaaagtgtcctcaatttcctttttc

SEQ ID NO: 997793 - DNA, 120 bp, Artificial Sequence
  ENSG00000254873_10 (sequence is synthesized)
attttataagcacagcaataggcaacacctattttatatctaggatgggaagccctcttagatttgaggctttccagctgatgcaatcaaaaacccatcaaggactgcttatagcaactt

SEQ ID NO: 997794 - DNA, 120 bp, Artificial Sequence
  ENSG00000254873_11 (sequence is synthesized)
gtgttgaaatataaaactactatttatttgaaagagaccatagttaataacatgttccaaatgaagcagtgacacccatttcttgatcctatcacttttcttgtcacttatgacatctct

SEQ ID NO: 997795 - DNA, 120 bp, Artificial Sequence
  ENSG00000254873_12 (sequence is synthesized)
gggcttagaaagacagtgatataaagataatccataggggaatgtccctagtcagcatattaagctgcacaattgagtagtgagctcaagttcacttatgaaagtggtgtccacctacca

SEQ ID NO: 997796 - DNA, 120 bp, Artificial Sequence
  ENSG00000254873_13 (sequence is synthesized)
actacacagggctaagtggatatttaaaatggctgtggacaaggttgtgctcaacttcctactttgttaattgaagacctaaggctgtgttagaagtagctcttagaagtcaggtcacaa

SEQ ID NO: 997797 - DNA, 120 bp, Artificial Sequence
  ENSG00000254873_14 (sequence is synthesized)
gctcaaacaaatattaactatatacattttataatctcagaattttgtgaagaatgagtatgttagtaaacatggccacatactgcatacatctcactatggaagagaaaatataaagtg

SEQ ID NO: 997798 - DNA, 120 bp, Artificial Sequence
  ENSG00000254873_15 (sequence is synthesized)
gtactcagtttacactaaaccaacaaaaaagcacatggggtgtatgtgtatttatatatctcacacactgagatatactgttgatattagtgtcttaaaatgacatttttcatggatatg

SEQ ID NO: 997799 - DNA, 120 bp, Artificial Sequence
  ENSG00000254873_16 (sequence is synthesized)
atacccgttgcctaaatctacttaggcctagtccttgtagaaacagattttcataagagaataagggcccaacagtctcctcacccccatcaattggtaggattgccctaccaatcctca

SEQ ID NO: 997800 - DNA, 120 bp, Artificial Sequence
  ENSG00000254873_17 (sequence is synthesized)
acgagtggaaggctagaaaagagtcgccaacctgcttcctgctccctccacctgcaggccatcccgccccggcacccgcaggcccctcgggtcttcgcagcccgcttcttcctctcaggc

SEQ ID NO: 997801 - DNA, 120 bp, Artificial Sequence
  ENSG00000254874_0 (sequence is synthesized)
ctgggccaatcactgctatctcccaagataccctggttgaaagatgtttgggaaaggtttcaagtactatctggagtaaaaggtgttactgttgggatacatgacaatgagcttctacgg

SEQ ID NO: 997802 - DNA, 120 bp, Artificial Sequence
  ENSG00000254874_1 (sequence is synthesized)
gggatacgtgttgagaaaaccagttctgctcaatttttaaatcctaggacactcgaataatattccattgtctggatgtgccacacagtttgtttatttattcacctattgaaagacatc

SEQ ID NO: 997803 - DNA, 120 bp, Artificial Sequence
  ENSG00000203527_0 (sequence is synthesized)
cacaacctttgaagaaggcagggcaacaggggtgaggaagctggctgggtttgggaggtaaccacagctgctgggacgaggactcctctggccaaccggaacaagctggaatcttcggtg

SEQ ID NO: 997804 - DNA, 120 bp, Artificial Sequence
  ENSG00000203527_1 (sequence is synthesized)
tcagaggaaccctggccacggtgcaaggacaggctggcctgaaggaggcacccaggcatcgggagcagctggacggtcaacagggtgaagggagttgagaagggcaccggggacgggaga

SEQ ID NO: 997805 - DNA, 120 bp, Artificial Sequence
  ENSG00000203527_2 (sequence is synthesized)
ggcagtggccccagggtctctgctaggttgcaagtgaatcaaaagcaaccacacaggaaaagtgtcaggcacagggcagaggctcaagcaccctccagtgaggcccatggtgtagagaaa

SEQ ID NO: 997806 - DNA, 120 bp, Artificial Sequence
  ENSG00000203527_3 (sequence is synthesized)
caaacagacaccaggatggacacgggcacccatccctccaggcgctgtggacctgggacagccacggaattgcttgcagtcagatggcgcaggacggtggatggcatctgaggactctct

SEQ ID NO: 997807 - DNA, 120 bp, Artificial Sequence
  ENSG00000203527_4 (sequence is synthesized)
ctgctccagacatcattccaggaaagtgacgggactggcctgtgcctctccccagggtttctggctccctgtctccagagtcctacttgaagtgcttttttaaggccagctgcctccaat

SEQ ID NO: 997808 - DNA, 120 bp, Artificial Sequence
  ENSG00000203527_5 (sequence is synthesized)
ccgttgctgtccaccaaggtctgggcccagatgacgctgccagccccttgccctctctttctaccacaaactcctgctgctacccaatctccccccttaatcctcccaacagcatcctgc

SEQ ID NO: 997809 - DNA, 120 bp, Artificial Sequence
  ENSG00000203527_6 (sequence is synthesized)
ctatgtcactctggcccctctgtctgctgaccacccaccttctctccatcagttggccaccacctcagaagccacctgctcttgcaggcttctttttttttttcttttttttttgagatg

SEQ ID NO: 997810 - DNA, 67 bp, Artificial Sequence
  ENSG00000203527_7 (sequence is synthesized)
cttgcaggcttctttttttttttcttttttttttgagatggagttttactctgtcacccaggcttgg

SEQ ID NO: 997811 - DNA, 120 bp, Artificial Sequence
  ENSG00000203527_8 (sequence is synthesized)
cagcctcttgtgggcttctccaacccctttccatatcccactggctccagccctgagctcagcttcctctgccttgaacagcccgctagccaagcccctggccctgctcctcatccagca

SEQ ID NO: 997812 - DNA, 120 bp, Artificial Sequence
  ENSG00000203527_9 (sequence is synthesized)
cgccctgcccaggcacatgtagatttggggaccacaggttgaccagcatattgggcaggaaggttcctcttctccttagaacccaatttccacacttgaaaaaagaagggggaatccatg

SEQ ID NO: 997813 - DNA, 120 bp, Artificial Sequence
  ENSG00000203527_10 (sequence is synthesized)
ggggtggttgtgattcctttaaacactgacagacagccgtgggagagggtcatgatttgaacccagaccactgggttccagtcctgccactattggacacactgtttgcctctgtgagct

SEQ ID NO: 997814 - DNA, 120 bp, Artificial Sequence
  ENSG00000203527_11 (sequence is synthesized)
tctgacccacatctgcaacatgggagcggctagtactcagctcacagggttcaaggaattgcaatggataatattagtatccatctgagggttcgaggggtcaaatgaagcagtattagg

SEQ ID NO: 997815 - DNA, 120 bp, Artificial Sequence
  ENSG00000203527_12 (sequence is synthesized)
gtgacccaatgtcttgctttgcctgggacagtcccagttgatatccacagccctggcataattaataatagtatctcctttcattctcacaagtgtactgatttggatattgttcaatta

SEQ ID NO: 997816 - DNA, 120 bp, Artificial Sequence
  ENSG00000203527_13 (sequence is synthesized)
taactaaatgcgaactattgactgcggtggttgtgatgtggatccgtatgtcataaatggcgtggagccacactcacacactgtaccaacgtccagctaccggtctggatgttaaactct

SEQ ID NO: 997817 - DNA, 120 bp, Artificial Sequence
  ENSG00000203527_14 (sequence is synthesized)
agtgacgtaagatgtcaccattgggggaaattgggtaaagggcatctgagaccactcttcactattttttgcagcttcttatggatctacaattatttcaaaataaaaaattctaaaaaa

SEQ ID NO: 997818 - DNA, 120 bp, Artificial Sequence
  ENSG00000228309_0 (sequence is synthesized)
acccacatttgcacagatgctgctgctatagtactttcaggcaaggccaaggcttcttgaaaggctggtcatgccccagtgatcaatgaagaactcagggatatcccaaaactcaggact

SEQ ID NO: 997819 - DNA, 120 bp, Artificial Sequence
  ENSG00000228309_1 (sequence is synthesized)
ataaggcacaatgggggagcaggtaccaggtggccagcatcctaaatgactctcagcagctgcagagaatgtaaataacaagagctgcctataaatctacctcagaagacaaagggaaaa

SEQ ID NO: 997820 - DNA, 120 bp, Artificial Sequence
  ENSG00000228309_2 (sequence is synthesized)
gaacggacatgcaccacttccagacctggcaccggcaaaccccccatggcaaccctccaaccctttcctcaacaactggaccacgctggaaaggactgaggatctagaggaggacagggc

SEQ ID NO: 997821 - DNA, 120 bp, Artificial Sequence
  ENSG00000228309_3 (sequence is synthesized)
tgtaatatggaaggagtttggtttctgaaggaccatgtagcaggccacctgcagggcgggaacatctttaataggtttggaatagcaagaaataaactggtcttgtattaaacaactaat

SEQ ID NO: 997822 - DNA, 120 bp, Artificial Sequence
  ENSG00000228309_4 (sequence is synthesized)
aaacatcattcccgtaatccctgatcaacagaaaggaagctctggaagcatgaatgctcaaccatatttaccagccttcctgtggtcatttgtctgagctccagctagtgaagtatgagt

SEQ ID NO: 997823 - DNA, 120 bp, Artificial Sequence
  ENSG00000228309_5 (sequence is synthesized)
atcctaaatgactctcagcagctgcagagaattttgtcttttccagaatgccgtacagttgaaatcatacggtatatagactttgcaggtttttatgcggacatgttttttgactccttt

SEQ ID NO: 997824 - DNA, 120 bp, Artificial Sequence
  ENSG00000228309_6 (sequence is synthesized)
cctttagccttcttgcatcacgacaaaaattcgaacttggtgtttgaagaacatgaaaaatgaggaggaataaaataatcatgagtctcctggtcattaactgcatgaagttgagctggt

SEQ ID NO: 997825 - DNA, 120 bp, Artificial Sequence
  ENSG00000228309_7 (sequence is synthesized)
cacttaagccattcctaatatgtaacttgagagtatagtattagatattcagtaaattcccttcaaaattcatatttaatgtttcctaattaaatatatatttggggctaaatatacaaa

SEQ ID NO: 997826 - DNA, 120 bp, Artificial Sequence
  ENSG00000228309_8 (sequence is synthesized)
atcctaaatgactctcagcagctgcagagaagaccataatggatggatatataggctgacgtatatcagttggcttcagttgtttggtgatattcaccagatctatattttgctatttta

SEQ ID NO: 997827 - DNA, 120 bp, Artificial Sequence
  ENSG00000228309_9 (sequence is synthesized)
gccagcatcctaaatgactctcagcagctgcagagaacattctcataaaagagaatcagtcatcctgaggtatagaatgctggggcccttccattactccatgcactggggaagaactag

SEQ ID NO: 997828 - DNA, 120 bp, Artificial Sequence
  ENSG00000228309_10 (sequence is synthesized)
aattgtgagaagagctttcacgctcccataaccattccttggcccacctccaagaaaaggcaggctggcctctgtttaggtgttgtctgtgcttgcattcccaacgttgacatgaggaat

SEQ ID NO: 997829 - DNA, 120 bp, Artificial Sequence
  ENSG00000228309_11 (sequence is synthesized)
aggtggccagcatcctaaatgactctcagcagctgcagagaacctacgtctgcgggtcagaccctggcaggtggtgccccatgtgaggaaaactacaaaggatcataatggaaccctcaa

SEQ ID NO: 997830 - DNA, 120 bp, Artificial Sequence
  ENSG00000228309_12 (sequence is synthesized)
tttctaaaacatcattcccgtaatccctgatcaacagaaaggaagctctggaagcatgaatggtcagtacacacatcgtccacaggactcacacaccacaaactagtcattgatcctttt

SEQ ID NO: 997831 - DNA, 120 bp, Artificial Sequence
  ENSG00000228309_13 (sequence is synthesized)
gacccaatttcagaaaatatgtttacatagagacacatatttttgctatttactttttgagcaaccaacaggaaaacctatccacatatgtccattatgatcctctctaatgaagactat

SEQ ID NO: 997832 - DNA, 120 bp, Artificial Sequence
  ENSG00000228309_14 (sequence is synthesized)
ctctttatgttgtttaaacaaaaagaaattaatgcatgagaatgtcaaagttctgagctttaagtttctgtactcaatatattgaataaaagatatatgtagtatacattggaatagaaa

SEQ ID NO: 997833 - DNA, 120 bp, Artificial Sequence
  ENSG00000228309_15 (sequence is synthesized)
agtggcaattaaaaaagaaataaacatgaactccccaaatgagccacaaaaataaatcagcatgtctaaatttcagaatgagaaacaaagatgcaattctctcctcagaccaaacgaagc

SEQ ID NO: 997834 - DNA, 120 bp, Artificial Sequence
  ENSG00000228309_16 (sequence is synthesized)
agagattttcaaactgcagaggtgccacagaaaaggctgaattctcaagcatagtgagcttagactttatagctaaaatagaaatttcagcttttagagctgaaatagaaggtctgagca

SEQ ID NO: 997835 - DNA, 120 bp, Artificial Sequence
  ENSG00000228309_17 (sequence is synthesized)
ttaacaaaacattagaaccttgcatttaaaaattagtatgagaaatttttgttattgtgctgagacccttacacacatgatttcttctagccaatacaggcacagattcaacaaagatgg

SEQ ID NO: 997836 - DNA, 120 bp, Artificial Sequence
  ENSG00000228309_18 (sequence is synthesized)
aggcaaggccaaggcttcttgaaaggctggtcatgccccagtgatcaatgaagaactcagggatatcccaaaactcaggactataaggttcatttgcccgatgtgcagtgagtcaataaa

SEQ ID NO: 997837 - DNA, 120 bp, Artificial Sequence
  ENSG00000228309_19 (sequence is synthesized)
ctgagacacttgggatacagcagagacagagtttaatacctgtagggcagctgaatgaggagaccagaggaaacttcaactatgtctccccaagagttttggggttgtttttaagaggca

SEQ ID NO: 997838 - DNA, 120 bp, Artificial Sequence
  ENSG00000228308_0 (sequence is synthesized)
tccttccaaaaggctgagctggagttgggggttctctcatggcttctcttggctcccgtcacaagaactattctagcttaagggtataaaacaggatgtttgtcgccaggcgcggtggct

SEQ ID NO: 997839 - DNA, 120 bp, Artificial Sequence
  ENSG00000228308_1 (sequence is synthesized)
ggaggccgaggcgggcggatcatgagcatcacttgcggataggtctaattgtcctcattatatggaagaagaaactgatattctaggaagtttagtaacgatatagatataatgcagctg

SEQ ID NO: 997840 - DNA, 120 bp, Artificial Sequence
  ENSG00000228308_2 (sequence is synthesized)
aacgatatagatataatgcagctgggaagggtgtggacttatgaagtcaaaactaggtctgttagactgtaaaatctgtgctttgaagattgtgcatctgggaaagaaaatgaaaaactc

SEQ ID NO: 997841 - DNA, 120 bp, Artificial Sequence
  ENSG00000228308_3 (sequence is synthesized)
ggaaattcttagatccaattagtaattgtggtcacaacacttaagaatgaattcagaatatacaattatacccaaaacacttgcaatgccttttttttcatgttatagagaattacagag

SEQ ID NO: 997842 - DNA, 120 bp, Artificial Sequence
  ENSG00000228308_4 (sequence is synthesized)
agactctagaattctttatgtctgtattcaagaagaaggaagataaaataatgaagaaaccaagtgcaattctaagacatatgtgccctgaaccattctttatttgaataaaacatagat

SEQ ID NO: 997843 - DNA, 120 bp, Artificial Sequence
  ENSG00000228308_5 (sequence is synthesized)
ccagaccatcattagccccctgcaaaagttgagatagatgctttgaagtaacaccttctccctatttgttttcattattttaacctagacttcgggatagccttgtagcgttggtaacaa

SEQ ID NO: 997844 - DNA, 120 bp, Artificial Sequence
  ENSG00000228308_6 (sequence is synthesized)
gtaaactgtttcactagaggcagacggatttctaagatattttgttagtttttattaagttagaaaagctcatgaaatctttgctggggctgagagaatggaattatctgattattagta

SEQ ID NO: 997845 - DNA, 120 bp, Artificial Sequence
  ENSG00000228308_7 (sequence is synthesized)
gggccacagagcgagactccgtctcaacaaaaacaaaaacaaaaaacaacgggatgtttgtcaaaagctgccttttctaagaacagagagcgtgtgactcttctctcaccccaccatggc

SEQ ID NO: 997846 - DNA, 120 bp, Artificial Sequence
  ENSG00000228308_8 (sequence is synthesized)
accatggctacttgttactgtgatctaaatttaattgtctccattagccacagggagctattgtctcaagagctgggggagcttatttacagttttatttcagagcaagataaatggtgt

SEQ ID NO: 997847 - DNA, 120 bp, Artificial Sequence
  ENSG00000228308_9 (sequence is synthesized)
cccctaaataataatgtgacttaatggtagaggcaggactaaatcccaatttctttccagtttatgttttactactaaagttgaaaacaagattctctttttagagtgtaactatgctgt

SEQ ID NO: 997848 - DNA, 120 bp, Artificial Sequence
  ENSG00000228308_10 (sequence is synthesized)
tatgaaattatgaatactcaagaattagctcataatgttgtctttttttatttttttttatattttgattactgcctttctcttgttagaagaaggaacgaattaaaacatcacttgcgg

SEQ ID NO: 997849 - DNA, 120 bp, Artificial Sequence
  ENSG00000228308_11 (sequence is synthesized)
gttttctctccaggcctcaatatctcttgggagctgttataaaatggcataactcatctgaaaaagaaaaaaagaaacggaaggaaacacctttccatttgaaaatacggtgtgtacgtt

SEQ ID NO: 997850 - DNA, 120 bp, Artificial Sequence
  ENSG00000228308_12 (sequence is synthesized)
tgtaagtgaagatggtctaagaacagaatttttaattatgcttccacaggaagtttgacagcaacgtttctttctttctttttttttctgggaagtttagggcaaggaggacatgaaatt

SEQ ID NO: 997851 - DNA, 120 bp, Artificial Sequence
  ENSG00000228308_13 (sequence is synthesized)
gataatgccttgagcccggcaatgggttttcccagaagaaataatgcaaagccgttagatgaatgacagtttctaaagtcttcaaaaccaactcttgacagatggagcactgcagaggcc

SEQ ID NO: 997852 - DNA, 120 bp, Artificial Sequence
  ENSG00000228308_14 (sequence is synthesized)
atgtggcacgggaatttccaaatttccactctaatttcatttgctttttaaaaaactttggcagctgaagttgcagcagctgacctctaactgctaccccggggaaacaggaggccgtgt

SEQ ID NO: 997853 - DNA, 120 bp, Artificial Sequence
  ENSG00000228308_15 (sequence is synthesized)
aacgggctctttatgaacaagggctgtagatggcgctggagaacacaggcttcgctaggggccgtggagaaggccctgtccggatgtctacccgccagcacagaggggctgccggccctt

SEQ ID NO: 997854 - DNA, 120 bp, Artificial Sequence
  ENSG00000228308_16 (sequence is synthesized)
gctttgcatctttaaggaggcagcctggtgtagtcagatatccccgcatccgagtcttagttttaccactgacagctgtgtgactttggtcagcttttcaacttcaagcttttttcctca

SEQ ID NO: 997855 - DNA, 120 bp, Artificial Sequence
  ENSG00000228308_17 (sequence is synthesized)
tctgtaaaaatcctaatttgtggtggtgtcatgaaaattaaggctaatatatattaaaatatttagtacagtactcagcacagattagatcccaataaagtccctaattacgtaaccaaa

SEQ ID NO: 997856 - DNA, 120 bp, Artificial Sequence
  ENSG00000228302_0 (sequence is synthesized)
acaccttcccctgtagcacagagagagaaaaaacaaaaacaaacatcttctgtactctgtcttctgagaaagaaacacttttttattctgagacagggtctcatgctgttgcccaggctg

SEQ ID NO: 997857 - DNA, 89 bp, Artificial Sequence
  ENSG00000228302_1 (sequence is synthesized)
cactgcagcctcgacctcctgggctcaaaggatcctcctgcctcagcctcctcatgcagctaatttttgtattttcttcgagacagggt

SEQ ID NO: 997858 - DNA, 120 bp, Artificial Sequence
  ENSG00000228302_2 (sequence is synthesized)
tttgtattttcttcgagacagggtctcgccatgttgcccaggaggtcaaggctactgtgagccgtgatcaaaacaccacactccatctatcctgggtgacaaagcaagaccgggtctcca

SEQ ID NO: 997859 - DNA, 120 bp, Artificial Sequence
  ENSG00000228302_3 (sequence is synthesized)
ctgtcacccaaaggcgaagggtctgcggtctgaccaaagcgtcttcccggagccttcagtgctctgttcagggggagccggacggagccaggcagtgcctgcgactccagagagcagcgc

SEQ ID NO: 997860 - DNA, 120 bp, Artificial Sequence
  ENSG00000228302_4 (sequence is synthesized)
ttctgactcgggaaaggctgctgccaagggtggatttttttaccatatgcaaggatgaagatgctgggtttttttctgtggtttttgtttgttttttgttttttgtgagagtctcactct

SEQ ID NO: 997861 - DNA, 75 bp, Artificial Sequence
  ENSG00000228302_5 (sequence is synthesized)
tagctgggattacaggcatgcgccagtatgcttggctaatttttgcatttttactagagacagggttcctcccac

SEQ ID NO: 997862 - DNA, 120 bp, Artificial Sequence
  ENSG00000228302_6 (sequence is synthesized)
tcaccgtgttagccaggatggtctcgataccctgacttcctgatccgcccgtcttggacatgttacttttatgggcagaaaacagcactacaaagttgtttcaggaaagtctggctgtga

SEQ ID NO: 997863 - DNA, 120 bp, Artificial Sequence
  ENSG00000228302_7 (sequence is synthesized)
tgtttcaggaaagtctggctgtgaagctggcaggaaaggagagagtggctgggtgaagaaaccgggttgaacaatgttttgtttttttcggatgggaggtatctgagcatgactaaatcc

SEQ ID NO: 997864 - DNA, 120 bp, Artificial Sequence
  ENSG00000228302_8 (sequence is synthesized)
ggatggacagagttgatagagaggaagaattgcaaaaagagcagagggcatctggagaaagaggaggaggacacagtgtcctgagggggaggtaagagaggaggacacagtgtcctgagg

SEQ ID NO: 997865 - DNA, 120 bp, Artificial Sequence
  ENSG00000228302_9 (sequence is synthesized)
gggaggtgagagagggggacacggtgtcctgagggggaggtgagagaggaggacacagtgtccggagtgggaggtgagagaggaggacagtgtcctgagggggaggtgagagagaggagg

SEQ ID NO: 997866 - DNA, 120 bp, Artificial Sequence
  ENSG00000228302_10 (sequence is synthesized)
acacagtgtccggagtgggcggtgagagaggaggacacagtgtccagagtgggaggtgagagaggaggacagtgtcctgagggggaggtgagagagaggaggacacagtgtcctgagggg

SEQ ID NO: 997867 - DNA, 120 bp, Artificial Sequence
  ENSG00000228302_11 (sequence is synthesized)
gaggtgagagaggaagacacagtgtactgaggggggaggtgacagaggaggacacagtgtccagagtggggagatgacagagggggacacaagtgtatggaggggggagattagactcag

SEQ ID NO: 997868 - DNA, 120 bp, Artificial Sequence
  ENSG00000228302_12 (sequence is synthesized)
gaagggacggacaagcttgtaggtgtgatgagaaatcaactgagggaattctcatcagtgggttcccttttccgggaaacagcaagttaaatcatctgctgagaggaaggaaggaatgat

SEQ ID NO: 997869 - DNA, 120 bp, Artificial Sequence
  ENSG00000228302_13 (sequence is synthesized)
ggctggggtcagaaggaacagatgcatgagctgatctgggaccaagattcctccaggtgggtgtgacagaagaagctcagaaaaagaactaaaaaaactgatcagatgatcctgacttct

SEQ ID NO: 997870 - DNA, 120 bp, Artificial Sequence
  ENSG00000228302_14 (sequence is synthesized)
gtatataaagttaagtggggcccccttctttgaccaccaccatgggcaggttagctattagtaaagctgtgttacactctgcgcttcccaagggtcctggccattgccgcctacctatgc

SEQ ID NO: 997871 - DNA, 120 bp, Artificial Sequence
  ENSG00000228302_15 (sequence is synthesized)
gtctgaagaacaagcagtcagtcagtagactggaaaggtttacattgtatctgtcttaaaaatgttgtacctgctcttgagcgtcaacttcactaaaatcgccgtttaagttgttctcag

SEQ ID NO: 997872 - DNA, 120 bp, Artificial Sequence
  ENSG00000228302_16 (sequence is synthesized)
aagtgctgggattacagacataagccacgtcgcccggccagaaagatattcttcatattattctaatcttaaaaatcttctcacttatttcaaaagatcatctgtctatatcccatctga

SEQ ID NO: 997873 - DNA, 120 bp, Artificial Sequence
  ENSG00000228302_17 (sequence is synthesized)
tcacttatttcaaaagatcatctgtctatatcccatctgagaaagggccgcctgtctgaatagacagagatctaaagggagggccccctgtgaatgaagagagaagggacccagtaaagc

SEQ ID NO: 997874 - DNA, 120 bp, Artificial Sequence
  ENSG00000274605_0 (sequence is synthesized)
acaggggcgtgcgtgagttccggcggcctgcaccgggcaaaccccgtaccttcccagcatcggctcagcaacccacgtgcatccaggccggtcaatgtcattgagtcacctccgcgcctt

SEQ ID NO: 997875 - DNA, 120 bp, Artificial Sequence
  ENSG00000274605_1 (sequence is synthesized)
ggccaccctggagtcccgagaatccgaagttccagacaaatgcccaaactacattcctgcatgttcgaaagcgtaaattgcaaagcacaaatccagttgtagattgtggccgggagcagt

SEQ ID NO: 997876 - DNA, 65 bp, Artificial Sequence
  ENSG00000274605_2 (sequence is synthesized)
atagattgtaaggaaaatacccccaaggaagttgaggacacagcagacttggactgtctccaaac

SEQ ID NO: 997877 - DNA, 120 bp, Artificial Sequence
  ENSG00000274605_3 (sequence is synthesized)
aggaagttgaggacacagcagacttggactgtctccaaacctgttcattcttctgagtgcactgctcggagcatcctattgggcagcatatcctggcctcctttccagttcgatgtggta

SEQ ID NO: 997878 - DNA, 120 bp, Artificial Sequence
  ENSG00000274605_4 (sequence is synthesized)
ctatacctgatttctggccaataaaatatgagaggacatgaaattcaacagcccctgggcttggcttataaaaccttccatgcaatcctccacaccttttcacctctcagctgctgagac

SEQ ID NO: 997879 - DNA, 120 bp, Artificial Sequence
  ENSG00000274605_5 (sequence is synthesized)
ttttctaggcactacacagaagcagcctgggtctccagtagcaaaggagagcagatccttctcactatcctgcaccgaactgtgacatgagcaaaaaataaagtttttattttcttacac

SEQ ID NO: 997880 - DNA, 120 bp, Artificial Sequence
  ENSG00000274605_6 (sequence is synthesized)
ccttctgcctcctgaccaatcctgatacttcactctatggccctatgtgtcatgatgtggccccttctcttcaggaactggccacctggatctgcctatacaggaggaaaaataaagcca

SEQ ID NO: 997881 - DNA, 120 bp, Artificial Sequence
  ENSG00000274605_7 (sequence is synthesized)
ccaacttttacacagccctgctaatcatggaagtgtgtccaggcttcaaataacttgagttttaatttcttaaattaaaattgggaaatatatttaatatttaatactaagctttaaaac

SEQ ID NO: 997882 - DNA, 120 bp, Artificial Sequence
  ENSG00000274605_8 (sequence is synthesized)
tacagaagacaaaaaataaaatagaataaaaataaaggctttctcttccagagttatatactgaaatgtttatagataccattatttcatggctggggtttgcttcataataatctggag

SEQ ID NO: 997883 - DNA, 120 bp, Artificial Sequence
  ENSG00000274605_9 (sequence is synthesized)
ttgaggacagtgggtggcagctaactggaccaagattgaccatgagttgacaattgttgatgctggatgataggaaatgaaagttcactattctgttctgtatgcttttgtgtatgtttg

SEQ ID NO: 997884 - DNA, 120 bp, Artificial Sequence
  ENSG00000274605_10 (sequence is synthesized)
aagtttttcatggaatacgaatgaactatacacaacagggaatgaatctcacaaatattaagccaaacaaaagaagctggaccaaaaaagcaagcatacagtatgattccatttatataa

SEQ ID NO: 997885 - DNA, 88 bp, Artificial Sequence
  ENSG00000274605_11 (sequence is synthesized)
accaaaaaagcaagcatacagtatgattccatttatataaagtttaaaacaggcaaaacaaatccatgatgttagaaatcagaataat

SEQ ID NO: 997886 - DNA, 120 bp, Artificial Sequence
  ENSG00000274605_12 (sequence is synthesized)
aggtgagtggatcacctggggtcagcagttcgagaccatcctggccaacatggttaaaccctatcttgactaaagatacaaaaattagctgcacgtggtggcaggtgcctgtaatcccag

SEQ ID NO: 997887 - DNA, 120 bp, Artificial Sequence
  ENSG00000237262_0 (sequence is synthesized)
caatggggagattcccaagcagaggaaggagactcagctattggacagtcaaagaaatcatgaaggtctactatatgtatttccactcctgacctaactgaatataactgtaaaaccatc

SEQ ID NO: 997888 - DNA, 120 bp, Artificial Sequence
  ENSG00000237262_1 (sequence is synthesized)
accaactctaactatcttaatctatttattgagagtgtatcagagcttgcagaaccaacccaatgtgtgggtttgggtgtggagagcaaacacagtagtcctgaaggctggaaagctggt

SEQ ID NO: 997889 - DNA, 120 bp, Artificial Sequence
  ENSG00000237262_2 (sequence is synthesized)
ctttcacctggaatgggtgggcttggacatcacctctgcattgctggactgtggtatggtctcacaccacaagaagatttaagcaaccttattaacttaataaagatttaaagacgttga

SEQ ID NO: 997890 - DNA, 120 bp, Artificial Sequence
  ENSG00000237266_0 (sequence is synthesized)
gcctgttgctgaagattcagaactagcagcaacaccaaaacaaaaagatcaagctggggtgacattgtaacgagaacttctcagctggagttaattgatttgaacaattcaagtccacca

SEQ ID NO: 997891 - DNA, 120 bp, Artificial Sequence
  ENSG00000237266_1 (sequence is synthesized)
cacatagtttttgaacggctgcgatgttaagaggagaccaaaggctgtgagatggagaaaatagaattcactgaatgtcaagggacttgcccagggacacacagtgttgtgctttctcca

SEQ ID NO: 997892 - DNA, 120 bp, Artificial Sequence
  ENSG00000237266_2 (sequence is synthesized)
ttacacagtcacctaattgaagattggccccaaatcttatttatcttggtgtcctattggctaatggccatgcctcacacataataagtattgagaaaatgattgttgattaaatgaatg

SEQ ID NO: 997893 - DNA, 120 bp, Artificial Sequence
  ENSG00000237266_3 (sequence is synthesized)
ggaggctaactccaaacgttaacaatgacaacaaggcagtcagagccctggagagagatgcactcctcaacattgcctgttgctgaagattcagaactagcagcaacaccaaaacaaaaa

SEQ ID NO: 997894 - DNA, 120 bp, Artificial Sequence
  ENSG00000237266_4 (sequence is synthesized)
gatcaagctggggtaacctgggaaggatgcctcctcccgctccctctcctccttatccagggtcccttccagcttctccagggtgccttccaaggtcccttttagcttctccagggtccc

SEQ ID NO: 997895 - DNA, 120 bp, Artificial Sequence
  ENSG00000237266_5 (sequence is synthesized)
cttcaggagtgaagtggactgggtgcacagcctgtgctccaccccaggagcctggcagtgctgagaggagagtgtgtcacaccccacgggagggaccttttgccactggggacaatgcat

SEQ ID NO: 997896 - DNA, 120 bp, Artificial Sequence
  ENSG00000237266_6 (sequence is synthesized)
ttgggacacttatctatcagcaggaagttaagataccccagctgggaacagctttaaaagtaaaaagttatctattatgacatccgaggggattgcatcaattaattcgttaaatctatt

SEQ ID NO: 997897 - DNA, 120 bp, Artificial Sequence
  ENSG00000237266_7 (sequence is synthesized)
ggtgctcctggaactttggagactttgtgtacagtggagaaaactctggacatgagttacttaacctggttttgaacctcattcctgcctttagagatctagtgtgtctgggcaaactac

SEQ ID NO: 997898 - DNA, 120 bp, Artificial Sequence
  ENSG00000237266_8 (sequence is synthesized)
aaaactcctggtgtagtgtctggcaagcagaggtatactaattcaagtcctgattgagttattagggcacattatcttaccaaaatagtaagtgttagaatcttacaagaactcagaatc

SEQ ID NO: 997899 - DNA, 120 bp, Artificial Sequence
  ENSG00000237266_9 (sequence is synthesized)
aaggttaaaaaggaacaagaaacaccaaccgttcaggacaaagactctcgatattatttaacttgaaggtgacattgtaacgagaacttctcagctggagttaattgatttgaacaattc

SEQ ID NO: 997900 - DNA, 120 bp, Artificial Sequence
  ENSG00000237266_10 (sequence is synthesized)
acccagagacaaaataaaggccagacattcttctggatttctcctttttgttcctacaacttgacaaaataatatgttctccagcaaaatgataatacttgatatttcctggaaacatta

SEQ ID NO: 997901 - DNA, 120 bp, Artificial Sequence
  ENSG00000237267_0 (sequence is synthesized)
aggtgggattgaacagcagcctcttttagtgggctttctttacaaaacccaacgactctacctctctgcttgctaagcatgtgaacttatcatctaatggggaatgcaagactcactctc

SEQ ID NO: 997902 - DNA, 120 bp, Artificial Sequence
  ENSG00000237267_1 (sequence is synthesized)
cagtaaacctagaaaacttagataaccttgcttctcatctaatgagacagatatattcttctctccagaagacaggtgtaacatggattccatgccactgggcaactgttcaactgccct

SEQ ID NO: 997903 - DNA, 120 bp, Artificial Sequence
  ENSG00000237267_2 (sequence is synthesized)
gaagaaacggtgtacgtatcacaagtatcacaaagggctgctgggtccactgagtgattgttttgcattaggtgagactgtttcgaagccatgatgtttcacaagtctctgattctatat

SEQ ID NO: 997904 - DNA, 120 bp, Artificial Sequence
  ENSG00000237267_3 (sequence is synthesized)
gtgctgtttgctttggagtgaaattacttcctcatgcttagcaccaccattgcctgattcctgtctgcctggaatgattatctccatcttcaatttgcaagtgaagaaactgagctatag

SEQ ID NO: 997905 - DNA, 120 bp, Artificial Sequence
  ENSG00000237267_4 (sequence is synthesized)
ggccatggcactaacaggttctctggaaagcagtggctaagatggagtcagaaatagaaaagcttattgtggattaattcctggggtgtgatggctcatacttgtagtcccagcactttg

SEQ ID NO: 997906 - DNA, 120 bp, Artificial Sequence
  ENSG00000237267_5 (sequence is synthesized)
ggaggctggggctggggctttgcttgagcccaagagtttgagaacagcctgggcaacactgggagaccctatctttacaaaatatacaaaaatttagctggttgtgatagcacacacctg

SEQ ID NO: 997907 - DNA, 79 bp, Artificial Sequence
  ENSG00000237267_6 (sequence is synthesized)
aatatacaaaaatttagctggttgtgagaaggatcgtttgagcctgggagctcaaggctgcagtgagccatgatcatgc

SEQ ID NO: 997908 - DNA, 120 bp, Artificial Sequence
  ENSG00000237267_7 (sequence is synthesized)
cagaccaccatgcagacttgacaaggtctctgcacagtcccagaagaaacaaagcaaagactgcccactagaggagtccccttttgaaggaaatgcctggacccttttttctctaccatg

SEQ ID NO: 997909 - DNA, 120 bp, Artificial Sequence
  ENSG00000237267_8 (sequence is synthesized)
actgagtagcaactccattcttgaaagggaacctgagaaacctatctctatgtctgccacaggtggtaaacttttccactgtcatgaatagtagcaagtggcaggaacaggatttgaatc

SEQ ID NO: 997910 - DNA, 120 bp, Artificial Sequence
  ENSG00000237267_9 (sequence is synthesized)
caggtgatatgattccagctccagtgttctcatccactgcttactccagttgtgtctagcatagagatgccggagagaaattacaggggtgttgtctccatgtcttctgtgaagagcact

SEQ ID NO: 997911 - DNA, 120 bp, Artificial Sequence
  ENSG00000237267_10 (sequence is synthesized)
ctcttagcctaatgcctcctcagggacctcgaactttgatctctgaactgcgtcctcccagggcccagagggaagatcaatcactcaggcatctcccaggacaccaggtcaagtggcaga

SEQ ID NO: 997912 - DNA, 120 bp, Artificial Sequence
  ENSG00000237267_11 (sequence is synthesized)
agttcatcctctgggattctttgtcctctgtaacatcgattgtcaacttggcaaagccagcttgacaataccagagtctttgtgtacaatccatagacagcactgggaagagcaaaccat

SEQ ID NO: 997913 - DNA, 120 bp, Artificial Sequence
  ENSG00000237267_12 (sequence is synthesized)
gagaggccagcactaaaccctcagggtagctaaagaggaagcatggtaagacctcattctgcagcagaaaaaaacaaacaatctgctctacatgtacccagcatcatgtgaacatgaacc

SEQ ID NO: 997914 - DNA, 120 bp, Artificial Sequence
  ENSG00000237267_13 (sequence is synthesized)
agttgagtatcgcctgggcctctgtttgctcatctgtaaatgggctggttgccccttcttgcaatggacaagcctgcatccgcagagttcgagtcctgtgtcttgtgtccttgccacatc

SEQ ID NO: 997915 - DNA, 120 bp, Artificial Sequence
  ENSG00000237267_14 (sequence is synthesized)
ctcctctgggagcactccgcaaaagctgttattgttagcccccttctctcaacctccccaatcattgcacactcatagacaaaggacaatctgatctttatgtgaccaagataaaatttg

SEQ ID NO: 997916 - DNA, 120 bp, Artificial Sequence
  ENSG00000237267_15 (sequence is synthesized)
atgggagatcagcaagacataaaggaaggttcttaaatgacatatttatcccaacattgttctgggaagaaaagtatccattgtaaaaactaaacatgtctgattaaatgataaatgcag

SEQ ID NO: 997917 - DNA, 120 bp, Artificial Sequence; identical to SEQ ID NO: 962524
  ENSG00000280614_0 (sequence is synthesized)

SEQ ID NO: 997918 - DNA, 120 bp, Artificial Sequence; identical to SEQ ID NO: 962525
  ENSG00000280614_1 (sequence is synthesized)

SEQ ID NO: 997919 - DNA, 120 bp, Artificial Sequence; identical to SEQ ID NO: 878226
  ENSG00000280614_2 (sequence is synthesized)

SEQ ID NO: 997920 - DNA, 87 bp, Artificial Sequence; identical to SEQ ID NO: 878227
  ENSG00000280614_3 (sequence is synthesized)

SEQ ID NO: 997921 - DNA, 120 bp, Artificial Sequence; identical to SEQ ID NO: 878228
  ENSG00000280614_4 (sequence is synthesized)

SEQ ID NO: 997922 - DNA, 120 bp, Artificial Sequence; identical to SEQ ID NO: 878229
  ENSG00000280614_5 (sequence is synthesized)

SEQ ID NO: 997923 - DNA, 71 bp, Artificial Sequence; identical to SEQ ID NO: 878230
  ENSG00000280614_6 (sequence is synthesized)

SEQ ID NO: 997924 - DNA, 120 bp, Artificial Sequence
  ENSG00000226833_0 (sequence is synthesized)
acaggagactgtttaggccatgcctggcatcagtaactcaggctgtttcccacactacaggccagcactgtgggctctcagtttattgggaaatggaaataagagggaaggacaaaagtc

SEQ ID NO: 997925 - DNA, 120 bp, Artificial Sequence
  ENSG00000226833_1 (sequence is synthesized)
cactgggaagcagactggacagaaaggaactctgagcagctaaactctgactaatcccagggtatacctgcgttttctcttcaccagatttttcctaccaggaagagcatgtgctgacca

SEQ ID NO: 997926 - DNA, 120 bp, Artificial Sequence
  ENSG00000226833_2 (sequence is synthesized)
acagacatgaatttcagcctggtagttacaacattcacagacaaactgcggcctggaccagctggtgaaacataattctgaatcctgcccacagccttcggtggttttggatgaaaggcc

SEQ ID NO: 997927 - DNA, 120 bp, Artificial Sequence
  ENSG00000226833_3 (sequence is synthesized)
agcgccttgggagccctgcgtttgatttcaagttttaaggccggcactggtggagcaatgaatggtgaaagctctccccttaaaggagcacagttgcctttaggtgactgctaactcagg

SEQ ID NO: 997928 - DNA, 120 bp, Artificial Sequence
  ENSG00000226833_4 (sequence is synthesized)
cttttgctgaggacagtgtttactttgtgagcttaatgacagggctggctttctgggagtgttgcaatgaaacagactcagacacaggccatcatgggcctcctccctagcaaggccgcc

SEQ ID NO: 997929 - DNA, 120 bp, Artificial Sequence
  ENSG00000226833_5 (sequence is synthesized)
acggctggcatctcaagagcagtccgttgaacttgggatttgggtgtgagacacagtttcatcagaagaatttaaaccaaagtctacatttgccctctagataaatgtgtgtgttcagca

SEQ ID NO: 997930 - DNA, 120 bp, Artificial Sequence
  ENSG00000226833_6 (sequence is synthesized)
agttaaaaatattctggtagaatttgaaggtaccatagagattacctacagatggaaaaaactgaaggtcagagatgggaagtgccttgtccaagatcacacagcatataagggaagaag

SEQ ID NO: 997931 - DNA, 89 bp, Artificial Sequence
  ENSG00000226833_7 (sequence is synthesized)
agtgccttgtccaagatcacacagcatataagggaagaagtaggactgaaatccagatttctctgttcctgttcctgttttctcttttc

SEQ ID NO: 997932 - DNA, 120 bp, Artificial Sequence
  ENSG00000226833_8 (sequence is synthesized)
ctccaactcttaggctccagagaccatcctacctcagcctctttagtagctgagatcctggctattttttatttttggtagagatagggtttcaccatgtggcccagtcttgtcttgaac

SEQ ID NO: 997933 - DNA, 120 bp, Artificial Sequence
  ENSG00000226833_9 (sequence is synthesized)
tcctgagctcaaacgatccacccaccttggcctcccaaagcgttgggaatatagtgtgagccactgcacccggccaggtcctggtctcttttcattattatacagctgtcaacaatcatg

SEQ ID NO: 997934 - DNA, 120 bp, Artificial Sequence
  ENSG00000226833_10 (sequence is synthesized)
gagagttctttttcccttttgttgggttcttgttcctttgcaaagtctataaagaaccaagatgatccaggaaattcagggagtcctcattcacttccaaaggcagtttgttgtctgttg

SEQ ID NO: 997935 - DNA, 120 bp, Artificial Sequence
  ENSG00000226833_11 (sequence is synthesized)
gctgtgctgtatgaattgctgtttcaattaagtttttcaacatttcctatgaaggcatgcaaatgaccactgattctaaataaacccatttaggtattcagggtttataaatatagagaa

SEQ ID NO: 997936 - DNA, 120 bp, Artificial Sequence
  ENSG00000226833_12 (sequence is synthesized)
aggcaccaggtcagtccaattctaaagccctggctggaatacccaggcagtgtgatttagagatgctgggctagttaggtggactagctctgggactctgttgtgagaaaaagtgagtgg

SEQ ID NO: 997937 - DNA, 120 bp, Artificial Sequence
  ENSG00000226833_13 (sequence is synthesized)
cgatggggtggggcagcggatgtaacttgatggcaaggattgtcaacttacagcaggaaaattttgggtgaggaggagcagaatatgggtggttctggcagcgagacagtcttcaggaat

SEQ ID NO: 997938 - DNA, 120 bp, Artificial Sequence
  ENSG00000226833_14 (sequence is synthesized)
gagaaggagaggtcatccccagctacctccaggagaaagatttttcctaccaggaagagcatgtgctgaccaacagacatgaatttcagcctggtagttacaacattcacaggagtttca

SEQ ID NO: 997939 - DNA, 120 bp, Artificial Sequence
  ENSG00000226833_15 (sequence is synthesized)
ccactgtgcctggtccattaaaaacatttgtaaagctatggtgttgataaagtattatgaaagactgcaaaaaaagatggctaatttttagttattattgcacatgtttagaggagctaa

SEQ ID NO: 997940 - DNA, 120 bp, Artificial Sequence
  ENSG00000226833_16 (sequence is synthesized)
tgacattttctatgattaataaaagacattatttatgtttttatttatgtattccacaacatttattttattttctccatttcaggaaaaccactatgttgttacaataaagattttcat

SEQ ID NO: 997941 - DNA, 120 bp, Artificial Sequence
  ENSG00000226833_17 (sequence is synthesized)
gtaatttgtgttcaattgatagtaataatgtaacaagttaaaaatgaaggtaattgtgtttaaaatttgagcatattttcatcaaaatgtaagttaaagtgattgtaaattttaagatca

SEQ ID NO: 997942 - DNA, 120 bp, Artificial Sequence
  ENSG00000226833_18 (sequence is synthesized)
cctcattctttctgtcttccctggcattcttccctctatccacctccactgagatgcatttttataaaagactttacttaggacacatattttgatgaaatccttaacatttttcttctt

SEQ ID NO: 997943 - DNA, 120 bp, Artificial Sequence
  ENSG00000226833_19 (sequence is synthesized)
tcccaatttttatattatcattgttataatgcattacaataatttatattttgcaaatttgttttaatatgttaattttgcaatgtaactatctcaaggcttctaatgaggagaggagga

SEQ ID NO: 997944 - DNA, 120 bp, Artificial Sequence
  ENSG00000226833_20 (sequence is synthesized)
ggccacagataggactagatagagagacttttaaagatgtgggtagggtgtttgtgaatgtctgggcagtggaatatttatgcagcactgtgggtgttttgaaccctctggaaactaaca

SEQ ID NO: 997945 - DNA, 120 bp, Artificial Sequence
  ENSG00000226833_21 (sequence is synthesized)
agcaagctccacacataaacttggtggaagtcctccaaactttggacaacacagaggcctttcagaagtctgaaccaagtccaagtcaaattacagcccagggcactggtgcaaatgaga

SEQ ID NO: 997946 - DNA, 120 bp, Artificial Sequence
  ENSG00000226833_22 (sequence is synthesized)
ggctgagcagatcagaggaaatgacacttgtccaggaccccagaaacccagggcctggtgccgggtctaccacttagcagtaatttccttgtcagtaaaaagggatgataatagctctta

SEQ ID NO: 997947 - DNA, 120 bp, Artificial Sequence
  ENSG00000226833_23 (sequence is synthesized)
cctcatggagttgcactgatgagaaaaataaaataatgtatgtaaagtcctgagcacaatgcctgccatataatagcacttattatttgtatgagatgccaataggcttttggagaaaaa

SEQ ID NO: 997948 - DNA, 120 bp, Artificial Sequence
  ENSG00000226833_24 (sequence is synthesized)
ccccgccgaggctcccctcgacgcctgggccgccgcgcaaccgcactggagcggcttctcccgctgccgtcttcgcgcaggtgcgtcgccctctctccacgtccacggcgccgagtctcg

SEQ ID NO: 997949 - DNA, 120 bp, Artificial Sequence
  ENSG00000226833_25 (sequence is synthesized)
ccacggtggcgcaggcgccagggaggttccccggctttgccgcgcggaggaagtcccggttacgcagagcgcgctggggcagggctgaccttcccctttctctacttcactggcctcctc

SEQ ID NO: 997950 - DNA, 120 bp, Artificial Sequence
  ENSG00000226833_26 (sequence is synthesized)
cagacgtggtggttgcgccctttcggcctcgctttccgttttttggcttcatcccctagatctgcaaacagttcctcgtgtttcttccgttagccgggaaacgcgaactgcagcgtttgg

SEQ ID NO: 997951 - DNA, 120 bp, Artificial Sequence
  ENSG00000226833_27 (sequence is synthesized)
gacccgggtttgcgcgtgtggaaagcaaaaggggttactctgctggagttcgacattgcaaataaaggtctttatccccggcggttctacaaaattagttctgcagggattctggttgaa

SEQ ID NO: 997952 - DNA, 120 bp, Artificial Sequence
  ENSG00000226833_28 (sequence is synthesized)
agaagcgttaaagtgggccttgtaggagtcagcaataatccaattttacatgggtgcaggtggctgcctgtgtctagcgctttcacacatctcatatcttcatccacgccgtgggtattt

SEQ ID NO: 997953 - DNA, 120 bp, Artificial Sequence
  ENSG00000226833_29 (sequence is synthesized)
tttttccacggtgtgtttctgttgctgcctccagtatattgcttaatcatcctacctggtaattatttatgcatttttctcctactctcgactcagctcctagggaataaaaacacatta

SEQ ID NO: 997954 - DNA, 120 bp, Artificial Sequence
  ENSG00000226833_30 (sequence is synthesized)
acttatctttgtgcccacagcacccaccaagtatttccatcacgtaatactgcctctagaaaggcaggaggagaagcagtcacgctaaggatctaggcaagccagatcttttgtccggtt

SEQ ID NO: 997955 - DNA, 120 bp, Artificial Sequence
  ENSG00000226833_31 (sequence is synthesized)
ttaggaggtggccagcccttacttattccacaagtgtttttccagaaactcagacttgatattgcctcaagtccaaggcagtgtgcttcccccactcacatatcactaatagtagctaac

SEQ ID NO: 997956 - DNA, 120 bp, Artificial Sequence
  ENSG00000226833_32 (sequence is synthesized)
atttgttcagatccctgtatgtactctgccactgttttaaatgttacacccgggttacctcatttaatccttacaactgccctgtgaggtaggtactattattatctctactttgtagat

SEQ ID NO: 997957 - DNA, 120 bp, Artificial Sequence
  ENSG00000226833_33 (sequence is synthesized)
gggattcaccgaggcacagacggttaaaaaacctagcccaaataacacaaataaacagcagagcatgcagtgctagagtctgcattcttaacaattgctatattctccctctccgtgaat

SEQ ID NO: 997958 - DNA, 120 bp, Artificial Sequence
  ENSG00000226833_34 (sequence is synthesized)
gtgggctgagatgctgaaacaggcatgtgctgtgggggagaaaaagctttgtccaaccaagtgctttctaatgtccagatgacatagagctaggatttcctaatgtcttttttcccctat

SEQ ID NO: 997959 - DNA, 120 bp, Artificial Sequence
  ENSG00000226833_35 (sequence is synthesized)
ttttctctccatttcagggttgagtttgtgcatcgattgtgaacacaacaggcagcaggctataatggtggtcctggctggagtagttttcacagacttcagtaatctgtggagatgaac

SEQ ID NO: 997960 - DNA, 120 bp, Artificial Sequence
  ENSG00000226833_36 (sequence is synthesized)
gggcagttctctgtagttttcacagatcactgccagttcgttttgaggccttcaggagtgaagacctggctcatcatcactctttgttgttttgttaaatttatttacaccctactttat

SEQ ID NO: 997961 - DNA, 120 bp, Artificial Sequence
  ENSG00000226833_37 (sequence is synthesized)
tccagaggaaaggatttaacgtagtttacataaatgtgtacatcagggtaaattaaaaataagtacagagaaaaataggacaaaagaaaaccgtgagtgtgaaagataagattaagccag

SEQ ID NO: 997962 - DNA, 120 bp, Artificial Sequence
  ENSG00000226833_38 (sequence is synthesized)
atatgactctcagttttctagcaaccaagaaaaagatcagttgcaatcggagtaggtgttttggctaagctggaactaggacttgaatatagcagcttgtagagttataccacttgccca

SEQ ID NO: 997963 - DNA, 120 bp, Artificial Sequence
  ENSG00000226833_39 (sequence is synthesized)
aatctcttccatgagcctctttaagtgtaacagaatgcctgggagcacgtaaatgctcctacttagatgcctacttagcctctaattttcatggggcccatgaatcccatgaaaaagaac

SEQ ID NO: 997964 - DNA, 120 bp, Artificial Sequence
  ENSG00000226833_40 (sequence is synthesized)
tttgaaccctgtccacaattagagttcaggtatacgcagacatgtttaaagacaagggacacccaaaggaaagattgcacagagagaaagtgagcatccgagagaaaatcaccacaagtg

SEQ ID NO: 997965 - DNA, 120 bp, Artificial Sequence
  ENSG00000226833_41 (sequence is synthesized)
aggcagagggaggccggtctcagcagagttttggaggtcgtgagaagaagaggtaggagataggagagtggttccgagtacttgcctgctgatgttaccttctccacccccaccaggttt

SEQ ID NO: 997966 - DNA, 120 bp, Artificial Sequence
  ENSG00000226833_42 (sequence is synthesized)
tccagtgcctggagtcttgggcaggaatgggccactgtaagaaagagctttatcactagggcctcagccaacttttctgtgggatatccctccaaaataattaagagttcagaatgcttc

SEQ ID NO: 997967 - DNA, 120 bp, Artificial Sequence
  ENSG00000226833_43 (sequence is synthesized)
agattttgaagtgaaactggtacatatattaagtgttacttaataacccgatagtttctagggcagctcaccataatcccaagtattagccaccaccctcacccccttcagagtaaaatg

SEQ ID NO: 997968 - DNA, 120 bp, Artificial Sequence
  ENSG00000226833_44 (sequence is synthesized)
tgtttcctgaaggaagttgggaaaatgaagaaaaaaaatacaaaaatcacctataatcttaccagtcatagatggcagttttcctgtcttatttctgaataatggttgttaaacatttgc

SEQ ID NO: 997969 - DNA, 120 bp, Artificial Sequence
  ENSG00000226833_45 (sequence is synthesized)
cagcacaccataaggcttagggaggcatctgggtcatgcatgttaatatccttgggtaattccagaaatctctatgaagggaaactcctgttatttatctagacttcctgattgcaaggg

SEQ ID NO: 997970 - DNA, 120 bp, Artificial Sequence
  ENSG00000226833_46 (sequence is synthesized)
gtttgggcatcatgatttaggggtcttaataaaattattattttatttttactaatagataatgtctgtgcctatcagataaaggcaaaccagtgctcagaggaacccaaccatctctga

SEQ ID NO: 997971 - DNA, 120 bp, Artificial Sequence
  ENSG00000226833_47 (sequence is synthesized)
attgagaccagagagctgtctctatggatagtccttagagaaggcatttcggaacacagtaaacagcagcctggtgactccgattacagggccagttgcctttgttacaataaaagcaag

SEQ ID NO: 997972 - DNA, 120 bp, Artificial Sequence
  ENSG00000226833_48 (sequence is synthesized)
agacatgaatttcagcctggtagttacaacattcacagtatacccacatcactaagctgggaggcacattttgagacccagaatcctgacacctccatgccttcaaaaggacaaactgcg

SEQ ID NO: 997973 - DNA, 120 bp, Artificial Sequence
  ENSG00000226833_49 (sequence is synthesized)
agtccactgggaagcagactggacagaaaggaactctgagcagctaaactctgactaatcccagggtatacctgcgttttctcttcaccagtatacccacatcactaagctgggaggcac

SEQ ID NO: 997974 - DNA, 120 bp, Artificial Sequence
  ENSG00000255007_0 (sequence is synthesized)
ggttgctgctctccatgagctgttccaactgtgaagcaaaagcttcatgcataaaggcatcccaacgcagtcaatgacgcacaggagaaagaggacagagataagcttcttgcctgttcc

SEQ ID NO: 997975 - DNA, 120 bp, Artificial Sequence
  ENSG00000255007_1 (sequence is synthesized)
ggcatcggttagaaggagtctagtccctgatggtcactgagctgcagaaccagcctgggctgcttcctgctggatgtcacttactagagagcgaaattaaatgtgcttcagctactgtta

SEQ ID NO: 997976 - DNA, 120 bp, Artificial Sequence
  ENSG00000255002_0 (sequence is synthesized)
tcatattagaaggcagagaatggaaaatacacatacacattctcctttaaaaaaaaaaaatacaaggagccttgagaaatggacatgatccgtgtatttcttgacctctgagataccatg

SEQ ID NO: 997977 - DNA, 120 bp, Artificial Sequence
  ENSG00000255002_1 (sequence is synthesized)
gctaatcccaaccaacctgcagaaatactgcttctggaagttccatttgcctccattctgagtgcttattaaccctgaaacttttgtcagctcaggaaaaagcaaaaggttctaaactaa

SEQ ID NO: 997978 - DNA, 120 bp, Artificial Sequence
  ENSG00000255002_2 (sequence is synthesized)
ctggctgcgcagtggaacacccttgttcacctcctcactgggctcctgggcctccaactcctgcccttcaggttctaggcaatcaaagcaaaaatggacaaatgggatcccatcaagtta

SEQ ID NO: 997979 - DNA, 120 bp, Artificial Sequence
  ENSG00000255002_3 (sequence is synthesized)
aaagcaaaaatggacaaatgggatcccatcaagttaaaaggcttctgcacagcaaaagaaaccatcaacaaagtgaagagacaacccgcagagtgggagaaaatatttgcaaactaccca

SEQ ID NO: 997980 - DNA, 120 bp, Artificial Sequence
  ENSG00000255002_4 (sequence is synthesized)
actctataggaaaaaaatctaataatctgatcaaataatgggcaaaagatttgaatagccatttctcaaaagaagacatgcaaatggcagacaggcacatgattgatcatcagagaaatg

SEQ ID NO: 997981 - DNA, 120 bp, Artificial Sequence
  ENSG00000255002_5 (sequence is synthesized)
aggcaacaataaatgctgatgaggatgtggaaccctcatgcactgttggtgggaatgtaaattagtacaagcactctggagaagagtttggaggttcctcaaacaactgaaaatagagct

SEQ ID NO: 997982 - DNA, 120 bp, Artificial Sequence
  ENSG00000255002_6 (sequence is synthesized)
cctcaaacaactgaaaatagagctaccatatggtccagcaatcccactgctgggtatgtacccaaaagaaaggaaatcagtgtatcaaagagatgtctgcactcccatgtttgttgcagc

SEQ ID NO: 997983 - DNA, 71 bp, Artificial Sequence
  ENSG00000255002_7 (sequence is synthesized)
caacctaagtgtccatcaacagatgaataaagaaaatgtggtaaatatacacaacagagtactattcagtc

SEQ ID NO: 997984 - DNA, 120 bp, Artificial Sequence
  ENSG00000255002_8 (sequence is synthesized)
ctggaggtcattaatgttaaatgaaataagcaaggtacagaaagacaaacatcacattttctcacttatttgtgggatgtaaaattaaaaacgattgctcatggaaatagagagtagaag

SEQ ID NO: 997985 - DNA, 120 bp, Artificial Sequence
  ENSG00000255002_9 (sequence is synthesized)
gatgattaccagaggctaggaagggtaatgggcgttgaggggaagatggggaaagttaatgggtattaaatagaaagaatgaacaaggcctactatctgatagcaccacagggtgactat

SEQ ID NO: 997986 - DNA, 120 bp, Artificial Sequence
  ENSG00000255002_10 (sequence is synthesized)
tcctgacctcaggtgatctgcccacatcagcctccttaaaaataaaattctaaggcccccaaccatctgaatggacccctcctctcagccaagggcattccaaagttaacctggaaaatt

SEQ ID NO: 997987 - DNA, 120 bp, Artificial Sequence
  ENSG00000255002_11 (sequence is synthesized)
agccaagggcattccaaagttaacctggaaaattagttcaggccacagtgggaacaggagttgtacatgccccattataccctcctccctgtggaattcaggcacaactgaccagcatta

SEQ ID NO: 997988 - DNA, 120 bp, Artificial Sequence
  ENSG00000255002_12 (sequence is synthesized)
tgtggcaataagacaccaaattccagcctgactctaatatagcatcacatgacaacaggccctgaagaaatcaaaatactctattcttttactcacatattttgaaatggccctgcaaaa

SEQ ID NO: 997989 - DNA, 120 bp, Artificial Sequence
  ENSG00000255002_13 (sequence is synthesized)
ctgtctcttgtgggggaaatctacattcagtagagaatccctttccctttccacatcttttccctgatccaggagagaattaactaagagtctggcaccttttaagtctgataagaaaca

SEQ ID NO: 997990 - DNA, 120 bp, Artificial Sequence
  ENSG00000255002_14 (sequence is synthesized)
tcatctgcataataagaaccttggtctccataaccccttatcttaactcagatagtcccttctatggattccatacttttagataaactcttttaatcaattgccctgggaaaatctttg

SEQ ID NO: 997991 - DNA, 120 bp, Artificial Sequence
  ENSG00000255002_15 (sequence is synthesized)
agataaactcttttaatcaattgccctgggaaaatctttgaatgcacctgtgacctgaaagttctcctccccacacctcttcgagctgtcctgcctttccagacctgaccaatgtacatc

SEQ ID NO: 997992 - DNA, 120 bp, Artificial Sequence
  ENSG00000255002_16 (sequence is synthesized)
gctgtcctgcctttccagacctgaccaatgtacatcttagatattaattgatgtcttatttctccctaacatatataaaaccaagctgtagcctgaccaccttgggcacatgtcgtcagg

SEQ ID NO: 997993 - DNA, 120 bp, Artificial Sequence
  ENSG00000255002_17 (sequence is synthesized)
atcaggatgggtgtttcagttgatgcatgcgtttgatgtggttgtgtttcttttcctccgcctaaaagcagttattaaaatgatggcgtttgcagatctagatttgaaagaaaagaataa

SEQ ID NO: 997994 - DNA, 120 bp, Artificial Sequence
  ENSG00000255002_18 (sequence is synthesized)
gagttagcaatccggatgtgttttgtggaagattatgccctaagcccttagaagggaggacactgagtttgggaaaagtcactacctctgggcttcattttttgccctaaggcaatgagg

SEQ ID NO: 997995 - DNA, 120 bp, Artificial Sequence
  ENSG00000227938_0 (sequence is synthesized)
tgataattcacagcccggaaggaacactaccttatttagatgtgctgcccccagaggagggggaaagaaggaggaggagggggatttagaagcaggtagagtaaaaggagaagatagaag

SEQ ID NO: 997996 - DNA, 120 bp, Artificial Sequence
  ENSG00000227938_1 (sequence is synthesized)
gcaccggtgattctgagaattcaaggaccctggcttgtagctgtgtggaccccatactctcttcctatcccaaaccttcctattccaccagggtgcccttctacaagggccaggacctcc

SEQ ID NO: 997997 - DNA, 120 bp, Artificial Sequence
  ENSG00000227938_2 (sequence is synthesized)
tccaggccacagcagtcacctggatgatgagggctccaggaggcaccctcaaccctggaattctctttttcaaataagagatccaggtgagaaccgtgaggatgggcacttggacaggaa

SEQ ID NO: 997998 - DNA, 120 bp, Artificial Sequence
  ENSG00000227938_3 (sequence is synthesized)
ttggcccgagcagcaacaacgttggtcactcaagccttcaccaggttctgctccacacagaaggaaggaaagcccatctcatcaggccttgggcaccaacaacacaaatagttccttgct

SEQ ID NO: 997999 - DNA, 120 bp, Artificial Sequence
  ENSG00000227938_4 (sequence is synthesized)
agcaatacattttccgatatgtttttgcttcttcctctaacgtttaaccttgggtatatttcaaaagaaacgcaagtctgcttgcttctgattcatactcactgagatcatcaaaaccag

SEQ ID NO: 998000 - DNA, 120 bp, Artificial Sequence
  ENSG00000227938_5 (sequence is synthesized)
aattatttggtaatagctgctgggtttactggatgccctctgggatctgtaaaatctctattcctcagaaacaggaagtttcaacaagaggaaggaggctggttgcaaaaatcaaaattt

SEQ ID NO: 998001 - DNA, 120 bp, Artificial Sequence
  ENSG00000227938_6 (sequence is synthesized)
gaatcttctccacctattggagagcccagcgttcatggcacttccttcagccagttaacaaatgtggattcggtgcctactgtgtgcaggaactggggacagagatgattttttaagggg

SEQ ID NO: 998002 - DNA, 120 bp, Artificial Sequence
  ENSG00000227935_0 (sequence is synthesized)
tggatcaactccttcactttgcagatgaacaaactgaggctcaaaagatcaaaagattcacctaagttcactccattacactgagtccttgctcctgaaatggccctcttcctcacacag

SEQ ID NO: 998003 - DNA, 120 bp, Artificial Sequence
  ENSG00000227935_1 (sequence is synthesized)
tacagcctcattcctcactatcttctgggcacatctgtgagctgcctgctgatgccatcggctctttgttccaggaagccatctaattcccatggtggggaaccacagccagctccctta

SEQ ID NO: 998004 - DNA, 120 bp, Artificial Sequence
  ENSG00000227935_2 (sequence is synthesized)
atttagtcaatgagggtttggattcagttccctcacttactaggtgagagacctcaagcaagtcactaagcctctccaagcctcagtttccttgtatggaaaatgggtacaatactgcct

SEQ ID NO: 998005 - DNA, 120 bp, Artificial Sequence
  ENSG00000227935_3 (sequence is synthesized)
acctctataaactagtgtgaggattaagatgatgtgtacagagccagcacagggctgggaaaagaataaacccctaataacccatagctaggaggataaggagaaggttaatgtcaacat

SEQ ID NO: 998006 - DNA, 120 bp, Artificial Sequence
  ENSG00000227935_4 (sequence is synthesized)
tagcagtactaccagaattttatcttctctaagacaggcaaaggaaattctcactggtccatctttgagttttgaacttcgtatcttttgcatttaataataaaatagattactgccaaa

SEQ ID NO: 998007 - DNA, 120 bp, Artificial Sequence
  ENSG00000227933_0 (sequence is synthesized)
gaaagaggagggacagctggggccctaggagctccccctgagggtctgtccctgggaacggggcgctaggacgggcactccttctggctggaatgctacgccggtgagggaaaggagtcc

SEQ ID NO: 998008 - DNA, 120 bp, Artificial Sequence
  ENSG00000227933_1 (sequence is synthesized)
actagggaagtacctggaggtggagacggggagagaaatcacagaaactcagtttacaaacgactgcttgggagcagtcatgtcacccagtccagagggagccggtcagctgcgttccgc

SEQ ID NO: 998009 - DNA, 120 bp, Artificial Sequence
  ENSG00000227933_2 (sequence is synthesized)
aactcccgggatgccgcgggccaggctgcatcccgcctgcgcagaagtggtggcaactccgcccctcgccaggcggcggcgctgcggactcagtcctaagcgggcgaaggcggcgagcgc

SEQ ID NO: 998010 - DNA, 120 bp, Artificial Sequence
  ENSG00000227933_3 (sequence is synthesized)
cgtgggtctgggcgggccaggagaaccgggtgcttcgaggagatctgcgggctgggttgggggcgtttgaccccttggcttgtcccagtgggtaggcgggactccaacccccgcctcctc

SEQ ID NO: 998011 - DNA, 120 bp, Artificial Sequence
  ENSG00000227930_0 (sequence is synthesized)
ggcccacactccccaagagctacatggttgtggggccgtgtggagtgaagaggtcaggaggagaaccaagtcaaggcagaaatgggatgagttacaccatcaaacataccacatgaagca

SEQ ID NO: 998012 - DNA, 120 bp, Artificial Sequence
  ENSG00000227930_1 (sequence is synthesized)
tcgtctcaaatggatttccagtgaattaagaaaaacttggatataatatttcttgtatttccactgagctcataaaagcccaggttttagtctgaaaacattgcagatagtaagacagtt

SEQ ID NO: 998013 - DNA, 120 bp, Artificial Sequence
  ENSG00000227930_2 (sequence is synthesized)
aaggattgcaccgagctctgccagtacgggcacagggtggaaaatgcatgcacttcagaggctgctggcctagggagtcagaaacaactggactcaaatcccagctccaccttaatagct

SEQ ID NO: 998014 - DNA, 120 bp, Artificial Sequence
  ENSG00000227930_3 (sequence is synthesized)
atacaactttggagaagttgttcagtctttctgaacctcagttttctcatctctaaaatggaataacaattcttcagagttgtactaaatgagtcaataaacgtaaaagaatatattaaa

SEQ ID NO: 998015 - DNA, 120 bp, Artificial Sequence
  ENSG00000225269_0 (sequence is synthesized)
aagggagccagggagagctcacaggcacaagaataacgctgctgtgataataaacccactcctgggacagcaacattcatcccgtcatgagaacagagccctcattcatccattcatctc

SEQ ID NO: 998016 - DNA, 120 bp, Artificial Sequence
  ENSG00000225269_1 (sequence is synthesized)
atcataggggcagaaggattacatttctaacacatgaacttttgggggacacattcaatacctagcactcccaaaatattcactaagagtgagagtaaattgatttaatttcagactgtt

SEQ ID NO: 998017 - DNA, 120 bp, Artificial Sequence
  ENSG00000225269_2 (sequence is synthesized)
cttggcagtccataagtagagatttccaagttttacaatagagaattaaaatgattgaaaaatattctaaaaaaaaaaaaacaacctgcagaagaaagctagaaaatcagaagatgaaat

SEQ ID NO: 998018 - DNA, 120 bp, Artificial Sequence
  ENSG00000225269_3 (sequence is synthesized)
attttttaggcataaaatatgcatgcagtttatagacaatggagatgtgctaactcttgaaaacgtgcttcgacatctcaaattgcttaaggcttttgcaacaaaataacttaccagtgt

SEQ ID NO: 998019 - DNA, 120 bp, Artificial Sequence
  ENSG00000225269_4 (sequence is synthesized)
caggccatggtagaatatgagttcacaatgaatttttatgcctgggtttctgtgacccaagttatgctgaagaatatgagagacaccaccttttaaaaatttttacatagcctgcggcca

SEQ ID NO: 998020 - DNA, 120 bp, Artificial Sequence
  ENSG00000225269_5 (sequence is synthesized)
ttcgttaatccctttggaaaattgcttaagcctggcatgttttgtaatgaactttatctcttcactaccaaaagtcgtaaaaaggaacttcagtgaggaaagaaacacaattgataattg

SEQ ID NO: 998021 - DNA, 120 bp, Artificial Sequence
  ENSG00000225269_6 (sequence is synthesized)
ggaaagaaacacaattgataattgaatatttcaaagagatcagcattttagaaaactggacggaatctcactctcaccaggctggagtgcagcgagcaatctcggctcactgcagcctct

SEQ ID NO: 998022 - DNA, 120 bp, Artificial Sequence
  ENSG00000225269_7 (sequence is synthesized)
gcctcccgagtagctgggattacagctttttggattggctcacagttttcctacttttctgtcctgtcagttgagaagaatacatttcaagagatgctcttggaaaacacgtttgatgga

SEQ ID NO: 998023 - DNA, 120 bp, Artificial Sequence
  ENSG00000225269_8 (sequence is synthesized)
ttgatggagaggttgatttttgtaacctgtatgccgtagtcaggagggaaatttggacatggacacatagggaagacagccatgtggagacagaggcagaggtggacctgctgccgcaaa

SEQ ID NO: 998024 - DNA, 120 bp, Artificial Sequence
  ENSG00000225269_9 (sequence is synthesized)
accacagggcgccaagtactgtgggccactgagaaaactaaaggagaggaaggattcttccctggagctttggagagggtgcggccctactttcacctggatttcagacttcagacttcc

SEQ ID NO: 998025 - DNA, 120 bp, Artificial Sequence
  ENSG00000225269_10 (sequence is synthesized)
agaaccatgaaggaataagctctctttgtttcaaaaccactcagtcaaggcactttgttacaacagcctaggaaactaatacaggaattggtattagtaaaatcattattgttggctcat

SEQ ID NO: 998026 - DNA, 120 bp, Artificial Sequence
  ENSG00000225269_11 (sequence is synthesized)
atgccgtagtcagaagagccgtcctctggcagatatgtgaaagaactgcctatgaggagcgagaggctacttcgcacacctcgcagctcaggtccccggagacggctttacaggcacaca

SEQ ID NO: 998027 - DNA, 120 bp, Artificial Sequence
  ENSG00000225269_12 (sequence is synthesized)
agcccctctcccaagccatctgccaggagccccatgaggaacacagcacagcgcctgcatcagaagcccatgggtttgcctatcacatgtcttgttttctcctgatccgtggctcacagg

SEQ ID NO: 998028 - DNA, 120 bp, Artificial Sequence
  ENSG00000225269_13 (sequence is synthesized)
acctcctagatttccccatcagtgctatttgcagtgcccccaagcactttcctccactccagtccctgagcgcatgccaacggccctattttcagccacccctctccatgcctcttgtct

SEQ ID NO: 998029 - DNA, 120 bp, Artificial Sequence
  ENSG00000225269_14 (sequence is synthesized)
gtctctagctgacaagcagattatctcttctgtccactttgtttgccaatgtactttggcaccattgaattccaacacatgaagtaaactgaactgtgtacaacgctgagcacacacgtg

SEQ ID NO: 998030 - DNA, 120 bp, Artificial Sequence
  ENSG00000225269_15 (sequence is synthesized)
gtttggagagcagccccttgtcaggatccaaaatgttcccaagccttgttgatatttgggtcactgcagatctctgagtcccccttcctttttaatcttcttcccctcaactcattctca

SEQ ID NO: 998031 - DNA, 120 bp, Artificial Sequence
  ENSG00000225269_16 (sequence is synthesized)
atttctctctctgaaaccacctgtgaacacacttatgcattcaaatagatgcatactgttcatgcttatatttttctgtaaccgtcatatctaataaatacttatcatccaggaaaaaaa

SEQ ID NO: 998032 - DNA, 120 bp, Artificial Sequence
  ENSG00000225269_17 (sequence is synthesized)
ctaggtaatttatattaaaaagtttatttagctcatagttctagaggctggaagtccacagtgccggcatctgtgagggccttcttgctgcctcacctcatggcagagggcatcacatgc

SEQ ID NO: 998033 - DNA, 120 bp, Artificial Sequence
  ENSG00000225269_18 (sequence is synthesized)
gaaggattcttccctggagctttggagagggtaatgaactgtaacctcactggacgtgtaaacagactgtgacctacctactcttgtgccaatcatggagtttcagccaatcacaggcgg

SEQ ID NO: 998034 - DNA, 120 bp, Artificial Sequence
  ENSG00000225269_19 (sequence is synthesized)
ccggctgttcaaaccatgtttaaataaggcaaacgcagagctgtaagcaatctaggtgtttctgcacctctcgtccattttctgtaagtcctttttctgttcataaatcttcttccatca

SEQ ID NO: 998035 - DNA, 120 bp, Artificial Sequence
  ENSG00000225269_20 (sequence is synthesized)
cataagatgagcaacttaccaagtgcttctaattctacttgataaaatgatactccctaagccaccttgactgggtgtgaaagagggcaaataaaggcttaaatacaatatatcttcctg

SEQ ID NO: 998036 - DNA, 120 bp, Artificial Sequence
  ENSG00000225269_21 (sequence is synthesized)
atgagataactgcagacctatttgtgggagaaaattgctgcacataagcatttgtgtttgttttatattcactttaactgtgaagagggaaatgaagttcgagcggaagccatgagactc

SEQ ID NO: 998037 - DNA, 120 bp, Artificial Sequence
  ENSG00000225269_22 (sequence is synthesized)
tattgtaacagctcatgaaaaattacagctcaacatccaaacatacatctgtctgtgtccctatgtgaattaatacagtattttaaggccaacaacaaacacaaataaccaattctaaag

SEQ ID NO: 998038 - DNA, 120 bp, Artificial Sequence
  ENSG00000225269_23 (sequence is synthesized)
ctatgggaactactttctgctgataactgcaaaaacacagaaataataacataagtcatggaaaactatgtaagacccaaaaagataatggctagattatttcaaccaaggcttgctttg

SEQ ID NO: 998039 - DNA, 120 bp, Artificial Sequence
  ENSG00000225269_24 (sequence is synthesized)
gtattcatagaaataaatctaaagcatctgctctaatgtatcattaaacttttatcagatcatagtcagaatgcatgaggattaaaactccttttagctgaataaagcatgctaagatat

SEQ ID NO: 998040 - DNA, 120 bp, Artificial Sequence
  ENSG00000225269_25 (sequence is synthesized)
ggttgatttttgtaacctgtatgccgtagtcagctttgtggtcacctaatgattcaaaagacatttccgtaaatgcctggaagcaatcagtcttctagccttcgctgatgggttctgcat

SEQ ID NO: 998041 - DNA, 120 bp, Artificial Sequence
  ENSG00000225269_26 (sequence is synthesized)
atgagttcaggcatgccttcaggactccaccaggcacttggtaattctgccttatccttcactttttgcttgagcagcgccgaaaggtgagccagaggagggaaatttggacatggacac

SEQ ID NO: 998042 - DNA, 120 bp, Artificial Sequence
  ENSG00000282381_0 (sequence is synthesized)
ctttgtctctggctcaggccggagcctgagatccatctctactgtcccgcgtgttgcccctcgggagcactaggtgactttgtcacatcctctgttgccctgagatctggaggtactggg

SEQ ID NO: 998043 - DNA, 120 bp, Artificial Sequence
  ENSG00000282381_1 (sequence is synthesized)
aaatgcatagctaagatgccaggacatcctggaaaccaggaaatgtttgtctgcatcttgttattgggccacaagaacacacagccagacccagtttggtccaggaacaacatctggcaa

SEQ ID NO: 998044 - DNA, 120 bp, Artificial Sequence
  ENSG00000282381_2 (sequence is synthesized)
ctctcccaggggctattccatgtgcaaaaaccacatgtccctctcaccactggggaagaatggtgatcaggcaggagtggatgcactcaaaggggtcttgctctgtcacccaggctgaag

SEQ ID NO: 998045 - DNA, 120 bp, Artificial Sequence
  ENSG00000225263_0 (sequence is synthesized)
tttgatgctggtatccatatccctccttctcatcaacaacaaaaaggatgactacttaagattctgttgtcttaaaggctttattaagttattgcccaaggattatccatctgcaaaata

SEQ ID NO: 998046 - DNA, 120 bp, Artificial Sequence
  ENSG00000225263_1 (sequence is synthesized)
tttttcttcagctatggactgtatcaaagtttatgggctataattgtattttggtttctgccaggcatcaggatagctcatttgcatgactggtacaaaatttacttattcagtgaatca

SEQ ID NO: 998047 - DNA, 120 bp, Artificial Sequence
  ENSG00000225263_2 (sequence is synthesized)
tgctcagctgctgtactgttcaatctgtaataataactgcagggtgactgactaacgataactaatcttctctcaactacaaaagcatgtaaattagtaaaataaatgtttagttgtgta

SEQ ID NO: 998048 - DNA, 120 bp, Artificial Sequence
  ENSG00000225265_0 (sequence is synthesized)
ggaagtgacttctggaagtgacccaggaagtgacagtgagctgcctctctgcgattggttttgcccgagttttatttttgtctgtctcagctagaaagtgggagactttcatttaaaatg

SEQ ID NO: 998049 - DNA, 120 bp, Artificial Sequence
  ENSG00000225265_1 (sequence is synthesized)
gaaattggggcgaggggttggcggctgggcgaagggagcattcaaaagcggagaatgtcactttacccgagaaattcactacgatgggccattggtttctgctcggctcgcaggcgcact

SEQ ID NO: 998050 - DNA, 120 bp, Artificial Sequence
  ENSG00000225265_2 (sequence is synthesized)
gcacgagtggaggtgtggctagtggctgtgatgagataaatccatgcatagccttttcattgcgagcttgaaagttcttttctattacagttttagctttaggtttaattggttcgactg

SEQ ID NO: 998051 - DNA, 120 bp, Artificial Sequence
  ENSG00000225265_3 (sequence is synthesized)
ccttctccacaatttgggcgagaatttcctttgccttctcagcaaaagttgttctgcggacccgtctgggtcaactttcatgagggacattgagacaaacaaatgaaatatgggttaaag

SEQ ID NO: 998052 - DNA, 120 bp, Artificial Sequence
  ENSG00000225265_4 (sequence is synthesized)
tactctgagcagctacaaaaagaagaccagtctatcctgctggagacagtggccacgtgaagaaagagctcttgcagtatgaaagaccacatggaaagagaggccacatggaaccaacag

SEQ ID NO: 998053 - DNA, 120 bp, Artificial Sequence
  ENSG00000225265_5 (sequence is synthesized)
tcagcatcttggtttcggacacgtgaagaaattcatctcagactgtgtatcctaaatcaggcacttgctgaatctaactacatgagtgagaccagttgacaacacatggagcagacatga

SEQ ID NO: 998054 - DNA, 120 bp, Artificial Sequence
  ENSG00000225265_6 (sequence is synthesized)
gctgttctcagtgagtcctacacaaattcctgactcacaacactgtgagcaataaaatggttgttattttaagccactgaagtttgcagtgatttcttacataggaatagataaatgaaa

SEQ ID NO: 998055 - DNA, 120 bp, Artificial Sequence
  ENSG00000225265_7 (sequence is synthesized)
cacaaacattgatcatttgcatcttctatcttttttatgactagtcttattggaaattaccagtttatttctgccatggttagaaaacaaactctgaaattttgatactttaaaattttt

SEQ ID NO: 998056 - DNA, 120 bp, Artificial Sequence
  ENSG00000225265_8 (sequence is synthesized)
attgagcattgtgtccatcaatgtcaacgtgattaaggtggttaatagttgtcttcagatcttctatattgtattgattgttttatgtgtagtgttgctattaattattgatacaggagt

SEQ ID NO: 998057 - DNA, 120 bp, Artificial Sequence
  ENSG00000225265_9 (sequence is synthesized)
gtaaaacttaaactatggctgtgaatttgccacttactttagttttgtcagcttttcttttgcatttttgaagctctgttattgggcatataaacatttatggttcgtgtgtcttcctga

SEQ ID NO: 998058 - DNA, 120 bp, Artificial Sequence
  ENSG00000225265_10 (sequence is synthesized)
tgaattgaccattttatcattatgaaatgtctttattgctgataatactccttatcttgaagtctaattcatccgatattagtatagccactgcagccttcctagcttactgtttactgg

SEQ ID NO: 998059 - DNA, 120 bp, Artificial Sequence
  ENSG00000225265_11 (sequence is synthesized)
tatatttttatccatgtttttactttcaacctgtgttttttaatttaatgtgcttctcttatagacaacagatagttgagtttgtctatcattttgctatttgttttcgatttgtcccat

SEQ ID NO: 998060 - DNA, 120 bp, Artificial Sequence
  ENSG00000225265_12 (sequence is synthesized)
tcagttttgtgttcctttgttctttacttcctgctttcttttgggttaattaatgtttttatatttcatcttaattcctctgttggctttaactgtatctttttgcattattgctttaca

SEQ ID NO: 998061 - DNA, 120 bp, Artificial Sequence
  ENSG00000225265_13 (sequence is synthesized)
gtgtttctgagaattatgatatacattcttaacttatcacagccttagagttaaaattatgatacttcatgtaaaataaaagagccttgcaatagtaaagttctacttaccacctcccca

SEQ ID NO: 998062 - DNA, 120 bp, Artificial Sequence
  ENSG00000225265_14 (sequence is synthesized)
agtcctttgtgctttgttgtcatatatatcatatctatgcacattgttatttttgccttagtcatatgtatcgcaaagaaattaagagaagaaaagtatatattaccttttgtgtattta

SEQ ID NO: 998063 - DNA, 120 bp, Artificial Sequence
  ENSG00000225265_15 (sequence is synthesized)
cctacattttgctatttccagttcttttcattccttcctgtttgtggtgaattatctttaagaatagctgtcaaaaagtattcacattcttgtatgtgcatgttgcttctccctttaaga

SEQ ID NO: 998064 - DNA, 85 bp, Artificial Sequence
  ENSG00000225265_16 (sequence is synthesized)
ttcacattcttgtatgtgcatgttgcttctccctttaagaaatagaatcaatttgggaggtcaaggcaggtggatcacaaggtca

SEQ ID NO: 998065 - DNA, 120 bp, Artificial Sequence
  ENSG00000225265_17 (sequence is synthesized)
tatgagcaggcgctaaacctggtttaggtatttaggcagcgcgcggcccggctcgtaactcctcctgctgcagcaggcgtatcgttggcctcgcctcgaccccggaagtgacttctggaa

SEQ ID NO: 998066 - DNA, 120 bp, Artificial Sequence
  ENSG00000241295_0 (sequence is synthesized)
aaccctgcctgagcagctcctgcattgctacaaggatgaagcagaaacatctggtcggttttagattccccttggatttccaacttcaaagggaattataaagaataacaaattcatgta

SEQ ID NO: 998067 - DNA, 120 bp, Artificial Sequence
  ENSG00000241295_1 (sequence is synthesized)
aaaaattagagcagcaggagagaatggtaaaattgtccttatttgactgctagtgacaggcgccacaggcagaactatgagaaaagacaaaggcaagatcaccagttgacaaccagagtt

SEQ ID NO: 998068 - DNA, 120 bp, Artificial Sequence
  ENSG00000241295_2 (sequence is synthesized)
cctgcaagagactgaatctttggctacatgcaaatatgcacagggcccttaacaatccatagggagatttacttgcttaaggaaaataaataggtaaataaataaaaggagttgaaaggt

SEQ ID NO: 998069 - DNA, 120 bp, Artificial Sequence
  ENSG00000286613_0 (sequence is synthesized)
ggaatggctgggtcatatggtaactcttttgaggaactgccagattattatcgaaactcacttctttctattcctctgggccacatgggaacttcagtctttataatttcagagatagta

SEQ ID NO: 998070 - DNA, 120 bp, Artificial Sequence
  ENSG00000286613_1 (sequence is synthesized)
acatctgagaacgtggcagcatcctctactgtgtggagcactgatcactgcactatttcagacggacttgtaaatgattgtgatactgaaaagctacaggagcagactctttatgatcaa

SEQ ID NO: 998071 - DNA, 120 bp, Artificial Sequence
  ENSG00000286613_2 (sequence is synthesized)
ctctttaaattcaaaatatgatttctagagcttttttatcccttaatgtgaccctctagagaggccctggagtgtttgaatttatgaaggatttctttgagattcattgatcattccatt

SEQ ID NO: 998072 - DNA, 120 bp, Artificial Sequence
  ENSG00000286613_3 (sequence is synthesized)
ccctcgggtggctttcatttggcctttcttgtatggaacctctctgccacaggattgtactggaatttttcaaaagcctcagcatgccaaagtcccatttcttttttcatatgcagatat

SEQ ID NO: 998073 - DNA, 120 bp, Artificial Sequence
  ENSG00000286613_4 (sequence is synthesized)
ttcctgcatgttggaaacaattgattttttaaccaaaatggcttatttctaaggtaggtgcaattcctgaactggagcagggagtccagtcctcataggtggagagtgtagtgacaagag

SEQ ID NO: 998074 - DNA, 120 bp, Artificial Sequence
  ENSG00000286613_5 (sequence is synthesized)
gatttatccaagtgacttagggaaaaccagtaaaaggaaaactgttgtatatcagtattcaaaactcagagccttgatattctaatttgagacaactcaaagactttaggacttgggaga

SEQ ID NO: 998075 - DNA, 120 bp, Artificial Sequence
  ENSG00000286613_6 (sequence is synthesized)
aaacaaggcctcctcaccgtactccaaatatcactgtattcataacttattttattacattctctaatattagattgattagctctattatcattttttactataaaagtaatacattct

SEQ ID NO: 998076 - DNA, 120 bp, Artificial Sequence
  ENSG00000286611_0 (sequence is synthesized)
ccctcaaggtctacctgctgccttcggggttcaacttccagcaagaagcgtgggaagcagccccatccccactaagcccccaagcggagtggtgtggtgagcccagcacgaaatcccctt

SEQ ID NO: 998077 - DNA, 120 bp, Artificial Sequence
  ENSG00000286611_1 (sequence is synthesized)
ccaatctctcaaagcaaacctctccaagcactcgcttaccctaccctgactggtgcctccagcttcgcacaggtgttggaggcgataaggagagtgacatccattaaacctgaggcacaa

SEQ ID NO: 998078 - DNA, 120 bp, Artificial Sequence
  ENSG00000286611_2 (sequence is synthesized)
gtcatcgcctctgttgtgtctcctaccggtgacttggcatttgcgccggcgactggcggccaccgggaattccgtaagggcgccgggagtggagggcaaattaacacaactgcccgctaa

SEQ ID NO: 998079 - DNA, 120 bp, Artificial Sequence
  ENSG00000286611_3 (sequence is synthesized)
ccccccacccccacccccaggcggcaaaagggagcgggaaatgtggaaagcgtcagaaaagaaatccatcaaggcgaaagcaccacacaaaggcgcgcaggcctcgcgttcctcccgccc

SEQ ID NO: 998080 - DNA, 120 bp, Artificial Sequence
  ENSG00000286610_0 (sequence is synthesized)
atgtcttcctgcttcagtgttagatccctaattcctcgcacagtgccgtgcacatatgcctgccttggctctgctttctccaaacctgtccccatcggtcagctggggtggacgagtgtt

SEQ ID NO: 998081 - DNA, 120 bp, Artificial Sequence
  ENSG00000286610_1 (sequence is synthesized)
ttccatcttgcaaagtcattgtgtggggaagatgagatattccacgtgaagcccccagcacggcccccagcgcagcctccttccaggaatgttggctctgaggtcgtcttccgcgtgagt

SEQ ID NO: 998082 - DNA, 120 bp, Artificial Sequence
  ENSG00000286610_2 (sequence is synthesized)
tttcatctgtcacttgtaacaggagtgctggtgggaaccatggtgcagtgtggtccagcatcacctgcacggcttggaagacggagatcgcagagccgggtcccagggtgtctgattcag

SEQ ID NO: 998083 - DNA, 120 bp, Artificial Sequence
  ENSG00000286610_3 (sequence is synthesized)
tgagtccagaggcgtgcctatgtgtggacagacatcgctgaccgaccataacctcacatctgccaaacagacacggcctcagaaattaacaatggatgtttgtcttcaacgaagcttccg

SEQ ID NO: 998084 - DNA, 120 bp, Artificial Sequence
  ENSG00000286610_4 (sequence is synthesized)
cccgacacatcagatacagtgctgtgctgggcggagccacaggaagcctggaggcctggctgtggctgctggttttgtctctgggtccctggtgctgatgatcacaggcttcagacaccc

SEQ ID NO: 998085 - DNA, 120 bp, Artificial Sequence
  ENSG00000286610_5 (sequence is synthesized)
gtgtgtccatgtgcatgtgtgtgcacgtgtgcaagtgcgtgcgtgcgtgcgtgtgcgtgtgcgtgcgcgtgtgtgatgcgtgtgcacgcgcgtgtgtgatgcgtgtgcacgtgtctgtgc

SEQ ID NO: 998086 - DNA, 120 bp, Artificial Sequence
  ENSG00000286610_6 (sequence is synthesized)
gtgtgtgggtgtgcgtgtgcatgtgtgcgtgcgggtgtgtgcgtacgtgtgtgcgtgtgtgtgcgcgcgcgtgtgtgttctcgtgtgcacgtgtgtgtgtgtgtgttttcagggtcagga

SEQ ID NO: 998087 - DNA, 120 bp, Artificial Sequence
  ENSG00000286610_7 (sequence is synthesized)
ataggttaactggatgagattccatcctctgtgaactccctgtgatttttgtgcagtcactatgttgcccaaactggcccacttcccttcactgttgttgctccagaggggcaggaggat

SEQ ID NO: 998088 - DNA, 120 bp, Artificial Sequence
  ENSG00000286610_8 (sequence is synthesized)
taatgtccacgctcggatacaaagttttcacaccccactgtcactgaactcctgcctgtagggaacattggctatgataaagaaaactaggtaaagcactgaaagggcagtgctcagaaa

SEQ ID NO: 998089 - DNA, 120 bp, Artificial Sequence
  ENSG00000286610_9 (sequence is synthesized)
gagaaagaaatgcgagcagccctggggctatttccttcctggaggttagaaaactctctgagtgagtgtgttgatcagaggtcgactaagctgcctcatgacaatcgaattctgaattta

SEQ ID NO: 998090 - DNA, 120 bp, Artificial Sequence
  ENSG00000286610_10 (sequence is synthesized)
ctgcagagacaataaccccatcacacaagtacaagggcatgtcggtgaaaaccatgttttaaactgtcaagctttgtaaataataaagcaaattcagatactgcaactagcaaaaagaaa

SEQ ID NO: 998091 - DNA, 120 bp, Artificial Sequence
  ENSG00000286617_0 (sequence is synthesized)
ttctggaaagttggatcctgtaaagctgtagaacgatgtgtattgaaggtacctgcctttgcatttttgctccatgctccttgctttttgaatgtcctttggtcctgagacttaggggat

SEQ ID NO: 998092 - DNA, 120 bp, Artificial Sequence
  ENSG00000286617_1 (sequence is synthesized)
cattgtgcacttctttcttaccctcatttcttaatatcttcaagcagtagtattttggatcaaccagtcagcctttggaggcaccagattctctctctgttcattcaggctccagtattt

SEQ ID NO: 998093 - DNA, 120 bp, Artificial Sequence
  ENSG00000286617_2 (sequence is synthesized)
cactccttcccacctggcatcttcattaactacccaactccagcttcaattcttaccaccaattaagaatcccttgaaaatgtacacacagttcacctgcattccatgtggcatcagctg

SEQ ID NO: 998094 - DNA, 120 bp, Artificial Sequence
  ENSG00000286617_3 (sequence is synthesized)
acttgctgggaaacagctgaatttgttgcctgaagcctcatttctcctccacatgaactctcggctcagctgatttgggcttctcacagcatgaaggtctcagggtagcagaacttcttg

SEQ ID NO: 998095 - DNA, 120 bp, Artificial Sequence
  ENSG00000286617_4 (sequence is synthesized)
catgacatccctgaagtgtcctggaactttagacatttcagcaactaaactatttttctgagactacctctgggagagatgcgtcaagccgcacatgcatcctttaaaagactgtgcacc

SEQ ID NO: 998096 - DNA, 120 bp, Artificial Sequence
  ENSG00000286617_5 (sequence is synthesized)
ctgaaatttggaaatgtagacacattcatatgaagtcatggaaagtttccagtgaggtctagaatccaagttcattttcggtgtgcatgtggccaaccttcctcttcctgttctggaagt

SEQ ID NO: 998097 - DNA, 120 bp, Artificial Sequence
  ENSG00000286616_0 (sequence is synthesized)
aggtgtgagccaccatgcccggccaagagtctgtattttcaacaagttcccaggaattcggagatctagaagtattaacagctatctttgaagttactgacgtagaaaaaaactcctgtg

SEQ ID NO: 998098 - DNA, 120 bp, Artificial Sequence
  ENSG00000286616_1 (sequence is synthesized)
aaaactcctgtgggccagggactcctctgcaggatcacctgacaattgtagttcttcaagactttattttcatttctcttatcatcttcaggctccgctggtgatacccaggcaaacagg

SEQ ID NO: 998099 - DNA, 81 bp, Artificial Sequence
  ENSG00000286616_2 (sequence is synthesized)
tggagaatgactttgatgagttgacagaaataggcttcagaaggtcggtagtaacaaacttctctgagctaagggagcatg

SEQ ID NO: 998100 - DNA, 72 bp, Artificial Sequence
  ENSG00000286616_3 (sequence is synthesized)
aggaagctaaaaaccttgaaaaaaggttactgatgaagctgaaaagcatggcacgagaacttcgtgatgcat

SEQ ID NO: 998101 - DNA, 88 bp, Artificial Sequence
  ENSG00000286616_4 (sequence is synthesized)
ttgaaataaagcaagaagacaagtttagagaaaaaaagagtaaaatgaaacgaacaaagcctccaagaaaatatgggacttacatgaa

SEQ ID NO: 998102 - DNA, 76 bp, Artificial Sequence
  ENSG00000286616_5 (sequence is synthesized)
aagcaagaagacaagtttagagaaaaaaagagtaaaatgaaacgaacaaagcctccaagaaaatatgggacttaca

SEQ ID NO: 998103 - DNA, 82 bp, Artificial Sequence
  ENSG00000286616_6 (sequence is synthesized)
gtcaaattcaggaaatacagaaaataccacaaagatactcctcgagaacagcgaccccaagacacataattgtcagattcac

SEQ ID NO: 998104 - DNA, 73 bp, Artificial Sequence
  ENSG00000286616_7 (sequence is synthesized)
ttgggttacccacaaactccagaagagagtgggggccgatattcacacattcttaaagaaaagaattttcaac

SEQ ID NO: 998105 - DNA, 120 bp, Artificial Sequence
  ENSG00000286616_8 (sequence is synthesized)
aaaagcaagggttgcaatcctagtctctgacaaattatttcaagtgcacattaagcaacaagcattttttgagttcctgaacatctgttgcatcaacaatcacagtacctgtactaacat

SEQ ID NO: 998106 - DNA, 120 bp, Artificial Sequence
  ENSG00000286616_9 (sequence is synthesized)
attactaaagactcaaacaaaacttggaggttcatgttatttgctttatttctgtatatgttaacagtttttcattaaaaaaattttttaaaactcttcaaacataaattccatgaatcc

SEQ ID NO: 998107 - DNA, 120 bp, Artificial Sequence
  ENSG00000286615_0 (sequence is synthesized)
gccgcgcgcagtccctagcgcaacatgcaggatcttcccggcctgactgctgcacctcgatcgtgagtcgcccctgcctgagcggcttccaccgcctggaaaaaactaagaaactcaaga

SEQ ID NO: 998108 - DNA, 120 bp, Artificial Sequence
  ENSG00000286615_1 (sequence is synthesized)
ggagtcatcagaattcctgccatgtgggagtcatcaacccaatgggtgacttcttttctgctccacatataagagtgttttcgtctcctattccaagcaagtagccaggctaattgccgc

SEQ ID NO: 998109 - DNA, 120 bp, Artificial Sequence
  ENSG00000286615_2 (sequence is synthesized)
cttacttcagggaagtctgtggcagaagcttgaaagcaaatgacctactacacctgcttgtgtcctggtcttcaagagcttgggttcctgaagtggattatgctggaggaacacaggtag

SEQ ID NO: 998110 - DNA, 120 bp, Artificial Sequence
  ENSG00000286615_3 (sequence is synthesized)
aagcagaagtaacaaaggagagaaggagactgccctactgccctataccaggaaggtgtggtggtttccacaatcatcaaggggcctgtgtcctacttctagcagaacctggggaagaag

SEQ ID NO: 998111 - DNA, 120 bp, Artificial Sequence
  ENSG00000286615_4 (sequence is synthesized)
acaaggattctgcggagcctaactgtgtggtgaagctagggaggctgtacccttggcaacagggcttccattgtgaagaaagatgcctgcaggccaagaagagcagagaaacagagtcac

SEQ ID NO: 998112 - DNA, 120 bp, Artificial Sequence
  ENSG00000286615_5 (sequence is synthesized)
tgccattcaacagttcatgacaacttcaacaatagggccaccataatgagccaaaaattaggagcaattctcctgtgttttaaggaaccacaaagtctctgagagactgaagaagagaga

SEQ ID NO: 998113 - DNA, 120 bp, Artificial Sequence
  ENSG00000286615_6 (sequence is synthesized)
tcacatctactggggtccaaggcctcaacagcacagtctcctcaacctgctgctccagacatttcgcttttcttcctctgcttgaatcctacaatcgcaatgctttcctgcctctgtgtt

SEQ ID NO: 998114 - DNA, 120 bp, Artificial Sequence
  ENSG00000286615_7 (sequence is synthesized)
tgcttggaattttttgtcctttggcaatttaatgcttgtattcatccatttaataataagtgcccatcttttctatcttcaaatacttgcccttcataaggttctccctgacccctctga

SEQ ID NO: 998115 - DNA, 120 bp, Artificial Sequence
  ENSG00000286615_8 (sequence is synthesized)
aaagccataatttcctcctttacatctccaagttttgtacttctcttgggacatttaccctgtactactttttgttatcatttcacatctgctcctcccaacatcttaaacatttattga

SEQ ID NO: 998116 - DNA, 120 bp, Artificial Sequence
  ENSG00000286615_9 (sequence is synthesized)
acatctactaagcatcctaaagacagtgactgtttcccaagtacctagcataacaccatatgccattgaccttaggacactaaactgaacagagcacagagcctgtcctcaaagttctca

SEQ ID NO: 998117 - DNA, 120 bp, Artificial Sequence
  ENSG00000286615_10 (sequence is synthesized)
aagtctatgtatcatgctcagggatcacaggattgtatgtagtaacttctcagcctttgttgatcttgattgtcagcactttaaagctccattcagctacttatgtaaaatttaagcaaa

SEQ ID NO: 998118 - DNA, 120 bp, Artificial Sequence
  ENSG00000286615_11 (sequence is synthesized)
atgaggaagataatttcgttggagagaaagcttctggatgcttcagaatatgccacctcacctgaatggtaaccattacacttgtaaataagataaaatagcaagaaaaatataaacata

SEQ ID NO: 998119 - DNA, 120 bp, Artificial Sequence
  ENSG00000286615_12 (sequence is synthesized)
ggatctcttttccatgggattgaaaatagagctcctgagaacctgcctgatggagagtgcaacatagagaaaagcagaacgaagacacagagagaaggagttccattttgacttctagat

SEQ ID NO: 998120 - DNA, 120 bp, Artificial Sequence
  ENSG00000286615_13 (sequence is synthesized)
gaaggaactgttgtccaaaaactgctttctcttcccgggcttacttcctttgccttcattgttttctgctgccactcctgctttggaatttgctgttatgtgtaataaactccatcacag

SEQ ID NO: 998121 - DNA, 120 bp, Artificial Sequence
  ENSG00000286615_14 (sequence is synthesized)
agtggccgctggggggttgtcgcttggcgccgcgcgcagtccctagcgcaacatgcaggatcttcccggcctgactgctgcacctcgatcgtgagtcgcccctgcctgagcggcttccac

SEQ ID NO: 998122 - DNA, 120 bp, Artificial Sequence
  ENSG00000286615_15 (sequence is synthesized)
taccttcaaaagatcaactttcttagctcccacatatgagtgaaaacatgtgatattcctctttctgtacttggcttatttcacttaatgtcctccagttccatccatgttgctgcaaat

SEQ ID NO: 998123 - DNA, 120 bp, Artificial Sequence
  ENSG00000286615_16 (sequence is synthesized)
aacacgattccaattttttatggccgaatagtattccactttgtgtatataccacgttttttaatccattcatcaattgatgcatgcttacatggattccatctctttgctattatgaat

SEQ ID NO: 998124 - DNA, 120 bp, Artificial Sequence
  ENSG00000286615_17 (sequence is synthesized)
agtgctgcaataagcatggggcacaggtatccttctgatacattgatttcacttcctttgattaaatacccagtagtgggattcagatatatttttatttattttaatttaattttatta

SEQ ID NO: 998125 - DNA, 120 bp, Artificial Sequence
  ENSG00000286615_18 (sequence is synthesized)
cagccagcaagaatagttcatcttatttcactgcttttaaatgtgctgagacttgctttatggcaaaaatatggtctttcttggtgaatggttcatgtgcacctgaaaacaatgtacaac

SEQ ID NO: 998126 - DNA, 120 bp, Artificial Sequence
  ENSG00000286615_19 (sequence is synthesized)
tgctgctgctattgggtagattgttctaaaaatgtcaactgggtctcattagttgacactgttcatcaagtcttctatttccttactaatttttactatctttattctgaacactacaac

SEQ ID NO: 998127 - DNA, 120 bp, Artificial Sequence
  ENSG00000286615_20 (sequence is synthesized)
ataactaatgcaatcttagattaagtagacttttttgttggtggtaactatatcactctgttaacatagaatttataatctactaaaattccaattatttttcatatttgctattaatct

SEQ ID NO: 998128 - DNA, 120 bp, Artificial Sequence
  ENSG00000286615_21 (sequence is synthesized)
tgacatcttaaaatattatttgtatttttagttgagaatttcatagtaatattataagactattcatttaggtctatcaaattccatttttgtatatgcagtccatctttagaacctgtc

SEQ ID NO: 998129 - DNA, 120 bp, Artificial Sequence
  ENSG00000286615_22 (sequence is synthesized)
aagggcttggtggagctaactcttttcctagtatattagctaggcaggttgaaatcatgatattgggaattgatcagaaagccacgatgctcttgaacaaataattattagacatgtaga

SEQ ID NO: 998130 - DNA, 120 bp, Artificial Sequence
  ENSG00000286615_23 (sequence is synthesized)
agcagatagaaataaaatgcatattctaacggagactttcctctccatttatatttattcacatcctgtagtacagtcattcaactgctgataaattctacaattctattattacatcca

SEQ ID NO: 998131 - DNA, 120 bp, Artificial Sequence
  ENSG00000286615_24 (sequence is synthesized)
gtctgctttcttcatctgatccacaaggattttatgagatattttttcaattaccttataaatccagagatattctcatttgttccatttacctgtctgctaatattttgaataaagaaa

SEQ ID NO: 998132 - DNA, 120 bp, Artificial Sequence
  ENSG00000286615_25 (sequence is synthesized)
actaagtcaccctaccagttctacctcttagcaaacaagattggcttcttatacccataatttcctttcagtagtgctctcaaattatgcttctaaatctatgatttaaaagcttgctta

SEQ ID NO: 998133 - DNA, 120 bp, Artificial Sequence
  ENSG00000286615_26 (sequence is synthesized)
gttacagcaatagactagagttcacagagtttaccttcttcccacttaaaaaaatagaagtgggggttacagcagagtgtaaactcataagtatggcagaaggttatcattttttttact

SEQ ID NO: 998134 - DNA, 120 bp, Artificial Sequence
  ENSG00000286615_27 (sequence is synthesized)
tcattcaattctaacaacaagaggcatgtataattattcctgctttacaggtaagaaaaagaaggctcagagagatcaattatcttgcccatgatcccatatctagtgagtggcagaggg

SEQ ID NO: 998135 - DNA, 120 bp, Artificial Sequence
  ENSG00000286615_28 (sequence is synthesized)
aggactgaccctgggtctgacttcaaagcttatgctctctctaccacttcacctgcctcagaactacatctgtttattctggtcttctgattgcttactgtggttcctcaaatctcacca

SEQ ID NO: 998136 - DNA, 120 bp, Artificial Sequence
  ENSG00000286615_29 (sequence is synthesized)
ttatgctatgtttaaacactttttcctcatagtcactgaaaatctacactgaaaaaaaagtgttcaggagccttaaagctcttgtgtgtacacagctttatctctccccacaacacaaat

SEQ ID NO: 998137 - DNA, 120 bp, Artificial Sequence
  ENSG00000286615_30 (sequence is synthesized)
gcaggcaagattggaagaggtcatgtctttagccataggtctcagccaagggacatagaggattagaaaggtggggttcttggcccatgagtctcctcccagatgccttcatttcggtct

SEQ ID NO: 998138 - DNA, 120 bp, Artificial Sequence
  ENSG00000286615_31 (sequence is synthesized)
tcttcttccagtcctagatattttttatgctcccttctccagtatgactcttgtccaggtttttgaaaagatcactgtcttttaaaggtagtggaggaagaaagggaagagcagaacaat

SEQ ID NO: 998139 - DNA, 120 bp, Artificial Sequence
  ENSG00000286615_32 (sequence is synthesized)
ggatgaggaaattgtatttgcagccttggaccctgtatcaggagttaggagtacttttctgtcttcttcatgtaacatgtcttcacagatttaaggcaatcctagtattcttactttgaa

SEQ ID NO: 998140 - DNA, 120 bp, Artificial Sequence
  ENSG00000286615_33 (sequence is synthesized)
aggggcaacaatgggattccaaattcatccgtttatttcccctagcttagtgttttcccccaaaaaaagttttaatatgatccacagtaagaagtacatttttcattatgaacaaattct

SEQ ID NO: 998141 - DNA, 120 bp, Artificial Sequence
  ENSG00000286615_34 (sequence is synthesized)
tatctttgtaagtatataattagaacaagtttcatgaaacaacacttactcttaccatatgtaatgccctctcatgttttcttaatgatgcttctcgaactttaatgtgctcattcatca

SEQ ID NO: 998142 - DNA, 120 bp, Artificial Sequence
  ENSG00000286615_35 (sequence is synthesized)
gctagagattttgttaaatatgaggttctgattcagtatccagggtggagaccgcattttaacaaactcctacgtggatgcttctgtttcttggattgcactttgagaagcaaagttcta

SEQ ID NO: 998143 - DNA, 120 bp, Artificial Sequence
  ENSG00000286615_36 (sequence is synthesized)
ttctgtattgttttatttaaatgttaaattacttttaggactcccaaatgtgtctggactggcagtttgtaaaagcattgctggtgtattggggcagcatgcctatctaggatattcttg

SEQ ID NO: 998144 - DNA, 120 bp, Artificial Sequence
  ENSG00000286615_37 (sequence is synthesized)
ttactgtggagtgggatcatgcttggaagtagttcagcaagaaacaggatttatcttccatataccaagaccagagaatcacagaagtaaagacatgaatatcttcctgaaattgctttt

SEQ ID NO: 998145 - DNA, 120 bp, Artificial Sequence
  ENSG00000286615_38 (sequence is synthesized)
tttaaaatttcaacatttgatatagtgaatacatctattacaatttggaataaataaatctaaatattctgcataatgaggacttatgaatgtgtgtgaaaagaaagttgcaaaagttga

SEQ ID NO: 998146 - DNA, 120 bp, Artificial Sequence
  ENSG00000286615_39 (sequence is synthesized)
ctgaaggtgaatatggcaatgatgtaagtatcagggggaataaaacatttcctgtagtatgatcttcttttgtctgcaatatgaatgcatactgtatcagtcagggttcttgttttcaag

SEQ ID NO: 998147 - DNA, 120 bp, Artificial Sequence
  ENSG00000286615_40 (sequence is synthesized)
taacacaaaccaactccaactaacttaataaaaacaacactgagggattccagaagagagggcagctgggaggcccaaagttaaaaatgagcaagaatccctttagaggactggggaaaa

SEQ ID NO: 998148 - DNA, 120 bp, Artificial Sequence
  ENSG00000286615_41 (sequence is synthesized)
aaaaatcaaagccatagtctcagagctgaaccaatctggtcaggctgtccctgctgagattgatgaacttgaaccatttctttccttagtcttcacatgatgctctcaagatcaaagtca

SEQ ID NO: 998149 - DNA, 120 bp, Artificial Sequence
  ENSG00000286615_42 (sequence is synthesized)
caggagagagcattcatttgactgaacttaggttttgcacttcctcctgactattctgagaaaacaggaaggctttggcccttcaaacttccatagtgagacaggtgcctgatacaccat

SEQ ID NO: 998150 - DNA, 120 bp, Artificial Sequence
  ENSG00000286615_43 (sequence is synthesized)
ccttccagaagcacagaaaagtggggagaggggatgttgtcccaaaaagaaaagaggataccactgggaaaagaaactattagattggtacaaaaataattccaggttttgccattaaaa

SEQ ID NO: 998151 - DNA, 120 bp, Artificial Sequence
  ENSG00000286615_44 (sequence is synthesized)
gtaattagaagtaatggcaaagcctgcaattacttttgcaccaatgcaatagattctaagtcatcaataaactatactggacacagcgctgcgaattggtcaggcctttattacaagtat

SEQ ID NO: 998152 - DNA, 120 bp, Artificial Sequence
  ENSG00000286615_45 (sequence is synthesized)
agcagtaaagtaaatgggatttcaattttggggaaccatgggcatagtctcagagagtaaatcataattggtgcatatttgaacgtgtatccaaatccactccttgaaggacttaataaa

SEQ ID NO: 998153 - DNA, 120 bp, Artificial Sequence
  ENSG00000286615_46 (sequence is synthesized)
ccgctgctgcagctgctgctgccggggcagtggccgctggggggttgtcgcttggcgccgcgcgcagtccctagcgcaacatgcaggatcttcccggcctgactgctgcacctcgatcga

SEQ ID NO: 998154 - DNA, 120 bp, Artificial Sequence
  ENSG00000286615_47 (sequence is synthesized)
gggcagtggccgctggggggttgtcgcttggcgccgcgcgcagtccctagcgcaacatgcaggatcttcccggcctgactgctgcacctcgatctgttttcgtctcctattccaagcaag

SEQ ID NO: 998155 - DNA, 120 bp, Artificial Sequence
  ENSG00000286615_48 (sequence is synthesized)
gctttaccatggaggggcggagagagaactccccggacgcgcaggaaaatccccccaggtcctcggaggcctcgcgcggcaatttattggggaatggctccctctgccgactcgccgagg

SEQ ID NO: 998156 - DNA, 120 bp, Artificial Sequence
  ENSG00000286615_49 (sequence is synthesized)
aggccccgggaggcccagtgatggaatgttaaaaccatgaacgggcttttccatttgtgggttagacaggacatgaattctggaatctgcttctctgactgtccatcttcctcttccaga

SEQ ID NO: 998157 - DNA, 120 bp, Artificial Sequence
  ENSG00000286615_50 (sequence is synthesized)
ctaaagagttttccagcttttacaggaccccaaaagatacaaatttgactgctgcaaagttctttcttgtgtcgttgaattctatccccctctccccacaaaaaaacaaaaacaggttta

SEQ ID NO: 998158 - DNA, 120 bp, Artificial Sequence
  ENSG00000286615_51 (sequence is synthesized)
agccccataaccactccaggtaaccatctcctaccaggcttctcttcctcccattaataagaactctttctttttagagagacttcaagagcgttcgagtccctactcaataacgctcct

SEQ ID NO: 998159 - DNA, 120 bp, Artificial Sequence
  ENSG00000286615_52 (sequence is synthesized)
ggaaaatagtacagactccatattatgtttgagtgaataaatgaatggaatgaatgaacatagatatgtttgaagcccctcaccatcctctttactctccctggaaatacacaggggaag

SEQ ID NO: 998160 - DNA, 120 bp, Artificial Sequence
  ENSG00000286615_53 (sequence is synthesized)
catttttctttgagataccatccctgccacaaggacagcagtctgggtggaaggtcagtcaggatggtccagcttttccctgtccagaagagagcaactgacctcagctaagcccctcag

SEQ ID NO: 998161 - DNA, 120 bp, Artificial Sequence
  ENSG00000286615_54 (sequence is synthesized)
gccctctctgccaggagttggaactttgatctgggcagcacaggcacaaataattctagaggagtaaaattattattacagtaactgtgtgtttaactatatagaaagatgaactgcttt

SEQ ID NO: 998162 - DNA, 120 bp, Artificial Sequence
  ENSG00000286615_55 (sequence is synthesized)
ccaaagtggaaaacattttacattctcaccagcaagatatgataattgcttcacatcctcatcaacactgggtagtttctgtcttcttatttttgccattctagtaagtatatagtggta

SEQ ID NO: 998163 - DNA, 120 bp, Artificial Sequence
  ENSG00000286615_56 (sequence is synthesized)
tcacatcgtggttttaatttgcgtttccttactgactaatgatggtgaccataaaagatgtttaccagcttttcatgtgctctcatgccacctgttctttgataaagtgtctgaatttat

SEQ ID NO: 998164 - DNA, 120 bp, Artificial Sequence
  ENSG00000286615_57 (sequence is synthesized)
tgcccaatttttaatcaagtctttggattcttattattgagttgtaggagttctttatataccaggcatttgttagatatgtatataaccaatatacactcccagtctgtttcttgtctt

SEQ ID NO: 998165 - DNA, 120 bp, Artificial Sequence
  ENSG00000286615_58 (sequence is synthesized)
tcaatttcttaatagtgtctttcaaacagcagtttttaattttgataaagtccagtttatcaagcgtgtttttgtgtgtgtgtgttgtacttttaggttttacataagtaatctttgctt

SEQ ID NO: 998166 - DNA, 80 bp, Artificial Sequence
  ENSG00000286619_0 (sequence is synthesized)
gggaaccgggagccggctccatgcgcctggagcgcgcgggtcccagcgcccatcggcccggggtccgaggggcccgctgc

SEQ ID NO: 998167 - DNA, 120 bp, Artificial Sequence
  ENSG00000286619_1 (sequence is synthesized)
cgccgcgtcggagccccagcagactttgagaggcgtgtgcgacagtgcgcgtcctctcctgcctctggatgtttccttggagcctctggccttcgggaagaccgagatattttcctctaa

SEQ ID NO: 998168 - DNA, 120 bp, Artificial Sequence
  ENSG00000286619_2 (sequence is synthesized)
gtgaacggtacagctgttgaaggcaaggacaatggatacttaaaaacagcctgatggcctggtgttgggcctgatcaccccaaaatttcaggcacccaacgtggggctatgaagaccatg

SEQ ID NO: 998169 - DNA, 120 bp, Artificial Sequence
  ENSG00000286619_3 (sequence is synthesized)
gtaaagaaatgctagagtatatggaaatgaaggacatatcatcaaaggacacccgaggatggctgaaagaagcttggtgggtaagctgggcactctgaagaaccaagtgccactgggtta

SEQ ID NO: 998170 - DNA, 120 bp, Artificial Sequence
  ENSG00000286619_4 (sequence is synthesized)
gagtctccccgaccaagctggtctcagcaagtggtctccatcatgggggctcgaatccaggttgaagggtcaccagagtgatggttggagaacatggaactagctggaggacacctgagt

SEQ ID NO: 998171 - DNA, 74 bp, Artificial Sequence
  ENSG00000286619_5 (sequence is synthesized)
atggttggagaacatggaactagctggaggacacctgagtactcttaaagcaaaccccgtggccaaaatcaata

SEQ ID NO: 998172 - DNA, 120 bp, Artificial Sequence
  ENSG00000286619_6 (sequence is synthesized)
ctggttgcagccacgtcgaggctgacactgaggaggaccccaactgtcatgagcaacacccgtcgaacacagccatccacctggggacaaatcaagaagctgtcacagatgatggaagaa

SEQ ID NO: 998173 - DNA, 88 bp, Artificial Sequence
  ENSG00000286619_7 (sequence is synthesized)
ggacaaatcaagaagctgtcacagatgaatcacaatgagtaatttggtgatctatcacagtgatgatcaccattgccatgagtattcc

SEQ ID NO: 998174 - DNA, 61 bp, Artificial Sequence
  ENSG00000286619_8 (sequence is synthesized)
ctggcaataatgcctagatgatttcactctatggcacagttacacatgctttctgatctca

SEQ ID NO: 998175 - DNA, 120 bp, Artificial Sequence
  ENSG00000286619_9 (sequence is synthesized)
atagaacctggccagaaataatgaacaacttgtttagtaagattgcattgcagaacaggcagagatgctacgcaatgattcctatgggatcattgattggtcccctaaggggatgtttag

SEQ ID NO: 998176 - DNA, 86 bp, Artificial Sequence
  ENSG00000286619_10 (sequence is synthesized)
atgtttagcttaaattgcacctctcagtctgcatgccatggccacactagttcagatggtctgaacaaagtggtcagatggcgtct

SEQ ID NO: 998177 - DNA, 67 bp, Artificial Sequence
  ENSG00000286619_11 (sequence is synthesized)
ggcaaaagttcctattgtctggaaccatggcagtatagtgtcacctcaacctcaaatgatatggctc

SEQ ID NO: 998178 - DNA, 84 bp, Artificial Sequence
  ENSG00000286619_12 (sequence is synthesized)
gatcaaaatttgggaaagaataaaaaaagcatctagaaagacactctacaaacttgtctttggatattatacacctgaccttaa

SEQ ID NO: 998179 - DNA, 120 bp, Artificial Sequence
  ENSG00000286619_13 (sequence is synthesized)
cctgtgagaagtagctcacagtgtcaaagctgcctttgcttttatcgatttgcaaatcaaataagggggacatattgggaacagcacccccccccccaaaatctggccataaactggtcc

SEQ ID NO: 998180 - DNA, 83 bp, Artificial Sequence
  ENSG00000286619_14 (sequence is synthesized)
cacccccccccccaaaatctggccataaactggtacatgttcatgatggtcttaatgcccacgctggaaggttgtgggtttac

SEQ ID NO: 998181 - DNA, 88 bp, Artificial Sequence
  ENSG00000286619_15 (sequence is synthesized)
ttcgtttcccataagggatacttttaattaatctaatatgtatagaaagacgtgggtaaatctctgttggaggctctcagctctgaag

SEQ ID NO: 998182 - DNA, 79 bp, Artificial Sequence
  ENSG00000286619_16 (sequence is synthesized)
gatttcatacagatgaacaactgaagacaaaaacaacaaagggggagaaagagggattatgggacagcccatactgcct

SEQ ID NO: 998183 - DNA, 120 bp, Artificial Sequence
  ENSG00000286619_17 (sequence is synthesized)
agattatgtcatctgcaaacaggaataatttgatttcctcctttccaatttcaataccttttatttctttttcttgcctgactgctctgactagcacttccagcactatgttgactacaa

SEQ ID NO: 998184 - DNA, 80 bp, Artificial Sequence
  ENSG00000286619_18 (sequence is synthesized)
gaattcagtaaagtttcaggatacaaaaacaatgtacacaaatcaggagtacggctatacaacaccaacaaccaaactaa

SEQ ID NO: 998185 - DNA, 89 bp, Artificial Sequence
  ENSG00000286619_19 (sequence is synthesized)
tcaaccccttttacaacagctgcaacaaaattaagaagatctctacaaggaaaactacaaaaaactgctgaaagaaatcatagatgata

SEQ ID NO: 998186 - DNA, 79 bp, Artificial Sequence
  ENSG00000286619_20 (sequence is synthesized)
tcatagatgatacaaacaaatggaaacatatcctatgctcacaaatgggtagaaacaatattgtgaaaatgagcatact

SEQ ID NO: 998187 - DNA, 120 bp, Artificial Sequence
  ENSG00000286619_21 (sequence is synthesized)
taaaattcatatggaaccaaaaatgagcctgcatagccaaagcaagactaaacaaaaagaagaaatctggaggcatcacattaccagacttcaaactatacaacaatgctggtagaagag

SEQ ID NO: 998188 - DNA, 120 bp, Artificial Sequence
  ENSG00000286619_22 (sequence is synthesized)
cacccgaggatggctgaaagaagcttggtgggtaacaatcaggcacctgtgtgggtgcccaccaaacatctggagatctatcatgagccacaccaggaagagagggctctgggaagagcc

SEQ ID NO: 998189 - DNA, 120 bp, Artificial Sequence
  ENSG00000286619_23 (sequence is synthesized)
agagctcctgatatgagtgatggtacaaatgaacatctcagagacaaaggagaagaccaatggagtctgtagatgcggaagccacctctggagagaaagccaccactgagagcaagcaat

SEQ ID NO: 998190 - DNA, 120 bp, Artificial Sequence
  ENSG00000286619_24 (sequence is synthesized)
ccagattccaacagtgacttttagctctgagaagtccaatactacagccctggctgagttcggaaaatacattcataaagcctgatggcctggtgttgggcctgatcaccccaaaatttc

SEQ ID NO: 998191 - DNA, 120 bp, Artificial Sequence
  ENSG00000286619_25 (sequence is synthesized)
aacactctttagtacagtggagcagttttgcctgtggttcctagaacaagggacaatggagttcgatgaatgggaaagaattggcagagatctaaaaaaggtgcataaagaaggagccaa

SEQ ID NO: 998192 - DNA, 120 bp, Artificial Sequence
  ENSG00000286619_26 (sequence is synthesized)
aattccagtttctttttggtcagtgtgggcattgataaaggcaggtcttgagccatttcaaacaaatgatgaggcagattcagataaggaagaggaaaacgagtgtaaaaaattaacttc

SEQ ID NO: 998193 - DNA, 120 bp, Artificial Sequence
  ENSG00000286619_27 (sequence is synthesized)
agattctgaatgtggggaacagcaaccagaggaaattaaagaaaggaaaactaaaacagatatattttagtagcccgttggttccacctgctgaattaagtgaatggccacttccttcct

SEQ ID NO: 998194 - DNA, 120 bp, Artificial Sequence
  ENSG00000286619_28 (sequence is synthesized)
ctccccctaatggtcgagaaaatgaattagctgcaaaacttactgctctggtagctgcaacattaaaacctggaggaattggtgatgctatacaaaattctattcagaaggttagagctg

SEQ ID NO: 998195 - DNA, 120 bp, Artificial Sequence
  ENSG00000286619_29 (sequence is synthesized)
taagttgttaaaggaattcaagcaagccattagtcaatatgggccaaattctccttttgtacaaactttactaaaaaatgtggctcttgataatagattaataccatatgactgggatac

SEQ ID NO: 998196 - DNA, 120 bp, Artificial Sequence
  ENSG00000286619_30 (sequence is synthesized)
tttaacaaagtctgttctcactccatctcagtacctgcagtttaaaacctggtgggctgatgaagctcaaactcaggcaagagaaaacacacaaacacagccacctgtgcttgtttcctt

SEQ ID NO: 998197 - DNA, 120 bp, Artificial Sequence
  ENSG00000286619_31 (sequence is synthesized)
tgaatggttaatggagttgggccctaattggggatgattagacaattaagcagtaatggaggatgttgccatcgggatgttctgtccgacaaggacctaaagaaccatatactgacttta

SEQ ID NO: 998198 - DNA, 120 bp, Artificial Sequence
  ENSG00000286619_32 (sequence is synthesized)
ttgctcagctccaagaggctgtgcgtaaagctgtaactgataaaacagctcaagacatggtaatacaacttcttgcatatgataatgctaatgcagagtgtcaagctgccattagaccta

SEQ ID NO: 998199 - DNA, 120 bp, Artificial Sequence
  ENSG00000286619_33 (sequence is synthesized)
tgcaagggaagcctcatttggctgaatatattaaggcttgtgatggcattgcgggtaatttacataaggctactcttttagctcaagctatggctggattaaaggtgggaaaaaatatgc

SEQ ID NO: 998200 - DNA, 120 bp, Artificial Sequence
  ENSG00000286619_34 (sequence is synthesized)
cccatttctcaggctcttgttttaattgtgggcaatttggacacacaaaaaaaggaatgtagaaaaggaaatcaaaaggcaaaaactattaccatcaatcaacagaaaagttccggtgta

SEQ ID NO: 998201 - DNA, 120 bp, Artificial Sequence
  ENSG00000286619_35 (sequence is synthesized)
tgcccctggtgtaagaaaggcaatcactgggcaaatcagtgtcatcctaaatttagcaaagatgggcaacctcttttgggaaacgggaagaggggcccacctcgggcccctcaacaaact

SEQ ID NO: 998202 - DNA, 89 bp, Artificial Sequence
  ENSG00000286619_36 (sequence is synthesized)
tactagaaaatgaaaggaattgaaattaagagaagagagggagtgaagggtggcaccaagaaaaaggttggagaagagagtaaaaagag

SEQ ID NO: 998203 - DNA, 120 bp, Artificial Sequence
  ENSG00000286619_37 (sequence is synthesized)
tccttgggctggttggtctgaggaccaaaggtcgtaggtggatctcttcatggagtgagggtgaggacaggggacagtctcctgaaggagtcctgctgacctgggtctttggcaccaaat

SEQ ID NO: 998204 - DNA, 120 bp, Artificial Sequence
  ENSG00000286619_38 (sequence is synthesized)
ggacaggggacagtctcctgaaggagtcctgctgacctgggtctttggcaccaaatgtgtcatgcatccatgtgaagagaccaccaaacaagctttgtgtgagcaacaaggctgtttatt

SEQ ID NO: 998205 - DNA, 120 bp, Artificial Sequence
  ENSG00000286619_39 (sequence is synthesized)
tccaaaaagagagtcagcccagtctatatcttttaaatgggaaaattcaatctatttacatgcaacgttattcttgataggtgagtacttacatctagcattctattattttctgcttgt

SEQ ID NO: 998206 - DNA, 120 bp, Artificial Sequence
  ENSG00000286619_40 (sequence is synthesized)
tttgtatatcctttgttccttcctctcttactgtttacttttgtggttgggcagttttctgtagggataagatttgagtcttatctctttctccctatgtgttagctttaccagtgagtt

SEQ ID NO: 998207 - DNA, 120 bp, Artificial Sequence
  ENSG00000286619_41 (sequence is synthesized)
atgtgttagctttaccagtgagtttttatagtttcacatatttttatgatgctggttatcatcttctctgtggggaacaggccccccaaaacctggccataaactggccccaaaactggc

SEQ ID NO: 998208 - DNA, 120 bp, Artificial Sequence
  ENSG00000286619_42 (sequence is synthesized)
aatagcatgagtgatctgtgccttaaggccatgctcctgctgcagatagctagtccaacccatccctttatttcagcccatctcttcatttcccataaggaataattttagttaatctaa

SEQ ID NO: 998209 - DNA, 120 bp, Artificial Sequence
  ENSG00000286619_43 (sequence is synthesized)
ccataaggaataattttagttaatctaatatctatagaaagaatgctaatgactagcttgctgttaataaatacatgggtaaacctctgttggaggctctcagctctgaaggctgtgaga

SEQ ID NO: 998210 - DNA, 120 bp, Artificial Sequence
  ENSG00000286618_0 (sequence is synthesized)
agcggaggtggggaatgcgcttccaagggaggcggaacgcagaggggatgcgagatggagcccggggagctgccgcagcgggcgatggccccggccggcgccggccgttctgttccctga

SEQ ID NO: 998211 - DNA, 120 bp, Artificial Sequence
  ENSG00000286618_1 (sequence is synthesized)
gattggaacttgggtcatttattggaccctcaccaccccccgaggggtctcaggaggcaccgcgaggtccagcctggctgcattctgcatggtgtcagctcctgccctgcttcctctcca

SEQ ID NO: 998212 - DNA, 120 bp, Artificial Sequence
  ENSG00000286618_2 (sequence is synthesized)
ccgcctgtatctggaatgataaagaagatgatgtatgggaaattcaagtatttgagctatacctagaaatttggacttccccatgaaattcagctgaatgcacaacccagtagcaaactg

SEQ ID NO: 998213 - DNA, 120 bp, Artificial Sequence
  ENSG00000286618_3 (sequence is synthesized)
aagctgtaccttggtcggcgtttggctgagaaggctgcaactggcctgagacgagtctggtcccgacgatgctgtgctctgcctcctcctgctgctgctgacaaccaagccctcccagaa

SEQ ID NO: 998214 - DNA, 120 bp, Artificial Sequence
  ENSG00000286618_4 (sequence is synthesized)
tttaaatgctgctgcagacatcctccaccaacacagggaggcggagagattgtgtcatgaggttttctgccactgcccagcccacctgctcccacacttccccctctggttttgtggtta

SEQ ID NO: 998215 - DNA, 120 bp, Artificial Sequence
  ENSG00000286618_5 (sequence is synthesized)
aaacaaaaaaaaacaaaaacgcacacacacaatctacagttaaaacattacttatgtacaatatcattaactagctttttcatttacgggatgggcattcagcatccaggaagagcactt

SEQ ID NO: 998216 - DNA, 120 bp, Artificial Sequence
  ENSG00000286618_6 (sequence is synthesized)
agggatcccatgaaaaagggagaaagtagggaaaaacattaatgtaaaattaaatagaatggatttttgtttctttcggtttaagtaacataaaggtaatatctgcaaccactcttgcct

SEQ ID NO: 998217 - DNA, 120 bp, Artificial Sequence
  ENSG00000286618_7 (sequence is synthesized)
cgagtatgcagtagcttgttacttagacaaatggcactagtgacattaaaatataaaattctatatgaaatagaagaatggtaatttattctagatgttgcagaagtaaagcagtttctg

SEQ ID NO: 998218 - DNA, 120 bp, Artificial Sequence
  ENSG00000286618_8 (sequence is synthesized)
actgagagcaggatgactgcttgagagggctgcttcaggagccagaccgtggttctgaattccgctgtgtcactgctgacctgtgcaaccttgggcaaatcgcccagcctacctatcctt

SEQ ID NO: 998219 - DNA, 120 bp, Artificial Sequence
  ENSG00000286618_9 (sequence is synthesized)
gttccctcatccatgaaatgcaatactattacctaggtcatggggtttttgaggggtttaaatgaattagtatgttaaactagcaatgcttagcacatattagatgcaaatgctctgcgt

SEQ ID NO: 998220 - DNA, 120 bp, Artificial Sequence
  ENSG00000286618_10 (sequence is synthesized)
atcttaaggactatatgtgtgttaactattatgaaatttttaagaggggcaggcagtcacgaattgtaatgtcctttaaaagaacaggttattaaaatgagagtagacgtaagatcttta

SEQ ID NO: 998221 - DNA, 120 bp, Artificial Sequence
  ENSG00000286618_11 (sequence is synthesized)
aattgtatgcatcaataaggaaattttgcacatttctaaaggaacagattcgattttggaatcatctttttttctagtttttctcccaaggtatgtaaagtaggccacttaaaaagaaaa

SEQ ID NO: 998222 - DNA, 120 bp, Artificial Sequence
  ENSG00000286618_12 (sequence is synthesized)
acatttttaaaaatttctgtattaaaaaacactttactaggtatttaaaaggtgtctgaatgaaagaaaattacagggaaagtccgaatattagagcagaattcagggatagcagagctc

SEQ ID NO: 998223 - DNA, 120 bp, Artificial Sequence
  ENSG00000286618_13 (sequence is synthesized)
tgggtccttttaaaatatttaatattgccttgagattacttatcttcatttgctttctcagttgtgaaatgcagattgcactatttatttaccttacacctttattgttaagacttgtgt

SEQ ID NO: 998224 - DNA, 120 bp, Artificial Sequence
  ENSG00000237756_0 (sequence is synthesized)
gagaggactgcaggtggagaaggaggtactgaggtactgaggtactgaggtaacatactgactgtatcctcttccaggaaggcaaggttcagaagtaagagctggagaaagagggccaca

SEQ ID NO: 998225 - DNA, 120 bp, Artificial Sequence
  ENSG00000237756_1 (sequence is synthesized)
agtgttgtatgtaatacagggatatagaattcagattcaaagcctatgcttttttctcatgatgccataacactgcatgagccttgagtttgaaattaatttggatttgaagtaataaaa

SEQ ID NO: 998226 - DNA, 84 bp, Artificial Sequence
  ENSG00000237756_2 (sequence is synthesized)
ataaatttaggtataatgtactcattaccataatgtaatggtattcatgtaacaaaaaaaacacttgtacctcaaaagctattg

SEQ ID NO: 998227 - DNA, 120 bp, Artificial Sequence
  ENSG00000255916_0 (sequence is synthesized)
agacgcccggggcccccaacggccagcacggtccgaatcgaccccaagcttgacccgagggcagcggggcctccgggaatgcctggccagggcggtgtcgccgggagtgaatgggggagg

SEQ ID NO: 998228 - DNA, 120 bp, Artificial Sequence
  ENSG00000255916_1 (sequence is synthesized)
agctgagtcccgggacgggtatgggggggttggggcttgggatgcagccggacctccgggaacagcagggggccctggagccaccaggagggagaaggccccgtccctgagccaggctcg

SEQ ID NO: 998229 - DNA, 120 bp, Artificial Sequence
  ENSG00000255916_2 (sequence is synthesized)
caggatgtttatcccaggaaatccagaggatcagaaccaggcaggacccggcactgggacggaggcagctgtctgcggggcgtttaccgtagatacgtatcacctgttctgagacagagc

SEQ ID NO: 998230 - DNA, 120 bp, Artificial Sequence
  ENSG00000255910_0 (sequence is synthesized)
gtggcattttccccgctcctctggccgccgaaggagtcctgtggtgccgggcaggaatgggctgcttggggacccaacgagctcccagagcctttcctgctgcttcctctacccctgtgt

SEQ ID NO: 998231 - DNA, 120 bp, Artificial Sequence
  ENSG00000255910_1 (sequence is synthesized)
ttcgctaggctctcgagatggactcagttccagattgcccagcctcacatattccttcatagcaacacaaagggactgagacaatatataagttaacatctgccatgtagtggaggttcc

SEQ ID NO: 998232 - DNA, 120 bp, Artificial Sequence
  ENSG00000255910_2 (sequence is synthesized)
gtccttctgagaaagaggagagacagggtcttcctctttgcctaagctggagcgcattggtgtgatcatcgctcactgctgcctcaaactcctgggctcatgcgaccctcccacctcagc

SEQ ID NO: 998233 - DNA, 81 bp, Artificial Sequence
  ENSG00000255910_3 (sequence is synthesized)
gcctcaaactcctgggctcatgcgaccctcccacctcagcctcctgactagttgggactacagaattggttccttccagtg

SEQ ID NO: 998234 - DNA, 61 bp, Artificial Sequence
  ENSG00000255910_4 (sequence is synthesized)
gtcctctcgctaacttccaagaatgaagccgtggacgttcacagtgagtattagacctcct

SEQ ID NO: 998235 - DNA, 120 bp, Artificial Sequence
  ENSG00000255910_5 (sequence is synthesized)
ggggcagccgggaagcggatggggcggtgcatcactcgggtccgctccacaccgtcgccactgctgtggtagccggttggccgaggggccacgataactggttgcccgcagtaggagcag

SEQ ID NO: 998236 - DNA, 120 bp, Artificial Sequence
  ENSG00000255910_6 (sequence is synthesized)
gactccagcatgatgggcaccaagggattttggtccttctgagaaagaggagtctttttcagaactatttgaaaacaagttgcagtcatgatgcctcactactcctaaatgctatgcagt

SEQ ID NO: 998237 - DNA, 120 bp, Artificial Sequence
  ENSG00000255910_7 (sequence is synthesized)
tccaacaatgtgtctttgccttctggccccagaatatcatctgggaatgcgtgttgcatcaagttgcgtctctccagttgcctccaatttggaatacagggaggtatctattctgcataa

SEQ ID NO: 998238 - DNA, 120 bp, Artificial Sequence
  ENSG00000255910_8 (sequence is synthesized)
attcagatgagacaataaaaacaatgatttcaaagttccaggttttacaaaaggagcctgtgtttgtgaaaaccttcagaggatggaaacagcaaatactgttgtaggggaagacaattg

SEQ ID NO: 998239 - DNA, 120 bp, Artificial Sequence
  ENSG00000255910_9 (sequence is synthesized)
atcacagggactgtgagatatgtccttaggagtaaagttttgttgtgacgtgttatattcagtgttcaagtatccgtgggttgaacgatacttctctttctgtctgtgagcataaacttg

SEQ ID NO: 998240 - DNA, 120 bp, Artificial Sequence
  ENSG00000255910_10 (sequence is synthesized)
acttcagaagagagcatggggtaaagacaagcctctctcctttcccatacttgagtagtagcatatgaagtctggaaagacataactaggtaaaatattttatattactgtagtagggct

SEQ ID NO: 998241 - DNA, 120 bp, Artificial Sequence
  ENSG00000255910_11 (sequence is synthesized)
ttaccccatttcagagccttcctttatctttcttgtttttaattctgtaattcacgtcacactagtctgaattggttttccttctccaaaactccctggcctatatcataaatttaaccc

SEQ ID NO: 998242 - DNA, 120 bp, Artificial Sequence
  ENSG00000255910_12 (sequence is synthesized)
tttatatgaattgctttacattgttttccagttgtttcatatcttgtcttgatgctatcgattgtcaaagacagaacaaggctggtttcacagtgggcctcttttctcaaaaatatccat

SEQ ID NO: 998243 - DNA, 120 bp, Artificial Sequence
  ENSG00000255910_13 (sequence is synthesized)
tcatgggaatgagagagaagttacataatagttttaatgaataacatttttgtagtgatcaccttcaaaatttcaaaatgcttctgtttttcaaaaaataaagattgattttgaaattaa

SEQ ID NO: 998244 - DNA, 120 bp, Artificial Sequence
  ENSG00000255910_14 (sequence is synthesized)
aagcaaacacacaaatgtgaacaacagggaaagaacccattgacctaccaagacaggctgccaacagaattttgaaggcttgccaagatgcttttatggaggtagagtgaatgagattcc

SEQ ID NO: 998245 - DNA, 120 bp, Artificial Sequence
  ENSG00000255910_15 (sequence is synthesized)
tgaggactaccaaaacattgggaagaaatgtggattttatcattcaaggaaatataattttattgtaagatataatctttgtttttgtagtcaaatagaaacattcatgccttaatacaa

SEQ ID NO: 998246 - DNA, 120 bp, Artificial Sequence
  ENSG00000255910_16 (sequence is synthesized)
cgtttggtaaaaagaactgaagaagacaccatagaagattttaacaaacaatgaactcattagctaaaagatttgtcatgaaataatgattgatttagttgttttctaaaatatttctag

SEQ ID NO: 998247 - DNA, 120 bp, Artificial Sequence
  ENSG00000255910_17 (sequence is synthesized)
tgcctattagatgttgaaggagactttgatcatgaagtgtgttctctgaggagctgctatttttatttttatatttgtttgaagtgaattgtcctgctaattctttaacataaaatatct

SEQ ID NO: 998248 - DNA, 120 bp, Artificial Sequence
  ENSG00000255910_18 (sequence is synthesized)
tcaattacatgattcaacattttaaaaagtgattaagacagaagaatatgtgctgggatttatttttggatctttgaagtagcaaagagtagcagaactccttaatccatagagtggtta

SEQ ID NO: 998249 - DNA, 120 bp, Artificial Sequence
  ENSG00000255910_19 (sequence is synthesized)
ttttgctgtatgatgactcttgtatttactccctgaattaccctttccactaaaaagtattaatgagacattagtaggctatagaaaaaaatacttctgatctacttagaaatattcatg

SEQ ID NO: 998250 - DNA, 120 bp, Artificial Sequence
  ENSG00000255910_20 (sequence is synthesized)
aggttttctcctggtggattcacatcaaattttattttttaaaaccccaagtatttttatttgatgattaataagtaagatggaggctggtaggtggaaatcgccagcaggaaaataaaa

SEQ ID NO: 998251 - DNA, 120 bp, Artificial Sequence
  ENSG00000287052_0 (sequence is synthesized)
acagccaaaccgtatcggtgaccaagagaatgatccagaacataagggagacaggagcacaaaacagagagaagtcactggcctggaggagacaagaaaggagctatcgaccacccttgc

SEQ ID NO: 998252 - DNA, 120 bp, Artificial Sequence
  ENSG00000287052_1 (sequence is synthesized)
ccaggaagatgtctggaaaccatgtgcctagagatgggcaagagggcagtgtcccagctggctgagtcggtgaccagatttcattgtctttggaaaggagtcaagctccaactccacaga

SEQ ID NO: 998253 - DNA, 120 bp, Artificial Sequence
  ENSG00000287052_2 (sequence is synthesized)
aaaataacagggagatcaactcagaggaaataacagtgaaaatcagtgaggaccagagtttatctcctacccactctctttaattgctggacagaatctgctgcttttaatataagcttc

SEQ ID NO: 998254 - DNA, 120 bp, Artificial Sequence
  ENSG00000287052_3 (sequence is synthesized)
ccggggaaagaaggaaagggccaaaggccctgcttggctgtactcaggatcagcttgaaaaccaacctcattttcagcaaccggcttctccctggttgcatgaacattttgttcgacacg

SEQ ID NO: 998255 - DNA, 120 bp, Artificial Sequence
  ENSG00000287052_4 (sequence is synthesized)
actctccttctttcattttcctaaagcagcagttgccaaccttggctgcacattaaaaatcacctgggagatcttttacaatactaatgccacttttagagctttatatttaatgggtct

SEQ ID NO: 998256 - DNA, 120 bp, Artificial Sequence
  ENSG00000287052_5 (sequence is synthesized)
gctgtgtgaactggccctcgagattatctaaatttccctaggtgactctaatacgcagccagttgagagctactgtcctgaagcattgttaacaggacatttttgtatatttagggttgc

SEQ ID NO: 998257 - DNA, 120 bp, Artificial Sequence
  ENSG00000287052_6 (sequence is synthesized)
ttgcaaaggcataattatggcagaaggtgaaaaacaacttcaaaatcaattttaaatatttgtgtccttaaaaaatccctctgggcatagtgtctcatgcctataatcccagcagtttgg

SEQ ID NO: 998258 - DNA, 120 bp, Artificial Sequence
  ENSG00000287052_7 (sequence is synthesized)
gaccagcctgggcaacataatgagacccctgtcactaaaaaaatttaaaaatgataatataaataaataaataaaaatcccgtagtcagtcctctcctttgagaaagtcttcctaaagag

SEQ ID NO: 998259 - DNA, 120 bp, Artificial Sequence
  ENSG00000287052_8 (sequence is synthesized)
ccctctctgtcctcctgcccccaactctagcatttctgatatataaaactctgtcataatacagtaagtagtgccccaaaaactgcaggagcaaatcattctgaggtcaatgaaatgacc

SEQ ID NO: 998260 - DNA, 120 bp, Artificial Sequence
  ENSG00000287052_9 (sequence is synthesized)
cacatgaacctctgtagttggccagccaggaacctgaaaaacaggctgtgtcatccaaaatacattccatctggtggtagtttaactgtccagctaaaacatcaataggaacattctgga

SEQ ID NO: 998261 - DNA, 120 bp, Artificial Sequence
  ENSG00000287052_10 (sequence is synthesized)
tgctctggcctgctaggaattccggtactacagcagggattccggggtctctgggtagctggtaacccttccttccaccagctctggagaaagtggacaggagagcacagggaaacctct

SEQ ID NO: 998262 - DNA, 120 bp, Artificial Sequence
  ENSG00000287052_11 (sequence is synthesized)
gcctcccaacatcccacaatgaggagcctccattccctgatcttttgtctgtgctccagttccctactcccctacttccctacccaccacttcacccccacccccttgcagaagagagct

SEQ ID NO: 998263 - DNA, 120 bp, Artificial Sequence
  ENSG00000287052_12 (sequence is synthesized)
tttggtgagcctaaacaaaactgaggggcaagcctgcatacctcagacacattatccctattcaacttcacaaaaactccatgaagaaggctctgttcgtatcctatttctcaaaataca

SEQ ID NO: 998264 - DNA, 120 bp, Artificial Sequence
  ENSG00000287052_13 (sequence is synthesized)
aaaaacttaagtaacgtgcccagtgttttagctggtaacctggaattaaaccaaattaattccagacacttcttcataataaaagggtttcaggcttatggccatctagatcagggacac

SEQ ID NO: 998265 - DNA, 120 bp, Artificial Sequence
  ENSG00000287052_14 (sequence is synthesized)
taaagcttttggatggcatattccataggacaatttggaggaactacctctacattgtaaaactgacatccacttaatagaagaagcatttgacaaaatgtaatattcgttcatgattaa

SEQ ID NO: 998266 - DNA, 120 bp, Artificial Sequence
  ENSG00000287052_15 (sequence is synthesized)
aaaaaaactctcaacaaaaaagtatagaaggaacttaacacaatatagacaatatatgaaaggcccacagctaacatcataatcaatgaggaaaagctgatagattttccactaagatgt

SEQ ID NO: 998267 - DNA, 120 bp, Artificial Sequence
  ENSG00000287053_0 (sequence is synthesized)
gacctaaagaacaaactataaaatactgaaacacaccatgcaaatatacgcacattactctgctaaatatcggaaccaaagtaatctatttagagaaaaggggtgagaggtggccttttt

SEQ ID NO: 998268 - DNA, 120 bp, Artificial Sequence
  ENSG00000287053_1 (sequence is synthesized)
actaatctccaagagtgcttgtgaattaattcaaacctggtaaaatctttcacttgaaggaatcaaggttgttatgttacgggaccctccgttaaagaaacagaggctttgaagtggagg

SEQ ID NO: 998269 - DNA, 120 bp, Artificial Sequence
  ENSG00000287053_2 (sequence is synthesized)
tttattcatccttccccggatggactggaaaattggcagtgcccaggttcatcacaggacagatactcaggacatgctgatctcggagagttgaaggaacaaaaaaactggatacagtgg

SEQ ID NO: 998270 - DNA, 120 bp, Artificial Sequence
  ENSG00000287053_3 (sequence is synthesized)
ctcctcagcagaaacacatgggtgtaaggatttgggatccatcttcagtttaggaaaataattttttttccatgttcgtatacaagaaaatccccatttgctgtaacgtggggtccacac

SEQ ID NO: 998271 - DNA, 120 bp, Artificial Sequence
  ENSG00000287053_4 (sequence is synthesized)
gggagataggccttgtgctggcaaagaagtagcctcctgccctcaaactcagagtccaggatagacactctgaagtgtaatctttccttgttgatcaagagattttttgcaaattgccag

SEQ ID NO: 998272 - DNA, 120 bp, Artificial Sequence
  ENSG00000287053_5 (sequence is synthesized)
ctcccattcttcacctgttcccatacccacctcccaatcatggtcaccagaggtaaaaggaggagagcccaagacacaaactgtgaagtcgaatctcccagcaagctcttgctgattcta

SEQ ID NO: 998273 - DNA, 120 bp, Artificial Sequence
  ENSG00000287053_6 (sequence is synthesized)
attggatgctccagaggtcatcagaaataataaagaagttatgggtcgtgtcaacatccaaggtcacgtccacttggaacttcagcattctaggattcatctgtagaaaagctctcagct

SEQ ID NO: 998274 - DNA, 120 bp, Artificial Sequence
  ENSG00000287053_7 (sequence is synthesized)
ggggctccatttccttgatattgggaatctgctttcatagctgccagttggacctgatgtcatttttctgagaaaccactatgcaaaagaagaacaataaaccttttccatgaggctctt

SEQ ID NO: 998275 - DNA, 120 bp, Artificial Sequence
  ENSG00000287053_8 (sequence is synthesized)
tctgcagtgaattgacactgttgaggcagaagatgcatacacgtttcaggttcattggtttctcaagatagtttcaggtacattggtttctcaggatacgttgaccagatgggaaatctt

SEQ ID NO: 998276 - DNA, 120 bp, Artificial Sequence
  ENSG00000287053_9 (sequence is synthesized)
cttaaagcttgtaagagtttgtccatgtccactcttctgtgctagaatctcttctatactctatttacttccaccagtagtttaggtcttgtggggaagagacacaggagagccttttat

SEQ ID NO: 998277 - DNA, 120 bp, Artificial Sequence
  ENSG00000287053_10 (sequence is synthesized)
tgatgagactccttcctgtctctttagccacaccctgccatgcctctttctcctaatcagattttgatttttaattatatcagataattagggcttatattgtattttttattgatatat

SEQ ID NO: 998278 - DNA, 120 bp, Artificial Sequence
  ENSG00000287053_11 (sequence is synthesized)
catagctgtacatattttcaaagtgcatgtaatattttcatacatatatacaatgtgcaatgatcaaacagggtaattgtgatatctgtcacttaaaacatttttctttgtgttgagaac

SEQ ID NO: 998279 - DNA, 120 bp, Artificial Sequence
  ENSG00000268093_0 (sequence is synthesized)
ataaacaagagaccaaaacagtgggattgagaatgtgcaagtatgaggatcttggcttttagatggtcccttacctggtcctgctgctcctctgcttcaaggtgtccattcatctgctgg

SEQ ID NO: 998280 - DNA, 120 bp, Artificial Sequence
  ENSG00000268093_1 (sequence is synthesized)
tcctctgctctgttacatcaacgggaccctggccctgggtcttaagccatagtaggctggtaggagcaaggagtcaggtctcactgtcctggcctgaccttcagctctgtggaggagagg

SEQ ID NO: 998281 - DNA, 120 bp, Artificial Sequence
  ENSG00000268093_2 (sequence is synthesized)
tcagggaagggccatctaggggccgggggagaaggagaagcggaactcaaaggatgggaatacaggatgctatagattgaggtgcagcaagatcatctcgggttagaccttaagtaggac

SEQ ID NO: 998282 - DNA, 120 bp, Artificial Sequence
  ENSG00000268093_3 (sequence is synthesized)
agcggtgaacctgataaggaaacgcccgaagcgtggggtcggaaatttccagatgccccgactagccctgccagccccgcctcctcacctccaacactgggcccgccgggtcctccggga

SEQ ID NO: 998283 - DNA, 120 bp, Artificial Sequence
  ENSG00000268093_4 (sequence is synthesized)
gccactgagaggccgtcggcgtcgggccagagcgtcaccgcgcgacgcatcgtgctagctacacgcatctcgctcccagatccctttcttccggaaagctatcgagaacacggcctgggt

SEQ ID NO: 998284 - DNA, 120 bp, Artificial Sequence
  ENSG00000268093_5 (sequence is synthesized)
agggccagagaggcccccgacgtgctggcccttccctcttggacgttgcgcttgttcctgcgctctatgctctctgccgttatcgcccggctagtcagtcgtccaactcaccacagagaa

SEQ ID NO: 998285 - DNA, 120 bp, Artificial Sequence
  ENSG00000268093_6 (sequence is synthesized)
gccatctttgttaagggagagtgggcctgtctcatccattgaattcacaaaagaaaaggggcgtgagggaggaggtctttagctgcaaagacagagactctaacacgcgtaacaaaggcc

SEQ ID NO: 998286 - DNA, 120 bp, Artificial Sequence
  ENSG00000268093_7 (sequence is synthesized)
cagagatccgatccagacacagagcaaggcagagacccacagaggttggatgaggcaataagagagctgggaggagagggagagtggggaaagtgaaggatacttttttttcggacagtt

SEQ ID NO: 998287 - DNA, 120 bp, Artificial Sequence
  ENSG00000268093_8 (sequence is synthesized)
gacagttacagagtcagagagacccagagaaaagcagagatataaacaagagaccaaaacagtgggattgagaatgtgcaaggctggagtgcagcgcgatctcggctcactgcaacctct

SEQ ID NO: 998288 - DNA, 81 bp, Artificial Sequence
  ENSG00000268093_9 (sequence is synthesized)
tgaggatcttggcttttagatggtcccttacctggtcctgctgctcctctgcttcaaggtgtccattcatctgctggtcct

SEQ ID NO: 998289 - DNA, 120 bp, Artificial Sequence
  ENSG00000287051_0 (sequence is synthesized)
gacccacctctgctcctcgccctccagcaggcgcctgtaggtggcgatctcgatgtccaggcccagcttggagttcatcacctcctggtactccctgatcaggcaggccatgtcctgctt

SEQ ID NO: 998290 - DNA, 120 bp, Artificial Sequence
  ENSG00000287051_1 (sequence is synthesized)
ggccttctgcagggcaccctccagctcggccaacttgcagcgggcatcgctgagggccgcctcaccctgctgctcagactgagccaccgcagcctccagcttggaattctgaagagaaca

SEQ ID NO: 998291 - DNA, 120 bp, Artificial Sequence
  ENSG00000287051_2 (sequence is synthesized)
gagagaacaaggaccaactcacgtcccgcacacccacctcaacctcccaatacacagttgaggaaactgacgttggacgaaggagtgggcagtgactcagttgcagcagaaaagttgaaa

SEQ ID NO: 998292 - DNA, 120 bp, Artificial Sequence
  ENSG00000287051_3 (sequence is synthesized)
tatctatttctcactgtatacaaaaaccaaattaaaatggattaaagacttaaatataagacctcagactatgaaactactagaagaaaacattgaggaaatgcttagggcattgacctg

SEQ ID NO: 998293 - DNA, 120 bp, Artificial Sequence
  ENSG00000287051_4 (sequence is synthesized)
gacaaagatttcttgattgagacctcaaaaccaaaggcaaccaaagcaaaaaatgggcaaatgggatcacatcgagctaaaagaacttctgcacaccaaaggaaacaatcaacaagttga

SEQ ID NO: 998294 - DNA, 120 bp, Artificial Sequence
  ENSG00000287051_5 (sequence is synthesized)
agaaatgacctacagaatggaagaaatatttgcaaactattcaactgacaaggaattcgtagctgcaatatataaggaactcaaacaactcaatagcaagtaaaccaaataatctgattt

SEQ ID NO: 998295 - DNA, 120 bp, Artificial Sequence
  ENSG00000287051_6 (sequence is synthesized)
atcatcaaagaaatacaaatcaataccacaataagattatcatctcaacccaattaaaatgacttttatcaaaaagacaaaaaaattatggatgctggcaaggatgtggagaaaggggaa

SEQ ID NO: 998296 - DNA, 120 bp, Artificial Sequence
  ENSG00000287051_7 (sequence is synthesized)
cacttgtacactgctagtgggatgtaagttactacagccactatggaaaacagtatggagtgtcctccaaaagctaaaaatagaaccaccaggtgatccagcaatcccactactaggtat

SEQ ID NO: 998297 - DNA, 120 bp, Artificial Sequence
  ENSG00000287051_8 (sequence is synthesized)
acatccaaaagaaagaaaattcttatatcaaagagatgtctgcactcccacgtttattgcagcgctattcacaatagccaagatttggaatcaaactaagtgtccatcaatggatgaata

SEQ ID NO: 998298 - DNA, 90 bp, Artificial Sequence
  ENSG00000287051_9 (sequence is synthesized)
agatttggaatcaaactaagtgtccatcaatggatgaataaagaaagtatgttacagatacacaatggaatattattcagccataaaaag

SEQ ID NO: 998299 - DNA, 120 bp, Artificial Sequence
  ENSG00000287051_10 (sequence is synthesized)
ggacattatgttagggaaaataattgaggtacagaaagacaaatttcagatgttcttacacatatgcgagagctaaaaaaattgatctcatcagatagagagtagaatgatggttaccag

SEQ ID NO: 998300 - DNA, 120 bp, Artificial Sequence
  ENSG00000287051_11 (sequence is synthesized)
gataaagacgtgttaatgagtacaaaaatacagttagataacagaaatgagatctagtgttcagtagcacaatagaatgactatagttaatcatttattgtgtatttcaaaataactaaa

SEQ ID NO: 998301 - DNA, 120 bp, Artificial Sequence
  ENSG00000287051_12 (sequence is synthesized)
ggagtaggcttggaatgatcccaacacaaagaaataataaatgtttgaggtgatggatattccaagtactctgatttgatcagtacacagtttatgcttatctcaaaatatcttatgtag

SEQ ID NO: 998302 - DNA, 120 bp, Artificial Sequence
  ENSG00000268095_0 (sequence is synthesized)
gatgcaatatgtctgcgcccaggggacgcttgctgggagcagccattttcaaccctactgccgtagagcaggcggagtccctcttttcgcgccttaagacagaaacacaaaatgatcctc

SEQ ID NO: 998303 - DNA, 120 bp, Artificial Sequence
  ENSG00000268095_1 (sequence is synthesized)
tgacaagtgatgaagaagaatgggaagatgtgaaaatccaagcaagaagaacttaggggaagcaactcaacatctaagaagaaatgaatagggatcagttccaagaagagataaagggga

SEQ ID NO: 998304 - DNA, 120 bp, Artificial Sequence
  ENSG00000268095_2 (sequence is synthesized)
atgatgacatccacatccaggaacctcctccttccttcatttgaactctcttgcttctggggagccaggacctatggagtaaaaatcaagttcatttggtgacacattccctccgggccc

SEQ ID NO: 998305 - DNA, 120 bp, Artificial Sequence
  ENSG00000268095_3 (sequence is synthesized)
agatgctgtctctgctgctgtaaactctcctgcagtcaaggccaagcaatatatctaagcatccctttgtcaggtgtccccaagtctttacatcccagggcaataaaacaacactctgaa

SEQ ID NO: 998306 - DNA, 120 bp, Artificial Sequence
  ENSG00000287057_0 (sequence is synthesized)
aatacagtacggattttaactgagacacatggaaacatcaggcaccaccgtagccaactgattgaagctagcattatcactattgggacaaaactgtatcacatgcctcttgatatgata

SEQ ID NO: 998307 - DNA, 120 bp, Artificial Sequence
  ENSG00000287057_1 (sequence is synthesized)
tactatgaaagatgctacatcactttgatgatatcctgccaaaaatgcataacctgaatctaatcatgaggaaacatcagaaaaaccaagttgagtgaaattctacaaaataattggtct

SEQ ID NO: 998308 - DNA, 120 bp, Artificial Sequence
  ENSG00000287057_2 (sequence is synthesized)
aaaggaccagacaattaagtgcaaagcataactctgaatggagatggaataaaagaactctaaggcagaggttggcaaaccagttctgtgaagagccagatagtaaatattttaggctgt

SEQ ID NO: 998309 - DNA, 120 bp, Artificial Sequence
  ENSG00000287057_3 (sequence is synthesized)
atggaccatatggtctatgttgcaacttttcaactctgtgattatagtgtgaaagcagccatagacagcacgtaaacaaatgggtttggttttgttccaataaaaccttatttgaaaaca

SEQ ID NO: 998310 - DNA, 120 bp, Artificial Sequence
  ENSG00000287054_0 (sequence is synthesized)
atttacaatttgtggtttatcgactgtttccatcactagaatgtaagctctctgaaagcaaggattttgtcttgaacacctctatttatacccaatgtctggcacagaacgatcttgctg

SEQ ID NO: 998311 - DNA, 120 bp, Artificial Sequence
  ENSG00000287054_1 (sequence is synthesized)
ctgctcactctttgagactgcgctgcctttaaaagctataacactcactgcaaagttctacagcttcactcccgaagtcagcgtagaacacgaacccaccagaaggaagaaacttcagac

SEQ ID NO: 998312 - DNA, 120 bp, Artificial Sequence
  ENSG00000287054_2 (sequence is synthesized)
acaaactctggacacaccatctttaagaaatgtaacaccgcgagggtctgcagcttcattcttgaagttagggagaccaagaacctaccaattctggacacactgggattacaggcatga

SEQ ID NO: 998313 - DNA, 84 bp, Artificial Sequence
  ENSG00000287054_3 (sequence is synthesized)
tctggacacagagatcctcatttttacaaaaaaatgaaaaaatgagttgtatgtggcagcacatgcctgtagtcctagctactc

SEQ ID NO: 998314 - DNA, 120 bp, Artificial Sequence
  ENSG00000287054_4 (sequence is synthesized)
gaggtgggaggattgtttgagcccaggctgcagtgagctatgaacgtgacactgcactccagtctgggtgacagaaagcgatcatctaaaagaagaaatagagaagcagtgtagttgtga

SEQ ID NO: 998315 - DNA, 120 bp, Artificial Sequence
  ENSG00000287054_5 (sequence is synthesized)
gaaaattgtgtgaccttgaacaagtaccttaaccttatcaggtctctataaaataggaaaaatatcacctacctgatgggcttgctatgacgagtaaaggaattatattggtatcaatac

SEQ ID NO: 998316 - DNA, 120 bp, Artificial Sequence
  ENSG00000287054_6 (sequence is synthesized)
agtgtctggcgtaatgctagcatatgctgtaggaatgccagagacatggtaattaccattattattgagttattggagttttggtgtttaagaaagggttgttgctttgactaaaagcat

SEQ ID NO: 998317 - DNA, 120 bp, Artificial Sequence
  ENSG00000287054_7 (sequence is synthesized)
tgctccactcactgtaagatcagggaagtcagaaaatcaccattatctgagcaggtagtttccttgtgaagcaaaaaattgcagaagctgctccagagcgtagggcaggattccactgga

SEQ ID NO: 998318 - DNA, 120 bp, Artificial Sequence
  ENSG00000287054_8 (sequence is synthesized)
taaatttaatcgttgtatttgagagtggcatttaacaacttcctgcttttaaaatacttaaatacctaagatactctgccaaatggaaagaatttgttctccgaacacagtgcctccaac

SEQ ID NO: 998319 - DNA, 120 bp, Artificial Sequence
  ENSG00000287054_9 (sequence is synthesized)
attaaatattctggacacttcgttggttcgcaactgtgatacttggaaacttgccacgttagattcttcaggattctaaaataaccttttcctgacttcatttatttaaatatcccagaa

SEQ ID NO: 998320 - DNA, 120 bp, Artificial Sequence
  ENSG00000287054_10 (sequence is synthesized)
taatctcttaagctataagtttgatgatccaggaaactatttataggaggatgagtactctctgtgactgatggtagttatgttttattttgagaaggacaaatcattaaaaagattgat

SEQ ID NO: 998321 - DNA, 120 bp, Artificial Sequence
  ENSG00000287054_11 (sequence is synthesized)
agggctggtggtattttaaactgaaagcagtaccaaggcaaacaaggcagttgaggtatgaagttggaacataataagatatgggtgtaattttcatcaacttagctaagacctagggag

SEQ ID NO: 998322 - DNA, 120 bp, Artificial Sequence
  ENSG00000287054_12 (sequence is synthesized)
gtcttccaatagaaggaaggcagaaacaggcagtaacacagacagtgatcttttaggtccactggacactttagcttaggcagctcgggttgtttgctcagtgattaacaactgagataa

SEQ ID NO: 998323 - DNA, 120 bp, Artificial Sequence
  ENSG00000287054_13 (sequence is synthesized)
acagatggagacaggactctgtcataattaaggtcaacagtgtgcttggtattattgatattgcccctaggtaggagaaaaacagaggaaggaaggtcaaggtcaacctaacttaaaaaa

SEQ ID NO: 998324 - DNA, 120 bp, Artificial Sequence
  ENSG00000287054_14 (sequence is synthesized)
actttaaaaaattgtggtgaaatatacataaaatttaccattttcatcatttttaaatgtacaaatctgtcactgatcatgcacattgttatgcaactaccaccagcatctatctccaga

SEQ ID NO: 998325 - DNA, 120 bp, Artificial Sequence
  ENSG00000287054_15 (sequence is synthesized)
actttctcatcttcccaaactgaaactctgtatcccttaactctccatttcactctacttgtgaaaccgcttttctgtctttatgtagtttattgtaggtgcctgatacaagtggaatca

SEQ ID NO: 998326 - DNA, 120 bp, Artificial Sequence
  ENSG00000287055_0 (sequence is synthesized)
gtgggaggttacggaccccggcaggagcgcccaccgaaatcctgtccccagctgaagcaacacgacccgcatcagtttactttccagtttgcctaatttctagaggttgaaattgaggat

SEQ ID NO: 998327 - DNA, 90 bp, Artificial Sequence
  ENSG00000287055_1 (sequence is synthesized)
tttccagtttgcctaatttctagaggttgaaattgaggataggaaagtacgaggtggaggtggtgggccagaatcaaacccaaaatagac

SEQ ID NO: 998328 - DNA, 68 bp, Artificial Sequence
  ENSG00000287055_2 (sequence is synthesized)
caggatatattctcccccttgcccttaagtaggtgctttgtaatattctcccccgcccttaagaatgt

SEQ ID NO: 998329 - DNA, 77 bp, Artificial Sequence
  ENSG00000287055_3 (sequence is synthesized)
caccctaactgacaggatatattctcccccttgcccttaagtaggtgctttgtaatattctcccccgcccttaagaa

SEQ ID NO: 998330 - DNA, 120 bp, Artificial Sequence
  ENSG00000287055_4 (sequence is synthesized)
cgcctgcacccaggtcaccacttccagcctggcgacttggtgctaattaagacttggaaggaagacaatctccacccaagctgggaaggttcctatcaagtgctcgtgatcactgagaca

SEQ ID NO: 998331 - DNA, 120 bp, Artificial Sequence
  ENSG00000287055_5 (sequence is synthesized)
gccgtaggaacagctgaacggggtggacactcacactcgggtcaagagactggtaaaagaaaccccagaaggaagggaaaaagaaactttgctctggtggaggaaacaaacatggacaca

SEQ ID NO: 998332 - DNA, 120 bp, Artificial Sequence
  ENSG00000287055_6 (sequence is synthesized)
gctggaggagaagccagttgccatattgtgaggatgctcaagcaaccttatgaagaggtctacatggtgaagaactaaggcctactatcaaaaacaaacactaatttgccagacatataa

SEQ ID NO: 998333 - DNA, 120 bp, Artificial Sequence
  ENSG00000287055_7 (sequence is synthesized)
tcagcttctgataactgtagagaaaagtatgggcagaaaggagaaagtaagccaagaggggagctggaagtcaggacctactgccttggaaagccatcgtgctgtgaggactcttcatca

SEQ ID NO: 998334 - DNA, 120 bp, Artificial Sequence
  ENSG00000287055_8 (sequence is synthesized)
ctgccttggaaagccatcgtgctgtgaggactcttcatcattcctcaagtctccctctgatgccgagcagaagctggactgtactgccgctatctcggctcactgcaacctccctgcctg

SEQ ID NO: 998335 - DNA, 63 bp, Artificial Sequence
  ENSG00000287055_9 (sequence is synthesized)
tatctgccagcctcggcctcccgaggtaccgggaatgcagacggagtctcattcactcagtgc

SEQ ID NO: 998336 - DNA, 120 bp, Artificial Sequence
  ENSG00000287059_0 (sequence is synthesized)
taaaaacccctgtcctagcctactcggtgtgctcttgcgattgcatcagatgcaagcagcacccttccgcagaagtaaagttgccttgctgaagaatttttggtctaagtgctggctctt

SEQ ID NO: 998337 - DNA, 120 bp, Artificial Sequence
  ENSG00000287059_1 (sequence is synthesized)
ctttgtggaccaaacacctgtctccaacaatctgggggcttgtctgggattccattatcctccagggaagggtctccgatcatctctcatgaggagacacatcctgctgccttgtcacag

SEQ ID NO: 998338 - DNA, 120 bp, Artificial Sequence
  ENSG00000287059_2 (sequence is synthesized)
ttgcctcaggagtaagggatcgagacccatctggcatgacgaataaacccggactctcagcaatgcagagaaagaaaaagtctacaaataaatacagtggcaaccaggtaactctgagca

SEQ ID NO: 998339 - DNA, 120 bp, Artificial Sequence
  ENSG00000287059_3 (sequence is synthesized)
cagaccaaggactcaaggcctcctagcacaaactccaccccttgaattcccagttcaccaacaccaacccagagatcacgtccttatcaaaagctggaaatagggaaagctcgaacccac

SEQ ID NO: 998340 - DNA, 120 bp, Artificial Sequence
  ENSG00000287059_4 (sequence is synthesized)
ctgggaaggaccttatttggtgctcctaatgactgagacggcagtccagaccgctgaaaagtggtggacccattataccagagtcaaaaaagcattgccctctccagaatcatggactgt

SEQ ID NO: 998341 - DNA, 120 bp, Artificial Sequence
  ENSG00000287059_5 (sequence is synthesized)
cactccaggaacaacagcctcaaaatcaacattcaagtgggtttaatctatctttttcttctctccttagctactcaaggatatcttattatcagtgtaactcaatcaccctttccccaa

SEQ ID NO: 998342 - DNA, 120 bp, Artificial Sequence
  ENSG00000287059_6 (sequence is synthesized)
acagttacatttgatgcttgtctagtcttaccttgtggagatcttcaaagtcaaaggcagctagcctctgcagaaaaatacccctgtccctccaaggaaaacactactactactgtgtct

SEQ ID NO: 998343 - DNA, 120 bp, Artificial Sequence
  ENSG00000287059_7 (sequence is synthesized)
tgtgtgtggtgggaatcttcagaggaagagtcaggtaattgggagttatgttcacagtgggcagacgttctatggactactaaaaatcagggttggacctcctgacagggttgcactgcc

SEQ ID NO: 998344 - DNA, 120 bp, Artificial Sequence
  ENSG00000287059_8 (sequence is synthesized)
ctaaagccacacctacacttcaccaaagggactaccccctctaattgccaatctaaccattgcaacccagtacttatctctattaatacccttaccttcaccattcccacacccactgta

SEQ ID NO: 998345 - DNA, 120 bp, Artificial Sequence
  ENSG00000287059_9 (sequence is synthesized)
gagcgattttatggctaaggggcagatgttgctggaagggaccctataggcttctttaaattatgctttgttccttccccttcgtctcccaccccctcctcgatcccacaaattcaaacc

SEQ ID NO: 998346 - DNA, 120 bp, Artificial Sequence
  ENSG00000287059_10 (sequence is synthesized)
atttcccacctcatacccaacgacaaaaccaaagtatcgtaatagaaatcaaaaatttaaagcaaactttagccattgaaatagggtaccaagatgcaaatgcctggctggaatggatta

SEQ ID NO: 998347 - DNA, 120 bp, Artificial Sequence
  ENSG00000287059_11 (sequence is synthesized)
aatattctgtccacacactacacaaaagcgatttttatgcttgtgcgacaggcaggccagaaacccaaattgtcccctttcctctgaccaaccgggcatggactgtatgtatggtagccc

SEQ ID NO: 998348 - DNA, 120 bp, Artificial Sequence
  ENSG00000287059_12 (sequence is synthesized)
tcttccaaaaccccacagcctggggcaataaggcatgtctaaccctctccctactattcccagaagttaaaagccctgcaggtctgcccctgagggccattcggactccggctacaaatg

SEQ ID NO: 998349 - DNA, 120 bp, Artificial Sequence
  ENSG00000287059_13 (sequence is synthesized)
ttgttcatccctaagcagatgtatggtggtattgcggtggaccactattgggtactctgccaagtaactggagcagcacttgtgctctaatcaaattggccatccctttcaccctggaat

SEQ ID NO: 998350 - DNA, 120 bp, Artificial Sequence
  ENSG00000287059_14 (sequence is synthesized)
ttcatcaaccaaacaaaaaggacaactacagaaaaagaagtgtcccccatgggtcttttgaccctcatgtttatatagatgctatcggagttccccgaggggtgcccagtgaatttaaag

SEQ ID NO: 998351 - DNA, 120 bp, Artificial Sequence
  ENSG00000287059_15 (sequence is synthesized)
cctgaaatcaaattaccacaggatttgaatctgtattattctggtggtcaactacaaacaaacatgtagactggataaattacatttactataatcgacagcggtttgtcaattacacaa

SEQ ID NO: 998352 - DNA, 120 bp, Artificial Sequence
  ENSG00000287059_16 (sequence is synthesized)
gcgatgccattaaaggaatagctgagaaattaggccccaccagccaaatggcttggggaaacaggatagcccttgacatgttattggctgaaaaaggcagagtctgtgtcatgattggag

SEQ ID NO: 998353 - DNA, 120 bp, Artificial Sequence
  ENSG00000287059_17 (sequence is synthesized)
tccaatgttgcacttttatccctattaacacagcccctaatggaacaattacaaaagcattacagggccttacaagtgaattagctgaaaatcccggaataaatggccccttttcaggtc

SEQ ID NO: 998354 - DNA, 120 bp, Artificial Sequence
  ENSG00000287059_18 (sequence is synthesized)
ttatggaaaaatggtttggaaaatggaaatgactcatgacctcaatatttacttctcttgcagttgttacaggtgtactcattcttgtaggttgctgtattacaccttctgttcatgggt

SEQ ID NO: 998355 - DNA, 120 bp, Artificial Sequence
  ENSG00000287059_19 (sequence is synthesized)
tggtgcaaaggcttacagaaacagctcttactaaaacctccctcaattcttccccaccctattcagataaactcccacttctagatcaccaagaggaacaacagagccaaattatgtttg

SEQ ID NO: 998356 - DNA, 120 bp, Artificial Sequence
  ENSG00000287059_20 (sequence is synthesized)
aaaaatttgaagaggaaaaactataaagaggggggatattgccagaaacaataagttcctcttcaaacttcgttgttctttctggttctgtaaacaacccttcccacctaattggtaaca

SEQ ID NO: 998357 - DNA, 120 bp, Artificial Sequence
  ENSG00000287059_21 (sequence is synthesized)
ggaacagcctctcccttcctgcctaataggccctattcaatttcaaacaatagccaatcgggtttagattgtgtggtccaactctagttactggggaaaggacacagaaacatgagctgc

SEQ ID NO: 998358 - DNA, 120 bp, Artificial Sequence
  ENSG00000287059_22 (sequence is synthesized)
attaggggtaaaaacccctgccctagcccccttggtgtgctcttgcaattgcttcagatgcaagtagcacccttctgcagaagtaaagttgtcttgctgaggaattttcagtctaagtgc

SEQ ID NO: 998359 - DNA, 120 bp, Artificial Sequence
  ENSG00000287059_23 (sequence is synthesized)
tagttcttctttgtggcacccaacacctgttcccaacaatgagaatatcaacaaatagaaaatataacaaagaaccaaacagaaatgaagataaagatacaataatgaaaattaaaaatt

SEQ ID NO: 998360 - DNA, 120 bp, Artificial Sequence
  ENSG00000287059_24 (sequence is synthesized)
cactggaagtgtttgacatattatttgattccattcttcctaaatatgatttcaatcttcttaaatgtattcagtcctgttttgtgacctatcctggaaatatgtgatgtgatctatcct

SEQ ID NO: 998361 - DNA, 120 bp, Artificial Sequence
  ENSG00000287059_25 (sequence is synthesized)
ggagaatgttctgtgtgcacttgagaagattacatatttttcttttgttaattgaaaaattctgtatatggctattacatcaatttaaagtccactattttgttattgattttctatctg

SEQ ID NO: 998362 - DNA, 120 bp, Artificial Sequence
  ENSG00000287059_26 (sequence is synthesized)
gattttctattttttattgaaagtggggtactgaattattctaccattacactattgctgtccatttctcctttcagatattttgatatttgttctatatacttaggtagtctaatagta

SEQ ID NO: 998363 - DNA, 120 bp, Artificial Sequence
  ENSG00000204380_0 (sequence is synthesized)
gggctggggagagaagcggaagccagtgataggattcagagctggaaccagagatagcaggtcagggcggtaggtttggtactgaggggagaaggttcatttgggacaaattcactgagg

SEQ ID NO: 998364 - DNA, 120 bp, Artificial Sequence
  ENSG00000204380_1 (sequence is synthesized)
ccttgggcagagtgatagtgcatttttatagggcatcaacccctcacctgtgatgggagggcagaggttggcatgcaatggcacttatacaagggtagattccctcctttctggatgact

SEQ ID NO: 998365 - DNA, 120 bp, Artificial Sequence
  ENSG00000204380_2 (sequence is synthesized)
gtgaggtgcacctagactgtgggttatgggagatcctgccagccctggagtgcctggggccactggggcagggccacaatgctttccctgtgggcgccctgggcttggtgacctccagag

SEQ ID NO: 998366 - DNA, 120 bp, Artificial Sequence
  ENSG00000204380_3 (sequence is synthesized)
tcaatgttagtcaggccattgttgggccagttgtgtttgttaaagctctttaaaacaacatgcacaatcacaggcctgtcccacaactggattcatgactctgaaagggtttcttgtcca

SEQ ID NO: 998367 - DNA, 120 bp, Artificial Sequence
  ENSG00000204380_4 (sequence is synthesized)
ggcagaaccccctagaaggctgggggcagggacggggccgccccttgctttccccagtctggctgccagccccgcgactgcagctggcactggctgtgaggctgggcctgtgagaggctc

SEQ ID NO: 998368 - DNA, 120 bp, Artificial Sequence
  ENSG00000204380_5 (sequence is synthesized)
cgagcagcggaacaacacagtccttgaagcccatcgagactcaagttggctgtgggggtggaggacaaatggggaattatcctgaggcttccctgccctctgctttgccaagggttcata

SEQ ID NO: 998369 - DNA, 120 bp, Artificial Sequence
  ENSG00000204380_6 (sequence is synthesized)
gtggacttgctgggaggcacaagggcaggggctaggagagtccagctgttacaaacccaggggctcctctgcctagaaacccctttctaaccaggccagcacaaccagctgcagacaata

SEQ ID NO: 998370 - DNA, 120 bp, Artificial Sequence
  ENSG00000204380_7 (sequence is synthesized)
gtggcaaagcagccagcatccctgcttgggcactcctcaccatgcaagggagggaggagctgtgctggggcaggccctgctctccacacctgggcaggcagggctggggatattaatatg

SEQ ID NO: 998371 - DNA, 120 bp, Artificial Sequence
  ENSG00000204380_8 (sequence is synthesized)
tgctcagcactgtgcttatcttacaaaaattaacccacgagatagacgcagccagtatagcaaggcggtgtccagggtcgcatggccagtaagtgcagggccaggatgtgatcccagctc

SEQ ID NO: 998372 - DNA, 120 bp, Artificial Sequence
  ENSG00000204380_9 (sequence is synthesized)
tgtccaactcgcatgggagctcttcaccaagacaggacttgcaggactcagaagatggacgcactgtgtaactgtgagcccactgcttcacctctctgagctgcagagaaaagatgacga

SEQ ID NO: 998373 - DNA, 120 bp, Artificial Sequence
  ENSG00000204380_10 (sequence is synthesized)
gaaggagaggtcttagaacacatccttatctgaaggacaggatacagtcttgttttaggaaactccagctgctctgtgtcattgaaagggaagaggagagaccagatggtccaagttcgc

SEQ ID NO: 998374 - DNA, 120 bp, Artificial Sequence
  ENSG00000204380_11 (sequence is synthesized)
catggcactggtaaggacctgagactgactgcaggcccttcatgaaagcaaagcctgggtgtgttataaccgccagtcccactctcccacagtgaggtccatcccggcaggggctgagtc

SEQ ID NO: 998375 - DNA, 120 bp, Artificial Sequence
  ENSG00000204380_12 (sequence is synthesized)
caccttgaccactgagacaaacagacctggtgatggactcagtgtttttaaattgtggagcttggacagggaggggcgagatggagaacgaggtatacacaaaagagaacaatgtgatga

SEQ ID NO: 998376 - DNA, 120 bp, Artificial Sequence
  ENSG00000204380_13 (sequence is synthesized)
gggcatgaagtgtgcttaccaaccttccctcactcagaggctggaagagattttagagcttaacagaaaaagagtgggaagaggacactgctgggcaaaagacatgaactaaagacttct

SEQ ID NO: 998377 - DNA, 120 bp, Artificial Sequence
  ENSG00000204380_14 (sequence is synthesized)
cggctgtccccatcagtggcacggtggtctcagcagtaccgatgtggatactcaagaacgtgaggctaccgtggaaatgctttgcttaaaccacacgttgagtttccaaggagtgaagat

SEQ ID NO: 998378 - DNA, 120 bp, Artificial Sequence
  ENSG00000204380_15 (sequence is synthesized)
ccccagggaaagcatctaggaccctgccatgttggcccagctctgggaagtcaatcgacgtggaccccttactgtgttaactgctaatcagccttctgtaaaaatgatattgcaaattca

SEQ ID NO: 998379 - DNA, 120 bp, Artificial Sequence
  ENSG00000204380_16 (sequence is synthesized)
aaaggcaagcggctctcacatcctaaggtattacccagcaaaaggcagcctcaggaggcagcccactgaagaccttcaagtccacgaagacaatgtatggattgttcactaaaactgagg

SEQ ID NO: 998380 - DNA, 120 bp, Artificial Sequence
  ENSG00000204380_17 (sequence is synthesized)
aatgattttcaaataatctgtcgccagagggccaatccaggcttcaggctccagtgtgtatggaggagctgccactgcagagacgctggcttagggggctgggggatgcctcctttgaat

SEQ ID NO: 998381 - DNA, 120 bp, Artificial Sequence
  ENSG00000204380_18 (sequence is synthesized)
cacatgaaaggagaacctgtctccatcaagtcattttttttctatattccctgcaacaatatttcgagttcagaaacctgtcaaagagattagttggaaaaatcccttgcctcagaagaa

SEQ ID NO: 998382 - DNA, 120 bp, Artificial Sequence
  ENSG00000204380_19 (sequence is synthesized)
agggaaatctccagaaacatccagcatcataattcatacagcctggtgaaaaatgcggatacagaattggaggaaatagcagcatgggcaccaccctgagaatgagcctaggggaaccag

SEQ ID NO: 998383 - DNA, 120 bp, Artificial Sequence
  ENSG00000204380_20 (sequence is synthesized)
agagaaagcctttaccacaccaagccactctgttctcacggttctcaggatattttcttaagttgccacgtccttgcccctgtaactttggagacttgccctttgatctggagagtggcc

SEQ ID NO: 998384 - DNA, 120 bp, Artificial Sequence
  ENSG00000204380_21 (sequence is synthesized)
tcctgaggaggacaggatccgcaggtcagaaagaaccaatggcatgcaaatagtggcaccaggcatcatggtcacctgccaccacgccctcctgcaaccaggccggcactgaccttgctg

SEQ ID NO: 998385 - DNA, 120 bp, Artificial Sequence
  ENSG00000204380_22 (sequence is synthesized)
tcgtaatcggatgtgttcacacacgtgtggatcacatacaacagtgagtctaccagcccctcgcaggaccgcatttgcttccgagcttcttcccccgcggagctgaggttcctaaagggg

SEQ ID NO: 998386 - DNA, 120 bp, Artificial Sequence
  ENSG00000204380_23 (sequence is synthesized)
tggagacaggaggagctgctgagatgaaccatgcactcatcagccacgtggacttaaccttaaggatctgagagagcgaacaacaggtggcagccacttagaggtcggaggaggcactgg

SEQ ID NO: 998387 - DNA, 120 bp, Artificial Sequence
  ENSG00000204380_24 (sequence is synthesized)
gggcttgcatggtaacatcctgaagctcacaatgatggcccgctccccattatccacacatggaagggaacctgcacatttggactgtatctctctcatgacgtgtcactttctaattcc

SEQ ID NO: 998388 - DNA, 120 bp, Artificial Sequence
  ENSG00000204380_25 (sequence is synthesized)
ctcatataattctttaggggcctattctcctgaggttcttcatatgtaaaagggggaaaataacagtaactacctcacagggttgctgtgaagaagaaacgagttgctacatagaaagca

SEQ ID NO: 998389 - DNA, 120 bp, Artificial Sequence
  ENSG00000204380_26 (sequence is synthesized)
attagaaaagtgcctccttcccagaaggtggcctgctgtcagtcatggtggtggctactactagacatgcttcacctcccttgttaggccagaagcttcttgcagtcccctgggcctatt

SEQ ID NO: 998390 - DNA, 120 bp, Artificial Sequence
  ENSG00000204380_27 (sequence is synthesized)
ataatattttgcgtgcagtaagtaggtggtcattaaatgttttttggatgaacagaggaaacatataatttcttgtattataaacatttcaagttaaatatagatatttgcttatgctaa

SEQ ID NO: 998391 - DNA, 120 bp, Artificial Sequence
  ENSG00000204380_28 (sequence is synthesized)
aacttttctgatcttttcaattataaaacacccagaaaacggttttgtgtctaaatttttttatatcaatttgccttcataaattgataccaaataaggatctattttatgtcccattaa

SEQ ID NO: 998392 - DNA, 120 bp, Artificial Sequence
  ENSG00000204380_29 (sequence is synthesized)
caatggttctaggctaactgtaaaattatgcaaattgagaatttgcaaaactgtgactagatgagggggcggtggaatggcggctctcatctgccctgcctctccgcagcactttccttt

SEQ ID NO: 998393 - DNA, 120 bp, Artificial Sequence
  ENSG00000204380_30 (sequence is synthesized)
catctttgcactctccaaggtgccttctgctccttgtctttaatacaacctatggacacagggccataggttggcacacatctgcctttagccctgactgctctctagaattgcggattc

SEQ ID NO: 998394 - DNA, 120 bp, Artificial Sequence
  ENSG00000204380_31 (sequence is synthesized)
ttttctccaatgctttcttgacactggcacatagacagctaattagacttctcaaactggacattgtcaaaactctgagctgctcacccttccaagcattcctgtcccttccccccatca

SEQ ID NO: 998395 - DNA, 120 bp, Artificial Sequence
  ENSG00000204380_32 (sequence is synthesized)
acagcacttctgtgcttgcagctgatccagccaaagatctaggtgtatccttatttcccccctttcctcgctcttaatattcgatctattagcaagccttgtcagctcttcctccacaaa

SEQ ID NO: 998396 - DNA, 120 bp, Artificial Sequence
  ENSG00000204380_33 (sequence is synthesized)
ataacccaaatctgcctacctcaccccagcacctggtttaggccactctcactgtttgcctggatctctgcaacagtctgatgttcctgtctctacttctgcctgtactcactcctccac

SEQ ID NO: 998397 - DNA, 120 bp, Artificial Sequence
  ENSG00000204380_34 (sequence is synthesized)
actgcagccagaaatgaggcccactactccactgcttagaacactctgatggtttcccatggcacttggaataaaatgcaaaccccatctgacttacaaaatcctatataatctggtacc

SEQ ID NO: 998398 - DNA, 120 bp, Artificial Sequence
  ENSG00000204380_35 (sequence is synthesized)
actctgccctttgctcagtaggctacggctgcaagctcatttctgctccagaacctttaccttaaccatttccttgactggcctatgactcttgtcttccccaacaccaccctctagtga

SEQ ID NO: 998399 - DNA, 120 bp, Artificial Sequence
  ENSG00000204380_36 (sequence is synthesized)
gtcactccttgtggtatttcagatgtaggcttaaatttaaactccttgagagaccccctgaccaccaaagtaaccattcaataaccctcacatcaccctatttgtttttatggcacctac

SEQ ID NO: 998400 - DNA, 120 bp, Artificial Sequence
  ENSG00000204380_37 (sequence is synthesized)
tgttattttcttgtttccttgtttgtctgtcttcctggtagaatgtggttccatcagagcagggatctagtctgttttattcgtcactggtttcacacagagggcattcaccaaatgttt

SEQ ID NO: 998401 - DNA, 120 bp, Artificial Sequence
  ENSG00000204380_38 (sequence is synthesized)
ctatccctgacccactgggggagctacagtgagtcctgccccaggctctccctgaagcctagctggctggctgaggagtaatcctagctccctggatgattgctaggccatgagacccac

SEQ ID NO: 998402 - DNA, 120 bp, Artificial Sequence
  ENSG00000204380_39 (sequence is synthesized)
cctgagatgtgggcatctgaattaggaggagctggcctgcattctgggatcctgactcttgttacctccccaccaacactgccccctgaccagggccgatagccacctgtctcaatgcta

SEQ ID NO: 998403 - DNA, 120 bp, Artificial Sequence
  ENSG00000204380_40 (sequence is synthesized)
gaaggctgcagaccagccacacaagctttgctctctttcaggctgcctgtcttggtgatgctagatgttaaacagcactcactgagtgctcatgcgatgacactgtgctaagcaccttcc

SEQ ID NO: 998404 - DNA, 120 bp, Artificial Sequence
  ENSG00000204380_41 (sequence is synthesized)
acaagtacctgctgacccctcacagctctgaggtggtattatcatccctattctacagatgaggaaacggaggctcaaacgggtcctggaagccaggtggtctgagaccagagcccactc

SEQ ID NO: 998405 - DNA, 120 bp, Artificial Sequence
  ENSG00000204380_42 (sequence is synthesized)
tctctgtccctgtgccactctgccctaaggcttgcttccagttcccagggtactgtaaggctgggaaatagggtcaaaatggagctgatgagtgttaagggcaaataatgaactctactg

SEQ ID NO: 998406 - DNA, 120 bp, Artificial Sequence
  ENSG00000204380_43 (sequence is synthesized)
tgcacactcgaaagaggctttatatatagattttaactgtaaaagataatgactaaaaaagtatttgggctcattttcacttatttatacaacttgaaactgattgtttaaatcacacac

SEQ ID NO: 998407 - DNA, 120 bp, Artificial Sequence
  ENSG00000204380_44 (sequence is synthesized)
ctctttaaaagcaaaatggttttaaccatcacattttgaatttaaacaaacagcaggctgcaaacacattagcaatcagaatgcgattaccagaaaaatgctgttaaagtggaaaacact

SEQ ID NO: 998408 - DNA, 120 bp, Artificial Sequence
  ENSG00000204380_45 (sequence is synthesized)
ggaattttggcagtaatcttagactgaaagggcctttctgagtaagtcacagaagagtcatttacaagataacttctttaaggccacaagtctgtgctcacgatgtttttctcccagaat

SEQ ID NO: 998409 - DNA, 120 bp, Artificial Sequence
  ENSG00000204380_46 (sequence is synthesized)
aacaaagtccagtggcctaaattttgaaataaaaactggaaacttagatagatgttaataaagtaagtcctcctaaaatcaatttacctatgacacatatttaatcacagaattaactgg

SEQ ID NO: 998410 - DNA, 120 bp, Artificial Sequence
  ENSG00000270412_0 (sequence is synthesized)
ttccccctcgacggacgtgcgctcgcctctgctgcctccacccgcggctgccttatgtaacctgcgaggaaagccccgcgcccgcgttcgttggggcaagcgggatgggctccctcccgc

SEQ ID NO: 998411 - DNA, 120 bp, Artificial Sequence
  ENSG00000270412_1 (sequence is synthesized)
ggaaggctggaatcagtgatttccttatatgatggacaaggagactgaggctcagagaggtggagcgtatgtcccaaagtcccaagctgcactgagctcctagatgctgtgacccaccct

SEQ ID NO: 998412 - DNA, 120 bp, Artificial Sequence
  ENSG00000270412_2 (sequence is synthesized)
gcacgcctgacacatggaccgacttgaatgcccaggagtggacctgcctgggggccataagggatacatacaactaaatgcagcagagataatcctaataaaagtttttaatgtactgga

SEQ ID NO: 998413 - DNA, 120 bp, Artificial Sequence
  ENSG00000278642_0 (sequence is synthesized)
tctcccattttctcctcccccaacctccccagcatccctgatcacttcaagggctgctgagccctgggaagattttccacggaagaacttgtttaataaatgggaaactgacctttgcta

SEQ ID NO: 998414 - DNA, 120 bp, Artificial Sequence
  ENSG00000272922_0 (sequence is synthesized)
atagttattccagtaagaggatattaagctccctcaaacaggccctgtatatctaacaggctctggcccccagcctcccctgacgcagctctgttacactgcagcacacccctggcctcc

SEQ ID NO: 998415 - DNA, 85 bp, Artificial Sequence
  ENSG00000272922_1 (sequence is synthesized)
ggctacccctgtgctcctggctattttacctccagagctgctggtgataagttggtaaaggaggacctccttaaaccatttgtta

SEQ ID NO: 998416 - DNA, 120 bp, Artificial Sequence
  ENSG00000272922_2 (sequence is synthesized)
gataagttggtaaaggaggacctccttaaaccatttgttaaaccatttgagactgttcctagtacttgttttaagctattttacatgatttttaatgtaataaacacatttataatacta

SEQ ID NO: 998417 - DNA, 68 bp, Artificial Sequence
  ENSG00000272923_0 (sequence is synthesized)
atatgccgttgcactccagccgggcaacaagggctaaactccatctcaaaagaaaagaaagaaaggga

SEQ ID NO: 998418 - DNA, 120 bp, Artificial Sequence
  ENSG00000272923_1 (sequence is synthesized)
aagggctaaactccatctcaaaagaaaagaaagaaagggaagtagaagtaggatttaacaaaggaccgagaagtcggctgaatagccaggttcagacagtgttggcaagaacggatcttt

SEQ ID NO: 998419 - DNA, 120 bp, Artificial Sequence
  ENSG00000272923_2 (sequence is synthesized)
ggcaagatcacttaaggtgagctactctagcagcatcctgtttgacatttgtatccataacttgaataaaaatatagaaggcaaagaagagtgctgggcaagatgtgttgggtgttagat

SEQ ID NO: 998420 - DNA, 120 bp, Artificial Sequence
  ENSG00000272923_3 (sequence is synthesized)
aaagtcttacgtctcggttcaagaaagcacgttgctatatgaaatttcagaaaaaagttttgttgcggggggtgggatattgatcatttgaacatatgccagttgtttctcctgccctag

SEQ ID NO: 998421 - DNA, 120 bp, Artificial Sequence
  ENSG00000272923_4 (sequence is synthesized)
gggaggttggcacggcaaccttcccactccgtaggtgggtagccttgctgatggggcacgtcgtcaccaagggacctgattgttgtcatggttttgtcttgtcctcctccctggtgaaag

SEQ ID NO: 998422 - DNA, 120 bp, Artificial Sequence
  ENSG00000272923_5 (sequence is synthesized)
tctactgcagttttattctcagctctggaaggagagggaacgagcctctgcctgtgtgtcctgacccctcttgccttgtttttgatctgctcaggccgggtgcagtggctcacgcctgta

SEQ ID NO: 998423 - DNA, 120 bp, Artificial Sequence
  ENSG00000272927_0 (sequence is synthesized)
tgccacattggcacctatggggtggagccaggtagggcaggagctgagaacagccccagccttcaggggccgcccagcctccatccgactgcctggcctcaagctgggaggaggacccct

SEQ ID NO: 998424 - DNA, 120 bp, Artificial Sequence
  ENSG00000272927_1 (sequence is synthesized)
ggggatgcagcatattttaagatgttggttttaggcatggacatttgaatgagcagaatgtgtgggctgcaggctggggtgggagaaccgatgtccgcagggcaagagaatgctggtctc

SEQ ID NO: 998425 - DNA, 120 bp, Artificial Sequence
  ENSG00000272927_2 (sequence is synthesized)
tcttgccctgcggacatcgccaggaggctcttcctgcggccattgtgatttttagggtcagaaaattatttggaaatattttttattctgcaaatattttctatacattttttcttgagt

SEQ ID NO: 998426 - DNA, 120 bp, Artificial Sequence
  ENSG00000272927_3 (sequence is synthesized)
agtaaaacttcttttgaaaatgctggcctgctgcacctgttctcagaggggcatgagaaaagaggattctcttcctagggctgtgggaagccccttgagatgttggaagcagggcagggc

SEQ ID NO: 998427 - DNA, 120 bp, Artificial Sequence
  ENSG00000272927_4 (sequence is synthesized)
aggagaacccagggagggcacagagctgtggacgagggctgggaaagccatcccgcctccccagggggtctccgaggagtgctgctgtggccaaaccaggggggccactttgtgctttct

SEQ ID NO: 998428 - DNA, 120 bp, Artificial Sequence
  ENSG00000272927_5 (sequence is synthesized)
gtttaggtgatgggatgcttctatctcctcagcaccccacaccaaatcccctgttattgccagatgatgtgcctaatgatcaaattgcttggaactcctaataataaaactttaaatcta

SEQ ID NO: 998429 - DNA, 120 bp, Artificial Sequence
  ENSG00000267147_0 (sequence is synthesized)
ccgggctcggctcaccctccccggatgccgctcctcctccatccccagaagtttcagccactgagattccccttgtcccggaggctggaggggaagacccaggcggctgcgctttggagg

SEQ ID NO: 998430 - DNA, 120 bp, Artificial Sequence
  ENSG00000267147_1 (sequence is synthesized)
ctggaccatcgtggggcttgtctgtgcccacttttcccccattcaagagttaccactgccaggcgcagttgctcaggcctgcaaacccagcactttgggatggcaagacaggaggatcgc

SEQ ID NO: 998431 - DNA, 120 bp, Artificial Sequence
  ENSG00000267147_2 (sequence is synthesized)
ttgagcccaggagcttgagaacagcctggacaacatgagccagccaggcccctgggcctggagcatccacaggaggaaagtacaagaaccctggcaccctgccaagcagcagggattctt

SEQ ID NO: 998432 - DNA, 120 bp, Artificial Sequence
  ENSG00000267147_3 (sequence is synthesized)
gggaaggactcatgtgaccagaaggggaaactgaggcactgctgagcaccaacagtcctggagagctttaagaatggttgccatctgaggccaggcatggtggtttatgcctgtaatccc

SEQ ID NO: 998433 - DNA, 120 bp, Artificial Sequence
  ENSG00000267147_4 (sequence is synthesized)
gaagtgaaaatagccagttcctccttaactgatgacatcccaccatcgtgatttgttcctgcccaaccctaactgttcaactgactttgtgacaatataccctccccgcccttgcaataa

SEQ ID NO: 998434 - DNA, 120 bp, Artificial Sequence
  ENSG00000229433_0 (sequence is synthesized)
ggaggggggggtgataataaaagggaccttgatatgaaccgcttgggaaccacctgtgtaggaggcagttcgggagcaactctcaaaaggtgcagtggcttgcaagattcagagctggcg

SEQ ID NO: 998435 - DNA, 120 bp, Artificial Sequence
  ENSG00000229433_1 (sequence is synthesized)
tgggcagggacacccctctcagagctaacacagtgcaccgcagccctggcgccagctcggggaatcaggtgggccctacacgagaaggttccacagatactgcctgcctaaagtggatct

SEQ ID NO: 998436 - DNA, 120 bp, Artificial Sequence
  ENSG00000229433_2 (sequence is synthesized)
tgagtcagatcctacgaaagccagaaggagggcatggctgagagtacctcggagaggcagaaaaaggggagctgactcaacactgctctgttgggaagatgtggggagagattctggaga

SEQ ID NO: 998437 - DNA, 120 bp, Artificial Sequence
  ENSG00000229433_3 (sequence is synthesized)
aggcgagatcccgtggcccatgggacacaccttcactgggcctgagctgtctgtcggcttcatctactgggacactggcagcctcactgtcaagtgcacgtttgtcctggcctgggctcc

SEQ ID NO: 998438 - DNA, 120 bp, Artificial Sequence
  ENSG00000229433_4 (sequence is synthesized)
gagcaggggcagcacagggagaacggccccatggttccacctcaccagctgtgagaacccgtgggcctggggaagagcagctgggccaggaaccagtgatgcagccctctctgtgacgga

SEQ ID NO: 998439 - DNA, 120 bp, Artificial Sequence
  ENSG00000229433_5 (sequence is synthesized)
aacaagacacaggcctggctcatttgcatgtcaggtctcttttacataaatctgcatgtcaagctggaggccctggagccaggtaatgcaaagtgatgcaaaataaattaatcagtgtgc

SEQ ID NO: 998440 - DNA, 120 bp, Artificial Sequence
  ENSG00000229433_6 (sequence is synthesized)
aagcccctagaggcaggggaagctgcatcaggacggggactaaaacagctccatcttaaagagaaactgacatcatctccgaaagccctgaggaacgtgctcttacacagacctgagtgt

SEQ ID NO: 998441 - DNA, 120 bp, Artificial Sequence
  ENSG00000229433_7 (sequence is synthesized)
tggggccgctcactttagcaagcacagcagcagcctaaacatcgctgacacctccaccatctggcctttggctccacagagctgctaccccaacttggggcacactttgggagagaacca

SEQ ID NO: 998442 - DNA, 120 bp, Artificial Sequence
  ENSG00000229433_8 (sequence is synthesized)
gagggaaaaacctctcagtagtaaatgtggatctcacaaagcctgtgcgcgcgagcaatggttctcagccctgcgtgcactttagaatcacccgcggagtttttaaacacccccatgcct

SEQ ID NO: 998443 - DNA, 120 bp, Artificial Sequence
  ENSG00000229433_9 (sequence is synthesized)
ggaccccaccaccagaggttctgatttaattgatctggagtaggacccaggcatggatatgttttcaaagctccccaggtgattctaatgtacagccagagatgagaaccaccacgttat

SEQ ID NO: 998444 - DNA, 120 bp, Artificial Sequence
  ENSG00000229433_10 (sequence is synthesized)
acaataggagaggccctcaggctctcactcagatcccagttactcttaatttatatatacttcgaacaatcctgttgtctggttttctagctgttataagattaaaagcagtgcttttag

SEQ ID NO: 998445 - DNA, 120 bp, Artificial Sequence
  ENSG00000229433_11 (sequence is synthesized)
caagtgagacggcaaaggtgacccacggtgggccccgggtcttccagtgtcagtgaaatgtgcacagaagggtctgggcctatacctttcacaatgtgtatgaaggtcatctgtctccga

SEQ ID NO: 998446 - DNA, 120 bp, Artificial Sequence
  ENSG00000229433_12 (sequence is synthesized)
gggaaaacagtggccagtctccaaggagctatgagtgtgcccagcgctgatgtgggcagctcaggggatcagagacagggcggggaggtcattaacgccaaggaagcagagctgcgtagt

SEQ ID NO: 998447 - DNA, 120 bp, Artificial Sequence
  ENSG00000229433_13 (sequence is synthesized)
gaaaggccctcagcccacctccacactagcctctctgcgccgcagttccctcctgggggaggatggagctggcctgcagggtttctgagggccccttcagtgccaccatcctaggtttta

SEQ ID NO: 998448 - DNA, 83 bp, Artificial Sequence
  ENSG00000229433_14 (sequence is synthesized)
catgtgtccctcccactccctgggctcctgtttggggggtgggaaaagtagagattatccaaaagccacagaaatttcccagc

SEQ ID NO: 998449 - DNA, 120 bp, Artificial Sequence
  ENSG00000229433_15 (sequence is synthesized)
ccaggacctgccctgggctccctcctcccagaaagtcaatttccctacaaaggaggctggggagcgagaagggctttctgctttctcttttggtttgcttgtttgcttgctctcccgctc

SEQ ID NO: 998450 - DNA, 120 bp, Artificial Sequence
  ENSG00000229433_16 (sequence is synthesized)
acattgtgcatatgcaggggactagctggttctctcggtctcgtaagaggaagagtggtgaccctggctcagataggtgtggaaggagcatcctagcaccgaggggcattggctgctgag

SEQ ID NO: 998451 - DNA, 120 bp, Artificial Sequence
  ENSG00000229433_17 (sequence is synthesized)
ccagacagggggcagggtgtgcactctcctctgggcctgcagaggcaaagtccagtctttgctgttctagaacagacacactgcagtcctggataaccccctaagctctctttctagagc

SEQ ID NO: 998452 - DNA, 120 bp, Artificial Sequence
  ENSG00000229433_18 (sequence is synthesized)
ctgatggctgcagaatgttttctcctggccaatgcgtgcctgtgtagtttatatacatgtgcgtatgtctgtagatatgtgtgtataaatatagatagacggatataaatcaagggttta

SEQ ID NO: 998453 - DNA, 120 bp, Artificial Sequence
  ENSG00000229433_19 (sequence is synthesized)
ggaggtaggcggcggcgctgacggcagccaagccactgctagttcttccaagagggcagctcgggtgtctccctgcactcctctcccgtcatttccgcctgtggctcctggttcccactc

SEQ ID NO: 998454 - DNA, 120 bp, Artificial Sequence
  ENSG00000229433_20 (sequence is synthesized)
ccaagcgtcaagctgtcatcatcaccaactcctccctcacttccccccacaggcaggctgttgctatatcctcactcattcctccgcagcaactctgaaatctgtttctttctgggtctc

SEQ ID NO: 998455 - DNA, 120 bp, Artificial Sequence
  ENSG00000229433_21 (sequence is synthesized)
acccgctccctcagcagccccctcatcgtgtccccatctctctttccgcatctccttgcctcctggcctctgtttccttggcttctcattctctttgactctgagctcgtccatcaccct

SEQ ID NO: 998456 - DNA, 120 bp, Artificial Sequence
  ENSG00000229433_22 (sequence is synthesized)
gacccgctcctctgtgcatattctagggacacaccgaactcccagccccctctggatcctgttctccttcccttcactctgcctctctctctgtcttgtgtgtgtttctctctctctctc

SEQ ID NO: 998457 - DNA, 120 bp, Artificial Sequence
  ENSG00000232342_0 (sequence is synthesized)
agggatcattgatcattgcctgtgaagaaataatctttgtggacaaggtgcctttttccataattttttcttataaccagcccttctcatccaaaggccacaatgaagtcgaagaaacct

SEQ ID NO: 998458 - DNA, 120 bp, Artificial Sequence
  ENSG00000232342_1 (sequence is synthesized)
tttcctgtactgacgtatgttagagatctggctggcagcttcaagacacttggaagcaagagggccactctattaaggatcgctgaagtatgcccacatgtcaggtttctctcagatgtg

SEQ ID NO: 998459 - DNA, 120 bp, Artificial Sequence
  ENSG00000232342_2 (sequence is synthesized)
gcaggcatatgaagaggtcaagagatcgagatcatcccggccaacatgaaataacaagaaagttagaaagtcttctgcctcccatcagaaaatgagctcaagtgttgtatccattgaaaa

SEQ ID NO: 998460 - DNA, 120 bp, Artificial Sequence
  ENSG00000232342_3 (sequence is synthesized)
tctgatgctaatcatctctgagtgaaccctacatcttacagtaaattgcatattgcaataaaaagtgatctctcatggttcttgaattatttttcatcatgtttagtgcaatactgtaaa

SEQ ID NO: 998461 - DNA, 85 bp, Artificial Sequence
  ENSG00000232342_4 (sequence is synthesized)
tcattacaaaaaaaagctgacttgcttgatatgtaccgtagattgaggtctgcagctgtggttgcccaccatttcaagatagatg

SEQ ID NO: 998462 - DNA, 120 bp, Artificial Sequence
  ENSG00000232342_5 (sequence is synthesized)
aggtctgcagctgtggttgcccaccatttcaagatagatgaatccagtgtaaggaccattgtggttgggggaggactttgtggagccatcactgcagctacgacagcaggcatgaaaacc

SEQ ID NO: 998463 - DNA, 120 bp, Artificial Sequence
  ENSG00000232342_6 (sequence is synthesized)
ttgaagtttctgtaaaatatctttttatcttatatttaaaatacaatgtgagtacagaattgctataagaaaggcatactctagtaagacttgaagtcattatatgacaacttaaagcaa

SEQ ID NO: 998464 - DNA, 120 bp, Artificial Sequence
  ENSG00000232347_0 (sequence is synthesized)
gcatattctactcccttttgctaacgagatacaagcaaagtgaggagaatcctgttatctctatgataataagcacacattaacttgctggggaacgagataccacacggagaagaacga

SEQ ID NO: 998465 - DNA, 120 bp, Artificial Sequence
  ENSG00000232347_1 (sequence is synthesized)
aggtgccccagttgacaggcaactcacccctagaaacagctgcaatcagcatctgcccacacatgtctgaaggatcccagctgagaccaaaagaattgcccagctgagtttagcttaaat

SEQ ID NO: 998466 - DNA, 120 bp, Artificial Sequence
  ENSG00000232347_2 (sequence is synthesized)
ttcagaccgttcacctccctcagagctgcacggcagtgtgacagccactggccatgtcccagcgtccgatcacatcctccgtcactcagggactgagggggcggggcctggagccctatc

SEQ ID NO: 998467 - DNA, 120 bp, Artificial Sequence
  ENSG00000232347_3 (sequence is synthesized)
caatcaggggcgctgacgtaggaaccgtccaatcgggcgtgcagccggacagaagggcgcggcttccgggatctggcggggccttcgtctctcctgccagcctcagctgggtcgtcttct

SEQ ID NO: 998468 - DNA, 120 bp, Artificial Sequence
  ENSG00000232347_4 (sequence is synthesized)
gtgctcggcgtgctttgctcggggaagctcaggtggccgccacagcctcttgccctctgacctgcaggtatcaggagatccatagctaagcagcctggacacccgggaagctgggaaatg

SEQ ID NO: 998469 - DNA, 86 bp, Artificial Sequence
  ENSG00000248538_0 (sequence is synthesized)
aacgcactgcgcgtgctcaattccaaaggctaaggaaagcattgcgcatgcgggaaacccacgctgagggaagaatcatgggaaag

SEQ ID NO: 998470 - DNA, 80 bp, Artificial Sequence
  ENSG00000248538_1 (sequence is synthesized)
cgctctttcgtgttccaaaggctttttaaataaacttccactcctgtcctggattctgctttatggccctcagtcgaatt

SEQ ID NO: 998471 - DNA, 120 bp, Artificial Sequence
  ENSG00000248538_2 (sequence is synthesized)
ctcctgtcctggattctgctttatggccctcagtcgaattctttcttctgaggaggcaaggactgaagttgcttctgaccagtacaggagaaaacgaatacagcagggatgacttccacc

SEQ ID NO: 998472 - DNA, 120 bp, Artificial Sequence
  ENSG00000248538_3 (sequence is synthesized)
agctccactttgcagctctgaggtgtattaaaaatgacctggaagaagtcatgccacgggccagaccttaacattcctttcggcttaccccaggatttcagacaaagcttcactttccta

SEQ ID NO: 998473 - DNA, 120 bp, Artificial Sequence
  ENSG00000248538_4 (sequence is synthesized)
ttccaccttttttaggccaaaccaatgtataacctccaagtgtcgatttacactttcgactgtaacttctgctttcctgagatttacccctgcctttaaaaacccttgcttgtaatccct

SEQ ID NO: 998474 - DNA, 120 bp, Artificial Sequence
  ENSG00000248538_5 (sequence is synthesized)
cagggaggccgtgtatttattaatcatgagctgcccaattctccttgcttggtgccctgcaaataaacaccctcttttctcccactgcaaaacctcagtgtggatgtttggctttacttc

SEQ ID NO: 998475 - DNA, 120 bp, Artificial Sequence
  ENSG00000248538_6 (sequence is synthesized)
acccccaggaaagcagacccaggtttgactcagcaacaacatctgtttctatttttctctgtataaatattaaaaaccataagtacatgctatctccaattccaatataaacccataggg

SEQ ID NO: 998476 - DNA, 120 bp, Artificial Sequence
  ENSG00000248538_7 (sequence is synthesized)
ctcattctggccttcccattttcttatgtgtaattcatttctctgaaaatgagaattcgagtactcagatatttacttacctactcaatcctagaatagaaataaaataattcaacataa

SEQ ID NO: 998477 - DNA, 120 bp, Artificial Sequence
  ENSG00000248538_8 (sequence is synthesized)
tggggagcaccgcttcgccacgtgatcggcagcgcgcccggagtgatccggctgcgggccagggtctgggaagggggtggtgggtcgccgtttcatcagaagccggaggacgggcgccag

SEQ ID NO: 998478 - DNA, 120 bp, Artificial Sequence
  ENSG00000248538_9 (sequence is synthesized)
ggggcaacttcctacaggagggcgtcccgttagaatgacagggcttttgcaaaagtctgacacccgtggcacagagcgccccagatatggagggtttcacagttgactcttgaacaatgt

SEQ ID NO: 998479 - DNA, 120 bp, Artificial Sequence
  ENSG00000248538_10 (sequence is synthesized)
gggggcttggggcaccaaccccctgtgcagttgaaaatcgacatataactttgactcgccaaaaacttcactacaatagcctgctgccaacctgaagtcttaccaataacatcaacagtc

SEQ ID NO: 998480 - DNA, 120 bp, Artificial Sequence
  ENSG00000248538_11 (sequence is synthesized)
aattaaacatattactaggctgaaaaggagaaggaagtgaaggggttggtcttgccgtctcacgagtggcagaggcaggagaaaatccaaatgagaaaacgaatacagcagggatgactt

SEQ ID NO: 998481 - DNA, 120 bp, Artificial Sequence
  ENSG00000248538_12 (sequence is synthesized)
gctctgaggtgtattaaaaataaacctagagccccaccaaatgaatccgctggcacgtggacctcagatgggggaaactgaggactgaattctgaccaccctcctttgttctaaatttct

SEQ ID NO: 998482 - DNA, 120 bp, Artificial Sequence
  ENSG00000248538_13 (sequence is synthesized)
ggtgagcctgtaaagttttaggatcaaggttaaaggcccttttttgctctcttctctcttggaccttcaggcgacggcttgggtatcttccaagcgaattttcctttctttcctgttctt

SEQ ID NO: 998483 - DNA, 120 bp, Artificial Sequence
  ENSG00000248538_14 (sequence is synthesized)
atgaaggttgagctccgatggccaacagccatttccaccttgtggtctacaactcttcatcccgactgcatggaggttggtctctctcttcagctggatttaggccaccatctgagcccc

SEQ ID NO: 998484 - DNA, 120 bp, Artificial Sequence
  ENSG00000248538_15 (sequence is synthesized)
cggggtacgttttgtctgaccctggcgccattcgaacggttcttctacagcatcaggcgttcacctggctcctagggcttttgtgctgtaggcctatatttccagctacttttggaaaaa

SEQ ID NO: 998485 - DNA, 120 bp, Artificial Sequence
  ENSG00000248538_16 (sequence is synthesized)
atctctctggaggctcaatgagcttgtcacatcagcctgcccagagtatcaagaaagacttaatcagcagtgaatactctccaccaagcccttgacccattgtcagtctctggcatcaga

SEQ ID NO: 998486 - DNA, 120 bp, Artificial Sequence
  ENSG00000248538_17 (sequence is synthesized)
gcaactgcagccagctcatgccttcaagagaaggactgaagatcattgtgtgcctaaaccaagtgatttcccccttttgctctgcagttctctttcctgccaccatgtgaagaaggacat

SEQ ID NO: 998487 - DNA, 120 bp, Artificial Sequence
  ENSG00000248538_18 (sequence is synthesized)
tgcccaggctggccttgaactcctggcttcaaacagtcttcccacttgggctcccaaagtgctgggattaaaggggcgagttacagcaccaggacctgaaatgaaaaacatggccagcaa

SEQ ID NO: 998488 - DNA, 120 bp, Artificial Sequence
  ENSG00000248538_19 (sequence is synthesized)
gacctgaaatgaaaaacatggccagcaaagcaggtgaggcaaagatcaggaaggacattaaacgccaaactaaggagcggaactgaatgagcagtgaaggggaacaatggcttcagcagg

SEQ ID NO: 998489 - DNA, 120 bp, Artificial Sequence
  ENSG00000248538_20 (sequence is synthesized)
tccactgggctcctcttttctgtcagcctccccctacccctcacctctgtactactcatgttactatctacgtctcttcaccaatgtcattgtggaaataaaagcttatctgtaagagta

SEQ ID NO: 998490 - DNA, 120 bp, Artificial Sequence
  ENSG00000248538_21 (sequence is synthesized)
gacggcatacgaggctgtgctgtactggtttgcaacatctgtcactggcttacatagctgttaatctttcatttcatgttcagacttatcagtattcattaaagaccctccatttgtgca

SEQ ID NO: 998491 - DNA, 120 bp, Artificial Sequence
  ENSG00000248538_22 (sequence is synthesized)
agaccttctgggaaagagtgccctatctcggtgtcttagatttaacaacaacgacaaaaaggttccattttagacactttttttgatcaggcagcaggcagtctctggctgtgggaggtg

SEQ ID NO: 998492 - DNA, 120 bp, Artificial Sequence
  ENSG00000248538_23 (sequence is synthesized)
tccaagttgatgtttaaatccacccatttccattttgcttccttacctacaagaaaatttagaagttggtgcaaatggcatttccatgagtacttctcatgcatctttgcatatttcacc

SEQ ID NO: 998493 - DNA, 120 bp, Artificial Sequence
  ENSG00000248538_24 (sequence is synthesized)
tggggggaagcacagaggctgagcctgggaggctggatccgcgagggcgcgtcacctcgcctagttgggagtccaggcacatgcacagcgtctaaaggtctaaacagaaagatgggatgt

SEQ ID NO: 998494 - DNA, 120 bp, Artificial Sequence
  ENSG00000248538_25 (sequence is synthesized)
gcctgcagcacgtgctgatctccaagggtgaggctggatgaagccaggggctatggaaagggagactgtttcagaggacttgacaccatcttcagtaatttctctggttcttggcagctc

SEQ ID NO: 998495 - DNA, 120 bp, Artificial Sequence
  ENSG00000248538_26 (sequence is synthesized)
agtgcagtgctgcagtcacaactcaccgcagccttgacctgctgggctcaactgatcctcccacctcagccgcctaagtattattgataggttgaataaaagataccagttttacacaga

SEQ ID NO: 998496 - DNA, 90 bp, Artificial Sequence
  ENSG00000248538_27 (sequence is synthesized)
gacgctcctggccgaatacgaggagttttgtgtgcgactcgtcctgctacatttcttggttacaaaaacctcttccttctttaatccggt

SEQ ID NO: 998497 - DNA, 75 bp, Artificial Sequence
  ENSG00000248538_28 (sequence is synthesized)
aacctcttccttctttaatccggtgtccgaggagttttgtctgcgactcgtcctgctacatttcttggttatgcg

SEQ ID NO: 998498 - DNA, 120 bp, Artificial Sequence
  ENSG00000248538_29 (sequence is synthesized)
tccgtgaccgggaagcgaggtgattgaaggacggtcgaggcagccccttaggctgcttaggcctgccctgtggagcgtccctgcaagggactctggccagcttgagcgacgggcatcctg

SEQ ID NO: 998499 - DNA, 120 bp, Artificial Sequence
  ENSG00000248538_30 (sequence is synthesized)
ggctgaacaccgggaaggaactggcactagaagtctggacgtctgaaacttgaagaacgaccacacttttacgttaaggttaagactctctgagtttctgaagccttgcagaagtaatct

SEQ ID NO: 998500 - DNA, 120 bp, Artificial Sequence
  ENSG00000248538_31 (sequence is synthesized)
agtaatctttgcctagctttgggaagatctgacccactacagattatgttagaagtgccagaggaggaagacttcctgtacccgtctgttatggagctaaatcacatcagtcacactgtg

SEQ ID NO: 998501 - DNA, 120 bp, Artificial Sequence
  ENSG00000248538_32 (sequence is synthesized)
acatgtgatgaaaaacatgggcgccatagtaagtcagccagaacccagagcaatgagtatgtctggaaggaggagactgcaccaaagctaacatgtgggctgtgcgttgaaggatgagga

SEQ ID NO: 998502 - DNA, 120 bp, Artificial Sequence
  ENSG00000248538_33 (sequence is synthesized)
tacgcccacaaggacaaagaaaatgatggaggagacaagaacaacacagtcctggaagctggagggaggaggacacattcagctgactttgcagatccaaaaatgcagacttcttctcag

SEQ ID NO: 998503 - DNA, 120 bp, Artificial Sequence
  ENSG00000248538_34 (sequence is synthesized)
ctggtagagtgggaggtgaaaagcaaacttattacactgcagaacaccccaaatactcaggaattgatggttccaggaattgcagcaaaggtggggctataaaaactcagctgggagtct

SEQ ID NO: 998504 - DNA, 120 bp, Artificial Sequence
  ENSG00000248538_35 (sequence is synthesized)
gcttaggaagcatttgtcttccgttttctccttcatcctgcacagctgaggccctgcccatcatccacactgacatgagttgagaggtttctagtctctggagaggttgaagcagagttt

SEQ ID NO: 998505 - DNA, 120 bp, Artificial Sequence
  ENSG00000248538_36 (sequence is synthesized)
ctctggactggggagactgtagaattagctgatggcaaagataccataacagggtgatcaaatggacatttacatatttaatgataagacctacaagccctcttagtttaccaaaatact

SEQ ID NO: 998506 - DNA, 120 bp, Artificial Sequence
  ENSG00000248538_37 (sequence is synthesized)
tagatgtgatggcggccgggaagaggctcatgtgtggcttcttcagtcctctcttcattcactcatgtattcatttattcaacgacatattactaaggaacctccttaagccgggatgct

SEQ ID NO: 998507 - DNA, 120 bp, Artificial Sequence
  ENSG00000248538_38 (sequence is synthesized)
agcagattggagatcccctgcctgcagcacgtgctgatctccaaggctccatttggctgcgtccctaccctgcataaccctcccagctagtctactccagggcagcatccagctggtgac

SEQ ID NO: 998508 - DNA, 120 bp, Artificial Sequence
  ENSG00000248538_39 (sequence is synthesized)
agcctgcccagagtagggcaaagtgcaactgcagccagctcatgccttcaagagaaggactgaagatcattgtgtgcctaaaccaattctctttcctgccaccatgtgaagaaggacatg

SEQ ID NO: 998509 - DNA, 120 bp, Artificial Sequence
  ENSG00000248538_40 (sequence is synthesized)
ttttccttccaacttgagtggaagcagcctgaggcatcatcagaagcagatgctgataccatgcttcttgtagagcctgcagaacagtgagccacataaacctcttttctttataaatta

SEQ ID NO: 998510 - DNA, 120 bp, Artificial Sequence
  ENSG00000248538_41 (sequence is synthesized)
ggagaagggttaataggggaagcagagagagagagatgagagaccaaagtttctagggcctttatctccagagcagagggtctgaaaccttagtgagcaaaaactgatccggaagacttg

SEQ ID NO: 998511 - DNA, 120 bp, Artificial Sequence
  ENSG00000248538_42 (sequence is synthesized)
gggacttcagccttctcctcagccctgcccttactctgagacaaggagcacccctggcaccgcagtgagatctctgccctgccagcaggcagagccctggcacagtcctttgccccatct

SEQ ID NO: 998512 - DNA, 120 bp, Artificial Sequence
  ENSG00000248538_43 (sequence is synthesized)
cttcttccctctactattcaaggtggcttactttgaatccattcttcctgtcaggccattgttccttatcctcattaaatctatgtttctttagaaaagcatttttaaaaaatttacatg

SEQ ID NO: 998513 - DNA, 120 bp, Artificial Sequence
  ENSG00000248538_44 (sequence is synthesized)
acaccaggcaccccaacagcatgtgctgtagcaattccttgggatcaaacgagagggcttttgagctaggctggtaggggagaaaccctggacgaacatgcaggtgaccagcaggcagag

SEQ ID NO: 998514 - DNA, 120 bp, Artificial Sequence
  ENSG00000248538_45 (sequence is synthesized)
gggaggacatgtgggttttcttctgcttcctaaagagacaaagccctagcaactgatcaactggagtggacagttctcttgtcccaggggaatctggtgcctgagagctgtcatttgagg

SEQ ID NO: 998515 - DNA, 120 bp, Artificial Sequence
  ENSG00000248538_46 (sequence is synthesized)
attccaggagagttcttgtggatttcaagtgaactttctgaacctaaaaatttgggaaatgtagacttccccaagagaatatgacttaaggagcaggaatgaaaaaaacaggagctgtgc

SEQ ID NO: 998516 - DNA, 120 bp, Artificial Sequence
  ENSG00000248538_47 (sequence is synthesized)
gacatgtttgcttccccttctgccatgaataacctggcatgcagttttcagcaaccctgtggggacagtttcaagacaagaaggaatatggtgacacccctgctccccattcaccctccg

SEQ ID NO: 998517 - DNA, 120 bp, Artificial Sequence
  ENSG00000248538_48 (sequence is synthesized)
accctccgctatcagtaaaagcttcctcagacctcaccagaagctggacagatagatgctggtgccaagcttgtacagactgcagaaccatgggccaaataaacctcttttctttataaa

SEQ ID NO: 998518 - DNA, 120 bp, Artificial Sequence
  ENSG00000248538_49 (sequence is synthesized)
gctgagggaagaatcatgggaaagagattgggaaggagaaagtcacttgactcacaggccaactgctatggactgaattgtgtcttcccctcattaatatgttgaaaccctatcctccct

SEQ ID NO: 998519 - DNA, 120 bp, Artificial Sequence
  ENSG00000248538_50 (sequence is synthesized)
ccaatgtgatggtatttgcagatggggcttttgggaagtaatgaagtttagatgaggcatgagggctggatggatatgatcagatgagtgcccaaagaagagacaccagagagctagctt

SEQ ID NO: 998520 - DNA, 120 bp, Artificial Sequence
  ENSG00000248538_51 (sequence is synthesized)
cttctttctctttccacctttacacactgagaaaaggccaagtgagcacacaccaagaaggcagccatctgcaaacccaaggagagagtcctcactagacaccctgctggtaccttgatc

SEQ ID NO: 998521 - DNA, 120 bp, Artificial Sequence
  ENSG00000248538_52 (sequence is synthesized)
acttctagcctccagaactgtgagaaataaattcctgttgttcaagctagtattaatacctggtgttttgttatggcagcctaagtgactaagacaccaacttaatttacttagccaggg

SEQ ID NO: 998522 - DNA, 120 bp, Artificial Sequence
  ENSG00000248538_53 (sequence is synthesized)
aggcaggagaaaatccaaatatgcttggtcaggactgaggatgtgtagtggacaagccaggattgctgcagtgatgtgctcaccattggagagaggaatgactgtcaacaaatcactaca

SEQ ID NO: 998523 - DNA, 120 bp, Artificial Sequence
  ENSG00000248538_54 (sequence is synthesized)
ggcccatatgttaagttctttaatagtacggtgactggaactacgggacggaacccaaaatgcagtcacccaaacgcatcatgtccattttgatccctacagcaattaagccttgctttc

SEQ ID NO: 998524 - DNA, 120 bp, Artificial Sequence
  ENSG00000248538_55 (sequence is synthesized)
acagccgctgaagcagaccaacagatggttgtttaattgtttataaaaccaaacattaactactgggcttggcaacgtatctcttctcctgaagcctctcaaagcagatatcagacaaca

SEQ ID NO: 998525 - DNA, 120 bp, Artificial Sequence
  ENSG00000248538_56 (sequence is synthesized)
ctctggaagatgctgagaaacatcaaaagatcaaaggtcgaatcttggaattcagatctgtcattgacctgccttataacttctgtcaaactgcaatgtggtgagattgttcacatgttt

SEQ ID NO: 998526 - DNA, 120 bp, Artificial Sequence
  ENSG00000248538_57 (sequence is synthesized)
caaaacccctttctagcaaagatgcgtctctgccaagtcacatatgttggccagaggtgtgtttagggaacttggccctcttcagaaaaatacagtctccttgttcctggccagatttta

SEQ ID NO: 998527 - DNA, 120 bp, Artificial Sequence
  ENSG00000248538_58 (sequence is synthesized)
atgttgctctaccttttagcttatgaagcttcaggctgtctgtacaaatgctgtctgttttaatagagtgctaattgcagtaacgggcagggcacttatgtctgtaatcatcacatcaac

SEQ ID NO: 998528 - DNA, 120 bp, Artificial Sequence
  ENSG00000248538_59 (sequence is synthesized)
gccacttggcttaatccttgaaaatggacaacaagctattactaaaccataaaaatcacaaattgtgcgtgctgacctagagacacctccaatcaatgagaagcagcctgagagccacca

SEQ ID NO: 998529 - DNA, 120 bp, Artificial Sequence
  ENSG00000248538_60 (sequence is synthesized)
aaggctcttcaatgtccagctgtcaccgacattccccaagaacttcaaagattttaaaggccaccatttccatgcacgtgtctcttggcgttgctgctgtttacactatgtggaagctgg

SEQ ID NO: 998530 - DNA, 120 bp, Artificial Sequence
  ENSG00000248538_61 (sequence is synthesized)
tttgattccacctatgacctaataagacaccaacagagctcccgacatgcaaagcatagacgtctgtccaatttttgaagaagttaagacatgaaaatggcaaaggttttctggagattt

SEQ ID NO: 998531 - DNA, 120 bp, Artificial Sequence
  ENSG00000248538_62 (sequence is synthesized)
gttgagatgactgaggttgagaacactatccccatgttaaagaaaagacagaattggatggatgcagctttcttagtatttctgtgtaccttaataccctaacattggtggtttgggccc

SEQ ID NO: 998532 - DNA, 120 bp, Artificial Sequence
  ENSG00000248538_63 (sequence is synthesized)
ttcaagacacattattggacaacatcactgcgatattgagtaccatcagagcagctgagatgcactgaaatgttgccgatgtaatttttgctatgcagaaagaaacttacagatctctac

SEQ ID NO: 998533 - DNA, 120 bp, Artificial Sequence
  ENSG00000248538_64 (sequence is synthesized)
acccctgagaagctttattttcccctggacccaatttagagaatgacatactggacttctggctgatgctgtaatggggtaagactttgggggaccttaggaggcaggtgagtgaacttt

SEQ ID NO: 998534 - DNA, 120 bp, Artificial Sequence
  ENSG00000248538_65 (sequence is synthesized)
gcatgtgtgagagatataaattattgggattgatattttttctttttaaaatagttcatttgtaattgctgtagatgcacaagttatacatatttatagggtacttgtgacattgataca

SEQ ID NO: 998535 - DNA, 120 bp, Artificial Sequence
  ENSG00000248538_66 (sequence is synthesized)
agcctacgacatgtaatgatcaaactggggtgattagggtatccatcacctcaagcacttatcatttctttgtgctaggaacatcccaatctcactcttttaattaatttgaaatacaaa

SEQ ID NO: 998536 - DNA, 120 bp, Artificial Sequence
  ENSG00000248538_67 (sequence is synthesized)
acaggcagaaggatgccttcttccacgcaagcactgaaccaaaccacagtagaagaaacagaatcaaatgagagagattcaactgaccagtttaaggcttatcagaaaggaacaaagaca

SEQ ID NO: 998537 - DNA, 120 bp, Artificial Sequence
  ENSG00000248538_68 (sequence is synthesized)
taccaaaatagaccatccttgcacaaacacagacacacagggacaaggcacaagtgcatcacttacaccagcacaggtgctagcaagaaacccattcatatgaacactttatgcggattt

SEQ ID NO: 998538 - DNA, 120 bp, Artificial Sequence
  ENSG00000248538_69 (sequence is synthesized)
taaagggaaaactcttcttttaaacataaaggacttttatctttgtagtatccacatttattcactcattcatttgatgcaatttatgtgccagatgcttggtcaggactgaggatgtgt

SEQ ID NO: 998539 - DNA, 120 bp, Artificial Sequence
  ENSG00000248538_70 (sequence is synthesized)
attcattccacaaacatttctaagtgtccatggtgacccagacatcatgggaacttcagggttccagagctgagtagaacacaactcccatccttagggattcaccatccagtagaggag

SEQ ID NO: 998540 - DNA, 120 bp, Artificial Sequence
  ENSG00000248538_71 (sequence is synthesized)
ggctcaatgagcttgtcacatcagcctgcccagaggtaaagcacatttctctgccctcacacgcctctcccttgctgtctttaacttaatcaatgcccgtaacaccctctacaatgctga

SEQ ID NO: 998541 - DNA, 120 bp, Artificial Sequence
  ENSG00000248538_72 (sequence is synthesized)
gcaagctcagatcctcctagtcttcatggcatccttctttttctttttccattggtctaatctgattgaatttaaattttgcacattttgcatgagtaattctcttgcatgaatctcttt

SEQ ID NO: 998542 - DNA, 120 bp, Artificial Sequence
  ENSG00000248538_73 (sequence is synthesized)
ctcttcctcccttctgccatcactggctcttgtcctctctttactggactgtagaataatctctttggtggtcttcctgtggtcttcccttcccctccactaaatctactctctattcag

SEQ ID NO: 998543 - DNA, 120 bp, Artificial Sequence
  ENSG00000248538_74 (sequence is synthesized)
aagagaaggactgaagatcattgtgtgcctaaaccaagtaagtctaactgctccttcaccagctcacccaaaactataggggccttctacagtcacgttcccatagctctgggaattcct

SEQ ID NO: 998544 - DNA, 120 bp, Artificial Sequence
  ENSG00000248538_75 (sequence is synthesized)
ccagacttgaactctggtttggcttccccagtttatatcctatgcttcataccaaggtcttcccactttgcctatcctacaagaagtagtggccaggttggactttctgataagtttgga

SEQ ID NO: 998545 - DNA, 120 bp, Artificial Sequence
  ENSG00000248538_76 (sequence is synthesized)
gattgcttcttggctgacccttggtaccttgttctactagccacagctaagctccacaaagcctaggtgagtgggacactgcaacccagcccagacccaacactatgaccttctaccagt

SEQ ID NO: 998546 - DNA, 120 bp, Artificial Sequence
  ENSG00000248538_77 (sequence is synthesized)
tatagtccataacaaatatttctagtttgttcactcattgagtcatccaacaagtatttatagagcaaccgtcaagtgccatatacattccatggtgttagggatatagcagggaaaatg

SEQ ID NO: 998547 - DNA, 120 bp, Artificial Sequence
  ENSG00000248538_78 (sequence is synthesized)
tcagacaaggtttctactcatagaatccatattctactattggaggaaaagagatagcacatatagcatcagtcattgtcaatgatcttaaatgtctgaagacaattagctttataagat

SEQ ID NO: 998548 - DNA, 120 bp, Artificial Sequence
  ENSG00000248538_79 (sequence is synthesized)
gtaagtgactgagagggaagggctattttagacaaaatgctcaaggaattagctctgggaatatgatgtttaaacagagatctgaatgacaagaagaagccagcatgccaatgttggtgg

SEQ ID NO: 998549 - DNA, 120 bp, Artificial Sequence
  ENSG00000248538_80 (sequence is synthesized)
gcagagtatactgggtagagagaccagcacaagtacaaaactctaaagtgggaatgaacctggatgagtctgaaggatgggaaaaagaatcatgtggctggatttgatgagcaaagaggt

SEQ ID NO: 998550 - DNA, 120 bp, Artificial Sequence
  ENSG00000248538_81 (sequence is synthesized)
atcatgtggctggatttgatgagcaaagaggtgaataagaggaaaaattaagtcaaacaggaagacacagactagatcatgtaaggccttggtaagtgatatggtttggctgtgtcccca

SEQ ID NO: 998551 - DNA, 120 bp, Artificial Sequence
  ENSG00000248538_82 (sequence is synthesized)
cagtgggagataattgaatcatgggggtgattaccccatgctgctgttctcatgacagtgagcgagttttcacgagatctgatggttttataagttttataaggggttttcccccctttt

SEQ ID NO: 998552 - DNA, 120 bp, Artificial Sequence
  ENSG00000248538_83 (sequence is synthesized)
ttataaggggttttccccccttttgctcggcacttctctcttgcctgccaccatgtaagacatacctttgcttctccttctccttctgccatgattgtgaggcctcccacccatgtagaa

SEQ ID NO: 998553 - DNA, 120 bp, Artificial Sequence
  ENSG00000248538_84 (sequence is synthesized)
ctgtgagtccattaaacctcttttcccttataaattacccagtctcagatatgtctttcttagcagcatgagaacaaactaatacagtaaatttgcataagacatttgcccttccctttg

SEQ ID NO: 998554 - DNA, 120 bp, Artificial Sequence
  ENSG00000248538_85 (sequence is synthesized)
aaagcaatgggaagccatgctctgcatactcagaataagagtgagattggaaaccatggtgattgaagacctattgggagtgaagacttgagccttgaaggagagagtgactgcaaagtt

SEQ ID NO: 998555 - DNA, 120 bp, Artificial Sequence
  ENSG00000248538_86 (sequence is synthesized)
tctcagatatctgcaactggggatgatatctggatgggatgcctgggccctggggttagtgaggagttcaaagaagaaggagcagaaatggattcaggagagagtgagcagagactcaat

SEQ ID NO: 998556 - DNA, 120 bp, Artificial Sequence
  ENSG00000248538_87 (sequence is synthesized)
gttctgtaagtaagtgctcctacaggggaagggttagagaggtcggtagaggggcccaggattccgggaagctggagattccagctctaagacatgctattgtagcctcaagacagatgc

SEQ ID NO: 998557 - DNA, 120 bp, Artificial Sequence
  ENSG00000248538_88 (sequence is synthesized)
acaattataggttgcaacagtggagtgattttgaagaagcaaaaatactcagtgcaatggactgaatgttagtgtccttccaaaattcatatgttgaaaccctaatctactatgtgttag

SEQ ID NO: 998558 - DNA, 120 bp, Artificial Sequence
  ENSG00000248538_89 (sequence is synthesized)
gattaggaggtaaagccattgggaggtaatgagggtggagttctcaggaataggattggtgctcttatcaacagaaccccagatagctctctcgccctcactccaccacatgaggataca

SEQ ID NO: 998559 - DNA, 120 bp, Artificial Sequence
  ENSG00000248538_90 (sequence is synthesized)
agaagtctgcagtgtgcaatctggaaagggccctcaacagaacccgaccatgctgacactttgatcttggacttccaggctccagaactgggagaaataaacttctgttgtttgcatgtc

SEQ ID NO: 998560 - DNA, 120 bp, Artificial Sequence
  ENSG00000248538_91 (sequence is synthesized)
gttgcttctgaccagtacaggtacgccgcaggtaacttggatctcttccaccgctaatagtttcttaatctgtaaaatgagataatgtgtgtattgcattaacccattcattgtgtgggt

SEQ ID NO: 998561 - DNA, 120 bp, Artificial Sequence
  ENSG00000248538_92 (sequence is synthesized)
ttaatgagatgatgtacgtaaagccctgagcatagtgcctggaatataggaagtccttagtaaatgttaattgctgcattttcattattactacatcttccacaccccagggatcccttg

SEQ ID NO: 998562 - DNA, 120 bp, Artificial Sequence
  ENSG00000248538_93 (sequence is synthesized)
gtcctggattctgctttatggccctcagtcgaattctttcttctgaggaggcaaggactgaagttgcttctgaccagtacagtttccctgactcttagagccgtggagcagtgtgtgtca

SEQ ID NO: 998563 - DNA, 120 bp, Artificial Sequence
  ENSG00000248538_94 (sequence is synthesized)
agtgctgggattaccggcgtgagccagcatcaccccccagcaaaagttagtattattaaccaagatgcagagctctctgaactgtgttacttggaatgagcaagttacaggtgggacctg

SEQ ID NO: 998564 - DNA, 120 bp, Artificial Sequence
  ENSG00000248538_95 (sequence is synthesized)
caagttacaggtgggacctggcctgccagaagccaaatcccttatgcacatgtagagagaaaatgctgctcaaggggctaagcagaactggaacccagaggctgtttctgtgtaggcaaa

SEQ ID NO: 998565 - DNA, 120 bp, Artificial Sequence
  ENSG00000248538_96 (sequence is synthesized)
gagaattttttttttttgagctgagcagctgttcaatctgcatttgaatctgctctactccctgtaaatggtgagggacaggaagatgagaatctaagaagctgtgttccaagggaggct

SEQ ID NO: 998566 - DNA, 120 bp, Artificial Sequence
  ENSG00000248538_97 (sequence is synthesized)
gagattgggaggatgcaggtgcatgtgatatcataaaaaatatatctggtctttgtccccagttcctggacagaccttcgaaaatacttggaatttcccaacaggagtgtcttttgttat

SEQ ID NO: 998567 - DNA, 120 bp, Artificial Sequence
  ENSG00000248538_98 (sequence is synthesized)
ttacaacaagacccttctgactacgtttgaacttacgttaatgtgactggtggtgggcccttagagagttgaaagggaggggctggtcatgctattaatagaaagaccaagcatgtgatt

SEQ ID NO: 998568 - DNA, 120 bp, Artificial Sequence
  ENSG00000248538_99 (sequence is synthesized)
gctcagcctcaggggtccctttatagcaatgcgagaatagactaacacagcaacccagaagtttgtggagtgaaatctaaagcagtgcttttaaaagtgagatcctaggaccagcaccac

SEQ ID NO: 998569 - DNA, 120 bp, Artificial Sequence
  ENSG00000248538_100 (sequence is synthesized)
ctgtaccacatgcatcacctgggaacctgttagaaaagcaaagcctcaggctccatcccagaccacctcaggcagaagctctgggggtggggtccaggaatctgagatttaacaagctct

SEQ ID NO: 998570 - DNA, 120 bp, Artificial Sequence
  ENSG00000248538_101 (sequence is synthesized)
ccaggtgatgctgatgcatgttcagtttgaaaacaatggacccagagagcctctaaagtgcaacctgccctgacaattttagtccaaaatcttgcatgggtaatttaatctctacatcct

SEQ ID NO: 998571 - DNA, 120 bp, Artificial Sequence
  ENSG00000248538_102 (sequence is synthesized)
gagatctgcaacacaaggagtttttaacctggaaagtgtgcttaattcttctactgcctcttcttgagggctgcctaagtacagaatgtttggtgtcctggagggtgcccaggctaacag

SEQ ID NO: 998572 - DNA, 120 bp, Artificial Sequence
  ENSG00000248538_103 (sequence is synthesized)
tgagaattggatagctccatcagggccttgggcactgggcctatggagtagcctgtacttcttgctcttttcaacacttgaagggagagggggccgagttctctcgcagagttgctctat

SEQ ID NO: 998573 - DNA, 120 bp, Artificial Sequence
  ENSG00000248538_104 (sequence is synthesized)
ggcagtggcagcagccagctggatatcacgggaaaatgcccgctccgtgaaacggtcatatatgcaaagtagcccccaaaggccaaaagagccaagaaaccaaagaacaagccacacaac

SEQ ID NO: 998574 - DNA, 120 bp, Artificial Sequence
  ENSG00000248538_105 (sequence is synthesized)
agtcaggctgtgtggcacttcgtggctgaaccgacagaattgtgttcaccagaccccaaaaacttttacagccccatctatagatatgatcaatacacacagggccagagaagtatgtta

SEQ ID NO: 998575 - DNA, 86 bp, Artificial Sequence
  ENSG00000248538_106 (sequence is synthesized)
tcaaggcatcatgtgtcattctcacagctgttaggacttcaatgatgttataaggaagttggggctcagagaagctacagaactta

SEQ ID NO: 998576 - DNA, 120 bp, Artificial Sequence
  ENSG00000248538_107 (sequence is synthesized)
gtaagatctgtgccttccgaagagggtagagtcttctggagggacattacaaataatcaggcactcccagtgctgggagctaagttctgttacagggaagagaaagaaacaatgggaata

SEQ ID NO: 998577 - DNA, 120 bp, Artificial Sequence
  ENSG00000248538_108 (sequence is synthesized)
atctctctggaggctcaatgagcttgtcacatcagcctgcccagagggcaaagtgcaactgcagccagctcatgccttcaagagaaggactgaagatcattgtgtgcctaaaccaaaata

SEQ ID NO: 998578 - DNA, 120 bp, Artificial Sequence
  ENSG00000248538_109 (sequence is synthesized)
gtttctcagtaggtacagcatcaaagaccaacacttgggattgattttgatgagacccagcacaggcaataatcagggagcttgagactctggaaccagaaactggacacaatattctga

SEQ ID NO: 998579 - DNA, 120 bp, Artificial Sequence
  ENSG00000248538_110 (sequence is synthesized)
ataatagagtcccatcattgaaaacaacctgagtttttgtttagaccagtgagcctccaataatttgtactggttaaaatacaaattcctaggctttctcccaaccaacgaattcagaat

SEQ ID NO: 998580 - DNA, 89 bp, Artificial Sequence
  ENSG00000248538_111 (sequence is synthesized)
acaaattcctaggctttctcccaaccaacgaattcagaatttcttggaggtggaatgcagaagtctgcaatttttcgagatggaatctc

SEQ ID NO: 998581 - DNA, 120 bp, Artificial Sequence
  ENSG00000248538_112 (sequence is synthesized)
tttttttaacagcttcacaggttattctgaggctctaccaggtctgaaaaacacagtgaccacattgatcagatctcccacagaagatgcatctgaaagaaccatgaggcaatgtcctct

SEQ ID NO: 998582 - DNA, 69 bp, Artificial Sequence
  ENSG00000248538_113 (sequence is synthesized)
catgaaaaacatggccagcaaagcaggtgaggcaaagatcaggaaggacattaaacgccaaactaagga

SEQ ID NO: 998583 - DNA, 120 bp, Artificial Sequence
  ENSG00000248538_114 (sequence is synthesized)
aatgtcctccgatcagtctggactcagttcatccttcccctggtacagaagagctgcgtcagtcattctctctgtgatctactgataagagtcctggacggggaattccaaggccatggg

SEQ ID NO: 998584 - DNA, 120 bp, Artificial Sequence
  ENSG00000248538_115 (sequence is synthesized)
tctattcccagccttgccactatgaatgtgacctccagcagttagatcccctgcctgcagcacgtgctgatctccaagggtgaggctggatgaagccaggggctatggaaagggagactg

SEQ ID NO: 998585 - DNA, 120 bp, Artificial Sequence
  ENSG00000248538_116 (sequence is synthesized)
tatggccctcagtcgaattctttcttctgaggaggcaaggactgaagttgcttctgaccagtacaggtgtcatgcccagatagccagccagcaggaaaaaaaagggaagaacgtgagggg

SEQ ID NO: 998586 - DNA, 120 bp, Artificial Sequence
  ENSG00000248538_117 (sequence is synthesized)
catgcttgcaaagtgtgacagacttgtctagaagtagcacccttctcatccattggccagaatgtggtcacgtgaccaccatccactccatggggtcctggagatgtggtgcctgcctgg

SEQ ID NO: 998587 - DNA, 120 bp, Artificial Sequence
  ENSG00000248538_118 (sequence is synthesized)
gctgcacatcagccacacttctctcactgtggaagccaagtaattgatgtctgatcattgtgcctggtggttgttgatagaacgggactgatttccccctggactggaccaagatcacaa

SEQ ID NO: 998588 - DNA, 120 bp, Artificial Sequence
  ENSG00000248538_119 (sequence is synthesized)
gcagcttctggattgtgattcaagggacaaaagagttaacaagaaactcattaatcttcaaaggcttcaagagtggcacagatgaatccaatattcctatatgacctactttactgaact

SEQ ID NO: 998589 - DNA, 120 bp, Artificial Sequence
  ENSG00000248538_120 (sequence is synthesized)
ggaaaaactgcatgctgacagcacaaatgatctgtaagaagagatgcaggttgtatatgtcagcctcgcagagaactctttccaaataccactgggagaaccagagcaacatgacaactc

SEQ ID NO: 998590 - DNA, 120 bp, Artificial Sequence
  ENSG00000248538_121 (sequence is synthesized)
cacagtatagcccaaaatactgaaattagattgcagggatgtgcagaaaccccttgtgaatgttgtcattggcacctttgaattctaaccttagcttgttactgatcagctaataatagc

SEQ ID NO: 998591 - DNA, 120 bp, Artificial Sequence
  ENSG00000248538_122 (sequence is synthesized)
ctgtatcttaaactataaccaaaaggtaaatatccatttattcatggattctcaatccttctgctgctttatagtattgagagttaaatgcatttgttacagtatttgtctaaatacatg

SEQ ID NO: 998592 - DNA, 120 bp, Artificial Sequence
  ENSG00000248538_123 (sequence is synthesized)
cccccagtccggaggacagtagaaaatacggcaacatgagaatccagattttatatgatcttttttcagagaagttttcacacttcacttggatgaagttacacttggttctccacccag

SEQ ID NO: 998593 - DNA, 120 bp, Artificial Sequence
  ENSG00000248538_124 (sequence is synthesized)
tggccacttctttccttcctccttacagtcaagagtcctcattttgtccagatgttcacttttttctaacctgactcaggagcaaacgcaaattagtctaatcttatcatgaccaccccg

SEQ ID NO: 998594 - DNA, 120 bp, Artificial Sequence
  ENSG00000248538_125 (sequence is synthesized)
tgccccttgtcagcaatgagtttggggtgatctcatcctggtcacttgggcgtgagtagcccaactctgggtctgatcctgcaaatgacgttctggtgtagcccaactctgggtctggtt

SEQ ID NO: 998595 - DNA, 120 bp, Artificial Sequence
  ENSG00000248538_126 (sequence is synthesized)
acatcagtgacttcacaatgtcatcgggaccctgggctcctgtcttcctgccctgtcaccttcaaggtactagcattgcttccactgggccctccagggctgcaaggtggccactatggt

SEQ ID NO: 998596 - DNA, 120 bp, Artificial Sequence
  ENSG00000248538_127 (sequence is synthesized)
tctaggcaccatatcctgacacaataacaaccaatggaaaaagaggaacaaatgtttgcattactgctcttcaaaatcaaggtaacatttccaagatggtccccaacaggccactgctca

SEQ ID NO: 998597 - DNA, 85 bp, Artificial Sequence
  ENSG00000248538_128 (sequence is synthesized)
taaaaaataaaaaaggactaaaggctgccaacgaatatcagaaacaaccatttgttataaactgccactgactggaagccttact

SEQ ID NO: 998598 - DNA, 120 bp, Artificial Sequence
  ENSG00000248538_129 (sequence is synthesized)
aaacaaccatttgttataaactgccactgactggaagccttactgataatataaacagttgatgaacacacactttgtatgttactgtattatatactatattcttacaataaagtaagc

SEQ ID NO: 998599 - DNA, 120 bp, Artificial Sequence
  ENSG00000253424_0 (sequence is synthesized)
acacagctgtgtgcagaggcagtaaaagggagaaattggagatggagatacagacacataaacagtatcagaaagtctctactgtctcctttcactcttttcagaacaaccatggttaga

SEQ ID NO: 998600 - DNA, 120 bp, Artificial Sequence
  ENSG00000253424_1 (sequence is synthesized)
tccagaaatccaggactgtgggccattgggttctgtatcaattttcaaaaggtgacatcatagaatcacagaatgttagaattggaaggacatggaatctaatctctcatttgaaacctg

SEQ ID NO: 998601 - DNA, 120 bp, Artificial Sequence
  ENSG00000253424_2 (sequence is synthesized)
aagatatttaccactcctttatcacatagagaaaaatcaggctaactctttaaaaaaatgtttgcactatcacatacatacagaaaagagctctaatctgggacatatctcaaaataata

SEQ ID NO: 998602 - DNA, 120 bp, Artificial Sequence
  ENSG00000253420_0 (sequence is synthesized)
ggcaatcctgtgaggataaaggaataaagaatcacaaacttgtccgctgacctcagcaggtggagtgccggaattcaggggaatctgtgttatcatgcacactcttctctgaggatagaa

SEQ ID NO: 998603 - DNA, 120 bp, Artificial Sequence
  ENSG00000253420_1 (sequence is synthesized)
tcacaggcacaccaaaaactagccatcgccgttagggacggcatcagaagggacagccccaaaagattacacaggacaaaagaagtggtcaaatacaaggattcctttgtaagtggatgc

SEQ ID NO: 998604 - DNA, 120 bp, Artificial Sequence
  ENSG00000253420_2 (sequence is synthesized)
tgctggggaccagaaagttgataagaaatattaaaaaaaaatttttttgaaagggttgtggttgtgcttgaaccaacttcagagttacatattaggcctagtgtcatggagacaaaacag

SEQ ID NO: 998605 - DNA, 120 bp, Artificial Sequence
  ENSG00000253420_3 (sequence is synthesized)
aaatgcaatctttggatactgcagctgcttcgtgcttttgccagcttatgctgctaaagaaggagaaaaaaaaaggactgccagagctaagaaaatttaataccttggagctgatatata

SEQ ID NO: 998606 - DNA, 120 bp, Artificial Sequence
  ENSG00000253420_4 (sequence is synthesized)
cggtattattttgtctttttgacagggtccggtgctatttttacccaagttgatacaggggttaggttaggactttagaaagaaatggtgatttattttaagtactgtttgtgtaatagc

SEQ ID NO: 998607 - DNA, 120 bp, Artificial Sequence
  ENSG00000253428_0 (sequence is synthesized)
tttctgtgccccggctggcagtgaactggtccccttagcagctgacctcctcctccagccctgtggctgcctcctctccaacagggaccctcctggtgaaagaaaaagagacttggtaat

SEQ ID NO: 998608 - DNA, 120 bp, Artificial Sequence
  ENSG00000253428_1 (sequence is synthesized)
tcactgagcatcacccaagaccgggcgcagacctacaccctggcgtataaaagacgtagtactcacgtcattcctgtttcacagatgcacagacttactcttggagaggctcctcccaaa

SEQ ID NO: 998609 - DNA, 120 bp, Artificial Sequence
  ENSG00000253428_2 (sequence is synthesized)
ccaagttgctgctcgaccgctctctgacctggattcactgaggacacatcaggcctttgccacgggctccatggagtggccggagcccagggctgggtgagtgtggggtgggtctgaagg

SEQ ID NO: 998610 - DNA, 120 bp, Artificial Sequence
  ENSG00000253428_3 (sequence is synthesized)
ggaggacgtgcatctagaggccaggccagcccctgcaggattttctgatgtcaaatcgcctgtcctgtgcccgagccctatcgccttagcagaatgaggacacgtgcctcccctgggcct

SEQ ID NO: 998611 - DNA, 120 bp, Artificial Sequence
  ENSG00000240915_0 (sequence is synthesized)
acaggaagagaattggaaatgctggagaagctctggaagcccacagagaacagatgcataaacaccatttaccagacacagctcagcaaaccctctctctcttccttccagcagcttggt

SEQ ID NO: 998612 - DNA, 120 bp, Artificial Sequence
  ENSG00000240915_1 (sequence is synthesized)
tgtcctcaaggagttcctaaatttcatacttctgagggttatatgggatggtgaggggtggaggagagtagcacggattgaaaaatacattaatgttggctgggcacagtggctcacacc

SEQ ID NO: 998613 - DNA, 85 bp, Artificial Sequence
  ENSG00000240915_2 (sequence is synthesized)
cggaggttgcagtgagctgagatttgctccatcttaaaaaaaaaaagaaaaatacattaaagtgtaccaaaataaatatatgaca

SEQ ID NO: 998614 - DNA, 120 bp, Artificial Sequence
  ENSG00000205037_0 (sequence is synthesized)
acgccccaggtgtccgcagcagcagcagcgcgttggggctgcgtctctgcgcactggctggctctgggctgggaagtttcaagttccaggcggtctgcattcccttctcccccttcacac

SEQ ID NO: 998615 - DNA, 120 bp, Artificial Sequence
  ENSG00000205037_1 (sequence is synthesized)
gtcaacagccgcgtccggctgcctcagaggcacagagtctgttcctggcttcacctggctttcgccataaactggaacgagcggccaagaccctggatgctgctgcggctttgcaagggt

SEQ ID NO: 998616 - DNA, 120 bp, Artificial Sequence
  ENSG00000205037_2 (sequence is synthesized)
cgtcaaccccagaagggcaggaacggcacccggctgggagtctgcaagtgtgtgtggagtgtgacattcatctcacatgcacagagcacacagggagtaaacaattctcatcctctggta

SEQ ID NO: 998617 - DNA, 120 bp, Artificial Sequence
  ENSG00000205037_3 (sequence is synthesized)
aggatcctggggaccgtttcaagaagagcctcaggacacggagaatgctcagtctctctcctggctgtccccgccaggcaagagggcccgggggtggagggaatccaggggacacggtcc

SEQ ID NO: 998618 - DNA, 120 bp, Artificial Sequence
  ENSG00000205037_4 (sequence is synthesized)
tcaccccactgtcagcgccggcagaccccaacactcatcccccagccccaggcacacaacccgccctgccgcccctcgccaggccctgccgggtgtccaccctctgaggtggcaggtggg

SEQ ID NO: 998619 - DNA, 120 bp, Artificial Sequence
  ENSG00000205037_5 (sequence is synthesized)
caggtgggggaggagacatgctggggaggggcccaggcctgggcggcgcggcccttcctttcactcccctgccaggcagtgcctgcgcccaccctcacccccaccaccccccccgacccc

SEQ ID NO: 998620 - DNA, 120 bp, Artificial Sequence
  ENSG00000205037_6 (sequence is synthesized)
tgggaggaaatgtaatgagtgcagggcggtgtctttggtgctgctggggtggagtcaagggccagatcccattgtgaatttgacagaaaaggaaacgggctccgagcgcaggtgaggctc

SEQ ID NO: 998621 - DNA, 120 bp, Artificial Sequence
  ENSG00000205037_7 (sequence is synthesized)
agccagggctccgcggctctcacccaagagctgagctccaaccttcctggcccggctccgtttcccgagctgtggaaaatgcctgtccacccggcatggctgggtagtgcctgcctcccc

SEQ ID NO: 998622 - DNA, 120 bp, Artificial Sequence
  ENSG00000205037_8 (sequence is synthesized)
cacgccagccacgggccggctccccagtcctctgtgggagggttgctggtctctgttaaaagccccccgggtgacgtgcatgccgccagggcctgtgcccccgggagacactctggggag

SEQ ID NO: 998623 - DNA, 120 bp, Artificial Sequence
  ENSG00000205037_9 (sequence is synthesized)
gggccaccacaaggaaacctcagtccaagctgtccagcggaggctgggcatggctgtgccagcacaggaaggcaggtaggggtctccggggcaggcagctctccctctggcccagccccc

SEQ ID NO: 998624 - DNA, 120 bp, Artificial Sequence
  ENSG00000205037_10 (sequence is synthesized)
tgtgtgaagtgctcagcctgggtaggaacgtgcttcccactcagcctcctccaagccgctggaggtcccgctggttccccaaatggcttctgtcctgagccgtgggctcctgaccacgca

SEQ ID NO: 998625 - DNA, 120 bp, Artificial Sequence
  ENSG00000205037_11 (sequence is synthesized)
cctaccttgcacggtctgaacaagagtctgtgccagggaccccgctcaggaggggcacagaggaagccaagggcccacacaggtgagggggtctcaggtctgggcctcacccagcccagg

SEQ ID NO: 998626 - DNA, 120 bp, Artificial Sequence
  ENSG00000205037_12 (sequence is synthesized)
ctcagcagcagcctcagaatttcctggcatctgcttgcctgtgttgcaacccaagtggggtgtgcatgccgcctgagagagaagacactcggggaggattatgtaagcgctttcctcccc

SEQ ID NO: 998627 - DNA, 120 bp, Artificial Sequence
  ENSG00000205037_13 (sequence is synthesized)
agcacagggccgtcttgggcacattgcgaccagaccatgtgcaaaagcactcgggagagtggcaggagctgacccaccagagagggattaaccccttccgggatgctggcggcttgtcct

SEQ ID NO: 998628 - DNA, 120 bp, Artificial Sequence
  ENSG00000205037_14 (sequence is synthesized)
tcgttgcctgactcggctgtttccaatgcagctgattttaacagcacctgtttcatgaggccacagccaggattctgggaggcaaagcacagaaagccctcaatgcggtttgaggctcca

SEQ ID NO: 998629 - DNA, 120 bp, Artificial Sequence
  ENSG00000205037_15 (sequence is synthesized)
ggcaaggctcagctgacagtagctgaaaacagcaatttcagccgcagagttgcccgtcctgtgcaccacagaacgaacaagggtttccagctttgctcagatttgtggggaccactgggt

SEQ ID NO: 998630 - DNA, 120 bp, Artificial Sequence
  ENSG00000205037_16 (sequence is synthesized)
ttggactttaggaaaagctcatttgcctttgggcagaagtgaccggagctggggtcacctgaggtctgggcaggaacctctcgctggctgacgcaggacctggggaggggccatctgtgt

SEQ ID NO: 998631 - DNA, 120 bp, Artificial Sequence
  ENSG00000205037_17 (sequence is synthesized)
ggggcagctctggactcagacccgtggatacctgtgaaacctgtcaggctgagccaccgtccagcaagtgaagagaccccaactgggccactgtggagtcacttggccaccacccccggg

SEQ ID NO: 998632 - DNA, 120 bp, Artificial Sequence
  ENSG00000205037_18 (sequence is synthesized)
ttctcacagccctcatgtgtgtcccaaccgcgagcaggcggccgacagtgcaccctgacaaggcacgcgtgtaccatcggggacacctgctactttaaagtgaccggatggtgcccagga

SEQ ID NO: 998633 - DNA, 120 bp, Artificial Sequence
  ENSG00000205037_19 (sequence is synthesized)
ccacaagaaccagcctcgtggcagggtgcccagcctccttccccctccactgttaacttttttgccaagattccaaaaacgaagctgcagctgaaaataatttctttttcttctatagcc

SEQ ID NO: 998634 - DNA, 120 bp, Artificial Sequence
  ENSG00000205037_20 (sequence is synthesized)
caaatgaccgatggtgtagagattttcccatcatagaactgcagtctccatttctagtaggcccaggaggtgacatgtctgaggttggggtgccttggggccagtgcccagaggagaacc

SEQ ID NO: 998635 - DNA, 120 bp, Artificial Sequence
  ENSG00000205037_21 (sequence is synthesized)
cacattggcgtcctagtaatgtgaaccctcataagagcttcaggacagcagaggcagtggagatgccggcaggcagggagagccggcccggccagcccctcgggaatgagcttcagtcct

SEQ ID NO: 998636 - DNA, 120 bp, Artificial Sequence
  ENSG00000205037_22 (sequence is synthesized)
attctagctcaaaatgataaacctcatctcaggcggctgcttgtgactccaagagaccaccaggccccggtgatagccagcacagtacctggcacataaatcccacccaccagcctggtg

SEQ ID NO: 998637 - DNA, 120 bp, Artificial Sequence
  ENSG00000205037_23 (sequence is synthesized)
tggctgggagacccgcccgggtgctctctgtctctccctccctctttcactgctccctgaaggcagcatctgaagaggctgaggctgtcctgtcgctgccccgacctctgcggagaagcc

SEQ ID NO: 998638 - DNA, 120 bp, Artificial Sequence
  ENSG00000205037_24 (sequence is synthesized)
cgcggctgtcctgtcgctgccccgacctctggggagaggcccgcagttctgatcacggacctcagacggggaagcgcacaggaggcctcgggtggccgggctgtgctgcttctccctgga

SEQ ID NO: 998639 - DNA, 120 bp, Artificial Sequence
  ENSG00000205037_25 (sequence is synthesized)
cgggcagagctggcacataggaggtgcttcgcaggtgactaaggaggcaaagacccgaagcctgggggactgcagtgtccggtggatcccagctgtggccatcaggcccatgggtgggag

SEQ ID NO: 998640 - DNA, 120 bp, Artificial Sequence
  ENSG00000205037_26 (sequence is synthesized)
agccaagggaggggctcagctgggcaataggatgcgagtgggcgggggacactgctgggaactcccttcactgcatggccaagaatgtgtgtaagcaaacagggcgggagagctgtgtgt

SEQ ID NO: 998641 - DNA, 120 bp, Artificial Sequence
  ENSG00000205037_27 (sequence is synthesized)
cgcctcgggcagtcactcagcctctccgcccgttttcctggtctgtaaaatgggccgaaacgcccgccctgctctgctctttgggcagtttctataaatgcttggcccagcctccccggc

SEQ ID NO: 998642 - DNA, 120 bp, Artificial Sequence
  ENSG00000257514_0 (sequence is synthesized)
gtcctctaggcaagaaaaaaaaagaagataagggaaagacaaaggaaggaaatggaaggaaaggacaaagaaggaaagtctactctgaatcttgacatgtcagcttgattctagaagtgc

SEQ ID NO: 998643 - DNA, 120 bp, Artificial Sequence
  ENSG00000257514_1 (sequence is synthesized)
gtttacctggaggacttacccacaactttaaccttgatgcttgcatgtgcctctccagcttcgtttttcagattgatgtggtaaacaccagagtcatctctttcagctatatcaatgacc

SEQ ID NO: 998644 - DNA, 120 bp, Artificial Sequence
  ENSG00000257514_2 (sequence is synthesized)
cactttgatcattatccctgggagaagaagccaacagctcctggtgaccacaataagagatttcatttttacctcttacgaagagctcagtggaacatttctcatcaccggctgtcacat

SEQ ID NO: 998645 - DNA, 120 bp, Artificial Sequence
  ENSG00000257514_3 (sequence is synthesized)
aatactctgaatcatctgtcatctgacagttattgataaacaggattctctggcatcctttgtgttcaaagatgtatctgttttgaataggatgaaaataaacagagtctgtgaatgtga

SEQ ID NO: 998646 - DNA, 120 bp, Artificial Sequence
  ENSG00000257514_4 (sequence is synthesized)
cctcagttcatccatgtgatataagccacacccatttacatctgaggtcacaactactcatcagattttgaataatcctctttctactgcttcacaacagttcacaagccacaacacttc

SEQ ID NO: 998647 - DNA, 120 bp, Artificial Sequence
  ENSG00000257515_0 (sequence is synthesized)
agaaaggtgctgctacactgagatcgactagcactctcagggactgtcaaagcaagggatttttcccatggagcatgtggatgacccggtgaaaccctatcatgaggttgtcttaaatct

SEQ ID NO: 998648 - DNA, 120 bp, Artificial Sequence
  ENSG00000257515_1 (sequence is synthesized)
tggccaagatcactgccggagaggtgtttgctttatactctgcatatgaatcccttgttggacctacatgctgcagatatcttctactactctggaagtaactttttcactcttaataga

SEQ ID NO: 998649 - DNA, 120 bp, Artificial Sequence
  ENSG00000257515_2 (sequence is synthesized)
gcacaattacccactggattttttttttgtcttttggaaaatctcagtgctggctgaacgagctatagttttgctattacaacacaaataataattccccaactgctcagtattttcttc

SEQ ID NO: 998650 - DNA, 120 bp, Artificial Sequence
  ENSG00000257515_3 (sequence is synthesized)
tatctttagttaatctgagtgtctatcacctatgctttcttacttaacctttttgagctcagttttgttattggtacaaaaatgaataatgtacttacctcatatggttgttgtgagaat

SEQ ID NO: 998651 - DNA, 120 bp, Artificial Sequence
  ENSG00000257510_0 (sequence is synthesized)
gtggtctctcttaaagacatgtcatatgaacattctgttgccagtcctcagtaatatcaggcaattcacctagaattcagaaagcaacaaatagaacaattcctctctcttgggacttca

SEQ ID NO: 998652 - DNA, 120 bp, Artificial Sequence
  ENSG00000257510_1 (sequence is synthesized)
ttttcttggatctgaatttttaagtcctgaagattctgaaatattccaaaggattaggagtttaaaattctctcttcctcatggaggaaaaccaggagatatacaaagaggtatcctgct

SEQ ID NO: 998653 - DNA, 120 bp, Artificial Sequence
  ENSG00000257510_2 (sequence is synthesized)
agaggatcccaggctaacgatggattagggaagaacaggcaagattatctagtttatattattctatttccactttgttagtgacttacacttaattacagtcttaataaatattctagt

SEQ ID NO: 998654 - DNA, 120 bp, Artificial Sequence
  ENSG00000257510_3 (sequence is synthesized)
tttgtctcaactgttatctgggtattatggcaggagacttatttaaatatagatcatgaagcccccttggtgttaaagggcagaattatcctcctggcagcagtaattagcaagagacct

SEQ ID NO: 998655 - DNA, 120 bp, Artificial Sequence
  ENSG00000257510_4 (sequence is synthesized)
ttaaggtaggaattacacataatgtcatttttaacaccaataccaatcaattagtagtggctgcctgaagccacatccagattcaagcaggaaagaatgctttgatcaattagtactcct

SEQ ID NO: 998656 - DNA, 120 bp, Artificial Sequence
  ENSG00000257510_5 (sequence is synthesized)
atcaatcatgaatacaacagaggaagtggcaacactggtgaatgatgagtatcatccctgacctaaagaaagttgcatatcaaggaacagggttagggccttggaggatctgggttttct

SEQ ID NO: 998657 - DNA, 120 bp, Artificial Sequence
  ENSG00000257510_6 (sequence is synthesized)
ataattaaaaaggacaattctttttattaaggaagaaaaatatattaaggaagttatcatttaccatataatttcacatcataatttctttgggcaattgccttcatttccttcaaatgt

SEQ ID NO: 998658 - DNA, 120 bp, Artificial Sequence
  ENSG00000257510_7 (sequence is synthesized)
tcatcacccaacatggtttgcaggtcctttggcatgtggattatgcatgatgaggcacattctggtttatctctgtacattctaaaatgctgtgcccagaactccctggaaaggggtgga

SEQ ID NO: 998659 - DNA, 120 bp, Artificial Sequence
  ENSG00000257510_8 (sequence is synthesized)
ttggaaatgaagaaatagaataaaaaccacaaaacagcaagaatagcctccaacacctttattaaatctaagagaaacagtagaggtgtgtctaactagtatggcaccaccaaaaagaag

SEQ ID NO: 998660 - DNA, 120 bp, Artificial Sequence
  ENSG00000257510_9 (sequence is synthesized)
aggcaggcaaagaatctaaggaagatgcctccagtgaaagaaactccagtgctagccagaaacttacagtcaaggatgatgtgtccaagcgaggaggacataagagaagcaaggtgccaa

SEQ ID NO: 998661 - DNA, 120 bp, Artificial Sequence
  ENSG00000257510_10 (sequence is synthesized)
ataaagaatgagaggtcaaatgtaatacaatttgctgactgtaagggggagagtttttttccccaaaatgccaaagtacataaagataaaggtgaaagtttcctctcaccagttccagtg

SEQ ID NO: 998662 - DNA, 120 bp, Artificial Sequence
  ENSG00000257510_11 (sequence is synthesized)
ttaacagtgagagttcttgggcaagccctccccaaatgaccgaaatggccctcctgctactccaggactacattttaccagcatagtgacaaagtaaaaagcaaatgattagttcaagcc

SEQ ID NO: 998663 - DNA, 120 bp, Artificial Sequence
  ENSG00000257510_12 (sequence is synthesized)
agtgatgtgaaggacacaattggagatactggttactttacaaagcatttaactggaatggcatattttccataatgaccagactgctttgaggaattaaggttgacttataaagctcaa

SEQ ID NO: 998664 - DNA, 120 bp, Artificial Sequence
  ENSG00000257510_13 (sequence is synthesized)
aaaaagcttcttggaaaggctggtctggtatgttgtctgcaaggttcctttacaagttccctgacctttggtaactaaggaatgtcactttctgacagtcccaggaacctcaaattattt

SEQ ID NO: 998665 - DNA, 120 bp, Artificial Sequence
  ENSG00000257510_14 (sequence is synthesized)
gagcactttgaggaaagaggaactcacccaattcatacagatattgcaatagtctgatggcaaatccttggcatggcttctagccttgaggcttttaaaagtctaatctgagattcctta

SEQ ID NO: 998666 - DNA, 120 bp, Artificial Sequence
  ENSG00000257510_15 (sequence is synthesized)
tgaaaaagttccagcaaagtcagtcttaaaagagtttatatgcagcctgaatgacatagtaagaatcccatctctaaaagaagaagaaaaataaataaaaataaaaaagcctatatagcc

SEQ ID NO: 998667 - DNA, 120 bp, Artificial Sequence
  ENSG00000257510_16 (sequence is synthesized)
aagcagcttcaatttgacctattttggaaggattcatcaaaaaacaaatttttgtttccctctcagacaagtaccgttgtctcaatgcacctttcatgtgcattctaactttgacagatc

SEQ ID NO: 998668 - DNA, 120 bp, Artificial Sequence
  ENSG00000257510_17 (sequence is synthesized)
caggccaagtataataagactaaaacttatcttgaaaatacatttgtcctactgtaatttgtctttggtagaaatagaggaccgtagaaataaaaattatgttccaaaagaaaactagag

SEQ ID NO: 998669 - DNA, 120 bp, Artificial Sequence
  ENSG00000257510_18 (sequence is synthesized)
tatacctgttatgagattccagctgtgtccattatttttgagtttttattatatgcctacactttggattgaattctgaatttttttctggccacacgtctccaaactaatatttccaaa

SEQ ID NO: 998670 - DNA, 120 bp, Artificial Sequence
  ENSG00000257519_0 (sequence is synthesized)
aaaccaaacttgttaggtccctgtatatcctgaattcaaagaggtccactttgtctggtgcaacttacaaatttagatgctatgctacagtggggaccattcacatctcagcaagaaccc

SEQ ID NO: 998671 - DNA, 120 bp, Artificial Sequence
  ENSG00000257519_1 (sequence is synthesized)
ctcaactattcaccagcaggaaatagagcaaggaaaccaaagcaaaaatagacatcactgaaaggcttctgcacagcaatgagcacaatcaacagaatgaaaagacacctacatatttgg

SEQ ID NO: 998672 - DNA, 120 bp, Artificial Sequence
  ENSG00000257519_2 (sequence is synthesized)
aactcaataacaaaaataacaacctgattaaaaatgggcaaaggacttgaatagatatttctccaaagaaggcatacaaatgggcaacaaatatattaaaaggtgctcaacatcactaat

SEQ ID NO: 998673 - DNA, 120 bp, Artificial Sequence
  ENSG00000257519_3 (sequence is synthesized)
catcagggaaatacaaatcaaaacgacaatgagatatcacctcgcacctgttacaattgctattactttaaaaacaaaacaaaacaaaacaaaacataatgagtgttgaagaggacatgg

SEQ ID NO: 998674 - DNA, 120 bp, Artificial Sequence
  ENSG00000276972_0 (sequence is synthesized)
acatgacagcagcttccaaatttttaacatgataccaaatctcaaactacatttattttaatgaattgagattctagcaattgcacttaaaaattctctttaatttttagaattcacatc

SEQ ID NO: 998675 - DNA, 120 bp, Artificial Sequence
  ENSG00000276972_1 (sequence is synthesized)
tcatgactttttcatctcatctgaaaagactacagcaacaataacaaaataaacttagtgtatactatccttattcttgcaggaagaagtaactggaacacaatcatctggcaaaatcaa

SEQ ID NO: 998676 - DNA, 120 bp, Artificial Sequence
  ENSG00000276972_2 (sequence is synthesized)
ctgagaaaaatggaaaaaaagtaccacctggcttccttgctagtaatatttttagtggcaataatacccaaataatgtggatcccaatcaaggtaataaacagatccatcaccttccaaa

SEQ ID NO: 998677 - DNA, 120 bp, Artificial Sequence
  ENSG00000273338_0 (sequence is synthesized)
tcgtcttcaaaattcctggggtctatcaatcagaaacgccagaaagtttgtgtactagtttcacattgttaagggagtatctataataaaattcaaatgcgttattttaaaataagtaaa

SEQ ID NO: 998678 - DNA, 120 bp, Artificial Sequence
  ENSG00000259395_0 (sequence is synthesized)
caaaagctgattggaagtctattcttccacccttgccagcctgccaggatggtgtcagaaaggccatgtagaaagcagagtttcatccccactgagtggtgagaagattttctcaatgga

SEQ ID NO: 998679 - DNA, 120 bp, Artificial Sequence
  ENSG00000259395_1 (sequence is synthesized)
tatcatatgaagagtcagaacttcaccatgtcacccctcaatttggcagtaaagaagtacctgtcccctctcagcagggtagtgtcagaagaagcctactggagagtcaggactttcacc

SEQ ID NO: 998680 - DNA, 120 bp, Artificial Sequence
  ENSG00000259395_2 (sequence is synthesized)
accactcaattgccacaggccacccccatggtgtcaatagaggatgagtggggagctggaaaccccgcttccacccggcaataatgaggttccctcccctccccgacttgagtgtcaaca

SEQ ID NO: 998681 - DNA, 120 bp, Artificial Sequence
  ENSG00000259395_3 (sequence is synthesized)
gatgctgagggggaactgaaagaaaaaaatagattaacccacaattatagttagaaacttctctactcttttctcaacaactgatagagcaactagacagaaaatcagcaaagatataaa

SEQ ID NO: 998682 - DNA, 120 bp, Artificial Sequence
  ENSG00000259395_4 (sequence is synthesized)
agaactcaatgaaagcatcaatcaaaaggatttaattgactttaatagaacatgctacctaataacagcaagatgtacattatttttatacatatccaagatagactatatgctgggcca

SEQ ID NO: 998683 - DNA, 120 bp, Artificial Sequence
  ENSG00000259395_5 (sequence is synthesized)
gccataaaacctcaacaaatttaaaataatcgaagtcatgcaaagtgtattctgcttccacccaccaagtcttacattagcccatttgcacactgctataaagaattacctgagactggg

SEQ ID NO: 998684 - DNA, 69 bp, Artificial Sequence
  ENSG00000259395_6 (sequence is synthesized)
ggctggcacgttttacatggcagcaggagacaatgaaagggaagagccatgcacttatcaaaaaaccag

SEQ ID NO: 998685 - DNA, 120 bp, Artificial Sequence
  ENSG00000259395_7 (sequence is synthesized)
acaatgaaagggaagagccatgcacttatcaaaaaaccagatcttgtgagaattctgtcatgagaacagcaaggcagaagtccgtccccatgattcaatcacctcccacaaggccactct

SEQ ID NO: 998686 - DNA, 120 bp, Artificial Sequence
  ENSG00000259395_8 (sequence is synthesized)
gccaacacatggggattacaatttgagatgggatgtgggtggggacacagaaccaaactatgtcaagtcttttccataggccttcaccaagtgtccccagaaatactggaagcaaggcag

SEQ ID NO: 998687 - DNA, 120 bp, Artificial Sequence
  ENSG00000259395_9 (sequence is synthesized)
gagagctgcaaatggtccctcatatacacatacacacagagccaggcacaggcattgaatgcctggtagtctgaggatggagaggagaagggaagaaactcttctggcactctgtcttac

SEQ ID NO: 998688 - DNA, 120 bp, Artificial Sequence
  ENSG00000259395_10 (sequence is synthesized)
ttggaagtaggtaaaagagctcaaggagtttccccatattaagtataggtgtgtgggacctgctgagtgaagaatgaaggcaatgcaagagaactgagaaaatgactccagacacacaac

SEQ ID NO: 998689 - DNA, 120 bp, Artificial Sequence
  ENSG00000259395_11 (sequence is synthesized)
tccaaagccctcggaaagggaatgcattaaacctacccttaatcatttgaagactctgctgaattaaatcttgctagagtaacaatatggcccaaacctggctcaattcaaaatagtttg

SEQ ID NO: 998690 - DNA, 120 bp, Artificial Sequence
  ENSG00000259395_12 (sequence is synthesized)
actcagtgcccacactagcagtgtgacagaagaagggaaaaacactcctcttggcacaaatattatttatgtaggtctctacatttatcttacacagaatatacagcattccgtcaaaac

SEQ ID NO: 998691 - DNA, 120 bp, Artificial Sequence
  ENSG00000259395_13 (sequence is synthesized)
tatacgacatgcaaagaaacaagacccatcatttaaaaaaagaaagagtcaaaagaaccagattcacatatgatccaaatgtcagaataatcagaaaattttttaaaaagaatagtcaca

SEQ ID NO: 998692 - DNA, 120 bp, Artificial Sequence
  ENSG00000259395_14 (sequence is synthesized)
ataagacattaaaggatctagcagtgaaagatacagatgagcaaatggaaaatgtcattagtgcaatggaaactgtataaaagatccaagtggaaattctagaactaaaacagataataa

SEQ ID NO: 998693 - DNA, 120 bp, Artificial Sequence
  ENSG00000259395_15 (sequence is synthesized)
caaagtccatcagaattctttccatacacttatcagcagaccagacacagaggaagaaaacaccagtgaacttaaagacatgccaataaaattatccaaactgtaatgcaaagagaaaaa

SEQ ID NO: 998694 - DNA, 120 bp, Artificial Sequence
  ENSG00000259395_16 (sequence is synthesized)
atctgtgaaaaaatacagcatctaaaaatctgaggagcaatatcaaatggtttaacaaaaacataattggagttccaaataaataagagagaaaatggagcaaaaaaattgatgaataat

SEQ ID NO: 998695 - DNA, 120 bp, Artificial Sequence
  ENSG00000259395_17 (sequence is synthesized)
gattgagaattttgctaaattgataaacacatttatctgcagttccaagaagctcattaagccccaagcaggataaatacaaagaaaaccacaccaatatgcatcatagtcaaagtgcta

SEQ ID NO: 998696 - DNA, 120 bp, Artificial Sequence
  ENSG00000259395_18 (sequence is synthesized)
aaagtcaaatataatcttgaaagcagcctgaagaaaaaagtcacactttatactcaagtgaacaacaatcagaatgaagtaagactattcatcagaaacagtggagaacagaagaaaatg

SEQ ID NO: 998697 - DNA, 120 bp, Artificial Sequence
  ENSG00000259395_19 (sequence is synthesized)
aactaacattttcaaattctaatagaaaaaactgtcaacctagatactaaatccagtgaaaatattctttatgaaggaagaaaaaataaagaaattgtcagacgacgaaggctgaaaaaa

SEQ ID NO: 998698 - DNA, 120 bp, Artificial Sequence
  ENSG00000273333_0 (sequence is synthesized)
acgcccccatgcatccccacccccgcccctccggacggcttacttacctcatacgcagctcatcttaaaccaatagaatcgctcggtggacgagagtgtctgactcagatatctacctcg

SEQ ID NO: 998699 - DNA, 120 bp, Artificial Sequence
  ENSG00000273333_1 (sequence is synthesized)
gagggagtttctgctactttagggaattattgactgggctttggggttgaacttttttttttttaaagaaagaaaaagaaaccctgggatccatctgttttttttgttgttgttgttgtt

SEQ ID NO: 998700 - DNA, 120 bp, Artificial Sequence
  ENSG00000273333_2 (sequence is synthesized)
agcttgtttttttttttataaatatgttgatttcttgtctttttttttttttatttcttactttcccatattaggggtgatagccaaaggggttctggtaagagaaagggggacaaacag

SEQ ID NO: 998701 - DNA, 120 bp, Artificial Sequence
  ENSG00000273333_3 (sequence is synthesized)
aactggtaaagaggcccccctggctccaggcctgtccatcaggaagtaaattttacagggcaccaagctttgccccctaaaatcccttaggtgttctttgttcatgcaggcaggtttctg

SEQ ID NO: 998702 - DNA, 120 bp, Artificial Sequence
  ENSG00000273333_4 (sequence is synthesized)
ccgcatttgatgtggaggcatgggccgggggcagttctctcctcacttgtaaacttgtgtagtttcacagaaaaaaaacaaaatgcagttttaaataaagaaatttcttttttccctggg

SEQ ID NO: 998703 - DNA, 120 bp, Artificial Sequence
  ENSG00000259390_0 (sequence is synthesized)
ggtggacacctgggtaggaacgctgctgctggttggctggtaggaggtgctgcagagagacccctacctgactgtcatcctctctcagtggcgagtccatctagttcagactcagacagg

SEQ ID NO: 998704 - DNA, 120 bp, Artificial Sequence
  ENSG00000259390_1 (sequence is synthesized)
tggaagaagtcaactcctaactagggtataatgaagcatgatggaagtatttgacccagcggctcttctatacccaggaggccctgactgccacattcaccagttgattttccagggaac

SEQ ID NO: 998705 - DNA, 120 bp, Artificial Sequence
  ENSG00000259390_2 (sequence is synthesized)
tcagctttgttatcttagggccaggtaactagattgaagcagagtccatgaagaactaaccatgcctcactccacccctgcagatggctccttcatgaagatctccccatttggaacaca

SEQ ID NO: 998706 - DNA, 120 bp, Artificial Sequence
  ENSG00000259390_3 (sequence is synthesized)
acatctgtttcctgctgggaccctgactgacacaagggtcaaaataagctcctccatgggaagcattgagagaggcagaaaataaagagaaggaagataatactatccattcattgcagt

SEQ ID NO: 998707 - DNA, 120 bp, Artificial Sequence
  ENSG00000259390_4 (sequence is synthesized)
cgtctatgtgctaaacactgtgtgaagcattttgcatgtattcaataaatatttactcaatgctttatgtgggttaaacactaataaatagacagtttctctgctctcagagagatgaca

SEQ ID NO: 998708 - DNA, 120 bp, Artificial Sequence
  ENSG00000224733_0 (sequence is synthesized)
aagagattgagtttaacgtctactgatcacaggtcacacagaagagattgctctttaaaaataaatccctgagagtttatatgaacatatgtctttttcctattatataaccatttaagt

SEQ ID NO: 998709 - DNA, 120 bp, Artificial Sequence
  ENSG00000224733_1 (sequence is synthesized)
acaggaaacaatcgacttagtgctacacctttattaattctgaatattatttgtctctatgtcttctcccacttggtttcctcaaggagaaagagtactaactgagaagagttaaaaatc

SEQ ID NO: 998710 - DNA, 67 bp, Artificial Sequence
  ENSG00000224733_2 (sequence is synthesized)
cagtggcataccaggtaggctgggactacaggtgtgtgcaaccacacccagctaatttttgtatttt

SEQ ID NO: 998711 - DNA, 120 bp, Artificial Sequence
  ENSG00000230258_0 (sequence is synthesized)
gcaagttgaggaggcatgttcaagatttgtcaaattacaagaatttgttacttgaatcacatgacatcactcagatgacgccactcagactgataatacagctcagccagttctgcgatc

SEQ ID NO: 998712 - DNA, 120 bp, Artificial Sequence
  ENSG00000230258_1 (sequence is synthesized)
ccacccaggaatgaatctgactctgcttgaattactctctctccattgcaattcccctgtctggataagctggccctgtctaggcagcaggcaaggtgaacacttgattacaaaaggatg

SEQ ID NO: 998713 - DNA, 120 bp, Artificial Sequence
  ENSG00000230258_2 (sequence is synthesized)
aagaaactgaagaatcaacaactcttagatcgatcagagaagcgagggcacagggcaaaccactgcctccaaaactggaaagcctgtgtggatgaatattgcttccaggagtcacataat

SEQ ID NO: 998714 - DNA, 120 bp, Artificial Sequence
  ENSG00000230258_3 (sequence is synthesized)
ctaaaatcatagaatgttagagctggaggaatctttagagtttgcccaaggtccttcaccagcattttacagaagattcttcgatttaactgctcttaattacatcccgttgcactggcc

SEQ ID NO: 998715 - DNA, 120 bp, Artificial Sequence
  ENSG00000230258_4 (sequence is synthesized)
ccatcaagttgctttaaacagcccttctagtcaacagagctgcagagaaaaaccttggttggttcaggtcactaggatgcaggaccatgggcagccagctagcagcagtgtgatctgaca

SEQ ID NO: 998716 - DNA, 120 bp, Artificial Sequence
  ENSG00000230258_5 (sequence is synthesized)
gcccctttcttcagctgaaacaattctccactcctcatatctgaagttgcttccaaaaatgagctgcccacacacagcccttgccccaggctttgctctctgagaaacttaggctgagaa

SEQ ID NO: 998717 - DNA, 120 bp, Artificial Sequence
  ENSG00000230258_6 (sequence is synthesized)
ctcagcccgtctgtacccaggcgctcattagaacagcgtgttgctccacaccgccttgtggtgtttgttaccgcgctcttggggttcgaaccgatacagcaggcttgcagctatttcatt

SEQ ID NO: 998718 - DNA, 120 bp, Artificial Sequence
  ENSG00000230258_7 (sequence is synthesized)
ggtttaaacttttatttttttattgcaaatgaaaattactatcaactatcattacaaagctgtagaatatgaagttcgaaggaaaacgctgaatcagtatacaaaagcgtctcaatcaga

SEQ ID NO: 998719 - DNA, 120 bp, Artificial Sequence
  ENSG00000230258_8 (sequence is synthesized)
agttgctttaaacagcccttctagtcaacagagctgcagagaaaaaccttgagctgtcacacttcatttgtgagaacactccagagcttcctccagctgctgattccaaaccagcttcac

SEQ ID NO: 998720 - DNA, 120 bp, Artificial Sequence
  ENSG00000230250_0 (sequence is synthesized)
aatgtgatctgggttctgatattatctctgcgctctgcagtgtgccatgggcacatgaggctgactgcatagataaaagaacaagagggtcaaatccattaactgggaatgtcagaagtc

SEQ ID NO: 998721 - DNA, 120 bp, Artificial Sequence
  ENSG00000230250_1 (sequence is synthesized)
ataaccatgcctgatgacaacagtttcctttggcctggtgtggtattgtaaattgtcgcttttagaccaactttttagtgatagaccctctctatgctttttgttgtaagctactgcaga

SEQ ID NO: 998722 - DNA, 120 bp, Artificial Sequence
  ENSG00000230250_2 (sequence is synthesized)
acctgtgccaccatatatatctttgccatggcctcatgatggatggaatatacttccctgccccttgacttgatacttgaccatgtaacttttttggaacaatgaaagatgatggaaatg

SEQ ID NO: 998723 - DNA, 120 bp, Artificial Sequence
  ENSG00000230250_3 (sequence is synthesized)
tcagtatacctgtgctcaggtatactgtgctaggtcttaagaagcctccagtgtttccagctatacatctgcaatcaccatgagaaggacctgctcaagcaaaccactagtcacaggagg

SEQ ID NO: 998724 - DNA, 120 bp, Artificial Sequence
  ENSG00000230250_4 (sequence is synthesized)
agaatgagagacacatggagcagagctgccctcagagtccacctagattagttgtcagcagacctccagtggacttgtagaaacacaagcaataataaaaggctgttgttttaagccact

SEQ ID NO: 998725 - DNA, 120 bp, Artificial Sequence
  ENSG00000230250_5 (sequence is synthesized)
agctccaatgtgatctgggttctgatattatctctgcgctctgcagtgtgccatgggcacatgaggctgactgcatagataaaagaacaagagggtcaaatccattaactgggtaattca

SEQ ID NO: 998726 - DNA, 75 bp, Artificial Sequence
  ENSG00000215067_0 (sequence is synthesized)
aacagctgaatcaataaagaaaatatagtacaattacataatggagtgctattcagccataaaaaaataagattc

SEQ ID NO: 998727 - DNA, 120 bp, Artificial Sequence
  ENSG00000215067_1 (sequence is synthesized)
gtgaaatcagtcaggcacagaaagacagactaaatgctctcacttatttgtgggagccaacaattaaaacaattgaactcatagacgtagagagtagaaggatgcttaccagaggctggg

SEQ ID NO: 998728 - DNA, 120 bp, Artificial Sequence
  ENSG00000215067_2 (sequence is synthesized)
gatgcttaccagaggctgggaagcataatgtggtggggggagtgggtagggcgtggggaatggagatggtcaatgggtacaaaaaaattagaaagtgttgggagcaggccccccaaaatc

SEQ ID NO: 998729 - DNA, 60 bp, Artificial Sequence
  ENSG00000215067_3 (sequence is synthesized)
tccaacctattcctttaattcagcccatcccttttcccataagggatacttttagttaat

SEQ ID NO: 998730 - DNA, 77 bp, Artificial Sequence
  ENSG00000215067_4 (sequence is synthesized)
attcctttaattcagcccatcccgacaatgctaatgactggtttgccattaataaatacgtgggtaaatctctgttc

SEQ ID NO: 998731 - DNA, 120 bp, Artificial Sequence
  ENSG00000215067_5 (sequence is synthesized)
tgggggctcaaatccaggtcgaagggtcgccagagcaacagttggaatggaaaaccagctggaggacacaggagtactcttaaagcaatccccgtggccaaaatcaacagctgatctgga

SEQ ID NO: 998732 - DNA, 120 bp, Artificial Sequence
  ENSG00000215067_6 (sequence is synthesized)
cgtggccaaaatcaacagctgatctggataccatcaatacacctgaaaccttagcataagccagattacaggaggatcccgaggaccccccagttgcagccatgtcaagactgatgctga

SEQ ID NO: 998733 - DNA, 86 bp, Artificial Sequence
  ENSG00000215067_7 (sequence is synthesized)
aataatttaatggtagctatgatagcggttatcaccactgccatgagtattccttcaacaggggctgacacagagaacacggcaat

SEQ ID NO: 998734 - DNA, 88 bp, Artificial Sequence
  ENSG00000215067_8 (sequence is synthesized)
tcagtatttaccataataaatctgctcatataattgaggcataccatcctcaaaaaccttgatgaacgtacttgtttaggaagattgc

SEQ ID NO: 998735 - DNA, 120 bp, Artificial Sequence
  ENSG00000215067_9 (sequence is synthesized)
tagaaaaagatgaacgtacttgtttaggaagattgctttgcagaacagacagaggtgctgcacaatgattcctatggaatcattattaattggtaccctaaggggatgtttagcttgaat

SEQ ID NO: 998736 - DNA, 79 bp, Artificial Sequence
  ENSG00000215067_10 (sequence is synthesized)
cgtgccatggccacactatgttcagatgatctgaacaaaacggtcagatggaaccgtggcggtatagtggcacctcaac

SEQ ID NO: 998737 - DNA, 85 bp, Artificial Sequence
  ENSG00000215067_11 (sequence is synthesized)
ctggaaccgtggctgctctagaagcttaacataaggatttgtggaaactattagatgttcttaataagatcaaaatttgggaaag

SEQ ID NO: 998738 - DNA, 82 bp, Artificial Sequence
  ENSG00000215067_12 (sequence is synthesized)
cttaaaggagctgcagacaaattagcagctagtaacccattagaatggataaaaacacttggaagctctgtatttcaatgat

SEQ ID NO: 998739 - DNA, 120 bp, Artificial Sequence
  ENSG00000215067_13 (sequence is synthesized)
agtaacccattagaatggataaaaacacttggaagctctgtatttcaatgatgattgtgcttttaatccatgttgtttgtctttgtatagtgtgcagatgtggatcctgactcctgtgag

SEQ ID NO: 998740 - DNA, 120 bp, Artificial Sequence
  ENSG00000215067_14 (sequence is synthesized)
gtgacaaagctgcctttgcttttatctctttgcaaatcaaagaagggagacatgttgggagcaggcccccccaaaatctggccataaactgtccccaaaactggccataaacaaaatctc

SEQ ID NO: 998741 - DNA, 86 bp, Artificial Sequence
  ENSG00000215067_15 (sequence is synthesized)
gcactgtaacatgttcataatggcccttaacacccaagctggaaggttgtgggtttattatggaaaaccacttaaaggcattctta

SEQ ID NO: 998742 - DNA, 120 bp, Artificial Sequence
  ENSG00000215067_16 (sequence is synthesized)
aaggcattcttaagccacacacaatagcatgagcaatctgtgccttagggacatgctcctgctgcagttaactaacccaacctattcctttaatccggcccatcccttcgtttcccataa

SEQ ID NO: 998743 - DNA, 120 bp, Artificial Sequence
  ENSG00000215067_17 (sequence is synthesized)
cttagcgaggccatgggggaaaaagtctaactggcggaactcctgggaactggggcgatgggctcttagtatcggaggattggagccatctgatttttacctgaaattccttagtctctc

SEQ ID NO: 998744 - DNA, 120 bp, Artificial Sequence
  ENSG00000215067_18 (sequence is synthesized)
ctgtgttggggaaatggtcaccttgccttcagggacctgggctttcagctgtccatacctggccctggttgatggcggcatgctgggcagtgcacgtgaagacgcacatgcgctgctggg

SEQ ID NO: 998745 - DNA, 72 bp, Artificial Sequence
  ENSG00000215067_19 (sequence is synthesized)
cctcccaagtagctgggattacagatacagcattacctgaaaagaagataacgatctggataccatcaatac

SEQ ID NO: 998746 - DNA, 120 bp, Artificial Sequence
  ENSG00000215067_20 (sequence is synthesized)
ccaagtagctgggatcacagggttgtggcatcacagctggctatattcttaacattattttgtaaccattccaacccccagaaatttctctctggctgacttgatccacagcgcctccat

SEQ ID NO: 998747 - DNA, 120 bp, Artificial Sequence
  ENSG00000215067_21 (sequence is synthesized)
cgccatccctgagtgccttgttgtggaaaatcttactttatcttggttctgtttggtataatcggggaaagtctgtattctttcattatgtaaaacaacttatctctcattgtttcatct

SEQ ID NO: 998748 - DNA, 120 bp, Artificial Sequence
  ENSG00000215067_22 (sequence is synthesized)
cctttctgagctctgctctgccagctctctttccaaaaccaaaatggctcttcaagttattttgtaaataataatgggccatctacttcttaacataaatgaatgattttccaaggtcaa

SEQ ID NO: 998749 - DNA, 86 bp, Artificial Sequence
  ENSG00000215067_23 (sequence is synthesized)
tgcccaggctggtcttgaactcctggtcttaagcaatcatactgctttggccacccaaagcacttaaaaccacagtatttctaggt

SEQ ID NO: 998750 - DNA, 120 bp, Artificial Sequence
  ENSG00000215067_24 (sequence is synthesized)
aaaccacagtatttctaggtcagtataacacacctgccccagggacttacaggtgtggcagaagcttggacttctggcttttctctctcttgcacccaggcacgctgcagctaccatttc

SEQ ID NO: 998751 - DNA, 120 bp, Artificial Sequence
  ENSG00000215067_25 (sequence is synthesized)
ctcccttcactacgttttagattctttccttttcattcctgtcattaccatgctaacatacatctctatccaccttactgttgggcaggtatgagcggcttgctggctgttcttccttgc

SEQ ID NO: 998752 - DNA, 120 bp, Artificial Sequence
  ENSG00000215067_26 (sequence is synthesized)
cttttggtctgtttctacttagctgactcctcaattgggtagaaacattcttcatcaatactatactgttataggctgtcccttgtgatttcaaactctagtaccagatactgttctctg

SEQ ID NO: 998753 - DNA, 120 bp, Artificial Sequence
  ENSG00000215067_27 (sequence is synthesized)
gttggttcttatgggcatcacttgtttttctggctaaatactagatctaaggtaggaatatggcttttgttttactagcagtgttcaagccctactgtgagcgcactgctagactgtcag

SEQ ID NO: 998754 - DNA, 120 bp, Artificial Sequence
  ENSG00000215067_28 (sequence is synthesized)
aataaacttaattaaaatcaacatctcaagatattgagacagtctcctcttcactcacaaattgctacaaagagtttttgctgctgcaatatcttttgatatggggctgttcctctctct

SEQ ID NO: 998755 - DNA, 120 bp, Artificial Sequence
  ENSG00000215067_29 (sequence is synthesized)
ggggtctgagggatatgtgatttaatagattaataagtaccttgaagatggggtgcagtcctgggaggcaccgcatggtggcgacagcgatgacctcagccaccaggtgagtgttcagca

SEQ ID NO: 998756 - DNA, 120 bp, Artificial Sequence
  ENSG00000215067_30 (sequence is synthesized)
agtgatactggatctcgtgcagttggaaatctgaatttcggacccaggactttgccaggagccaggcaagtggggggtctgagggcaggaacagtgttggggttggagagctggggttgg

SEQ ID NO: 998757 - DNA, 120 bp, Artificial Sequence
  ENSG00000215067_31 (sequence is synthesized)
gaggctgaatctgggagaaagagaaattattgaactcccattccgtatatgacattatagtcagcattcttggggaaacagagatgactaagtaagattattgccttctaggaggttata

SEQ ID NO: 998758 - DNA, 120 bp, Artificial Sequence
  ENSG00000215067_32 (sequence is synthesized)
gtctagcaggaggactgtgaaccctcccagcctgccgctcgctagctggagtgccctgatgtcaggtggaaggcaggagggactggaagaagggggtccagaaggaggccctaacagtgg

SEQ ID NO: 998759 - DNA, 120 bp, Artificial Sequence
  ENSG00000215067_33 (sequence is synthesized)
tgtgggagaaacctgctgctttggggtcggcgctcagatggtggtggaatgtgaaggagaagtaggaggtgtaagattattgacagttcttgtcacctgactgttaagaatagtgagaga

SEQ ID NO: 998760 - DNA, 120 bp, Artificial Sequence
  ENSG00000215067_34 (sequence is synthesized)
aggactttcgcgggagacggcgccgtctgaaaccaaaactgctcctggggaaaccttccttgacctctgtagctagggcgtgagtattggaagagcgagggcctccggtttgttggtccc

SEQ ID NO: 998761 - DNA, 120 bp, Artificial Sequence
  ENSG00000215067_35 (sequence is synthesized)
agagagcgtttctatctcttctctactcctcccttttaaaattgagattctgacagtgtaaaggagttaggacccccttttggggatcgggcatggttttgtggctttaaaatgctttaa

SEQ ID NO: 998762 - DNA, 120 bp, Artificial Sequence
  ENSG00000215067_36 (sequence is synthesized)
aattgctgaagtttcttggtattggaactgtttctcctaagtaacattttatcatcgcacgtgaaatactgtaactctcggtgccaaatccaggaaaaatgggcggttaggagaagtcca

SEQ ID NO: 998763 - DNA, 120 bp, Artificial Sequence
  ENSG00000215067_37 (sequence is synthesized)
gaaggtaagcagtcctgttaaatgtacacaaaaatgtcactttgcttctctaaactaggaaaactgataggacttttgaataaggtaggatataagatttaaaaatataaataggtcatc

SEQ ID NO: 998764 - DNA, 120 bp, Artificial Sequence
  ENSG00000215067_38 (sequence is synthesized)
aaaaatataaataggtcatcccctccaaaaaagccgtttgtatgtttaactggtgagtgacagatctgtaataattatttagaaataggaatgtcgaggcgggcggatcacctgaggtcg

SEQ ID NO: 998765 - DNA, 120 bp, Artificial Sequence
  ENSG00000215067_39 (sequence is synthesized)
catggcgaaaccctgtctctactaaaaattacaaaaattagctggatgtggtggcatgagcttgtgatcccagccactcgggatggtgaggcgggataatcccttgaacccgggaggcga

SEQ ID NO: 998766 - DNA, 84 bp, Artificial Sequence
  ENSG00000215067_40 (sequence is synthesized)
cgcctgggcgatagagactactgggatgtttgaagaacacagttttgcagtgagcaagttgtacccactctagtgaggacagtg

SEQ ID NO: 998767 - DNA, 120 bp, Artificial Sequence
  ENSG00000215067_41 (sequence is synthesized)
ttgcagtgagcaagttgtacccactctagtgaggacagtgacctcagaataattgagagggatcatttgaccttgagaccccaggacctaacaaataaacactatcattggctagaataa

SEQ ID NO: 998768 - DNA, 120 bp, Artificial Sequence
  ENSG00000215067_42 (sequence is synthesized)
tctgactcagtttggattctctctgtccgttctcaccacactactaaggagagaacagtgccaggcaggggaaggagaggtacctgaagttctttctccagttgagcctgaagctcttcc

SEQ ID NO: 998769 - DNA, 120 bp, Artificial Sequence
  ENSG00000215067_43 (sequence is synthesized)
atccccgagggcagcactagcctggagggcagagaggtcgagcgtctcaacagcatggggttggcaccattgaggaactggtagctgaacaactcatcatcctgccagcactggcgaacc

SEQ ID NO: 998770 - DNA, 120 bp, Artificial Sequence
  ENSG00000215067_44 (sequence is synthesized)
ctgtgttggggaaatgtcccctctcaccatgtctggctggcggcgactcagatgccatgagatggccatttgaagacaggcctgccggacatcaggtcaccttgccttcagggacctggg

SEQ ID NO: 998771 - DNA, 120 bp, Artificial Sequence
  ENSG00000215067_45 (sequence is synthesized)
ctgcatatcccttctccaaaatctaccccaggggttcaggtatataaccctccctgaacccagcttctgcgttttcattctcaaggcctctctgagttgaccagatatgataaggtctct

SEQ ID NO: 998772 - DNA, 120 bp, Artificial Sequence
  ENSG00000204814_0 (sequence is synthesized)
tggccgctgggaagttgggagagccaggctggggctccggcaggcccagggaaagttccctttctaggctctttattaaaaaatttaaaaggaggagttgaggcgccttgaattttcctt

SEQ ID NO: 998773 - DNA, 120 bp, Artificial Sequence
  ENSG00000204814_1 (sequence is synthesized)
cgtgagtttggagaccagccgatttttcatgaagctagcaaagactgcggtcctggatcctgcaacatatacctcattttctccaggcctctccacttgctcgagctctcagccaccagg

SEQ ID NO: 998774 - DNA, 120 bp, Artificial Sequence
  ENSG00000204814_2 (sequence is synthesized)
agacagacggaaggggcttctgggctgtgttgggagcgggcactgtcccctacccactcctgcacagtttcccaaagtccagcgacctccgaccctccttgggggaaaaaataccagtac

SEQ ID NO: 998775 - DNA, 120 bp, Artificial Sequence
  ENSG00000204814_3 (sequence is synthesized)
ctctgcatcctgttatatgactgggcttgcttcaggaatatcttacaaagaagaagaagaagaaggaagaggaggaacggcttggagtcatgtttacatctagttctactgatccgttca

SEQ ID NO: 998776 - DNA, 120 bp, Artificial Sequence
  ENSG00000204814_4 (sequence is synthesized)
catctggagagtttatttataactccctctataactctctgtttggaggcactggtggctctactgacagactgatgtctaggaaatattgctctatgtctaaccgtacctaaatgtgct

SEQ ID NO: 998777 - DNA, 120 bp, Artificial Sequence
  ENSG00000204814_5 (sequence is synthesized)
gtggttgtatttacagatttacgtttgagggaaatataattatttccattgtatttgtgcatatacagtagttataggagcagatttatatatgggaaaatatacgactctcttacagcc

SEQ ID NO: 998778 - DNA, 120 bp, Artificial Sequence
  ENSG00000204814_6 (sequence is synthesized)
gctggaggggcctcccttgcccacctctcttcgctggcactggcctcccgcacccgggtctgcagtccctccgccatctcacaggtgtgcagccgctaggcctgggggatccgaatgact

SEQ ID NO: 998779 - DNA, 120 bp, Artificial Sequence
  ENSG00000275056_0 (sequence is synthesized)
cagaaaagggaactgagtcagacaaaagagcaggactcttcaatgtggaaaagcaaagactgaaggaatcacgggatcaggaggtaggaaacagcgaatggcctagaggagtttggcgat

SEQ ID NO: 998780 - DNA, 120 bp, Artificial Sequence
  ENSG00000275056_1 (sequence is synthesized)
gggcactgcaagtggattgtggtatgactgtgttaggaccagggtgaggagcactgcataaaaggggcgtttaagaggtggtgtaaacaggtattgcaaggggattttttagggatgaga

SEQ ID NO: 998781 - DNA, 120 bp, Artificial Sequence
  ENSG00000275056_2 (sequence is synthesized)
actaacttgtgaagacaaagccataagtggctcctgtagaagctggactgcacctcgcctttaacacttgacatcagggagggggcatgtggtccaggcacatcctgggtgggggcacca

SEQ ID NO: 998782 - DNA, 120 bp, Artificial Sequence
  ENSG00000275056_3 (sequence is synthesized)
ttggttactggaccctggcccaggtggatagggtctgacccagtggagtgtcctccgttcctgagaaatacaggatttggtcaaagatgttcagtttcaaaattgacacactacttaggc

SEQ ID NO: 998783 - DNA, 120 bp, Artificial Sequence
  ENSG00000275056_4 (sequence is synthesized)
tagttatacttttttaatatttgcaaggtcttttattaaagagcagaaagaacggctccttatgacaagataatcagtgattacaatcttttagaaacctgatttttctctctccacatc

SEQ ID NO: 998784 - DNA, 120 bp, Artificial Sequence
  ENSG00000275056_5 (sequence is synthesized)
tctgccaaaatatctaacaaattgtgttgacatcccactgttaggagagggccagaccttcctaatcaggtgtcctggtgagaggaggacttctttatacggattcggctccctgagcga

SEQ ID NO: 998785 - DNA, 120 bp, Artificial Sequence
  ENSG00000275056_6 (sequence is synthesized)
gatggccaagacaaaactgcccacgtaatttttgtattttcatggaaatacgaaggggatataatttcagcaaaaccctgccagcttcacttggtgactacaaccaaagattatgtgtca

SEQ ID NO: 998786 - DNA, 120 bp, Artificial Sequence
  ENSG00000275056_7 (sequence is synthesized)
agtgcacgagggtccctctctgacaggtctgattagtggtgacccccccatcagagtagagacagagctcacggtttaaaagtttcatcggggccaggcgtgatggctcacacccgtaat

SEQ ID NO: 998787 - DNA, 120 bp, Artificial Sequence
  ENSG00000275056_8 (sequence is synthesized)
cccaacacttcaagaggcagaggcagaagcatcactcaagcctaagagttcaaggccagcctgggtaacatggcaagacccatctctacaaaaaatttaaaaataaaaaatttaaagcta

SEQ ID NO: 998788 - DNA, 120 bp, Artificial Sequence
  ENSG00000285361_0 (sequence is synthesized)
tttttttgtattatataacttaaatccaattttggatctaaacataatgattttaagttttttaacaacaattttcaatttgtgatctaatagcaggtttggatggagcttgtgttctgg

SEQ ID NO: 998789 - DNA, 120 bp, Artificial Sequence
  ENSG00000285361_1 (sequence is synthesized)
aagacacagttttgatgcttttaatatcctgctgttgttaaatagaatttgaatgggtgaaaaatgaaatgtggacaaaaacatattggattctcaaaacacgaaatatagatattggta

SEQ ID NO: 998790 - DNA, 120 bp, Artificial Sequence
  ENSG00000285361_2 (sequence is synthesized)
cataaaatttgaaattaaggcagattctggaaaactgactcctaacagtaaatcaaaagggatttcttgttgctatttggaaagcattttcataaaattagaatgaagaatacagcaaat

SEQ ID NO: 998791 - DNA, 120 bp, Artificial Sequence
  ENSG00000285361_3 (sequence is synthesized)
ttaaccactaggaaaacactttcttcacttgccttccatgacattctactctcttgattttctcttctccttctcctttgctgggtcctccttttctttccatctcttcatgcaggactc

SEQ ID NO: 998792 - DNA, 120 bp, Artificial Sequence
  ENSG00000285361_4 (sequence is synthesized)
ctccagggttcagtccttgatcttcttttttcagttttctatctacactcattctaatggtttgaaatactacctatgtgccaattacttccaaagtttgatctttagcccacacctctc

SEQ ID NO: 998793 - DNA, 120 bp, Artificial Sequence
  ENSG00000285361_5 (sequence is synthesized)
tgttccatctgaactttcccgcatttcacctgatggtaactccatcctttgaatcactcaggtcgaaagtcttggagtcatccttgactctttcatgtcctcccttcagttccatcagta

SEQ ID NO: 998794 - DNA, 120 bp, Artificial Sequence
  ENSG00000285361_6 (sequence is synthesized)
actttaccttccagaggaatcacttctcaaccacctacacaagacttaccctggttcaggccactatcatttcttcccttcttccacacaccctgcccctgcataggctcttctcaaaag

SEQ ID NO: 998795 - DNA, 120 bp, Artificial Sequence
  ENSG00000285361_7 (sequence is synthesized)
aagattctgaatgacgcttttactttatttttatttatttttttgagagggtctcaccctctcacccaggctccgtctcaaaaagatgaatgtctcttcatcttcttttatcctgttcta

SEQ ID NO: 998796 - DNA, 120 bp, Artificial Sequence
  ENSG00000285361_8 (sequence is synthesized)
ttttttttccataccatgtcttactctgtagctcaccataatttatttgtatgctcattttaggtttccctcaagtaaaacgtaaactaatccaggcacggtttttgttgttgttccatt

SEQ ID NO: 998797 - DNA, 120 bp, Artificial Sequence
  ENSG00000285361_9 (sequence is synthesized)
attttgagggctgggcacatagatgcgcaaggagtgcccaaactcatcatctcactctttatacagctgggcaaactgcctaaagtttcctcaagcctcagctttactattttcttgaat

SEQ ID NO: 998798 - DNA, 120 bp, Artificial Sequence
  ENSG00000285367_0 (sequence is synthesized)
ttacaggctgattaaacttgatgggttctggagatgccgaggaagagaggcagcatcacctacttgcctggactctagatgggcagctgatcatcttggacagactgctggatgctgtac

SEQ ID NO: 998799 - DNA, 120 bp, Artificial Sequence
  ENSG00000285367_1 (sequence is synthesized)
ccagggtggtcactcccagacaccatagaaaatgatgaggaaactgagcttcgagaagggagagtaactagtcctgagtcacacagttggtgaaatgtggagctgtcttgaaagttcatg

SEQ ID NO: 998800 - DNA, 120 bp, Artificial Sequence
  ENSG00000285367_2 (sequence is synthesized)
ggttcacctactgcactgcttgaagaatatttcggtgtattacaaatctgttcagaagcagaacagagaaaacaaaaatctccaacagcgtacacagcttatttgctagcaatgtacatg

SEQ ID NO: 998801 - DNA, 120 bp, Artificial Sequence
  ENSG00000285367_3 (sequence is synthesized)
cacatcaagtgcttaacacagtgcctgacatgataaagtgtagccaaaagacaaacaaacctgcttaactgaagatgatcagttaggatacagggaggtgttttaaacaaatggcagaca

SEQ ID NO: 998802 - DNA, 120 bp, Artificial Sequence
  ENSG00000285367_4 (sequence is synthesized)
aactgagaaatctgcacttcaagtccaactcatcctgagaaatgccagaattttagcaacaaaacaaacccgcaagtcttcttcgttcttgagagtcatgccgttttcctccaaacaagg

SEQ ID NO: 998803 - DNA, 120 bp, Artificial Sequence
  ENSG00000285367_5 (sequence is synthesized)
acgaaaggctctttgcttgtggagtgtctcagtctagcagtagattggaaaaatgtccaagcaggggactcgagttctctcccggatgagttcatttcaatagtcactgtgtttcatcgg

SEQ ID NO: 998804 - DNA, 120 bp, Artificial Sequence
  ENSG00000285367_6 (sequence is synthesized)
atgcagctggttacatttttaataggcagatggctaattttacagttccaagccaatctctcattggacaacatccagaaagcccgtggtagggtgatgcccagcagaaagttcaacagg

SEQ ID NO: 998805 - DNA, 120 bp, Artificial Sequence
  ENSG00000285367_7 (sequence is synthesized)
acacttggggggaacatatgctaatgtcagcccttttacttaaatgtctttaaaaagaatattcagtgctaagctgagggattttcacagactcaagcctaacaccagatgggtggccag

SEQ ID NO: 998806 - DNA, 120 bp, Artificial Sequence
  ENSG00000285367_8 (sequence is synthesized)
ctatgaagtccttagggcctgagcaaatgctcttaatctggcttggatggtcggagaatcaaatagcaccaaaccagtaatctctgagtgatttttaaaaatgacaaaggtgtatgcact

SEQ ID NO: 998807 - DNA, 120 bp, Artificial Sequence
  ENSG00000285367_9 (sequence is synthesized)
tgcagaaatgaccaggctaactagagaagcgagtttctcttaatagaagtccatggcgttactaaagccctgtggtcctatgattacctcggcatcccgacctccgttttgggtgcccct

SEQ ID NO: 998808 - DNA, 120 bp, Artificial Sequence
  ENSG00000285367_10 (sequence is synthesized)
ccccatctgacctttatggagttacaggaatgaatgtccgtttacctccccccaggtgacagcccctcgcctccagggtcagagagggcggaatgtctgttgcagttaagcatccttatt

SEQ ID NO: 998809 - DNA, 120 bp, Artificial Sequence
  ENSG00000285367_11 (sequence is synthesized)
tttaaactgtttggaaatctctctctccaaggagatggctatttagacatcttaattaaaagggaatttggaaatatctcccgttttgcagcgcatgtaatcaagcatttctttttctct

SEQ ID NO: 998810 - DNA, 120 bp, Artificial Sequence
  ENSG00000285367_12 (sequence is synthesized)
gagagagagagagagagagagagaaaaccaaagcaaaaaacaacaaacattttctgggaggtgataaaagtcttggatgcaaagtatccttattttatcccatgtgatgaattgccatag

SEQ ID NO: 998811 - DNA, 120 bp, Artificial Sequence
  ENSG00000285367_13 (sequence is synthesized)
tgccatagggtggctggaaaactctttaagaaccccaagggcaaatgccgttgtttaaatgaggcaaatgttgtttacctctaagcaaaataaaagctaaggatcagaagaaagagggga

SEQ ID NO: 998812 - DNA, 120 bp, Artificial Sequence
  ENSG00000285367_14 (sequence is synthesized)
tcaaaagatctttctccaaacagatttataaaagagagtgatttttaaatgatttcaactcctactttataaaaatattttatgaggcacttttctgaaaataacatgcttctgaagagt

SEQ ID NO: 998813 - DNA, 120 bp, Artificial Sequence
  ENSG00000285367_15 (sequence is synthesized)
tttcctccccaaatcgcttcctgaaaatggtggcattactttcatgcagtacaattgcctacacaagaccttatttaaaacaatgcaaaagaaatttgacaaagctagtaactctgcaca

SEQ ID NO: 998814 - DNA, 120 bp, Artificial Sequence
  ENSG00000285367_16 (sequence is synthesized)
ttttttttttttttttttttttgccgggaaaataaccttcaaacctcaaactaaatctgtaactgcttctatcaaatttttctttcaagaacctggaaagcggttcattttgttttatcg

SEQ ID NO: 998815 - DNA, 120 bp, Artificial Sequence
  ENSG00000285367_17 (sequence is synthesized)
tcattttgttttatcgagcagattgtgaaaagagttttcttgcagagtttttgttttataatcaaaataattcgagggaagtgacacgacttttcttttgagatttttttttttttctgg

SEQ ID NO: 998816 - DNA, 120 bp, Artificial Sequence
  ENSG00000285367_18 (sequence is synthesized)
acaaaatctaatagagggagagagagaaaaaaatctaaccaaagccaagacttgcagacaaaagttacacacaatcagaaaaccctcaaagataggtataaattattctgtcactaaatt

SEQ ID NO: 998817 - DNA, 120 bp, Artificial Sequence
  ENSG00000285367_19 (sequence is synthesized)
aaagtattggtagaagaaaagtcttaaaaatgtaaaatgagtactagccaaataccttcacagttaatggaattatggaaacttctctctggtgtgaatacccccaaacacattttagat

SEQ ID NO: 998818 - DNA, 120 bp, Artificial Sequence
  ENSG00000285367_20 (sequence is synthesized)
ttatttttaaagtgtagtttaaagaaactttataccatttaaaaaaaaaaataactttgaaaggaaaagagccaaaagaaaagcagaaattagggcagtttttaaactacaagccaactg

SEQ ID NO: 998819 - DNA, 120 bp, Artificial Sequence
  ENSG00000285367_21 (sequence is synthesized)
tttgctctactttgctttatttattagttctcaaggtatttaaaacttgagcattaaaactgcagaataatttgcaaatgaatgcagttgcagttgtgaaaatataactcacagctgaat

SEQ ID NO: 998820 - DNA, 120 bp, Artificial Sequence
  ENSG00000285367_22 (sequence is synthesized)
gtgggttattcagacaaatggctgctttgttcgaggaggggaagtaaagttctgtgttaatttattacaaactgcagcatttcatccctgatgtccaggcaacaatgttttttatttcaa

SEQ ID NO: 998821 - DNA, 120 bp, Artificial Sequence
  ENSG00000285367_23 (sequence is synthesized)
gtaatttataagcacttcccagagcacttagcggtgatgtccttggctgttttgctcccagagacggagtgtatatgtatttactgtgggaatttgtttttaataaaactgttgtaaggc

SEQ ID NO: 998822 - DNA, 120 bp, Artificial Sequence
  ENSG00000285367_24 (sequence is synthesized)
ttggccacgatgattggcttaggggaggtcatgtgatccaacttaagccagtgaaactcagctctggagcttctgttgaaactatagctgaaagaccagcttgtcagtcctggtagccgt

SEQ ID NO: 998823 - DNA, 120 bp, Artificial Sequence
  ENSG00000285367_25 (sequence is synthesized)
ttttgccatatttgctatcctgagaggggaatttgcatgagaatgaagttgttccagaagaaagcatacatgagagatggagaagttgagaaatctgcccctgcataattcagttaaaca

SEQ ID NO: 998824 - DNA, 120 bp, Artificial Sequence
  ENSG00000285367_26 (sequence is synthesized)
aatgaatttccccagtccaacttattgaataatcattgtcctgaagtagttaatggatttgagttacagctcggcaaattccacaaagaaaataaaacagcacaaggtccccacagagcg

SEQ ID NO: 998825 - DNA, 120 bp, Artificial Sequence
  ENSG00000285367_27 (sequence is synthesized)
gcaggaagaactcagcgatggaagcttttaggagtggatcaagtgacaatgctaaacaaaccagcacagccaacctcctggtccagaggatcacacgtgaataagctgatctgatataag

SEQ ID NO: 998826 - DNA, 120 bp, Artificial Sequence
  ENSG00000285367_28 (sequence is synthesized)
tgattctttggactttttcctgggaattaaggacaaagttattcctggttttgctgctggctttgattaaagaacgcatggactaaggaggtgccagcagccgttttaaaccacaagagg

SEQ ID NO: 998827 - DNA, 120 bp, Artificial Sequence
  ENSG00000285367_29 (sequence is synthesized)
agccacttacaaagactccctgtgacccaactttagtcaagctcctctgagctctcttttcacctaggccttgaccttgacccctggcttgtctttggcctgcccagccgagttttggta

SEQ ID NO: 998828 - DNA, 120 bp, Artificial Sequence
  ENSG00000285367_30 (sequence is synthesized)
agaatcctgctaaattacttcccacccttgatatggcatcacacttgatatcaagtttctcaaccctcactttcctgcaattagcaagaatcttgttaggccagtttagcaagaatcccc

SEQ ID NO: 998829 - DNA, 120 bp, Artificial Sequence
  ENSG00000285367_31 (sequence is synthesized)
tacccctgatgtctctcctcttagtaatttccaatccactgacaccctcatcctgttccttggctataaatccccacttgtccttgttgtactcaaatttgagcctgatctctccccact

SEQ ID NO: 998830 - DNA, 120 bp, Artificial Sequence
  ENSG00000285367_32 (sequence is synthesized)
atcccctggatcccgggctcgcgggggcgcggagaagaggatccaggaaaggagagggccattggcaaggaactgaggtggccttcgatcaacagcccacaaggaatggaatcctgccaa

SEQ ID NO: 998831 - DNA, 120 bp, Artificial Sequence
  ENSG00000285367_33 (sequence is synthesized)
taacaatcaaatggtccgaggcatccaagcatggcctattgcctgtgtctttattctgaacagaacagggcagccttgggaaaatgctggctgctcagctagctcacttaaaaaaaatca

SEQ ID NO: 998832 - DNA, 120 bp, Artificial Sequence
  ENSG00000285367_34 (sequence is synthesized)
ccaatatttaaactgtaaggtccttggctatggaaggtgactggagaaccattgatccctgcattttataggaaaagcaagggcccattggaacctgttgctgttgtgactggagagtga

SEQ ID NO: 998833 - DNA, 120 bp, Artificial Sequence
  ENSG00000285367_35 (sequence is synthesized)
attctgctggtgggaagacggaaattagaacaaaggattgtttctaaacagaatgcctgcacgcagatatgaagatgaggggagtaaatgccttcagcaaaatgaggaaacaaaatgtgg

SEQ ID NO: 998834 - DNA, 120 bp, Artificial Sequence
  ENSG00000285367_36 (sequence is synthesized)
tgtgaaagcttccctgtgggagagaagaagaaagaaaagtttatgcaccttgcaatttcaagctaaacaaaaaaaaaaagccatctttgccttcctaaaataaaataaaatccttaccca

SEQ ID NO: 998835 - DNA, 120 bp, Artificial Sequence
  ENSG00000285367_37 (sequence is synthesized)
cgctaggggccccgtgcggtcaggccggggcgacctccacccgcacccacgcctcatggggctcccgggtcttggccgcggctgggatccccggaaaagcagggacggagaagccaggcc

SEQ ID NO: 998836 - DNA, 120 bp, Artificial Sequence
  ENSG00000285367_38 (sequence is synthesized)
ggcatgcccgccctccttcccccgggaggacccaacaactccggaaagatcctgccgggagatgtgctcgctttccccggggcagcgggggaaagcccagcaaaggcacattgaaaatta

SEQ ID NO: 998837 - DNA, 120 bp, Artificial Sequence
  ENSG00000285367_39 (sequence is synthesized)
aaaagaaaaaaaaaattacgccgagtggaagaagcaatcggggccgcggcggcggcccacaccaggcatattggaccttgcccatctacacctcagccccacagagcaaggagagggcca

SEQ ID NO: 998838 - DNA, 120 bp, Artificial Sequence
  ENSG00000285367_40 (sequence is synthesized)
ggtgtctaatggatcacatgactgtacctactggtccttttcctgccttgttaattacaaggtgttatgatcttcaccacagattgattacataaaggggatcatttcttcatccccacc

SEQ ID NO: 998839 - DNA, 120 bp, Artificial Sequence
  ENSG00000285367_41 (sequence is synthesized)
atttgccatgtaactttgtcatgccctgtatctctgactctggcctctgtcattgacttgctgtgccaatgttagcaaatgtgaagcacacacaggcttgaatagcactgtgcaacggga

SEQ ID NO: 998840 - DNA, 120 bp, Artificial Sequence
  ENSG00000285367_42 (sequence is synthesized)
cttgttaacacttaccttctactgttgctacatgaacatgcccaggctagcctgatggatgatgagagacatgtggaatagagcagagtcaccacattcatctcagctgagacctttcta

SEQ ID NO: 998841 - DNA, 120 bp, Artificial Sequence
  ENSG00000285367_43 (sequence is synthesized)
gatgggtcaacagccctctacccccagacgtgtgagccagcccagccaagatcagccaagtccaacctgaataattgaacactgaggtcttgttgcagaataaaagtgtattattgtaac

SEQ ID NO: 998842 - DNA, 120 bp, Artificial Sequence
  ENSG00000285367_44 (sequence is synthesized)
ggtatggagaaacaggatttggaaacccataagtgtaagccttcatatatgggtagaacaggtttcttgctcacaagagacaccaacttaaattgaaaagaaagtggttttggactagtg

SEQ ID NO: 998843 - DNA, 120 bp, Artificial Sequence
  ENSG00000285367_45 (sequence is synthesized)
ctaggtactggtgcataaacccatgtatatacgcacaggctcttgaggggtcagtgaaagaagctgctgaaatgtcactcgtagaatgggcttcaaacaggagtgggattttctcacctt

SEQ ID NO: 998844 - DNA, 120 bp, Artificial Sequence
  ENSG00000285367_46 (sequence is synthesized)
catctaactccctgctgttctttaatgcaactctcctaagcccccagcatccaggtgttccttttgccatttatgatgctgcttctctcctactttgggataccctccctcttttctgtt

SEQ ID NO: 998845 - DNA, 120 bp, Artificial Sequence
  ENSG00000285367_47 (sequence is synthesized)
catcattatccccctgatgctaacccattgaatggctctattttcctcttctctgcagtacttttaggttttcagcatctgtgttacatgcactaggctttggttttatatgattacaca

SEQ ID NO: 998846 - DNA, 120 bp, Artificial Sequence
  ENSG00000285367_48 (sequence is synthesized)
tcagactgcaactattctacatctaatcccttaattaatctataagctcctgagaggaaagctatggtactaaatgctttcacagcgtaaggccaaagtaaatgcttttggcactaagta

SEQ ID NO: 998847 - DNA, 120 bp, Artificial Sequence
  ENSG00000285367_49 (sequence is synthesized)
aaggtttcacatatattcatgccttgattgaggtggaacaggagacctactagtgatatttaatagaatgctaccaatttcttctgtctgactgaaaggctcatagattctaagccattc

SEQ ID NO: 998848 - DNA, 120 bp, Artificial Sequence
  ENSG00000285367_50 (sequence is synthesized)
ctttccagaaacatctttaagaaccatgctgcaattgcttgttgatcaaggcttgtctaactatggtcctgcttgaaggcagagaagccatttctattcatccaaccaaccattcaataa

SEQ ID NO: 998849 - DNA, 120 bp, Artificial Sequence
  ENSG00000285367_51 (sequence is synthesized)
atagttaataggttccttctatgtagaggagatctctattatgtaaggataagtgatagaagagaaagacttgagtataaatccactgaaaatcaaggaccaaaattttataagagtgaa

SEQ ID NO: 998850 - DNA, 120 bp, Artificial Sequence
  ENSG00000285367_52 (sequence is synthesized)
taaagtaaaatgatctcattgggtctgcatattgattaaaatgaaacaaataatttattttaccttatatttagcaaaatatagactataaacacaacaatttgttaactctgagaatga

SEQ ID NO: 998851 - DNA, 120 bp, Artificial Sequence
  ENSG00000285367_53 (sequence is synthesized)
acaaagaatgaatcaaaggatgagattttggcatattttttgacatcccttacctaaccattgatctttattgaaattttaaaaagtcatgttaattaccctgacttgattattacacgt

SEQ ID NO: 998852 - DNA, 120 bp, Artificial Sequence
  ENSG00000285367_54 (sequence is synthesized)
atttaccaaagctgaatctatgcaaactctacaatccagcaattccactcctggtgttaccagtggagggtcttgactacaagtcatccaaattcttggcgttttgaacaaaaaattgga

SEQ ID NO: 998853 - DNA, 120 bp, Artificial Sequence
  ENSG00000285367_55 (sequence is synthesized)
caaaatgcacaaagaaagcaatgaaggaatgaagcaacggaagcacagatatatgtaaacaaaaattcactccacagagtaggagctggctcgaccaagtggctcaagagcgttggttac

SEQ ID NO: 998854 - DNA, 120 bp, Artificial Sequence
  ENSG00000285367_56 (sequence is synthesized)
tcagagggtgaagtcaagttacaaagttaaacatgaagacttggccccatgaccagcctgaatgattgcgggaggggaccaattataggtactcttcatttttcatctgcaaggcagtgc

SEQ ID NO: 998855 - DNA, 120 bp, Artificial Sequence
  ENSG00000285367_57 (sequence is synthesized)
aaagggagtagcctcttatccttttgttacttgcgtgtagaaaggtggggttttcctttggattcagttctaggaagtcagcacaaatcagccttaggtttcctgtctccagaccctatt

SEQ ID NO: 998856 - DNA, 120 bp, Artificial Sequence
  ENSG00000285367_58 (sequence is synthesized)
ctgcctcactgagtaaataccaaatagaaatgagcatgtgttcatctaaaggagaccttcagagtggtgcttacagccccaaatcagaaacaatgcaaaggccctgggctgggaagtgaa

SEQ ID NO: 998857 - DNA, 120 bp, Artificial Sequence
  ENSG00000285367_59 (sequence is synthesized)
ttatggtagagtcacatggtggactactgcgctgcaatgagaaggagcaatcttcagaccaatccagggacatgaaaggatctcacacccattatactgactgagcagaaagggtaggac

SEQ ID NO: 998858 - DNA, 120 bp, Artificial Sequence
  ENSG00000285367_60 (sequence is synthesized)
aaagtaggacatacatatatcctgtatgatttgatgcttatgatgtttaaaaacaggctaactctaaccgtaaccctctgctcattaatgctttttgtttgtttgtttatttgagacagg

SEQ ID NO: 998859 - DNA, 120 bp, Artificial Sequence
  ENSG00000231705_0 (sequence is synthesized)
ccaggactgacgccacagcctgcagctcctccccaagcccagccccagcccttgcccttcaatcctgagaccctgagatgcatgggtggggctttcatccgctggggaggctgagacccg

SEQ ID NO: 998860 - DNA, 120 bp, Artificial Sequence
  ENSG00000231705_1 (sequence is synthesized)
gacggcaccgtggccaggaccccagccagcacttcccttttctgcgagggttttctgtttctttgattataaaataacccctgttggtggggggaaaaaattagcaaaataaagaaaagc

SEQ ID NO: 998861 - DNA, 120 bp, Artificial Sequence
  ENSG00000231704_0 (sequence is synthesized)
agtttaggctcctaggagacttgattctggctgacgtgctgcgactgtcatctttcagatcagagtaactctgagtctggtgggagtgtcttcccccgacaccccgtatacctccgcttt

SEQ ID NO: 998862 - DNA, 120 bp, Artificial Sequence
  ENSG00000231704_1 (sequence is synthesized)
aagatgagagaatcttctgtcggtgctagcgttcagcggctaacggaggaggcttgactcaacctgccggacactaaaggacatcactctgagcctgagggaggggctctcctttggtct

SEQ ID NO: 998863 - DNA, 120 bp, Artificial Sequence
  ENSG00000231704_2 (sequence is synthesized)
gttagccactaggcactccacatcgctgcccgcatcaccacgctgcggcatctgctgttgcatctgcgatccacaaggcctacaccattcgccatcgcacctggctgtttgttgcagata

SEQ ID NO: 998864 - DNA, 87 bp, Artificial Sequence
  ENSG00000231704_3 (sequence is synthesized)
tacaccattcgccatcgcacctggctgtttgttgcagatatttctcagaacatgatcttcacttactgcaacctctgcctcccgggt

SEQ ID NO: 998865 - DNA, 120 bp, Artificial Sequence
  ENSG00000231704_4 (sequence is synthesized)
aaaaaaaaaaaaaagtactcatatctctttttctgtaacttttaaaatccactcccaaatacgtcttgggggaacttcctatgtcagtatagcatggtagtccataactggattcttcaa

SEQ ID NO: 998866 - DNA, 120 bp, Artificial Sequence
  ENSG00000231704_5 (sequence is synthesized)
taacagtaaatctagctatttcccccagcggaatgggaattgtgtccaacatttcaaacatctggaaaagtatcatctatacgcagtgtaatgtttacagcgaattctgccactgctcgc

SEQ ID NO: 998867 - DNA, 120 bp, Artificial Sequence
  ENSG00000231704_6 (sequence is synthesized)
tgattttaaacacattaccctgtgtctcagttttttatttgtaaatgatattttaccacctaatttacagggctgtagtgaggattacatcgattgacatatttatggcaagctctcaga

SEQ ID NO: 998868 - DNA, 120 bp, Artificial Sequence
  ENSG00000231704_7 (sequence is synthesized)
cctgaagtgttccaagcatagagatgatggacgtggtatgggacaatcagtgcacccgcaggaggggacggcgggaaccaagattggaaggaacattgctctctgtgactgagtctccgt

SEQ ID NO: 998869 - DNA, 120 bp, Artificial Sequence
  ENSG00000231704_8 (sequence is synthesized)
agtcttcggacggcggcctgcggaggtcgggtgagagggtgatcgcgctgctgaaagccgactgcgcctacgtggactgcgggttcgctccgggccgctcctccctgctgttcacgagga

SEQ ID NO: 998870 - DNA, 120 bp, Artificial Sequence
  ENSG00000231703_0 (sequence is synthesized)
ctagctccaacctgaggactgggatcggaggtctttccagaaacagaaggcttctagctgctcccatgggtttcaggaggaatccgcttgcttggatcagctgacctctgacagtttgtt

SEQ ID NO: 998871 - DNA, 120 bp, Artificial Sequence
  ENSG00000231703_1 (sequence is synthesized)
tagggaaggagtggggagtgattgttacaggccctgcaggggagagagcctgtgggtggtggtgctgaggcgtgtttaatgaggctgtcccttagtcaggggctgaaggtggacccttga

SEQ ID NO: 998872 - DNA, 120 bp, Artificial Sequence
  ENSG00000231703_2 (sequence is synthesized)
catttggaagcagcgtggagagtcactgtgcaccccctgagagacggaggcctctgcccggagcagggaacttcataagtggcggcccagagggaaccgtccacagaaccccctgtgtct

SEQ ID NO: 998873 - DNA, 120 bp, Artificial Sequence
  ENSG00000231703_3 (sequence is synthesized)
cccctccagagtgtaggtccctgagggcagtcacctgatctgtctcagtcactgcagtgtccccaaacagagcaccgcctcaggcacacagagggcagtggtgaggactaaaggaggcga

SEQ ID NO: 998874 - DNA, 120 bp, Artificial Sequence
  ENSG00000231703_4 (sequence is synthesized)
tgagaagagagtccccacaaggagtctggcacagaggaagtttcgacgtatgctgtccattgcaacttcgacttatgctgcgtttctgtgtcggaacagtggaagacattcaacaagcac

SEQ ID NO: 998875 - DNA, 120 bp, Artificial Sequence
  ENSG00000231703_5 (sequence is synthesized)
tttgtctcagaggcttagttacaattaattgagcctgaaagaccatagacttgaaaaagccctcaaagtgataaaggtaaaaagaaaaataaaatgacatctagcaggcactgagggctc

SEQ ID NO: 998876 - DNA, 120 bp, Artificial Sequence
  ENSG00000231703_6 (sequence is synthesized)
tacaacgtgtggctagcctgtattcagcaccctacagtgtgcagccaggctgtgctcagcatcctacagtgtgcagccaggctgtgctcagtactctacagtgagtagccagcctgtgct

SEQ ID NO: 998877 - DNA, 120 bp, Artificial Sequence
  ENSG00000231703_7 (sequence is synthesized)
cagcactccgcagtgagtggccagcctgtgctcagcactctacagtatgtggccaaactgtgctcagcactccacagtgagtggccagcctgtggtcaggactctacagtgagtggccag

SEQ ID NO: 998878 - DNA, 120 bp, Artificial Sequence
  ENSG00000231703_8 (sequence is synthesized)
tctatactctgcactctacagtgagtggccagcctgtacacagcactccacagtcgtcatcttttcatcataaatctaatggccacttaatgaggtagacctgtcccatgacttgaactg

SEQ ID NO: 998879 - DNA, 120 bp, Artificial Sequence
  ENSG00000231703_9 (sequence is synthesized)
atttcaaaaactcaaaactcatactctcttgcatttggcaaccaaaacacaacccacttcctgggaccttctgacagccaggccacgttgagcaaacaccgagccctcttcagagttggt

SEQ ID NO: 998880 - DNA, 120 bp, Artificial Sequence
  ENSG00000231703_10 (sequence is synthesized)
cagcagccaggtcagcagcgactggcaaggcgactgcttgccaggtctcctccagcatgagcttgggatggagctgaatccctttcatgcacaagcagaatttgaaaaggtgcggggcca

SEQ ID NO: 998881 - DNA, 120 bp, Artificial Sequence
  ENSG00000231703_11 (sequence is synthesized)
cactagtacctctgcgtctcctgccagagcccaccagcttattttgcttcttcagagtctgtaaagcatccttctggatgacgaatgccttccgaggctccagcccaccaagccttcctc

SEQ ID NO: 998882 - DNA, 120 bp, Artificial Sequence
  ENSG00000231703_12 (sequence is synthesized)
taagtttcagatgcagaggccacctcggagaactgtgattgtctccctgcatctccccagtgcccccggatgagtgccaccctcctcacctgctatcacaaagacaagaaaggccattca

SEQ ID NO: 998883 - DNA, 120 bp, Artificial Sequence
  ENSG00000231703_13 (sequence is synthesized)
tgagtcagatgctggaggaaaaattgaactctttctcccaggatacaccaaagatcaagcagaatctcattaaggctcacttcaaagactcgtcctttatttccatacaaacaagtttaa

SEQ ID NO: 998884 - DNA, 120 bp, Artificial Sequence
  ENSG00000231703_14 (sequence is synthesized)
attatcgtgtgtgaatctgctgttagcagggactctgttccattatgcatgattccttactgttcatatcatgaataatgggcagtgctccgttagcgatttccagtaatatgctaaact

SEQ ID NO: 998885 - DNA, 120 bp, Artificial Sequence
  ENSG00000231703_15 (sequence is synthesized)
ttgggagtggtcatggtgttaggttaaagttctggtgtttgcctattttatttcttactcaagctataatggcctgcttcatcaaaataggtttcacagtcttattgtaatgaacacagc

SEQ ID NO: 998886 - DNA, 120 bp, Artificial Sequence
  ENSG00000231703_16 (sequence is synthesized)
ataacacatgttgtggctatgatttccttattattattattgaatatttattgagcacttactatgtgtaagggatggtgctcagtgtatgcattgcatgcataatatttaatcttccgg

SEQ ID NO: 998887 - DNA, 120 bp, Artificial Sequence
  ENSG00000231703_17 (sequence is synthesized)
aatcccatgaaatagctatgatgattattcccattttactggtgaaaaaaactgataatttgagcaggatctaaattatccacagataaaacttttttgtgtgtttttgagacagggtct

SEQ ID NO: 998888 - DNA, 71 bp, Artificial Sequence
  ENSG00000231703_18 (sequence is synthesized)
cacagataaaacttttttgtgtgtttttgagacagggtctcactttgtgtttccaggctcaagcgatcctc

SEQ ID NO: 998889 - DNA, 88 bp, Artificial Sequence
  ENSG00000231703_19 (sequence is synthesized)
gctgggactacaggcatgcaccatcacactggctaatgttttaaacaatttttgtagagatggtgtcttgctattttgcccaagccca

SEQ ID NO: 998890 - DNA, 120 bp, Artificial Sequence
  ENSG00000231703_20 (sequence is synthesized)
aggcatgagccaccgtgcctggcctgatagaactgttaataaatggtaatgctgattcaaatcagttggtctgacttcagatactcctaattataaaatactttttacaacgctattact

SEQ ID NO: 998891 - DNA, 120 bp, Artificial Sequence
  ENSG00000231703_21 (sequence is synthesized)
ctattacttgctgaagagctttggcagataatcgatgatttggtaagcaggtatttggatgtccagtgcacatttctcatgtccagatgagaaatgaatgctcaggggattgcttgatac

SEQ ID NO: 998892 - DNA, 120 bp, Artificial Sequence
  ENSG00000231703_22 (sequence is synthesized)
ctgggagtgagaaaatccttgttcaagtactggttttgacttcacttaatcttgggcaagtcatccagtcttcctggatgtgctgaggtggttgcattattgcctttgtaattttttttc

SEQ ID NO: 998893 - DNA, 120 bp, Artificial Sequence
  ENSG00000231703_23 (sequence is synthesized)
ctaatgctatcccttccccctccccccactccatgacaggcccctctgtgtgatgttccccatcctgtgtctaagtgttctcattgtgcaattcccacctatgagcgagagagaacatgc

SEQ ID NO: 998894 - DNA, 120 bp, Artificial Sequence
  ENSG00000175611_0 (sequence is synthesized)
gggagcatcttcagggcagcgccgcccacgcgcgaggtgaatgaaggacacggcctcttgacactcccaggcagcacagatagacggatccgtctctgcccttgatcacatcagcagaat

SEQ ID NO: 998895 - DNA, 120 bp, Artificial Sequence
  ENSG00000175611_1 (sequence is synthesized)
agactagaagaatcatgagacttttcctagttgcctttcaagaatatgaagaaaaaaatggttctcaaagtgggtttgaatgagtattgttccaataaatgaacttatattcatatttca

SEQ ID NO: 998896 - DNA, 120 bp, Artificial Sequence
  ENSG00000175611_2 (sequence is synthesized)
gggccaagtgaaactagcgcgttttcttggatcctacactttatagtgagtcataaatactttaaatacaaagccaacaacatttgctgcaaataaacgtaaaaatactgttaaagtgta

SEQ ID NO: 998897 - DNA, 120 bp, Artificial Sequence
  ENSG00000175611_3 (sequence is synthesized)
aagtgttttcctccgtaccatctgacgtttctggcggttcgttgaacgcgagagaacgctgagccgtctgcactgagcccgggagcatcttcagggcagcgccgcccacgcgcgaggtga

SEQ ID NO: 998898 - DNA, 120 bp, Artificial Sequence
  ENSG00000175611_4 (sequence is synthesized)
taaaaaatgctcatattgaaaaagaagaaaagctgaaaattaattgtgcttccaactttaaaaaaggacaacaagctaatcctaaagaaactagaataaaaggaaaaaataaacagaagt

SEQ ID NO: 998899 - DNA, 120 bp, Artificial Sequence
  ENSG00000175611_5 (sequence is synthesized)
taaagagtaattttaaaaaatacaatagaaattatcaacgaagccaaaagttgattctttgaaaagattaatgaagtaggcaaaccactggtgagatgaatcaagaaaaatagagaaaag

SEQ ID NO: 998900 - DNA, 120 bp, Artificial Sequence
  ENSG00000175611_6 (sequence is synthesized)
actcaaataaacattaggaatggaaaatagggcaatgctaaagagaattcaaagatcagaaaaatatgggagtatactaaaaacgatttcatgcccaagtgttcaaatctatattgcctt

SEQ ID NO: 998901 - DNA, 120 bp, Artificial Sequence
  ENSG00000175611_7 (sequence is synthesized)
ctttctgtgggcggagcaatcttcccgatgtctcttccctctgaggccagtagcaggaagggcctcgggagttgcgagtgtcgcgaggtttgaggtcgctcggtgggccgggcgctgtgc

SEQ ID NO: 998902 - DNA, 120 bp, Artificial Sequence
  ENSG00000175611_8 (sequence is synthesized)
gaagctagaaataactgggggcatggagaatgcggtggctgtaaagggccgctgaggcggtggaggcctggcagagagcgtccccgcggtcgcggcttctggcttctctgtggagcttgg

SEQ ID NO: 998903 - DNA, 61 bp, Artificial Sequence
  ENSG00000175611_9 (sequence is synthesized)
tgcttgaacccatgaggcagaggttgcagcgagcagagatggccccactggactccagccg

SEQ ID NO: 998904 - DNA, 120 bp, Artificial Sequence
  ENSG00000175611_10 (sequence is synthesized)
aaaaaaatcaaaaaggaaaagaagcactgaagaaatccataaccgttggagaagcttgaatcagtagttgataatgtccctccaagaaaagaccagatgtaagtgactgtacaggaaagt

SEQ ID NO: 998905 - DNA, 120 bp, Artificial Sequence
  ENSG00000175611_11 (sequence is synthesized)
tctgccaaatgtcaaagggaatagataaatatcacataaactcttccagagaatacaagaaaaggaacactccccaacttattttataaacttggttaaatcttgatagcaaaatttaat

SEQ ID NO: 998906 - DNA, 120 bp, Artificial Sequence
  ENSG00000175611_12 (sequence is synthesized)
aaggacaccatgacaagtgaaattataagcaaattttacttacagttatatgcaaaagttctaaacaaaatactggacaactgaatctaattttgaataatactagcaagaataataata

SEQ ID NO: 998907 - DNA, 120 bp, Artificial Sequence
  ENSG00000175611_13 (sequence is synthesized)
ataacaataataataataataatgcatcatgaccaagttgggtttacctcaagaatgcaaatatagtttaaaactggaaaatctagtagtgaaatttaccacactaagaaataaagaaga

SEQ ID NO: 998908 - DNA, 120 bp, Artificial Sequence
  ENSG00000175611_14 (sequence is synthesized)
gacaagctgagggaaagactatgccgtgcagcaaagtgcacaaaacttaagtgtatacagcttggtgaatttttggatatgaatccacctgtgtaaccaccatctggagcaaaatattga

SEQ ID NO: 998909 - DNA, 120 bp, Artificial Sequence
  ENSG00000175611_15 (sequence is synthesized)
acattttaagcatcccagaagattctatcatgcttcctcctagctctaacctccttccgcctaaagatcccagtttctgacctgtagcatagtccctctctctgaagaacttcctgtaat

SEQ ID NO: 998910 - DNA, 120 bp, Artificial Sequence
  ENSG00000175611_16 (sequence is synthesized)
tacaggcatgagccaccatgcccaacccaagaatttacatttctaacaagttcccaggtaatgcttatgctgctggcctagaaaccacacttgaagaaaccactccttcagaaaatagtt

SEQ ID NO: 998911 - DNA, 120 bp, Artificial Sequence
  ENSG00000175611_17 (sequence is synthesized)
cactccttcagaaaatagttcttgtctcccaagaggagaaggaatgcgaaagaggattttaaagaaagcttccaaattgtggccaactctgatagaagatcatagacacttgaaactcag

SEQ ID NO: 998912 - DNA, 120 bp, Artificial Sequence
  ENSG00000175611_18 (sequence is synthesized)
tgctgaagaggatgctgtagtcatgcccaggctcaatgggaaagagctccaggatgaggggggcttgcataccatgggacgggggaggaattgacaacaaagatccacatatttatcatc

SEQ ID NO: 998913 - DNA, 120 bp, Artificial Sequence
  ENSG00000175611_19 (sequence is synthesized)
cacaaggttggttggtcttaatcttgtgcttgtcgtatccattttataatacaatcacattcgtacacttgactttaatttacatcacagagttatatgtctttgatgcaagacttcagc

SEQ ID NO: 998914 - DNA, 120 bp, Artificial Sequence
  ENSG00000175611_20 (sequence is synthesized)
aaaatggcccagccagggtgttagggttttctggcactctacccatggaagaggagaggattggaatgaagagaggaaggcacaagggagaaagctgacatatggaatcaagttggagaa

SEQ ID NO: 998915 - DNA, 120 bp, Artificial Sequence
  ENSG00000175611_21 (sequence is synthesized)
gtggggaaagggtggacaatgcattttcagggaccagccccatcactggctcagggtttcctaggcacggctcttctcaggcaagctgtgctggaagcctggattacatctggaattcaa

SEQ ID NO: 998916 - DNA, 120 bp, Artificial Sequence
  ENSG00000175611_22 (sequence is synthesized)
gaactctccctgtttcaaatacagcctagagaacacaggtggtccacaggctgcatttttgccacccacaactttgggccacatttagaggagccagtgaaagaatcaatctgctgagtc

SEQ ID NO: 998917 - DNA, 120 bp, Artificial Sequence
  ENSG00000175611_23 (sequence is synthesized)
agaagaaaattcaacaagctcttatccaaataggcactcgtacgtgttgccatattaaagatgcaagtggtcccattagtaataaactcttcagacacaaaaggcatttgtgtcacaaat

SEQ ID NO: 998918 - DNA, 120 bp, Artificial Sequence
  ENSG00000175611_24 (sequence is synthesized)
tctgtacaagttataaatagagggaaaagcatctgggaatgtgaagtcaagagtcctgtgttttgactctagctcaagtgcagaccaaaaacataggcgttcacctctcagttcagttta

SEQ ID NO: 998919 - DNA, 120 bp, Artificial Sequence
  ENSG00000175611_25 (sequence is synthesized)
acaatatttctcaaggatctatctgtgaggcacttggatgcatggtctataaataagaccaagtccctttcttgaaagtgcttaaaatctaatgaaggggagggagataaatacacaaat

SEQ ID NO: 998920 - DNA, 120 bp, Artificial Sequence
  ENSG00000175611_26 (sequence is synthesized)
caatggattcaagacagggtattgaagatgttatgagagtaatacaagtaaaacattgaccaagttaaaaaggacaaaacaaaacagcaagtaaggtgttaactcctccatattccatta

SEQ ID NO: 998921 - DNA, 120 bp, Artificial Sequence
  ENSG00000175611_27 (sequence is synthesized)
gaatactcttagcatgcccagttcctgacacaaaagtaggcatttgataaatggctctttgagtaaattaaatgagcattatctcttcccagacctaaacagcccaccaatgacctagtt

SEQ ID NO: 998922 - DNA, 120 bp, Artificial Sequence
  ENSG00000175611_28 (sequence is synthesized)
tacaatttatgcactgttaatttgcctaattagacccagtatctacttctgtgccacaaaatcatatgattagagcattaacagtcatgaaacgctttatagacctggacttctccaatc

SEQ ID NO: 998923 - DNA, 120 bp, Artificial Sequence
  ENSG00000175611_29 (sequence is synthesized)
gaggacattacaatctactaaataaagaataacttgaagagggatttaaatagaggagggtattgagaaagccataaatttagtaaaagagaagttaaaatcggcacgtggggttcatag

SEQ ID NO: 998924 - DNA, 120 bp, Artificial Sequence
  ENSG00000175611_30 (sequence is synthesized)
cattaaaggacatgatttacctctgaaactcatgtttgtttctaccagatgagcaggaagagattccaaagaggaaaagatgattagaagtaggaataactagcttgggcaaagtggcaa

SEQ ID NO: 998925 - DNA, 120 bp, Artificial Sequence
  ENSG00000175611_31 (sequence is synthesized)
gacggatccatccggccagggggaggggccgagcccggctgcatgtaacacccggaaggcggcggaggacagcaaggtggctggccggcaggccaatggcggccaacgccacttccggcc

SEQ ID NO: 998926 - DNA, 120 bp, Artificial Sequence
  ENSG00000175611_32 (sequence is synthesized)
gccctccgagcatcgctcttcggcaacccgaagccacaggatggaggagggggatcccagcaaagatcccagtttctgacctgtagcatagtccctctctctgaagaacttcctgtaata

SEQ ID NO: 998927 - DNA, 120 bp, Artificial Sequence
  ENSG00000175611_33 (sequence is synthesized)
ttttttgctaggaagagtttgaagtttgaaatcccagaatgaggaaattcatccagcttggagacttccaatcccttcattgtgcagaaggttgctaatgctctcaggagaagcccttca

SEQ ID NO: 998928 - DNA, 120 bp, Artificial Sequence
  ENSG00000175611_34 (sequence is synthesized)
ccaagagaatacttccacatagagtcctctccattgagactaaggaaacatgctatgtcatgtagccacagcagcctttgcagctgttgaaggcagcaagacttgcatggcaatcagaag

SEQ ID NO: 998929 - DNA, 120 bp, Artificial Sequence
  ENSG00000175611_35 (sequence is synthesized)
gactcatatccagttataagatggcagatgggacacacactcatcaggcttagtgagcagccaatccagagggaaccatactcagccctaggggctgggcgcggtggctctcgcctgtaa

SEQ ID NO: 998930 - DNA, 120 bp, Artificial Sequence
  ENSG00000175611_36 (sequence is synthesized)
aaaaagccctaggaagatttcttcaaacagatgaagctaatgatatccccagtgtgtttgaatatattgagagatcacacaatagggacactgtttagggttgaattaatagcaagcaaa

SEQ ID NO: 998931 - DNA, 120 bp, Artificial Sequence
  ENSG00000175611_37 (sequence is synthesized)
ctgacagggcctgtatccgttccctattgccacaataaccaaaaaccacaaactttgtagcttgaaacagcacaaatttatcatctgacagacaatgcatttattatctcacggttctgt

SEQ ID NO: 998932 - DNA, 120 bp, Artificial Sequence
  ENSG00000175611_38 (sequence is synthesized)
agatcagaagtgctacctgggtgtcacccgggctgcactcctttctggtgactccacaggacaatccttagcttgcctttgccagcttctgtccacattccttggctttggtcccttcct

SEQ ID NO: 998933 - DNA, 120 bp, Artificial Sequence
  ENSG00000175611_39 (sequence is synthesized)
ccatcttcaaagccagtgatatgccatctctctgaaccttccatcctcaagtctaccgctgattgcagctggaaaagattctgagggctcacctgagtaatccaggatcatcttcccatt

SEQ ID NO: 998934 - DNA, 120 bp, Artificial Sequence
  ENSG00000175611_40 (sequence is synthesized)
aaggtggctggccggcaggccaatggcggccaacgccacttccggccgccctccgagcatcgctcttcggcaacccgaagccacaggatggaggagggggatcccagcaaaggtagcgac

SEQ ID NO: 998935 - DNA, 120 bp, Artificial Sequence
  ENSG00000175611_41 (sequence is synthesized)
taaggggacccaagcagaacgggagggcgacgtccggagcggcggcagagccaggggacgctgtgtgaggctggcaaagcggtgttcacctagttctctcgggctccgccgccgccggag

SEQ ID NO: 998936 - DNA, 120 bp, Artificial Sequence
  ENSG00000175611_42 (sequence is synthesized)
gaggacaggaggccggcaaggcgacccccaaatcttcctaggctctgacttccgtctcctaacccccgcaaattccaacccggtcttggaaaatcccgcgagaacgggctcccgaattgt

SEQ ID NO: 998937 - DNA, 120 bp, Artificial Sequence
  ENSG00000175611_43 (sequence is synthesized)
gtcagtctgtctgcaatgctacctgcatccttaacccttgtggtaactgtgatggtttaaggcaaaaacaagtgcctcaaccatgaacctagcaatgaatgaggaaagaaatctttcttc

SEQ ID NO: 998938 - DNA, 120 bp, Artificial Sequence
  ENSG00000175611_44 (sequence is synthesized)
ccctacaattctgctgggttttgcaatcacactgtgagaaactctaccctgagacgtcaaaccgagaaagaatgctattggctccaaggtgcggtttggaagacgaccgacctctattcc

SEQ ID NO: 998939 - DNA, 120 bp, Artificial Sequence
  ENSG00000175611_45 (sequence is synthesized)
gacctggaggtcagctttgaggatgcctctgcctgccatctttgggcgtgttcacaaggcacatttctttgaatagatttcagcagcgacgcattttcacttctgtggggtgggtgcaaa

SEQ ID NO: 998940 - DNA, 120 bp, Artificial Sequence
  ENSG00000175611_46 (sequence is synthesized)
caaaagtcattcagagctgagtctggtggagaggacgggtgatatgctgggaatactttttgctttaaaaagcatttaaagtacttaaatacttttttttttttttgagtcagagtcttg

SEQ ID NO: 998941 - DNA, 120 bp, Artificial Sequence
  ENSG00000273805_0 (sequence is synthesized)
cttttttcttcggaggcttcatttcctgaaagacacagtgtccgtgatgaactgatttcactaattcgctcattgcattttttaaaaacctcagcggtccagatctggcttcttttgaag

SEQ ID NO: 998942 - DNA, 120 bp, Artificial Sequence
  ENSG00000273805_1 (sequence is synthesized)
gtgacaacactaggcctatgcctcatccccagcaggtgaccaatggaggaaaataaaatagaacttcaacatgctctctgacgaacttgaacccctggtactggttgctctgagaagcca

SEQ ID NO: 998943 - DNA, 120 bp, Artificial Sequence
  ENSG00000273805_2 (sequence is synthesized)
tgggtttccttccttggacaatttcagagcccatcattatggtttatggaaaggaagtggcactgagagagacccttgcttctcctggcagctcttctcccttgagaaagctcctcaact

SEQ ID NO: 998944 - DNA, 120 bp, Artificial Sequence
  ENSG00000273805_3 (sequence is synthesized)
tctcctgagcttagtttcagaagtgattgttcatcctctcccactgggagtcctgggatgggctccgtatattttactccagccacaggcggatgagtgagatgaccttttcaggtcact

SEQ ID NO: 998945 - DNA, 120 bp, Artificial Sequence
  ENSG00000273805_4 (sequence is synthesized)
caggagatcctccagtttctcaggataatctaagcatctccctttcctttagaagctgtcagagctaactcagcgtgggtgtgggctctttgcagctacaccacctcccctccaatattt

SEQ ID NO: 998946 - DNA, 120 bp, Artificial Sequence
  ENSG00000273805_5 (sequence is synthesized)
caccaccgcccctcagctctagaaatggctgattttcatgacgccctttgccaaccagattatttcttaaattgctctcccccctgctgggtgttctgggacacagacgccagtgtgtgg

SEQ ID NO: 998947 - DNA, 120 bp, Artificial Sequence
  ENSG00000273805_6 (sequence is synthesized)
ggtccccggctttcctttctcccagagcagctggaggagagcctcagtttctccaccgcacaccctggcctgagggtagcagccgacccagtcgggggagtgggcctcctgcgccctcgg

SEQ ID NO: 998948 - DNA, 120 bp, Artificial Sequence
  ENSG00000273805_7 (sequence is synthesized)
gcggggccccaccgaggaccccctgaacggcagcccgccgcgaggcagcgtggggaccaaactgccgcgccccagagcccgccgccgcctgtccccgcgtctgaggtccgcaaggaagag

SEQ ID NO: 998949 - DNA, 120 bp, Artificial Sequence
  ENSG00000273805_8 (sequence is synthesized)
cgcaaggaagagctgcgggaatgcacgcccggggaagaggctttgtgaaccgaggctcggcgcgccccccacccgcgcccctcatgggcagccgggcccagcccgccgcccgggcccctc

SEQ ID NO: 998950 - DNA, 120 bp, Artificial Sequence
  ENSG00000273805_9 (sequence is synthesized)
tgggaagggcttggaggcgacgcggggggtcgggggaggagggagcgttcctgcaaatcacatgattttcccgcttatataaatcacagcttgtttttctcaaccagctgcagacttaaa

SEQ ID NO: 998951 - DNA, 120 bp, Artificial Sequence
  ENSG00000221953_0 (sequence is synthesized)
atcgctggggcctccctgcgaggctgtcagcggccgaggtgggggcccttgccggggtgaggagccgatcgtccaccggatcaggccccctgcagcagcccgcctggagcccgagcatgg

SEQ ID NO: 998952 - DNA, 120 bp, Artificial Sequence
  ENSG00000221953_1 (sequence is synthesized)
ccgggcggggaaggggcggcggcaccggaattgctccgcccagctaaggccggggccgtggctcctgtgcaagatgggcctgtgcaccctccagcccctgggccctcctcgaaaatcctc

SEQ ID NO: 998953 - DNA, 120 bp, Artificial Sequence
  ENSG00000221953_2 (sequence is synthesized)
cacatcctgcgggacctggaccgccagcggcctcccaagcctgggccatttgccccgtcgcctccgcctggcattcgacttcttagaaccgcgggcacgagggcagcgtgggggcagtgg

SEQ ID NO: 998954 - DNA, 120 bp, Artificial Sequence
  ENSG00000221953_3 (sequence is synthesized)
tggctgtcagtccacgcgggccgccgagaggacgcgcccaccccaccctccaaacgccgtcctcctgcttcagccagagccgtccctgacatgggcccagggacgcggctgcagaggcca

SEQ ID NO: 998955 - DNA, 120 bp, Artificial Sequence
  ENSG00000221953_4 (sequence is synthesized)
cttccggtcactccccgctgcggcctcgcgctccgggagccgcaccctccgctgcgccagctccgaccgcagtcttcgggagcagaagcagcgccgcgcgggccctgaccccacaccctc

SEQ ID NO: 998956 - DNA, 80 bp, Artificial Sequence
  ENSG00000221953_5 (sequence is synthesized)
tcgctgggtccctccgccccggccgctccccgcaccgcgcgcggtgcctacgagctccaaggcggcgccagccaagacgg

SEQ ID NO: 998957 - DNA, 80 bp, Artificial Sequence
  ENSG00000221953_6 (sequence is synthesized)
cccggcaccggcggggagggcgcgctcctaggctgcgggagcggacggacccctccgacttcggccacctggcgccgccg

SEQ ID NO: 998958 - DNA, 120 bp, Artificial Sequence
  ENSG00000221953_7 (sequence is synthesized)
cctcctccccgccgaagtccctcccggggcagccgccgcaaactttccggagcgggagcgactgtgaacccgagtcctcccggcgccccgggcccttcgcgcgcctgccggtccccgtag

SEQ ID NO: 998959 - DNA, 80 bp, Artificial Sequence
  ENSG00000221953_8 (sequence is synthesized)
gtagcccggccctgcgcccgcccgggccccactactgcggccgagcgatccggcgtgaccgcgggacccacagggcgccc

SEQ ID NO: 998960 - DNA, 120 bp, Artificial Sequence
  ENSG00000221953_9 (sequence is synthesized)
atcccaaccactggggagactgaagcgggaggagcgcttcagtgcaggagttcgagagctggtggggaaaccagccccacaccacccggcgggtaccccgagtccggcgcagacaaagga

SEQ ID NO: 998961 - DNA, 120 bp, Artificial Sequence
  ENSG00000221953_10 (sequence is synthesized)
tttagaaagagaatcacagtttaaccggcgggtccaggggaccagggcgtcggaggcttgctcgcggccccgagctctcggcctccacccaatttattggtttaccagctcttcgttctt

SEQ ID NO: 998962 - DNA, 120 bp, Artificial Sequence
  ENSG00000221953_11 (sequence is synthesized)
agggcaaatgggaggggtgagaagggatgaggaaaaggattaatcaatgaaggagaactcgtgactcatttaataagatgtgtagccgtggcggtttctgtgaatttcctctagcaaagg

SEQ ID NO: 998963 - DNA, 120 bp, Artificial Sequence
  ENSG00000221953_12 (sequence is synthesized)
cgtgtgtctaaactatttaagatctttaccttatccggactgaaatgcgtgggagcgggtttcaggagcagccaagatgtttgattgtactccactgcttcaagggagtgttatctccgc

SEQ ID NO: 998964 - DNA, 88 bp, Artificial Sequence
  ENSG00000221953_13 (sequence is synthesized)
cccatggatgtctcacgcaggggggaccaactcatctggcattccagaaactctctttcccacatatgtccccctttttttgtctcta

SEQ ID NO: 998965 - DNA, 81 bp, Artificial Sequence
  ENSG00000221953_14 (sequence is synthesized)
tgtctcacgcaggggggaccaactcatctggcattccagaaactctctttcccacatatgtccccctttttttgtctctat

SEQ ID NO: 998966 - DNA, 64 bp, Artificial Sequence
  ENSG00000221953_15 (sequence is synthesized)
tctattaattttttttttattaataaccgccattgctatttcgttcactgtgtctggcttctct

SEQ ID NO: 998967 - DNA, 120 bp, Artificial Sequence
  ENSG00000221953_16 (sequence is synthesized)
aaccgccattgctatttcgttcactgtgtctggcttctctaccaaggcgccgtcggcatctgtagactaaaaataaacagcataaacagacacaaaccaaaataaaatttgcaattgttg

SEQ ID NO: 998968 - DNA, 120 bp, Artificial Sequence
  ENSG00000237705_0 (sequence is synthesized)
aagaagcagtcttggacctttcatcttcagagaatgtcacaaggaacagagataagccacccctgctgagccctgcccaatctgcagattcgcactggggaaactctttttctccttact

SEQ ID NO: 998969 - DNA, 120 bp, Artificial Sequence
  ENSG00000237705_1 (sequence is synthesized)
cctggagattctgatttcactgtgcgacctgatggggagttgccaggagaaggactgcgtcggcctttggaagctggtgaagccgcacttgcctggacctctcctggagactcagctgct

SEQ ID NO: 998970 - DNA, 120 bp, Artificial Sequence
  ENSG00000237705_2 (sequence is synthesized)
catctcctttaactgggattggttttaccacctgaatcaaagtattccaatattttgattacttaaaaatataaaaggaataccctttgccatctcaatatggcttcaatgaagaatttc

SEQ ID NO: 998971 - DNA, 120 bp, Artificial Sequence
  ENSG00000237705_3 (sequence is synthesized)
ctaccaccattctacggcagttagctgctctcccgctgcatgaaggtaacaatgttgactagcaacatctagaatatgaagactgctgtacaaggctgcttctgctggtattgagggaga

SEQ ID NO: 998972 - DNA, 120 bp, Artificial Sequence
  ENSG00000237705_4 (sequence is synthesized)
gaagaagctctagccagaagacaaaggaggcttcaactgtttaatattagttcctttaaaaaatacacatccaactgcactgcagcaagtacaataaaatattaacatttattaaataca

SEQ ID NO: 998973 - DNA, 120 bp, Artificial Sequence
  ENSG00000237707_0 (sequence is synthesized)
tacaattccagatggtctagagtggcggggcaagtggagtctgagatgagctactgagataaatctggttcctatagggctgagatcatgttttccagcagcaatcccaggactgggtgg

SEQ ID NO: 998974 - DNA, 120 bp, Artificial Sequence
  ENSG00000237707_1 (sequence is synthesized)
aaacctggaggttttcaggaaggctggaggaggctggcttaggatgagctgctgcattggctgtgcagacgtgaccctcaggacttcatctgaacctgtgaagagtttccatgcagggaa

SEQ ID NO: 998975 - DNA, 120 bp, Artificial Sequence
  ENSG00000237707_2 (sequence is synthesized)
catcagtctactgggtgtttgctacacctctgaagagctaaggttttccctcctgttacagtaatggacactcaacaacacatacccttcccagcaacctgtcctgctggaaaactactc

SEQ ID NO: 998976 - DNA, 120 bp, Artificial Sequence
  ENSG00000237707_3 (sequence is synthesized)
gataaggtaacttctgcctgaaggggaccagggtcatcatacccgcaagtgcagcatcttcctgcagctctcatactaccaagctggggtttttccaacataaacattacaggtgctaaa

SEQ ID NO: 998977 - DNA, 120 bp, Artificial Sequence
  ENSG00000248309_0 (sequence is synthesized)
gcgtccaggaaggaagtgacagaagacgaatgggaaaaggagaacagctcacagcgtttgaaacatcgcggcaccactttcagataaaaacatagacctgaatggcatcatccagtatcc

SEQ ID NO: 998978 - DNA, 120 bp, Artificial Sequence
  ENSG00000248309_1 (sequence is synthesized)
aaggaaaccatgcagttttgaacatctggaggcctgatttattggagattgcaaatgtacagtgtaacatagctgtggagagcgagaagatcaggattgtcaatgctgtcattgctttta

SEQ ID NO: 998979 - DNA, 120 bp, Artificial Sequence
  ENSG00000248309_2 (sequence is synthesized)
ctggaatccccagcacgaattgaaggtttgaccagagacaaagaagcaaatgctatcaattaacattcacatgtggtaggaattctactagtgcatgtggagagaaacatggctgctgca

SEQ ID NO: 998980 - DNA, 120 bp, Artificial Sequence
  ENSG00000248309_3 (sequence is synthesized)
aagctgagaatgagatgaaatgtatatgtaacccttgtgtatggcaagtttggcaagaaagaaaaagcatacttggcagattaagataaggtttctctctgtttactgatatagtctcag

SEQ ID NO: 998981 - DNA, 120 bp, Artificial Sequence
  ENSG00000248309_4 (sequence is synthesized)
gtttgcattgtgtgatgaataataggttgggggaagatatcctttgtttattcattcatttcatcaacaaatatttaatgagtacctactatatgccatgccacaaagagtataaaccta

SEQ ID NO: 998982 - DNA, 120 bp, Artificial Sequence
  ENSG00000248309_5 (sequence is synthesized)
gagacagaatgttgagtcacatagacagtgctcctgatacaattatttgaactgagttaacaatacttcaaggttccatgtctaatttactggctaggttctcaacaaaatttctggata

SEQ ID NO: 998983 - DNA, 120 bp, Artificial Sequence
  ENSG00000248309_6 (sequence is synthesized)
cttcctgttgtcatgtgaaggacatgtttgcttccccttccaccgtgattgtaagtttcctaaggcctccccagccatgctgaactgattataggactgtgtatgtcctacacacacatt

SEQ ID NO: 998984 - DNA, 120 bp, Artificial Sequence
  ENSG00000248309_7 (sequence is synthesized)
atatgtcctacacgcacagtgatgaggagtgacaaaatgaagactccagaatcctctttatcagatcctgaatgtgcactttctgaagtgaagtccactatgtgctgggcacacagagaa

SEQ ID NO: 998985 - DNA, 120 bp, Artificial Sequence
  ENSG00000248309_8 (sequence is synthesized)
aatgcaattcagatcttccctttcgcttggcttcttaaaacttcttttgaggatggtaaaatttcgtgttatattaaatttcatcctgtaactgatactctgggatgatgttggccaata

SEQ ID NO: 998986 - DNA, 120 bp, Artificial Sequence
  ENSG00000248309_9 (sequence is synthesized)
actagcaagactttaaataatcaactagtttaggcattgcttagcacgctccagctgacttcacaagtaaaaccatgtgaagaaagaaggttttcaggtaacacagatggaggtgatgat

SEQ ID NO: 998987 - DNA, 120 bp, Artificial Sequence
  ENSG00000248309_10 (sequence is synthesized)
ctttctcattttgtggaaaatattaatttctcattttttattcactgacaattagtaaaattccttactctacctaatatgtagacttctgaactatgtaagtaaaactttatagtaact

SEQ ID NO: 998988 - DNA, 120 bp, Artificial Sequence
  ENSG00000248309_11 (sequence is synthesized)
ctgctctcatcacctatatactcttctctctgcccgtctctgcttccccccccttccccccccccttttctcccggccgacggagctgaaggggcgggggttccttccttggagtgtttc

SEQ ID NO: 998989 - DNA, 120 bp, Artificial Sequence
  ENSG00000248309_12 (sequence is synthesized)
tagagctcggaggctgctggtaggggggcaccactttcagataaaaacatagacctgaatggcatcatccagtatccaaggaaaccattgtgtctgtaaccagctaatgagctgcaacag

SEQ ID NO: 998990 - DNA, 120 bp, Artificial Sequence
  ENSG00000248309_13 (sequence is synthesized)
agcctggccttcattttcagcaaattaagttcatccctcataggaattgtggtctggctgtggcaccgctcctaggttctctaaacatgaatatgcctttgggggaagacagaagaacat

SEQ ID NO: 998991 - DNA, 120 bp, Artificial Sequence
  ENSG00000248309_14 (sequence is synthesized)
ggaagccatgtgaaaaaaacggatcctaaggtataaacaaagtgcagatgattgtcggccatgctgcagggatttcttgtttgtcttctcagtagtgttagctaattttgtcttccaatc

SEQ ID NO: 998992 - DNA, 120 bp, Artificial Sequence
  ENSG00000248309_15 (sequence is synthesized)
cgcaattccttataggacttggacgctttgaacctctcaggacccctcagattctagtacataaactcggagccaaattcacagccagctctccttcaaactgccttatctgtttttgag

SEQ ID NO: 998993 - DNA, 120 bp, Artificial Sequence
  ENSG00000248309_16 (sequence is synthesized)
ttaattagaagggccttttaacaactttgcatttgagtcctaagaaaagtctagttcattaggcaataaagccactgtgctggcccctaatcaaggtcagtacatatcattatacgactg

SEQ ID NO: 998994 - DNA, 120 bp, Artificial Sequence
  ENSG00000248309_17 (sequence is synthesized)
atccaaatttgagttggttcagttatttcatttgttcattgtccacaatgttccagtcacagtaccaggtgctcagagtgtggtgttagagacaagattcaaagtaagtaattttagacc

SEQ ID NO: 998995 - DNA, 120 bp, Artificial Sequence
  ENSG00000248309_18 (sequence is synthesized)
aacagggatgggcaagaaagaccttacagaagagatgaatatcttagcgaataacttagcaggatttcaaagaatggacgagagttttgcaggcagatgagataggaagggtgccagaga

SEQ ID NO: 998996 - DNA, 120 bp, Artificial Sequence
  ENSG00000248309_19 (sequence is synthesized)
gaaaggaaagcatgggcaagggctcaggaggtggggaaaaatgtgatatagtttgaggtactggagtatgaagttaacaaggggagaatatttagaaggaaggatggagaagtaggcaga

SEQ ID NO: 998997 - DNA, 120 bp, Artificial Sequence
  ENSG00000248309_20 (sequence is synthesized)
gagcagattatcaggttaaaatattagaaattagtattgaagtttactagaagccagcagcacgttcaatgcaagcaggtgccatggtcatattagttttagtttagtaatcagtgtaga

SEQ ID NO: 998998 - DNA, 120 bp, Artificial Sequence
  ENSG00000248309_21 (sequence is synthesized)
aggtggatgagagggggtgagtctggaggcaataagcatagttggtagtagcagtctaggtgtcacctgacaggggcctttactagcccagtggtggacatttttaatgcattagtcttt

SEQ ID NO: 998999 - DNA, 120 bp, Artificial Sequence
  ENSG00000248309_22 (sequence is synthesized)
cttctagtctgtgaatttcttataacgagggtgtggtcttcctcacacttgtttcttcacacttgttgcctactatcatacctgacatgcagtaaattaccatagcaagacaaaaaatct

SEQ ID NO: 999000 - DNA, 120 bp, Artificial Sequence
  ENSG00000248309_23 (sequence is synthesized)
cttaaacgtgtactctttattactctgttggaccatgatgagagcaacttattgtatggctatttaaaattatttatgaagataatattttttgtgttggaaatgctacaataatttaat

SEQ ID NO: 999001 - DNA, 120 bp, Artificial Sequence
  ENSG00000248309_24 (sequence is synthesized)
tgtgagatttataactaagacttattgttcacatttgttttatgttttcatatatgtgatgaaatagacaatttactctgtaagtcttaaatataaaaatgattcattatttctttctga

SEQ ID NO: 999002 - DNA, 120 bp, Artificial Sequence
  ENSG00000248309_25 (sequence is synthesized)
tttctagagctcggaggctgctggtagggggaagttgtacccgtcagcacctgctgagggctttgttgtccaaaccctgacaggtaaaaaaattcctgcagaataaagccagaccagctg

SEQ ID NO: 999003 - DNA, 120 bp, Artificial Sequence
  ENSG00000248309_26 (sequence is synthesized)
gtctggcaggccgaggtgcacctgtttctgtcactctggagtaaatttagctgtaaagggcaccactttcagataaaaacatagacctgaatggcatcatccagtatccaaggaaaccat

SEQ ID NO: 999004 - DNA, 120 bp, Artificial Sequence
  ENSG00000248309_27 (sequence is synthesized)
ggtgagcaaagagacaagattacatgtttaaaccaagaaaagaatcttgaaaaagcattgaaaagaacaactttcaagtcaaaagaatcaaggtgaagagaatggatactcatgcccatg

SEQ ID NO: 999005 - DNA, 120 bp, Artificial Sequence
  ENSG00000248309_28 (sequence is synthesized)
gtggaagacattatactctagatttttctagtattattaaatttgaaaatgatttattccaaattttaacttagcttttaattttactagtgtcaaaatgttgtactactttggacaact

SEQ ID NO: 999006 - DNA, 120 bp, Artificial Sequence
  ENSG00000248309_29 (sequence is synthesized)
gatttttccaatagagagtcaatagcatctttgcagggtggtttaaaagccaataatttaatccatattctactaaaacttttaatataagcattttacccagatgtattttttccttgt

SEQ ID NO: 999007 - DNA, 120 bp, Artificial Sequence
  ENSG00000248309_30 (sequence is synthesized)
tttagaaaatctgattttaattgctaaaactcgtttttaaatattaattcaatgaaagaaatgctatggttttctactttttcatttcttaaactcaagggaaaacatgggtgaaaaaca

SEQ ID NO: 999008 - DNA, 120 bp, Artificial Sequence
  ENSG00000248309_31 (sequence is synthesized)
ggagtgtttctagagctcggaggctgctggtaggggggcaccactttcagataaaaacatagacctgaatggcatcatccagtatccaaggaaaccatgttctctaaacatgaatatgcc

SEQ ID NO: 999009 - DNA, 120 bp, Artificial Sequence
  ENSG00000248309_32 (sequence is synthesized)
tttgggggaagacagaagaacatggaagccatgtgaaaaaaacggatcctaaggcagttttgaacatctggaggcctgatttattggagattgcaaatgtacagtgtaacatagctgtgg

SEQ ID NO: 999010 - DNA, 120 bp, Artificial Sequence
  ENSG00000248309_33 (sequence is synthesized)
ataggaattgtggtctggctgtggcaccgctcctagacatgacaaactccaaaaggaaacccaagcagctatttggctcccttaattaatgaagtcgcccagtatggataattcaggttc

SEQ ID NO: 999011 - DNA, 120 bp, Artificial Sequence
  ENSG00000248309_34 (sequence is synthesized)
taaggctttttacctgtctgttgaactgagtgaaggacccagaggccctatgatgtggtgtagcttcgagagaaggaagcctagatccctgaatcattgtgcagaacatacttatcctac

SEQ ID NO: 999012 - DNA, 120 bp, Artificial Sequence
  ENSG00000248309_35 (sequence is synthesized)
agccatataggactgttatatgagtaagcgctgaagttatttcttaggttattgaactttccaagcatatctattacattaattagtgttacctcaataaaagcatgtacttcacagaac

SEQ ID NO: 999013 - DNA, 120 bp, Artificial Sequence
  ENSG00000248309_36 (sequence is synthesized)
agggcaccactttcagataaaaacatagacctgaatggcatcatccagtatccaaggaaaccatgttctctaaacatgaatatgcctttgggggaagacagaagaacatggaagccatgt

SEQ ID NO: 999014 - DNA, 120 bp, Artificial Sequence
  ENSG00000248309_37 (sequence is synthesized)
ctagagctcggaggctgctggtagggggtgcttgtagacatggaagaaggcctcaccttctccatggctgacaaccgagaaggctggtctgacttggaagaagctgtgtggccaacagcc

SEQ ID NO: 999015 - DNA, 120 bp, Artificial Sequence
  ENSG00000248309_38 (sequence is synthesized)
tgtcgcaccacacaacaaaattttctctataataaccagtctaagtaggcttttaccccacaaaagtagatcccatttaatttactttgtgtttatagcactccctctcaaaccgcacca

SEQ ID NO: 999016 - DNA, 120 bp, Artificial Sequence
  ENSG00000248309_39 (sequence is synthesized)
ttatcctagtaattaagccagaatttttctctgccaagaccaatagatggaccaagaagtactcatccttgtaaactttctttggataaattgcttacatataataaattcagagttaag

SEQ ID NO: 999017 - DNA, 120 bp, Artificial Sequence
  ENSG00000248309_40 (sequence is synthesized)
gattacatgtttaaaccaagaaaagaatcttgaaaaacagattggaagaatgcgaaatgttattagacacaggcacagcatagcagtagaaacatcttaactgagaacttggaactgaaa

SEQ ID NO: 999018 - DNA, 120 bp, Artificial Sequence
  ENSG00000248309_41 (sequence is synthesized)
ttttaaggaggcaagggcatttataaaacattttagaaactatttaataaaaatggtaaaattaaagtgtttgtttatgtactcaacaaatatttatttggaaagtgcatgcctgggggc

SEQ ID NO: 999019 - DNA, 120 bp, Artificial Sequence
  ENSG00000248309_42 (sequence is synthesized)
acatctcgttaatgaggtgatcctgtgtttagaactgaaggcagtcctcatccattctctcaaaaggtgaccttctttgttcttcttatagcctcaccacatttaattttcagaggtttt

SEQ ID NO: 999020 - DNA, 120 bp, Artificial Sequence
  ENSG00000248309_43 (sequence is synthesized)
gacataaattaaaaacattctttggtagattgtattgtatgaaaacaatcttcaaaagtgtaagcattgatatctggaatatctgggaaaatgtacaataaagacatctcttctggtctt

SEQ ID NO: 999021 - DNA, 120 bp, Artificial Sequence
  ENSG00000248309_44 (sequence is synthesized)
aaactattgggaatctaggatgccactggaacatgtaaaatggcagctaaggtctatggaaacccttcatgtttagaaactggctaaagcttgagttctcttatcttttggttaagggca

SEQ ID NO: 999022 - DNA, 120 bp, Artificial Sequence
  ENSG00000248309_45 (sequence is synthesized)
ttggcacatcattttctttatcccctccccacaaactaatgtacatttctgcagctaatatcaaagttttaattcatgttcaggagctatgaaatctactgtggaaatttagtttctaaa

SEQ ID NO: 999023 - DNA, 120 bp, Artificial Sequence
  ENSG00000248309_46 (sequence is synthesized)
caacatgctactctggagaaagacattcctaaaatatttgaaatttctactatttccgtacttcgactttttttttgttatttgtactatctccttttaaaattaaattattttcaatgt

SEQ ID NO: 999024 - DNA, 120 bp, Artificial Sequence
  ENSG00000248309_47 (sequence is synthesized)
tagcactccctgtcagattcattgaacaagcttaaattcaggatactgaaaatgtaaattgggaagagggatgtatgttcttgggattcttttctcccgtgcatggacacccaaacaact

SEQ ID NO: 999025 - DNA, 120 bp, Artificial Sequence
  ENSG00000248309_48 (sequence is synthesized)
ctcactgtagtaaagggaggttacacatgtgttgataacatttgtattactgctggtaggaaattgaacattgatgggtggttttaaaagcctgcttttgcctattgtgtttccacattt

SEQ ID NO: 999026 - DNA, 120 bp, Artificial Sequence
  ENSG00000248309_49 (sequence is synthesized)
ctttgccaatatagttggtcaaattagttatgcaaaatgcatctaaaaacttctaatccaaaagtgtcaatgttgttaaagatttcttttcatacacaaagaaatattacattgctccat

SEQ ID NO: 999027 - DNA, 120 bp, Artificial Sequence
  ENSG00000248309_50 (sequence is synthesized)
gtatctgacctctgctttggggccttactttaagttacatttttcttaaataaagcttttctgttttttaaagtgaatgacgggatgttaactttaaatagacatttaaccacataaagt

SEQ ID NO: 999028 - DNA, 120 bp, Artificial Sequence
  ENSG00000248309_51 (sequence is synthesized)
atagtggcagatggttcatttttctactcagggtagacactttattcaggtaatgatatttaatcctcattttctatgaaatctgcatgttgttcttaaatctgatactattttgtgatt

SEQ ID NO: 999029 - DNA, 120 bp, Artificial Sequence
  ENSG00000248309_52 (sequence is synthesized)
taaaatgagtgttgggttaactttgtttacaagtgaagtatttatccctttgattctcttttactttcttcttttggtaaacacctatccgtttctaagacccacttatatgttatctca

SEQ ID NO: 999030 - DNA, 120 bp, Artificial Sequence
  ENSG00000248309_53 (sequence is synthesized)
tcaaggaaaattttcccatcctcccaaaggagaacagaactccactgtagtggaataagttttttgaggtatgaaccaatgcttctgtcctcctaatattcttacaacctctaacccgcc

SEQ ID NO: 999031 - DNA, 120 bp, Artificial Sequence
  ENSG00000248309_54 (sequence is synthesized)
tctgcattcaggaaaccagaatacattagggaggagacagcaaaggaaaacaaaagacaataaaggaatcgatgtatttgttttgtaactcaaagttaaagtccaaatttagaaaataga

SEQ ID NO: 999032 - DNA, 120 bp, Artificial Sequence
  ENSG00000248309_55 (sequence is synthesized)
tttgaaagcataacgggtcaatttctgttgtgcctctgaagaagaaagttgagaaagaacgaagagggcttagatgctggtgggtgtctgcaaaaaagcccagacaatgcctggaataat

SEQ ID NO: 999033 - DNA, 120 bp, Artificial Sequence
  ENSG00000248309_56 (sequence is synthesized)
aaagaagcagagaacttccagggaggaagggaacagtctctaagatggagcaggacctggggaagtcttgcttctccactgaagaacatggaccaagaccagggcagaagggatggcagc

SEQ ID NO: 999034 - DNA, 120 bp, Artificial Sequence
  ENSG00000248309_57 (sequence is synthesized)
ttccccgtagagcagtgaggacggatgacgacatgaagactggactgctcattctcaccttcccttcacagtccctggcactttttaagctccttggaaattagaggcaatctaggagaa

SEQ ID NO: 999035 - DNA, 120 bp, Artificial Sequence
  ENSG00000248309_58 (sequence is synthesized)
agggggatagaagcagaccttatttctgttacaatgtgaatgggagcttcaaattgaagataaaatgttatggaaaaagtgaaattatatatatattttgcacatcgtagcttggtggct

SEQ ID NO: 999036 - DNA, 120 bp, Artificial Sequence
  ENSG00000248309_59 (sequence is synthesized)
ttaggtttctgtgcatcaaaggaaggaattgtgtcttcctcattgtcatactctggtattggagattgtgcaacatatatagtaggtatgcaataaacagctgttaacagaatgaatcaa

SEQ ID NO: 999037 - DNA, 120 bp, Artificial Sequence
  ENSG00000233288_0 (sequence is synthesized)
ggagactactcctcccagcatgcctggcgaggcgcgcaccgcgctggccctctctcctgggacacgcaccgcctccaatcctggtttatgctgggattgtagtcaggcagccctgtgagc

SEQ ID NO: 999038 - DNA, 120 bp, Artificial Sequence
  ENSG00000233288_1 (sequence is synthesized)
aatttttcagattaactcttaagtactccacggctacatgctcctgaagctgttataggcccagcctcagatctgtgcagggcggatgcacaagagcagaatctccgtggacatctttct

SEQ ID NO: 999039 - DNA, 120 bp, Artificial Sequence
  ENSG00000233288_2 (sequence is synthesized)
ggagcatcaattttactgcaagattttgaagaaacacatttaattgattttcaaggtacataggaagtacatggaatcagatgtttgccatagcttgctaacgaattctctcctgcatca

SEQ ID NO: 999040 - DNA, 120 bp, Artificial Sequence
  ENSG00000233288_3 (sequence is synthesized)
agatggcatgcctctcaacaggacactcttaggaggctggaatgtgttaaaattagtatgtgatctgtttttggtgaagagccatctgactctcaactgtacatggtagccttaatgcac

SEQ ID NO: 999041 - DNA, 120 bp, Artificial Sequence
  ENSG00000233288_4 (sequence is synthesized)
ctgccagccaagccatacaggccaagggaagtctgagtccattattcattttatcaatctgttgtagtgaacagctagattattatgaacattgtacacattttaccatattcctttgct

SEQ ID NO: 999042 - DNA, 120 bp, Artificial Sequence
  ENSG00000233288_5 (sequence is synthesized)
cttcctagggcatttgttccaggattcttcttggataccaaaatgcatggatgcataagctccttttataaagtggcatagtatttacatataaccaatgcatatactcctgcatacttt

SEQ ID NO: 999043 - DNA, 120 bp, Artificial Sequence
  ENSG00000233288_6 (sequence is synthesized)
aatctctagattacttgtaatacctaaattgttatgctttattgtttaagaaataacataaagaaaaaagtctgtacatgtttagtagagatgctttataagaaatatttttgatttaca

SEQ ID NO: 999044 - DNA, 120 bp, Artificial Sequence
  ENSG00000233288_7 (sequence is synthesized)
tacatcttttgaatccaggattgcagaaaccgtgaatgaggagggctgactctatctatgtttggagtctgtgaatatgaactcttcctatgttggtaaatggaaatttctttcaccaaa

SEQ ID NO: 999045 - DNA, 120 bp, Artificial Sequence
  ENSG00000233288_8 (sequence is synthesized)
actgctactcccagtatgcctggtgaggagcgcaccgcactgcccctccctgaaggtaccaactccatccgcaatccccaatcccaatgcatgcttgggattgtagtccggcaacctgtg

SEQ ID NO: 999046 - DNA, 120 bp, Artificial Sequence
  ENSG00000233288_9 (sequence is synthesized)
gaagaaacacatttaattgattttcaaggtgagaaattaaacctcgaaaactagactggaaagtcatctacgcctgaactatcagactttcttcagaagaaaactctaaggagaacatat

SEQ ID NO: 999047 - DNA, 120 bp, Artificial Sequence
  ENSG00000233288_10 (sequence is synthesized)
tttccattattataaatattacaaatgagaaatcatagcaagttacctgaaaatgctgccctggcagtttcctaaatcacaacatgtcctgggtatggttttaggtgtattttctttttg

SEQ ID NO: 999048 - DNA, 120 bp, Artificial Sequence
  ENSG00000233288_11 (sequence is synthesized)
ttggatataaaaattggggtttttgaccacatcttgtaagttttctgctattagtagtttctttacttttgtaccatatttaatttttctgtgtcttcctcttcttctcagactcagtca

SEQ ID NO: 999049 - DNA, 120 bp, Artificial Sequence
  ENSG00000233288_12 (sequence is synthesized)
ctccacaagtctctaaaggctctgttcattttcttcaaacatgtttcatgttggatgatttctattgctgtcttctgtttctactctgtggataagctcaagggtgtgtgtgcgtgtgtg

SEQ ID NO: 999050 - DNA, 120 bp, Artificial Sequence
  ENSG00000233288_13 (sequence is synthesized)
tgtgtgcgtgttttccatttcattatttttctatttggttcttcttataattttcatttctctgctgaggttccacatcagttaattcattatgagaatattttcctttactctcatgaa

SEQ ID NO: 999051 - DNA, 120 bp, Artificial Sequence
  ENSG00000233288_14 (sequence is synthesized)
catactcataagagctgattttaaatccttgtctgctgatctgattacatcatgttgctttttatcttgtgtatacattacattttcatctttcttcacacatttcatgaattttaatgt

SEQ ID NO: 999052 - DNA, 120 bp, Artificial Sequence
  ENSG00000233288_15 (sequence is synthesized)
gttctatgagtttctggtggttatagagactctaaattctgctgtattcttttgaagagcattgttattatttgaagaaggggttaatttggctggattcaaactgcaatacctgtctct

SEQ ID NO: 999053 - DNA, 120 bp, Artificial Sequence
  ENSG00000233288_16 (sequence is synthesized)
cctgcagtgggcacagctgaaatcctcattcagttcttatgcacatatatgtattttatatagatgtgtgattctatgtaactgtatatactatgcagattttgtcacagttacatgtga

SEQ ID NO: 999054 - DNA, 120 bp, Artificial Sequence
  ENSG00000233288_17 (sequence is synthesized)
gagtgttagttcaacaatactccagtactactggaagccagaaccttagttttgtttgcttactggattttatataaatgaaataatatagtatggatacttttacacctactttctttt

SEQ ID NO: 999055 - DNA, 120 bp, Artificial Sequence
  ENSG00000233288_18 (sequence is synthesized)
acatgtcattatgtttgtgatattcatctttgctgttgcagattgctataatttgtacactttaaaaagcattgtttacactgtggtaaaatatacataaaattaaccactttaaccatt

SEQ ID NO: 999056 - DNA, 80 bp, Artificial Sequence
  ENSG00000233288_19 (sequence is synthesized)
ggtagccccgagaccaacagccagaagtggttaagaaactattacaccccagaggtccttaggtcaagagttcgagacta

SEQ ID NO: 999057 - DNA, 72 bp, Artificial Sequence
  ENSG00000233288_20 (sequence is synthesized)
tggtgaaaccccgtctgtactaaaaataaaaaacttagccgggcgtggtggcgggcagccggtaggcagagg

SEQ ID NO: 999058 - DNA, 120 bp, Artificial Sequence
  ENSG00000233288_21 (sequence is synthesized)
aagtgtgaagtgtgcaggaattaaatacattcacattgttttgcaaccaccatccccatctatagggaacattttttatcttgcaaaactgagtctctgtgctgattaagcaacagctcc

SEQ ID NO: 999059 - DNA, 120 bp, Artificial Sequence
  ENSG00000233288_22 (sequence is synthesized)
cagttaccctccctctagcccataggaaccactcttctactttgtgtttctatgaatttaattaccctaaatacctcacgtgagtggaatcatacagtgtttgtcattttgtgactggtt

SEQ ID NO: 999060 - DNA, 120 bp, Artificial Sequence
  ENSG00000233288_23 (sequence is synthesized)
tattgtacttagcacaatgtccttaaggtttatctatgttgtagcatgtatcagaattttcttacttttgctaagtgaataatattccactgcatgtaaaaacacattttgtttacctac

SEQ ID NO: 999061 - DNA, 120 bp, Artificial Sequence
  ENSG00000233288_24 (sequence is synthesized)
gattcaaggaaagctttgattgtttcaccttttagctattgtgaataatgctgctaggaacctaggtgtatgtatatctctttgtgtgcctgctttcatatctttttgagtatatcccag

SEQ ID NO: 999062 - DNA, 120 bp, Artificial Sequence
  ENSG00000233288_25 (sequence is synthesized)
cctgctttcatatctttttgagtatatcccagaagcaagattgctggattataaggtaattataagtgtaattgtatttgtttgtttgtttgtttttctgagatggagtcttgctctgtt

SEQ ID NO: 999063 - DNA, 63 bp, Artificial Sequence
  ENSG00000233288_26 (sequence is synthesized)
atgcgcttggtgattctcatggcaggtgcgacattgtacttgcccaccaatagcttactaggt

SEQ ID NO: 999064 - DNA, 120 bp, Artificial Sequence
  ENSG00000233288_27 (sequence is synthesized)
aggtgcgacattgtacttgcccaccaatagcttactaggtttctaatcactccacatcctcatcaacactgttattttctgttttttgatagtggctatcctaatggatgtgaagagata

SEQ ID NO: 999065 - DNA, 120 bp, Artificial Sequence
  ENSG00000233288_28 (sequence is synthesized)
gctcattgtaggcttgatttgcattttgctaataattagttctctcgagtatattttcatatgctttttggccattttacaccatctttaagaaatgtctgttcaagtcctttgcccatt

SEQ ID NO: 999066 - DNA, 120 bp, Artificial Sequence
  ENSG00000233288_29 (sequence is synthesized)
tttgaatgaggtagtttttttttgttgttgtttagttatagcagttctttatatattccaggtattaatctcttatcagatgtatgatgtgcaaatattttcccatgctgtgcattgctt

SEQ ID NO: 999067 - DNA, 120 bp, Artificial Sequence
  ENSG00000233288_30 (sequence is synthesized)
tgcaatattgttgataatatcctttaatgtgtaaaagttttattttattttcataaagtccaatttgtctttatttttctcttgttgcttgtgctttgggtgtcctatcctagaaatcat

SEQ ID NO: 999068 - DNA, 120 bp, Artificial Sequence
  ENSG00000233288_31 (sequence is synthesized)
tgccaaacacaatgtcaagatgttttctacctgtattttcttcaaaaattttgtagtttaagctcttacatttaggtctttgatccatttttatttgtttatggtgtagggtaaagaacc

SEQ ID NO: 999069 - DNA, 120 bp, Artificial Sequence
  ENSG00000233288_32 (sequence is synthesized)
aaatgcataattttgcatgtatggatatccaacttccccagcaccaattgttgtaaagacagtcctttcccattcaatgatctttacatccccatcaaatatcatttgaccatataaatg

SEQ ID NO: 999070 - DNA, 120 bp, Artificial Sequence
  ENSG00000233288_33 (sequence is synthesized)
aggggttatttataagctgtttgctattctgtttgtccatatgtgtgtctctatgccagtaccacactattttggaactctgtagtaggttttgaaatgagtaagtatgaattttttaac

SEQ ID NO: 999071 - DNA, 120 bp, Artificial Sequence
  ENSG00000233288_34 (sequence is synthesized)
agcgctcttctttttcaagattgttttgactattcagggtcccttgagattccatatgaaatttaggcaggatttctctattactgcaaaagagtctttgggatttttaccttcttggtt

SEQ ID NO: 999072 - DNA, 120 bp, Artificial Sequence
  ENSG00000233288_35 (sequence is synthesized)
ggccctgcgctttcttctcgcccatccgtttctatgccccttcggacgtgctcagtgcagcccttccctatggctgggacttaaggcccacgggcctggcagttctctggcgtctttcga

SEQ ID NO: 999073 - DNA, 120 bp, Artificial Sequence
  ENSG00000233288_36 (sequence is synthesized)
cacatttaattgattttcaaggattgcagaaaccgtgaatgaggagggctgactctatctatgtttggagtctgtgaatatgaactcttcctatgttggtaaatggaaatttctttcacc

SEQ ID NO: 999074 - DNA, 120 bp, Artificial Sequence
  ENSG00000248300_0 (sequence is synthesized)
ccaggtagaggtgaagcttcgcagtgcttggacgtatactcaaccatacggagaatatcagcctgtagcaggtaaataagagcccagcacagaagaaaaggcagagctacaagaagacag

SEQ ID NO: 999075 - DNA, 120 bp, Artificial Sequence
  ENSG00000248300_1 (sequence is synthesized)
tgccacattattttcattggaatctatgtacgcatctatgcctgagccagaagaggtgaagcaaagttgctgacttcagcctcaagccgataaggaggaaaagagcttggcagtttaaag

SEQ ID NO: 999076 - DNA, 120 bp, Artificial Sequence
  ENSG00000248300_2 (sequence is synthesized)
caattgccatgcagtgatgagaacaggtttgggaggctcaagacctggtgtgacatcctgactccaattggttcatatgaggagacaaggagaagatgtccatctggaaaccttcaggaa

SEQ ID NO: 999077 - DNA, 120 bp, Artificial Sequence
  ENSG00000248300_3 (sequence is synthesized)
gtggatcttcaccagacaccagatctgctggtactttgttctggacttctcagtctccagaactgtgagaaataagtgtctgttgtttaagccattcaatcaatagcattttgtcatatc

SEQ ID NO: 999078 - DNA, 120 bp, Artificial Sequence
  ENSG00000248300_4 (sequence is synthesized)
atcctaaactgtctcgtggtgtttgtattgtttcaacctaaagccctgaatgatgtgaatggttaaccatttataaactactgaagttgactcagcacattatcttgtacatggtggacc

SEQ ID NO: 999079 - DNA, 120 bp, Artificial Sequence
  ENSG00000259961_0 (sequence is synthesized)
cggaaggcgccggcgcccagctgggtcaagttgttgtagctgaggtcgaggaacacgagcttggccgagccgctgaacgtgccctcctccagcgagcgcagcgagttgttcctgaagtcc

SEQ ID NO: 999080 - DNA, 120 bp, Artificial Sequence
  ENSG00000259961_1 (sequence is synthesized)
atcagctgctggtctgagaggtccagctgctgaggctctgaggcctggagtcaccaggcctggcttccaagctgtgtggcctcagaccagtacctctgcctctgtggacctggtagctcc

SEQ ID NO: 999081 - DNA, 120 bp, Artificial Sequence
  ENSG00000259961_2 (sequence is synthesized)
atttgtgaaatggaaaaagacaacgtgagggccgcatggggaagtatttgtatgggaacatgatttgaaaggtctttggagaaatattgccaataaaagtggccacaaatcttgcgatgg

SEQ ID NO: 999082 - DNA, 120 bp, Artificial Sequence
  ENSG00000259964_0 (sequence is synthesized)
aatgattctagttgaaagaaagaaaaaaggaaggaagaaaggaggaagaggcaggcacaagacaaaatgaatctctccgctgtgcacatggagccttagctctgattccagttgagcaaa

SEQ ID NO: 999083 - DNA, 120 bp, Artificial Sequence
  ENSG00000259964_1 (sequence is synthesized)
attatgaagaagatgattccccatatggatgacagataaacaccctgtggcgagtcactcactcccgaaaggccctctgaaggatcgcgcatgtcctgactgcacagcctgctcctgaca

SEQ ID NO: 999084 - DNA, 120 bp, Artificial Sequence
  ENSG00000259964_2 (sequence is synthesized)
atgctctcaaagccacggttgtaatagaaattggaaaatcaaagcagatccatgtggcctcagcataacgaaaacaaggaataaatggatgttactactactagtactgcttctgctgcc

SEQ ID NO: 999085 - DNA, 120 bp, Artificial Sequence
  ENSG00000259964_3 (sequence is synthesized)
ataaaacatcaaaaagaaactcaccaccaaggaaaccagagaatcctttcttgtcttgagtgaatggcaatgatcttggtggccaagataataaatacacgtttattatattgaaaaact

SEQ ID NO: 999086 - DNA, 120 bp, Artificial Sequence
  ENSG00000259964_4 (sequence is synthesized)
attctaaaatatatgttctctatataaagtaatctccacatgattctgagaaaaagtttaatctatctttctactacaaagttcttaataatgctttgacaaggaggtaccatatcccaa

SEQ ID NO: 999087 - DNA, 120 bp, Artificial Sequence
  ENSG00000259964_5 (sequence is synthesized)
gatgtgatacactttgctcagtttttaaattaaacattctagagtaacttatagagtgatgtcagcatgatggccaactagagttgcctgacacaaaaaggtaccaaaacaataaataaa

SEQ ID NO: 999088 - DNA, 120 bp, Artificial Sequence
  ENSG00000259964_6 (sequence is synthesized)
aagcactctcttgcctgccgccatgtaaggcattccttcgctcctgctttgccttccgccatgattgggaggcctccccaaccatgtggaactagacggggtttcatcatgttgcccagc

SEQ ID NO: 999089 - DNA, 81 bp, Artificial Sequence
  ENSG00000259964_7 (sequence is synthesized)
accatgtggaactagacggggtttcatcatgttgcccagcctagccttgaactcctcggctcaagtgtgagccacctttct

SEQ ID NO: 999090 - DNA, 120 bp, Artificial Sequence
  ENSG00000259964_8 (sequence is synthesized)
cctttcaaagtcactgcctttggatgtaagtttctcagagagaatgagccttgtgtccaatgcctggaaagcaacagcatttggccaccaagttcctcttcatcctcatcaagcagcttt

SEQ ID NO: 999091 - DNA, 120 bp, Artificial Sequence
  ENSG00000259964_9 (sequence is synthesized)
tcctgttttgtttttagctccaaccttaggacaatggacaagtcaatcagtccagattaccctgcaccagggaagagaggcacctgacagctatacccttcaccaagtccacggggacaa

SEQ ID NO: 999092 - DNA, 120 bp, Artificial Sequence
  ENSG00000259964_10 (sequence is synthesized)
aggcacaagagtaatagaagctgcagggagaatgcaattctcatcaacccttggggttgccgcattgtttttgctctgttttccagaaagtctttaacggaggagaaagggtgtggagga

SEQ ID NO: 999093 - DNA, 120 bp, Artificial Sequence
  ENSG00000259964_11 (sequence is synthesized)
agggagggccttgcctattagcagatatttcaatgcagtcatcaccctcccgccattcaatgtcagggatcagcccttgcaaaggagcagtcattggacaatgggcacaatcagggctct

SEQ ID NO: 999094 - DNA, 120 bp, Artificial Sequence
  ENSG00000259964_12 (sequence is synthesized)
ttcctctgctgaaaaggctgcttttccactaggcatgccctatgtatggaaaaaacttctacctctggtttgctttcgtttgtacccacccactgcaaactaaaattgcatgaagcagag

SEQ ID NO: 999095 - DNA, 120 bp, Artificial Sequence
  ENSG00000259964_13 (sequence is synthesized)
gctaagatggttttcctagtacaacgaatatctgccaactctaaatagaaagacttagatcaatgatgactagttaattaagcaaacttgagaaaggggactattcatttattccttacc

SEQ ID NO: 999096 - DNA, 120 bp, Artificial Sequence
  ENSG00000259964_14 (sequence is synthesized)
tttcactgagcagtttagaggctttcattggaaatatcattaatcacctgaaatgccttgcaataataactggtatccccattttacagtttatcatgtactaggctctgcggtaggttc

SEQ ID NO: 999097 - DNA, 120 bp, Artificial Sequence
  ENSG00000259964_15 (sequence is synthesized)
tgggaatacagacttgaaccagacatgctttcaggccatctgcaggacaaagcaaatgttacagaagttaagtgacttgctcaaggccccttgaagtccagcttggaagactaagaactc

SEQ ID NO: 999098 - DNA, 120 bp, Artificial Sequence
  ENSG00000259964_16 (sequence is synthesized)
ggaatgaccctgtgcctccaaacatgtggtttaagaggcagatctaacatgactcttcaaaaacaagcccagggaaaagagaagatgacaacatgtaaccagcagccaccttagaatgca

SEQ ID NO: 999099 - DNA, 120 bp, Artificial Sequence
  ENSG00000259964_17 (sequence is synthesized)
gggggcagctatagtgccacctctgcaggcggatttaccagtttaaatagatggttctcaaaactgcaggcaactttgtccccagagggacattcggcaaagtctgggacattttttgct

SEQ ID NO: 999100 - DNA, 120 bp, Artificial Sequence
  ENSG00000259964_18 (sequence is synthesized)
tgtcacaacgcaagagtttcttactggcatctattgggtagagaccatggatgctgctaaaattctaacggctcacaggacaatcccacaagaaataattatctggtccacaaaaccaac

SEQ ID NO: 999101 - DNA, 120 bp, Artificial Sequence
  ENSG00000259964_19 (sequence is synthesized)
agtttcaaggctggggaactctgatgtggataaatcaggcctgggtagatagaaggaaagtaccttgagaagaaacatgtttgggtacccaactttaaagagtttggtcttagggacgtt

SEQ ID NO: 999102 - DNA, 120 bp, Artificial Sequence
  ENSG00000259964_20 (sequence is synthesized)
tatgtgccagcaaggtaaattccatggcctggcatgtgttgcagcaacaacagtaacaccaccacctatatagtatttactatgagtcagacaacattctaaaccccttatctgtaactc

SEQ ID NO: 999103 - DNA, 120 bp, Artificial Sequence
  ENSG00000259964_21 (sequence is synthesized)
cctcattttacagatgaggaaactgaggcactggaccttgcccaaggtccagaattactaagcagtagaactgaggtattaaccaggcaatctggcttcagagtctgctatggtttcgct

SEQ ID NO: 999104 - DNA, 120 bp, Artificial Sequence
  ENSG00000259964_22 (sequence is synthesized)
gtgtccccatccaaatctcattctaaattgtagctctcgtaattcccacatgtcgtgggagggactcagtgggaggtaactgaatcctggggcagtttcccccgtactattctcgtggta

SEQ ID NO: 999105 - DNA, 120 bp, Artificial Sequence
  ENSG00000259964_23 (sequence is synthesized)
gtgaattaagtctcacaagatccgatggttttacagatgggatttcccctccacaagcactctcttgcctgccgccatgtaaggcattccttcgctcctgctttgccttccgccatgatt

SEQ ID NO: 999106 - DNA, 89 bp, Artificial Sequence
  ENSG00000259964_24 (sequence is synthesized)
ggtatgtcttcattagtagcatgagaacagactaatacagagtccaggttcacatggtaggcccttgatacatgtgtgatgagttaatg

SEQ ID NO: 999107 - DNA, 120 bp, Artificial Sequence
  ENSG00000259964_25 (sequence is synthesized)
tcacatggtaggcccttgatacatgtgtgatgagttaatggggaaaaataaatggacatggctataagcaaaagcatgcatcaaatgtataaaaaaatacaaagagaatacaattaggaa

SEQ ID NO: 999108 - DNA, 120 bp, Artificial Sequence
  ENSG00000259964_26 (sequence is synthesized)
caaaaggacattgacttctgctctgtttctccaaactaaccaaggagtgtgcatccttggtagggaaggaagacagctgacatgggaaggctccacttgccaaattcctacatcatcaaa

SEQ ID NO: 999109 - DNA, 120 bp, Artificial Sequence
  ENSG00000259964_27 (sequence is synthesized)
aatcagatcacatcatcactgggaggaaaagatagaccactaacatacaaagacagtgcccagaagactgtgctatgattcattttgctccccaaagactaagatttgtggcctaagtga

SEQ ID NO: 999110 - DNA, 120 bp, Artificial Sequence
  ENSG00000259964_28 (sequence is synthesized)
taagttattctgtctgtcaaaactttgttttaactgtaatgtggcctggaaacataacatagtgggaatttagaagttatttaaaaaacacctttttatggtttgggttttatgtgtata

SEQ ID NO: 999111 - DNA, 120 bp, Artificial Sequence
  ENSG00000259964_29 (sequence is synthesized)
gcccagctgttgagcttaatctcagagtcactggaacaaccacttcaaggttgaattcgtcaccccaatcacatgggaacattatctaattaagtggctctgccacttgaggggcaagga

SEQ ID NO: 999112 - DNA, 120 bp, Artificial Sequence
  ENSG00000259964_30 (sequence is synthesized)
gagctgaagtcgggtattgggaaacacaggttgctcttccatgacaacaggtcacacagttgaaatcccaaaaccatgggcaggaccaggttgtgtaaatgaggttcagctgccctggct

SEQ ID NO: 999113 - DNA, 120 bp, Artificial Sequence
  ENSG00000259964_31 (sequence is synthesized)
cccactgccaccctggcacacaaaggtcatctcatccatttcctccatgtctttgtatttgctattcctcatcccagaatcatggccccttccttcttccctgtggataatgcctctttt

SEQ ID NO: 999114 - DNA, 120 bp, Artificial Sequence
  ENSG00000259964_32 (sequence is synthesized)
ccccccattgcatcttacttattaattacaaaattgtccctggataattcttactttgcttttaagattcagcttagaaatgttgtctttgagtctcaatttcttcctctgtataaaggg

SEQ ID NO: 999115 - DNA, 120 bp, Artificial Sequence
  ENSG00000259964_33 (sequence is synthesized)
gacaatagtagcttctacgacacaaagttgttgccaggattaaaaaatagataatgtgtagaaagcacagtgcccaacatacagaaagtgtttaacaaacgttggttgtcactgtcatca

SEQ ID NO: 999116 - DNA, 120 bp, Artificial Sequence
  ENSG00000259964_34 (sequence is synthesized)
ttgtcactctcctctgtgatcacaaactctggccagactttaaccattgcagtgcacctcctgactgcactgcacttgtttattcctgtcttccccattaggctccgggctcttccaggg

SEQ ID NO: 999117 - DNA, 120 bp, Artificial Sequence
  ENSG00000259964_35 (sequence is synthesized)
taaatccatactaaacaataagccctcctcctgcgggtctgtatctctgtgacacgtcttccctgtgaaaggcacaggaagaaaataaaggaagagaacagaatgttctcgatgctactc

SEQ ID NO: 999118 - DNA, 120 bp, Artificial Sequence
  ENSG00000259967_0 (sequence is synthesized)
ataaatattacaaaataatttatcaaacatttaaaaaattaaaagcaacaaaaacagtcaatatatatatacatggttgagaattcaaaaggtacttaagggtaaacaatgaaaaaaaca

SEQ ID NO: 999119 - DNA, 120 bp, Artificial Sequence
  ENSG00000259967_1 (sequence is synthesized)
aacagaactcaaccacctatgggccaccatccagttcccttctccagagacaaaactgttaatcggtgtcatacatatattttctttttcttttttttttgagactgggtcttacttggt

SEQ ID NO: 999120 - DNA, 69 bp, Artificial Sequence
  ENSG00000259967_2 (sequence is synthesized)
atcaggctggtcgcaaactcctggactcaagtgatcagcccaccttggcctgccttagccccacaaatg

SEQ ID NO: 999121 - DNA, 84 bp, Artificial Sequence
  ENSG00000259967_3 (sequence is synthesized)
tcgccatgttgatcaggctggtcgcaaactcctggactcaagtgatcagcccaccttggcctgccttagccccacaaatagagt

SEQ ID NO: 999122 - DNA, 120 bp, Artificial Sequence
  ENSG00000259969_0 (sequence is synthesized)
tgtcatagaaactatatagcattgatttttagctatgattttgattcagtttttaaagtatttaatttttattatatcagcccacactgaacattggtttttcagcagataatgcatctt

SEQ ID NO: 999123 - DNA, 120 bp, Artificial Sequence
  ENSG00000259969_1 (sequence is synthesized)
ccaagtgctccaaggcgaagagccgcagagaagaatactgcatcttgagtcataccctgaaattactgaatgaattacctgtggccatgtaaacactctgcttcagtaggtagagtgcaa

SEQ ID NO: 999124 - DNA, 120 bp, Artificial Sequence
  ENSG00000259969_2 (sequence is synthesized)
cagacaatccaatcattcagaactaagtttttagttagcttctgttattcactgaagtagtttgcaattacagttgtctctaggtatccatgggggattggttccagaactccctgctga

SEQ ID NO: 999125 - DNA, 120 bp, Artificial Sequence
  ENSG00000259969_3 (sequence is synthesized)
taacaaaattcatggatgctcaagcgccttacataacttggtgtagtatttgcgaataacctatgcacatcctcaagtatactttatatcatctctaaacatataatacttaatatgtaa

SEQ ID NO: 999126 - DNA, 120 bp, Artificial Sequence
  ENSG00000259969_4 (sequence is synthesized)
ttactgtatttagtgaataatgacaagaaaaaaaagtgtgtacctgtttagtacagacactactctgtactgatttttttttctgagtattttccatccagggttggttgaatccacaga

SEQ ID NO: 999127 - DNA, 120 bp, Artificial Sequence
  ENSG00000259969_5 (sequence is synthesized)
tgtgtaactcacaaatatgaagggctgacggtacctagtagttaattcagatttatcgcagtgatctaaagtaattttgcagtttacaagcatttttttttggttctaaaagaaaaaaac

SEQ ID NO: 999128 - DNA, 120 bp, Artificial Sequence
  ENSG00000259969_6 (sequence is synthesized)
aaaacgaatattggtgatgtgatatttatgtaatgtgatgatattataatggccacgttttaaaacttgagaatgtcctaagttcacacactgttggtttctagatccacaaggcttctg

SEQ ID NO: 999129 - DNA, 120 bp, Artificial Sequence
  ENSG00000259969_7 (sequence is synthesized)
tatacagttcacggtcctcggcattgcttcttgtaatttttccatcccaaaggagagctactgtactgactgtacttgtggaatgcagcgcttcattaaattaagtttattaaaatgcaa

SEQ ID NO: 999130 - DNA, 120 bp, Artificial Sequence
  ENSG00000259968_0 (sequence is synthesized)
tgagcactggctgccagccttgtgtagcccactgggcacagccatcccacccttggctccaaccctgactgcaaagcaagaaagggctttagtgggctgggtaattctaacaactgccag

SEQ ID NO: 999131 - DNA, 120 bp, Artificial Sequence
  ENSG00000259968_1 (sequence is synthesized)
tgacaagtctgctgatggactcatctgggcaacatcacattacgaattagcatctagaaatggctggcataattccagcgggcagagcttcattgctggccttgctcatgaacagggtta

SEQ ID NO: 999132 - DNA, 120 bp, Artificial Sequence
  ENSG00000259968_2 (sequence is synthesized)
gggtttatgctgccaatgtagatattttgcctccaaaacgttcaacagggtttgtattgaagctccaaagtactcctccaggaggagcagtctgaaggtgttcactaagcatgggagtgg

SEQ ID NO: 999133 - DNA, 120 bp, Artificial Sequence
  ENSG00000259968_3 (sequence is synthesized)
tgcagggagtgcatagggggcaaaagtgatttaaggttaactcatccagaattcattagataggtgttcatccactggaatctgccagagagaatcctagcctctgaaaaagaaatttgt

SEQ ID NO: 999134 - DNA, 120 bp, Artificial Sequence
  ENSG00000259968_4 (sequence is synthesized)
agattctagagcctgaccgcctggatttcaggcccagtgctactacttactacctgtaagtccttaagttggaatctagcctttctgtgcctccatttttcatctgttagctgggaataa

SEQ ID NO: 999135 - DNA, 120 bp, Artificial Sequence
  ENSG00000259968_5 (sequence is synthesized)
taatattatcttcctcagttatgggctgaaggtttgtgtccccctcgcccactcatatgttgaaaccctaacccccagccccagtgtgatggtatttggaggtagggcctttgggaggaa

SEQ ID NO: 999136 - DNA, 120 bp, Artificial Sequence
  ENSG00000259968_6 (sequence is synthesized)
attaagttaaataaggttatgcgagtggggccctcaggataggattaatgcccttataaaaaaggaggagacgcaggctgtctctctgtgctccacgccatgtgaggatacaacaagaag

SEQ ID NO: 999137 - DNA, 120 bp, Artificial Sequence
  ENSG00000259968_7 (sequence is synthesized)
gccatgtgaggatacaacaagaagtcggcagtctgcaatcagaaagaaagccctcatcacagcccgactagcctggcaccctgatctcagatttccagcctccagaactgtgagaaaata

SEQ ID NO: 999138 - DNA, 120 bp, Artificial Sequence
  ENSG00000249658_0 (sequence is synthesized)
attatccccttgggggttaggatttcaatatatgaatttttgggaaacacaaacatttagcccatgacaggggccaagggagtgaggtgggatcagaaaccaaggccctcagatgtgtgt

SEQ ID NO: 999139 - DNA, 120 bp, Artificial Sequence
  ENSG00000249658_1 (sequence is synthesized)
gtggcagggagggtggtgggtaagaaactcatcagtgcggtttctgcacacgccctgtttatccaggccctttgattctccccaagagggaggagaccagcgaggagaccagcattgggc

SEQ ID NO: 999140 - DNA, 120 bp, Artificial Sequence
  ENSG00000249658_2 (sequence is synthesized)
agattttcttcctccccttctgctgggacagatgaagatgtggcgggcacgggggatggatgaacaaggacacgtggtcagaggcacaagggagtaattgtcagggatccaagtcacttg

SEQ ID NO: 999141 - DNA, 120 bp, Artificial Sequence
  ENSG00000249658_3 (sequence is synthesized)
cagaggcctttctgaatggtgggttctgaggtggctgtatccaggtgtggcgtctccacccttggccttgcatggagaacccaggaagcgaagctacaagggcaaagcagaaggatgggg

SEQ ID NO: 999142 - DNA, 120 bp, Artificial Sequence
  ENSG00000249650_0 (sequence is synthesized)
actgcgtgggcggaaccaagagcctggcggggggttctcctgaatggcggttctcccagaacctccagagatgtcacaggcccagcactgtggctcgtggctgaccgcgccctggagggt

SEQ ID NO: 999143 - DNA, 120 bp, Artificial Sequence
  ENSG00000249650_1 (sequence is synthesized)
ctcgctgtgtttatccttgtgaggtccttctacagagctttcaaggaagacagagttcagcctgtttattgggaagactttaatcctgctcaagacatctactgtgtcaccgtaccactg

SEQ ID NO: 999144 - DNA, 120 bp, Artificial Sequence
  ENSG00000249650_2 (sequence is synthesized)
ttggcaacatccctgagacagaagagagacacagagagaagaggcacagaggagccggccatggagcgatacagcagaagctggaggcgacgggaggatcctggcccagagcctcgggag

SEQ ID NO: 999145 - DNA, 120 bp, Artificial Sequence
  ENSG00000249650_3 (sequence is synthesized)
ggagtgggggccgtgttccagaagcctgagagtcctgcgtgttgttctgagcccctaaggctggggtagcttgttccagcagtcatgggaaactgacacatcccaaacacagcagcacga

SEQ ID NO: 999146 - DNA, 120 bp, Artificial Sequence
  ENSG00000249655_0 (sequence is synthesized)
gagccccaaacaggcttttacttctagttaacaatcttctgtgtgaccacatagtcaaagagaagacagattaaaagaggcctgtggaggcagtagttggctccagagctgggacagatg

SEQ ID NO: 999147 - DNA, 120 bp, Artificial Sequence
  ENSG00000249655_1 (sequence is synthesized)
ccccttatcagtggacaccttgaagtaggttttggatgggctgatgtttcttcttctgaccctaaaacttcctgtcaggatgctggcatactcgtccacatgactcggatatccctttgc

SEQ ID NO: 999148 - DNA, 120 bp, Artificial Sequence
  ENSG00000253162_0 (sequence is synthesized)
aggagtttaggagagagaggtgactccaaggtgacatcccgagaaacctggcaagcagttggaagttcaacacagttggagaacgagctactcagaaaaggatctaccgtgcatgaagaa

SEQ ID NO: 999149 - DNA, 120 bp, Artificial Sequence
  ENSG00000253162_1 (sequence is synthesized)
aaaatgtaattcaggtatttcatttcattctctcatctcctcacttcaattttaggtgagaataccaattcaattctccatacatcaaatttccttctcctgaaaaatattataggattt

SEQ ID NO: 999150 - DNA, 120 bp, Artificial Sequence
  ENSG00000253162_2 (sequence is synthesized)
gtggacagaattacttttatgtaaagtcttcatgataactgaattggactacgttgtgtttgcacccatataaatctaaacaagcctgagagcagctttatctctaactttctgtctgac

SEQ ID NO: 999151 - DNA, 80 bp, Artificial Sequence
  ENSG00000270112_0 (sequence is synthesized)
ccgaggggtccgcgtagcgcatcctggctaccgggcgccgcgggcgcggggtacggggcggccaggcaatgactcgcggg

SEQ ID NO: 999152 - DNA, 120 bp, Artificial Sequence
  ENSG00000270112_1 (sequence is synthesized)
ggagacgccaggtgccacgagccggaggcggcccctcccgccgaggtggcggccaatggggagcaagacccgggctccgtcccctgtgcgccccagcgcgccgcgcatcgacccctccag

SEQ ID NO: 999153 - DNA, 120 bp, Artificial Sequence
  ENSG00000270112_2 (sequence is synthesized)
ggttgcccagcgcgctgtgccctgccgggggcgggccacgtttgatctccgggcccgcagcaagggatcgcgaaggttggcctccggttctgccgatagggacggggggagggggcgtac

SEQ ID NO: 999154 - DNA, 120 bp, Artificial Sequence
  ENSG00000270112_3 (sequence is synthesized)
aggctttttaaccaattaaagaaaaactccaacatttagagggcccattattataataattcctgtatttgtttgctgtctggcacataaaaacgtgcttcacttgcatatattaatgaa

SEQ ID NO: 999155 - DNA, 120 bp, Artificial Sequence
  ENSG00000270112_4 (sequence is synthesized)
ttttcacctcctagcccctggctaacccattttacagctgaaaggactaaagcaacagatgcccaaagtaactcacctagcaacaagtcttgggattctgagatgaggttctttctccca

SEQ ID NO: 999156 - DNA, 120 bp, Artificial Sequence
  ENSG00000270112_5 (sequence is synthesized)
cacacacaggcaggctggcttcttgggagtgggacttgttcatttgtccccaccaccaccattgattttgactgattgctccactcttgctgtcttcaaacttttgaacaagggggtttg

SEQ ID NO: 999157 - DNA, 120 bp, Artificial Sequence
  ENSG00000270112_6 (sequence is synthesized)
catttctctttgcactgggccaaattatgaggtaggtcctacacacaggctccaagatgacagtactaatttttcactaatttttctctacttggtgctcaagtgtagagtttgaggggt

SEQ ID NO: 999158 - DNA, 120 bp, Artificial Sequence
  ENSG00000270112_7 (sequence is synthesized)
actatcatcttcactccaggcaaggcactgttgtttcttttgtattcctgcttattctccaccccatcaggtgctcactctgatacctgtctttgagtgctgttttcttggaaaaacaaa

SEQ ID NO: 999159 - DNA, 120 bp, Artificial Sequence
  ENSG00000270112_8 (sequence is synthesized)
tctattttcaagaaatgaatcaaaattatcctaagaactttttaattgcaatataatgcatttacagaaaagtacacaaatcataaatgttcaggtcgctgtgttttcacaagctgaaca

SEQ ID NO: 999160 - DNA, 120 bp, Artificial Sequence
  ENSG00000270112_9 (sequence is synthesized)
cacccatgtaaccagtacacagatcaattatcggcccccaggagtcccctcatgttcctatctggttactatgtactcaagagtaaccactgttctgaatcctaaccccaaagatcagtg

SEQ ID NO: 999161 - DNA, 120 bp, Artificial Sequence
  ENSG00000270112_10 (sequence is synthesized)
gttttatataaatgcaattatacattatatattattttgtgtctgccttcttttgcttaacgttgctatgagatttatccatgctgttgcatgtggtgggcagaattacaagaagacccc

SEQ ID NO: 999162 - DNA, 120 bp, Artificial Sequence
  ENSG00000270112_11 (sequence is synthesized)
caagattcctcaccccttcttgtatgcacattcccataggtattgatctaggcgctgctgtgaagggaatttgcagatgtaattggcctaaatcagttggctttaatatcaggaaattgt

SEQ ID NO: 999163 - DNA, 120 bp, Artificial Sequence
  ENSG00000270112_12 (sequence is synthesized)
cctcagtgggcatggccatatggagcccttacaagggactgggctcttcctggtgaaaaagatttgaatcacgagagtggctgatatgagggaaattctttgctgttgccttcgaagaca

SEQ ID NO: 999164 - DNA, 120 bp, Artificial Sequence
  ENSG00000270112_13 (sequence is synthesized)
gaagaggtccacaaggcaaaggatgcagacagcctgtaggagctgagactggctcctggctgacagccagcaaggaaatgaggacctcagtcctccaatcatgaagcagactccgacttc

SEQ ID NO: 999165 - DNA, 120 bp, Artificial Sequence
  ENSG00000270112_14 (sequence is synthesized)
tgctaacaacctgaatacacttcaaagaggattctgagctccagccgcctacacattgatttcagctgttgggaccctcagccgagaacccagctatgccgtgcccagatgtaagaccta

SEQ ID NO: 999166 - DNA, 120 bp, Artificial Sequence
  ENSG00000270112_15 (sequence is synthesized)
cacatctgtgagctttctagttaacaagatggaggaagagataaagaaggacattccccaaagtctcacagaactcttctgctcacatctcattggctaacatgagtcacatggtgaacc

SEQ ID NO: 999167 - DNA, 120 bp, Artificial Sequence
  ENSG00000270112_16 (sequence is synthesized)
tggatgcagggaggctgaagaagacagtcatcttgctgggcagaaggaaaggaaggaggacctatgaacagtggtgggttccatgtcaggggcttgccagccacaaggaaaggtcagaaa

SEQ ID NO: 999168 - DNA, 120 bp, Artificial Sequence
  ENSG00000270112_17 (sequence is synthesized)
ttcccagaatttcagttctgaaatctgtatgttgacccagactcttgggaattttacctggatattttcagattcttaaacataatttttaatgtcatttgaatggatgcagaggagagc

SEQ ID NO: 999169 - DNA, 120 bp, Artificial Sequence
  ENSG00000270112_18 (sequence is synthesized)
ccagtccggcgccggatcgcggttgcccagcgcgctgtgccctgccgggggcgggccacgtttgatctccgggcccgcagcaagggatcgcgaaggtattgatctaggcgctgctgtgaa

SEQ ID NO: 999170 - DNA, 120 bp, Artificial Sequence
  ENSG00000270112_19 (sequence is synthesized)
ttcaaaaaggtgtaacatatgtacagaaaagtgctcaaatcataacatacagctctccataaattatcacagagtgaagacacccatgtcattaccactaagaaaaaaagagagaaacca

SEQ ID NO: 999171 - DNA, 120 bp, Artificial Sequence
  ENSG00000270112_20 (sequence is synthesized)
tcacaccccagaacccaccctgtgctcctcccagcctcatgtgcccatccggaatgttttccttttctctgcttttctcctcaagtctgtcttagccccctcttctcttctggccacctc

SEQ ID NO: 999172 - DNA, 120 bp, Artificial Sequence
  ENSG00000270112_21 (sequence is synthesized)
acttcccaggcctccccgataccccgggcagtggggggcttttttgaggctggtttgccttttggcacagtggaaatagcatgtgctctggagccagctctccaagatctagatctcagc

SEQ ID NO: 999173 - DNA, 120 bp, Artificial Sequence
  ENSG00000270112_22 (sequence is synthesized)
ccacctactcactagctttgtgaatccaagcaagagacctaatccctctcagctccccaggcactatcctggggtcacaggtgctgattgggtacttcccagagtggctaccgagtgcct

SEQ ID NO: 999174 - DNA, 120 bp, Artificial Sequence
  ENSG00000270112_23 (sequence is synthesized)
gctgctcagcatggggctcaaatacacccactgcattttcatttctatgcttttgcttgggtctctgaaagctcccgagggatgttcattgtttccatttcacagattgccacaatgatg

SEQ ID NO: 999175 - DNA, 120 bp, Artificial Sequence
  ENSG00000270112_24 (sequence is synthesized)
cctgcagaggtgaaatgacttgcccagcatcacacagtggggcaagggcagagtgaagcctggaccctaggctctgaggccacagcagcacaggacccggagctgtgccctccggcccca

SEQ ID NO: 999176 - DNA, 120 bp, Artificial Sequence
  ENSG00000270112_25 (sequence is synthesized)
gacctgccatggtcctgtggctgtttagacgactgtttggcccaggggtgcctggctctctaaaagattcactgttgccctcaccaatatttatttcagccttcccagaatgtttcctaa

SEQ ID NO: 999177 - DNA, 120 bp, Artificial Sequence
  ENSG00000270112_26 (sequence is synthesized)
gcgtgcggcgcgcagggcactgagtcaccatcgtggccgcgtcctcgcgctctcctagcgatttctccggagaaagcggagcaaggtcagccgggcagcccttcaaggacggcgcgccgc

SEQ ID NO: 999178 - DNA, 120 bp, Artificial Sequence
  ENSG00000270112_27 (sequence is synthesized)
tcctgcatgctgatggcctgcggggctgcctgcccgtgccccggcgcccaactcctacaaggaagaaattcaggggctccccgcccccgccacagtcctcttccccctccccagctgcaa

SEQ ID NO: 999179 - DNA, 120 bp, Artificial Sequence
  ENSG00000270112_28 (sequence is synthesized)
ctcggcagccgttcgtcaaagaccctgttgtcaccgagacactgggaccttgtctcatccttggaaccactcgtaaatcttaggtcaggcagccggcagccttcggggaccacagtcccc

SEQ ID NO: 999180 - DNA, 120 bp, Artificial Sequence
  ENSG00000270112_29 (sequence is synthesized)
ccaaagctttaggaagccagttactacatccggaaagattcgtgcttcagaacgcaagccagggagaataatcacagaaacgcaatgcgaatgtcgtgcctctcagaaattcttagcctg

SEQ ID NO: 999181 - DNA, 120 bp, Artificial Sequence
  ENSG00000270112_30 (sequence is synthesized)
aaataccgtccccaccccccaacccggccaggcgacagtcctgtcatcctaacaccgcagaggctccaagcgctgggagtcgtgtgcccgcggcgctcgccactgaggccggttggaaga

SEQ ID NO: 999182 - DNA, 120 bp, Artificial Sequence
  ENSG00000270112_31 (sequence is synthesized)
ttctagggtgccccttcccaggttccagcaggcactccgggatgttctagagtcaggccagggattcaacagcgaacctgaccgaaactcaaacctcagcacaagaactttgatggggga

SEQ ID NO: 999183 - DNA, 120 bp, Artificial Sequence
  ENSG00000270112_32 (sequence is synthesized)
agtgcccagactccaatactctcgaccttggcatttagtagtttcttctttgaactggaaagatcaaataatgcacagtaaaatctcatgataagggttccaccaagaattcgggatttg

SEQ ID NO: 999184 - DNA, 120 bp, Artificial Sequence
  ENSG00000270112_33 (sequence is synthesized)
gaaactaatacttctgtgtgcagttatagtttgttcaatcttattgctatatagtatgccatcaaacgactgtggcacaacttatccattctacagctgatggacatctgggtagttgct

SEQ ID NO: 999185 - DNA, 120 bp, Artificial Sequence
  ENSG00000270112_34 (sequence is synthesized)
gccatcagccttccagtgcatggttttttgggtgaaaacatgcatgcatatctgctgggtatctatttctagaagtaaaattgctaggtcagagagtatacatatgttcagctttagcaa

SEQ ID NO: 999186 - DNA, 120 bp, Artificial Sequence
  ENSG00000270112_35 (sequence is synthesized)
ttactgccaaagtttttccaaagggaaaattatttttaataggtattttatccagatttgccacgacctaataaggaattcgtccccacaataaaactaactggctaacctaatagcaaa

SEQ ID NO: 999187 - DNA, 120 bp, Artificial Sequence
  ENSG00000270112_36 (sequence is synthesized)
aagcccacccaatcaagagccaagatagttgagggacaacaacagctccaaaggcacccactctcccttgaggaggtactcaacagttaggtctcctgcatgaattggcagtgaatgaga

SEQ ID NO: 999188 - DNA, 120 bp, Artificial Sequence
  ENSG00000270112_37 (sequence is synthesized)
ttgatgctggcattaggaatagctagaactttgcagcaagactctatgtagaatagattttggtcacttgatcctctgcacatgatcagcaatagtccagtggtctctgctgacactgct

SEQ ID NO: 999189 - DNA, 120 bp, Artificial Sequence
  ENSG00000270112_38 (sequence is synthesized)
cttctaatcctaatggcattttaattctgactatcttcatatcagaggtatctttaacacacacacaaacacctcacaggcatctctagtgaagctggagacctaagatctcaaaacatg

SEQ ID NO: 999190 - DNA, 120 bp, Artificial Sequence
  ENSG00000270112_39 (sequence is synthesized)
gaggtctgaagtcccttttgttcctatcagtatggagctagattccattttaagccaaatttatattctgattgtagaattgcagcaaacactcagaaggccttgcaaacaaaagagtaa

SEQ ID NO: 999191 - DNA, 120 bp, Artificial Sequence
  ENSG00000270112_40 (sequence is synthesized)
acacatggataaatgatcactatgccagattcagtgaacaccatttttatattctaattgccaggaatggggacagctgcatcattgtttaaaacacacactcatgcacaattaagccag

SEQ ID NO: 999192 - DNA, 120 bp, Artificial Sequence
  ENSG00000270112_41 (sequence is synthesized)
aacaaatgtcaacactggcaccatctgctaaattactgataactgatgagcattactcatgctgtgagcattgtctccaatataaaatggaaagactttttcaaaaacttagaggtttct

SEQ ID NO: 999193 - DNA, 120 bp, Artificial Sequence
  ENSG00000270112_42 (sequence is synthesized)
accagttttaaaaagccagtttttatatcatacagcacaactgcaacctgtcagattatgtaagtgacatttcacccatgtgttcgaggagtatgtgataagtacatgctgtttttgtgc

SEQ ID NO: 999194 - DNA, 120 bp, Artificial Sequence
  ENSG00000270112_43 (sequence is synthesized)
ctctttacatttatgttaacaagccaggccttcaagaggctgattcctggctctgggacactttgtctgtgatgagggtatcttgctgtcaggtgagcagaaatgcccagttataacctt

SEQ ID NO: 999195 - DNA, 120 bp, Artificial Sequence
  ENSG00000270112_44 (sequence is synthesized)
gtaatcagagagccagggttttgccattacatggtcaactgcagacacaagactctacttcatcagtctcgtttttaataaattatataacagaaaaatgatttaaaccccttgttcagt

SEQ ID NO: 999196 - DNA, 120 bp, Artificial Sequence
  ENSG00000270112_45 (sequence is synthesized)
ccccttatgaagtacaaattgtatccaatataatttatgaaaaatcatttataatcttgaacctggagatgaagccacctttcagctttcatatctccaagctgagaagcatcctcctgc

SEQ ID NO: 999197 - DNA, 120 bp, Artificial Sequence
  ENSG00000270112_46 (sequence is synthesized)
ctgtctcagcatcactcccagatattcttctcctgcatttgttccaatttatccagtttgtttcaaagggtagagatattattattagtaatccataaaccacctgatgcatcatagtac

SEQ ID NO: 999198 - DNA, 120 bp, Artificial Sequence
  ENSG00000270112_47 (sequence is synthesized)
gattctcttgcacctcaggcatgtcacactcctacagtatgttcctgtacttgccagaaacagcatcactggaataaggtcactcagatcacattcagatgacatgctggacataatgga

SEQ ID NO: 999199 - DNA, 120 bp, Artificial Sequence
  ENSG00000270112_48 (sequence is synthesized)
cctagaatctccttttcttaccttaaaggctgggctgtagggtagaaacacttggatcaggttctgccctttgatgaattcagctaagagaatgtattttttaatttccaagccagtgca

SEQ ID NO: 999200 - DNA, 120 bp, Artificial Sequence
  ENSG00000270112_49 (sequence is synthesized)
agcccctagacgcattttgttggtggtctgtataatgctgagactttcagaggaatgccctataaatacagctgcttaaaaatgtttaatattccttgggtacctgagaagagaaaaggg

SEQ ID NO: 999201 - DNA, 120 bp, Artificial Sequence
  ENSG00000270112_50 (sequence is synthesized)
atgagtgttccactgtgatcatctacttctgaagcaccaagggatgtttcaaatcctaacaccatggccacagtaaagcatgtgtcatttaaccaccatcctaaattctaaaagctccat

SEQ ID NO: 999202 - DNA, 120 bp, Artificial Sequence
  ENSG00000270112_51 (sequence is synthesized)
gcattgggtagacatggctagtatggacactatgtgctagacattgtatgacatgctagggaaacgagaatcagtcattcacagtctgtgcctagaaaggagtttaaattcccatgagga

SEQ ID NO: 999203 - DNA, 120 bp, Artificial Sequence
  ENSG00000270112_52 (sequence is synthesized)
agacagacagtgccctatagtaggattaagatctgtctaacccaaattgggagtgacagagaggtcagtgggcagggggcagaatggcaaggaaggtttccagaggaggtagtgtttgac

SEQ ID NO: 999204 - DNA, 120 bp, Artificial Sequence
  ENSG00000270112_53 (sequence is synthesized)
ctgaattgtgatgcgtgaggacgttcagccaggtaaagaggtgggacaaggtactgtaggtggaggctggcagtgggtgatggggtacagttggctcaacacggctgaagagattaggct

SEQ ID NO: 999205 - DNA, 120 bp, Artificial Sequence
  ENSG00000270112_54 (sequence is synthesized)
gggtgggtgagtgcgagacagagcacagagaattgggattttatccatgaaaccattgcaagattttaagtaggggaatgatatgatcagatttgcattttagataatcaagctgcaggc

SEQ ID NO: 999206 - DNA, 120 bp, Artificial Sequence
  ENSG00000270112_55 (sequence is synthesized)
tagtggagcacagtttgagggttcaaagactgaaaaggcacggagatgccggcttgtctttcttttccctgatcagaccagaccccttcccttggcctccccttcccaccacatacctca

SEQ ID NO: 999207 - DNA, 120 bp, Artificial Sequence
  ENSG00000270112_56 (sequence is synthesized)
ttggcaggcagccctactatgagctcatattattgtaccaatttgagaattaattatctgcctccttccagggtagcaggaaaagagtagagaaacatgattactgactgctttatagaa

SEQ ID NO: 999208 - DNA, 120 bp, Artificial Sequence
  ENSG00000270112_57 (sequence is synthesized)
gctgtcaccatattaagtgcttcatcattcaattcacctgagatgcatggaaataggttaagcttgattgaggctggtccaccgcaaaactgtgcagttagcagagtttgtttttggtac

SEQ ID NO: 999209 - DNA, 120 bp, Artificial Sequence
  ENSG00000270112_58 (sequence is synthesized)
atatacccttttgttactctgcagccccctctgctctataggttcctggtataataacactctcttcccctcccttttggaacctctgctcttgggaaaggctttgatagctttctctta

SEQ ID NO: 999210 - DNA, 120 bp, Artificial Sequence
  ENSG00000270112_59 (sequence is synthesized)
aatactagtgttcctgatgggagaaatttaacctgaagcatcctctctgactgcaatgaaggtgttgtcctgttagaactgcactcagagcactgtaaagaattatataagtagccatca

SEQ ID NO: 999211 - DNA, 120 bp, Artificial Sequence
  ENSG00000270112_60 (sequence is synthesized)
ccttaaccacatcctcaaacattttcaatgcaatctagcggagaatgattttctgaaagaatacatatctgattttataacagaaataaatggaaatatgatttgttttatagaaaatgt

SEQ ID NO: 999212 - DNA, 120 bp, Artificial Sequence
  ENSG00000270112_61 (sequence is synthesized)
cttgccctctaactattaatatgtcaatatttatatatgaactacaataagaacagctacaacaagattgatgtatactgcctgaacgccctgaaaatagatcattgtccgcaagtgtag

SEQ ID NO: 999213 - DNA, 120 bp, Artificial Sequence
  ENSG00000270112_62 (sequence is synthesized)
ttaccaatataacagcctagtcttgctgtgctatgagtttgcctggattgccattacttataggccaagtagactgtggtgaatgccagatactagccaactttttctgaaagagccaga

SEQ ID NO: 999214 - DNA, 120 bp, Artificial Sequence
  ENSG00000270112_63 (sequence is synthesized)
tgataaatatcataaactttgtggcccagacaggttctgttgcaactcccaactctgccactgtagtgtgaaaacatagacaatggagaacgaatgtgaatggccagagttgctccacag

SEQ ID NO: 999215 - DNA, 120 bp, Artificial Sequence
  ENSG00000270112_64 (sequence is synthesized)
gattgctaactcctgctccacactttgtgatatgcagatcccatgcaagaagtcccacctcatttccctgaagagtcaccataaaaggcattccatgtttagacatcatatttacaaagg

SEQ ID NO: 999216 - DNA, 120 bp, Artificial Sequence
  ENSG00000270112_65 (sequence is synthesized)
cctaataaataataacatgttaatctattatccaccatcaacatgttagcacagttttatttatccttgaagtgaacctggagatcacaggatgacctttctatgcatacactctcctct

SEQ ID NO: 999217 - DNA, 120 bp, Artificial Sequence
  ENSG00000270112_66 (sequence is synthesized)
aactttgaccagcggtctcataaatacacgtcccaggtcaccatggacaactaaacaaatatatgggttgcttggtgagatttcacctccacttatgaagacaataaattcttgtgtcct

SEQ ID NO: 999218 - DNA, 120 bp, Artificial Sequence
  ENSG00000270112_67 (sequence is synthesized)
gcctcccttacagctgctgagaccacagggctaagttcctgccaatgagaggggaaatctggacacagagacaaacatgcacagaaggaagactatataaagagacacaaggagaagact

SEQ ID NO: 999219 - DNA, 120 bp, Artificial Sequence
  ENSG00000270112_68 (sequence is synthesized)
gccacctacaagccaatgagaaaaacctgcaacacattcttccctaagaggcctcagaaggaaacaaccctgctgacaccttcgtttcagacttgtagcctgcagatcctgagacaatac

SEQ ID NO: 999220 - DNA, 120 bp, Artificial Sequence
  ENSG00000270112_69 (sequence is synthesized)
atttctgttaagacaccctatttgtgcagctttgtaaaggcagccccagcatatatgtaaagctatatatgtaaagctttacatgtgtgtatatatatatatacacatacacagcaacct

SEQ ID NO: 999221 - DNA, 120 bp, Artificial Sequence
  ENSG00000270112_70 (sequence is synthesized)
acctgcatactgtgtatatatacacatatatacatgtatacatatgtacatatagctatacacatatgtactttacatatatatgtataaacacacaaaggaacgtgaatatatacatat

SEQ ID NO: 999222 - DNA, 120 bp, Artificial Sequence
  ENSG00000270112_71 (sequence is synthesized)
caaaaaatcttggccctcacggaacttacattctagtggaatattaatagttgagcatatcaaggagtgtaggtcaagtggctgggggaaatgccactgactggcaagattacacctaca

SEQ ID NO: 999223 - DNA, 120 bp, Artificial Sequence
  ENSG00000270112_72 (sequence is synthesized)
tttccagggcagagagaagaaaatgagttcccaaagacagaaaaagacatgttggcacaatagccaagaaatggaagagactgtgtcaactgcagatgttgaaactagtaaaaatcaagt

SEQ ID NO: 999224 - DNA, 120 bp, Artificial Sequence
  ENSG00000270112_73 (sequence is synthesized)
ccaagagacttggcaattaggagtacatttgacttcaacaaaaataattccaggagtgtgatggcagctgagattctagcatgtaaactacttgccagcgactttaggagattacctgag

SEQ ID NO: 999225 - DNA, 120 bp, Artificial Sequence
  ENSG00000270112_74 (sequence is synthesized)
ccactctgttgcgccaatgtgacaaaacccaccctgaataaatccaacctttgactgcttccacaactatggcttcgacaatgggcattactgaagaaagcactgccatttagctatcac

SEQ ID NO: 999226 - DNA, 120 bp, Artificial Sequence
  ENSG00000270112_75 (sequence is synthesized)
tgtaagtctacggtgtccaactcaccgctagtccattctctaattctccaggattgctatttcaaactagctgttatactcatacatcatccttacctcctccttgcttctggaaccaat

SEQ ID NO: 999227 - DNA, 120 bp, Artificial Sequence
  ENSG00000270112_76 (sequence is synthesized)
aacatcaatcatatggttctcaaagacatgaaagccaaaccactaagtaactcttttaactctctgctgttcaaatgacacacatgcctatgtccacaaccatcccttcatctgcctttg

SEQ ID NO: 999228 - DNA, 120 bp, Artificial Sequence
  ENSG00000270112_77 (sequence is synthesized)
atctggatcccaacttcctcctcctgttcaggaaccttggtgtaccaatgatcttagtcaacccctcctgaacctcccgcatttttacctctactgattccatctcactatcctattagc

SEQ ID NO: 999229 - DNA, 120 bp, Artificial Sequence
  ENSG00000270112_78 (sequence is synthesized)
ctctactgattccatctcactatcctattagcagttaaacatgaaattcaagtttcttccactaaaaaaaaaacacaacaacatcaacaaaacacgccaggcacagtggctcacacctgt

SEQ ID NO: 999230 - DNA, 89 bp, Artificial Sequence
  ENSG00000270112_79 (sequence is synthesized)
actgggactggctctccttgttcttgtgatcgtactctctgtggcccaggctggagtgcactggtgccatctcggctcactgcaacctc

SEQ ID NO: 999231 - DNA, 77 bp, Artificial Sequence
  ENSG00000270112_80 (sequence is synthesized)
tcaccgtgcctggcccatatctattctttggtaaaatttttattcaattatttttcctattttagaattgagttgtt

SEQ ID NO: 999232 - DNA, 120 bp, Artificial Sequence
  ENSG00000270112_81 (sequence is synthesized)
ttttattcaattatttttcctattttagaattgagttgtttacacacatatacattgtattttcctctggatacagatatgtcttttgcaaatattttcttccagcctagacctcatcat

SEQ ID NO: 999233 - DNA, 120 bp, Artificial Sequence
  ENSG00000270112_82 (sequence is synthesized)
ttcagtttttaaataatgtgttttttttttttaaaataaagctttgtattagtccatcttcacactgctgtaaagatactaccagcgactgggtaattaataaaggaaagcggtttaatt

SEQ ID NO: 999234 - DNA, 120 bp, Artificial Sequence
  ENSG00000273375_0 (sequence is synthesized)
ggcttgaatgagaggatctctccatccttatttttcttttgctctctgacacgaactttctgatctgtggccttcgtatcctccacatgttaccactttaagtcgtatctggatgtgttc

SEQ ID NO: 999235 - DNA, 120 bp, Artificial Sequence
  ENSG00000273375_1 (sequence is synthesized)
atgctgatccatcttctagtctcaccttccagtttgtcctactttataatccttcaggtttaattcaaaaccgaatttatccatgatatagctttcttttctctggactcataagtaagc

SEQ ID NO: 999236 - DNA, 120 bp, Artificial Sequence
  ENSG00000273375_2 (sequence is synthesized)
gattgtacctgacagcctcttctatttcccatagtaaaactagttgattaattgttggtaaaatttacatcatatagcagaaatggcttcttcagtaaaacagactgaagaatatgctag

SEQ ID NO: 999237 - DNA, 120 bp, Artificial Sequence
  ENSG00000273375_3 (sequence is synthesized)
agactggctgcaatataagtgaggtctaattggttttaaatgaagtattttccactctttcatttcttgagtggtttcaatttagagcatctcttcggttctacctttaattcccacatt

SEQ ID NO: 999238 - DNA, 120 bp, Artificial Sequence
  ENSG00000273375_4 (sequence is synthesized)
tagattacagtgagatcattttctgttcctcaattttggttccagaccaacattttagattttaatactactataatcttgctttatccaacaataaaatcttgccaaaagtacaagtac

SEQ ID NO: 999239 - DNA, 120 bp, Artificial Sequence
  ENSG00000270115_0 (sequence is synthesized)
cctttgtcaaaagggcctctgatctctgccaaaaaacccccctccagtgaactccctcctaaccaggccacctagcttcctgctgtcagaaagttctcattgctagtaagattttcttga

SEQ ID NO: 999240 - DNA, 120 bp, Artificial Sequence
  ENSG00000270115_1 (sequence is synthesized)
tttcttcccactgggttgtgggaagaaaggcagacagccttgaggcagacagcctcggtgcattgttgaatgtaagaatgaataaattggtgcacaaagaccgcatgaaccctcaggatt

SEQ ID NO: 999241 - DNA, 120 bp, Artificial Sequence
  ENSG00000270115_2 (sequence is synthesized)
tctgagttcctatctctttagcctggtgctcggcactcatccagggtaattggtcaggcttggtgtactcaggaaaaggagacaccgttatctctccaataaagtctgtatctgatgaca

SEQ ID NO: 999242 - DNA, 120 bp, Artificial Sequence
  ENSG00000224223_0 (sequence is synthesized)
acttcaggaagccaccagaggagcagcttcctggctagatggccaaagtgttgaaaacttgctagaaaggcttcactctgttggtcacaataacacacaccctaaaagagcaagaaaggt

SEQ ID NO: 999243 - DNA, 120 bp, Artificial Sequence
  ENSG00000224223_1 (sequence is synthesized)
caagagctccttcttccaaggaccacttctgccactgataggctgaaccagtgccttcatctgagcagcgaaggggcgtaaatgagcagggacacactcctcagaccttctgcctctggc

SEQ ID NO: 999244 - DNA, 120 bp, Artificial Sequence
  ENSG00000224223_2 (sequence is synthesized)
tctgcctactcatttgtagaggcactagtgcacagcggttaaagaggaaggctgcttcacatctcagctccatcactcacagcacagcaaatatcttccttgctggttgtgtggaagtga

SEQ ID NO: 999245 - DNA, 120 bp, Artificial Sequence
  ENSG00000224223_3 (sequence is synthesized)
tgggttgaggaaggaagactagatctccatttctggcttatgttttatgatttataatttcagagcttgcttttttttcttctgtcacaatgccattaattgatgataaattttcctcta

SEQ ID NO: 999246 - DNA, 120 bp, Artificial Sequence
  ENSG00000224223_4 (sequence is synthesized)
aataagcacaacatattagccaccagctgtcttgcccaaggttgtaactagatctgtattataaaacatgataaaattccaaaggatttttaagaatttaaactgcaacctgaataaata

SEQ ID NO: 999247 - DNA, 120 bp, Artificial Sequence
  ENSG00000224223_5 (sequence is synthesized)
acaggtattctaaagccataattatacaaattggtgttcatcttaattaaattcaagctttcaaaaaagattttctgagtttttaaaatcacaaagtaattagcaatacatctgaaaaca

SEQ ID NO: 999248 - DNA, 120 bp, Artificial Sequence
  ENSG00000224223_6 (sequence is synthesized)
ttatataaagccttaaaaagagacaaaaataaaataggaatataaattaataatgaaaatttcatagtttatggtaccaggtagatacagatttgattcttagatttgctatctaccagc

SEQ ID NO: 999249 - DNA, 120 bp, Artificial Sequence
  ENSG00000224223_7 (sequence is synthesized)
tttgctatctaccagcttgttactttgggtgagctgctcacaaaatctctctgaagcttaaagtcttatgtataaaactgatatggtaatacttatctgccaagggtcatttttagcatt

SEQ ID NO: 999250 - DNA, 120 bp, Artificial Sequence
  ENSG00000224223_8 (sequence is synthesized)
aaatgagataatggattttaaaaatctaggagagtaaacctagcatgtgagtgagctcagcaatgcctagttctctacctctttacctaccagataggaaaatatgctacaaaataacta

SEQ ID NO: 999251 - DNA, 120 bp, Artificial Sequence
  ENSG00000224223_9 (sequence is synthesized)
ttatttaagaggacaataaagaaacagaaatatgaatagatattaaagaaaataaaaacaagcctggaaagctcgaaaattatacaaaataatatctaatgaatttaaaaatgtaacagt

SEQ ID NO: 999252 - DNA, 120 bp, Artificial Sequence
  ENSG00000224223_10 (sequence is synthesized)
taaagaaggacctatttaattaataatgccaaaaggagacatatgatcacagtttacaatatatatccaaatgaaggccagttaaagaactaagcaggaaagaaaaatcaaatataggaa

SEQ ID NO: 999253 - DNA, 120 bp, Artificial Sequence
  ENSG00000224223_11 (sequence is synthesized)
ggaagattagcataaaataagatacttgtggctttgaaggttaaaagttacaaaataatttgcaagtgaaaatattttgctataactttaaaattttatttaagtaaataatatgtaact

SEQ ID NO: 999254 - DNA, 120 bp, Artificial Sequence
  ENSG00000224223_12 (sequence is synthesized)
ctaatacttaggaaaataataaatgtcaatatttacagatgctgtgattatgtaacccactcctaatcactcctaatcagtcgtaatagagatattaaaagtgatcatataatatgaata

SEQ ID NO: 999255 - DNA, 120 bp, Artificial Sequence
  ENSG00000224223_13 (sequence is synthesized)
aaattaagataaaagtataaacttaggtcaaccttctacataactccaataccaaaatagaaaatattttaggaataatattgaatcctcaatagtagcaacaagtaaaagatataaaat

SEQ ID NO: 999256 - DNA, 120 bp, Artificial Sequence
  ENSG00000224223_14 (sequence is synthesized)
atataatcttttttttacaaagtatggttgcaaataagtagtatgaatatgaagaccactaaaacacttcattgagagagtttaggtttgaataaatgagttacaatgctatgtttttgg

SEQ ID NO: 999257 - DNA, 120 bp, Artificial Sequence
  ENSG00000224223_15 (sequence is synthesized)
atggcccatctcagaattgcaaatctgtcaggtttttcagaagtatttatagatttgatgcagtcccagtcaaaacaccttctcattaaaaaaaaattgataggtataatcttggcaaaa

SEQ ID NO: 999258 - DNA, 120 bp, Artificial Sequence
  ENSG00000224223_16 (sequence is synthesized)
gttttctaaatcaacaagcatcataaaggttacagtgaatcagacattctgctacattgccactggcatggtgaatcagtacttcccttgtgaaggaaaatttgtcagggaagagtactc

SEQ ID NO: 999259 - DNA, 120 bp, Artificial Sequence
  ENSG00000224223_17 (sequence is synthesized)
acaagcctttagattgtgcagcccatatgtccctgaaatcatacttctgagaagaaattccaaggatatcatagcgagtcatgaattgcaatacttaccatggagtttttcatacacctg

SEQ ID NO: 999260 - DNA, 120 bp, Artificial Sequence
  ENSG00000224223_18 (sequence is synthesized)
gaaatacacagatgaccaaaaggaaagttacctagtgaatgtgttaaagcatacagtgaacatcaagcagcttctagaatcatcttctcaaagaatgtttggagacattagaaaggattc

SEQ ID NO: 999261 - DNA, 120 bp, Artificial Sequence
  ENSG00000224223_19 (sequence is synthesized)
agtacatgacatcacgtgaaaaaacataggatacaaaactttaaagtgaaaaaatatatagcatacagaactttaaatcagtctgagccatgtgcatagaaaaataaaagaaaaaaagaa

SEQ ID NO: 999262 - DNA, 120 bp, Artificial Sequence
  ENSG00000224223_20 (sequence is synthesized)
aatgtacagcagtcaatagagactcttccattttctctcattacaaaaccagaagatcagctatgtggggccatcagctcccagcctaaggtcctataacccgaagcttgaaggcaatca

SEQ ID NO: 999263 - DNA, 120 bp, Artificial Sequence
  ENSG00000224223_21 (sequence is synthesized)
gtacctctgcttttcaaaggtcatgagattggtcatttctgaagcaacacagacttgtacctgtatcagcaatgtttaccatgctcataatcaaagacgtatgctagtttggaatgagct

SEQ ID NO: 999264 - DNA, 120 bp, Artificial Sequence
  ENSG00000224223_22 (sequence is synthesized)
actaggctcattgtatcagtgtccaaaataatgaagatttatctgtcactgtgccaccaagagtccaactcactggctactttgagaaagaacatggtgcactatttgcttcacactcaa

SEQ ID NO: 999265 - DNA, 120 bp, Artificial Sequence
  ENSG00000224223_23 (sequence is synthesized)
gaagttaatatggaaccttaaaaattggaacggaaactaaaacaaattaaggagatctttcagagattttaaccttatattttgtctctgcgactataactttgtaaataaccataacta

SEQ ID NO: 999266 - DNA, 120 bp, Artificial Sequence
  ENSG00000224223_24 (sequence is synthesized)
tgaataggaataaagatttaaaaataagttatcagacattctcaaccttgtttccaaggttatgtaatgtttatcataagagaaaatcctaaaatattaaaattgcttacttgaatttaa

SEQ ID NO: 999267 - DNA, 120 bp, Artificial Sequence
  ENSG00000267834_0 (sequence is synthesized)
ctccctccttccctcatgctccccttctctccctccttccctcatgctcccctggccactttccagcttaaagcccctatagccactaagtactcagggctacaaacttgggccagcagg

SEQ ID NO: 999268 - DNA, 120 bp, Artificial Sequence
  ENSG00000267834_1 (sequence is synthesized)
tacaaacttgggccagcagggctcaggactggactgtctccctgagacccagctaggtgcctggtatattgtaaggtcctaaagtaaagaagatgaggccgggtgcggtggctcatgcct

SEQ ID NO: 999269 - DNA, 120 bp, Artificial Sequence
  ENSG00000267838_0 (sequence is synthesized)
tggttaggaaaaagtgagtgaacgcatgtggcccccagaacccctccctgaaattgcagttgatttttattcccaccgtcaggcccacatatctaaagcttcctctgaacgctccttgca

SEQ ID NO: 999270 - DNA, 120 bp, Artificial Sequence
  ENSG00000267838_1 (sequence is synthesized)
gtacacaaaatagaaatgattgacaggcacagagcagcagcaggccccacgctgtacaccagcatctggcactgtgggtcaccaagcaccaactcgatcccctcggagccaggtgtgtgt

SEQ ID NO: 999271 - DNA, 120 bp, Artificial Sequence
  ENSG00000267838_2 (sequence is synthesized)
tgagattcaggatttttcagttgcaaaggcaatatgatctctactccacagggcacacggcaccctcagtgctcagcacagcagtgtgcagcagcctggttaacttttctgcagggaagt

SEQ ID NO: 999272 - DNA, 120 bp, Artificial Sequence
  ENSG00000267838_3 (sequence is synthesized)
gtcatctcccaccaacacaggtcaggttttcctgcccaatgagcttggggatggcttgactttggagctctttggatctgtggattttggaattttggatttctgatacccgtttgatca

SEQ ID NO: 999273 - DNA, 120 bp, Artificial Sequence
  ENSG00000267838_4 (sequence is synthesized)
aagaggcaaccgaggtctaacgggtcaagtgactttcccatatccgtgaaggtcatgaaaagcagggccaggatggtggcctggggtgccttgaatgataagctgggcccttcactgtgc

SEQ ID NO: 999274 - DNA, 120 bp, Artificial Sequence
  ENSG00000267838_5 (sequence is synthesized)
aggcccctctccttcagtccactctgccactgctgtctgccacaccctgctctgatagctcctctctgccaggcttttccctcacatcctcaactcagccaagagctggtttcttccaga

SEQ ID NO: 999275 - DNA, 120 bp, Artificial Sequence
  ENSG00000267838_6 (sequence is synthesized)
gagccctgctgtgcagtcagttattggacttctctttttgtgcatgtttgttttcagggtttagctgatcaaagtggtatcgttgtaacaggcagctctaaatagaagtcttcagaagcc

SEQ ID NO: 999276 - DNA, 120 bp, Artificial Sequence
  ENSG00000257647_0 (sequence is synthesized)
aaagaatgaaaactataatccatacttaagacaaagggcaataaagctaccctggaagcagtcctgatgttaaaattctgaaaaagcatataattatgctgaagacataaagaaaaatgt

SEQ ID NO: 999277 - DNA, 120 bp, Artificial Sequence
  ENSG00000257647_1 (sequence is synthesized)
cgcgggcatgaggccgaggcaggaagactgcttgagtctgggagttcaacacaccttgcccttgccctacaactttctttaaaaattcgaccttttgtacattctatcttgctttactcc

SEQ ID NO: 999278 - DNA, 120 bp, Artificial Sequence
  ENSG00000257647_2 (sequence is synthesized)
ctcgattcctagcaccatcctttcttcattcctttttcacttatccatcattaggttgttactttttctttcagctggccccttccatccattcctttcctcaacaatctttgctaaatg

SEQ ID NO: 999279 - DNA, 120 bp, Artificial Sequence
  ENSG00000271402_0 (sequence is synthesized)
gatattgtgatcgcccagactccactctcctggcctgtcacctctggagagctacccacatatcctgtaggtctagtcagagcctcttgtccagtgatggatacacctattcgtattggt

SEQ ID NO: 999280 - DNA, 120 bp, Artificial Sequence; identical to SEQ ID NO: 823395
  ENSG00000271402_1 (sequence is synthesized)

SEQ ID NO: 999281 - DNA, 120 bp, Artificial Sequence
  ENSG00000271409_0 (sequence is synthesized)
cattcatcaaaagctttattgtggatccagtgtgttctgagcccatgcgtggaagtgagggagctgggctagaactcagccccgttgggacctgagctggtgccctgctctgtcacaggc

SEQ ID NO: 999282 - DNA, 120 bp, Artificial Sequence
  ENSG00000271409_1 (sequence is synthesized)
ctttcctcttcctgcaatgctgctgcccagaaatgggcacctcagaggcgcctgataaaatcccagggactgaccgagttaacaagccaaggagatggcaatgcaggcagatggggcctg

SEQ ID NO: 999283 - DNA, 120 bp, Artificial Sequence
  ENSG00000271409_2 (sequence is synthesized)
ggtggcagggctggacccgggctcagaggcacaggcactggggtctggcctttgggatgcttggaatccagccccgtgctggtcccagccctgtgccaccccctctgcaggctccactcc

SEQ ID NO: 999284 - DNA, 120 bp, Artificial Sequence
  ENSG00000271409_3 (sequence is synthesized)
cactaaatcctgccggaaaacgtaaaaccttaacagtccttcatcttcctgcctcccctgagccctcaattccccccagtcctcgtggcagcagcccaaccccctcagtccctgccttgg

SEQ ID NO: 999285 - DNA, 120 bp, Artificial Sequence
  ENSG00000271409_4 (sequence is synthesized)
atacagcacgttgagattctcaagactctgtttttgtcttgtgttagatcaacataacaggagcggtggcagcaagggcgataaaataataagactgctcatgtgtcaggctccgtttcc

SEQ ID NO: 999286 - DNA, 120 bp, Artificial Sequence
  ENSG00000271409_5 (sequence is synthesized)
tagccatgatctcagtctacccaaggactgtaggaagggagtactttgatcattacacccattttcagcaaaggagactgagcgatgactttctctcccccgcaaaacatggccacagca

SEQ ID NO: 999287 - DNA, 120 bp, Artificial Sequence
  ENSG00000271409_6 (sequence is synthesized)
gatgccgctttggcttaataaccggtgcaggagagcttgaaggcaagaggcttatagctgagaggaaagagcagacatttggagtccagtcttggcattgaaccctcaactgctctgagc

SEQ ID NO: 999288 - DNA, 120 bp, Artificial Sequence
  ENSG00000271409_7 (sequence is synthesized)
cttagtttccttgcctgcacaatgggccaatgagcgctcccccttcatgtagcttttgcgaggttcgtgagatggtgtgtggaaagccccaggctcaatgctggcacagagcaggcgggg

SEQ ID NO: 999289 - DNA, 120 bp, Artificial Sequence
  ENSG00000271409_8 (sequence is synthesized)
gacaatgattctctttctctggaagacaagccaaaaaacagttcccggtcctgcttttccagccccagagggaagagagacccaaggcaccaggtgctaaaccaggagtcctggaggttg

SEQ ID NO: 999290 - DNA, 120 bp, Artificial Sequence
  ENSG00000271409_9 (sequence is synthesized)
ggctgtgtggcctcaggccagatcatctccctgagccccaatttcttccttaatgaaacaggacaggctgagcctcactgtccacctttttagggcatcccagtgtctcgaacaatgtca

SEQ ID NO: 999291 - DNA, 120 bp, Artificial Sequence
  ENSG00000271409_10 (sequence is synthesized)
gataggaaagctctctgagaagttcccggcattgctcacatgggagggcgactggcttttccagcactactaataatttactctgttctacctctcaagtggtgaaaaggaaacttctgt

SEQ ID NO: 999292 - DNA, 120 bp, Artificial Sequence
  ENSG00000271409_11 (sequence is synthesized)
aagaggatgcttccagcctgaaatgattcatcccctctgtgagattcctgtggcttcctgccacgccatttcacctgcctcctgagctgccgggcctcgctggtcttgggttggcctttg

SEQ ID NO: 999293 - DNA, 120 bp, Artificial Sequence
  ENSG00000271409_12 (sequence is synthesized)
ctatttgagaccctggggtccagtgcattggctcctggaggtcacatgccttcccctccttccacatcagcttcctccagacacggtggctggcgtgcagctcacaggaggtgcatgaga

SEQ ID NO: 999294 - DNA, 120 bp, Artificial Sequence
  ENSG00000271409_13 (sequence is synthesized)
catgtcaggctgctctttcttaactcctcggcccagtgccttcccctccttccacatcagcttcttcatctatagaataaggagtttggaacttgaacgacggcaaagtgtgaggccata

SEQ ID NO: 999295 - DNA, 120 bp, Artificial Sequence
  ENSG00000271409_14 (sequence is synthesized)
ctttgggctgccccacattctctaaggccgatggcagccatcactcatcagcctgaagcagctgcagaatccttaacccaggacccagagaacctcaacccaacggttcatggagggctg

SEQ ID NO: 999296 - DNA, 120 bp, Artificial Sequence
  ENSG00000271409_15 (sequence is synthesized)
gaacttctaagccatggatttctagcatccgaaacagttttgaggtgggatgttcaaagattccatgtgggggagaggatctcaagcttgctggaaggaggaagaagagtgggaggagga

SEQ ID NO: 999297 - DNA, 120 bp, Artificial Sequence
  ENSG00000224825_0 (sequence is synthesized)
accgctgtgtggccaggaagagggactgggagtgggggtgggtgcccagagcttgcacagatccccatgtcaagcggacacccgcctggctcttcagtaaaagagtgaagaaaggccgag

SEQ ID NO: 999298 - DNA, 120 bp, Artificial Sequence
  ENSG00000224825_1 (sequence is synthesized)
cacagcgcgaaggaaacctgaggtctccggcaaggcaggagaggagaccaagtgactccccgaaacccaccctccagcccttcgagaggcccagagtccagccggagcaagcgtaacgct

SEQ ID NO: 999299 - DNA, 120 bp, Artificial Sequence
  ENSG00000224825_2 (sequence is synthesized)
acagtccctggcgcgcatccctgcagaccccagctcgccccggggtcccgccgccgccgccgccaccgcctgcgactgcgagggtcctggcccgagggtgcaccagcacctccttccact

SEQ ID NO: 999300 - DNA, 120 bp, Artificial Sequence
  ENSG00000224825_3 (sequence is synthesized)
accggccctttatctgacaaaagagccggagcccatgactctccgactgtgagcagtgtggcctttccaagcctccagaactttctcattacaacttttccggggtcgcactactccctg

SEQ ID NO: 999301 - DNA, 120 bp, Artificial Sequence
  ENSG00000224825_4 (sequence is synthesized)
aactgtttcctcagccgcgtccagcctcgcagcactgctcttctgcttgctactccagcgaagggacatgcctgctggccaggacgcttagtgggcctcgtaacctggcgagtgtgtgcc

SEQ ID NO: 999302 - DNA, 120 bp, Artificial Sequence
  ENSG00000224825_5 (sequence is synthesized)
cgcgcgtgtccaccctgcccccggccggtgcgccccgcgcgcccaaacccggccggcgaccactgcgcgccgggcgcttccaaactgctcctgtccagaggcatccctctttcggctttc

SEQ ID NO: 999303 - DNA, 120 bp, Artificial Sequence
  ENSG00000224825_6 (sequence is synthesized)
tccatcccgcgtccgcttccgcacccgagagcgacaagcaaaaaagattcagtgcaactcaaggactggtttgttatactcaaaatgtaccaggaacaggaacaaaagtattttataaaa

SEQ ID NO: 999304 - DNA, 120 bp, Artificial Sequence
  ENSG00000224825_7 (sequence is synthesized)
taattaatttttatgggctatgagtcccaaatggttatgtaatcaaagtggaagcagaaaagcatggcttagaaaataattggtcatgtcatgtcacgcttaacacatgttcttgctctg

SEQ ID NO: 999305 - DNA, 120 bp, Artificial Sequence
  ENSG00000224821_0 (sequence is synthesized)
agacacacagagaggacagatgatgagaagacagagagaagacagccgtctataagccaaggaatgccagagctccgggaacctgggagagaggcagggacagatcctcccgcactgtct

SEQ ID NO: 999306 - DNA, 120 bp, Artificial Sequence
  ENSG00000224821_1 (sequence is synthesized)
cagaaggaaccagccctgcagacaccttgatgtcggctttcagcctccagagctgtgagaccatacatttctgatgtctaagctgcccagtctgtggcagtttgtgacctcagccccagg

SEQ ID NO: 999307 - DNA, 120 bp, Artificial Sequence
  ENSG00000224821_2 (sequence is synthesized)
aaaccagtacaaagagcttaaggagctgaacccagggagttgggcagcaaggcagcaccatgctggcggcaggggttggctcccccagggcacagaggatgcccagtggggaggccccac

SEQ ID NO: 999308 - DNA, 120 bp, Artificial Sequence
  ENSG00000224821_3 (sequence is synthesized)
ttcctccaggtcctgcggtgcctgctctcaggtcatgcccatccacagcggggtgctgaatgcactgcacatcctacatacgccaaaacggccaagacgtgcacaggactcagcatcagg

SEQ ID NO: 999309 - DNA, 120 bp, Artificial Sequence
  ENSG00000224821_4 (sequence is synthesized)
ctcactgctgctaggaagtgccaccgccaaggggacaggaggctgggagagacatgcaggctcattttcatgtccaaacaccccaaacaggaagcctagagagacaaccacagatgcagg

SEQ ID NO: 999310 - DNA, 120 bp, Artificial Sequence
  ENSG00000224821_5 (sequence is synthesized)
gcatgagccccacggacgcctggggtcccacgcagacgcagggcatcagccccacggacgcctggggtcccacgcagacgcagggcatcagccccacggacgcctggggtcccacgcaga

SEQ ID NO: 999311 - DNA, 120 bp, Artificial Sequence
  ENSG00000224821_6 (sequence is synthesized)
atgcacggcatcagccccacggacgcctggggtcccacgcagacgcagggcatcagccccacggacgcctggggtcccacgcagacgcagggcatcagccccacggacgcctggggtccc

SEQ ID NO: 999312 - DNA, 120 bp, Artificial Sequence
  ENSG00000224821_7 (sequence is synthesized)
acgcagacgcagggcatgagccccacggacgcctggggtcccacgcagacgcagggcatcagccccacggacgcctggggtcccacgcagacgcacggcatcagccccacggacgcctgg

SEQ ID NO: 999313 - DNA, 120 bp, Artificial Sequence
  ENSG00000224821_8 (sequence is synthesized)
ggtcccacgcagacgcagggcatcagccccacggacgcctggggttccacgcagacgcagggcatcggcaccatgggtgcccggcatcccacccagttgtgaggcaccagcatcaaggat

SEQ ID NO: 999314 - DNA, 120 bp, Artificial Sequence
  ENSG00000224821_9 (sequence is synthesized)
gcccagggtccccccagacacagggcatgggcaccacagagacgcctggtgtcccacccagcccagggtggctttcagccaagcctccccaaatgatccataaacccaatttcataaaca

SEQ ID NO: 999315 - DNA, 120 bp, Artificial Sequence
  ENSG00000224821_10 (sequence is synthesized)
aaagcacattttttcaaaagaaaacttagactattttgtggcgatagccttcagggttggaaagaaatataagagtctgcaaatttagtttttccattaaactatagggataacaattat

SEQ ID NO: 999316 - DNA, 120 bp, Artificial Sequence
  ENSG00000224821_11 (sequence is synthesized)
tccttttgagaaacattgagtccaaagaaaagttttgattttttgatcatgtaacttggattccaagactgctacacacttctggttcccccccaaaaaactaaaaaaaagatgaactca

SEQ ID NO: 999317 - DNA, 120 bp, Artificial Sequence
  ENSG00000224822_0 (sequence is synthesized)
tctcacttataaatgggagttgaacaagaacacatggacacagggaagggaactcacacacccgggcctgttggggggtgggggcctaaggaagggataacattaggagaaatacctaat

SEQ ID NO: 999318 - DNA, 80 bp, Artificial Sequence
  ENSG00000224822_1 (sequence is synthesized)
tgggtgcagcaaacgaccatggcatgtggcagaacttaaagtataataaataaatatataaatatttataaataaataat

SEQ ID NO: 999319 - DNA, 120 bp, Artificial Sequence
  ENSG00000224822_2 (sequence is synthesized)
tttataaataaataataaatacataaatatcagaaagtaaaagaggaaaaaactgaaccttgaatttttttcttttagaatatttataatatttaacgtatttgaaggtgaaggccatcc

SEQ ID NO: 999320 - DNA, 120 bp, Artificial Sequence
  ENSG00000224822_3 (sequence is synthesized)
tacatggacatctgaagctttagctaagtattatcttttctgtaatgtgactattggtttgcagttcggttcttcttttcgaatagtatgagattaattttctcagtacttaaatcactc

SEQ ID NO: 999321 - DNA, 120 bp, Artificial Sequence
  ENSG00000224822_4 (sequence is synthesized)
ctcagttaagttggatgttcatggaggaacattctttccttcaggttgctgatacatttgctgcactgtaggggagggagtgggtatctgagttagtcagttttaccatttataaaatgt

SEQ ID NO: 999322 - DNA, 120 bp, Artificial Sequence
  ENSG00000224822_5 (sequence is synthesized)
tgaaagaatcgaaaatgtttaactggttgagaggcaatgatgttgcaaatggggtattcttcaaagctccttctttttttaaatcttcaaaggcaattattctgaatgtaaactacagac

SEQ ID NO: 999323 - DNA, 120 bp, Artificial Sequence
  ENSG00000224822_6 (sequence is synthesized)
caaattgcagtcttctgtaagcatttcagagattacctcaaatattttttgattaaaaaactcttccgtggtcttttgtgcttcagaactacccagtacaacagggtcttcagcctgctc

SEQ ID NO: 999324 - DNA, 120 bp, Artificial Sequence
  ENSG00000224822_7 (sequence is synthesized)
aggatctctaaagagagctagcacacagtcagccaactttggctgcttcaactcctaggaacaagaaatgatgctgagataatttgtctggcaggtattatcagcccacaatgactgctg

SEQ ID NO: 999325 - DNA, 120 bp, Artificial Sequence
  ENSG00000224822_8 (sequence is synthesized)
tcatttagcctcaaaatgtttatttttccttttacaatgctgtatttctttagaaccttcctattccgagtgtggaccctaggccagccccatagacttcccctggggacttgtcagaaa

SEQ ID NO: 999326 - DNA, 120 bp, Artificial Sequence
  ENSG00000224822_9 (sequence is synthesized)
tgcataattttaggccccaccccagacctgttggaccagaatcttcatttaacaagatgcccagaaaacctgagataatcaaagacccacaactaagtaagacctctcaggatctcaaag

SEQ ID NO: 999327 - DNA, 120 bp, Artificial Sequence
  ENSG00000224822_10 (sequence is synthesized)
ccaagtgttttacagagaagagaagatagaaaaggcatattatctaggagtggaaaagaattttatgctgaaaatgttgaagagagaattcaaaatcaaattcaacattccacctaggag

SEQ ID NO: 999328 - DNA, 120 bp, Artificial Sequence
  ENSG00000224822_11 (sequence is synthesized)
gcttccatctctgcttaggagctgagtaatggaggtgattggtgtaagtgttcagtacctatgaagacctaactcttgagggagagactccaatgtaaacttcctactcaatactgcctt

SEQ ID NO: 999329 - DNA, 120 bp, Artificial Sequence
  ENSG00000272707_0 (sequence is synthesized)
gtagtctgggctccatggaatccatagttgaatttcagtgggtaggggctggttcataattttttttaaattgtatgaggaactatgtgtggtgtgcacatatattcatatttttcaagg

SEQ ID NO: 999330 - DNA, 120 bp, Artificial Sequence
  ENSG00000232394_0 (sequence is synthesized)
tcagctcaggctgctgtgacaaagcactgcaggccatggtttcccatcaaaagcctgttctctctcagttctaaagaggcagcccaggatgtgttgagttacatcgactgcacagcccat

SEQ ID NO: 999331 - DNA, 120 bp, Artificial Sequence
  ENSG00000232394_1 (sequence is synthesized)
accggcctccgtggccgccctccccatggcaggcagggatggaggcaggctgaggcacctgtcctctgaggcctgcggaggctctctctcctgtgcttctctgaggatgtcgctccgccc

SEQ ID NO: 999332 - DNA, 120 bp, Artificial Sequence
  ENSG00000232394_2 (sequence is synthesized)
tactcaaggagtactagacccctctgtctgctgaggtcagcatcccagaacacggctccagctgacgattgcacttggcacccatatcctccgtgcgacaacctggtgtcagcagtctcg

SEQ ID NO: 999333 - DNA, 120 bp, Artificial Sequence
  ENSG00000233138_0 (sequence is synthesized)
ctgttcggtgccaagtagaataatttccaccactttccctgttcttcagtactactgcatagccaagctggtttattgttgcatataaagtctgggctgtcttccgaagtgctctgtttc

SEQ ID NO: 999334 - DNA, 120 bp, Artificial Sequence
  ENSG00000233138_1 (sequence is synthesized)
actcccctgacgcgcctttcttctcctcaaagccctccattggcaggggcaatgtgggtgaaggatgtaaactggaaagggctggcggcatggagtgaaccatctggatcccaccaacgg

SEQ ID NO: 999335 - DNA, 120 bp, Artificial Sequence
  ENSG00000203729_0 (sequence is synthesized)
ctgaaaactggaacagggatgtcgacagtcagaggaggagaagggcagaagtgtgcactagaacaccagatgtttgaggctgaaaatgatatggatgcagaataaatagccccaaaataa

SEQ ID NO: 999336 - DNA, 120 bp, Artificial Sequence
  ENSG00000203729_1 (sequence is synthesized)
ccttctatctgtggtgtcccgtccccctccttggccaggcatcaaagctacatgttgttcatttaaaacatgaacatcctgatcccaggactttgaagataggaatcacccatcccaaac

SEQ ID NO: 999337 - DNA, 120 bp, Artificial Sequence
  ENSG00000203729_2 (sequence is synthesized)
cagacacactgcccacagtagctgagaaagaagccaaaggtggtgaatgattagcagaactgcaagacagctccagaatctaaacacagagtactgggaaagctgttttgtgggggaaac

SEQ ID NO: 999338 - DNA, 120 bp, Artificial Sequence
  ENSG00000203729_3 (sequence is synthesized)
gaggaggtcctttgtggcctgtctgctccatgggaatagctccaggagagggaagaccagctgccttcatcaggaactcacaggtggcatttctatggggaatcagcacaagggaaaagg

SEQ ID NO: 999339 - DNA, 120 bp, Artificial Sequence
  ENSG00000203729_4 (sequence is synthesized)
agacatttcatttccaagttatggtggcatcgcaattacaccattattgcatggactgaagtgcaagtggaggacaaggggttgggagaggaagtggctttggcaaattgtccttaagct

SEQ ID NO: 999340 - DNA, 120 bp, Artificial Sequence
  ENSG00000203729_5 (sequence is synthesized)
ggtaagaagcagatctccaagactttctactgggatatggagttttggggcaaaaaggagagtggagatcaacactaatatttatttattcatttttaaataatacactttcagatagaa

SEQ ID NO: 999341 - DNA, 120 bp, Artificial Sequence
  ENSG00000238246_0 (sequence is synthesized)
tgtgcagaagtgcatcaagctgaggccctaggacctgcagggataatccaggggctcaagaaacactgattgaatgaaatgaacaaagaaagagcaagcaagctatgtattttgctggaa

SEQ ID NO: 999342 - DNA, 120 bp, Artificial Sequence
  ENSG00000238246_1 (sequence is synthesized)
ccttttacatgagactcaggtttcattttgaagacacccaggtcaatgtgtagattatcttgactctgcctctttaaatagagcacagattgttatatgcaagttgcgtgctagtgtgtt

SEQ ID NO: 999343 - DNA, 120 bp, Artificial Sequence
  ENSG00000238246_2 (sequence is synthesized)
gagtgtctttacattagtgttttcttcaaagaagatagagatcattcaggatgctaggttttttttttttcacttattttgaggatctttacaaaggaaaatggcactttgaaatcgcaa

SEQ ID NO: 999344 - DNA, 120 bp, Artificial Sequence
  ENSG00000238246_3 (sequence is synthesized)
ggatgatgtagctatctggttgggtttgatcctgccagttccgctaggagaaatcttacttcatattggctgaattgctgacatgagttttaaagataaaacaatttgagaaattgaaaa

SEQ ID NO: 999345 - DNA, 120 bp, Artificial Sequence
  ENSG00000238242_0 (sequence is synthesized)
atgaaccctttaaaagcaaatatttttttttctggctgctattagaaggagaagttagaagattagaaaagtatgagaaagattcgatgcattgttaccagcttaaagctagagggggcc

SEQ ID NO: 999346 - DNA, 120 bp, Artificial Sequence
  ENSG00000238242_1 (sequence is synthesized)
acgtggcaaagaatgctggagtgaagtggcgtgatcatagcgagctcactgcagcctcaaactccttggtgcgagggaccctcctgcctcagcatgtgtcagaaaagcaggccggtagat

SEQ ID NO: 999347 - DNA, 120 bp, Artificial Sequence
  ENSG00000238242_2 (sequence is synthesized)
caaacgcccaggtcgaatgctttgaagttaatgtcataatagatgttatagcacaaagatccaacaccttcttccaagaagcttgaacaggagcaggcaagaatattaaccatttagaga

SEQ ID NO: 999348 - DNA, 120 bp, Artificial Sequence
  ENSG00000238242_3 (sequence is synthesized)
ctggacagcaatgtctcattgattcacatgttctagagcaccagctccacctgtttatgcaccagaacggggatgggaagaaacacagcctttggatgtttgcaaatcccgaatgaccat

SEQ ID NO: 999349 - DNA, 120 bp, Artificial Sequence
  ENSG00000238242_4 (sequence is synthesized)
caggaactggagaggttggagaaataatagagcagaagccacctggaagcaggggcccaaacaacagggcaggttgttagctgcattgcacatagaagggtagaagaggaagaatgattt

SEQ ID NO: 999350 - DNA, 120 bp, Artificial Sequence
  ENSG00000238242_5 (sequence is synthesized)
tacttcttgacaaagaagaagaaggaaagacgtctgcagggtaagcatgtctgggagtccctgccacctgctgccattcatttaatcatccctgggagccggactgcaggccctgtgcca

SEQ ID NO: 999351 - DNA, 120 bp, Artificial Sequence
  ENSG00000238242_6 (sequence is synthesized)
ggctgtcagcagcagaaactggcaaggagagagctcactcagcagctattagataccagggcctgcccaccagttacagtgtgaactggggactggaggaacaggaagcaatggctgatc

SEQ ID NO: 999352 - DNA, 120 bp, Artificial Sequence
  ENSG00000238242_7 (sequence is synthesized)
tcagcagtcagcaggaggaaaagtaaggcagaactgaaatgtatgatgtgtttactttgttatcagcactgtgtcatgctaagtacctttgaaatgtctcttcttctcattcctcgaaat

SEQ ID NO: 999353 - DNA, 120 bp, Artificial Sequence
  ENSG00000238242_8 (sequence is synthesized)
agtcctactaagtaggtattactttcttcattattgccaaagaagaaactaagaccaaaagagtttaagtaaattgttcagtagatcttggacattaaaccaattttgtctgactcaaaa

SEQ ID NO: 999354 - DNA, 120 bp, Artificial Sequence
  ENSG00000238242_9 (sequence is synthesized)
acaagtcaatcagccatcacgaagtgctgctgtcagcaaggtctccatggcgtgtgggaggacacaaaggagaggcatctaaattaagctggagtcaagaatgaccataatgaggctcct

SEQ ID NO: 999355 - DNA, 120 bp, Artificial Sequence
  ENSG00000232661_0 (sequence is synthesized)
atagagaacatattgagggattcttgtgctggcaccagctgcttaaccatcaaggattctgttatgaaatactattcctggaagaaggccttttgaggaatgaagtatatcctctttgag

SEQ ID NO: 999356 - DNA, 120 bp, Artificial Sequence
  ENSG00000203721_0 (sequence is synthesized)
gagtgtccttcagacactgggatggctgcacctttacccgtcctctccaactctctccacctagaaagtattcttttctcttaattttgttagagttatataggaatgctccttcagcag

SEQ ID NO: 999357 - DNA, 120 bp, Artificial Sequence
  ENSG00000203721_1 (sequence is synthesized)
aaatgacagaggctgttgctctcagaatcaaatgcaataatgtgacctgtaaattcctgtgaatatttggatattttagcgatatttgtttattcagaagagattctggatgcagaactc

SEQ ID NO: 999358 - DNA, 120 bp, Artificial Sequence
  ENSG00000203721_2 (sequence is synthesized)
tcctcctctctgttctctaaccctgctttccaccatcattcttctctctctagggcacagagagaattaagaacaacctaagggtcattacaatgatctaactgccttacctgcttttga

SEQ ID NO: 999359 - DNA, 120 bp, Artificial Sequence
  ENSG00000203721_3 (sequence is synthesized)
actggttgagcctcttgtgggaccgaaaacaaaagaagggtgttgaaatgcaaatagataactctgggtcccagtccctgactgcaaaaggaagccaaaactgacaacaacgtctccttc

SEQ ID NO: 999360 - DNA, 120 bp, Artificial Sequence
  ENSG00000203721_4 (sequence is synthesized)
tctacggaggtttgtagaaaggctgtacaaaaatctcacaagatgtatttcttctcgtggactggagtcccaaggtgcttaagagctcttcaatttgttaatggaaagaaacaccattta

SEQ ID NO: 999361 - DNA, 120 bp, Artificial Sequence
  ENSG00000203721_5 (sequence is synthesized)
ctctgagcttcatctttttacgaagacgtcatggtgtgctatctgtactgggaaactttccccagcatcagccatctcctgaagataacattgtctgctagagattgtcatgtatgtgga

SEQ ID NO: 999362 - DNA, 120 bp, Artificial Sequence
  ENSG00000203721_6 (sequence is synthesized)
ttgaatctctttatcttcatggtcctctttctgtgcccccagcccggttgacaatgtgtgccttcactcacccaattagaaaccttggaggtatcctgtactcttctgtcacttaccctc

SEQ ID NO: 999363 - DNA, 120 bp, Artificial Sequence
  ENSG00000203721_7 (sequence is synthesized)
agcctaaagccaatcagtcaccaaagtattgtctgtcattatcatcatcatcatcatcatcactgtcaccactgatggagtgagaaccttgtgcagttgagcatgaaccccaatttcatt

SEQ ID NO: 999364 - DNA, 120 bp, Artificial Sequence
  ENSG00000203721_8 (sequence is synthesized)
tgcaaaatgacccagacagcagatttcatctcatatgaaataagcaaggtgaggttttgatgacgttacagacatggctaagaagaggttgagaaccagcattcagcccacctgactcca

SEQ ID NO: 999365 - DNA, 120 bp, Artificial Sequence
  ENSG00000203721_9 (sequence is synthesized)
aagctcatgccccgaacctcagaaacttctccagtgagttccttttttttaatggcaggatcacaccattagtttggactggatccaacctggattgttgcaacagcctttgatctgatc

SEQ ID NO: 999366 - DNA, 120 bp, Artificial Sequence
  ENSG00000203721_10 (sequence is synthesized)
tgtcaagccctgtgccttctgtgcaacccattctctaccctggcacgagcattactaaaataccaatctggtcctatgactcctctgcataaaaaccacggctggggctggtcaagtgca

SEQ ID NO: 999367 - DNA, 120 bp, Artificial Sequence
  ENSG00000203721_11 (sequence is synthesized)
atactgaccttggcaagagtaatggaccgagattgagtgatgaatttgtgcttaagagctcttcaatttgttaatggaaagaaacaccatttacaccggatggctacaaagcaaccttat

SEQ ID NO: 999368 - DNA, 65 bp, Artificial Sequence
  ENSG00000203721_12 (sequence is synthesized)
tccagcctctcaagtagctaggactacagatcttttctcagaatagcagtctgtaggctgtcacc

SEQ ID NO: 999369 - DNA, 120 bp, Artificial Sequence
  ENSG00000203721_13 (sequence is synthesized)
agttatcatggctttaatcttaatgccttccctgcactgttttgggaatatcttaatactgctatttttgaagagtccagctcagttattctgcagaatgtctgttgatttggctttgct

SEQ ID NO: 999370 - DNA, 120 bp, Artificial Sequence
  ENSG00000203721_14 (sequence is synthesized)
gtttcctcataagtagatccagattatacgtttttgttgatgttgggttcttctcagtgaatcacatccgatgatgtcagcacgaggcctgatcatttggtttaggtagctttcactaga

SEQ ID NO: 999371 - DNA, 120 bp, Artificial Sequence
  ENSG00000203721_15 (sequence is synthesized)
ctttttcattgtaaaggtacctatcccttttctaattaataagtaatatgttgggtgatagtttgtgtgtgaatatccttttctccagtgacctttcatccaatggtttcagcattttaa

SEQ ID NO: 999372 - DNA, 120 bp, Artificial Sequence
  ENSG00000203721_16 (sequence is synthesized)
atgatcctgggctgagtcagttttcagtggtggctgcagacttgtggttttccaattctttcatcacttttacatttattaattggcagtctatgacttcttatagccacataaagataa

SEQ ID NO: 999373 - DNA, 120 bp, Artificial Sequence
  ENSG00000203721_17 (sequence is synthesized)
ttcaggaattatctgaacctatgaatgttaccttatttggaaaaagagtctttgcagatacaattcaattaagaatcttgagatgaggagattatcctggattatccaatgggccctaaa

SEQ ID NO: 999374 - DNA, 120 bp, Artificial Sequence
  ENSG00000203721_18 (sequence is synthesized)
tccaatgacaaatgtccttggcagagggagatttgagacaggagaagagaagacacgaaggagggaaggaagtgatgtgaccacagaggcagcgattggagtgatgtagtcacaagccaa

SEQ ID NO: 999375 - DNA, 120 bp, Artificial Sequence
  ENSG00000203721_19 (sequence is synthesized)
ggagcaccaacagccaccaggagctggaagagcccaagagtatatactaatacctggatttgggacttgggacttctggtctctagaagtaggaaagaataaacatctgttttttgtttg

SEQ ID NO: 999376 - DNA, 120 bp, Artificial Sequence
  ENSG00000203721_20 (sequence is synthesized)
agagtaatggaccgagattgagtgatgaatttgtgtgtgttgtggctgatgtgcattttggtgctttgtatgcaagtttaagaatatcttagcaataggaaaggaagatttatggcagtt

SEQ ID NO: 999377 - DNA, 120 bp, Artificial Sequence
  ENSG00000203721_21 (sequence is synthesized)
caagatggtctagcttgagctctgtaggcttgactgatgaaataagtagtagttttttgctaaaataaccacattgtttgcaaaagttttctcctttgagttttctagggtcattacaat

SEQ ID NO: 999378 - DNA, 120 bp, Artificial Sequence
  ENSG00000203721_22 (sequence is synthesized)
ggaactggaaagagcttttctaagacttgcagttttttactttgtggtccaaaacagtaaaagtgcctagtataggttagaaagctgactgaaatgagacctgaagttttcatcttgcaa

SEQ ID NO: 999379 - DNA, 120 bp, Artificial Sequence
  ENSG00000203721_23 (sequence is synthesized)
aacagccttctatagtgtctccatgccagcctctagcatctagatgttcccagctttctacagtgccctgtaagctcgcactctctccctctgccagtgtcacaggagggtcggttagtg

SEQ ID NO: 999380 - DNA, 120 bp, Artificial Sequence
  ENSG00000203721_24 (sequence is synthesized)
acacatccctgatctttcaacctcctgcctccctcaaccgtgtaatgtccaagtcctataatagatctttcaatctatgatgcttatcgtggttctgcttcccaattcaaaccctggctg

SEQ ID NO: 999381 - DNA, 120 bp, Artificial Sequence
  ENSG00000203721_25 (sequence is synthesized)
agatgtggtcttatgaggggacattccatggtgtgctgaaagtcaccccacagtatccccatgataaacatacagaatagctgtgaatttctcttagagagcccaggacatgatcaaaac

SEQ ID NO: 999382 - DNA, 120 bp, Artificial Sequence
  ENSG00000203721_26 (sequence is synthesized)
tggattgtctgccaggctgaagagaccccagggtgaacagaaaacgatggaagctgctctctggcctgccagccaatcacatattcctttaagactacctaccatgccagttccgaactc

SEQ ID NO: 999383 - DNA, 120 bp, Artificial Sequence
  ENSG00000203721_27 (sequence is synthesized)
agctgcaggcagccatcaggtacttataaagtagctgtcatgactggggaactgaattttaaattttaattaagtttaaatgtaaaaactgataacttgagtctgttattgaaaaacctt

SEQ ID NO: 999384 - DNA, 120 bp, Artificial Sequence
  ENSG00000232667_0 (sequence is synthesized)
ctgatgttcacaatgatggtttcaagtcatctaaggaatggatctggaagcaatgagtggtagtaggtattgaataaaattgtcattgccttacaagaggacacatcattgaggtcattt

SEQ ID NO: 999385 - DNA, 120 bp, Artificial Sequence
  ENSG00000232667_1 (sequence is synthesized)
agaatcttcaggtgaaggaagactgatgttctcaaacagaaaagatgggctgtttctgatggaaattaaggatcaatgaggagactgttttccatgggtctctcacatttctggacatct

SEQ ID NO: 999386 - DNA, 120 bp, Artificial Sequence
  ENSG00000232667_2 (sequence is synthesized)
tatatagcaaatgacagagaaaatgtctctctctagggtgaagaccagatagaattactgctcattttaaaagattcaggtaccctatgtttagaattcctctcttgtaccccaccccat

SEQ ID NO: 999387 - DNA, 120 bp, Artificial Sequence
  ENSG00000232667_3 (sequence is synthesized)
tatgtgtgcaggtattacccagacttctttgtattatcctgtagatttgtgtcttccagaaccaatgcaaatgctgatactctggtttttgctgttctgaataataaagtcattaatatc

SEQ ID NO: 999388 - DNA, 120 bp, Artificial Sequence
  ENSG00000232667_4 (sequence is synthesized)
gctcaggtatgtctttattaccagtgttcttgaggatacaatcaaccaaggtacactttaaattaaagcagatatatggataaaacaggaaaaatacaaggatattcaatatcaacattt

SEQ ID NO: 999389 - DNA, 120 bp, Artificial Sequence
  ENSG00000232667_5 (sequence is synthesized)
ccattaagaattgtactggggcatctggccaacagaattcagagccccagcctgttcataaaaaaaatcagatgaattttgtctgcggaacattctgcaaaaatatctgaccagtaagta

SEQ ID NO: 999390 - DNA, 120 bp, Artificial Sequence
  ENSG00000232667_6 (sequence is synthesized)
atcctctaaatagccacagccatcaacagcaaggaaagtctgagaaagtgtcacagccaagaggaccctataaagacatgatgactaaatgtaacatggtgtcttccatgggatcctgaa

SEQ ID NO: 999391 - DNA, 120 bp, Artificial Sequence
  ENSG00000232667_7 (sequence is synthesized)
atgtaacatggtgtcttccatgggatcctgaaacagaaaaaggacattagagctggggattgtggtatgtgcctttagtcctagctactccggaggctgaggcaggaggatcacctgagc

SEQ ID NO: 999392 - DNA, 120 bp, Artificial Sequence
  ENSG00000232667_8 (sequence is synthesized)
atgccactgcactccagctcaggcaacagtgagacccggtctcaacaaacaaaagaaaataaaagaatggtagacaaggaaagcagttgaacagctatgcgagaagcctactttctcttc

SEQ ID NO: 999393 - DNA, 120 bp, Artificial Sequence
  ENSG00000232667_9 (sequence is synthesized)
atgtaacacgttggcctaagagatctatagagctttttaaaaacaaagaaggcagcaagatttaaaataataaaaccagcaataggtatttttaaaagtgagagaaactatcagagagct

SEQ ID NO: 999394 - DNA, 120 bp, Artificial Sequence
  ENSG00000232667_10 (sequence is synthesized)
tcagtcagagactttgtgagcttactgtaaattagagggagcaaattggaggagaaatgacaaaagaaacagaaaaaatgtttaatcagacaaaggaactaaaaaacctcagtcttaatt

SEQ ID NO: 999395 - DNA, 120 bp, Artificial Sequence
  ENSG00000232667_11 (sequence is synthesized)
agaagatggtcaaacaaatctcttaactgatgttcacaatgatggtttcaagtcatctaaggaatgggagaaaatacaactggtgaattgcaaagatattaagaaatttttttcatgacc

SEQ ID NO: 999396 - DNA, 120 bp, Artificial Sequence
  ENSG00000232667_12 (sequence is synthesized)
tccaaagaataaaattataaaacttattcttacctttttgtttcctgtaaacgtgtggtatattccccttgtccctcacgacaaacttctctatgatttcctcaatggttaaggccccaa

SEQ ID NO: 999397 - DNA, 120 bp, Artificial Sequence
  ENSG00000232667_13 (sequence is synthesized)
atgatacattaaaaaatatacatttgttttatattttcaaagtattcttaatctttaattaggaactacactgaaactctgttgtcaatgcccctacgaagactgaaagagatgtgatgg

SEQ ID NO: 999398 - DNA, 120 bp, Artificial Sequence
  ENSG00000232667_14 (sequence is synthesized)
ttttaagactggtgcctatggtcaaaagaatatactgactgcttccaaatgtctataaataaattatggtttcttaaaggcccatgaaatgaaactttatttcttgtcattagttatcta

SEQ ID NO: 999399 - DNA, 120 bp, Artificial Sequence
  ENSG00000232667_15 (sequence is synthesized)
atttcttaaaggttatctttgttaggaatggaatcaatttaatgatttaaatatttttcaaacattttataacacatttttatactagaattcttgtttgctttcaattgcctttctcat

SEQ ID NO: 999400 - DNA, 120 bp, Artificial Sequence
  ENSG00000232667_16 (sequence is synthesized)
tctttttactttcattccatgttttccttctgaattataattgtgtattctattctggatgaaatactcatatttctctaaaatgtggctagtaaacaaaaccatgtaagagtgtacata

SEQ ID NO: 999401 - DNA, 120 bp, Artificial Sequence
  ENSG00000232667_17 (sequence is synthesized)
tcacaatgatggtttcaagtcatctaaggaatgggtgagtaccagggaacttgtgtaatttcaatcaaatttaatttttacaacaatcccaagaaatatatcattatccctacatcacag

SEQ ID NO: 999402 - DNA, 120 bp, Artificial Sequence
  ENSG00000232667_18 (sequence is synthesized)
actaaaacaaaataaacaaaaacaaataaaacctttgagactcagaactattttagcaactttcccaaaagctgctaaaaggtaaaactagaatcctgatccatcaatgccaagccctat

SEQ ID NO: 999403 - DNA, 120 bp, Artificial Sequence
  ENSG00000232667_19 (sequence is synthesized)
cagattcagagccccagcctgttcataaaaaaaatcagatgaattttgtctgcggaacattctgcaaaaatatctgaccaggaaagataaataagatgcaaaaagtcacacacacaggaa

SEQ ID NO: 999404 - DNA, 120 bp, Artificial Sequence
  ENSG00000232667_20 (sequence is synthesized)
atgattaatacaattttatggcatcaaaagataccatcgataaagtaaaacacaagtcacgaactaggggaaagaagatgaggtaacatccaaaatacatgaagaaatcttgtaagtcta

SEQ ID NO: 999405 - DNA, 120 bp, Artificial Sequence
  ENSG00000232667_21 (sequence is synthesized)
ttaaaagactatacgacctaacagaaagaagcagcaaaagccatgaaaaggaaaagaaggacaaaactatctgaagccctgtaaaaagtctgagtcatttctgctctatttctttcccta

SEQ ID NO: 999406 - DNA, 120 bp, Artificial Sequence
  ENSG00000232667_22 (sequence is synthesized)
cagtaataattctgtgaccataattctgtgtctcgttctcctttcaagactgaatgatagagacagatgcagactcaaggggtaattgaaaagaacttattgaagggtctatttacaaaa

SEQ ID NO: 999407 - DNA, 120 bp, Artificial Sequence
  ENSG00000232667_23 (sequence is synthesized)
gtgtgggcagcataaagaaactaacaaaagatggtaaaatacccaaggactagtcacaacaggaagaatttaccacccctagaccccagaggacagaggaaggagctgtttctagaacca

SEQ ID NO: 999408 - DNA, 90 bp, Artificial Sequence
  ENSG00000232667_24 (sequence is synthesized)
attcagagccccagcctgttcataaaaaaaatcagatgaattttgtctgcggaacattctgcaaaaatatctgaccatcctagctactcc

SEQ ID NO: 999409 - DNA, 120 bp, Artificial Sequence
  ENSG00000232667_25 (sequence is synthesized)
gtttggctgaaacattttaccatcctggacaccatgcttactttaaatgattccaggaatttgcagaatgtggagataacatctgttaccaaggatagctcctctcctccagaataactg

SEQ ID NO: 999410 - DNA, 120 bp, Artificial Sequence
  ENSG00000232667_26 (sequence is synthesized)
cgtactgtttcttcaatagaccatcgggctatttcattaagacagcatcttcagacaatgtggtacatggtagcaccaatttaaatcaacagactgaataaactacgagaaccactccca

SEQ ID NO: 999411 - DNA, 120 bp, Artificial Sequence
  ENSG00000232667_27 (sequence is synthesized)
ctgatgttcacaatgatggtttcaagtcatctaaggaatgggatctcactctatcacccagattggagtgcagtggcacaataatgatgcactaccttgatctcccaggctcaagtgatc

SEQ ID NO: 999412 - DNA, 120 bp, Artificial Sequence
  ENSG00000232667_28 (sequence is synthesized)
tacaagaatgaattggagtggcatgaagcatgagataagcagaccacttacaagactgttgcagttgtaaagcataggatgacaggactggattaaggttcttgaggatacaatcaacca

SEQ ID NO: 999413 - DNA, 120 bp, Artificial Sequence
  ENSG00000232667_29 (sequence is synthesized)
tatctcagtgccttagactggatcttctagaaacagagaattccaggtagaaggtttattggagaatgccctcaggaaatatacctaaaggaagtgaagatggaggcaagactggacaga

SEQ ID NO: 999414 - DNA, 120 bp, Artificial Sequence
  ENSG00000232667_30 (sequence is synthesized)
tccacttctggggaggcctgaggaagcttctaatcatggcagaagttgaagctggtatgtaaaatgcaaaagcaggagcaagagagagagagagagaaaggatagctcctctcctccaga

SEQ ID NO: 999415 - DNA, 120 bp, Artificial Sequence
  ENSG00000274044_0 (sequence is synthesized)
gcgtgtgaaaaggaagccctactctactaccaaggtgacttcagggagcacattcaatgagaatacaagaagatatgctgtgcacaccaaccagtgtaggagacctcatggctcccgggt

SEQ ID NO: 999416 - DNA, 87 bp, Artificial Sequence
  ENSG00000274044_1 (sequence is synthesized)
gaaggtggtgcaggtggcccctctgaggcgtgaatctactccccatgaggacaccgtacacaacatcactaacgaggatgcctcaca

SEQ ID NO: 999417 - DNA, 120 bp, Artificial Sequence
  ENSG00000274044_2 (sequence is synthesized)
aggacaccgtacacaacatcactaacgaggatgcctcacacgatatcactaacgaggacgctgtccacggcatcgctaacgaggccgccgacaagggcatcgccaacgaggacgccgccc

SEQ ID NO: 999418 - DNA, 120 bp, Artificial Sequence; identical to SEQ ID NO: 949264
  ENSG00000274044_3 (sequence is synthesized)

SEQ ID NO: 999419 - DNA, 120 bp, Artificial Sequence; identical to SEQ ID NO: 949265
  ENSG00000274044_4 (sequence is synthesized)

SEQ ID NO: 999420 - DNA, 120 bp, Artificial Sequence; identical to SEQ ID NO: 949266
  ENSG00000274044_5 (sequence is synthesized)

SEQ ID NO: 999421 - DNA, 120 bp, Artificial Sequence; identical to SEQ ID NO: 949267
  ENSG00000274044_6 (sequence is synthesized)

SEQ ID NO: 999422 - DNA, 120 bp, Artificial Sequence; identical to SEQ ID NO: 949268
  ENSG00000274044_7 (sequence is synthesized)

SEQ ID NO: 999423 - DNA, 120 bp, Artificial Sequence
  ENSG00000274044_8 (sequence is synthesized)
tgcctctgaactttcaggactttaaaaagcactcatgtttccatcctcactgttgactcctggcttaaagggatctcccggggtgagtgaggaggcgggattggaccctggcagtctgac

SEQ ID NO: 999424 - DNA, 120 bp, Artificial Sequence; identical to SEQ ID NO: 949270
  ENSG00000274044_9 (sequence is synthesized)

SEQ ID NO: 999425 - DNA, 120 bp, Artificial Sequence; identical to SEQ ID NO: 949271
  ENSG00000274044_10 (sequence is synthesized)

SEQ ID NO: 999426 - DNA, 120 bp, Artificial Sequence; identical to SEQ ID NO: 949272
  ENSG00000274044_11 (sequence is synthesized)

SEQ ID NO: 999427 - DNA, 120 bp, Artificial Sequence; identical to SEQ ID NO: 949273
  ENSG00000274044_12 (sequence is synthesized)

SEQ ID NO: 999428 - DNA, 70 bp, Artificial Sequence
  ENSG00000274044_13 (sequence is synthesized)
cggcatcgccaacgaggatgctgcccacggcattgctaacgaggatgccgtgcacggcatcgctaatgag

SEQ ID NO: 999429 - DNA, 120 bp, Artificial Sequence
  ENSG00000274044_14 (sequence is synthesized)
aggatgctgcccacggcattgctaacgaggatgccgtgcacggcatcgctaatgaggactccgtatacgacatcgctaatgaggatgccatatatgacatcgctaatgacaccgtacaag

SEQ ID NO: 999430 - DNA, 120 bp, Artificial Sequence
  ENSG00000274044_15 (sequence is synthesized)
gctgtacacgacatcgctaatgaggacaccatacaaggcattggtaatgaggacgttgtatatgacatcgctaacaaggacactctacaagccgtcgctaacaaggacactgtacacaac

SEQ ID NO: 999431 - DNA, 120 bp, Artificial Sequence
  ENSG00000274044_16 (sequence is synthesized)
gagggcgctttatacgacattgctaatggcaccgacaaggcacgctaacgtggacactgtacacgacattgctaatgaggactccgtatacgacatcgctaatgagggtgccgtatatga

SEQ ID NO: 999432 - DNA, 85 bp, Artificial Sequence
  ENSG00000274044_17 (sequence is synthesized)
gctgtacacgacatcgctaatgaggacaccatacaaggcatcggtaatgaggacgctgtatacgacatcgctaacgaggacacca

SEQ ID NO: 999433 - DNA, 120 bp, Artificial Sequence
  ENSG00000274044_18 (sequence is synthesized)
aatgaggacgctgtatacgacatcgctaacgaggacaccatacaagccgtcgctaacaaggacactgtacacaacatcgctaatgatggcaccgtacaagacatcaccaatgagggcgct

SEQ ID NO: 999434 - DNA, 120 bp, Artificial Sequence
  ENSG00000274044_19 (sequence is synthesized)
ttatacgacattgctaatgataccgacaaggcacgctatcgtggacgctgtacacgacatcgctaatgaggactccgtatacgacatcgctaatgagggtgccgtatatgacatcgctaa

SEQ ID NO: 999435 - DNA, 120 bp, Artificial Sequence
  ENSG00000274044_20 (sequence is synthesized)
accgtacaaggcacgctaacgaggacgctgtacacgacatcgctaatgaggacaccatacaaggcatcggtaatgaggacgctgtatacgacatcgctaacgaggacaccatacaagccg

SEQ ID NO: 999436 - DNA, 120 bp, Artificial Sequence
  ENSG00000274044_21 (sequence is synthesized)
ttatacgacattgctaatgataccgacaaggcacgctaacgtggacgctgtacacgacattgctaatgaggacaccgtataagacatcgctagtaactatcgcaagaacaaaaaaccaaa

SEQ ID NO: 999437 - DNA, 120 bp, Artificial Sequence; identical to SEQ ID NO: 985066
  ENSG00000274044_22 (sequence is synthesized)

SEQ ID NO: 999438 - DNA, 120 bp, Artificial Sequence
  ENSG00000274044_23 (sequence is synthesized)
cgacatcgctaatgacaccgtacgaggcacactaacaaggatgctgtacacaacatcgctaatgaggacagtgtataagccatcgctaatgaggacactgtatatgacattgctaacgag

SEQ ID NO: 999439 - DNA, 120 bp, Artificial Sequence
  ENSG00000274044_24 (sequence is synthesized)
gacactgtacaaggcattgctaacgaggacgctgtacacaacatcgctaatgacaccatataagacatcaccaatgaggatgctgtatatgacatcgctaatgacacccacaaggcatgc

SEQ ID NO: 999440 - DNA, 120 bp, Artificial Sequence
  ENSG00000274044_25 (sequence is synthesized)
taacgaggacgctgtagacgacattgcttataaggacaccgtacaagacatcactaacgaggacgctgtatacgacatcgctaatgaggacgttgtatatgacatcgctaatgaggatgc

SEQ ID NO: 999441 - DNA, 120 bp, Artificial Sequence
  ENSG00000274044_26 (sequence is synthesized)
tttacaagacatagcgaatgaggttgctgtatatgacatcgctaatgaggacattgtatatgacatcgctaatgaggacgctctatacgacatcactaatgaggacgctgtatacaacat

SEQ ID NO: 999442 - DNA, 120 bp, Artificial Sequence
  ENSG00000274044_27 (sequence is synthesized)
cgctaatgaggacgctgtatatggcatcgctaatgaggatgctgtatacgaattcgctaataaggacgctgtatatgacattgctaatgaggacactgtacaagacatctgtaaaaaaga

SEQ ID NO: 999443 - DNA, 120 bp, Artificial Sequence
  ENSG00000274044_28 (sequence is synthesized)
agatgctgccaatgagccattgacactggagaatgatacctaccctgaaataactcacttcctgaggaaaaaacgccatctctaggatttgattgtggagagcatatctgatgatgggga

SEQ ID NO: 999444 - DNA, 120 bp, Artificial Sequence
  ENSG00000274044_29 (sequence is synthesized)
tcataagtcatccagtgggctaggcacggtggctgacacctataatccccacactttcagcctgccaaagtgcctttttttgtgcctttcacataaagactatgacacagctaagctatt

SEQ ID NO: 999445 - DNA, 120 bp, Artificial Sequence
  ENSG00000274044_30 (sequence is synthesized)
catgtactaataaatacctgccctgagctgtgtgaccacggacaccaccctataatgtggccagtgtgtaggaactctgcaggctcagatcattccagacatacatgcagatgttggaac

SEQ ID NO: 999446 - DNA, 120 bp, Artificial Sequence
  ENSG00000274044_31 (sequence is synthesized)
tcccttgcacagtgactcatgatcccaaggctgagtgctgagggcaggattaacctcagcgattgttgctggcatcagtgcagccctgggaccagagcacacctgggtgactcgaagaag

SEQ ID NO: 999447 - DNA, 120 bp, Artificial Sequence
  ENSG00000270755_0 (sequence is synthesized)
aataaattaagaggtggagctactaaacaaaaaacaaaacaaaaaaaaacctcttgcagataaacctccaactctacttcctttgttgggcagttacaataaatttaagttgtcaaaact

SEQ ID NO: 999448 - DNA, 120 bp, Artificial Sequence
  ENSG00000270751_0 (sequence is synthesized)
caatttacagccctctttaccactaattaagagtgtcaaactgacaataccgaataccataattagcatgacaatgtttaaagggagcaatgaaatgaagtctcgttgaaactggggttc

SEQ ID NO: 999449 - DNA, 120 bp, Artificial Sequence
  ENSG00000270751_1 (sequence is synthesized)
catatgttttacttgtgttggttcacaactatcaatgagttcatctaaagcaagcaatttctctggtccactccagctctatcaaagagaattagaaatttttattgttttaacagatgt

SEQ ID NO: 999450 - DNA, 120 bp, Artificial Sequence
  ENSG00000270751_2 (sequence is synthesized)
cccaaattacaggcttataaaggaaaactcacatctacacacaaccatagttgatcagggtagaactgtataaaaagtggctccttatagtgacattttttccacaaggcattgaagaag

SEQ ID NO: 999451 - DNA, 120 bp, Artificial Sequence
  ENSG00000265289_0 (sequence is synthesized)
ttctttctttcttttttgagacagaatctggctctgtcgcccagtgagactcctatctctatttttagaaattaaaaataaataagataaatgtatatctatactggtagacatgaaggg

SEQ ID NO: 999452 - DNA, 120 bp, Artificial Sequence
  ENSG00000265289_1 (sequence is synthesized)
ttatctagtggttttagcataaccagtattttaactgtatatgtgtactgagaaacttgaagccaagttaattaccacagtttaaataagaacattcttatattttacctttcttcatag

SEQ ID NO: 999453 - DNA, 120 bp, Artificial Sequence
  ENSG00000265289_2 (sequence is synthesized)
gcctctgtcggacttggaaagcattttggctaaactaggatacaaacaggataataaagcacggaagatatatgttcattgtgctagctagcattctgtgtttattccaaaaaaagtcca

SEQ ID NO: 999454 - DNA, 120 bp, Artificial Sequence
  ENSG00000265289_3 (sequence is synthesized)
gcgtcttctattaaaacaggtttactttgaggctaagcatgatattaagggaaaatgcagtgattcagcagtggtgcatccctgtaaagccagccactcaagaggctgaggcaggagtat

SEQ ID NO: 999455 - DNA, 120 bp, Artificial Sequence
  ENSG00000261291_0 (sequence is synthesized)
actaatggtttagtagaaacttggctctaaatttattatgcattctatggtacctaactgccttttactcacagcaaaaaaataacaaaagttcatagagcacctattgtgtattaggtt

SEQ ID NO: 999456 - DNA, 120 bp, Artificial Sequence
  ENSG00000261291_1 (sequence is synthesized)
ggtgcaaaactttcagtggcaaaaattgcaattattttgcaccaacctatcaggtattgtgctaagtacttaaaagtacaagtataaagagactatttttgggagtggaggggcagacag

SEQ ID NO: 999457 - DNA, 120 bp, Artificial Sequence
  ENSG00000261291_2 (sequence is synthesized)
aacatataaataaatgaaataaaacttttttgtagagatggatctcactatgttgcccaggacagtcttgaactcctggcctcaagcagccctcccaccttgacctcccaaagcactgga

SEQ ID NO: 999458 - DNA, 120 bp, Artificial Sequence
  ENSG00000261291_3 (sequence is synthesized)
attacaagcatgagccatggcttctggctaaagaggactttaaggctagatctcaactggtgtttttgttatgttacaagaaaaaaggtagctccaagtcagcttaaacaatatcagaaa

SEQ ID NO: 999459 - DNA, 120 bp, Artificial Sequence
  ENSG00000261292_0 (sequence is synthesized)
aagagagatgataattgtaacaaaggccttgagagatagaggggttgcgatttaaagcataagtagggaggttaatttttgataggtgccggaatatagaactccaatgaaaggaaggca

SEQ ID NO: 999460 - DNA, 120 bp, Artificial Sequence
  ENSG00000261292_1 (sequence is synthesized)
gaatgtgtaatgtgcaaataggttggtatatttgtggtagaaagggaaggatgtcactacgtaagtttttttttaattttaccaagaatgagataaaagccaatatgcaggatgggaagg

SEQ ID NO: 999461 - DNA, 120 bp, Artificial Sequence
  ENSG00000261292_2 (sequence is synthesized)
acgtataggttggaagagacatatgtaagtagttggatagtaggaaagtgaatatatatttgatgaaatattttaaaggcatctttactaaatatttttgagacatcttattggaagacc

SEQ ID NO: 999462 - DNA, 120 bp, Artificial Sequence
  ENSG00000261292_3 (sequence is synthesized)
cgaaactttgaattctgtggtttccaaggactctggtaagagtcctttccataatgtagagattgagaacttctcaatgccataaatactgttttccttattttcatctattacagatta

SEQ ID NO: 999463 - DNA, 120 bp, Artificial Sequence
  ENSG00000261292_4 (sequence is synthesized)
aaaggcagaaacattttgtagctaatctgttataatgcaaagcctatcaaacttaaaattagcttaatcctgaaagatgtatattgcataatcaacctgtcacttttttcaaacacgatt

SEQ ID NO: 999464 - DNA, 120 bp, Artificial Sequence
  ENSG00000261292_5 (sequence is synthesized)
tgggagggtattgaggtcccatgtaaattttaaaataaaagacaaacaggaactaatcttttagtaaaaattattttgttttcatataggaaaacaatgccttctgtcatttacggaaaa

SEQ ID NO: 999465 - DNA, 120 bp, Artificial Sequence
  ENSG00000261292_6 (sequence is synthesized)
cacatgggcaatatggttggttgttcattgtgcccctctatcctataggaagaatgtgatcttttaattgtgcttggtgctttgtttctggagatatatatatatatattatatatatgt

SEQ ID NO: 999466 - DNA, 120 bp, Artificial Sequence
  ENSG00000261292_7 (sequence is synthesized)
atatataccatatgtatatatacatatgtatgtgtgtatgtgtgtatatatatctctctaggttgtatgtaattcaatatgttggaatttaaagatgcattattatttggatttgatgtg

SEQ ID NO: 999467 - DNA, 120 bp, Artificial Sequence
  ENSG00000261292_8 (sequence is synthesized)
tgtatttgattaaacactttaaattttaaatggccgcatcaaattttaaatggtagatgatatcaacaattgcagtgcactcaaaatgttataaaatctttgtagcacaaatcctgaagt

SEQ ID NO: 999468 - DNA, 120 bp, Artificial Sequence
  ENSG00000261292_9 (sequence is synthesized)
atatgcaaactaaatagcatatttatataaaatacctagataacatgtctaggttgagatatttaatccctcatagagctatatttgactaataaaaaacgacagctaaaaataatttcc

SEQ ID NO: 999469 - DNA, 120 bp, Artificial Sequence
  ENSG00000261292_10 (sequence is synthesized)
ctccctataagtacaaatatgatttttaaagcatcattgtaacttgtcatgaagctatttattattaattaaggatttaactctgtacccatctgctcttacaaaaggggaaaaagattt

SEQ ID NO: 999470 - DNA, 120 bp, Artificial Sequence
  ENSG00000261292_11 (sequence is synthesized)
atctatgagaatagggaagtatagcactgttttatgtttttctctttagtattctgtcaccatttaaagcttcaatatatgccttccactcaggttcctgacacagcctacattctcttt

SEQ ID NO: 999471 - DNA, 120 bp, Artificial Sequence
  ENSG00000261292_12 (sequence is synthesized)
tctggttataatcacaatatggtagagctataaacaaggtaaaaaggtgttaacaattgaactgcaatcctacctattatctactttactatagcagtgaagtagtccagacttatttga

SEQ ID NO: 999472 - DNA, 120 bp, Artificial Sequence
  ENSG00000261292_13 (sequence is synthesized)
aggtggtactatttttatcttacaaaaatctactataatattaataactttccatgtaaattttcatgtgctggcatgcttacaagttaatagtgttatagaatgctcagctctcaatat

SEQ ID NO: 999473 - DNA, 120 bp, Artificial Sequence
  ENSG00000261292_14 (sequence is synthesized)
gaggggttgtttgtggtgaattgcataacatatgtcatctatttgctgaaagaatatgctgtttagcaaactacctgctgagcaacataataagatttttgtacaaggtacaaattacta

SEQ ID NO: 999474 - DNA, 120 bp, Artificial Sequence
  ENSG00000261292_15 (sequence is synthesized)
attattgtattttatttttctatgatttcctaagaggcattatcagggtcttacagatggagtaagcctgtttattaaaatatctattggcaaataaaagttacagctttggtggttgaa

SEQ ID NO: 999475 - DNA, 120 bp, Artificial Sequence
  ENSG00000261293_0 (sequence is synthesized)
ttgcaacctccagctcccaaataaccatatattcaaacgaaattaactcaagagtagaaactttgttgttaaaaaggaggtgaagggagacaaggctgttgtaaacaccaacaaatatca

SEQ ID NO: 999476 - DNA, 120 bp, Artificial Sequence
  ENSG00000261293_1 (sequence is synthesized)
actgaatgaattttgattaagatctagtaaagtagtaccagtgagctggtttccgcagcagtgacggtacttccgcagctacggagtcaggatcacttagtctggtgcattccacagcct

SEQ ID NO: 999477 - DNA, 120 bp, Artificial Sequence
  ENSG00000261293_2 (sequence is synthesized)
tgaaagcaaaggaacttctccccaggaaaatccacgtatgtgcacaaacacacaagcacgattttgcacacaattgcaagaggtatctgaaatctctaaaactatctatgagcctccaat

SEQ ID NO: 999478 - DNA, 120 bp, Artificial Sequence
  ENSG00000261293_3 (sequence is synthesized)
gaggttcccagatacaacagacacttcatataactcccaggaatccaccaaggggataatattaccaccatttcaaggactgggaaaacgagttcagagaaattaaagcatttgcccggg

SEQ ID NO: 999479 - DNA, 120 bp, Artificial Sequence
  ENSG00000261294_0 (sequence is synthesized)
cactacctggaacacggtgacgatggcccacagcagggagtcgaagttcttcctgtcaggcacggtgtctccggtgtctgtcttcaggctgaacttgcagccgaaaaggcgagagaacca

SEQ ID NO: 999480 - DNA, 120 bp, Artificial Sequence
  ENSG00000261294_1 (sequence is synthesized)
gcccggcctgcctggctgcctagcctccagccgaccctgaccctgagctccaggctagacgggcacacagcaggcgctcagaacaccccagttggagcctggtgcctgcccccacccccg

SEQ ID NO: 999481 - DNA, 120 bp, Artificial Sequence
  ENSG00000261296_0 (sequence is synthesized)
tatatgaggaaattcacctctggggtggcaatgattaacttaatatacatccagctattaaaaatgatgatgccaggatatatttactgccatagaagcaagcccaaaatatagagtgtt

SEQ ID NO: 999482 - DNA, 120 bp, Artificial Sequence
  ENSG00000261296_1 (sequence is synthesized)
aattcctactcacccttaaagactcagcttaaataaccccttctctgctctcatacaaagatgacccaaggacagaggcaacagagggcagtgcagggtagtgcaagaagctctggctct

SEQ ID NO: 999483 - DNA, 120 bp, Artificial Sequence
  ENSG00000261296_2 (sequence is synthesized)
aggactaattggacgaggtctgaatcttaactctggcacctgttagtgaagcagcctcaagcaaatcacttaatgcttctgtacttcctttattgttttgtaaataaagaaaattcaatc

SEQ ID NO: 999484 - DNA, 120 bp, Artificial Sequence
  ENSG00000261296_3 (sequence is synthesized)
ttcttaaaggggttatgtgtacaaatacatagttcaaaaaatttaaaaatataactataaaagtatgtggcaaaatcccattcatatcctattctccctccacagccaaacacttttaat

SEQ ID NO: 999485 - DNA, 120 bp, Artificial Sequence
  ENSG00000261296_4 (sequence is synthesized)
tggtttcttatgtatcattttggaatttatatttgcaaatacacatgtatattcttattctactcttctctctcaacacagaaagtagcagaccatatatattataccattccttgttcc

SEQ ID NO: 999486 - DNA, 120 bp, Artificial Sequence
  ENSG00000261296_5 (sequence is synthesized)
tttttaaaaacacacaaaatatatctgagttcttctacatgagtacataggtctttctcattcttctttacaactacacagtattccatcgtttggatgtaccatagtttattgaaccag

SEQ ID NO: 999487 - DNA, 120 bp, Artificial Sequence
  ENSG00000261296_6 (sequence is synthesized)
ttccctgttggtggacactgaagtcatccttatcatactatcacaaacaatattggcaaggcaagcataaccacctacacacaccaagttcatttctgaatgtgcctttgatgaagcttc

SEQ ID NO: 999488 - DNA, 120 bp, Artificial Sequence
  ENSG00000261296_7 (sequence is synthesized)
tgtttaaatctccacaagatcacaaggctgaaaagttagcccctttttcagttttcattatgtacagcagtatgtagcaaaagactcccttgagcaaagcaaatgtactctttgaggatt

SEQ ID NO: 999489 - DNA, 120 bp, Artificial Sequence
  ENSG00000261296_8 (sequence is synthesized)
tatttcataaaataaatggataaacagaacacccagcataacaatttctatttaacaatgcatatgtatgtatacaatacatgcatatgcatagaaagtataaaataaatccgtcaaagc

SEQ ID NO: 999490 - DNA, 120 bp, Artificial Sequence
  ENSG00000261296_9 (sequence is synthesized)
attaagcattgtctcagtatgctggacctatggagtgctttgtagattccccctccttgtctatcagttctaatttcacaacagtgaatatgtacaatttttgcaatataaaatttcaaa

SEQ ID NO: 999491 - DNA, 120 bp, Artificial Sequence
  ENSG00000261296_10 (sequence is synthesized)
aaatgttaactcacattaagctggatacattctttcagtctgtcctacatttgtatagtgctccagtgtgttcaaatatcacttcattttaaaatattttttttcaaatatagagacaga

SEQ ID NO: 999492 - DNA, 120 bp, Artificial Sequence
  ENSG00000261296_11 (sequence is synthesized)
cagggtcttgctcagtcgaccaagttggtcttgaactcctagattctcctggatcctcccacctccgcctcccaaagtgctggtattacaagtgtgagccatcacgcccaaccagcttca

SEQ ID NO: 999493 - DNA, 120 bp, Artificial Sequence
  ENSG00000261296_12 (sequence is synthesized)
tttgagaaacctttcccaagcactccatatattactaattattcctttcttcatttttatataggattttcttcatatctctattacctcacttgtcacatgataatcagttactcaccc

SEQ ID NO: 999494 - DNA, 120 bp, Artificial Sequence
  ENSG00000261296_13 (sequence is synthesized)
atctgtctcccttgattgctcgtgggctccttgagcaatgtgcgaccttgaacagtgtgtgacacatacatgcttcctacacagagaaggaaatgatttcgctacagtgtcaatcattac

SEQ ID NO: 999495 - DNA, 120 bp, Artificial Sequence
  ENSG00000261296_14 (sequence is synthesized)
cagaattcaatacctgtatttctaaatcgttctagatactctgccaacaacttgagaatgttacgctctttccctaaaacttccatccattccagccatagttaactcaattgtgacatg

SEQ ID NO: 999496 - DNA, 120 bp, Artificial Sequence
  ENSG00000261296_15 (sequence is synthesized)
ctctctggccaagcccatttgtagttttttctttaggtgatttttaattttaatttttgattttgattgtttgctttttggtattttttaatctaggagtgtttggtaaacttcaccatg

SEQ ID NO: 999497 - DNA, 120 bp, Artificial Sequence
  ENSG00000261296_16 (sequence is synthesized)
taagagttgagaattcctctactcttgaaatgtttgtgcctctattactatgtatcaggcagtgaactaagcgtctaggatagaaagatgaaacggtagaacctgccctcatggagcgca

SEQ ID NO: 999498 - DNA, 120 bp, Artificial Sequence
  ENSG00000261296_17 (sequence is synthesized)
tggtctagtatggaaaacagccatatgaacaaataaccacactataatattaaatgcaataccaaaagggaaatgtattgaatatttgacatgtgtcaattaccttgttagataccttat

SEQ ID NO: 999499 - DNA, 120 bp, Artificial Sequence
  ENSG00000261296_18 (sequence is synthesized)
taacaattatctatgatcatattagatacgtatttgaattggacagaaggccatgaaactctaggactgctagagtttgttatgctctcaattgtcttctaaagaaactgtctcctaatg

SEQ ID NO: 999500 - DNA, 120 bp, Artificial Sequence
  ENSG00000261296_19 (sequence is synthesized)
gttctttctgaatatgctatagtcatacaactattgtgcaactgtagcatacacaaaaagcatatctgtagcatactcatgtgaccaataatgcataaaaccaaccttacttctttggcc

SEQ ID NO: 999501 - DNA, 120 bp, Artificial Sequence
  ENSG00000261296_20 (sequence is synthesized)
acaagtaactggaccaaggctcagtgtttcagctaaggacaacatataggttgaacttcagggacaatcgccaaggacatggcatggctcaaaattctctctaataggggccttccgttt

SEQ ID NO: 999502 - DNA, 120 bp, Artificial Sequence
  ENSG00000261296_21 (sequence is synthesized)
ttagaaggtgacaggctaacccaatcagatattctctcttggaaaatacaaatgttgggtgaacaaaggaaaagagggcaggttttcagagctcaaatcctatcctaaatactgctaaat

SEQ ID NO: 999503 - DNA, 120 bp, Artificial Sequence
  ENSG00000261296_22 (sequence is synthesized)
taatgttctgtgaagttttgaaagtactagggccaagaaacaatatggctacttagatgacttcccatccaagtttacattcggccctcattaccaaaggtgataagtgtgtgcctcttc

SEQ ID NO: 999504 - DNA, 120 bp, Artificial Sequence
  ENSG00000261296_23 (sequence is synthesized)
cttgcaacccatcagggtctaacacatcatatcgccacttctgaaattaggaaataggctcagaagtccaagagcttgaccagagtaattcacttggtaggtagcagaaccagaattcaa

SEQ ID NO: 999505 - DNA, 120 bp, Artificial Sequence
  ENSG00000261296_24 (sequence is synthesized)
agagcaagtcggcgtgattcttctccaatatcctgccagttacatgggcaagtggcctcaaaatcaacaaaagacaagtagaggttgacatgtgtcaatggaaagaggctcaaaaggaag

SEQ ID NO: 999506 - DNA, 120 bp, Artificial Sequence
  ENSG00000261296_25 (sequence is synthesized)
agtttgtacacaagaatagaacagaaacgttctggaagtatgtctggggatgtgaagtaggaaggggcacaccaggtttcaccttggtcaagtgactgtctaattcccccgagctccaga

SEQ ID NO: 999507 - DNA, 120 bp, Artificial Sequence
  ENSG00000261296_26 (sequence is synthesized)
ctcagctatctgtctttctcactctaatataaaatccacagggcaggaccttaatctctagcttgttcaccacagattaaagcagagtctggcttaatagtaagtgcttaataaatatat

SEQ ID NO: 999508 - DNA, 120 bp, Artificial Sequence
  ENSG00000261296_27 (sequence is synthesized)
gaatgaataaatgaatgaacattccacattgttgggggaaggggttatcatgaaccagaccctagcagtcacttacaaatacagttgatcctcattatttgtggatcctatatttgcaaa

SEQ ID NO: 999509 - DNA, 120 bp, Artificial Sequence
  ENSG00000261296_28 (sequence is synthesized)
tttgcttacttgctaaaatgtgtttgtaatctccaaattaatacttgtggagctttcaaggtgattcatggacatacacacagtagtgaaaaatctgtcactccttatgcacgttccaag

SEQ ID NO: 999510 - DNA, 77 bp, Artificial Sequence
  ENSG00000261298_0 (sequence is synthesized)
aagaggtccttacaatcatggcaggaggtgaagaagaagcaagtaccttcttcacaaagcagcaggaaagagagaag

SEQ ID NO: 999511 - DNA, 120 bp, Artificial Sequence
  ENSG00000261298_1 (sequence is synthesized)
caggaggtgaagaagaagcaagtaccttcttcacaaagcagcaggaaagagagaagtgcaaaggaggaacttccaaacacttataaaaccattggatctcatgagaactcactcattatc

SEQ ID NO: 999512 - DNA, 85 bp, Artificial Sequence
  ENSG00000261298_2 (sequence is synthesized)
atgagaactcactcattatcatgagaacaatatgggggaaacagcccctaggatccaatcatctccctccctcaacaagcaccag

SEQ ID NO: 999513 - DNA, 120 bp, Artificial Sequence
  ENSG00000261298_3 (sequence is synthesized)
gaaataaaggagtgattgtgtttgtgtttcagatgaaatgagagtggctcttatcctggataactatcggttggctaattggctggatccctcactggattataaggaacactgtcatga

SEQ ID NO: 999514 - DNA, 120 bp, Artificial Sequence
  ENSG00000261298_4 (sequence is synthesized)
catgtagaatcgtactaggaaactaattcaaactcaataaacatttgttgaataaatacaagaatgaacagcacacagcagctgcaggaggacagggaatgctttggatttgagagctgg

SEQ ID NO: 999515 - DNA, 120 bp, Artificial Sequence
  ENSG00000261298_5 (sequence is synthesized)
gctgataacagacatttatagacagtagcaataggaccctttttgctgtttatccatcaaccctcaaatcccaagtagagtactggacttcccacagttaatggggaaggagctcaagca

SEQ ID NO: 999516 - DNA, 120 bp, Artificial Sequence
  ENSG00000261298_6 (sequence is synthesized)
gttccatttggacatgaacagaaaaggcccccaaaagaccacataactcaggggcaatcagtttccatcatttttttatagttatctttcatattagattttttcaggtaaaatttacat

SEQ ID NO: 999517 - DNA, 120 bp, Artificial Sequence
  ENSG00000261298_7 (sequence is synthesized)
atagtaagtgaaaggcaaatatcctaagtgtacttgatgcgttttgacagtattctctcatgttaccaacatataaacaaaatatagaacatttccatcacccaagtaagttccctttgt

SEQ ID NO: 999518 - DNA, 120 bp, Artificial Sequence
  ENSG00000261298_8 (sequence is synthesized)
gcccctcttccagtcaatgcccaacacctttctcacagacaacacgttttcttatgtcattcaccatagattcatttaacctgtcacaaatgtcatataaataaagtcaatagcgcacac

SEQ ID NO: 999519 - DNA, 120 bp, Artificial Sequence
  ENSG00000261298_9 (sequence is synthesized)
gtgcagttgttgatggatatttgggtatttgcttttgtccattatgaataacttctgtaaacattcttgtacaagtcttttgtttaaatatattttcactactcttgagtaaacacagat

SEQ ID NO: 999520 - DNA, 120 bp, Artificial Sequence
  ENSG00000261298_10 (sequence is synthesized)
aaatggattcgtattatacatatttaaattcataagaatctaccaaatggttttgcaaagtggttatagcattttacgcttccattggtcatagatgacggttctagttgctctgcacct

SEQ ID NO: 999521 - DNA, 120 bp, Artificial Sequence
  ENSG00000261298_11 (sequence is synthesized)
ttgtcaacatttgggtctgtcagtctttataattttaagttttttatacaccttgactttactgacaagcctttaaattttagagattctagtgtgtatgaagtcatatctcattgtggt

SEQ ID NO: 999522 - DNA, 120 bp, Artificial Sequence
  ENSG00000261298_12 (sequence is synthesized)
ttgaatttgtattttcctaatgtctaatgatgtttagcacattttcatgagcttattggctattcctatatcttctgttgagaagcttcaattaaagccatttgcccatgtttgatagaa

SEQ ID NO: 999523 - DNA, 120 bp, Artificial Sequence
  ENSG00000266010_0 (sequence is synthesized)
aaagagactagaagttggtccgcggtgtcccgggagcctgggagccgcctcagcccgcccggagggaaggagggaaacaccgtcggagccgaccgcggcctggagagggccggagagccg

SEQ ID NO: 999524 - DNA, 120 bp, Artificial Sequence
  ENSG00000266010_1 (sequence is synthesized)
gaggccaggggcccgcgacgagtaggggtggaggggaggaaagcggggagatcgcgcgaggaggaagcagccgaacctcgggcgggcgctgcgcatggagaacggccgcggcggagggtg

SEQ ID NO: 999525 - DNA, 120 bp, Artificial Sequence
  ENSG00000266010_2 (sequence is synthesized)
ctcccaggcgcggagagaagccgagggcgccagcgggcgagcgcgagtccggggtctgcgccgcgctgctggtgaataaaaaggagagaggaggcgcctcttactgctctgccggaaaac

SEQ ID NO: 999526 - DNA, 120 bp, Artificial Sequence
  ENSG00000266010_3 (sequence is synthesized)
cggaactgcgctcagcgagcagctgggcgctggagttgtgtgagaccgaccttaaactttctccgaccctatctcgggatgctacggctcaggtcgtggtggtttcgggaacctcaagac

SEQ ID NO: 999527 - DNA, 120 bp, Artificial Sequence
  ENSG00000266010_4 (sequence is synthesized)
aacattccccagctgacctttgggaactttaactcgggtcgtcatgtacggaaaggtagtctatggggtacgcagaatggaaaagggcttccacatcagtcgtgtccgaggacgctctcc

SEQ ID NO: 999528 - DNA, 120 bp, Artificial Sequence
  ENSG00000266010_5 (sequence is synthesized)
aacttttgatgtccctggagagtttctgatatttccctggagagtttcagtttcagcgtggccgcatttggaaaaggctgaaggtagaaaactctggaatggagaggctggcgactggag

SEQ ID NO: 999529 - DNA, 120 bp, Artificial Sequence
  ENSG00000266010_6 (sequence is synthesized)
catttggaaaaggctgaaggtagaaaactctggaatggagaggctggcgactggagcaggatccaggggctttaaattttaacctgaatgcgatcgaatgcgcgactcccagaagagata

SEQ ID NO: 999530 - DNA, 120 bp, Artificial Sequence
  ENSG00000266010_7 (sequence is synthesized)
aggctcgtccgctgcaggagccgtgatatatgtctcgctccctttcgcttacagaaaggatttcttccgacagacgtgaccccagaaggctgccgagggagactttaggacaagaggcgt

SEQ ID NO: 999531 - DNA, 120 bp, Artificial Sequence
  ENSG00000266010_8 (sequence is synthesized)
tgtttttttagggaaggaagaggagcctgtgcagagttgaactggggtggagaggtgccttgtaaagtatggtttccagagatggtgagacctcgtagctaagcgttgtttcctctgcac

SEQ ID NO: 999532 - DNA, 120 bp, Artificial Sequence
  ENSG00000266010_9 (sequence is synthesized)
tcgataccccccggggacctgcttttcccgcagctccgcagacgcggcgggagggcgcgctggccccggcgctgctgggacagaggtgagcagcggggtggacattgaccgattcgacaa

SEQ ID NO: 999533 - DNA, 120 bp, Artificial Sequence
  ENSG00000266010_10 (sequence is synthesized)
cgttcgggctctaagggctcgggaagggacccggcattttaccctccagattcccaatctatttttaaaaataatgttcaaaacatatgggaaaaataagtgattgctccttttcatggt

SEQ ID NO: 999534 - DNA, 120 bp, Artificial Sequence
  ENSG00000266010_11 (sequence is synthesized)
cacagattgtatttattttttcagactggttttccaacctaacgagggaatgggtagtgaatgttgttgttgttgttgttgtttatgttggttaatttcgaaataaaactgtttaactcg

SEQ ID NO: 999535 - DNA, 120 bp, Artificial Sequence
  ENSG00000266010_12 (sequence is synthesized)
tccgcccggccgctcaacccccgccaggactcggaatgccttgcttttggttcttttccctgttatctaggccacccaatgaccgacgaaagattttccctccctgcttctcccgtggcc

SEQ ID NO: 999536 - DNA, 120 bp, Artificial Sequence
  ENSG00000266010_13 (sequence is synthesized)
aatcccgataaagaaattccgcgccggcgccggcctccctccccgcggcctggttgctccctgacgccctgagaccccgacttcggcggccgcagacctcggacgggcccggcgggacct

SEQ ID NO: 999537 - DNA, 120 bp, Artificial Sequence
  ENSG00000266010_14 (sequence is synthesized)
gtggctgccgcctggggaaggtggaggtccccgggctgcggggccagggagtgccaggccctaggagacgggcggacaagggggtccccgggagctctggagctccaggtgggagctggg

SEQ ID NO: 999538 - DNA, 120 bp, Artificial Sequence
  ENSG00000266010_15 (sequence is synthesized)
tatcctaaaacggcccccgtgcacttcgcggaaaaactaagccaagctcagggggccgaaattaccactccgttttgattattttctgatactaaataataaagataaaaccaaactgcc

SEQ ID NO: 999539 - DNA, 80 bp, Artificial Sequence
  ENSG00000266010_16 (sequence is synthesized)
acgtcaggtggtggcggcggaaacttgcaggtcgcccccacccccagcgccggctcccgccggcggccacttcggggaag

SEQ ID NO: 999540 - DNA, 120 bp, Artificial Sequence
  ENSG00000266010_17 (sequence is synthesized)
gcccccggccgacccccgtgcgccgccggcggccgccagcacggcgcggaggtgggctagcggcggcggcgcacgaaaggtcaccgcggtggcattcctctccgcgctgtttacgtgact

SEQ ID NO: 999541 - DNA, 120 bp, Artificial Sequence
  ENSG00000266010_18 (sequence is synthesized)
taatgtactcgctgcgccgcggcctgttatctaggccacccaatgaccgacgaaagattttccctccctgcttctcccgtggccgctttaaaccaaataaatttagctattaagggccaa

SEQ ID NO: 999542 - DNA, 120 bp, Artificial Sequence
  ENSG00000266010_19 (sequence is synthesized)
agaggcgttgtttttgtgagaatgaatttttatactttaccccgaccccaccccctaccccccgcccaggtaaatccaagtaaatgattttctgaaggtcggtctcctagaaagcgttta

SEQ ID NO: 999543 - DNA, 120 bp, Artificial Sequence
  ENSG00000266010_20 (sequence is synthesized)
ggctctggttttttgttttgtttctattttcgtgttttcccagttagggaaggaagaggagcctgtgcagagttgaactggggtggagaggtgccttgtaaagtatggtttccagagatg

SEQ ID NO: 999544 - DNA, 120 bp, Artificial Sequence
  ENSG00000266010_21 (sequence is synthesized)
gtgagacctcgtagctaagcgttgtttcctctgcacgtaactgtgagttgtgaacttgtggctcctgggggagcgggacagggcctggcagtgcgggggagggggcaaggaattcaggaa

SEQ ID NO: 999545 - DNA, 120 bp, Artificial Sequence
  ENSG00000266010_22 (sequence is synthesized)
gttggcgagaattcttcgtttttcattcttcgttgtaaattgcttctaaacacttctgaattttaaattgctaccgagaaggtccagaaaccgttctcatccaatttagtcacttttatt

SEQ ID NO: 999546 - DNA, 120 bp, Artificial Sequence
  ENSG00000266010_23 (sequence is synthesized)
ttttggttcttttcgtgagttccgaccaaatgtttaagtggactgggttttgcagaagctcatttgtaagcactgacggaaatgggttgtgggcatttgatttcctttgattccaacgtt

SEQ ID NO: 999547 - DNA, 120 bp, Artificial Sequence
  ENSG00000266010_24 (sequence is synthesized)
ttgaaataatgtttctcggatttgctattcgaagcaattttctaaaaactcatatcttatttgctaaaaataaactctttggctcagtttgtgtccaggctgtgtacggcctccaaccct

SEQ ID NO: 999548 - DNA, 120 bp, Artificial Sequence
  ENSG00000266014_0 (sequence is synthesized)
attgccaggaaccatgccacaccataccagtcagtgagccaggctggttcttcttatcacaaaagatcaaatgcccaggaatatgagtcatctgaagattcctgctaatgagcagagccc

SEQ ID NO: 999549 - DNA, 120 bp, Artificial Sequence
  ENSG00000266014_1 (sequence is synthesized)
tgcacgagggttgacaagactgaagcccagagttctttgtccatgaatgttggacaagaatgagcagtgcctgcttctcttaacttcgaatctgctttagcagaaagagcttaatggaaa

SEQ ID NO: 999550 - DNA, 120 bp, Artificial Sequence
  ENSG00000266014_2 (sequence is synthesized)
agcatgccctgcacttctgttttccatgaggagccagaagtcatcagcaaagctgcagcccaagatgagagaagccattcgcctcctggggcctccatggagtgaatgcctttaagatga

SEQ ID NO: 999551 - DNA, 120 bp, Artificial Sequence
  ENSG00000266014_3 (sequence is synthesized)
caagagctgggatgtaggaggaaggtcattttgttatcagtggatgcctcaccttagaaaagtcccgtaaaactgaggaagattgtgggaggtatccttgggggtcatctagaccagcac

SEQ ID NO: 999552 - DNA, 120 bp, Artificial Sequence
  ENSG00000266014_4 (sequence is synthesized)
tccagcctgccccaaatctacagatcaaaaaagcaaagtccagagaagtaacgtctcaaggtcacataagtcagtccctatcaacaacagcactaaaatcaaggcttcctaaaaccagtc

SEQ ID NO: 999553 - DNA, 120 bp, Artificial Sequence
  ENSG00000266014_5 (sequence is synthesized)
actgctggtcaactccagacaagctgtattaaataatgaagtgggaacagagactgtgaaaaatctaaggggaggaaaaaaaaagaatctttaaaaaaatgctatatagatttcaaagca

SEQ ID NO: 999554 - DNA, 120 bp, Artificial Sequence
  ENSG00000266014_6 (sequence is synthesized)
cttagaattactattttccttccatatctttggctccttcttctattctgggtcctagtcaaatgttagttttactggagtgttctatcgaggccaaattaacacccaaactggaattaa

SEQ ID NO: 999555 - DNA, 120 bp, Artificial Sequence
  ENSG00000266014_7 (sequence is synthesized)
tactcacctttgttcggcaaattcagactcccagacgtcacagaggtgctgaacacattttaacactcagggacatttacaccagagaaatgcatcaatttacaaaaaagtatgagcctc

SEQ ID NO: 999556 - DNA, 120 bp, Artificial Sequence
  ENSG00000266014_8 (sequence is synthesized)
aaacgtgtacacccaatccatattggcggccagaaagcagtttctctccacccgcctcctcttcctccactccctccatcctgctggacctcccgtgcactggattacccggcccactct

SEQ ID NO: 999557 - DNA, 120 bp, Artificial Sequence
  ENSG00000266014_9 (sequence is synthesized)
gggactgttgcagcacgagcaactttggtgccatgctcttaattcctcaaacgccgttacctctctttatgcttagccccaaggtgggaagaaggaaataaatcttgttccttgtgggat

SEQ ID NO: 999558 - DNA, 120 bp, Artificial Sequence
  ENSG00000266014_10 (sequence is synthesized)
acagattgctctctgctggataagtggtggccaagagaaccacgtgtgctggtggaaaagcgctggacctgctgcccagcaccacagccgacagcagcaaatggccattgaacacttcaa

SEQ ID NO: 999559 - DNA, 120 bp, Artificial Sequence
  ENSG00000266014_11 (sequence is synthesized)
aatgcggggactctcgcccatttcccacagacctatataccccgcctgcaaacctgacggaaaggcccacacaccacaccagagagatgtggagggacggagcattcatcatagacagca

SEQ ID NO: 999560 - DNA, 120 bp, Artificial Sequence
  ENSG00000266014_12 (sequence is synthesized)
tgggatgtaggaggaaggtcattttctctccaatctcacactaagaaaacgactatacatccaggttattctgaaccttggaaaaaaacagaaaaaaatacaaaggaagcaaaggaacaa

SEQ ID NO: 999561 - DNA, 120 bp, Artificial Sequence
  ENSG00000214381_0 (sequence is synthesized)
cctggagcagagttccggtgttattgagcagcaagaatgagagcagagggggaagcaaaggtggcacattgattataacacacagctgaggtctcgatcacactagatgtctccagtcag

SEQ ID NO: 999562 - DNA, 120 bp, Artificial Sequence
  ENSG00000214381_1 (sequence is synthesized)
tcgtgtggaaatcgatgtgcttcagaacagtctattggatgacctggctccaggatcagggaagtcagagcccagacctcggttcacggtgcttcctcagattctgggaatgctgcagga

SEQ ID NO: 999563 - DNA, 120 bp, Artificial Sequence
  ENSG00000214381_2 (sequence is synthesized)
attctgggaatgctgcaggaagctgaacttcaggggcccagtgggttcaggccccagacaccagggtctttgcagtcccatcatgagtcttgttctgtcgcccaggctggagtacagtgg

SEQ ID NO: 999564 - DNA, 120 bp, Artificial Sequence
  ENSG00000214381_3 (sequence is synthesized)
gtgatccacctacctcggcctcccaaagttctgggactacaggagtgagccaccatgcccagcctatacttattccctgacttctcccaactagtatgtaaacttcaagctgacaaggaa

SEQ ID NO: 999565 - DNA, 120 bp, Artificial Sequence
  ENSG00000214381_4 (sequence is synthesized)
tcccaactagtatgtaaacttcaagctgacaaggaatttgtcttaaaacagtatctggcatgtaagaagcactcaattaatattcattcactgaatgaaagaagaaaggaaagagcatat

SEQ ID NO: 999566 - DNA, 120 bp, Artificial Sequence
  ENSG00000214381_5 (sequence is synthesized)
gacaagaaaaacaacaacaacaacaacaaaaaggataagcaagacaatctacgtttataacagaagaattgaatctaggggtgctcgttaagaattgtgatcaagcttaaatttttccca

SEQ ID NO: 999567 - DNA, 120 bp, Artificial Sequence
  ENSG00000214381_6 (sequence is synthesized)
gaaaaaaaaaagatgtttaaatagtacaagaaaatgaatacgacagattgcatcttgtaataagtgaattatatcaacagagttactaatgttgaatcaatttccccattcctggaataa

SEQ ID NO: 999568 - DNA, 120 bp, Artificial Sequence
  ENSG00000214381_7 (sequence is synthesized)
gggaagaaagtgtggttttttcatgaacaccaagtggatctaaaagggtggcatccagaggctgtcatcaactacgctcctcatagcagcttctcttaaaggaaatttgagcggcacatt

SEQ ID NO: 999569 - DNA, 120 bp, Artificial Sequence
  ENSG00000214381_8 (sequence is synthesized)
tctgcagccaacacatgagtcaataaagcactggaagtcaaaaaacctgagcttcagaacaatgacttccaaccagcggtccatgtgatcttggaccagtaatacactctttgagattca

SEQ ID NO: 999570 - DNA, 120 bp, Artificial Sequence
  ENSG00000214381_9 (sequence is synthesized)
cattatttcttgctggataatataacagagtagtgcactagtgtttttcaaggtatttattctaatactagctccaagaatagtgtttagcacataacaatcactcgataaatatttgtc

SEQ ID NO: 999571 - DNA, 120 bp, Artificial Sequence
  ENSG00000214381_10 (sequence is synthesized)
tgaagaaaagaaatgaatgaataaatgaaagagacattaggaaagagaagatgaagccctttaaaagcatatgtataaaaggagcttcaaaatatggattctatctatatcttgttacca

SEQ ID NO: 999572 - DNA, 120 bp, Artificial Sequence
  ENSG00000214381_11 (sequence is synthesized)
ttctcttcctatcacattccattcctcagatactgaatttacagagcatagcagctgcttgaacacgtaatggcttttataactccacatctttgtgcatgccggtctcttgccctggaa

SEQ ID NO: 999573 - DNA, 120 bp, Artificial Sequence
  ENSG00000214381_12 (sequence is synthesized)
cgccttttgatcctctgtgactgacaaaaactgtcagaatccagcttcaatgtcccttcttctctgaagactttcttgacatctccaagttaggaatcatttctctctcctttgtgtcct

SEQ ID NO: 999574 - DNA, 120 bp, Artificial Sequence
  ENSG00000214381_13 (sequence is synthesized)
cacagtatttttttggtatatctgctatagcatttacttactccatagtgattcgtctgtatatcttcctcctcccactagatgatggaacacattaagagacccttaactaatgagcta

SEQ ID NO: 999575 - DNA, 120 bp, Artificial Sequence
  ENSG00000214381_14 (sequence is synthesized)
caattaaatgtaggcatggaaggatattgatttctctcatttattctcagctcctggggtaggcagacagtgaatcagatgcctctgaccacaagcacattcatccatttatcccattgt

SEQ ID NO: 999576 - DNA, 120 bp, Artificial Sequence
  ENSG00000214381_15 (sequence is synthesized)
atagtggatcttcatctaagtttattcagtctttacccaacttgtcctggatggccaagagactagcaaaggttggatgcaggtggaacatactctgactcagggatacttatttcatga

SEQ ID NO: 999577 - DNA, 120 bp, Artificial Sequence
  ENSG00000214381_16 (sequence is synthesized)
ttagacagcagtttcctaatcattgtccatcccttctccccatgcacacgattcagcccttagggttatctctggatacccatcacttgggttgctgggcactcttgtgtaaagagaacc

SEQ ID NO: 999578 - DNA, 120 bp, Artificial Sequence
  ENSG00000214381_17 (sequence is synthesized)
agaaatttccttcagcagtctacaccttcatagatgagggtagtagcaacaggagaaatctattttacagattaaaatcagaagaaaggagaaatttctgctaagacagaggagaacagt

SEQ ID NO: 999579 - DNA, 120 bp, Artificial Sequence
  ENSG00000214381_18 (sequence is synthesized)
agactggctatcaacaagataaactatagaaaagcgatcactagcgtatgaaccatcccccaaggcactgtaggtcaaaacagatgatctaggaacctgcagatgaatccctctagaaca

SEQ ID NO: 999580 - DNA, 120 bp, Artificial Sequence
  ENSG00000214381_19 (sequence is synthesized)
agaaaacaacattaataaaagtttatatttattgaactttttgttaagtggttacctaaaccttttatgcatattgatgagtttaattctcaccataaccttaccgggtaggcatcatta

SEQ ID NO: 999581 - DNA, 120 bp, Artificial Sequence
  ENSG00000214381_20 (sequence is synthesized)
ttatctgaaaggcagcgagattaagtaacctgctcaaggccacataattaggaaatgaaggggtcttgagatgaacccagacaatctggctttggagctcatcatccgtttttttaaaac

SEQ ID NO: 999582 - DNA, 120 bp, Artificial Sequence
  ENSG00000214381_21 (sequence is synthesized)
aaaacaaaacaaaacaaaaaaaaccctgttgtatacactataatatgcattttaaagtgtacaatttaattatttttagcatatttgtgaagttgtgcaaccatcactacaattttagaa

SEQ ID NO: 999583 - DNA, 120 bp, Artificial Sequence
  ENSG00000214381_22 (sequence is synthesized)
cattttcatcactccaaaataagctccatacccattgtcaatcaccctccatttttcttcagctccccaaacccaagaaacaactaacctactttctatctctattgaattagctcttct

SEQ ID NO: 999584 - DNA, 120 bp, Artificial Sequence
  ENSG00000214381_23 (sequence is synthesized)
gaacctttcagatgaatgggattatacaatatgtggtctttgattcatccatgttgtagcatgtatcagcattccatttcttttttatcaaatgatacttggttgtctggatacaccaca

SEQ ID NO: 999585 - DNA, 120 bp, Artificial Sequence
  ENSG00000214381_24 (sequence is synthesized)
ttttatttacccattaatcagttgaagaacatttgcattgttttcacattttcctgttataaataatgcttctgtgaacattcatgtacaggctttcattgcttttgtgtatacatctag

SEQ ID NO: 999586 - DNA, 120 bp, Artificial Sequence
  ENSG00000214381_25 (sequence is synthesized)
gaatggaattgctgggtcatacagtaacttggtatttaacctcttgagcaacacatggtcttaatcactacacaggatatttcacacagtggatatgaagtcacaactgtctctcaagat

SEQ ID NO: 999587 - DNA, 120 bp, Artificial Sequence
  ENSG00000214381_26 (sequence is synthesized)
tttggggttgttattgcctcttacattctaaaaactttgtgtttttcttgttttgaaattcaacatactgttatttcagcataaaatggaacttggctaatttgaagcttgaggtcaaca

SEQ ID NO: 999588 - DNA, 120 bp, Artificial Sequence
  ENSG00000214381_27 (sequence is synthesized)
cattttaatgaatctatgatatgtgccaaggactattataagatctatgatggatacagggaaaaaaatatatttctatgaacagtctttatagctttaataaaccctcattgagcatcc

SEQ ID NO: 999589 - DNA, 120 bp, Artificial Sequence
  ENSG00000262921_0 (sequence is synthesized)
agcacttgcagtttgaagcgggaaacagggaggcagaagcagcgccggatcacattggatcacgctggatcacgttggacgctggctcaaagtctctgcagaggactctccagggagttg

SEQ ID NO: 999590 - DNA, 120 bp, Artificial Sequence
  ENSG00000262921_1 (sequence is synthesized)
tatcttatgattccagtagtggaaagaacaaaatcaaaacactgtatggcgaaatcctcaacgggaaggacctggaattcacatccttcgagatatcatctgtacctcagcactgttgtg

SEQ ID NO: 999591 - DNA, 120 bp, Artificial Sequence
  ENSG00000262921_2 (sequence is synthesized)
aggctcaaaaatgattcaagaccctgatggtgtctctccaacgaccaacacacagggatggtgccaacctgtcactcaatgacaacgcagggctggtgactaactggtttaattcgagac

SEQ ID NO: 999592 - DNA, 120 bp, Artificial Sequence
  ENSG00000262921_3 (sequence is synthesized)
cgtgggtcggaccacttgtctgtgctttgataatggagaatttgagtccctggaaaaagctactcgaccaggttagactagtggctggtagagtgcgaatgacaacatgctataccatca

SEQ ID NO: 999593 - DNA, 120 bp, Artificial Sequence
  ENSG00000262920_0 (sequence is synthesized)
tgcacggaccagcccgtctgcagcctcgagagggaacagcacagacggcgtggaggcctccccggtgcaaactccggcagcccctaccacatccaccaagcccccccgagaacagtcagt

SEQ ID NO: 999594 - DNA, 120 bp, Artificial Sequence
  ENSG00000262920_1 (sequence is synthesized)
gcccaggtggcaacagagatggcccaggtggcaacagagacggcccagggagagagtggcagcagcagatcaaaccccggagcccctgccctgggtgggtgccagcttccctgagacatt

SEQ ID NO: 999595 - DNA, 120 bp, Artificial Sequence
  ENSG00000262920_2 (sequence is synthesized)
ccgtgcctgtgacattgctgtgtgcagagatgaacgagacgggaaaagccactgcaccctgaagaactacaatatggtgggggtggcagatgccaatcaatgacacagatacctatttaa

SEQ ID NO: 999596 - DNA, 120 bp, Artificial Sequence
  ENSG00000223442_0 (sequence is synthesized)
atttaaaagtaataaagacaaactacagttacttgggtgagttggctccccaggcttttgagatacctgccttttgtccagcactgcatcgtcctcgcatatccaaggctgtgtctccct

SEQ ID NO: 999597 - DNA, 120 bp, Artificial Sequence
  ENSG00000223442_1 (sequence is synthesized)
tgaggaagaggctttactggtccaaccagaaagagaagctaagaacccatgactggattctctcccttggacaccccacagaccaatatctcaccttccaggagaagacccttccagctc

SEQ ID NO: 999598 - DNA, 120 bp, Artificial Sequence
  ENSG00000223442_2 (sequence is synthesized)
ttgcttctttaaacctattaacttagttttctttagctagactcccaaacatcagcttttacaattcagcctatggttcaatcactatggcaagataaacatttgtttaggtgtgaaaca

SEQ ID NO: 999599 - DNA, 120 bp, Artificial Sequence
  ENSG00000223442_3 (sequence is synthesized)
gggggtgtttctgaacgacgctgtgagagaatcactttccccaagaaaaggtatagcagaggggaagggagagacagcaacagaaagtgaggtcaatttctccacatattcagaacgtcc

SEQ ID NO: 999600 - DNA, 120 bp, Artificial Sequence
  ENSG00000223442_4 (sequence is synthesized)
gcgggcccggccgagcggcagcccctgccctggagggtggtctccagggaccaaggcgtggcgggcggtgcggagaggcgcggcacagatggctacatcagaggaatttctccacatatt

SEQ ID NO: 999601 - DNA, 120 bp, Artificial Sequence
  ENSG00000223442_5 (sequence is synthesized)
tcaccactcggtagttataattccgccttttatcagaagctgatacattttcatcggcatcagaccgtatttctatgtattcaatatctgacacaggaagaagaatattttagaggaacc

SEQ ID NO: 999602 - DNA, 120 bp, Artificial Sequence
  ENSG00000223442_6 (sequence is synthesized)
gcctcttcgctttgctctggccccgaagcgctgggattgggacctcccttcctcccgaccagctcatcctgggaaagctggggttgctttttcgggtttctctggactctgggtctccgt

SEQ ID NO: 999603 - DNA, 120 bp, Artificial Sequence
  ENSG00000223440_0 (sequence is synthesized)
aagggtccattttcctcactatattctgcaagaataagatctccatctttgcctgtgagatcctgaggtgtgcgcataaaaaacaactctccaccacctgaggcttgcctctcttgttct

SEQ ID NO: 999604 - DNA, 120 bp, Artificial Sequence
  ENSG00000223440_1 (sequence is synthesized)
ctcatcttggccttttttttgatgtgctttagcaaaggttggactgaatggggacctggctgagagagtgcaccaaatgagtactttttcagaggtgggcgatggaactgccggattttg

SEQ ID NO: 999605 - DNA, 120 bp, Artificial Sequence
  ENSG00000223440_2 (sequence is synthesized)
atgggccccatgtgggtgggaaagaagggctgccataattccatagcaggaattgaatgctggataatattccctccaaaggtgccccgaagaccctgttgcttggggaaataatactca

SEQ ID NO: 999606 - DNA, 120 bp, Artificial Sequence
  ENSG00000223440_3 (sequence is synthesized)
tcattggagagattccatggatctttcacttctggctgagacatgttctgctgtggttcctccctgatgacacctgttttgcccaagagaattcgactcttcttcagagatgattccttc

SEQ ID NO: 999607 - DNA, 120 bp, Artificial Sequence
  ENSG00000223440_4 (sequence is synthesized)
ttactctccttggagggggagttagaggtggcctcttccttctcatcaggaatttccaaaatgaggttctcatcattgggatcaagtgccaaaacaggaggttccaacagccggggcatg

SEQ ID NO: 999608 - DNA, 120 bp, Artificial Sequence
  ENSG00000223440_5 (sequence is synthesized)
gcctgagcatcccaaatgatattgtcctcccagcgtccatacaccagatcctcattgtcaatgggaaaaatggagtaccaaggtttgtcatcatccagagtgggtgcaaaaccttgctga

SEQ ID NO: 999609 - DNA, 120 bp, Artificial Sequence
  ENSG00000223440_6 (sequence is synthesized)
acattgtaagccattacattcctagtcttaatagaaggaagccagcctgccaggcttgcaccctgaggttttgtccctttgtgtttgatatcctccccatcccagatgatagaatcctcc

SEQ ID NO: 999610 - DNA, 120 bp, Artificial Sequence
  ENSG00000223440_7 (sequence is synthesized)
caatgcagctgtgtcaccatcaggaagttttcgtcagccagaagatcagtgccattgctttcctcaagtttcctaaattcctccatcattctagattttatcacaggttcatgttgtgtc

SEQ ID NO: 999611 - DNA, 120 bp, Artificial Sequence
  ENSG00000223440_8 (sequence is synthesized)
tttctcagtttgaagccatagtcaaacccactgccatcttcggagacacccagcatatcataccacagtcgggcaggcccataacgccactcagccactcttggtttggtatctgtcact

SEQ ID NO: 999612 - DNA, 120 bp, Artificial Sequence
  ENSG00000223440_9 (sequence is synthesized)
ttatctacatctccagttgattgggaaaatttggactccacaggaaccatcatcgtgatttcatcatcagcgagacactgctctgggggtggtggtggagcatagtcatagttccacaaa

SEQ ID NO: 999613 - DNA, 120 bp, Artificial Sequence
  ENSG00000223440_10 (sequence is synthesized)
cagctcacgatgcttcttcctctttctccgagcactccgccaaacagatgggacattcttccctggtccaaaaagatgtaggaagcgtaacacttttccaggtcgaaattctggaaaaag

SEQ ID NO: 999614 - DNA, 120 bp, Artificial Sequence
  ENSG00000223440_11 (sequence is synthesized)
ttcggtgacacttggcaacagcttggtggcatcatgctgcataatcccagccaatggaagggtcagctttccatcctcagattctgcctgtgttgcttcctgaggtcccatctcagattc

SEQ ID NO: 999615 - DNA, 120 bp, Artificial Sequence
  ENSG00000223440_12 (sequence is synthesized)
tgaatcagagtaactactgaaatccactttctctgaggccaaaaaggaaggggcaatgatggagggcaagatgatgtcttctccactttcagacacacagggctccctcctaaaacagcc

SEQ ID NO: 999616 - DNA, 120 bp, Artificial Sequence
  ENSG00000223440_13 (sequence is synthesized)
acttaggaacaagagccactgaaaagtgatggatgtgctcccttgacaacccatagcaggaaccagcttgtgtagcagtgacactgcaaactaaggaagcagaagccagatacatgcatc

SEQ ID NO: 999617 - DNA, 120 bp, Artificial Sequence
  ENSG00000223440_14 (sequence is synthesized)
ccttgccagggggctcccagtggagtcttgtagactatgttacagtgtgccgtggctccaattcaattctaagctctagttgtgtgactaaaagcctaaaggagaaaaaggaaaacaagc

SEQ ID NO: 999618 - DNA, 120 bp, Artificial Sequence
  ENSG00000223440_15 (sequence is synthesized)
ctcaaagtcctgcctgcttctgtcttctggcaagaaactatggctatacatccaggagggctggaagggctgagtggcattatcattttgtaactctcttactcaccaaaaacacaggag

SEQ ID NO: 999619 - DNA, 120 bp, Artificial Sequence
  ENSG00000223440_16 (sequence is synthesized)
aggttttcaaatgaatgtatattcatgaggaatattttttaaagacagtagaaagaatttttttaaaaagcagcatcatcacaaggcctattggttatctctgttcagcaacacacattt

SEQ ID NO: 999620 - DNA, 120 bp, Artificial Sequence
  ENSG00000223440_17 (sequence is synthesized)
aggggtcatgtcagaaaatggtatatgctcaaaggatctgccttcctttaggtcacacctttacatcatccacttattctggaaacaatattgttcgttcccatgggctgcttaagattt

SEQ ID NO: 999621 - DNA, 120 bp, Artificial Sequence
  ENSG00000223440_18 (sequence is synthesized)
ctacgatatcacactgaccagaatactttgataagttccattgctcaggatcctggatttttgactggtcaagccccatccaaggaactgcagcacaaaatagatgacttagaggtcaag

SEQ ID NO: 999622 - DNA, 120 bp, Artificial Sequence
  ENSG00000223440_19 (sequence is synthesized)
agcctggctttgagccaaagagaccaatcattagaattttggccctgctcgttactaccttgtgattttgacaaattacttttctttctaagcctcagtttcttcttctataaacaaagg

SEQ ID NO: 999623 - DNA, 120 bp, Artificial Sequence
  ENSG00000223440_20 (sequence is synthesized)
ccagaaagatacctacttcataggattgttactaggatcaaatgagaatgcctataaagtgcttagcatagtgcctggcacatcgtaagatttcaataaacgttaaatgctttcccatgc

SEQ ID NO: 999624 - DNA, 120 bp, Artificial Sequence
  ENSG00000236948_0 (sequence is synthesized)
aggctggagctagtcagcagcttttgcgtaagcactaggcagcactggagtgcagctgagggagtcggccatgagccgctggagtgcaggggagggagctggccgtgagccgctggtgca

SEQ ID NO: 999625 - DNA, 120 bp, Artificial Sequence
  ENSG00000236948_1 (sequence is synthesized)
gagggagacggctgtgagacgctggagtgcaggctattttgacccctgaagtcttcccatgcggggcagactctttgcaagactgactacctggaggagcagaggagcaggggagaatgc

SEQ ID NO: 999626 - DNA, 120 bp, Artificial Sequence
  ENSG00000236948_2 (sequence is synthesized)
atgttcctggaagtaggggacttgcttccaagagaagagggaacaaaagtagaaaagagaaggactgtacaacactgtctcagctcatttgtgctgctataacaaaatgcctgagactgg

SEQ ID NO: 999627 - DNA, 120 bp, Artificial Sequence
  ENSG00000236948_3 (sequence is synthesized)
agcactggagtgcagctgagggagtcggccatgagccgctggagtgcaggggagggagctggccgtgagccgctggtgcaggggagggagacggctgtgagacgctggagtgcaggtgga

SEQ ID NO: 999628 - DNA, 120 bp, Artificial Sequence
  ENSG00000236948_4 (sequence is synthesized)
ggcgtgatctcggctcacagcaacctctgcgtcccgggttcaagaaatgaccagaacctgaaatttatatttaaaggggaagcagagtgtaaaagtttgaaaaatttgcagcccacccat

SEQ ID NO: 999629 - DNA, 120 bp, Artificial Sequence
  ENSG00000236948_5 (sequence is synthesized)
gtaaaagtttgaaaaatttgcagcccacccatgtggtggaaaagaaaaccccatttccaaggctcataggtgaagagacttttgccttgtctgagatgagactttggactttggactttt

SEQ ID NO: 999630 - DNA, 120 bp, Artificial Sequence
  ENSG00000236948_6 (sequence is synthesized)
tgctgtaatgagttaagactgtgaattattgggaagtcatgattgtacttttgcaatgtgaggaggacacgagatttggagggatcaggggtgaaataatttggtttagatctgtgtcct

SEQ ID NO: 999631 - DNA, 120 bp, Artificial Sequence
  ENSG00000236948_7 (sequence is synthesized)
cacccaaatctcatgttaaattgtagtccccagtgttggagatggggactgatgggaggtaattagatcatgagggcgaaattctcatcaatgctttaggaccgtctcctctgtgctatt

SEQ ID NO: 999632 - DNA, 120 bp, Artificial Sequence
  ENSG00000236948_8 (sequence is synthesized)
ctcatgatagagttctcataagatctggttgtttaaaagtatgtggcacttccacacctcccaccaccaccaccaccaccaccaccattctcctactccagccatgtaagaggcacttgc

SEQ ID NO: 999633 - DNA, 74 bp, Artificial Sequence
  ENSG00000236948_9 (sequence is synthesized)
ctactccagccatgtaagaggcacccccagatgcagaagctgctatacttcctgtacagcctgtagaactgtga

SEQ ID NO: 999634 - DNA, 120 bp, Artificial Sequence
  ENSG00000223446_0 (sequence is synthesized)
ccgtcttgggcccgcccttccgggccctgccgcgttgagtggcggagtcgggatccaggtggcccgccggccggctcagtccacctccccgctcccggcctcgcgccccaccccttggat

SEQ ID NO: 999635 - DNA, 120 bp, Artificial Sequence
  ENSG00000223446_1 (sequence is synthesized)
tcgcgccccaccccttggatgagaaaactgaaactgagaggggacgtgactgatccaacgcctggcatttccagctccggagcccgccacaagaagctcctagccccacatgatgtgaat

SEQ ID NO: 999636 - DNA, 120 bp, Artificial Sequence
  ENSG00000223446_2 (sequence is synthesized)
gcactgggccccagccaggaagtggagacccgtgaaggaaggaatagcagcactctcccagccagcagcagcagtttcccttcctctttccttccctgcctgtgtgggccgttcccccat

SEQ ID NO: 999637 - DNA, 120 bp, Artificial Sequence
  ENSG00000223446_3 (sequence is synthesized)
agcagctctaatttgagatgccagagcctgacccggaatgggggcccaactcagtgtccccttctcggacagcacagtggtccctgcagtccatgcgccatctgtctctttgcctcagtt

SEQ ID NO: 999638 - DNA, 120 bp, Artificial Sequence
  ENSG00000223446_4 (sequence is synthesized)
ctgtgccatgacctcccatcagggccggcatagggggcatcaggagaatgggtgcagttgtcacctggaaacctcaaaattcttggggcccagtcatggtcactatacagcagccacccc

SEQ ID NO: 999639 - DNA, 120 bp, Artificial Sequence
  ENSG00000223446_5 (sequence is synthesized)
tgtccccaaacactgaaggcccaacccagagctggatcacaaggaagactggaagctccactcccccatggagcttccctgttaccagaggacacaaacacacatctgcatgttgatctg

SEQ ID NO: 999640 - DNA, 120 bp, Artificial Sequence
  ENSG00000223446_6 (sequence is synthesized)
agagccctgtgtggagaggaactaggcccccagccaacaaccagcagtgactcactgtgagagagtgaatcatcttggaagtggatcctaagccccaatagagacttcagatgaaactgc

SEQ ID NO: 999641 - DNA, 120 bp, Artificial Sequence
  ENSG00000223446_7 (sequence is synthesized)
aaccctggctgacatctgactgcagtggcataagaaacccttatgtcagaatcaccctgcaaagcccaaattcttgacccaccaagtgaaagagaataaatgacgattgttgtgtttgaa

SEQ ID NO: 999642 - DNA, 120 bp, Artificial Sequence
  ENSG00000224799_0 (sequence is synthesized)
acttaaagtataataataataaaactaaataaataaataaatctacgggtggatttttcagatgcactggcagagcaaatatcggttttatataaaaagtcagcataagccaattggaga

SEQ ID NO: 999643 - DNA, 120 bp, Artificial Sequence
  ENSG00000224799_1 (sequence is synthesized)
tcacaaaagcagaaaggacaatggataaagacaaaagcaaatgtacattatcacattttggccctatacaactattaggacaagagaggaaggagaaaagcaggcccacgtcagtttaaa

SEQ ID NO: 999644 - DNA, 120 bp, Artificial Sequence
  ENSG00000224799_2 (sequence is synthesized)
aatgccatacactgcactccaggtctggtaatctggctcaaccagattgaggctggtaacctggctcaaccagttctgcgatttcacccaagaacagaagacagcaagagaaactcactt

SEQ ID NO: 999645 - DNA, 120 bp, Artificial Sequence
  ENSG00000224799_3 (sequence is synthesized)
tgaccccctatgattccatctccaacccgaccaatcagcacaccccacttcccaagcctctccccaccaaattatccttaaaaactctgatcccggggaaggcttggaaagacagatttg

SEQ ID NO: 999646 - DNA, 120 bp, Artificial Sequence
  ENSG00000224794_0 (sequence is synthesized)
accgggctaggatacagaatggaaggtgtatgagagctgggatttttatctgttttgctgtatgaagtagatgagggaagaatcaagactgatgataagattatttcaactcaacatacc

SEQ ID NO: 999647 - DNA, 120 bp, Artificial Sequence
  ENSG00000224794_1 (sequence is synthesized)
agtaaaaccggctccaagatcaagacagagaatatttccagccccgagaagctgccctggctctccttctggtcagtacccacccctgcccccaagggtaaccactctcccgtcaccagg

SEQ ID NO: 999648 - DNA, 120 bp, Artificial Sequence
  ENSG00000224794_2 (sequence is synthesized)
agcccacccggtctggaccttcctgtcagtgagaccagcgtgtgattttttgcaggcgtgggctttctgcactcggcatgagctccgcccctgctgctgcctgtagccagggtgaccagt

SEQ ID NO: 999649 - DNA, 120 bp, Artificial Sequence
  ENSG00000224794_3 (sequence is synthesized)
gggcttttaccttaagcagcaggtagacagtggggctggtgacagctgcggggatccagagttctgggaggtgtggcggaccagctgggcccaggactggggttggaggtgaaagtcagg

SEQ ID NO: 999650 - DNA, 120 bp, Artificial Sequence
  ENSG00000224794_4 (sequence is synthesized)
caacgtcagctcatcgacagcatttcaagccgtggaatttgagtactattgagctggccgtgccactgatggaatcgtttcttgctgctgcaaaattgagagccacatgctacaggtcag

SEQ ID NO: 999651 - DNA, 120 bp, Artificial Sequence
  ENSG00000224794_5 (sequence is synthesized)
gccttctgcccccctatccgctgtgaggtgcttgaaggactggtttggaaacagacccctatttcagaagcagagttgaggcttagcaagggagaatgactggcccaaagtcactcggct

SEQ ID NO: 999652 - DNA, 120 bp, Artificial Sequence
  ENSG00000224794_6 (sequence is synthesized)
ggtaggtttgggccaggactcctcgctccgcactggacacccctgcactgccttctgggtgtgccaggttggcatggggaggctgggctcacacccaaatcaggacatagcctatcgtga

SEQ ID NO: 999653 - DNA, 120 bp, Artificial Sequence
  ENSG00000224794_7 (sequence is synthesized)
agggtaacccccacctgaagtcactgtctccccagcagtgacatcattagcaagccagaatgcgcagggcatacagctggaggaccaggcaagctgaggcgggggccaagtgggtagttc

SEQ ID NO: 999654 - DNA, 120 bp, Artificial Sequence
  ENSG00000224794_8 (sequence is synthesized)
ggggccaacccccatcagcggccaatggcctctagaagatggctgggcctcacacgccttggaaaccagagcgagaggccatcagggtggggaaggcagcccatcacctcctgtccaagt

SEQ ID NO: 999655 - DNA, 120 bp, Artificial Sequence
  ENSG00000224794_9 (sequence is synthesized)
gcctcattttacaggtagaggaactgaggcctgaggcaggtcatgactatcccaggattacacggcaagtgaggggcggatgcaggagaggggcccaggcctcctccctcccaacagtgt

SEQ ID NO: 999656 - DNA, 120 bp, Artificial Sequence
  ENSG00000224794_10 (sequence is synthesized)
tctgtctaccctccaagttctgtctcgcccagccaagggccactctgctcccgcactgctgggctggggtggtggaagagatgggaaagtggaagaaggcaggggctgtgttcagaaggg

SEQ ID NO: 999657 - DNA, 120 bp, Artificial Sequence
  ENSG00000224794_11 (sequence is synthesized)
gcccctgaggctgtgaggatggtccatgccctcagggagtcaggctggtggagggggagggagcacaactcagaactcatcttcctccccaacacgctcctcccacagtcctatctcctc

SEQ ID NO: 999658 - DNA, 120 bp, Artificial Sequence
  ENSG00000224794_12 (sequence is synthesized)
accaggcccaggagctggcgcctcagcaactgctgcattttcaggaattttgcaaactggcttcaaaacacagccataattagacgtcaaagtatttaaacttacagttcagggccaggc

SEQ ID NO: 999659 - DNA, 120 bp, Artificial Sequence
  ENSG00000224795_0 (sequence is synthesized)
actgctgctccctcaaagctagagaaccagagctgagaagcagaaaccctctcagtggcctggcccgtgctgcagacagacagagcggtcaaggaaggcctcaggaccagaggcagagag

SEQ ID NO: 999660 - DNA, 120 bp, Artificial Sequence
  ENSG00000224795_1 (sequence is synthesized)
aggaatggagtgagagagatcaatgctggacccaagatgattaacgtgccaacctggggcactggcgctagggagatggtcagatcgatggattccaagcaaatgaagagcctggcgcat

SEQ ID NO: 999661 - DNA, 120 bp, Artificial Sequence
  ENSG00000224795_2 (sequence is synthesized)
tcggcagccaagctgtgaagttaaacacagcgacggggccaggcgtttggtgagcgatgagggtgatgaaacaggacacatatatcttgggaaacaacactgagaggccagatctggttc

SEQ ID NO: 999662 - DNA, 120 bp, Artificial Sequence
  ENSG00000224795_3 (sequence is synthesized)
tgaaaaatgtctttgctccttgtcacctttcaaaggcaaaatcacagctcttaaaatagtctttactgagaaaccagggaagtcaaaatctgaaggctggaccgaactttcaaaagctct

SEQ ID NO: 999663 - DNA, 120 bp, Artificial Sequence
  ENSG00000224795_4 (sequence is synthesized)
ggcaaagaatgaggagccatgttggagcagaggtctggcagagaagagaagacaaatgcagaccaacatcatccaatgagtttccagaatgaagtactgactcaacttcacactgctttg

SEQ ID NO: 999664 - DNA, 120 bp, Artificial Sequence
  ENSG00000224795_5 (sequence is synthesized)
cttcacaagctagagcttgcttcccacaccttcatgtctgtgaggctccatgttgcctgcttagcactgtttatccagcctgaccaactgctccaagtggctgccgtgtgtcaggaaatg

SEQ ID NO: 999665 - DNA, 120 bp, Artificial Sequence
  ENSG00000224795_6 (sequence is synthesized)
gccctcctaaacaataccagaattttagagttgcaagaccagtattttaaagctgatcatctcctattgaggaatcctttgcctgcaactgaggagaacgccaatttgaagtctagtgta

SEQ ID NO: 999666 - DNA, 120 bp, Artificial Sequence
  ENSG00000224795_7 (sequence is synthesized)
ccaatgagagcacctggacggaaggcaaccagtgtgttagtgacaaatgcaaaatcatgatgttggcagatgaatgccacccaaggagcactcctggagggtcggtgcgattgctcagct

SEQ ID NO: 999667 - DNA, 120 bp, Artificial Sequence
  ENSG00000224795_8 (sequence is synthesized)
tgttagctcaagggccaacaggagagttgctggggtgctcttgtcagggaggggaacatcaggacacatctctactgtctcatcctgcctgcaacagaacatgaccgaaaacagtggcct

SEQ ID NO: 999668 - DNA, 120 bp, Artificial Sequence
  ENSG00000224795_9 (sequence is synthesized)
aggggcagaactgaagcagatttacgccgtttttcttcctttgacttcagtgctttcttaactgtgtggtcacggagtagatatcatcaatttatattctgtgtgtacagcaaaattttg

SEQ ID NO: 999669 - DNA, 120 bp, Artificial Sequence
  ENSG00000224795_10 (sequence is synthesized)
gctaccaaatagtggttaatttaataatctggtcaatttagaggtaataaatgaaatattaatagaaatgaattaacttttcaagtaagaaataaattatttgttcattctttccccaaa

SEQ ID NO: 999670 - DNA, 120 bp, Artificial Sequence
  ENSG00000224795_11 (sequence is synthesized)
atgtgacatgagtcacagtgtcttcggaggaaatgaaagaccacaggacggggacatggcatcatgaaaaaagatgctttgtgattttcaacatatggtgacacttttcctaatttagag

SEQ ID NO: 999671 - DNA, 120 bp, Artificial Sequence
  ENSG00000224795_12 (sequence is synthesized)
ggggaagctgggttttgagttttcttttatcctccctctttgttaaaagcaagagaaagaagatttaaagaacatctgtgtattcaaatgatagaaatagaattatacactttcaaaaac

SEQ ID NO: 999672 - DNA, 120 bp, Artificial Sequence
  ENSG00000224790_0 (sequence is synthesized)
cggccgcgccgcagaaggtgaaggaacagcgcgaggcacgcagccgccgcaccgtggcgcgcacgagctcagccggccggcgaccccagcgcgcccacaggacagtggcagccggaaagt

SEQ ID NO: 999673 - DNA, 120 bp, Artificial Sequence
  ENSG00000224790_1 (sequence is synthesized)
ccactccaggacaacacaggactacaagtcaggaatttgaagatgaaaagtgctcaacagtgataaatcctaaatgtttcactgaacaacctttcagatagccttcttgaagtttgctga

SEQ ID NO: 999674 - DNA, 120 bp, Artificial Sequence
  ENSG00000224790_2 (sequence is synthesized)
actgaacaacctttcagatagccttcttgaagtttgctgaattatggctataaggaccactccccacccctgctagatgaagtctcacttgcccaggttgcagtgagccgagattgcacc

SEQ ID NO: 999675 - DNA, 120 bp, Artificial Sequence
  ENSG00000224790_3 (sequence is synthesized)
accactccccacccctgctagaaggttgtttgtgacccaagagggcatcaatacaaagaccctaaagctgggattccgaagcacagagtcgcgggagagaaccaaagctcatcgcatctg

SEQ ID NO: 999676 - DNA, 120 bp, Artificial Sequence
  ENSG00000224790_4 (sequence is synthesized)
gtttaagactccttcagagttggatcagcctaaaaacaggacatggtacaagattttattcattccaaagattgtaaaaattaaattcatcctgagaatttatcagtctatgtgggagct

SEQ ID NO: 999677 - DNA, 120 bp, Artificial Sequence
  ENSG00000224790_5 (sequence is synthesized)
acagacttctatgagcaagcagagtacctggcattcctgaccatgctatttctaccaatcaacaaaaactactagatactcagaggggatttaatacagagagctggctacaacatgaca

SEQ ID NO: 999678 - DNA, 85 bp, Artificial Sequence
  ENSG00000224790_6 (sequence is synthesized)
cagaggggatttaatacagagagctggctacaacatgacaaaacaccagacaagggagggcactgtggctcatgcctgtaatccc

SEQ ID NO: 999679 - DNA, 120 bp, Artificial Sequence
  ENSG00000224790_7 (sequence is synthesized)
gcaacaagagtgaaactccgtctgaaataaataaataaataaacaaacggacacacaccacagaagggacagtgaggcaacccagggaatagaaagagcagaagccgcgaccctctgtag

SEQ ID NO: 999680 - DNA, 120 bp, Artificial Sequence
  ENSG00000224790_8 (sequence is synthesized)
tagggctgagggcacacaacacaggtcaagttaccgtcgcccgggatccagggtcccctggtggaagctggaacccacagatcagtgctgtgggagatggagccacagagaaacaactgc

SEQ ID NO: 999681 - DNA, 120 bp, Artificial Sequence
  ENSG00000224790_9 (sequence is synthesized)
tgctggagacatcagcaggggaagaaggcggaaaaatactgtagccgctccacacctccagcccaacgccccatggcggaacttcactagaggccccacggcagaagagcctccaggaac

SEQ ID NO: 999682 - DNA, 120 bp, Artificial Sequence
  ENSG00000224790_10 (sequence is synthesized)
ctccttgtggaccagaggagagagatagagaggcggcaggaggcaagggtgtgtctaagacaaacaggccacagccagcccctggccttcctgaaactcctcccttgggttcttttaaaa

SEQ ID NO: 999683 - DNA, 120 bp, Artificial Sequence
  ENSG00000224790_11 (sequence is synthesized)
ttcaatattctgcttctgttccagggttaatgggctgaactgtgtccccccaaattctaatgttgaagttctaacccccagtacctcagaatgggactgcatcaggagacaggtacttta

SEQ ID NO: 999684 - DNA, 120 bp, Artificial Sequence
  ENSG00000224790_12 (sequence is synthesized)
aaatagtcattaaggtaaaatgaggtcaccacctaatctgttatgactggtatccttataaggataaaatagtcattaaggtgaaatgaggtcatcacctaatctgttatgactggtatc

SEQ ID NO: 999685 - DNA, 120 bp, Artificial Sequence
  ENSG00000224790_13 (sequence is synthesized)
cttataaggagaggagactagacacagacatgcacagggggacaatcctgtaaggacaaagggagaagacagccatctccaagccaaggagagaggcctcaggagaaaccaaccccgccc

SEQ ID NO: 999686 - DNA, 120 bp, Artificial Sequence
  ENSG00000224790_14 (sequence is synthesized)
acaccttcatcttggacttctagcttccagaactggggaaatgaatttctgttgttgaagccccagtctgcaatacttagttatagcagcccttgcgaaccagcacatccaagttctccg

SEQ ID NO: 999687 - DNA, 120 bp, Artificial Sequence
  ENSG00000224790_15 (sequence is synthesized)
tctctgtctctaacccctctctcaactgtcggccataagtgagcctctgcccccaacttctggcctcctctatgttctcttccttggtgacctctggcagtgacgctcagtcctcatggc

SEQ ID NO: 999688 - DNA, 120 bp, Artificial Sequence
  ENSG00000224790_16 (sequence is synthesized)
cagctctggcctctcccaggctctggcgccgcaatcatctcttccacttgtctctgcttggatagtctgtcagcatctcaaaggcaacatgaataaaaccaaatgcattttttcctccca

SEQ ID NO: 999689 - DNA, 120 bp, Artificial Sequence
  ENSG00000224790_17 (sequence is synthesized)
accacaccttcccacaggtactctaactccacctggccaataggaattttctaggtttacccttaggtgtttcgagatatggtctcagaatacatcatgggaaaattacattttggggtc

SEQ ID NO: 999690 - DNA, 120 bp, Artificial Sequence
  ENSG00000224790_18 (sequence is synthesized)
aatcctgtataccaattctaggttaaaagcatggggaccaccatggttcaacatgagctgacccttgcattgaagagtactgataccattcatgcctggggaaggaatagagggaggaag

SEQ ID NO: 999691 - DNA, 120 bp, Artificial Sequence
  ENSG00000224790_19 (sequence is synthesized)
atatgaagggcacagtgagaagtgaaacagtcacataacaagctctgtttatgatcccgccctaaaatgatttcattttgcaaaggtcaaggatagagttgagtttcatcacccctatat

SEQ ID NO: 999692 - DNA, 120 bp, Artificial Sequence
  ENSG00000224790_20 (sequence is synthesized)
aacaaaggaataggggaaggatgcaaaaataatacaccaagggatattaatgtgtatgcacctgatcctcatcctgtagtccctcactgctcaaagtgtggtccttagagcagcagcagc

SEQ ID NO: 999693 - DNA, 120 bp, Artificial Sequence
  ENSG00000224790_21 (sequence is synthesized)
agcatcacttggaagctcgcaagaaaagcggaatcctaggccccacccaaccccaaatcagcgtctgcattttgacaaaatcccaggagactcacaaacacattaaagttagagaagcac

SEQ ID NO: 999694 - DNA, 120 bp, Artificial Sequence
  ENSG00000224790_22 (sequence is synthesized)
tgctaacatcttcctctgtcattccctgggtctgggctactctagactctaataagacatttccaaaatgatgtggaaaataagaccacagactagggatttttttttttttttttagat

SEQ ID NO: 999695 - DNA, 120 bp, Artificial Sequence
  ENSG00000224790_23 (sequence is synthesized)
gcgcccggtcagactagggatttagaagcaagactttgtcatttataagaacactgcagaaaggaacaagaatgacccagctagccactgaagaccacctctgaaacccatcaacatgac

SEQ ID NO: 999696 - DNA, 120 bp, Artificial Sequence
  ENSG00000224790_24 (sequence is synthesized)
cggctttctataggaaaagtctccacagactcaaaaagtctctagtttcttgcccttaggaaggcatgccctgggaataatagtttggggacaagagagagtagagtgtttactgtccta

SEQ ID NO: 999697 - DNA, 120 bp, Artificial Sequence
  ENSG00000224790_25 (sequence is synthesized)
tcccccattaaatacatggcagaacttccccagggaaagcctatcatactgacattaactcagtacctgtttgaacttggagagcattcagaattctcatcagtcaaatggccagagctg

SEQ ID NO: 999698 - DNA, 88 bp, Artificial Sequence
  ENSG00000224790_26 (sequence is synthesized)
agagcattcagaattctcatcagtcaaatggccagagctgagaaggatagcttgttttgtttgtttttgagacagggtcttgctaccg

SEQ ID NO: 999699 - DNA, 73 bp, Artificial Sequence
  ENSG00000224790_27 (sequence is synthesized)
accctgttgcccaggctggtttccaactcctgagctcaagccatctgcccaccttagcctcccaaagttgtgg

SEQ ID NO: 999700 - DNA, 76 bp, Artificial Sequence
  ENSG00000224790_28 (sequence is synthesized)
aggttttaccctgttgcccaggctggtttccaactcctgagctcaagccatctgcccaccttagcctcccaaagtt

SEQ ID NO: 999701 - DNA, 88 bp, Artificial Sequence
  ENSG00000224790_29 (sequence is synthesized)
gacaggattttgccatgttgcccaggcttgtctcgaactcctggattcaagcaatctacccgcctcggcctcccaaagtacctgggat

SEQ ID NO: 999702 - DNA, 120 bp, Artificial Sequence
  ENSG00000269599_0 (sequence is synthesized)
gacagcttgatactttaatatctattaggcagagaataaaatatcacacaaaaactgaacaaggcaagtataaaccagatgacgactgcttgtagaaagtaggacaccacttccagcaag

SEQ ID NO: 999703 - DNA, 120 bp, Artificial Sequence
  ENSG00000269599_1 (sequence is synthesized)
agcaaaagatgtgtctttttcctcatgtctagtaagattggcacttttctccttgggctcagtggtctaatgaagtcatgaaagtgcattcagcccactgaacctgaatctttagaaaac

SEQ ID NO: 999704 - DNA, 120 bp, Artificial Sequence
  ENSG00000269599_2 (sequence is synthesized)
cttccaaaactattattccaaaggaaggcacactccctcaggatatggatcttgttttgttcacgagaacagcatgatgcatagtagatgctcataaagatttgctgaatgaataaaata

SEQ ID NO: 999705 - DNA, 120 bp, Artificial Sequence
  ENSG00000269599_3 (sequence is synthesized)
attttaaaaccataattcccatggagagaccataataatacagtctttaacaaaaacaactataagctggggtcaagagtctaaagccaactagggaaaatatatatatatttgagacag

SEQ ID NO: 999706 - DNA, 120 bp, Artificial Sequence
  ENSG00000234546_0 (sequence is synthesized)
agcaaccactagaatggaagctgcatgtgggcatggcttagttttgtccactgctggatctcagcatccaaaacagtctaccacctgatgtctcagtatactggctcgcggcacatcggg

SEQ ID NO: 999707 - DNA, 120 bp, Artificial Sequence
  ENSG00000234546_1 (sequence is synthesized)
caaatgaacctatcagataacaacggcagatcagatgcctgagcattcagaagcaacagctgtggagcccccgtgggttcagaaggcctggttcccgtctccagaagcctggctctcctc

SEQ ID NO: 999708 - DNA, 120 bp, Artificial Sequence
  ENSG00000234546_2 (sequence is synthesized)
cctcctgggcccactactttggcttcttgttcctacgtacaaggagttgcgaagaaggcaactcttcccctccctgaagccaaaggaatgaaacagactagggcgggagaggtggccatc

SEQ ID NO: 999709 - DNA, 120 bp, Artificial Sequence
  ENSG00000234546_3 (sequence is synthesized)
ggcccccagggaaacatcagcgggagcggtactaaggaagtgctcatctcttagagacaaaggcccatggaggggaacagtaaccatcccctcccaattcagaaaatgttaacataagca

SEQ ID NO: 999710 - DNA, 120 bp, Artificial Sequence
  ENSG00000234546_4 (sequence is synthesized)
cttcatttctcatgcagataaccacataagtctattaataagaaagaaagagaaagaaaaaaaagaaaaaggaatccatgccagcagggtataggaattggtctataggagaaagggtca

SEQ ID NO: 999711 - DNA, 120 bp, Artificial Sequence
  ENSG00000234546_5 (sequence is synthesized)
cccactgaaaggtgggctgaatagaattccttgcctgggctttgaggtcctggcatggagaaggctgtagaaatgctggcatcagtggaaccctcaataaacagaattcttgttaaagaa

SEQ ID NO: 999712 - DNA, 120 bp, Artificial Sequence
  ENSG00000234546_6 (sequence is synthesized)
tacctgggtgcatgctgggacggggcgagcaggtagtgcaggcttccaggcctctcctgccccggagcttggctgcaggactcccgcaaaatctccaaatgcccccgatctgcgtggtca

SEQ ID NO: 999713 - DNA, 120 bp, Artificial Sequence
  ENSG00000234546_7 (sequence is synthesized)
ccgagaagcagcccggctcggaacaagcccaggcaagcccaggcagagcccgccgccgggtcctccttcctgctcgtgccaccaggccccggggccgcgacgcgtctctccagcccggga

SEQ ID NO: 999714 - DNA, 120 bp, Artificial Sequence
  ENSG00000234546_8 (sequence is synthesized)
tccggggagctgggctgtccccagaccgacgggacagcggcatctcctccacctgaaaaggaaagaggaccagtttgcaggactccgaactgggcccgcgagatctccacctgcgcaaaa

SEQ ID NO: 999715 - DNA, 120 bp, Artificial Sequence
  ENSG00000234546_9 (sequence is synthesized)
tgagaacgggggactcattcctccggcactgggagaagacgattctttaggaggaggacagggaagcgaatgctacccagaagagaggtcatctcctggtacaagaaaatgggctgtctt

SEQ ID NO: 999716 - DNA, 120 bp, Artificial Sequence
  ENSG00000234546_10 (sequence is synthesized)
ctggataaccgcagcaattcatctctgagtagctgaaggtcattagtatgcattatacaagtggaaccatttgagagaaaagagggaactcactggacacaaaagtgcactgagactgtg

SEQ ID NO: 999717 - DNA, 120 bp, Artificial Sequence
  ENSG00000234546_11 (sequence is synthesized)
aacagcaagtcccgaacaaggacacagagatagatcccaaagggaaaggctggagggggaaggatgcgacccagccgcagtggctgatccatgagggctcctgtctgggttcgtgctgcc

SEQ ID NO: 999718 - DNA, 120 bp, Artificial Sequence
  ENSG00000234546_12 (sequence is synthesized)
aatcagtagcattccccaggcaagacgtgggcgccaggcctgacttgaaacccaaggttggcttcaagatcttgcagctggatcagaatgctgagttcatcgttgctggtgggccgccgt

SEQ ID NO: 999719 - DNA, 120 bp, Artificial Sequence
  ENSG00000234546_13 (sequence is synthesized)
gacccccaaaggcggggcagcgaacactcccctccactccgcgcctccgcagaacacacagggcaccatttcacaaacacagcaggcacagagagaaactcctgcattttcatcataatg

SEQ ID NO: 999720 - DNA, 120 bp, Artificial Sequence
  ENSG00000234546_14 (sequence is synthesized)
cacggaaaccccctgacctcaagcccagagaagtgagatgcatccaggtctgtttgctgcctgcatgtttcacaaatacatctaacagatgtctcagtatactggctcgcggcacatcgg

SEQ ID NO: 999721 - DNA, 120 bp, Artificial Sequence
  ENSG00000234546_15 (sequence is synthesized)
gaggaggacagggaagcgaatgctacccagagccaccaaaatgcctggacctgggcagctaacagtgggatgaatctgctttagagacaccagactgccagctagagaattgaaataacc

SEQ ID NO: 999722 - DNA, 120 bp, Artificial Sequence
  ENSG00000234546_16 (sequence is synthesized)
tgattcttatctatttttccatccagagagggcacaccaaggctaggcctcattttttttttctttaaacatttttgtgttgacaaataatgttttataaaggcctcactatctgccaaa

SEQ ID NO: 999723 - DNA, 120 bp, Artificial Sequence
  ENSG00000234542_0 (sequence is synthesized)
agcggcagcccgatcacccccaaacctcgtcagcatccccacctggccccaacctgccagccttcaccaggctcttaacaagaggccagttctcagccagcctctctcctgtccttgagc

SEQ ID NO: 999724 - DNA, 120 bp, Artificial Sequence
  ENSG00000234542_1 (sequence is synthesized)
atgcatgtcactgaactcagaacatggggagcctgggttacagatccacagaataaccaagaccagcgtggcaggggcctccaggggccgaaacctccaggagagaagtcagtaaatgct

SEQ ID NO: 999725 - DNA, 120 bp, Artificial Sequence
  ENSG00000234542_2 (sequence is synthesized)
atagaaagcacagcctgtgtcgggaatggagatgaaatatttctttgttagacatgccatcaaaaagtcccgaagttgaggaagaacgcaggtttattttcaaataaatgctcacttgga

SEQ ID NO: 999726 - DNA, 120 bp, Artificial Sequence
  ENSG00000234540_0 (sequence is synthesized)
aattggaatatagggcagaactggaactttgcatctaaacttggaggaaaacagagcttggaagaccgacaagtgaacagttgatagtgtcctgttctcctgttgtgtacactgccgagc

SEQ ID NO: 999727 - DNA, 120 bp, Artificial Sequence
  ENSG00000234540_1 (sequence is synthesized)
tggtgtctgctgctttgtttgtgggggaaaaaaacccatgcatctggtcacggaagtcttctgtgctgatgattgtagtggtgtgagtgcagaggaaaatcacggttagagaaagttttc

SEQ ID NO: 999728 - DNA, 120 bp, Artificial Sequence
  ENSG00000234540_2 (sequence is synthesized)
cctacacaagtaggctaggaattcctgtgtgcaccatctccatcacctttcacgttctcctgccttggaggaactgtggatgaaaatgactacagaataaaggattattacttcagacga

SEQ ID NO: 999729 - DNA, 79 bp, Artificial Sequence
  ENSG00000228021_0 (sequence is synthesized)
agaaagagaaagagaaagagagaaagaaaagtgaaagaaagaagaaagcaagaaagaagaaggaaggaaggaaggaaag

SEQ ID NO: 999730 - DNA, 68 bp, Artificial Sequence
  ENSG00000228021_1 (sequence is synthesized)
agaaggaaagcaagcaaggaagcaagtagccaaagccctgggaacccatcgaggaatggccccggagg

SEQ ID NO: 999731 - DNA, 120 bp, Artificial Sequence
  ENSG00000228021_2 (sequence is synthesized)
gccaaagccctgggaacccatcgaggaatggccccggaggcagagttaccctcagctctgatggaaagccttgctccaatctgaattctggtcttccaagaaaaatcacaagcaatgaca

SEQ ID NO: 999732 - DNA, 120 bp, Artificial Sequence
  ENSG00000228021_3 (sequence is synthesized)
acagactgtaatcagctctccacaaggtcatcccagaacaccaaggacagtccagatacctccaggctctcctcagtaatggacggaagcagtggtgcagataatctgcccaaatggcgg

SEQ ID NO: 999733 - DNA, 120 bp, Artificial Sequence
  ENSG00000228021_4 (sequence is synthesized)
gctccagttctccctggattccaggaacaccatctccttcctcgtcccttccatcccagggaaggtttacactgaaaattttttgtgatgaaaagatttgaagaagatgacaggagatgg

SEQ ID NO: 999734 - DNA, 120 bp, Artificial Sequence
  ENSG00000228021_5 (sequence is synthesized)
agaagcaccagctgatctgcagactccaaggaggtcccaggaagaggtgtcatccactaagatcttctgggacaggaaagccctgtgatacctcttacatcacaccaaacagagccccac

SEQ ID NO: 999735 - DNA, 120 bp, Artificial Sequence
  ENSG00000228021_6 (sequence is synthesized)
atcccagaacaccaaggacagtccagatacctccaggctctcctcagtaatggacggaagcagtggtgcagataatctgcccaaatggcgggctctggcatccggtgcagtcttgctcgt

SEQ ID NO: 999736 - DNA, 120 bp, Artificial Sequence
  ENSG00000228021_7 (sequence is synthesized)
aggtcccagctgaggaagccctgtggtcagctcagacagggatgcggactgaagccgaagcaggtgttagtaattgtcgtacctacagacgaggaaaccgagcctccatgaagtgaagtg

SEQ ID NO: 999737 - DNA, 120 bp, Artificial Sequence
  ENSG00000228021_8 (sequence is synthesized)
tcgtcccttccatcccagggaaggtctcctggttcttctagcccctctaacttcctctcatctctcctgtaacaacaatgatcagaatgatacctgaggaataaaccataagaaaaatga

SEQ ID NO: 999738 - DNA, 120 bp, Artificial Sequence
  ENSG00000228021_9 (sequence is synthesized)
ccatgccagcataaaacagggcctgctgaaatgcctagcgcttcaacaaggtgagctcttgtaggccaggggccaaatgacggacatcatgtgccaccaacaccacacagatgaaggcgg

SEQ ID NO: 999739 - DNA, 120 bp, Artificial Sequence
  ENSG00000228021_10 (sequence is synthesized)
tctgcccagaagagttgcattctaaatgacccctcagagagccctctggatggccgcctctcccacaggtccctgcaatcacataaaaaacactcattgcagccaagatgcacaaagcac

SEQ ID NO: 999740 - DNA, 120 bp, Artificial Sequence
  ENSG00000228021_11 (sequence is synthesized)
agtattgatttcatactcaggtttttccaaaacaaatcataaacccacaccaattatgtccaatcagttttatggataaagaagcctgagactctccaacaggagagcttgagtttccct

SEQ ID NO: 999741 - DNA, 120 bp, Artificial Sequence
  ENSG00000228021_12 (sequence is synthesized)
tctcactcttgtgctgggtgtccttttcctacctccagaccatcacaaggatatctgtaatgtagatgaggccagtccttttgcccaatgttgacagacaagaggaagattccagggaga

SEQ ID NO: 999742 - DNA, 120 bp, Artificial Sequence
  ENSG00000228021_13 (sequence is synthesized)
aatgccgcagcagcaaatgaatatgaatgatgcttttccactttgtgcttataaaatgccttttgtaccagaatctcaaagctctccaggaagcaaggctttgaatgggactttcactcg

SEQ ID NO: 999743 - DNA, 120 bp, Artificial Sequence
  ENSG00000228021_14 (sequence is synthesized)
gggtaaacatgagtggtcggagcttcccaagtcatttgtgataagaaagaacaaaagtccgggcacttttaaaatgcaatattcttgccttctgggtagtaaacaaagtgtgcagatgga

SEQ ID NO: 999744 - DNA, 120 bp, Artificial Sequence
  ENSG00000228021_15 (sequence is synthesized)
taatgacatctgtggattctggctccacttcctagagagaaaaaaaacatgtaaataaatacgtaaaaaattgtcatatgtggatgacacccttggttcatccagtagttaccattctgc

SEQ ID NO: 999745 - DNA, 120 bp, Artificial Sequence
  ENSG00000228021_16 (sequence is synthesized)
ctaacattcacgagctatggattctattactgggtcccttgtgactgcattacactgagaaagtaaaatatatttctcttcaatgcctgagggaagataaatgttatagaaatgtttagt

SEQ ID NO: 999746 - DNA, 120 bp, Artificial Sequence
  ENSG00000228021_17 (sequence is synthesized)
aaaaaggtccagtcagtggctttgacacttgatgcttttgcactaagcagtgctgtccttttgttctctccattggaagcctccttgtaaatgtttaatagctaaatgactcaccagagt

SEQ ID NO: 999747 - DNA, 120 bp, Artificial Sequence
  ENSG00000228021_18 (sequence is synthesized)
gcagaggggaactcagaagcagtctctatcagattgattggaaggttcatttgagaattctttccttctcatccttagtttaaggtgcacatgcagcatgaataactgcctgggctccag

SEQ ID NO: 999748 - DNA, 120 bp, Artificial Sequence
  ENSG00000228021_19 (sequence is synthesized)
ccaccgacatgcctgaacagcagacattagtgactctgacactcttcctaggattcattcagggtattaatcagcttcagaggaaaactcacaaacactctaagaagaattctgttgcaa

SEQ ID NO: 999749 - DNA, 120 bp, Artificial Sequence
  ENSG00000228021_20 (sequence is synthesized)
aagtgatacctagcagagacagtctgcccttgcagtcacttgcattatatcccaaaagtcaatgctaagagcttgcaaaagaatttgagttcatcaggtgtccagaaaataaactccttc

SEQ ID NO: 999750 - DNA, 120 bp, Artificial Sequence
  ENSG00000228021_21 (sequence is synthesized)
aaatgcagtcgaaatagtttcaataacttcaaatactctgcctgttatgaatctacagagcagcaattaaataattatcagttaatgattcaatgtcagatacctataaccaagggtgtc

SEQ ID NO: 999751 - DNA, 120 bp, Artificial Sequence
  ENSG00000228021_22 (sequence is synthesized)
ttgctattacactgaaaattacatattaaggttttgctggggtgcagaaaatgatcccccaaaatatagtgcttcggcatgccgagtactttgaaaatcggaaggttttagaaatcagcc

SEQ ID NO: 999752 - DNA, 120 bp, Artificial Sequence
  ENSG00000228021_23 (sequence is synthesized)
ttagacccaagctctctttctgactttccttacctccttgtttctctgatcctctttctagaagcacctggagggactggactgactctctggaattttcttatctaacaaagcttcttt

SEQ ID NO: 999753 - DNA, 120 bp, Artificial Sequence
  ENSG00000228021_24 (sequence is synthesized)
ccaaaaaaaaaaaggcaattgtcttaagaccaccccccccatctttaggaatctcatcaaatgaccaggaaagaagcaaagagacggagttgtcactatacccagatagactactcatct

SEQ ID NO: 999754 - DNA, 120 bp, Artificial Sequence
  ENSG00000228021_25 (sequence is synthesized)
attctcgagggcaggtctgacaacctttgtgcaaggtgacgtttcactcctcaccttcccaacacctcccccagagctcagaggaacttttgtcatttactcctacacacctcatccccg

SEQ ID NO: 999755 - DNA, 120 bp, Artificial Sequence
  ENSG00000228021_26 (sequence is synthesized)
ccttccctaagaagagagggtagacaggcatctggaccctgctgggttattaggccattactcttctgcaattccccatggtatgcacgttaaaataaacgcatgccttttctcctgttg

SEQ ID NO: 999756 - DNA, 120 bp, Artificial Sequence
  ENSG00000228021_27 (sequence is synthesized)
ctctgcctttttcagttcattttcagcaaaccttcagagggtgaaaggggaagttttcttctttgtccctacattttgcattgtcttataccttgacatttttctactcgtcaagttaaa

SEQ ID NO: 999757 - DNA, 120 bp, Artificial Sequence
  ENSG00000228021_28 (sequence is synthesized)
ctgtaaagcaaaatatagatcattagctgactaattatttttgagttaaaaagtagctagcatttggttttgggtaccacagtgtgtctaatatagtctttttagaagcaatgatctata

SEQ ID NO: 999758 - DNA, 120 bp, Artificial Sequence
  ENSG00000228021_29 (sequence is synthesized)
aacattttttatcattcaccatttctggttgagtaaagtgactcacagttgtagtcctacctattcaggacgctgaggcaggaggatcacttcagccgaggaaggagttcaagtccagcc

SEQ ID NO: 999759 - DNA, 120 bp, Artificial Sequence
  ENSG00000228021_30 (sequence is synthesized)
tggacggtctctaaaaatattaaaatttaaaaaaaattctgaacatgcaaccccaatatgtatttatttgtaaatgatatactgtcactaatacattgacattaaacaagtagaaaacaa

SEQ ID NO: 999760 - DNA, 120 bp, Artificial Sequence
  ENSG00000228021_31 (sequence is synthesized)
ccagctgatctgcagactccaaggaggtcccaggaagaggtataaaggaaggaatctgagacatggttcttcctccctgtgggtaccatcccttcctgtggcagctctcctgttctctaa

SEQ ID NO: 999761 - DNA, 120 bp, Artificial Sequence
  ENSG00000228021_32 (sequence is synthesized)
gcacctcgatccccccaaccccactcatttatatggacctggcactcagatctttcacccgtataatgccactccaggctctgcctcttgggtagtgtcctatgtcctagaatattccca

SEQ ID NO: 999762 - DNA, 120 bp, Artificial Sequence
  ENSG00000228021_33 (sequence is synthesized)
gatgagaatgggaccccttaggtagagctgtgtgctctgcctcacctaatccagctggcaacccccataggtgtcatccactaagatcttctgggacaggaaagccctgtgatacctctt

SEQ ID NO: 999763 - DNA, 120 bp, Artificial Sequence
  ENSG00000228021_34 (sequence is synthesized)
gtgcacagtgaggctgctctcagggaaggtgtcctcctgctggcagcaggggccatgggtactggcagggagttggcgatggagaggacagttcaggaagaaaagggtgcaggctctggc

SEQ ID NO: 999764 - DNA, 120 bp, Artificial Sequence
  ENSG00000228021_35 (sequence is synthesized)
ggcgatggagaggacagttcaggaagaaaagggtgcaggtgggctccatttggcctccttccttggtccattctcatcttcctgggccctgcggatgcatggcctgggctgctttgccct

SEQ ID NO: 999765 - DNA, 120 bp, Artificial Sequence
  ENSG00000228021_36 (sequence is synthesized)
ctggctttcaagctggtttgagctataagagatggagcagagaaaggagaggaaggccagcatctttcttccctgcttccttcaggctctggcatccggtgcagtcttgctcgtcatctc

SEQ ID NO: 999766 - DNA, 120 bp, Artificial Sequence
  ENSG00000228022_0 (sequence is synthesized)
atactcaacacatcacatggttcgaaggctaggccactttccactactattgagctgcctcctctctatgaaaatgcttttctggattgagggagacagtcatagagaaatgtgttgttg

SEQ ID NO: 999767 - DNA, 120 bp, Artificial Sequence
  ENSG00000228022_1 (sequence is synthesized)
gcatcgatttcctatggttgggcaatggcttccgccatctggaccaggtgacgtcagctatctggatttctgccagcattccccggcccaggaaacagacttccggctgtctgggctctg

SEQ ID NO: 999768 - DNA, 120 bp, Artificial Sequence
  ENSG00000228022_2 (sequence is synthesized)
agccatcttcggcctcctggagttggatgctgaaacttgcagtcacacaaggacttgaacctagagcttttctaaagcccgtactctttccagtaccctgagccaggggagccagcgggc

SEQ ID NO: 999769 - DNA, 120 bp, Artificial Sequence
  ENSG00000228022_3 (sequence is synthesized)
agaaatgacgtgtgaggtaccctctctctcttcacttccatgtgatctgttactcattttgtcaagacatcctgggtcccagagaccactcttattcccaggtgtgtgacctcctcctac

SEQ ID NO: 999770 - DNA, 120 bp, Artificial Sequence
  ENSG00000228022_4 (sequence is synthesized)
agactacagtgggaaagacaccatctccaggtgccaggtgctacacaagatactggctatagcagcgaacaggacagcccgtctcatcctcatggaggtcacaggacaatgagaagaaag

SEQ ID NO: 999771 - DNA, 120 bp, Artificial Sequence
  ENSG00000228022_5 (sequence is synthesized)
caaagtgcagggattacaggcatgagccatcgaacccggcccaagaagaaagacattgaacaagtaattacagggtattgggtgttatgaaagaaaagcatggtactgtataatgaggtc

SEQ ID NO: 999772 - DNA, 120 bp, Artificial Sequence
  ENSG00000228022_6 (sequence is synthesized)
actgtataatgaggtcatctaatttagtctggggtgacaaggaatgcctactaaagaaggtatcgtttaagacatacctggggaatagcggtagtgaaaatagaagctccagaaatgcag

SEQ ID NO: 999773 - DNA, 120 bp, Artificial Sequence
  ENSG00000228022_7 (sequence is synthesized)
ggaccatggctgacatgtttaccatgccagtgtctggcatggaagaggcccaattcctttggttgaaaggatgaagtaatctagctgaataaagggtgtgtgcgtgcacgcaggtgtgtt

SEQ ID NO: 999774 - DNA, 120 bp, Artificial Sequence
  ENSG00000228022_8 (sequence is synthesized)
tgtagttaaccttcctttagctcagcttaggaaacagcttttgtaaaactgcgtaactagtagtaggtgagagaggaatacgaatgatatacacaccattaaagacaacttactaacagc

SEQ ID NO: 999775 - DNA, 120 bp, Artificial Sequence
  ENSG00000228022_9 (sequence is synthesized)
actggtgaaaaggacctgagcccaaacagtgtccatgatagtgaatccattttggttgtgttggatttgaggtggcaaagaaataaggaactggcatgtgactgcgggaaattggagcta

SEQ ID NO: 999776 - DNA, 120 bp, Artificial Sequence
  ENSG00000234548_0 (sequence is synthesized)
actgtcttccgcctcccctcctgtcccactggaaggtcttcaggggcaataacaagcgtggagcttcatttcctctgataacaatgccttcttctcgaatccttcctggaggacctgtct

SEQ ID NO: 999777 - DNA, 120 bp, Artificial Sequence
  ENSG00000234548_1 (sequence is synthesized)
gaggatgttttccagctagcttttttttcataagtagaaagagtacactaaaataacagcaaaaagtatagtagatacataaaccagtaccatagtcatttattatcaagtattatgtac

SEQ ID NO: 999778 - DNA, 120 bp, Artificial Sequence
  ENSG00000234548_2 (sequence is synthesized)
tatacataactggatgtgctatacttttattatacaactggcagagcagtcaatttgtttaccccagcataaccacatacatgttctgcttgaattcttgccctggctcttggtgaagga

SEQ ID NO: 999779 - DNA, 120 bp, Artificial Sequence
  ENSG00000234548_3 (sequence is synthesized)
aataccaccccacttggcttctcctggtaacagtggctgcctttgcttgcctgtctccaactcctcccaagagcattgctgactgtgagctgtacctttgaatctgcaggggcccttccc

SEQ ID NO: 999780 - DNA, 120 bp, Artificial Sequence
  ENSG00000234548_4 (sequence is synthesized)
atctgtctaatatttgctatcagtgaaacagaaaaacccttgggacactgtcagggagcattctggcccgcaaaatgcctaccaaccaccatgccgttctcattcttgccattagcaacc

SEQ ID NO: 999781 - DNA, 120 bp, Artificial Sequence
  ENSG00000234548_5 (sequence is synthesized)
ttctctttctctacatcatcagcgtcctatgtgcactcattctagagggccaataattctcacagattaccagtgtagacttaaattatttttattataatatcacagtacaagtaaaaa

SEQ ID NO: 999782 - DNA, 120 bp, Artificial Sequence
  ENSG00000234548_6 (sequence is synthesized)
acataaaccttgagtgtagtctactgcacacctgggcaatatggtatagcgtattgctcctaggctgccaacctgcacagcatgttattgtactgaacaatgtaggcaatgtaacgcaat

SEQ ID NO: 999783 - DNA, 120 bp, Artificial Sequence
  ENSG00000234548_7 (sequence is synthesized)
gatatttgtgtatctaaacatacctaaatgcagaaatgctgcagtagatatacaacataaaagattgtttttaagtccacctgtagaaggcacttaccatgaattgaacttgcaggcttg

SEQ ID NO: 999784 - DNA, 120 bp, Artificial Sequence
  ENSG00000234548_8 (sequence is synthesized)
tgctgggattacaggcgtgaaccaccgcatctagcctaaaattatattgttaaaagactttgtttctcagtttgggataatcagaattcatagttctgatctcgactaccagttttaatg

SEQ ID NO: 999785 - DNA, 120 bp, Artificial Sequence
  ENSG00000234548_9 (sequence is synthesized)
gttctgatctcgactaccagttttaatgaggtacttctttctaactccatcagctgtgtggctatctgcagattctgctatcagctacaggtctgggtttgtgtctccgacaaagaacca

SEQ ID NO: 999786 - DNA, 120 bp, Artificial Sequence
  ENSG00000234548_10 (sequence is synthesized)
cctcaaagccccacagaaaaggactgtaccgtatacttcaaactattgacacctcaaagaacagagcttgggttcaggcttctgatgcattctgagacactctcagaccataccagtggg

SEQ ID NO: 999787 - DNA, 120 bp, Artificial Sequence
  ENSG00000234548_11 (sequence is synthesized)
ctgggtcaggatttacagaactattttcatttcaagagcatacgggctcatgagattgctaactcaagatccggtggaacagaaatacttatatcggactgaataaactgatgaggaaaa

SEQ ID NO: 999788 - DNA, 120 bp, Artificial Sequence
  ENSG00000234548_12 (sequence is synthesized)
gccaacagcagcctggctccttcatcctgtgcagtatgggacagagctgggtccttgttgtcatcagccagacaagcacacattaaagcccaccttagccattggcattacagctttaaa

SEQ ID NO: 999789 - DNA, 120 bp, Artificial Sequence
  ENSG00000234548_13 (sequence is synthesized)
agcagctccatcctaccatgctgtcactctactcaatcacgtgatcttaacgaccagctctacatatcctctctccatgcccccaccaccatcccccaccaacaaatccgatacatttgt

SEQ ID NO: 999790 - DNA, 120 bp, Artificial Sequence
  ENSG00000234548_14 (sequence is synthesized)
acttctttctaactccatcagctgtgtggctatctgcagataccacccacataaacaaaaactttttgggagtcctccagaatttttaagagttatctaaactattgcctttaatgacca

SEQ ID NO: 999791 - DNA, 120 bp, Artificial Sequence
  ENSG00000234548_15 (sequence is synthesized)
cgaataagtttttctcttccctggcctgccgtttacgtagtaccctggatgaatctatacttactccatagtaagtagtaccttggatgaatctatacttgcatccaatggaaatgagag

SEQ ID NO: 999792 - DNA, 120 bp, Artificial Sequence
  ENSG00000234548_16 (sequence is synthesized)
tgatggtgcagagttatccgaagtaactccagctatgttgtggatcttctaatcatgggctcatctaagccttcccagatatcactctagtttttacaatctttgtttatgacaattagg

SEQ ID NO: 999793 - DNA, 120 bp, Artificial Sequence
  ENSG00000234548_17 (sequence is synthesized)
gctgtaacattggctgtagacatttgttgcatcaaggaactcagcttccactgaagttctgaagttaatcagtttctgatcttgttctgcaactctctgcaagaagaaaaatcaccagga

SEQ ID NO: 999794 - DNA, 120 bp, Artificial Sequence
  ENSG00000234548_18 (sequence is synthesized)
aatagtgcatcctgaaaggagtcaaagtttccttatccagctggagcagtgtgatctcggaccagagtcaattccttgcccaacagacttcacattgagccatgagaagcagcctactta

SEQ ID NO: 999795 - DNA, 120 bp, Artificial Sequence
  ENSG00000234548_19 (sequence is synthesized)
cccttacctggacacttctccaaaacctgtgaaatggcctctgtcactgcctcaaagcctcatccttggtgggcaactcacctggatcctgagaccaaaatatagagcttaatgaactgc

SEQ ID NO: 999796 - DNA, 120 bp, Artificial Sequence
  ENSG00000234548_20 (sequence is synthesized)
atccacactatccaatatggtaaccactagccacttgtgactactgagtgtctgaaaggttctgcttgaattcttgccctggctcttggtgaaggatcggcctgctggatctgagtcatc

SEQ ID NO: 999797 - DNA, 120 bp, Artificial Sequence
  ENSG00000234548_21 (sequence is synthesized)
attggctgaagcatcattatttggtgcatgactgtagaactttaagcaatgatgaaaatgctctatatccacactatccaatatggttctgcttgaattcttgccctggctcttggtgaa

SEQ ID NO: 999798 - DNA, 120 bp, Artificial Sequence
  ENSG00000234548_22 (sequence is synthesized)
gtatatgtggtctgccattggctgaagcatcattatttggtgcatgactgtagaactttaagcaatgatgaaaatgctctatatccacactatccaatatgataccacccacataaacaa

SEQ ID NO: 999799 - DNA, 120 bp, Artificial Sequence
  ENSG00000234548_23 (sequence is synthesized)
cttcagctcccttccaataccttccattcattctcttcatcaaggacatctgcagtgcacggcagcatcagggggcaggcctcctgagcccccagcaggattccatttctccaccttcca

SEQ ID NO: 999800 - DNA, 120 bp, Artificial Sequence
  ENSG00000234548_24 (sequence is synthesized)
ctgccatccgacttgctgatgcccaggcccccagaggaggaagggctatcctgttgttatgagaacaaatgaagctaagaagtggtttgaggtgggaacagccaggccctacagacagag

SEQ ID NO: 999801 - DNA, 120 bp, Artificial Sequence
  ENSG00000234548_25 (sequence is synthesized)
agactcctgtgttttttagtagcattagcaaaagagcttagcatcgctgctaattaaaatcacatccacgtttggcttcggaatgcataaggcatcacaataactcagcactgaaggggc

SEQ ID NO: 999802 - DNA, 120 bp, Artificial Sequence
  ENSG00000234548_26 (sequence is synthesized)
ttatagtggttttaaaataaatccacacattctttgcagtgtgctcccttcaatgcagcctcattcctctcctcttgaatgtaggctattctgagtgactcacttatcaatagaatgtag

SEQ ID NO: 999803 - DNA, 120 bp, Artificial Sequence
  ENSG00000234548_27 (sequence is synthesized)
tgaaaacggtggaatatgactttcaaagatatgctgttgaagacactgcgcttctgtcttgctctctctttcggatcacgtgctcttcagggagccagctgccatgtcatgcagacactc

SEQ ID NO: 999804 - DNA, 120 bp, Artificial Sequence
  ENSG00000234548_28 (sequence is synthesized)
aagcagccctatggagaagccacatggagaggggctgaggcctgtttcccacagccatgtgagtgggccattccggaagcagatcatccagccctcgccaagctgacagacgactgcatc

SEQ ID NO: 999805 - DNA, 120 bp, Artificial Sequence
  ENSG00000234548_29 (sequence is synthesized)
cccagccaacatctagactggagcctcacgagagaccaacccggagaccccacccagctaagccactccagaatccctgaccccaaacattgtgacatgataaaaatgtgttgtttaagc

SEQ ID NO: 999806 - DNA, 120 bp, Artificial Sequence
  ENSG00000234548_30 (sequence is synthesized)
aactttctagattaaatacaaacaaactacaacactgatcaaaataaaagcagcaacattaatttaatgtggcaatgtcttgtggaaagcaaattgccagtgttgaaacagtagaaagtt

SEQ ID NO: 999807 - DNA, 120 bp, Artificial Sequence
  ENSG00000234548_31 (sequence is synthesized)
cttaatgttggttttttactggttgtatttccgcattttaaatttagtaacacttaacacagagaatgctgtatataaaatcatatatatatatatacatacaaaatcatggtccactgc

SEQ ID NO: 999808 - DNA, 72 bp, Artificial Sequence
  ENSG00000234548_32 (sequence is synthesized)
cctttaaaatttttttgtagagatgggctctcactatagccctgttctggaactcctgggctcaagccatcc

SEQ ID NO: 999809 - DNA, 120 bp, Artificial Sequence
  ENSG00000234548_33 (sequence is synthesized)
tccacactatccaatatggtaaccactagccacttgtgactactgagtgtctgaaaggtgactggttctgcttgaattcttgccctggctcttggtgaaggatcggcctgctggatctga

SEQ ID NO: 999810 - DNA, 120 bp, Artificial Sequence
  ENSG00000228027_0 (sequence is synthesized)
attcaagcccaagagaagtgaggcatgggatgctttaattcaaagacctcctcagctgtaaggtgaacaaatgagggtacagaagagagagttgttagaatctacattggtactttcaaa

SEQ ID NO: 999811 - DNA, 120 bp, Artificial Sequence
  ENSG00000228027_1 (sequence is synthesized)
tttcctttcttccttcctagatgctttctgcattagcactgtgctccatttcttcagtcctatgcccttcccaaaattggcactgcaagacatgataccttaaaggcatctccaaatgag

SEQ ID NO: 999812 - DNA, 120 bp, Artificial Sequence
  ENSG00000281103_0 (sequence is synthesized)
agcaggctcacaccctgcccttcagagttgcagcagctaatgctgatgccaggaccttgtcctgccaggaagcctctgattagggctgtgaaccaacttccttttcacatctgcaaggac

SEQ ID NO: 999813 - DNA, 120 bp, Artificial Sequence
  ENSG00000281103_1 (sequence is synthesized)
acttggaggcaactgcccaaggccactctgaggagggttgaatgttctttattaaaaggactgaggatcatgtgtgttggtgggccttggactctgctctaagctcaaattttgcagttt

SEQ ID NO: 999814 - DNA, 120 bp, Artificial Sequence
  ENSG00000281103_2 (sequence is synthesized)
acgtggaggacatgaggcttccgcaggaacagctctgaaagctgagttctcgggtccctgtgaaggagggaagcttgcctgccttggagcgtgaaaaagtcttgctggacagaagtctca

SEQ ID NO: 999815 - DNA, 120 bp, Artificial Sequence
  ENSG00000281103_3 (sequence is synthesized)
cggtttaaaactgggaagggagaggattgagatcacactagaatgcacagaaaattcttaaaacaaaaaaatgagagaaacttcatcagaatgtgaaaagaactataaagctacagtgct

SEQ ID NO: 999816 - DNA, 120 bp, Artificial Sequence
  ENSG00000281103_4 (sequence is synthesized)
gaagagagggcaatactggcactagaatgagaagattcatggaacacagtggaaaatgcagtaagagagctgcatgtatgtaatattttatcatgtgataaagtgatatattaatattca

SEQ ID NO: 999817 - DNA, 120 bp, Artificial Sequence
  ENSG00000281103_5 (sequence is synthesized)
agaaggggtggtgcctgggaggacctgcagaggagctcccgcatctcctcaggccctttcttctgcgccatcttgtggcagttgagagcaggcccagggcagaagggaggcaggggcatt

SEQ ID NO: 999818 - DNA, 120 bp, Artificial Sequence
  ENSG00000281103_6 (sequence is synthesized)
aagagctcaggcctccagctgagggactgcagatgttggactcatggaggcaaccactcaaggtcactctgagaagggttgaacgtgctttattaaaaggactgaggatcatgtgtgttg

SEQ ID NO: 999819 - DNA, 120 bp, Artificial Sequence
  ENSG00000281103_7 (sequence is synthesized)
gtgtgtcccggagtctgctctaagagctgcacgggggcttggatcaatgcctgaatccagtgttcctgagtgcagagcatctttgctctgggtgagctttgaccatcctggagaagaagg

SEQ ID NO: 999820 - DNA, 120 bp, Artificial Sequence
  ENSG00000281103_8 (sequence is synthesized)
ctgctgcgggggtgggacaaagccaagaccaatgcccagcggccaaggccagccagatggctctgtgctggcagccagtgtacacggattttacctgaaggaaaatgtcacattttccac

SEQ ID NO: 999821 - DNA, 120 bp, Artificial Sequence
  ENSG00000281103_9 (sequence is synthesized)
agacaactgaagaaagagagctctttggattaccctaattgtgatttactcattggaaccactgttttggattgtccaaaattaagtctcaaagcttaaatatgaggcttcagggagtta

SEQ ID NO: 999822 - DNA, 120 bp, Artificial Sequence
  ENSG00000281103_10 (sequence is synthesized)
tcctgaaatcagtgcttggtatcttcttgttttttgcttgttttttaaaaccttaattctcatatttttctgtcatatttctcagtgcctggtacattatcaccattaatccatgccagt

SEQ ID NO: 999823 - DNA, 120 bp, Artificial Sequence
  ENSG00000281103_11 (sequence is synthesized)
tatgtacagttttgcatgtttgttttttattttactcttttctctccttcattccctattcctgttcccccataggtgcccagtctaatgtatttgatatctgtccttagagcctccgta

SEQ ID NO: 999824 - DNA, 120 bp, Artificial Sequence
  ENSG00000281103_12 (sequence is synthesized)
tctgtgaagactagagtcatgcacttcatcacatttcagtaacgatgggccgcatgtaccacagtcccatgagatgatagaggtgcagaaaaattcctgtcatctagtgacatcgtagcc

SEQ ID NO: 999825 - DNA, 120 bp, Artificial Sequence
  ENSG00000281103_13 (sequence is synthesized)
atcataacatcacaacacgactctcatttgtggtgaccctggtgtacacaaacctactgtactgccagttgtataaaagtctagcacatccagctacgcacagtacatacttgaaaatta

SEQ ID NO: 999826 - DNA, 120 bp, Artificial Sequence
  ENSG00000281103_14 (sequence is synthesized)
taataaatgaccatgttactggtttatgtaattactatattatactttttaatcattattttagagtgtacaacttctacttgtaaaaaaaaaaaaagttaactgtaaaacagcctcagg

SEQ ID NO: 999827 - DNA, 120 bp, Artificial Sequence
  ENSG00000281103_15 (sequence is synthesized)
caggcccttcagtaggaattccagaagaaggcactgttgtcctaggagatgacagctccatgtgtgttactgccctgatgaccctccgtgggtacaagatgtggagctggactacagtga

SEQ ID NO: 999828 - DNA, 120 bp, Artificial Sequence
  ENSG00000281103_16 (sequence is synthesized)
tattgaagatctcgaccctgtaggcctaggctaatgtgtggctgtgtcttgatttttagcaaaaatgttttaaaagtgaaaatgttaaaaatagaaaacagtttatagaataaggatata

SEQ ID NO: 999829 - DNA, 62 bp, Artificial Sequence
  ENSG00000281103_17 (sequence is synthesized)
gttacaggcgtgaactacagggcctggcctgtttgtgttttaagctaagtgttgttaggagt

SEQ ID NO: 999830 - DNA, 120 bp, Artificial Sequence
  ENSG00000281103_18 (sequence is synthesized)
cctggcctgtttgtgttttaagctaagtgttgttaggagtcaaaaagttaaaaaataaaagttgctaaagtaaaaaagttacagtcagcaaaagctaatttattaatgaagaaagaaatg

SEQ ID NO: 999831 - DNA, 120 bp, Artificial Sequence
  ENSG00000281103_19 (sequence is synthesized)
tatgttttgatcaatttagtgtagcctaagtgtccagtgtttatagtctacaggagtgtacaggaacgtcctaggtcttcacatcctctcaccactcactcattgactcactcacccaga

SEQ ID NO: 999832 - DNA, 120 bp, Artificial Sequence
  ENSG00000281103_20 (sequence is synthesized)
gtagcttccagacctgcaagctccattcatggtaactcccctatacaggtgttacagtacttaaaattttatatcctatttttactgtaggttgtctctgtctagatatatttggataca

SEQ ID NO: 999833 - DNA, 120 bp, Artificial Sequence
  ENSG00000281103_21 (sequence is synthesized)
cacatacttaccaatgtgttacagttgcctgcagcactcagtacagtaacatgctgcacagctttgtaacctagaaacaacaggctacacctatagcctctgtgtagtaggctgtgccat

SEQ ID NO: 999834 - DNA, 120 bp, Artificial Sequence
  ENSG00000281103_22 (sequence is synthesized)
ctgggtttgtgttctacaacgttgcattctacaatgttcacacaaggatgaaatcgcctaaggacacatttctcagaatgcttcctcattgtcaagcaatgcatgactgtatatagaatt

SEQ ID NO: 999835 - DNA, 120 bp, Artificial Sequence
  ENSG00000281103_23 (sequence is synthesized)
gttcataaatactgtgtttttcatccatgtaaatggcatgccatttctacctatccacgtctgcacaccagctcatgcccctcattcatgctcctttctgctgctcaccgctccacagct

SEQ ID NO: 999836 - DNA, 120 bp, Artificial Sequence
  ENSG00000281103_24 (sequence is synthesized)
ggcagcccctgcattccatccatccattcccccaaacatgggcatgttgctatcagcagggagctgtgatggacccctcacagggtcctcttattcctcgtgcaagcctttccctgggaa

SEQ ID NO: 999837 - DNA, 120 bp, Artificial Sequence
  ENSG00000281103_25 (sequence is synthesized)
gttcctcccagcattgctggtcagggggaacacacactcacatcttcactaaatgctaccagtgctatggtgttatcagaaactttatttatttattttttgccaatatgatagctatca

SEQ ID NO: 999838 - DNA, 71 bp, Artificial Sequence
  ENSG00000281103_26 (sequence is synthesized)
acctgtcttaaaaacaaaaacaaaaaaaatggcacaggtctgattattaggaagctgaggttcttttttat

SEQ ID NO: 999839 - DNA, 120 bp, Artificial Sequence
  ENSG00000281103_27 (sequence is synthesized)
gcacaggtctgattattaggaagctgaggttcttttttatacttagtattcactgaagtgtgaattacctttcatgtcctctaaacataccaacaaggaggctggagttaggacttatgt

SEQ ID NO: 999840 - DNA, 120 bp, Artificial Sequence
  ENSG00000281103_28 (sequence is synthesized)
tagagccagcctgcctggggcacagcctggccctgccatttattgactgtgtgactttgagaaagcttcctcatgtaactctatcttagcttccctgcctgtaataagtaaaaacagcaa

SEQ ID NO: 999841 - DNA, 120 bp, Artificial Sequence
  ENSG00000281103_29 (sequence is synthesized)
ctacctcatagatttgtaaagattacataaaataatacatgcaatgcatggcaaacgacagtcaacgaatgttattattatattaactattgccatattataaatataaataaatataaa

SEQ ID NO: 999842 - DNA, 120 bp, Artificial Sequence
  ENSG00000281103_30 (sequence is synthesized)
gtcccggagtctgctctaaggccctgtggctgcctggtgccctgggaatggtccggtcatgggcctcagcccaggatgagcagccaacaatgcaatcccacgaagagtgtgcggaaggga

SEQ ID NO: 999843 - DNA, 120 bp, Artificial Sequence
  ENSG00000281103_31 (sequence is synthesized)
gaggttacttctcaagatggagctgccaaatagggacactttggagagtctggcctgagaacttttagtttcaagaatgtattgctttggaaaagacagaataaaagtccaagcactgcc

SEQ ID NO: 999844 - DNA, 120 bp, Artificial Sequence
  ENSG00000281103_32 (sequence is synthesized)
cttgtgtactttagacatttatcctttgtgaatttgggatggtacaaatatcttaggcaagtctatcatctgtctaccaactaactatctcaaatatcttttcattaaatataaattctt

SEQ ID NO: 999845 - DNA, 120 bp, Artificial Sequence
  ENSG00000281103_33 (sequence is synthesized)
gagacacaggcagagagaagtgactgaggatgtgtcttaggggactcccaagccttcctcccagaaggggtggttcctgggaggacctgcagaggagctcctgtgtctcctcaggccctt

SEQ ID NO: 999846 - DNA, 120 bp, Artificial Sequence
  ENSG00000281103_34 (sequence is synthesized)
tcttcggcgccctcttgtggcagctgagagcaggcccagggcagaagggaggcaggggcattgagagttcaggcctccagcagagggactgcagatttaggggaagctgaccctggaatt

SEQ ID NO: 999847 - DNA, 120 bp, Artificial Sequence
  ENSG00000281103_35 (sequence is synthesized)
aacaggctcagaccttggagggggcagtcccacaacaggctcctaccctgcccttcagagttgcagcagctaatgctgatgccaggaccttgtcctgacaggaagcctctgattagggcc

SEQ ID NO: 999848 - DNA, 120 bp, Artificial Sequence
  ENSG00000281103_36 (sequence is synthesized)
ctgaaccaagttccttttcgcatctgcagacacatggaggcaaccactcaaggccactctgagaagggttgaacgtgctttaaattaaaaggactgaggatcatgtgtgttggtgtgtct

SEQ ID NO: 999849 - DNA, 120 bp, Artificial Sequence
  ENSG00000281103_37 (sequence is synthesized)
ggtaaatatgtgtgtgtgtgtgttgggggggcaggggttgtgcctgtaatcctgtgtgtgtgacctccttattagaggatttttgttcattaaagtaggagtgtgaatttgtttgtttgc

SEQ ID NO: 999850 - DNA, 120 bp, Artificial Sequence
  ENSG00000281103_38 (sequence is synthesized)
ttgtttgtttttaaagtagtactgggtgccatgtcatgcaatatttggaacatacttaaactaaaaacttgttatttttctgtacttccaattcccccggtattgtatattttatttgtc

SEQ ID NO: 999851 - DNA, 120 bp, Artificial Sequence
  ENSG00000281103_39 (sequence is synthesized)
atccctaccctcagaaagcagactaatatctgcagtgcacctggattcacagttggaaatataggggacaaaaaaagtatagtaatattattgtgaaaattcagtaaggcataggcagat

SEQ ID NO: 999852 - DNA, 120 bp, Artificial Sequence
  ENSG00000281103_40 (sequence is synthesized)
tatcaccacctctgtaagaatatatagagacacatgtttgaaagatgcataatgagatgtagaacagtgtctctctcagttgttgtgttgtcctagctcagagaattcagtttctgctgt

SEQ ID NO: 999853 - DNA, 120 bp, Artificial Sequence
  ENSG00000281103_41 (sequence is synthesized)
catcacagctgggaatgagaaagggagggggctccggttggtctccctctgcctctggagcacacgtgcaggacatgaggctgctgtaggagcagctctgaaagctgagttctcggggtc

SEQ ID NO: 999854 - DNA, 120 bp, Artificial Sequence
  ENSG00000281103_42 (sequence is synthesized)
cttgtgaaggaggaaagcttccatgccttggagcatgaaaaagtcttgctggacagaagtctcatggtttaaaaatgggaagggagaggattgagatcacactagaatgcacagaaaatt

SEQ ID NO: 999855 - DNA, 120 bp, Artificial Sequence
  ENSG00000281103_43 (sequence is synthesized)
cttaaaacaaaaaaataatgagagaaatttcatcagaatgtgaaaagaactataaagctacagtgctgaagagagggcaatactggcactagaatgagaagattcatggaacacagtaga

SEQ ID NO: 999856 - DNA, 120 bp, Artificial Sequence
  ENSG00000281103_44 (sequence is synthesized)
tatggaaacaaatattattgcatttcgttcttaccagatatagatagtgatttagttgtaataaaaacaaaatcattacacttaaacaatgatgaattgcatagaaattctaggtgagat

SEQ ID NO: 999857 - DNA, 120 bp, Artificial Sequence
  ENSG00000281103_45 (sequence is synthesized)
tggcctttctaagcttgacatcaaactagacaccctagaaaaattgatagattttaatgctttttttttcaaagttcaattcaccaaaaggtgccaaatgtaaataataacaaatgaggg

SEQ ID NO: 999858 - DNA, 120 bp, Artificial Sequence
  ENSG00000281103_46 (sequence is synthesized)
gaaatatcttcaacacattcgataaagggtcagtatctttaaaatagtgtatcttaactcttacgaaataataagaaaaaattaatcctccaagagaggaataggcaaagagtatgacat

SEQ ID NO: 999859 - DNA, 120 bp, Artificial Sequence
  ENSG00000281103_47 (sequence is synthesized)
ggcaattcacaaaagaagaactataaataacctataaagttgtgaaataatactagtactcccaaagatgggggaatgcaaactgaatttacaaatctcattttcggaaccacagagctt

SEQ ID NO: 999860 - DNA, 120 bp, Artificial Sequence
  ENSG00000281103_48 (sequence is synthesized)
ggattgcaatcattatcaaattaaagcatatgacttagggaatgttaattaaccgcccaatttctaatgttacattcaacagtactttaaaccttaatgaagtttctgtgtagattaaat

SEQ ID NO: 999861 - DNA, 120 bp, Artificial Sequence
  ENSG00000281103_49 (sequence is synthesized)
gattaaataaaatatgcatgtaatgtgcttagtacattaactaccagaatgtcagtacccatatgtaccatcaatattattattatcgttattcatttttttgagacagagtctcactct

SEQ ID NO: 999862 - DNA, 120 bp, Artificial Sequence
  ENSG00000281103_50 (sequence is synthesized)
aactggactgcagtagtgtgatattagctcactgaaaactccacctaccaggctctacagattctcctgcttcagcatccaagtagctgggattacatgtgtgtgccactacagccagct

SEQ ID NO: 999863 - DNA, 87 bp, Artificial Sequence
  ENSG00000281103_51 (sequence is synthesized)
cgttggctgagctggtcacaatctcccggcctaagtgatcctaacgactggactgcccaaatgctgggattacaggcatgagccacc

SEQ ID NO: 999864 - DNA, 120 bp, Artificial Sequence
  ENSG00000281103_52 (sequence is synthesized)
caccgggcctggccagtattattattactaatacagtaattattgtataaaaattcctgatagatcagtgatgccatcattaaataatcaatgcataaaaacattcaaataaatgatatg

SEQ ID NO: 999865 - DNA, 120 bp, Artificial Sequence
  ENSG00000281103_53 (sequence is synthesized)
gacatctttatgcatgcttatgaagtatgtgcacctttagaagtaagacacacagtccagacacaggaaaatataagattgattaaaatatatagaaactgaatatcagaaagaaaatat

SEQ ID NO: 999866 - DNA, 120 bp, Artificial Sequence
  ENSG00000281103_54 (sequence is synthesized)
aaatatggcattcaaatagaaagaatacatactccgctatgaaaaacagagtgaaacagctcaagtgaactgccaaaaatattgttacctatagtgtcagggagaaaagaagaatgagaa

SEQ ID NO: 999867 - DNA, 120 bp, Artificial Sequence
  ENSG00000281103_55 (sequence is synthesized)
gtctacaatggaagctaaaatcttcaaatgcatcatcttttatgattttgacttcacttccatgtaaatgttttatatatgcaaaacagatatgaaacaaaacaaagtaatacaacaaat

SEQ ID NO: 999868 - DNA, 120 bp, Artificial Sequence
  ENSG00000281103_56 (sequence is synthesized)
ttccaaaatgtaaaaaagaaaactgaacaattaaagtagctatatcaatgttgacatgaacacatagagaaaaattatttcaaatgattttgtggaaaaagtattctgattatgtaccca

SEQ ID NO: 999869 - DNA, 120 bp, Artificial Sequence
  ENSG00000230212_0 (sequence is synthesized)
gagtgccatggggggtgtcagggagaagacaattcctacaatgccacctcatgtagctgaaacctcgccttcctctcctaagtgttctgtgcctgagtgctggggtcaggattatgcatg

SEQ ID NO: 999870 - DNA, 120 bp, Artificial Sequence
  ENSG00000230212_1 (sequence is synthesized)
gtcccaacagggcttgaccaggcaggacaagcagggtcgaaggagtcccagtgctttaaaatacactccaggggagtacacgttactaccttgtgaagagggtgcctgcttctgcttcac

SEQ ID NO: 999871 - DNA, 120 bp, Artificial Sequence
  ENSG00000230212_2 (sequence is synthesized)
tgaggcctccccagccatgcagaactcaccatgtacctatcacctggtataagaaagaaatccttagcaataaagacggaaccacgtatgtcctcctcccctcaccctcagagggaggcg

SEQ ID NO: 999872 - DNA, 120 bp, Artificial Sequence
  ENSG00000230212_3 (sequence is synthesized)
tcccctcaccctcagagggaggcgttatggaccccgcagacgccaggagccccagtgcatcggttcttcttcggggaggccacgtcccctccccatacccttgaaggcgatgcccgcgtt

SEQ ID NO: 999873 - DNA, 120 bp, Artificial Sequence
  ENSG00000230212_4 (sequence is synthesized)
gttgaccagcacgtccaggcccccgtactccttgcgcaggaagtcgcgcagggcgcggatgctctgcagatcgtcgatgtccagctggtggaagcgcgggctcaggccctccgcctgcag

SEQ ID NO: 999874 - DNA, 120 bp, Artificial Sequence
  ENSG00000230212_5 (sequence is synthesized)
ccgcgtcacgtcccgcgccgtgagcaccacgtcccccgagaacagccggcacaggtcgcgcacgatggccaagccgatgcccttgttgcctccagtcaccagcgctacatggatgccgga

SEQ ID NO: 999875 - DNA, 120 bp, Artificial Sequence
  ENSG00000230212_6 (sequence is synthesized)
cgacatggctgaacggggcgcgcggaacacctgcgtggagaacagacctggctcaggcccgggagccccgcagcgtgttccagagactgctcgagtctggcggtcgtgggcgcgcacccg

SEQ ID NO: 999876 - DNA, 120 bp, Artificial Sequence
  ENSG00000230212_7 (sequence is synthesized)
tgggttacacgcccggccgctgagcgcgcaggcgcaggccccgccctagcggggcggggctgaaccatccctacccctccccaccggaacctcgccggggtgcggagcaggcggagagcc

SEQ ID NO: 999877 - DNA, 120 bp, Artificial Sequence
  ENSG00000230212_8 (sequence is synthesized)
agctagcctgactttgcagaacccgcaggccgaagaccgaggctggtctctagctactggctgttggctgcccacgtggcagtgaagaaccattcctagtggccatgtgcctagatctga

SEQ ID NO: 999878 - DNA, 120 bp, Artificial Sequence
  ENSG00000230212_9 (sequence is synthesized)
actcactgcttgcccttggttctctgaggggttttcttcatattctcccagctgttcaatcattcctagttgtgtttgaagaaatagtacatttgcatggtttttttttctttttttcct

SEQ ID NO: 999879 - DNA, 120 bp, Artificial Sequence
  ENSG00000230212_10 (sequence is synthesized)
ggagatatgcggaaagaataatcatcttacagacaccatgtacctatcacctggtataagaaagaaatccttagcaataaagacggaaccacgtatgtcctcctcccctcaccctcagag

SEQ ID NO: 999880 - DNA, 120 bp, Artificial Sequence
  ENSG00000229261_0 (sequence is synthesized)
aaatgtgagcacagcccttgcggtggtatgagaggtggcctcgacggtggagcccatcctgggatgccatcactgggaagagagagctggtgctcccagcctggggaaactcggataaag

SEQ ID NO: 999881 - DNA, 120 bp, Artificial Sequence
  ENSG00000229261_1 (sequence is synthesized)
gtgacaggaggctccatcccaggcacattcccggtgaaagggcattttatccagggtgaagaacacgtgctactgtctacagagtgcgtccacgtacgtcacctcttctcatcgccacag

SEQ ID NO: 999882 - DNA, 120 bp, Artificial Sequence
  ENSG00000229261_2 (sequence is synthesized)
catccctttgaggcagccacgtaaggccaaagttcttgtccccagagccatgaaaaatacacactgaaaacctcccagttctcctgtggatgaacaatctgcagatttttagaaattgtt

SEQ ID NO: 999883 - DNA, 120 bp, Artificial Sequence
  ENSG00000229261_3 (sequence is synthesized)
ccagggtctcagtagtaacccttgcaggcaccgctggcccaggatctggacaattctagaggcaggaagcacagagacgaagaaggggactcactgcctgaccgcagagaaacgagctgt

SEQ ID NO: 999884 - DNA, 120 bp, Artificial Sequence
  ENSG00000229261_4 (sequence is synthesized)
gccttttgaccagatggagaaaccaaggcacagagcccaactgggacgcagtgaaatcgagatttgaacgcaggcagtctagctgcagagttcttgcttgcccgctgtgctacactggct

SEQ ID NO: 999885 - DNA, 120 bp, Artificial Sequence
  ENSG00000229261_5 (sequence is synthesized)
aggctggaaacaaggcacggggagacttggggcctcagctggaaaaatggccctaagctctttctaacacagtggaaagtgcacaggccctggggtcctactttggcttttcttaaactg

SEQ ID NO: 999886 - DNA, 120 bp, Artificial Sequence
  ENSG00000229261_6 (sequence is synthesized)
caggtaaaggtccaagtctatattcatatctgtaaaagcttcatagctatgtcagtggtcacagtgagaaagaaagcaaattatcacacaaggaaaggcatgtggtctacagtgggcaca

SEQ ID NO: 999887 - DNA, 120 bp, Artificial Sequence
  ENSG00000229261_7 (sequence is synthesized)
ctagaagcatctcctgaagctcagcctttccctggctggggacccctcttcgctcacccaacttggtctcttgggataagaaaatgtgtgcagacctttcagtccactcagtaaggcatg

SEQ ID NO: 999888 - DNA, 120 bp, Artificial Sequence
  ENSG00000229261_8 (sequence is synthesized)
agaaagtacctgttccatgtactggaattaaaggaacagttgggaattttatggaaattctattcctgttactaaagaaaacagctcttgaattctgccctgtattctttttaatggtaa

SEQ ID NO: 999889 - DNA, 120 bp, Artificial Sequence
  ENSG00000229261_9 (sequence is synthesized)
gtccaaagttaagtcgtcataacataaatcagtgtgacctgctggtattccacttgctgcaaaagaatcagaaactgtgtgggagagcaaacttccataataagaaaaccaatgtagaga

SEQ ID NO: 999890 - DNA, 120 bp, Artificial Sequence
  ENSG00000229261_10 (sequence is synthesized)
cttccaaacgctgccagtggttacagtcacaatggtgtctctatcggagcagccacaaatgaagcagaaatgctaacctcagcaagtttcaaaagaatgctgctaatcatttttacaggt

SEQ ID NO: 999891 - DNA, 120 bp, Artificial Sequence
  ENSG00000229261_11 (sequence is synthesized)
ttattctgaaccgaagacaaggaatgctcaggaagaaattctgacatgatttctaaatcacaactgtacattaagggtcatatttgcaaaacacctatcaaggaaagaaaagccatacaa

SEQ ID NO: 999892 - DNA, 120 bp, Artificial Sequence
  ENSG00000229261_12 (sequence is synthesized)
gaaaatgcagttcatgtgacttttaacatttttcagaataattacaatctcaattgcacaaaataaccaacttttcaaagcaaatgagacttctggttaaacacggcattaacctacaag

SEQ ID NO: 999893 - DNA, 120 bp, Artificial Sequence
  ENSG00000229261_13 (sequence is synthesized)
gacaaaaagaaaggaaacagtgactgataagagatcttaacataattctggaagacaggaagctcacggaagtaattgcttagtagagcaaacactgaaacctgagtgcccgcagagggt

SEQ ID NO: 999894 - DNA, 120 bp, Artificial Sequence
  ENSG00000229261_14 (sequence is synthesized)
gactcgggtgagaaaggagctgtgacgtttgtaaaactctaaaatgctcaggaatcagaggtctggggcaagacatagagccaaaaacaagagattggttaaaaagctatataaaaaagc

SEQ ID NO: 999895 - DNA, 120 bp, Artificial Sequence
  ENSG00000228793_0 (sequence is synthesized)
tcttgtaaccaaacgcatcccatctgactcactgggcacctgactccagttgtgtaaaacaggcccagatagcttgcctttgcctccgttggcgtgtggtggacaattgtaaatttcctt

SEQ ID NO: 999896 - DNA, 83 bp, Artificial Sequence
  ENSG00000228793_1 (sequence is synthesized)
tgcctccgttggcgtgtggtggacaattgtaaatttccttgtaaggtatattagtccgttctcacgctgttataaagaactgc

SEQ ID NO: 999897 - DNA, 120 bp, Artificial Sequence
  ENSG00000228793_2 (sequence is synthesized)
ggaggcctcaggaaacttacaaacatggcagaagggaaaggagaagcaggcgccttcttcatagggtggcaggacagagtgagagcaagcaggggaaaatgccagatgcttataaaacca

SEQ ID NO: 999898 - DNA, 120 bp, Artificial Sequence
  ENSG00000228793_3 (sequence is synthesized)
atctcatgagaactcactatcatgaggacagcatggtggtaatcactcccatgattcaattacctcccacagggtccctccaacgacatgtcgggattatgagaactacaattcaagatg

SEQ ID NO: 999899 - DNA, 120 bp, Artificial Sequence
  ENSG00000228793_4 (sequence is synthesized)
ggacacaaccaaacgatatcataagaatcctgattttgtttggaaggacagcgtgcctggttccaggatatacatctttccacaccaatagaccttgttttccgatgtagcattattttt

SEQ ID NO: 999900 - DNA, 120 bp, Artificial Sequence
  ENSG00000228793_5 (sequence is synthesized)
catagttggcgaatatacagttatggattcataacagcaagatggagaaattgcactgcagagaaatctttaaaagcaattacctaatactgcagattgctgaactgtacccacacccaa

SEQ ID NO: 999901 - DNA, 120 bp, Artificial Sequence
  ENSG00000228793_6 (sequence is synthesized)
ctgttgctacatctcactatgggtttcctgtgacattttgagcaagtatgcctctgtgactggggttcttacactccagaatggatgagaagcaccgtaagtggcttttaaaatgaatat

SEQ ID NO: 999902 - DNA, 120 bp, Artificial Sequence
  ENSG00000228793_7 (sequence is synthesized)
tccctggcccttcagtcgctctataggtcaagaatctgaattctcaacctgtctagaaggttctggttttaatggtctgtgggctgcacattgagaaacctgttcagcgagtgcaacaaa

SEQ ID NO: 999903 - DNA, 120 bp, Artificial Sequence
  ENSG00000228793_8 (sequence is synthesized)
ggttccacatgtgagaaaggaagcatcaggtctcttgagcctgttctttaatctgtaggctgcaccttctctttaaattctgctaataacaccatgcgagaaaacacccgagcttgaaaa

SEQ ID NO: 999904 - DNA, 120 bp, Artificial Sequence
  ENSG00000228793_9 (sequence is synthesized)
gcccatgttccaacataactgtccttcaccactctggaaaattaatggtttgtttcgattatccctttgttaaactccaaagtcaaagagctctgaaaggcatacggttattttaagttt

SEQ ID NO: 999905 - DNA, 120 bp, Artificial Sequence
  ENSG00000228793_10 (sequence is synthesized)
caggtgatttctgttgccaaatattttaaaaatttaaaattgctacgtgacctcttagtagtactattagatttcctgacaataaaaataagtcttttggtttcaccatttatagttagt

SEQ ID NO: 999906 - DNA, 120 bp, Artificial Sequence
  ENSG00000228793_11 (sequence is synthesized)
acagctaatattaagtataattttaaaagccttttattttctcagaaagaaaaaataatcaaaatctgctcagtgtggtattgaataattaaaaacaaaagaacagtatcttcacattag

SEQ ID NO: 999907 - DNA, 120 bp, Artificial Sequence
  ENSG00000228793_12 (sequence is synthesized)
gacaactcgcggggattgttttccacaccgtggaagctttgttcttttcgttttttgcaataaatcttgttgctgctcgctttttgggtccacattgcttttatgagctgtaccactcac

SEQ ID NO: 999908 - DNA, 120 bp, Artificial Sequence
  ENSG00000228793_13 (sequence is synthesized)
cgtgaagatctgcagcttcacttcagagcctagcgagaccacaagctcactgagaggaacaaacaactccagacgcgctgtcttaagagctataacactcaccgcgaaggtgtgcagttt

SEQ ID NO: 999909 - DNA, 120 bp, Artificial Sequence
  ENSG00000228793_14 (sequence is synthesized)
cactcctgagctagtgagactacgaagccactggaacgaagaaactccaaccacgtttgaacatcagaaggggcagactccagacgcttcatcttaagagctgtaacactcactgtgaag

SEQ ID NO: 999910 - DNA, 90 bp, Artificial Sequence
  ENSG00000228793_15 (sequence is synthesized)
gccagcgagaccacgaaccgtgccccaccttaagagctgtaatactcactgcaagggtctgcagcttcattcttgaagtcagaccaagaa

SEQ ID NO: 999911 - DNA, 120 bp, Artificial Sequence
  ENSG00000228793_16 (sequence is synthesized)
tcttgaagtcagaccaagaacccagcaattcccaacacacagggaccagcttctttcctaactcacttaggctcttcgtgctgctctggcaactaacacccttggctgcaggggcttgga

SEQ ID NO: 999912 - DNA, 120 bp, Artificial Sequence
  ENSG00000228793_17 (sequence is synthesized)
cactacccttagtcactgacaattgtgtgaaggctgctgtcgttaacttcacttgatcaccttaggctcctgtgaagtggtgagcaattcaaacaaattcctgtcgtcaaatcatgagtc

SEQ ID NO: 999913 - DNA, 120 bp, Artificial Sequence
  ENSG00000228793_18 (sequence is synthesized)
cacctgtcccgagttggaagtctgaactcatgttcctggattcctcccatgcatcttggtgctggtgtggggcctgaactcagccaatccgcaacacctccaggagtcttcctcttagat

SEQ ID NO: 999914 - DNA, 120 bp, Artificial Sequence
  ENSG00000228793_19 (sequence is synthesized)
attttcattttattttccatgacttgtttaaacagtttttgcaaattattgctaatcagcctaataaaactgaatcacctattaaacaattttgttttgaattaaatggcattaaaataa

SEQ ID NO: 999915 - DNA, 120 bp, Artificial Sequence
  ENSG00000228793_20 (sequence is synthesized)
cagctgcattggcgccagagcaccaatggggcaagagaatcctctggagaagttttctgtgatctcatcacaggagtagcccagaggaacagcccagggcctggggcctaggatgggtgg

SEQ ID NO: 999916 - DNA, 120 bp, Artificial Sequence
  ENSG00000228793_21 (sequence is synthesized)
atcaatcagattcgtgttttgcaactacttcttggcaagacgtacgggactgaccgcagttgacacatgccaatagggggagaaatctgaagacgtgtttctgtgcagtggtggcaccca

SEQ ID NO: 999917 - DNA, 120 bp, Artificial Sequence
  ENSG00000228793_22 (sequence is synthesized)
ggggctctggccagaggaggtcacaggaagatgcctagcggcccgtggagcgacctgccccgcattgtcacttgaccgctggtgtgcgaaggggataacactgtgttcaatgtgtttgta

SEQ ID NO: 999918 - DNA, 120 bp, Artificial Sequence
  ENSG00000228793_23 (sequence is synthesized)
accttgcatgaaaaaattgaagaaatgtcactttcttctcaccctctcccaggccaatcatctgtcatgaattcaatatgaggcaaacgtctggtgatcacagggacaaactagggatag

SEQ ID NO: 999919 - DNA, 120 bp, Artificial Sequence
  ENSG00000228793_24 (sequence is synthesized)
gcctttgggagaggaatctactcagtttgtgttcaaccggactatccaggtaggggagctggctggagagggagccagcatttgttgactgtaatctctgagctagggtcgcaattacat

SEQ ID NO: 999920 - DNA, 120 bp, Artificial Sequence
  ENSG00000228793_25 (sequence is synthesized)
cttctgcatctttgtgtgcatagtaccaagcacagaattatccagagtagacactcaataattgtttgttggaagagtcattgttgcttttgcttccaagcccctcacaaatttccacac

SEQ ID NO: 999921 - DNA, 120 bp, Artificial Sequence
  ENSG00000228793_26 (sequence is synthesized)
agtgcagttgagctcgcacagtcaatgaacagtttatatctgattaataggggctgatagtctgaggtggcctgccttcttgcagagaaagtttggggtgggttactgagacaggctgga

SEQ ID NO: 999922 - DNA, 120 bp, Artificial Sequence
  ENSG00000228793_27 (sequence is synthesized)
cagctgctttatctttatacccatcattttggtaagactatgtgtccaatctgaaattcaccaacaggacagggccagctgccagaactgaagtcccaagaagaaaaccaagcaaagctg

SEQ ID NO: 999923 - DNA, 120 bp, Artificial Sequence
  ENSG00000228793_28 (sequence is synthesized)
agacacaaacctgaacttttgaacttgtcaatctactgagtcaactaactctgggactcccatgtctggacttcttcatgtgtgttaacctatcttccttgttgcttttgccacaaggtg

SEQ ID NO: 999924 - DNA, 120 bp, Artificial Sequence
  ENSG00000228793_29 (sequence is synthesized)
aggacagaaaatcacaagtgctggagaggacgtggagaaactgggatccttctgcactgttgatgggaatgtcacacacatctctgtggcaaacaatatggtgcttcctcgaaaaattca

SEQ ID NO: 999925 - DNA, 120 bp, Artificial Sequence
  ENSG00000228793_30 (sequence is synthesized)
acatggaattatcatgggatccggcaactccacttttgagtatacacccacaagaattgaaagcaggtattcaaacaggtgtccgcacatctgtgttcatagtagcattactcacaatag

SEQ ID NO: 999926 - DNA, 120 bp, Artificial Sequence
  ENSG00000228793_31 (sequence is synthesized)
acaacagctggaagccatccaaatgtccactgatgaatgaataaaccaaatgtggtccatatatgtaatgggatattattcagccctaaaaaggagggaaatccagtcccatgatacatc

SEQ ID NO: 999927 - DNA, 120 bp, Artificial Sequence
  ENSG00000228793_32 (sequence is synthesized)
atggatgaaccttgaggatgttatgctaagtgaaataatccagacacaaaaagacaaacactgtatgattccacttacatgaggttcctagagtagacaaattcacagagacagaaagta

SEQ ID NO: 999928 - DNA, 120 bp, Artificial Sequence
  ENSG00000228793_33 (sequence is synthesized)
gaatggtggctgaggagaggaaggagcggggagttggtgttcaaggggtacagagtgtcagttctgcaagacatgaagctttctagacatggtgtatgcaatttaaatatatttaatatg

SEQ ID NO: 999929 - DNA, 120 bp, Artificial Sequence
  ENSG00000228793_34 (sequence is synthesized)
attggactgtaaattcaagtggttaagatggtaaattttatgtgtattttactgcaacttaaaaatgaggttattaactttttttaaattttaaaagaaaagtggaagaaataaaagatg

SEQ ID NO: 999930 - DNA, 120 bp, Artificial Sequence
  ENSG00000228793_35 (sequence is synthesized)
tcaagggctccatctgcaaaacgcaggcttgaaccacaggactggttatgctccttcttgttctgtgtcctctaaatccaccccgtgggatggttctcatcctcatttctaggaaaacaa

SEQ ID NO: 999931 - DNA, 120 bp, Artificial Sequence
  ENSG00000228793_36 (sequence is synthesized)
ggcccaggtggaatctcttttctcatctgcaggactgatgcctttcttggcctaaatttcaacaacatgtgactataaaacttacctgtgtgtgaaccctacagatatttgcgggggtgt

SEQ ID NO: 999932 - DNA, 120 bp, Artificial Sequence
  ENSG00000228793_37 (sequence is synthesized)
tgtgtggggagatgaccccatggtgggcccctagcgccggcctcttgctatcatgctgagcacgcccaccttgccgcagcctaggatctccctttcccaccggcactctcttgcctggag

SEQ ID NO: 999933 - DNA, 120 bp, Artificial Sequence
  ENSG00000228793_38 (sequence is synthesized)
tgtggatccactgtggctttccctcgccccatcctccagcttggtgggtagtaatatcttctgtccctctttagactcgggggcctaactggaaaacaggtgcattggtagatttagtag

SEQ ID NO: 999934 - DNA, 120 bp, Artificial Sequence
  ENSG00000228793_39 (sequence is synthesized)
cagaggagtccaagagttctagtgctctacatgggcatgagaccaaagcccataaatacatgttcgcggggtgcctactgtatacccaatgctgtaaggtagtgtccccaaagcatactg

SEQ ID NO: 999935 - DNA, 120 bp, Artificial Sequence
  ENSG00000228793_40 (sequence is synthesized)
ctgcagaacactagttttgtggggtgttcaacgatattacctggagaaaagagtccagaatctaacaagtttgggaaactctggattaaataaggttaactatgtttcttttaggtagtc

SEQ ID NO: 999936 - DNA, 120 bp, Artificial Sequence
  ENSG00000228793_41 (sequence is synthesized)
cttctcagagacttaagatgagagcatgcattgggaacttccaaaatgggagatgcagtgggaggcactcccatagttaggtaaccaggcagcccctttttacttattttattttatttt

SEQ ID NO: 999937 - DNA, 89 bp, Artificial Sequence
  ENSG00000228793_42 (sequence is synthesized)
ttattttatttttttgagatggagtcttactatgttacccaggctggactcaaacttctgagctcaagcagttatcccacctcagcctt

SEQ ID NO: 999938 - DNA, 120 bp, Artificial Sequence
  ENSG00000228793_43 (sequence is synthesized)
ccaccacacctggcttttttaaaaacaaaggaccatattttggaaacacataggccctgtagcacacagacccatgggatctcctggccacctggcccagcccatcttccgcagatatga

SEQ ID NO: 999939 - DNA, 120 bp, Artificial Sequence
  ENSG00000228793_44 (sequence is synthesized)
tgattttgtttggaaggacagcgtgcctggttccaggacttgaatcattcgtttgtccagcatctccatgctgtgtacgctacccgcctgttagtcattgacactgtctgctcctgacat

SEQ ID NO: 999940 - DNA, 120 bp, Artificial Sequence
  ENSG00000228793_45 (sequence is synthesized)
ccacccatcaatattgtcattgctcaatgatccaggatcaccgagagcagatgagcctcctgatgcatggtcagaaggtcaatagtagcttacttctccgtcacaacgcctgagttattc

SEQ ID NO: 999941 - DNA, 120 bp, Artificial Sequence
  ENSG00000228793_46 (sequence is synthesized)
gctgaggccacggagaaggaagcagcacaaagaatgaaccctggagagggtgccagaggcaggcgggttccagccatgtggcggcacagccttactgggatagtctagctgtgtcactca

SEQ ID NO: 999942 - DNA, 120 bp, Artificial Sequence
  ENSG00000228793_47 (sequence is synthesized)
gagaagcacccctcctgtggagccggccgtggaaacgccctgacatggagtcagaagcccgagcccgtgtttcagacttggcgttcattgaccagaagagctgcttcaccacttaaccat

SEQ ID NO: 999943 - DNA, 120 bp, Artificial Sequence
  ENSG00000228793_48 (sequence is synthesized)
tgccccagggccccacggctaacactgtaggccacgcttcccatttctcagctgaaataaaaggtatgtttttgttgcaaatatttagttgaccattaatttacctaaaaccagtgactc

SEQ ID NO: 999944 - DNA, 120 bp, Artificial Sequence
  ENSG00000228793_49 (sequence is synthesized)
ctttgaacactgtagaaggttcccatcctggcacaggcatggtttgaagataaaattatgaagagtttcaggacagctccagcagagcatgaaaccaagcgccaggctgttctgagagta

SEQ ID NO: 999945 - DNA, 120 bp, Artificial Sequence
  ENSG00000228793_50 (sequence is synthesized)
tctgagaccctgtaagccttcaccctgcagccaacttccaaaggctaaataaaggcacagctgcgggacggagggagatatactaaggaatggaaagatgagggtggaactggatggagg

SEQ ID NO: 999946 - DNA, 120 bp, Artificial Sequence
  ENSG00000228793_51 (sequence is synthesized)
tcaaagagaaattcccagtgatacaaagagccagcatagagaaatctcacacagcttacatggctgatggctgcacagcaaggaatgctaaagttcattcactgggctcaaggaaaccat

SEQ ID NO: 999947 - DNA, 120 bp, Artificial Sequence
  ENSG00000228793_52 (sequence is synthesized)
gagagagaaaaagagaccgcattcacctaatttttattgcagtatattgtgataattgttctattttattattggttattgttgttaatctatactgtgcctaattcataaattaaacct

SEQ ID NO: 999948 - DNA, 120 bp, Artificial Sequence
  ENSG00000228793_53 (sequence is synthesized)
cactcttgttcaacatagtactggaagttctaggcaaagcaatcaggcaagagaaagaaataaaaggtgtccgaactggaaaagaggaagtcaaatttttcctctttgcggaagacatga

SEQ ID NO: 999949 - DNA, 88 bp, Artificial Sequence
  ENSG00000228793_54 (sequence is synthesized)
aaagaggaagtcaaatttttcctctttgcggaagacatgattttatatctagaaaaacctaaaggctctgccccttagatctgataaa

SEQ ID NO: 999950 - DNA, 120 bp, Artificial Sequence
  ENSG00000228793_55 (sequence is synthesized)
aaatcagtagcatttctatataccaataatgaacaatctgagaaagaaatcaagaaagcaatcccatttgcaatcgtcacacacacacacacaaatacctaagaataaattcaacaaagg

SEQ ID NO: 999951 - DNA, 120 bp, Artificial Sequence
  ENSG00000228793_56 (sequence is synthesized)
aggtgaaagacctctgtaaggaaaactacaaaacactgaagaaaaaaattgaagaagaaactaacaaatggaaaacatcccatgttcatggattgaaagaattaatattgttaaaattac

SEQ ID NO: 999952 - DNA, 120 bp, Artificial Sequence
  ENSG00000228793_57 (sequence is synthesized)
catactacccaaagcaatctgcagatttaattcaatccccatcaaaataccaatgtcattttttatagaaatagaaaaaaaaatcctaaaatttgcatggaaccaaagacagtttaaata

SEQ ID NO: 999953 - DNA, 120 bp, Artificial Sequence
  ENSG00000228793_58 (sequence is synthesized)
gccaaagcaaaatcctgagcaaaaagaacaaagctggaaacatcacactctcaacttttaaaatatattgtaaggctaaagtaaccaaaaaagcatcgtattggtaggaatgaaagggga

SEQ ID NO: 999954 - DNA, 120 bp, Artificial Sequence
  ENSG00000228793_59 (sequence is synthesized)
atggagagacgttggttaatgggtacaaacatacagttagatcgaaggaataagatctaacaatcaatggcagagtagggtgactatagttaacaacaatgttttgtctattccaaaata

SEQ ID NO: 999955 - DNA, 120 bp, Artificial Sequence
  ENSG00000228793_60 (sequence is synthesized)
gctagaaaagaggaattgaaatattcccaatatatagaaattataaatacttgaggtgatggataccctaaataccccaaattgatccttatccattctacgtatcaaaatatcatgtgc

SEQ ID NO: 999956 - DNA, 120 bp, Artificial Sequence
  ENSG00000228793_61 (sequence is synthesized)
ctataaaatatgtacaaatattatgtatcaataataaaatgttcaagtcttcttacaacagcatgtttacaaacatgaacttttaagtcagacagacagaggtgaatcccggctttacca

SEQ ID NO: 999957 - DNA, 120 bp, Artificial Sequence
  ENSG00000228793_62 (sequence is synthesized)
tttgccaattgggtgacccagagcaacttaggtggcttctctgagccccagtgtactcatctcaaaatgaggataataacgactttcccatagggtgatatgtttagtgtgtttagcaca

SEQ ID NO: 999958 - DNA, 120 bp, Artificial Sequence
  ENSG00000228793_63 (sequence is synthesized)
gtgcctcacacagggtcaaacactcaagaaattgtagctttttgtatagttaccaagagctgtaaaggaccgcctttatttgtcatagaaaccattaatatcccatcccactagcctttg

SEQ ID NO: 999959 - DNA, 120 bp, Artificial Sequence
  ENSG00000228793_64 (sequence is synthesized)
tgtactaagttcatggtttatgttgacttggcttgacttctgtcttttctccctcaagtctccatggggattgaaagctctccctagttgggccctggaaactgtagctggctccatccc

SEQ ID NO: 999960 - DNA, 120 bp, Artificial Sequence
  ENSG00000228793_65 (sequence is synthesized)
atgctctttaccttaccttccttcccaggcaatgctcagctcaatagaaagctcaagtcctatacagttgtcagttcagttgaaccagaggttcaattacgctgtgtagctgctccaggg

SEQ ID NO: 999961 - DNA, 120 bp, Artificial Sequence
  ENSG00000228793_66 (sequence is synthesized)
tagcctctgcctcagaagaagacaagataagtgattgatctgccactgatgctctgcccccaggagcttttctttctccattcctggctcctggaggtaaggacaatttctgggaaagtg

SEQ ID NO: 999962 - DNA, 120 bp, Artificial Sequence
  ENSG00000228793_67 (sequence is synthesized)
gttgctgtaagaggtcattgttacatttggggatatgttccttttatcgagaaagcaaatctctccaatgctcagcttcaaggtgtaggtgatgttagggtgccctatttttgggattct

SEQ ID NO: 999963 - DNA, 120 bp, Artificial Sequence
  ENSG00000228793_68 (sequence is synthesized)
cccatttgtctggcaaccagaaaatgtaagaaaatgcagtacaatcttgctattaaacaccttgctattccagagattcaattttactgtgtaactatttctctgtctaagacctgtaaa

SEQ ID NO: 999964 - DNA, 120 bp, Artificial Sequence
  ENSG00000228793_69 (sequence is synthesized)
ttctacatcacagatgctgttttgggcatggttgcattcaggaagctcctgagcctcggagccattatagcatctcacaggccatgggacactggcgtatagccacaataggagaaatgt

SEQ ID NO: 999965 - DNA, 120 bp, Artificial Sequence
  ENSG00000228793_70 (sequence is synthesized)
gtccaccaggacatccttatcaaagagcacaagaaaatgaaaagggaacaggcagtcttaccactgctctccatcaggcgttctccttctcttttttttcctaattatgtttagtcatct

SEQ ID NO: 999966 - DNA, 120 bp, Artificial Sequence
  ENSG00000228793_71 (sequence is synthesized)
taaaaatgataaaaggtagatgcctttgaacgctgggatcagccagccaattgttttaagattcacctcaactgactttaagacgcacatgggtatcatttggcaataaagcaagtttta

SEQ ID NO: 999967 - DNA, 120 bp, Artificial Sequence
  ENSG00000228793_72 (sequence is synthesized)
ttaaatttaggcaactttcttcgagagacagacataaaatcctggcaaagataagagctaaaattaaccagacacgtggaatgctgaacagctgaattaaaacagaaactcgacatcatg

SEQ ID NO: 999968 - DNA, 120 bp, Artificial Sequence
  ENSG00000228793_73 (sequence is synthesized)
cagacaataacattccatctatgagtgccctctccccaccttgaggatgggaacttccttgtcatctcagacccttataaaaggcctctgtgaaaatggatgaagtgtttgggtagccaa

SEQ ID NO: 999969 - DNA, 120 bp, Artificial Sequence
  ENSG00000228793_74 (sequence is synthesized)
aaaccctctttctaatgccatacttaaagttctcctaaacttttaaatccaacatcccctaaacaaatacgtccatttattcacaataaatcaattttttttttcagaagaagattcaat

SEQ ID NO: 999970 - DNA, 120 bp, Artificial Sequence
  ENSG00000228793_75 (sequence is synthesized)
taaaaaaaaattcctatgtccctgctcttcaatgttttagccattgcacagtaatggcttgcctaattctcttttaaaaccaaattcatgtccccaaccatggaaggtattgagcccatt

SEQ ID NO: 999971 - DNA, 120 bp, Artificial Sequence
  ENSG00000228793_76 (sequence is synthesized)
aaatttggggtgcttctgcaaatgaagttttgtatatgtttacttcttggtgcaaaagaaattacatgcacattacagtaacatcagaaaatatagacaagcaaatgaaccatatcaaac

SEQ ID NO: 999972 - DNA, 120 bp, Artificial Sequence
  ENSG00000228793_77 (sequence is synthesized)
agctacaattccaatcacccagaaatgatatatgcatataaacatacctgcacattatatgtgtgctccatatgccacacaaatgtatgagtaaatcatttgtcttcatgagcatgcaaa

SEQ ID NO: 999973 - DNA, 120 bp, Artificial Sequence
  ENSG00000228793_78 (sequence is synthesized)
catatatatgcacatcatacgtgtcctatataaaaatatatacattgtcttccgcatgcgtacacacatatatgtatgcagatatatctcttatgatacaagtgtatgcatacattatgt

SEQ ID NO: 999974 - DNA, 120 bp, Artificial Sequence
  ENSG00000228793_79 (sequence is synthesized)
gtgtttttcatatacacacaaacacatatgcataccacatgtgcctttcatagtcacacaaacacatgcacataatatgtgcctttcatatgcctgcaaacacatatgaacctcgtcttt

SEQ ID NO: 999975 - DNA, 120 bp, Artificial Sequence
  ENSG00000228793_80 (sequence is synthesized)
tatgcacatatatacatatatgcatgacatatgtgcctttatctatatctgtgattttccaaaattaagataatgtatacattgtgtacatcctctattgtcacctgatttttcactttg

SEQ ID NO: 999976 - DNA, 120 bp, Artificial Sequence
  ENSG00000228793_81 (sequence is synthesized)
gggtcctttgtggaagtcatggggcagggtcccctgaggcaccttgaaagtaaaggagaaacagctctcagggactcagctgcaagtcattagtaactaagcggaacagctgtcttcagc

SEQ ID NO: 999977 - DNA, 120 bp, Artificial Sequence
  ENSG00000228793_82 (sequence is synthesized)
aaagcttgacctggatcccagaactgaaacagcgggagaaacagaactctcaccttccttaacctggatcccagaatttaaacggactgcttccccaacagcaggcgatggagtccctga

SEQ ID NO: 999978 - DNA, 120 bp, Artificial Sequence
  ENSG00000228793_83 (sequence is synthesized)
gatgcctgctaaaaatacagacccctgttcacaagggccaagaggtgggagcaacccaggtgtgtacggatggataaatggataagcaaaatgtggtctagccatgcaacggaatgtcct

SEQ ID NO: 999979 - DNA, 120 bp, Artificial Sequence
  ENSG00000228793_84 (sequence is synthesized)
gcagccttgaacaggaaggaaatcttgacgcgcgccgcagcatgggggagccgcaatgaggacgttatgctaagccagtcacaagtgcatgattccactcagaggaaggacccagagtcg

SEQ ID NO: 999980 - DNA, 61 bp, Artificial Sequence
  ENSG00000228793_85 (sequence is synthesized)
tcccaagtagctgggattagaggtgtagggcttagtctcaaactcctgacctcaagtgatc

SEQ ID NO: 999981 - DNA, 120 bp, Artificial Sequence
  ENSG00000228793_86 (sequence is synthesized)
acaggcatgaaccaccacgcccagccaactgcagctttctagcagccaagtgtgtgttctttattatcttgaatcccagtgaaaaattagagaaaaaattgtgtgtatatggcactatca

SEQ ID NO: 999982 - DNA, 120 bp, Artificial Sequence
  ENSG00000228793_87 (sequence is synthesized)
aaccttaagttgtcagttttctctaagaggtataatttcatcaaaagcataattgtaagctttaccttgttaataactttattgatcataactgattattgcaatggactgaatgtttgt

SEQ ID NO: 999983 - DNA, 120 bp, Artificial Sequence
  ENSG00000228793_88 (sequence is synthesized)
gtcccccaaaatccatatgttgaaattctaacccccaagatgatgatattaggaggtggggcctttggaaggtgatgaggtcatgaggatggggcccttgtgaatgagattagtgccctt

SEQ ID NO: 999984 - DNA, 120 bp, Artificial Sequence
  ENSG00000228793_89 (sequence is synthesized)
cttaaaggacactatttctgccacatgaggacacaggaagaaggcagctgtctgcagcctggaagagtgccctcatcagaaccctaacatgctggctcctttatctccaacttctatctt

SEQ ID NO: 999985 - DNA, 120 bp, Artificial Sequence
  ENSG00000228793_90 (sequence is synthesized)
ccagaactatgagaaataggtttctgttgtttagaagccacccagtccatgatactttgttatggcagtctgaactaaaacagatattatcttgattatattttctaaaacacaatatgt

SEQ ID NO: 999986 - DNA, 120 bp, Artificial Sequence
  ENSG00000228793_91 (sequence is synthesized)
tttgaccatagttcatgtactgaccaacgcctttttaatcatctaggagaaaacaatgcattaatctttccagcattgcagttatcctcattttggtagaagagagaaagtcctctgagg

SEQ ID NO: 999987 - DNA, 120 bp, Artificial Sequence
  ENSG00000228793_92 (sequence is synthesized)
tcagggaaaaatcaaagtttggaaccacaatacatggtatggtggtatgaatagaagtggtatatgcattgtccttccaggctagagggggatcatcaacattctttgagagtggcttcc

SEQ ID NO: 999988 - DNA, 120 bp, Artificial Sequence
  ENSG00000228793_93 (sequence is synthesized)
aggtggtcgttcaaatcaaagtacatgtttcttccggaagctcatttagtaaaatatgtggtgtaactatgaaaacttggttgcctgaacttttccctgttgggatgtgccatactcctc

SEQ ID NO: 999989 - DNA, 120 bp, Artificial Sequence
  ENSG00000228793_94 (sequence is synthesized)
tagaaacatcagaaaagattacaactggtcatcaccagtcttttgcttcatcaacaacaatgcaaaatggctatttaaaggagcaacactagttagtaaaaatatatttgcatacacaaa

SEQ ID NO: 999990 - DNA, 120 bp, Artificial Sequence
  ENSG00000228793_95 (sequence is synthesized)
actgctaacatccaagtgcctggccatgttattttcaataaagccacaatcattactttttcatttcatcatctttttcattagcatgggaaaaccttttagtagcagaagctcatttgc

SEQ ID NO: 999991 - DNA, 120 bp, Artificial Sequence
  ENSG00000228793_96 (sequence is synthesized)
ttttatctacttttctgtgctctcacaataaacaagcaaagcaacttaatttcaacacatggatagaaagagcataagtctatattcccttcttttctggggaacaaatagggcagggac

SEQ ID NO: 999992 - DNA, 120 bp, Artificial Sequence
  ENSG00000228793_97 (sequence is synthesized)
ttctgaaactagagatgttcctgtagagacagatatgtgtaatatctgtaaaaatttacaaagacaatgctacaagtttgctgcgtcagaccatcagaattgtaattgcttttgttcttc

SEQ ID NO: 999993 - DNA, 120 bp, Artificial Sequence
  ENSG00000228793_98 (sequence is synthesized)
caaaagccccacaggatttagtacataactacgtaattgaaaatcgtttattatctatgccttacctaggtttgttaattgccttacgtttgttaattaataatttgaaaatgatacatg

SEQ ID NO: 999994 - DNA, 80 bp, Artificial Sequence
  ENSG00000228793_99 (sequence is synthesized)
acttttataatattatagatgtaaatttatatatacttttccctagttctgtgcactgaaatgtcttagaacaacaccca

SEQ ID NO: 999995 - DNA, 120 bp, Artificial Sequence
  ENSG00000228793_100 (sequence is synthesized)
ctgtgcactgaaatgtcttagaacaacacccagattatggctatgaagtactatttcccacaaaaccaataaaatgaaaatccatggggagccttggagaagtgggtgactctaggtctg

SEQ ID NO: 999996 - DNA, 120 bp, Artificial Sequence
  ENSG00000228793_101 (sequence is synthesized)
aggtagagaatgtcaaaggtgagactggacccccaggacactgtcaaagatcactaggactcacacaccagcctgacgaggctcccaatggcctcaaacaccccaaagatggggaccatt

SEQ ID NO: 999997 - DNA, 120 bp, Artificial Sequence
  ENSG00000228793_102 (sequence is synthesized)
cgaacattatgcacacaatagtttcaacggaccaaaacaactgtgagtttataattgatttttttttttaaaaaaaccacacaccaaaaatctaactagtcactattgggggatgctgat

SEQ ID NO: 999998 - DNA, 120 bp, Artificial Sequence
  ENSG00000228793_103 (sequence is synthesized)
gaccaacttattttttgaaaatgggtaaataaggggaaagagacagccatttattcacctttcctatgcaaactatactactggtaaccaaacagcaaatgaggggaagtttttctttac

SEQ ID NO: 999999 - DNA, 120 bp, Artificial Sequence
  ENSG00000228793_104 (sequence is synthesized)
aggagcattctagctaagaaatgaaggaggcgtgacagaaaataaccattttgcagctccttgtggactaatgaatagatgcattgagcaataacaattgctactatgagagagagagaa

SEQ ID NO: 1000000 - DNA, 120 bp, Artificial Sequence
  ENSG00000228793_105 (sequence is synthesized)
agagagagagagagcgcacgccagatattatatatcctgatggaagaatacagcaccacctgtgaaatatttcccactcctcattctctgctggaaaaaaggacctgactctgaacaggc

SEQ ID NO: 1000001 - DNA, 120 bp, Artificial Sequence
  ENSG00000228793_106 (sequence is synthesized)
ctctagatacaactaccaagagagaggaagtacagagggacatgggaagccaccatggggatgccatcagcactctggtcaggggagatgctacaggacagcaatgtggcttccaccaga

SEQ ID NO: 1000002 - DNA, 120 bp, Artificial Sequence
  ENSG00000228793_107 (sequence is synthesized)
aataaaatgcaagaaggacctttagattgaaaaagacctgagacataacaacgaatcacaggcgtgggcttcatttagatcttgactgaagcaaataaaccataaaaggaaataaaatta

SEQ ID NO: 1000003 - DNA, 120 bp, Artificial Sequence
  ENSG00000228793_108 (sequence is synthesized)
tgaaatgtatgagtcaactggaaattcaaatatgactggacatgtgatggcctgttaagaaactatctttgattgtttacagatgtgattgtggtattgtgattatgttgggggagggaa

SEQ ID NO: 1000004 - DNA, 120 bp, Artificial Sequence
  ENSG00000228793_109 (sequence is synthesized)
agaatttatccttttagtgacacatactgaaatatttacagattaagtgataaggtctctaggatttgcttcaaattagtataagagtagagtacctaggggcggttaaaatgaaacaac

SEQ ID NO: 1000005 - DNA, 120 bp, Artificial Sequence
  ENSG00000228793_110 (sequence is synthesized)
attgttcacgagttaattatttaagaatttaaagcatatggacatatggggatatattatactattctgtattgaactactttggtgaaaataatgaaaagttttcaaaaaataattata

SEQ ID NO: 1000006 - DNA, 120 bp, Artificial Sequence
  ENSG00000228793_111 (sequence is synthesized)
caaacccaaccctttcacacacacctaggatgatttgaagagctacctaataacctttcataaggttctgaaagccagccagagtggttgtgatcagtagtaatgaagagccttctttca

SEQ ID NO: 1000007 - DNA, 120 bp, Artificial Sequence
  ENSG00000228793_112 (sequence is synthesized)
ctgacattccactttttacagatggggaagccaggctccagcagttacaaaacaaggtcccatgacccctagaccctacttgcaaagctgggattgacgcaagctcatctaactccaaaa

SEQ ID NO: 1000008 - DNA, 120 bp, Artificial Sequence
  ENSG00000228793_113 (sequence is synthesized)
cccaagctcttcccactgtgacaagggaggggacaaataggaaaaggcagtttgagcttttctgggaaaggaaagaaatgaataccttggcctttgtccagatgtggcctgcagaataaa

SEQ ID NO: 1000009 - DNA, 120 bp, Artificial Sequence
  ENSG00000228793_114 (sequence is synthesized)
tcctatgtggcaaggccgcttaacctctgccggggctgtgtcattacggtgattcttcacactagttaaatgccacggtgaggatggcacgggggaagaagagctcacggcaggcgccat

SEQ ID NO: 1000010 - DNA, 120 bp, Artificial Sequence
  ENSG00000228793_115 (sequence is synthesized)
ctccagaaaggatccactgcaggtggttggtgagtccagatggctcccccagatgacactgctgggtggcaacctaattatttttcattaacttttaattatggaacatttcaaacgtgt

SEQ ID NO: 1000011 - DNA, 120 bp, Artificial Sequence
  ENSG00000228793_116 (sequence is synthesized)
gcacaattaaagagagtcgtacaatgaacctcgtgtgtccgaaactcaacttcgacaacgatcaactaaatgcccaatcttgttttatctgtatctccacacacttccccctcattcagg

SEQ ID NO: 1000012 - DNA, 120 bp, Artificial Sequence
  ENSG00000228793_117 (sequence is synthesized)
cattcaggattatttcaaaacaaaccctggatttaatcattctagatttaataattttattcactactatttcagtatgtatgtctaaaagataacaatatcatttttacacctataaat

SEQ ID NO: 1000013 - DNA, 120 bp, Artificial Sequence
  ENSG00000228791_0 (sequence is synthesized)
agtcgccaggcaccggccacggcgcacgccaacatccaggataattctcctttccaagcccgggagttccggggcaggcgaaaaaggggggatgggagacccacagtccctttaaccctc

SEQ ID NO: 1000014 - DNA, 120 bp, Artificial Sequence
  ENSG00000228791_1 (sequence is synthesized)
ccccctggcctgccaaccttttccgaacccccatgtcacacaacttcctcatcatggaaacttccactgggttcggcgctgaggatgccaaactccatttcacaaggaacatgtcaacag

SEQ ID NO: 1000015 - DNA, 120 bp, Artificial Sequence
  ENSG00000228791_2 (sequence is synthesized)
ctgggcttggggtttgaggaacagagccgctgcgattggaacagagcccggccaccctgttccaccactgtccactccgtagctcccagcctgccgccgcgcggtgcccgaacacgagag

SEQ ID NO: 1000016 - DNA, 120 bp, Artificial Sequence
  ENSG00000228791_3 (sequence is synthesized)
ggcacctcctcccagatccggggcgcagaagccccgcggaggcaggtagaagattctgaggccctgggcgggaactagtaagccacaatctggaagagtcttttaccaccatgtggagga

SEQ ID NO: 1000017 - DNA, 120 bp, Artificial Sequence
  ENSG00000228791_4 (sequence is synthesized)
gaactagagcactcatgttgaactattaccgagaaaagtaatcaacttcttttgtgttaagtcactgaaaggcaagtgttgatttgttgcagtaattggtgctcccttaacacacctgtc

SEQ ID NO: 1000018 - DNA, 120 bp, Artificial Sequence
  ENSG00000228791_5 (sequence is synthesized)
atcacagcataaataatcttttccttaaataaatacaggtaaaagaataaagtagacctaaatgcattaatatgaatataggctcaaagcaaaatgttgggctataaatgttcagagtga

SEQ ID NO: 1000019 - DNA, 120 bp, Artificial Sequence
  ENSG00000228791_6 (sequence is synthesized)
taattttttaagttgatgtgtaatttagtacagtaaaatagataaaacctaaatgttcagttcaatgaatttttacatgttcatgcccctgtataatcacctcccagaacaacatagaaa

SEQ ID NO: 1000020 - DNA, 120 bp, Artificial Sequence
  ENSG00000228791_7 (sequence is synthesized)
atacttcatataaatggaatcatacagtgtgttttctcttgtgtctggtttctttcactcaatgtttttgaggtgaatccacattattgtgtggattagaaagttgttctcttaaaattt

SEQ ID NO: 1000021 - DNA, 120 bp, Artificial Sequence
  ENSG00000228791_8 (sequence is synthesized)
ctgtttgacattacgttatatgaatatgccacaatttgtttattcattctccaattgatggacatttgggttgtttccaatttgggactatgacaaatgaagcagctatgaacattcttg

SEQ ID NO: 1000022 - DNA, 120 bp, Artificial Sequence
  ENSG00000228791_9 (sequence is synthesized)
aacaattatttttgtggtacacgcactcatatctcctgggcatatgcataggagtgaaattgatggtcatatatttatctgagttattctattaaagctcaaaatgatcaatattcaaaa

SEQ ID NO: 1000023 - DNA, 120 bp, Artificial Sequence
  ENSG00000228791_10 (sequence is synthesized)
gacactcctcaggtcccagaacggccgccctattaatttgtctttgccctggaaatgtatagataaaaccaggaagacaaaaataatgtatactcttcaagagatctttcccgggcaaat

SEQ ID NO: 1000024 - DNA, 120 bp, Artificial Sequence
  ENSG00000228791_11 (sequence is synthesized)
aagttcctgggctttgctccaaagctgccccggaatgttttggttggtttggagaaaagctgtggcgtctacaccacttgttccaagcaggcggccccctggtggctaacggggggtgag

SEQ ID NO: 1000025 - DNA, 120 bp, Artificial Sequence
  ENSG00000228791_12 (sequence is synthesized)
ggtagtcaataaggaactatagttgcaacaaaactactttgacaacagagtacaattaatttcttatagacagtattaaaataattccgacatcataatttaatattcacatctattcgt

SEQ ID NO: 1000026 - DNA, 120 bp, Artificial Sequence
  ENSG00000228791_13 (sequence is synthesized)
gtaacacgcagtataatagagttatgacgatatggatcctcagctgcctgacaatgtataggttatttattggaaggttctctagatttccagccagtgacatgtatgttttattctcgc

SEQ ID NO: 1000027 - DNA, 120 bp, Artificial Sequence
  ENSG00000228791_14 (sequence is synthesized)
ttcttctgagcgtcccagggaaaggggtgagaggccccccacccctgctgacagcattaacaaccaccccgctggataagcagggtttcactgatgcacttttaagaaagttgcaggccc

SEQ ID NO: 1000028 - DNA, 120 bp, Artificial Sequence
  ENSG00000228791_15 (sequence is synthesized)
cagagaccccatttccctttggtcctcggtgagaagtccgtgctttcttctctactcttaataagtctgcaccataggacttgcaggcttctgtagttggagagctgttctcctttgcag

SEQ ID NO: 1000029 - DNA, 120 bp, Artificial Sequence
  ENSG00000228791_16 (sequence is synthesized)
gggggccacagaagcagcagctcgcagtcatgttccaagactagcaatccataaacattgcttgccctgggggggggaaaataaagatttcgccaatactgcatctcttcgatttttacc

SEQ ID NO: 1000030 - DNA, 120 bp, Artificial Sequence
  ENSG00000228791_17 (sequence is synthesized)
catttcctttacttggtcctatttttacttggtcaaagaaacacgtgtatcatatactcagaatttccccttaattataagttttttacaaaaagtcaataaaagacaaaatgggaagtg

SEQ ID NO: 1000031 - DNA, 120 bp, Artificial Sequence
  ENSG00000228791_18 (sequence is synthesized)
ttgaagcactgtccagaaactatagtaatagcaatataaaaagaagggtagtgaactgaccttagcaaatttgctctgccactaatttgctagtcaagtgaccctattttcctgactctg

SEQ ID NO: 1000032 - DNA, 120 bp, Artificial Sequence
  ENSG00000228791_19 (sequence is synthesized)
tttctttagtaaaatgtggatgttatcataggtgaccgcagatcctgaagttcctttgtgtgtgggggggggagggtgggtgagatttaaaaatttgattcaaataaatttccattcgct

SEQ ID NO: 1000033 - DNA, 120 bp, Artificial Sequence
  ENSG00000228791_20 (sequence is synthesized)
ggccccaacagttgacaacctagtcttcgggtcttcttcacagcgtgtgaacagcttagtattaccgcgggggggcgggagggggttggggggtggtgaggtgaagcaaatcttccttca

SEQ ID NO: 1000034 - DNA, 120 bp, Artificial Sequence
  ENSG00000228791_21 (sequence is synthesized)
acacggtggatcatgggcttctcggcctactggaacttttaatttttttctcttcctgagtataacttggagctaaattatttaagaaggagacatacagaggacaaaatgaaatgtaac

SEQ ID NO: 1000035 - DNA, 120 bp, Artificial Sequence
  ENSG00000228791_22 (sequence is synthesized)
aaaaactgttgcttctctttgttcaagggctttgtctttctgatctcattttgcccagaaaattcagaaatgagccaattaaagcatgaaataaataaagggcgtggcattattcaaaca

SEQ ID NO: 1000036 - DNA, 120 bp, Artificial Sequence
  ENSG00000228791_23 (sequence is synthesized)
aaaccccattttggggttgtcagtgtcctcacttagtcattgatgtgacatgcttacctcatactcaatttgagttttgcagaactcccacacattgtgtgcccacagggattctgtgct

SEQ ID NO: 1000037 - DNA, 120 bp, Artificial Sequence
  ENSG00000228791_24 (sequence is synthesized)
tatggggcaacaagaatgctatgtgtgagtggaacaagtaaagaatggcagcagctatgcatgttatctgtatttcctctgttcatgcacatgctccattgtcccatcagccttcattta

SEQ ID NO: 1000038 - DNA, 120 bp, Artificial Sequence
  ENSG00000228791_25 (sequence is synthesized)
caaaacaaaagttcaaagataaaattattaggaatttcattacggtgacaacagagcattaaatgaagtgccaggcctcaagcaccaagcccttcccagcatgggttgtatgcagctgtc

SEQ ID NO: 1000039 - DNA, 120 bp, Artificial Sequence
  ENSG00000228791_26 (sequence is synthesized)
agtacataacatagctaacatgtattagacatgtattatgttttacgtactgtcctaaatatttcatacatcttttaaagtttgccagaggaccctgtgaaacagtattattatgtactt

SEQ ID NO: 1000040 - DNA, 120 bp, Artificial Sequence
  ENSG00000228791_27 (sequence is synthesized)
cattttccagatgttaaaaattaggaagatcaaataatctgctcaagctcaggcctgggtactgggtgacagagggtatactcttaaccagctcatcatgctacctgcatgcaacacaag

SEQ ID NO: 1000041 - DNA, 120 bp, Artificial Sequence
  ENSG00000228791_28 (sequence is synthesized)
agcatcccttcagcatctttggtgctaccggataaattctgagcaatggacatataaagaagtgttgtgtggttgcatctgggaagttcctttatgctttgtcctttatttttcaccctc

SEQ ID NO: 1000042 - DNA, 120 bp, Artificial Sequence
  ENSG00000228791_29 (sequence is synthesized)
ctcttcatgatggctgaacatttgtacaatggccagacctggagaaaccatcttggggggacttgggaatggaggtccagccttggggagcaacaaagtcagaggatcctaaatttcatg

SEQ ID NO: 1000043 - DNA, 120 bp, Artificial Sequence
  ENSG00000228791_30 (sequence is synthesized)
ggcttatagacttttaaatgagagaagataaaaaaaagaaaggcctatttcatttaagaaatgaatagtttttatttttctattacttctagtcaaatctaattccatttcctatttggc

SEQ ID NO: 1000044 - DNA, 120 bp, Artificial Sequence
  ENSG00000228791_31 (sequence is synthesized)
tgtgacagcagatccttgtgcagtgactgacacatagtgggtgttcaatagatgtttgaagcaatctgggaggtatccctgataccttctccttccccatatccaactcagcattgatgt

SEQ ID NO: 1000045 - DNA, 120 bp, Artificial Sequence
  ENSG00000228791_32 (sequence is synthesized)
ctatcagttttaccttctgacatctctcaaatctgtgcacttgtcttaatctccctccacccatgtgagctgaagcttctctagaccttgtgttgcctaggctactcaaaagccttctaa

SEQ ID NO: 1000046 - DNA, 120 bp, Artificial Sequence
  ENSG00000228791_33 (sequence is synthesized)
atggtctcatcacatcacatccttttccactaaaaacttgatttttgttttttttaggagccaaatccttgacataggctatgggtcttatttctcatcatttttagtcttaccatatga

SEQ ID NO: 1000047 - DNA, 120 bp, Artificial Sequence
  ENSG00000228791_34 (sequence is synthesized)
tctctcactatcttcttatagcactgcacatttctgtatgtgtcatagcctgtctctcccagtaaactgtaagccccaaagaggcagtcattatggatgttttacatacttttatatcct

SEQ ID NO: 1000048 - DNA, 120 bp, Artificial Sequence
  ENSG00000228791_35 (sequence is synthesized)
tagtgtctagtatggtgtctgatacatattagatgcttaataaacatttgctgaatgaataaatggtattgcaaatgccattgttgggatttggaaaatcggtgggcagtgactgggttt

SEQ ID NO: 1000049 - DNA, 120 bp, Artificial Sequence
  ENSG00000228791_36 (sequence is synthesized)
taaaagacagaaagagaggaggaaagagagaaagggaggagagagagagagagtgagaactcttatgtttaccttataaaatagccatttagctcattagcttagtcaaattctaaataa

SEQ ID NO: 1000050 - DNA, 120 bp, Artificial Sequence
  ENSG00000228791_37 (sequence is synthesized)
tcttaactcctaagattggatggactaaagtttgaagcctactgtcttcccatcactgtcctgagcctgacatctaataattagatcagcagtcatcaaagtgattacaagaccatttct

SEQ ID NO: 1000051 - DNA, 120 bp, Artificial Sequence
  ENSG00000228791_38 (sequence is synthesized)
gggggtccatgagatcctgcctttccaagctggatatggtcatattttcttcacatacttcaactcaaacaacatactacagcagattgaatgcagaagcagttacgggactccagctgt

SEQ ID NO: 1000052 - DNA, 120 bp, Artificial Sequence
  ENSG00000228791_39 (sequence is synthesized)
actattaaactaaacgctatggtttgaatgctcactccaaaaatcatgttgaaatttaattggataaattaattgggacatggggcctttaagtagtagattaatacccttattgcagga

SEQ ID NO: 1000053 - DNA, 120 bp, Artificial Sequence
  ENSG00000228791_40 (sequence is synthesized)
gttggatatttatctcaggagtgggctcctggtaaaaggatgaagtttggtttccatttttctctctgcctcacgtgcttccttgtccttcggtcatgttacgatgtagcaagaaggccc

SEQ ID NO: 1000054 - DNA, 120 bp, Artificial Sequence
  ENSG00000228791_41 (sequence is synthesized)
tacagatacagccccttgatcctggacttcccagcctctagaactatgagcgaaataaatttattttcttttaaagttacccagtctgtgatgttctattagcaagaaatgacatttaaa

SEQ ID NO: 1000055 - DNA, 120 bp, Artificial Sequence
  ENSG00000228791_42 (sequence is synthesized)
ccttttgcaaaaatgtaaaataatgccttttgttcactaaatagtttcttattttggaaaatatagttgttttttaaaaaacatgttctttacattaacacataaggatttatcattgct

SEQ ID NO: 1000056 - DNA, 120 bp, Artificial Sequence
  ENSG00000228791_43 (sequence is synthesized)
taagtcactgaaagagcgctgccctcagctgaaatgagagccatctcaacagaaagcttaaattccccccatccttagcccatggtccgtgacacactgttgtggtgttataaatgagca

SEQ ID NO: 1000057 - DNA, 120 bp, Artificial Sequence
  ENSG00000228791_44 (sequence is synthesized)
gctccctttgcctcaagatggaattaactctgcgttgcaattcatgctccggtgccctctgtggaattaggctgaagctggacttcagccaagactgcatccttgcttagttcattttct

SEQ ID NO: 1000058 - DNA, 120 bp, Artificial Sequence
  ENSG00000228791_45 (sequence is synthesized)
tgccttattctactttcctggattgccttctcctgagagcacctactccgccagtaaatcacaagtacctccgtctctccttacaagcaattggagctaagatggattgaactggaaagg

SEQ ID NO: 1000059 - DNA, 120 bp, Artificial Sequence
  ENSG00000228791_46 (sequence is synthesized)
ctagatgctcccaagaatacaaagataaagaagattgcctgcagttgcccagatgcctggaaagtctttaaggcaaagaactgggtaagaagagtttattatacattcctgagcagcatt

SEQ ID NO: 1000060 - DNA, 120 bp, Artificial Sequence
  ENSG00000228791_47 (sequence is synthesized)
gtcagcgagtcaagatacctctctgcattccagagaacttgtcctgatcctcgcaatcagagctgtcttggaacagatgtcacctcctctggtctttcctgacccaccggctcattcata

SEQ ID NO: 1000061 - DNA, 120 bp, Artificial Sequence
  ENSG00000228791_48 (sequence is synthesized)
tctcctactcagccaagaaaataggtgtctagctatagaaaatagtctgatttcctgcccagaaactgtttcgggtgaaaaaaagcaaatgaaaaggaagtaaaaggagagagttagagt

SEQ ID NO: 1000062 - DNA, 120 bp, Artificial Sequence
  ENSG00000228791_49 (sequence is synthesized)
atattacatttcttgaatacctgcaacctacttttccaatcacttttaaaccagagttctttttacagctttcagagctgagcccgttagttgaagctccgccgagagaagccagcagag

SEQ ID NO: 1000063 - DNA, 120 bp, Artificial Sequence
  ENSG00000228791_50 (sequence is synthesized)
gcttccctctacaccagtagttctcattttgctgcatgtcagaacctccagaagagctttaaaaatctcctgatgtccatgtttcagtccaaagcaattaaatcagaatagaaggaggta

SEQ ID NO: 1000064 - DNA, 120 bp, Artificial Sequence
  ENSG00000228791_51 (sequence is synthesized)
gaggttatatggaggggctattggggcatgtctcagtccattagaagcccaaagaaacttgggatttggggaaggacttggatgaagataaataaagggcagccaggctctttattcaga

SEQ ID NO: 1000065 - DNA, 120 bp, Artificial Sequence
  ENSG00000228791_52 (sequence is synthesized)
ttatatccaccatcctagagaagagggcctgacatttttaaatcgtgaccgaactggaagagatttgtagtactttgaaggttgcccttcaaacgcattggaatcgttggcattgctaag

SEQ ID NO: 1000066 - DNA, 120 bp, Artificial Sequence
  ENSG00000228791_53 (sequence is synthesized)
tgaggtgatattcaacagggctatttgatgagatatgacagatgcaaaacgaaagtagattaatttagtaagagtataaaagaaaacgaatgtcacccatcaaacaggcaaaggcaggag

SEQ ID NO: 1000067 - DNA, 120 bp, Artificial Sequence
  ENSG00000228791_54 (sequence is synthesized)
gtgaaaaggagcaggagaaagacctacccaggagccctatgcgagaggccacgcccatcctgcccactgattgggccgaggcacacctttggtgtatagctggctctcaggcaggaggaa

SEQ ID NO: 1000068 - DNA, 120 bp, Artificial Sequence
  ENSG00000228791_55 (sequence is synthesized)
ggttatctgaagaaggttcaaagaagtgtttatgtggctggaagtctaaaaagaaatgaagtgatagaggtttacaaagatgtttgtggaaggagaatttacagattgtagatgatggag

SEQ ID NO: 1000069 - DNA, 120 bp, Artificial Sequence
  ENSG00000228791_56 (sequence is synthesized)
aaagaagaaattctgactccactcgctacaccttcagctcttgagaaaactgagtatggactgggtgagttgaacatatagtatatgaagaaagataattttgacaattgaatctgtttg

SEQ ID NO: 1000070 - DNA, 120 bp, Artificial Sequence
  ENSG00000228791_57 (sequence is synthesized)
tttgaagtgtgactgttaaacctgagcgagtggtttgagatggaggtgttaagactctgcttgtcaactctatgaagaaaattaaatgttgtactgtgacccaaattatattggacattt

SEQ ID NO: 1000071 - DNA, 67 bp, Artificial Sequence
  ENSG00000228794_0 (sequence is synthesized)
ctcactacaacctccacctccagaacgccactgtgcccagctaatttttaaacctttttgtagcaac

SEQ ID NO: 1000072 - DNA, 73 bp, Artificial Sequence
  ENSG00000228794_1 (sequence is synthesized)
acaatcgtcccgccttggcctcccaaaatgctggcattccaggcaggagccactgtacctggccccaccttct

SEQ ID NO: 1000073 - DNA, 120 bp, Artificial Sequence
  ENSG00000228794_2 (sequence is synthesized)
gcattccaggcaggagccactgtacctggccccaccttctttttgctgtaggctgagcacaggagaagttgaatttatcagggaacctaaagacatgcccttctttgaaggcagaagtcc

SEQ ID NO: 1000074 - DNA, 120 bp, Artificial Sequence
  ENSG00000228794_3 (sequence is synthesized)
tgtccacgtcaaatgccctccctccatccctcccagctccctagtcatccttcctattctaggctccaggagcgagacctcctccatgtgcctgctaacgtcagtgccacgggccctctt

SEQ ID NO: 1000075 - DNA, 120 bp, Artificial Sequence
  ENSG00000228794_4 (sequence is synthesized)
tggttctcctgcccaccttctctgactctgcccaacacccacgggccagaggcccttttccttcttggcacttctcggtgttgtagcaggatgagccacggacaaaacccctcagacgcc

SEQ ID NO: 1000076 - DNA, 120 bp, Artificial Sequence
  ENSG00000228794_5 (sequence is synthesized)
gggttaaggaatgatttggttttattcggccaggagcttcagcggactcaagtctcaagaaccgaactctctgaagacagagttcctggcccttttaagggtttacaacctttaggttcc

SEQ ID NO: 1000077 - DNA, 120 bp, Artificial Sequence
  ENSG00000228794_6 (sequence is synthesized)
acgtgaaagggtcgtgatagattgagagcacatgcgtttagagtggggtgggggggttaatcttttaacctcaggcctgatcatcaggggcaccagctggtcttgccactgacttcattc

SEQ ID NO: 1000078 - DNA, 120 bp, Artificial Sequence
  ENSG00000228794_7 (sequence is synthesized)
tgtttttcaacttttacttcctcctcctcttcagacaggagacagtaagagaaatggcctctctcctcagcggcacaatggactttagacatcgcgcctgttttgtactctccaagccgg

SEQ ID NO: 1000079 - DNA, 120 bp, Artificial Sequence
  ENSG00000228794_8 (sequence is synthesized)
gatgcccagaggccccctgtgcttgtggtcgtggccttagacagttccctgccctttgttccagccccgccacacagtctgcacggcctccaccgcagctctggtgagcctcttggccag

SEQ ID NO: 1000080 - DNA, 120 bp, Artificial Sequence
  ENSG00000228794_9 (sequence is synthesized)
ctcctggtgacagcgtgcacctccctgctctgagaaggtctccctctcctctctgcccaccctgtacagagacatctttcaagcccatcccagaggagagtggcctctctcctcaacccc

SEQ ID NO: 1000081 - DNA, 120 bp, Artificial Sequence
  ENSG00000228794_10 (sequence is synthesized)
ctctctcctcaaccccaagaggacggcctctcatgtggctgtcacccatctgacccctatcacagacctgaggagtgggcagagtccttgaccgcattctagggagacttccaaaagaaa

SEQ ID NO: 1000082 - DNA, 120 bp, Artificial Sequence
  ENSG00000228794_11 (sequence is synthesized)
tcaacaacccacactgagagactttcctgcacttctgacctgtggctaacactcctcaccgttcattctgtcatcagtgttttggggaagcacctttaactctctgtgatttacaggtta

SEQ ID NO: 1000083 - DNA, 120 bp, Artificial Sequence
  ENSG00000228794_12 (sequence is synthesized)
ttaagtggcccttacaattccctccagagatggaaaagacatgatgatggtgtctgagctcacagcagcaagcaggcgtgtgtgctcagcagccacgtggctcatctgctgggagcttgc

SEQ ID NO: 1000084 - DNA, 82 bp, Artificial Sequence
  ENSG00000228794_13 (sequence is synthesized)
tgtgctcagcagccacgtggctcatctgctgggagcttgctaaatacgatgttctacaacattgcctaacacaaggggagac

SEQ ID NO: 1000085 - DNA, 72 bp, Artificial Sequence
  ENSG00000228794_14 (sequence is synthesized)
caaaggggtgccagcacccttggctggataagtttgaatgtgctcatagtggacatggtagaatgaaggtgg

SEQ ID NO: 1000086 - DNA, 89 bp, Artificial Sequence
  ENSG00000228794_15 (sequence is synthesized)
ggtagaatgaaggtggttgaaatgttcacattaaagaacttccacccagattgcaagaaaagagagaagaatggagacggcagcacgag

SEQ ID NO: 1000087 - DNA, 120 bp, Artificial Sequence
  ENSG00000228794_16 (sequence is synthesized)
gaaagcgcgtgtctgcgtcgggttctgttggagtgcgttcggtgcgccgtgggtccgcgctgcttccacccaacttcctgttagtttctctcctgtcacaatggcatgatctcggctcac

SEQ ID NO: 1000088 - DNA, 120 bp, Artificial Sequence
  ENSG00000228794_17 (sequence is synthesized)
cagcctcccaagtagctgggattacagtttccatcattatcttctatggagttcttcattcccacatctgtggaccttaaaatcctaccgttgagtgcctgccttggatcagcagtcagt

SEQ ID NO: 1000089 - DNA, 120 bp, Artificial Sequence
  ENSG00000228794_18 (sequence is synthesized)
gcctgccttggatcagcagtcagttcgttaccttggttctcagacgatgcttgcaacaacgccatgcgattcgcccactcttggtaggcagagaagccttcagagaaggatcctgactcg

SEQ ID NO: 1000090 - DNA, 120 bp, Artificial Sequence
  ENSG00000228794_19 (sequence is synthesized)
aattcactgggtcacagtgtgatagtgtgaagatgggaggacgttaagggaaggctatgggtgagttgggaaatgtgttaggcagggtcagagattaccacatcctaaaaacaacactta

SEQ ID NO: 1000091 - DNA, 120 bp, Artificial Sequence
  ENSG00000228794_20 (sequence is synthesized)
aggagggagatgacaaaacaatcaatgaataacatgactttttccagtgaaagtgccatatctaatccttttccatttttgttctctgagcttctttcttagggaagatccttcttgaga

SEQ ID NO: 1000092 - DNA, 120 bp, Artificial Sequence
  ENSG00000228794_21 (sequence is synthesized)
tatgggggcataactcaacatgtgtaaaagacaatcttctgcttttcactgaacctccaggaattcaggacaataaacgtctacatggagaccaacagtttccatcattatcttctatgg

SEQ ID NO: 1000093 - DNA, 120 bp, Artificial Sequence
  ENSG00000228794_22 (sequence is synthesized)
cccactcttggagaaaataagagaagtatccctgaaggatgaaatatcctcgaatatgaaaaggtctgctctctgaagaccaactgtctcagtctgctttttgctgctgtaacagaatac

SEQ ID NO: 1000094 - DNA, 120 bp, Artificial Sequence
  ENSG00000228794_23 (sequence is synthesized)
gcttgcaacaacgccatgcgattcgcccactcttgggtaggtggagacattggggctcaggtgtgggtaagtgattgtgtgactccttgttaagcggcagaaccgggactcaaattcaca

SEQ ID NO: 1000095 - DNA, 120 bp, Artificial Sequence
  ENSG00000228794_24 (sequence is synthesized)
cagatctgattccaaaccctgtggccctaagcatagtgttattagacaataagccctctgcagggagatttccagtgctgatggcagggtctgtcatgaaggaggactctgctgaatttt

SEQ ID NO: 1000096 - DNA, 120 bp, Artificial Sequence
  ENSG00000228794_25 (sequence is synthesized)
tctttgaaccccaggaagtgcctggcacagttctctgaagaaattagaatgcagccagtggttactaaagaaatgaataagtcaagtaaatggacagagctgtgtgctaagagttctttt

SEQ ID NO: 1000097 - DNA, 120 bp, Artificial Sequence
  ENSG00000228794_26 (sequence is synthesized)
gggacacagaaatgggtcagaattggaaatgtccagaaaatactcttggataattatgaaagctacatataggagctcaggtttaactccatatgaaatgaagagtcacaaaagaaaagg

SEQ ID NO: 1000098 - DNA, 120 bp, Artificial Sequence
  ENSG00000228794_27 (sequence is synthesized)
tcctgaaagaaatgacacattaatgaatgaaggtatagttatttggagaaaatgaacctagatataagagtaaccatatcaaaatgtgtttctttaactgcggtcttcagaacctatgag

SEQ ID NO: 1000099 - DNA, 120 bp, Artificial Sequence
  ENSG00000228794_28 (sequence is synthesized)
gttcattggtatattcttgggaactatgtgtgtttgagaaacatatttctggcgccaaactgacagtcacctcaaatccatcacagcacttatgatgaattcttttcaagttaaatgctg

SEQ ID NO: 1000100 - DNA, 120 bp, Artificial Sequence
  ENSG00000228794_29 (sequence is synthesized)
taaagaaaatacttctcttttttactgttaattcacaatttaaaagtgttttcttactgaactacatgttggtccctcagataaggatttctcgagtctcaggtctttggggtctttgag

SEQ ID NO: 1000101 - DNA, 120 bp, Artificial Sequence
  ENSG00000228794_30 (sequence is synthesized)
gagtgtgacttctcaaattggatgacactgatctaactggctgtagtatccattcaagcatgagggaggtcagagcctgggaaagctcaggtccaaacagctcttgaaagaggacgttgc

SEQ ID NO: 1000102 - DNA, 120 bp, Artificial Sequence
  ENSG00000228794_31 (sequence is synthesized)
agggcaggctgctttgcacaaagggacctgtagacactgagaacatcagtataccaggaaccagcccaccctttcactctgccagacatgaggctgtgggttacccatctttccctgtct

SEQ ID NO: 1000103 - DNA, 120 bp, Artificial Sequence
  ENSG00000228794_32 (sequence is synthesized)
cctgaactcatagcaaaaacaaaaaacttcacttgtttgttaacacatatagttcaagacggaagggcctacactgaagcagaaaggattgaggtttatcagcatcttcgctttgaggcc

SEQ ID NO: 1000104 - DNA, 120 bp, Artificial Sequence
  ENSG00000228794_33 (sequence is synthesized)
tcataatgtacttcccatggactaaagttgttcactttctttagaggatattagctaaagatgtggtaaaaccacatttttgcagaaaagtgaatattcaaaaacaaatgtatatggtga

SEQ ID NO: 1000105 - DNA, 120 bp, Artificial Sequence
  ENSG00000228794_34 (sequence is synthesized)
ctcactctcctgccccacctcgacatccacagcgaggcaatgaagaagcccctgccaaggaggagcccgcttctcagtgggacaccgggaagtttctctcctgtcacaatggcatgatct

SEQ ID NO: 1000106 - DNA, 120 bp, Artificial Sequence
  ENSG00000228794_35 (sequence is synthesized)
cttggacgacccaggacataggccagccagtacgtaccccagtgtgttggagaatcgcgctcggcttcttcctctgtgctgagtcatgaaagttgccggagcaggtgcagttacacaacc

SEQ ID NO: 1000107 - DNA, 120 bp, Artificial Sequence
  ENSG00000228794_36 (sequence is synthesized)
tccaggtaacatcacatgatcgttcaaaaaataatcatccaagtccaggatgcagcatctgtctcagtttttggcataggatgacagtctgaaatacacttactgaatttgaataagaac

SEQ ID NO: 1000108 - DNA, 120 bp, Artificial Sequence
  ENSG00000228794_37 (sequence is synthesized)
tcccaagtagctgggattacaggaatctcaccagtgacacgcgtttgtgaaaagctgtgaatattcagtgccacagggttaaacctcggtacagaagcgagaccctgctgggcagagaaa

SEQ ID NO: 1000109 - DNA, 120 bp, Artificial Sequence
  ENSG00000228794_38 (sequence is synthesized)
ctcggtacagaagcgagaccctgctgggcagagaaagggtgacctggaaggtgtgtgagggccccgcccatgggcccctgtgatggtcatggcctcaagaatcacagtccagtttccatc

SEQ ID NO: 1000110 - DNA, 120 bp, Artificial Sequence
  ENSG00000228794_39 (sequence is synthesized)
taactacttagaggttaaaagtcacaagggtgtatggatgaggctggagtgatctgggaccaaagacatctaggcttgctgtcaaggcttctgatcaacatgagatgaccgccgtgtggt

SEQ ID NO: 1000111 - DNA, 70 bp, Artificial Sequence
  ENSG00000228794_40 (sequence is synthesized)
tgagatgactgccgtgtggtaaactgatgaaccctgacccattaggctttggctacagaatgtggaaata

SEQ ID NO: 1000112 - DNA, 120 bp, Artificial Sequence
  ENSG00000228794_41 (sequence is synthesized)
accctgacccattaggctttggctacagaatgtggaaataagttgtgttactacatgtgtgtaatcctagggtgcaggacaccggccgggaggttccatagagtgatgggttctgcaggt

SEQ ID NO: 1000113 - DNA, 120 bp, Artificial Sequence
  ENSG00000228794_42 (sequence is synthesized)
aactcatcctctagtcctctgtaagctcctagaaggaagaaattatgtcctttagactaataaaattcctccaaaccaaatacagcacctactgtgaagacacaaagatacttttagaat

SEQ ID NO: 1000114 - DNA, 120 bp, Artificial Sequence
  ENSG00000228794_43 (sequence is synthesized)
agtaaaaactttatccattgagaaattccttaatgaaacagtatccaagaagtcatttgccagcagatttcttagaggtgcgataaagaagaggacattgccagtcgtcacagcagctgc

SEQ ID NO: 1000115 - DNA, 120 bp, Artificial Sequence
  ENSG00000228794_44 (sequence is synthesized)
aatagctcctctctattgttaaacagtgggatatcttgtgcaggttttcagttgacaatcaattttaaagattagtttcggtccccatcaatcaattatttattaacccatcaataaaaa

SEQ ID NO: 1000116 - DNA, 120 bp, Artificial Sequence
  ENSG00000228794_45 (sequence is synthesized)
aaatactgattatttctgcagcagtgactgcaatacctcactcaatctctgtctttcttgaagaagtcataaataaacacgatgaatctatgtagaagcggaatctcaccagtgacacgc

SEQ ID NO: 1000117 - DNA, 120 bp, Artificial Sequence
  ENSG00000228794_46 (sequence is synthesized)
tcagcctgtgcacctctctgacgataagcagagatgctggtttagagacttgctactcacggggaagtccttgggcctcctgtactcacattacctggaacttcttggaaattcagaatc

SEQ ID NO: 1000118 - DNA, 120 bp, Artificial Sequence
  ENSG00000228794_47 (sequence is synthesized)
tcaggccccaacccagacggactgaatcaaaatcttcattgtggtaagaccctcggtgacacacaggcctgggaagcacaggttagcgtgtcaccttgggcaaagctctcagcattgtga

SEQ ID NO: 1000119 - DNA, 120 bp, Artificial Sequence
  ENSG00000228794_48 (sequence is synthesized)
gcctctgttttctactctgtaaaggaggcatgaatatctacaacatcagtttgccatgagtattgaaaaataatgtcttagaagcacagggcagagcctggcatgtagtttgtgctcagt

SEQ ID NO: 1000120 - DNA, 120 bp, Artificial Sequence
  ENSG00000228794_49 (sequence is synthesized)
gcacagcagacaagaaaccacatgcaccagacctgggcggccgtcggcagcccaccctgagcaaccatgggtggccctcttgtctctcgggacaagaaatgcttctttagaaatgcttct

SEQ ID NO: 1000121 - DNA, 120 bp, Artificial Sequence
  ENSG00000228794_50 (sequence is synthesized)
ttcctttctaaaatgaaagttttggacagtatttcctttcatttaaaaatttcatctgtgtatttgatggcctctgttgtttctttcctgaaactcctgctaacatactgggagctgaag

SEQ ID NO: 1000122 - DNA, 120 bp, Artificial Sequence
  ENSG00000228794_51 (sequence is synthesized)
aagggctccgtgaaggcgagtaggggtgcctgtccctcccagggaggagcttccctcctctcacctgctgcacgagccctagtgcttcaccaactccagcctcagtgccctgacactggg

SEQ ID NO: 1000123 - DNA, 120 bp, Artificial Sequence
  ENSG00000228794_52 (sequence is synthesized)
ggagggaaaggaagcgcacgcaccagccgttccacccaccgaagttgtttggtcccaatctgcaaaatcagttaaacgtcttcctgcctggcagcagatcaaagggtgaggggtctggga

SEQ ID NO: 1000124 - DNA, 120 bp, Artificial Sequence
  ENSG00000228794_53 (sequence is synthesized)
accctttgttatccatgacttaaagaaaagtgaacagggaggtggacaactgtgcaaagactggctggagtcaaatcctgggcataggtgaagcatcgagaatgcttgtcacacgtttga

SEQ ID NO: 1000125 - DNA, 120 bp, Artificial Sequence
  ENSG00000228794_54 (sequence is synthesized)
atgtgcagggggactctgactggaagctcctagcagaggctgaagacactggttaggtcctggtgcgtgccttgggatgcatcccaggcaacgggcccaggagcttgaggtcatgtccac

SEQ ID NO: 1000126 - DNA, 120 bp, Artificial Sequence
  ENSG00000228794_55 (sequence is synthesized)
ctggctcaccagggagtcctgcaccattcttcaaacctaactggaagagacactgatccttcctcccacctaagggctcccagagccacaggtctccgactctcctgcaacacctcctgc

SEQ ID NO: 1000127 - DNA, 120 bp, Artificial Sequence
  ENSG00000228794_56 (sequence is synthesized)
tgcctgttcccaccgcccatgattcactcagtcaccatcctcagcagcacccgacagcctctgtgtgtctgtgtcactcaccattaccagccccctgggtgcccaatgcatgtatgttag

SEQ ID NO: 1000128 - DNA, 120 bp, Artificial Sequence
  ENSG00000228794_57 (sequence is synthesized)
acagaacaaatgcacggcggccttcagcagcaccgaccgcgtcaacccctctgtgctcacaccaggagtgatcagcgcacacgccctcccacaggatgggagaaggtgataacagctgag

SEQ ID NO: 1000129 - DNA, 120 bp, Artificial Sequence
  ENSG00000228794_58 (sequence is synthesized)
ctgggtgtccagaagccagccccaccccacagccactactgagaggttatgagatcatggccttatcccgagtaatgctgctgcagtgaactgggacttttttcctctgaattcaaaggt

SEQ ID NO: 1000130 - DNA, 120 bp, Artificial Sequence
  ENSG00000228794_59 (sequence is synthesized)
ggggcagtctaggcacctggatgcaccatctgctctgtcccggcctggtggctgctcactgtgggatgctgtgcaattagacagttactatctttccctggttgacggattagagtttcc

SEQ ID NO: 1000131 - DNA, 120 bp, Artificial Sequence
  ENSG00000228794_60 (sequence is synthesized)
cttttctgagcatcttgttttgaagtgatccgaagtgtttagggttaaagagcgtgattttcccaaactgtccaaagaaatagaagcaggtctgcaagaggggggtgcccagagccttga

SEQ ID NO: 1000132 - DNA, 120 bp, Artificial Sequence
  ENSG00000228794_61 (sequence is synthesized)
gatggaagcgagatggggtgagacctggggagctctccaggccgccgggaagctgcacgtcatcctctggacctctttgctgactgtgtgctgtcaccacagcagccgccttctctcatc

SEQ ID NO: 1000133 - DNA, 120 bp, Artificial Sequence
  ENSG00000228794_62 (sequence is synthesized)
tgtaaacaggattttacgtaaatttccatacacttggttgttgacaattaagtagattgtttttaaagatacttgaaatgatatcagaatttcctaaatatatcattaaaacaggaaact

SEQ ID NO: 1000134 - DNA, 120 bp, Artificial Sequence
  ENSG00000228794_63 (sequence is synthesized)
agtgggcacaccaagaacaagagctggccagggatgacggacgcatctaggccttctcggcctaagggttacattagttatacactctggaggtgacttgacctgtcattgtgaacaatt

SEQ ID NO: 1000135 - DNA, 120 bp, Artificial Sequence
  ENSG00000228794_64 (sequence is synthesized)
gaggtacaatagctattaaaagagacagaggcactttctgtgtccagaggggcttttagtctgctctggaaagcaagatgcgtgcagatgagtgacgcagtgcatcgtgtggatgcaaag

SEQ ID NO: 1000136 - DNA, 120 bp, Artificial Sequence
  ENSG00000228794_65 (sequence is synthesized)
ggagggactcacatgggaaccagaggagctacgaagggaggcagtggggactggtgggtcgagacctggaaataacacatgaataggcaacaaaggtttcctttcctcttccatgcactt

SEQ ID NO: 1000137 - DNA, 120 bp, Artificial Sequence
  ENSG00000228794_66 (sequence is synthesized)
cagtccttgaaaaacgtcttaccacggaattccacagcgtaccaagcgattccacagcttgatggcacactctcctttctcagcattcttgaaaatggcgtgtgagccaagccatcttac

SEQ ID NO: 1000138 - DNA, 120 bp, Artificial Sequence
  ENSG00000228794_67 (sequence is synthesized)
tgagaaattaccttaaaccatttgatgaaccaaaaatattttgtaatacccatctccgacattaggtaggcaaatcacacagaaacaccgaggtcttctgagtcatatttatctgaaaaa

SEQ ID NO: 1000139 - DNA, 120 bp, Artificial Sequence
  ENSG00000228794_68 (sequence is synthesized)
tcacagcttgggtgcatgtgaagccagaggagcactcctggggcctgcggtgccatcactcagctcccctgggcttcacatggccatggagcacccagcaagtgtaggctctgagccttc

SEQ ID NO: 1000140 - DNA, 120 bp, Artificial Sequence
  ENSG00000228794_69 (sequence is synthesized)
agggaggggcggcatcagccagcaccatcgtctcctgggtcttgtgcctcttccttggttgcggtgttgtcagggccagaattgggcaattccgggtgacatccaggtgtggctgctgac

SEQ ID NO: 1000141 - DNA, 120 bp, Artificial Sequence
  ENSG00000228794_70 (sequence is synthesized)
acggagcacaggtgaggttcactgaggtaagtgggccatggccttgggcttctagttcagagcacaccatccactcagcatgtgaacccagctccaaagcgtatgtgtgcatgtgtgtac

SEQ ID NO: 1000142 - DNA, 120 bp, Artificial Sequence
  ENSG00000228794_71 (sequence is synthesized)
ctgtgcacattgcgcatgtctctgtgtatgcatgtgctttgatgcatgttgatgtacgggtgtatctgtgtattgtgtatgcacacacgagcatatgtgtacatgaatttgtattgcaca

SEQ ID NO: 1000143 - DNA, 120 bp, Artificial Sequence
  ENSG00000228794_72 (sequence is synthesized)
tgtgtttaatgcgaacacgtgtcatgtgtatgtgttcacatgcatgtgtgtctgtgtactgtgtgcaacagtgtgtgcaagtgtgtatatgtgggtttatgtttgtacagtgtgtgtagt

SEQ ID NO: 1000144 - DNA, 120 bp, Artificial Sequence
  ENSG00000228794_73 (sequence is synthesized)
gtgtgtacacatatacacctgtgtgcatgtgtacatggtatttaagcatgtttgcacgtgtgtttgtgcttgcatgtgctgcgtgtttgtgttggtgggatgtggggaggctgctgtgga

SEQ ID NO: 1000145 - DNA, 120 bp, Artificial Sequence
  ENSG00000228794_74 (sequence is synthesized)
gacaaaagctggagagaacttggtagagtaacccaggtcaggaaatggcacctgcaaaggaaggctggagtgcctgggattcacgttgaaatggccaatccgtcagctgggctggacaca

SEQ ID NO: 1000146 - DNA, 120 bp, Artificial Sequence
  ENSG00000228794_75 (sequence is synthesized)
gccatcacgctgggcagctgtgaggttaaaacagaaagtctgggctgtggggaggctgagaattgagatgcatgtatgagatgagtcacgagggccaagtggtgtgtgtgagaaagcagg

SEQ ID NO: 1000147 - DNA, 120 bp, Artificial Sequence
  ENSG00000228794_76 (sequence is synthesized)
cacagcaccactaaacactaaggagatttcaggggagttacgggtggagggaggacatcagatctaccctggaagttaaacgtgtttcgagtgcattaaatactatgggccacagacgcc

SEQ ID NO: 1000148 - DNA, 120 bp, Artificial Sequence
  ENSG00000228794_77 (sequence is synthesized)
ttgtctccatatctactcttttataaatgaagtaaagttcttgggaaatacttttctcactctaaagctcacaatctatcttgcaaaaaatattttaaattccatctcaaataagccagg

SEQ ID NO: 1000149 - DNA, 120 bp, Artificial Sequence
  ENSG00000228794_78 (sequence is synthesized)
tgcaccagacactgccagccttgcctggctctcgccttcttgctcttccttccccacctgctggggattttcttaacgatggagatgggtttgggtttgtcctgctgtgctctgctcccc

SEQ ID NO: 1000150 - DNA, 120 bp, Artificial Sequence
  ENSG00000228794_79 (sequence is synthesized)
attcccggatccaaggtcctgcctctgtcctgtcccctgagccacctcagggatgcagggtcccccacctggtcaagtgcccagtgctgtgttgtcatttgcaagttcttcctgtgactg

SEQ ID NO: 1000151 - DNA, 120 bp, Artificial Sequence
  ENSG00000228794_80 (sequence is synthesized)
aactccaaatggcactgggactgctgactccacccactggacaacccgtgttcttgcttttggggtttctgaaacagccccaagactctgggcatcttgattttgctcccattgcttctc

SEQ ID NO: 1000152 - DNA, 120 bp, Artificial Sequence
  ENSG00000228794_81 (sequence is synthesized)
aggacaccctgctcctgtggtttgcagccccggccttctcttcgaggacgcctctgctcttctgcctcacactcggattggaccttcttcagcacagccagtggccgaggcttcctccct

SEQ ID NO: 1000153 - DNA, 120 bp, Artificial Sequence
  ENSG00000228794_82 (sequence is synthesized)
ggggctcagtggagcaggacagatgctgcatccaaactcttccattgggttccagtctgttccagtcatgcccttgagcctctaaagctcctaggtgagagacgtagcagctgacagcac

SEQ ID NO: 1000154 - DNA, 120 bp, Artificial Sequence
  ENSG00000228794_83 (sequence is synthesized)
ttcccacttgatttgggtggactccagcctccccagcaacaataagagatcaaaagcatcgttgaggaagcagcttgctgaaacgctgagtgcccgccactctcaggtcaggtgggaccg

SEQ ID NO: 1000155 - DNA, 120 bp, Artificial Sequence
  ENSG00000228794_84 (sequence is synthesized)
gcaggccagcatgagttcctgaacacttggttctcaatactggccacagccacactgtaaggggaaacaagagggcactgtatgcaaacatctcttgaactctggagtctgctcaccttc

SEQ ID NO: 1000156 - DNA, 120 bp, Artificial Sequence
  ENSG00000228794_85 (sequence is synthesized)
ctgcctcaagcccctctcccacgtggtccagtcaccattctccacagagactaccctaaaacccagcgactctcgtgtgcctgcagaatggcacagcccgttctcatagcagcactcctg

SEQ ID NO: 1000157 - DNA, 120 bp, Artificial Sequence
  ENSG00000228794_86 (sequence is synthesized)
tttaatcagagggatgttaacgaccaagtcatatttgctcgatttgtgttcaacatatttcatttgtaccgataaaacttaaaaatatccccacacatgcattgcctattaaagagtatc

SEQ ID NO: 1000158 - DNA, 120 bp, Artificial Sequence
  ENSG00000228794_87 (sequence is synthesized)
ttccaggtacacctcccttacacatcagttaacttgataatttcttcccattcttgtgcaataaatttccttcctgatcagctctgtccagcagcaacaataatccacgtagagacatgc

SEQ ID NO: 1000159 - DNA, 120 bp, Artificial Sequence
  ENSG00000228794_88 (sequence is synthesized)
aaactaaaagtccgttagtggaggcacgaagctgatgaggcttggaaaaaaatgaccgatttgattaaaattaggacccatgggagtggagctctgcctattttagaggcaaagtaaatg

SEQ ID NO: 1000160 - DNA, 120 bp, Artificial Sequence
  ENSG00000228794_89 (sequence is synthesized)
cctgggagtccaatcaccgacattctgtttgaggtttctaatcacaaggaagatggagaaaatgcagaacaagtggtcaagaacagggagataataaatagaatatttatgggctgagga

SEQ ID NO: 1000161 - DNA, 120 bp, Artificial Sequence
  ENSG00000228794_90 (sequence is synthesized)
aaacaattaccaggggaaagcccaagaagcaaagatgaacagagaacgtgctgactgcgctcgtttggaaaggcctcatggccaaaggaggagaggcattatgaggagcagtgaccgagt

SEQ ID NO: 1000162 - DNA, 120 bp, Artificial Sequence
  ENSG00000228794_91 (sequence is synthesized)
gggcaggacccccggggatcaggaaaggtgcacggggggaaatgagaggcctgagcggcttcccagcgaaggtttttgaagcacggtttgattttctctctccccctcaccatccccaaa

SEQ ID NO: 1000163 - DNA, 120 bp, Artificial Sequence
  ENSG00000228794_92 (sequence is synthesized)
ttttagttgtgactatctccaggtacatggcttgcgacaggcggtgtataaaaactaatgtcagtttaattttaaaaccttagccattttctggaacttaaatatcaaagagaaaatgtc

SEQ ID NO: 1000164 - DNA, 120 bp, Artificial Sequence
  ENSG00000228794_93 (sequence is synthesized)
cacatatgatgttaattgaggtttgtctcactggtgatttgtgctgattcaattcctgtttctttttttttttcttaaggggtcagttttagaattgggagataggtgtataacatatga

SEQ ID NO: 1000165 - DNA, 120 bp, Artificial Sequence
  ENSG00000228794_94 (sequence is synthesized)
ctatacagcgcaggttggttttttaacatagaaatatctgcctttaaatgagaactgaaaacggagcttcttggaggccacctgctggtggcagtgatctgaccgctgtttaagctttct

SEQ ID NO: 1000166 - DNA, 120 bp, Artificial Sequence
  ENSG00000228794_95 (sequence is synthesized)
ttgaactcctttttttaaaacagcctccataatcaatggtgtacgatctactctcgtggtaaaacttactcagtgaagagtgtgttttattttctgaggagctgaactgttccaacctga

SEQ ID NO: 1000167 - DNA, 120 bp, Artificial Sequence
  ENSG00000228794_96 (sequence is synthesized)
gtattctgaataaggacagtggtcgagcatgagtgatgccatctgggcttagaaataagtgggcctaaaatctgattgttttcatacattgttcagatattgacgcaaatagcaatttat

SEQ ID NO: 1000168 - DNA, 120 bp, Artificial Sequence
  ENSG00000228794_97 (sequence is synthesized)
tttgtaaaaaatgattggtatccggaacttgcaacagctgtgtgtggcttgaagggagatgaagtggtgaaggcctggtttccaccgaagctctcacagcccagcctttcactgtgtggc

SEQ ID NO: 1000169 - DNA, 120 bp, Artificial Sequence
  ENSG00000228794_98 (sequence is synthesized)
cgggggaagggtgctccgggtgggggacgggaatggtgggactggggatgccacgggacaaggctgctggcctggaaggtagtcacgtggagaaccgcaggagatgagattggaaagtag

SEQ ID NO: 1000170 - DNA, 120 bp, Artificial Sequence
  ENSG00000228794_99 (sequence is synthesized)
taataagccatgtggataagaacagaggagcgggttttaagggggacgtcctgaaatgctgctcatgtcgtttcagttccatagaccacaggaaatgcaggtgagagggcagcccggtgg

SEQ ID NO: 1000171 - DNA, 120 bp, Artificial Sequence
  ENSG00000228794_100 (sequence is synthesized)
gaaggaaggaagagggtggtggtgagccaggtgagtgtggagccgcccagggcaccgtgctgtgcgatagctcaggcatcgggtgcttctgccaaacccttcagcagctggtttggggcc

SEQ ID NO: 1000172 - DNA, 120 bp, Artificial Sequence
  ENSG00000228794_101 (sequence is synthesized)
aaacgtccttcctgtgtgagagaaggcagagcctaggcagcattccaaaccccatccagatgggaggctgagtgcagagcaaacggagcccagcactccagagccgtgtcccttcactgc

SEQ ID NO: 1000173 - DNA, 120 bp, Artificial Sequence
  ENSG00000228794_102 (sequence is synthesized)
catgatcacatcacaaacagcgaggcttggagaggacttaagagctccttcaatgccatcttccatccactgcgtgagccagaatagaaaaaaaggaataagaagaggtcggttaagctc

SEQ ID NO: 1000174 - DNA, 120 bp, Artificial Sequence
  ENSG00000228794_103 (sequence is synthesized)
tctattaagttgagaaaatgggaacttcaggtgatcatgtgagatattcaagttaaaaaaattatttaaaaagcacattcttattattaaaattttagaaagtacagagaaggaaatttt

SEQ ID NO: 1000175 - DNA, 120 bp, Artificial Sequence
  ENSG00000228794_104 (sequence is synthesized)
aataacctacacctagaacactaagatactggtaacgtagaaaaatgtgtagttaatgccttgatggattcttttctatttttttctctagcaatatttatgtctatccacagaaagcgt

SEQ ID NO: 1000176 - DNA, 120 bp, Artificial Sequence
  ENSG00000228794_105 (sequence is synthesized)
acactcatgtatttgcatggctaatatattttatgtaaagttctatatatttctcaacatttcacttaatatttctttataaacatttttccagtgaataaaaatttttccaaacagtaa

SEQ ID NO: 1000177 - DNA, 120 bp, Artificial Sequence
  ENSG00000228794_106 (sequence is synthesized)
ggccctgccagtgtctccgccggttgaaagcgcgtgtctgcgtcgggttctgttggagtgcgttcggtgcgccgtgggtccgcgctgcttccacccaacttcctgttaggaatctcacca

SEQ ID NO: 1000178 - DNA, 120 bp, Artificial Sequence
  ENSG00000228794_107 (sequence is synthesized)
acatctgtcagcctgcgcctggttggagacgcctccctctcatttgtccttgcttgctgcgtgactttggcaagtgcttgcctctttgagaccctcagttttcacacctgagaaatagaa

SEQ ID NO: 1000179 - DNA, 120 bp, Artificial Sequence
  ENSG00000228794_108 (sequence is synthesized)
aggtggtgcctgccccagctgccacgcagaagagtttaggtggcatgtgagaaaatgccttatgaactacgatgtgagcaactgcagcatgctgtgaacaccgctttcatgagctcctca

SEQ ID NO: 1000180 - DNA, 120 bp, Artificial Sequence
  ENSG00000228794_109 (sequence is synthesized)
ggggcagggtaacacccaagcattcttacacctcccaccgggcttgtcacgaccgtatgcaaatgaaggccatcaagcgtgtttgatcagtgatgtatttctttatttttagttgtagaa

SEQ ID NO: 1000181 - DNA, 120 bp, Artificial Sequence
  ENSG00000228794_110 (sequence is synthesized)
tatgacaactctatttttagcagctatagcggccaaaactttgttaccactcagcagttgtgtgttcttcaagagtaggttttgtgctttcaaaatatctgaatcctctaccatttacag

SEQ ID NO: 1000182 - DNA, 120 bp, Artificial Sequence
  ENSG00000228794_111 (sequence is synthesized)
gtgttctgtgcatacttggtgtatgagttcctcaggaaggaagaaaaatgtgccctttttatcttttaaaaagatggcttggcttggtactcctttgcctgcattccttctctgtattta

SEQ ID NO: 1000183 - DNA, 120 bp, Artificial Sequence
  ENSG00000228794_112 (sequence is synthesized)
gaaacgaacctacacaagtgaaggcaaaggaagcctcttgaaagataaggcaggaaaaatgaggatagaaaacaaaacccttctagagagtttacgtggaggctaccacgggcatcgctg

SEQ ID NO: 1000184 - DNA, 120 bp, Artificial Sequence
  ENSG00000228794_113 (sequence is synthesized)
ctctgcagtctgtcaaccagaggcccctggtgctgcagcacggccttggcagcttcaccaacaggaatgtgttctcctagggtactggagggtggcagtcccagagcaaggtgtggcagg

SEQ ID NO: 1000185 - DNA, 120 bp, Artificial Sequence
  ENSG00000228794_114 (sequence is synthesized)
gctgctcctcctgaggcctctccctggcttgcagacgacatcttctcccatgttctcatgtgggcctccctctgcacacgtatatctgacatcctcccatgtcctcacacgttcctccct

SEQ ID NO: 1000186 - DNA, 120 bp, Artificial Sequence
  ENSG00000228794_115 (sequence is synthesized)
ttgcactcgaatcccggacatcctcctatgtctcacgtggtcctctctctgcactcgaatcccagacatcctcctatgtcctcacatggtcctccccctgcactcacatccctgacgtcc

SEQ ID NO: 1000187 - DNA, 120 bp, Artificial Sequence
  ENSG00000228794_116 (sequence is synthesized)
tcccgtgccctcacgtggtcctccctctgcactcacatccctgacgtcctcccgtgccctcacgtggtcctccccctgcactcacatccctgacgtcctcccgagccctcacgtggtcct

SEQ ID NO: 1000188 - DNA, 120 bp, Artificial Sequence
  ENSG00000228794_117 (sequence is synthesized)
ttcagcattagtccccatatcctcgtccggtgtggcactgagagcagctaactgttgccctcgttggttcccagttggcttccgtgactggtcagggtcaggtccactgccaacaggctg

SEQ ID NO: 1000189 - DNA, 120 bp, Artificial Sequence
  ENSG00000228794_118 (sequence is synthesized)
gtgttgaatcccttggagaaacacagacattctgaccctaaattatgctttcaatgccatgtgttttcctatcacaaaaatcctcgttctcaagtttcttctttctttatttttatttca

SEQ ID NO: 1000190 - DNA, 120 bp, Artificial Sequence
  ENSG00000228794_119 (sequence is synthesized)
tcactcgaatcactagagaataccaaataggaataggaagataacacactggtaagaaaaatgtccaaggccaatcacaggagtcaaagctcgtgatcaaatcagctctgcctggggagg

SEQ ID NO: 1000191 - DNA, 120 bp, Artificial Sequence
  ENSG00000228794_120 (sequence is synthesized)
ccgtgctcatggcaccatttagtgacaagtgggtgactctggggcaagttccaggggtgtcacccccaaggcagcagctcaggtgcagccaccatggaggcagtttcactgaggggccct

SEQ ID NO: 1000192 - DNA, 120 bp, Artificial Sequence
  ENSG00000228794_121 (sequence is synthesized)
ctgaggcccctactctgagattctaagacagggtttgaagaatgttccagcatttgaacacatgaaccctatgatgtcctgctgtgagagagaacaatgtcccaattttgcccaggtgat

SEQ ID NO: 1000193 - DNA, 120 bp, Artificial Sequence
  ENSG00000228794_122 (sequence is synthesized)
ttgaacatctcggtatggatctgttatgggttgaattttctcctgcccaaattcttatgttgaagtccttacccctgatgggactagatttgtagacagggcctttaaggaggtgattag

SEQ ID NO: 1000194 - DNA, 120 bp, Artificial Sequence
  ENSG00000228794_123 (sequence is synthesized)
cgtagtgaggtcaccaggtgggccctgatgcaatctggcatcctcctaagaggacatgaggacacagacacatacagagggacgatcgtgtgaggacacagaggatggcatctgcacgcc

SEQ ID NO: 1000195 - DNA, 120 bp, Artificial Sequence
  ENSG00000228794_124 (sequence is synthesized)
cagccctgcccacaccttgatctgggacttccagcctccagggttgtgagagagaaatgtctgttgtttaagccatgcagtctatggtgctttgttatggcagctccagcaagctaacct

SEQ ID NO: 1000196 - DNA, 120 bp, Artificial Sequence
  ENSG00000228794_125 (sequence is synthesized)
atggcagctccagcaagctaacctgggatctaaaatgatacttaaactggttcagtctgattcttaaactggttcagtggagctaggccaggctccctctgagcagatgttggtcccttt

SEQ ID NO: 1000197 - DNA, 120 bp, Artificial Sequence
  ENSG00000228794_126 (sequence is synthesized)
gcaggcctgctgtgtgtgatgattgctaaccaggttatgacagtgatctttaagtaagtgggaatcttgtgagttttgaggttttgtttttttttttaatgaaatctacatgggatgttt

SEQ ID NO: 1000198 - DNA, 120 bp, Artificial Sequence
  ENSG00000228794_127 (sequence is synthesized)
caaaaatagcagcctctgtatacatttgtcaagcaggaagctgggtctgcggggagtagggtggggctggttctcccacacgcttgccactttcaggcccttgccttgcatgggctgcgg

SEQ ID NO: 1000199 - DNA, 120 bp, Artificial Sequence
  ENSG00000228794_128 (sequence is synthesized)
tggttctgccagtgtggattcgaaccgataggtttcgctgtaccttgatcagcatcctgctgccgagaaagccaaaaagggctggagcaaccctcccgtgtgccatgtgagcctgtttcc

SEQ ID NO: 1000200 - DNA, 120 bp, Artificial Sequence
  ENSG00000228794_129 (sequence is synthesized)
tttctacagtcaccagttcacgcagcaagtgtcagagcattcctgtaaggcccggctctccacaggggccaggggagctttctctggcagggtcttcttcactgtgtgtaggatacggca

SEQ ID NO: 1000201 - DNA, 120 bp, Artificial Sequence
  ENSG00000228794_130 (sequence is synthesized)
gcctttgaggctggggaaccgaagttttccttttattctattttaattaatttaaattacaataagtattatcactaagtttatgcaaacacgtgagggaatgctgatttagagctggtg

SEQ ID NO: 1000202 - DNA, 120 bp, Artificial Sequence
  ENSG00000228794_131 (sequence is synthesized)
gcgtaaggtcacagagctcccacgaatctcacatggaagccttgtttctccaggttttttgtagtttgtactgaatcacacaccatgctgcttccatgttttttcagggatttccaacac

SEQ ID NO: 1000203 - DNA, 120 bp, Artificial Sequence
  ENSG00000228794_132 (sequence is synthesized)
agattttcctgagtaccctggattaatctccttttggataggtccatgggggccctgctgctttttccccttagccctgggcgaggtcatcatagagggggagtggcaatggctcacaag

SEQ ID NO: 1000204 - DNA, 120 bp, Artificial Sequence
  ENSG00000228794_133 (sequence is synthesized)
gtactagtggaaccccagtaagttatctcagagcccgcttagaacacaagtgctacgtcccccaaaagctttgcaatgagtatctgatgggaacaaactcagtcaaggacaggcccaggt

SEQ ID NO: 1000205 - DNA, 120 bp, Artificial Sequence
  ENSG00000228794_134 (sequence is synthesized)
tggggcttgcaggctgcagattcagaattgtttatgagatgggagccatactttctaacaacaagacctgaatttctcaatttaatccaagtcgtgacttaagttagcgcccttccgttc

SEQ ID NO: 1000206 - DNA, 120 bp, Artificial Sequence
  ENSG00000228794_135 (sequence is synthesized)
ctctattacatttctgttcggcatggatcaaattgcctacaaggtggaacagatttcaactgcaatctctgaaccagaaaattcacttattctcatgaaagtttgtaatctttggagagt

SEQ ID NO: 1000207 - DNA, 120 bp, Artificial Sequence
  ENSG00000228794_136 (sequence is synthesized)
tgcttaaacacttaaaaccatctttcctctttctatactccaaacttacctgctgcaatttcttgctaagaagcaaagtgctatttgcctattcctatctctctttaccatcagacactc

SEQ ID NO: 1000208 - DNA, 120 bp, Artificial Sequence
  ENSG00000228794_137 (sequence is synthesized)
cttaagttaagagctagataattcgctcagcctcaggccaggccgagcctcactctagaagtcacattcctgaggtgtagggggtcaaaatgcctctcattgttcagaagcaggtgaggg

SEQ ID NO: 1000209 - DNA, 120 bp, Artificial Sequence
  ENSG00000228794_138 (sequence is synthesized)
gccagccagggcacatcctgctctccaggcttggttcagataactgtcagcccagttttcaagagcacacaccaaaaatgcaccaaagcttacatccatacaaacacccgcacatggatg

SEQ ID NO: 1000210 - DNA, 120 bp, Artificial Sequence
  ENSG00000228794_139 (sequence is synthesized)
tttatggaagcttatttgtttttattcataatcacccaaactcagaatcaaccaagatgtccttcagtagatgaatggataaactgtggtgtgtccaggcagtggaatattattcaacgc

SEQ ID NO: 1000211 - DNA, 120 bp, Artificial Sequence
  ENSG00000228794_140 (sequence is synthesized)
aaaaagaaatgagctatcaaggcatgaaaaaatatgggggaactttaaatgcataaatgagtgaaagaagccagtctgaaaaggctacaccccgtgtgcttccaactacaggacatcctg

SEQ ID NO: 1000212 - DNA, 120 bp, Artificial Sequence
  ENSG00000228794_141 (sequence is synthesized)
gaaaaagcagaattaccaacacagtgaaagataaggcctggtggtgtggggaaggatgaacaggtggagcacagggatctttaaggcagacaatctactctgtgtgatactgcaatgatg

SEQ ID NO: 1000213 - DNA, 120 bp, Artificial Sequence
  ENSG00000228794_142 (sequence is synthesized)
gtctcagccagcagggttgcccagtgccccttgtcaccccccgagcaacacaagccaggctgcggttactctgggtctgtgcgtctgggatcatagtttttaaatctgccccagggtcct

SEQ ID NO: 1000214 - DNA, 120 bp, Artificial Sequence
  ENSG00000228794_143 (sequence is synthesized)
ccagtcccagctgtggaaagtcaccctcagagggtgaggcgggcggcgcgcctctgtgtgagtggccccatccttcacagcgagtttgtgtctactgaatcgcagactctgggaggctga

SEQ ID NO: 1000215 - DNA, 120 bp, Artificial Sequence
  ENSG00000228794_144 (sequence is synthesized)
agggttacaggaggtcgtgtgtctcacgtcgccacttcacggttgaggaccccgtgacccgctttgctcagtggctgcgcaagatgagtaatgacctgaaacagggaaaatgtcttggat

SEQ ID NO: 1000216 - DNA, 120 bp, Artificial Sequence
  ENSG00000228794_145 (sequence is synthesized)
ttgcgtaatgaggagaaaaatgcagccatgttgcagcctgataaaatactctgccagtgtcctgccataaaatgacaggcgaattttcagtagcagattctctaatagttctgtggtctt

SEQ ID NO: 1000217 - DNA, 120 bp, Artificial Sequence
  ENSG00000228794_146 (sequence is synthesized)
ctaggtgctaaactgtttaagtatctacattttctaagcccgcctaatgcaaatattctcaaaaaacataaacccttcattctttctcaaataggttacattagttatacactctggagg

SEQ ID NO: 1000218 - DNA, 120 bp, Artificial Sequence
  ENSG00000228794_147 (sequence is synthesized)
gttaggtaagaggcgcgtgaggctcctgtgccgggggcggtgctgctcccgagtcggcgcgcggcggggacgcgagtccgtagtttctctcctgtcacaatggcatgatctcggctcact

SEQ ID NO: 1000219 - DNA, 120 bp, Artificial Sequence
  ENSG00000228794_148 (sequence is synthesized)
gctcccgagtcggcgcgcggcggggacgcgagtccgtaggtgctggcgggagcgagagtcgggtggggaccctcgcgagcccgcactccgcctctgggtagcagcctcttcggccccaca

SEQ ID NO: 1000220 - DNA, 120 bp, Artificial Sequence
  ENSG00000228794_149 (sequence is synthesized)
gtgacgcgcgctcgggctccgcgttcgcgtcgaggcagaggcgtagtaggggtcgggcccagggctggaggggccgggaccgggcggggtgccgccctggacaccgcgccggcagctgtt

SEQ ID NO: 1000221 - DNA, 120 bp, Artificial Sequence
  ENSG00000229262_0 (sequence is synthesized)
tccgggagactctgcagatgtatttttatccaccaacaaacgggatttgctagaaagaaggagcttgggtgaatggaagagtaaaaatgaagtacaactatgaagttacagaattattcc

SEQ ID NO: 1000222 - DNA, 120 bp, Artificial Sequence
  ENSG00000229262_1 (sequence is synthesized)
ttccaattatacagaagaggctgtcaactccattaacaaagcttttttttcctttcactggatttcaaaccactggctacagtgagttctgctgccacatcctgggtcatcgattctgcc

SEQ ID NO: 1000223 - DNA, 120 bp, Artificial Sequence
  ENSG00000229262_2 (sequence is synthesized)
attggtgtcctaggacagcattaagaccttcagctgtcttctgattgaggacaagatcatggtgtctcatcgtccccaccccactgtaattcaaaataaaaacaatgctaaaccacaaaa

SEQ ID NO: 1000224 - DNA, 120 bp, Artificial Sequence
  ENSG00000239677_0 (sequence is synthesized)
agaggcctctcttctgatatccttcttaacttaatctacactggctgtgggttccctttatttttttttctggaatcctagaggatgcacggatacaattcacccaatgtgtccatctct

SEQ ID NO: 1000225 - DNA, 120 bp, Artificial Sequence
  ENSG00000239677_1 (sequence is synthesized)
cctctcctaagtgtcagtctataggtttctgacctctagaggaatccctgaagctgtacagctatactttaccggttacgtctagactataaaggaccacagtgttccacctcaggcagg

SEQ ID NO: 1000226 - DNA, 120 bp, Artificial Sequence
  ENSG00000239677_2 (sequence is synthesized)
ttcagcgacctgcaagtagtgatacagctgggaaagttacagagcctgcgggaagctccggctgcaacttcagttctgaccagaggttctgtgaaccttcaggatttagcaggtttccag

SEQ ID NO: 1000227 - DNA, 120 bp, Artificial Sequence
  ENSG00000239677_3 (sequence is synthesized)
ggagtgggagaggccagcgtgctggctccatccacttcacctaacacctctgaagtgtctgccctgcagtgtggcaagcgtggtgctgagcgcttctaaatccgtcgctttaaagatcat

SEQ ID NO: 1000228 - DNA, 120 bp, Artificial Sequence
  ENSG00000239677_4 (sequence is synthesized)
tagtacaatgttgtgagagggttagctccatttgaaaattattttcccgtgattacaaaagaagcgatgctgactgcagaagttagaactgggagaagactcatcacccccatgatcatg

SEQ ID NO: 1000229 - DNA, 120 bp, Artificial Sequence
  ENSG00000239677_5 (sequence is synthesized)
tcaacaactgccctccttcagttttggtttgttttgtgtgtacactctgtcatctttccattgaggaaactcaggctagaagaaggataaaaacaaaacagaaaacaaaacaaaacaaaa

SEQ ID NO: 1000230 - DNA, 120 bp, Artificial Sequence
  ENSG00000239677_6 (sequence is synthesized)
cctttgctgttctcaaggctggcactgaggttggtaaaagttccaagcagggctccaacaccggaacaaacctttctccaatccctgaagctgtacagctatactttaccggttacgtct

SEQ ID NO: 1000231 - DNA, 120 bp, Artificial Sequence
  ENSG00000239677_7 (sequence is synthesized)
atttggaatctgcttccagtttctgaacagtgaagcgggagagttctgaacagtaaagcaggagctctgtattcagcgagactctggggcctggaaagtgggattacagcatccattttg

SEQ ID NO: 1000232 - DNA, 120 bp, Artificial Sequence
  ENSG00000239677_8 (sequence is synthesized)
tctaattgctttccttctttcttttatgtggctgctaaagccccatgaccttcactatttaactgcttcatcagagtgaaagaattgccttgatgttcataaggattacttgtttcacac

SEQ ID NO: 1000233 - DNA, 120 bp, Artificial Sequence
  ENSG00000239677_9 (sequence is synthesized)
tttctggaatcctagaggatgcacggatacaattcacccaatgtgtccatctctcctctcctaagtgtcagtctataggtttctgacctctagagggtaagcaacttgcccgagatcccc

SEQ ID NO: 1000234 - DNA, 120 bp, Artificial Sequence
  ENSG00000239677_10 (sequence is synthesized)
tagctggtctgagcagcaaagcctttgaacgcagttttgactctggagctgcattcttcattcttatcctacacttgcttgtgaattctttttcgtccttccagaatccctgaagctgta

SEQ ID NO: 1000235 - DNA, 120 bp, Artificial Sequence
  ENSG00000239677_11 (sequence is synthesized)
gagactttcttttaattgctttaatcaattaatgcattgctttgataggattctgcatggggtggaatattattggcctttgttcagataagcttgtgccagggaatcctccatcagtat

SEQ ID NO: 1000236 - DNA, 120 bp, Artificial Sequence
  ENSG00000239674_0 (sequence is synthesized)
atggccagggttcctctatccatctgtgggaagaccccaagtttgatactgaagatgttaaaccatctccaaagtgactatttcacattgactatgttcccctagttggaaagccaaggc

SEQ ID NO: 1000237 - DNA, 120 bp, Artificial Sequence
  ENSG00000239674_1 (sequence is synthesized)
ccttccttcaccaccaaggaggatggctcagcagcagctcagtccctgcttgtcaaccaccgacctccatacactccagccccggtccacatcccccaaggctcctcgtgggattcctaa

SEQ ID NO: 1000238 - DNA, 120 bp, Artificial Sequence
  ENSG00000286187_0 (sequence is synthesized)
tagtcccatgttcctaagagaggtcagacgtgagcagcctgaagaaacctcaagcagagcccaaggaataaatcacgaaatccctaaggatctaaaaggatctgcatgatgcctcagacc

SEQ ID NO: 1000239 - DNA, 120 bp, Artificial Sequence
  ENSG00000286187_1 (sequence is synthesized)
tctgcatgatgcctcagacctgcctagatgttgtagggtcagcgagaccatgaacccaccaggaggaacaagcaactctggaggcgccacctttaagagctgtaacactcactgggaagg

SEQ ID NO: 1000240 - DNA, 65 bp, Artificial Sequence
  ENSG00000286187_2 (sequence is synthesized)
acaacactcaccccaagggtccacagcttcattcttgaagtcagcaagactaagaacccaccaga

SEQ ID NO: 1000241 - DNA, 120 bp, Artificial Sequence
  ENSG00000286187_3 (sequence is synthesized)
gcttcattcttgaagtcagcaagactaagaacccaccagaaggaacaaattctggtcacaccatggggattggaatatagtctgttgaaattgtgggacccatccactcctcactagatt

SEQ ID NO: 1000242 - DNA, 120 bp, Artificial Sequence
  ENSG00000286187_4 (sequence is synthesized)
gtatcctcaaccctatctgaccttattgctgctcacactctgtgtcccaggatgaaatctcaagatgatggaggagtgccccctttgacctgaagcacctgctcagctaggaaccaaatt

SEQ ID NO: 1000243 - DNA, 120 bp, Artificial Sequence
  ENSG00000286187_5 (sequence is synthesized)
caagggggaggtgacttggacgctggcaagtctcgacccgccccccaatatactggggattcatgatccacagaaaaatagagaacacagccctgcgactaaagcaaagccacacagaca

SEQ ID NO: 1000244 - DNA, 120 bp, Artificial Sequence
  ENSG00000286187_6 (sequence is synthesized)
agccatcaaaatgttgagagactcaaataaagaagcactgaaatgtgttagccacattcttttaagcagactccatttgcaggaacacacacacacaaagacacaataccacacaaacac

SEQ ID NO: 1000245 - DNA, 120 bp, Artificial Sequence
  ENSG00000286187_7 (sequence is synthesized)
atgcagaaatctgacactcataacactcccacagaaacacacagcccggcagcttctgaggctgtgtgtttctgtaggaagccccaccttggagagagcaaccccagggaacagaggcag

SEQ ID NO: 1000246 - DNA, 120 bp, Artificial Sequence
  ENSG00000286187_8 (sequence is synthesized)
gctctaactaaaaatatcatgggggcaagtttcataaagactcactcctagaactcctgggcaggcctaaggaatcctgcagatgattttggatccacagggattttgtagtttattcct

SEQ ID NO: 1000247 - DNA, 120 bp, Artificial Sequence
  ENSG00000286187_9 (sequence is synthesized)
ggggctctgcttgacatttcttcaggctcactcacatctttctctcctaggatcatgggattattccatgtatcccacagagaagacaggtgagagtccaccagcgcacctccacagagg

SEQ ID NO: 1000248 - DNA, 120 bp, Artificial Sequence
  ENSG00000286187_10 (sequence is synthesized)
tctctttctccacaagctgcagggacttgtctcttgccaacagtgacattccttgtgacacttgccagaactcaaaatcaggcatggtgccctgagtctagctcatgcacattcgtgagg

SEQ ID NO: 1000249 - DNA, 120 bp, Artificial Sequence
  ENSG00000286187_11 (sequence is synthesized)
caggctctggcatccggctgtcagagctgtcagcctgactaagcagaggaaaatgctgcaagcagagccggccttgtatcaggaaaaaggatgcctatgaaaacccactgcgagacccta

SEQ ID NO: 1000250 - DNA, 120 bp, Artificial Sequence
  ENSG00000286187_12 (sequence is synthesized)
aaagtctcaaactcagggcctctttgggccatctccatggtcaggtcccactggaggaggaggtgtttcaagactgtgaggtggtcgctggaaactgctcttctgactctattcctgaaa

SEQ ID NO: 1000251 - DNA, 120 bp, Artificial Sequence
  ENSG00000286187_13 (sequence is synthesized)
gaggctgtgtgcaagaatcaggtcccatggagattggaatagagtctcttgtgttgttggggttctttgggtgatagaattatacttgaaaccccagaggtgggcatcactaaaagatgc

SEQ ID NO: 1000252 - DNA, 120 bp, Artificial Sequence
  ENSG00000286187_14 (sequence is synthesized)
ccgagcttgacctcatggcatcccttcatcctgggtctcacaggggctgtctggaaaagtcaggaaccatcacagaggaaagtccaaggtgaagcagttgtctcacaccacagactggtc

SEQ ID NO: 1000253 - DNA, 120 bp, Artificial Sequence
  ENSG00000286187_15 (sequence is synthesized)
tctccttggtgcagatgaggttgacacagtgactcagaggctgtctgtggtgatagtaagcctgaaaattgtgttcagcagtgctgtagtgctgttaagggtcattgtagatttttcatg

SEQ ID NO: 1000254 - DNA, 120 bp, Artificial Sequence
  ENSG00000286187_16 (sequence is synthesized)
aaagcaaggaaaaaacaaggcttgcctgaggaaatgagctgccttgtgctggagtccaaacttggactgaactcttatgggtaaagataaggtagagaccatgtctcagaggtcatcttt

SEQ ID NO: 1000255 - DNA, 120 bp, Artificial Sequence
  ENSG00000286187_17 (sequence is synthesized)
gatgatgccaagcctgaaaatgatatccagtagagctgttgaaggacactgtagattgtccataaaagcaaagaaaaatcaaggttcacctgatagaatgagctgcattgacctggagtt

SEQ ID NO: 1000256 - DNA, 120 bp, Artificial Sequence
  ENSG00000286187_18 (sequence is synthesized)
taagcaatgttcaatgcttcctgttagaggtcccaaaagcctcctgcaaattgcaaacaacctcagcccccataacgagacaacgactcaaaacttggagcaccgccagactcctcaaag

SEQ ID NO: 1000257 - DNA, 120 bp, Artificial Sequence
  ENSG00000286187_19 (sequence is synthesized)
tcccttttgctctttgaaatctctggaagcaaaataatctttggcaagaggcagtcccatccagccacagcccaatgaaagaacccccactcaacgagaagaccatgtagatgaaaaaaa

SEQ ID NO: 1000258 - DNA, 120 bp, Artificial Sequence
  ENSG00000286187_20 (sequence is synthesized)
tcagagactagattgccaggcaaaagccagacagggctgcctgcttctcatcctacaggaatcatgcggaatgccaagagaagtgaaaaaaaaaagagtttccttgttggcagctgtaag

SEQ ID NO: 1000259 - DNA, 120 bp, Artificial Sequence
  ENSG00000286187_21 (sequence is synthesized)
ggaatttacagttttaaaggtatcaaagctgcccagtcattaaattgtgacagtgtttagaaggaaacactcaggcaatggattcccattagggtcattctctgtgaactgagaaacgtt

SEQ ID NO: 1000260 - DNA, 120 bp, Artificial Sequence
  ENSG00000286187_22 (sequence is synthesized)
tactgtgtcattgagccagacacaggaaaacctgcaccaacaagaaacatggacatcagagaaagaagagtcaagtgtggaggccatatcccaccaagcatcaatccatttcattcccat

SEQ ID NO: 1000261 - DNA, 120 bp, Artificial Sequence
  ENSG00000286187_23 (sequence is synthesized)
ttggctcccggtgaagttgtgggatctcatccaattcccaccagattgtatcctcacccctgtctgaccttattgctgctcacactctatgtcccaaaatgaaaacccaagttgatggag

SEQ ID NO: 1000262 - DNA, 120 bp, Artificial Sequence
  ENSG00000286187_24 (sequence is synthesized)
tattgccccctcatgatgtgaagaaactgcttggctgggacctgaatttgaggatcatgggactgtaccatggatacaacagagaagacaggccagaatccactgctgacacacctccag

SEQ ID NO: 1000263 - DNA, 120 bp, Artificial Sequence
  ENSG00000286187_25 (sequence is synthesized)
ggaaacctctttatctgccaagctgcagggatttgtcactggcaaaggtgacattcattgtgaagctagccagagctcgcaatcaggcctgatgccctgagactagggcacgcacattaa

SEQ ID NO: 1000264 - DNA, 120 bp, Artificial Sequence
  ENSG00000286187_26 (sequence is synthesized)
tgaggcaggctctggccctggctctcagacctgtcagcctgcctaagcagaggaaaatggcagaggcagagtcggtctggtatcgggaaaaaagctgcctgtgaaacccactgaaggacc

SEQ ID NO: 1000265 - DNA, 120 bp, Artificial Sequence
  ENSG00000286187_27 (sequence is synthesized)
ctaaaagtctcaactttgggggttattcaagccatctccatggttgtgtcccactggaggaggaggtgttttgagaccatgaggtggtcgcagaaactgctcttctcttctgagtccgtt

SEQ ID NO: 1000266 - DNA, 120 bp, Artificial Sequence
  ENSG00000286187_28 (sequence is synthesized)
cccaaaggaggctgtgtgaaagaattaggtcccatagggattgatatatagtctggtgtgttctggaggggttttttgggtgatagcagcagacctgagatcccagaggtgggtgtcagc

SEQ ID NO: 1000267 - DNA, 120 bp, Artificial Sequence
  ENSG00000286187_29 (sequence is synthesized)
aaaagatggccaggctcttgacctctctgcctcccttcatcgggggcctcacataggctctctgggaaaggcaggaagcaagacaaggcaagtataagatcaacactgttctcacacctc

SEQ ID NO: 1000268 - DNA, 120 bp, Artificial Sequence
  ENSG00000286187_30 (sequence is synthesized)
cttgcccctcatgggtgcatatgaggatgtgacaccatctcagaggctgtctgtggtgacggcaagcctaaaaatggtgtccagtagtgctgttgaggagcactgtgaattctccatgaa

SEQ ID NO: 1000269 - DNA, 120 bp, Artificial Sequence
  ENSG00000286187_31 (sequence is synthesized)
agcaaagaaaaatcaaagctcacctgaaacaacaagatgccttttgccagagtccaagcaatgttcaatgattcctgtcagaggaccccaaagactcctgcaaagtgcaaacaacttcag

SEQ ID NO: 1000270 - DNA, 120 bp, Artificial Sequence
  ENSG00000286187_32 (sequence is synthesized)
ctcccacaacatacaacaatccacaatctggagtgcagccagatgatgcaaagtcccttctgctctctgatatctctggcagctaaataattggtgggaagaggcattcctatccagcaa

SEQ ID NO: 1000271 - DNA, 120 bp, Artificial Sequence
  ENSG00000286187_33 (sequence is synthesized)
cagaacaatgcaagagcccctccactatgagaaggccatacagatgacaggaaacagaggctagtttaccaggcaaagccagacacagctgccagcttgtcatcctacaggaatcatgca

SEQ ID NO: 1000272 - DNA, 120 bp, Artificial Sequence
  ENSG00000286187_34 (sequence is synthesized)
gcactccaatagaactgggagaataagagtttccttgttgttggctgtaacaggagtttatggtttttaaagtatcaaagctaccgagtcattaaaacatgagagtttttagaagaaaac

SEQ ID NO: 1000273 - DNA, 120 bp, Artificial Sequence
  ENSG00000286187_35 (sequence is synthesized)
actcatgctatggattcccatgagggtcattctcatgaactgagaaacatttagtgtggaagccgttgagccagacacaggaaaccctaggctggtgaagttgctggaccccattttcca

SEQ ID NO: 1000274 - DNA, 120 bp, Artificial Sequence
  ENSG00000286187_36 (sequence is synthesized)
ttcagcagattgtatcctcaccacagctgaccttattgctgctcagactctatgttccaggataaaatcacaagaagatgtagtagtgccccctcatgatgtgaagcatgttcacagctg

SEQ ID NO: 1000275 - DNA, 120 bp, Artificial Sequence
  ENSG00000286187_37 (sequence is synthesized)
ggaaccaaattcgaggttaatctaagtggccttgcagacagatctgctagtgtctctccctgcgttgtcctcaagatgatggaaacactgagagatacctggtttttggtgtggtgtgct

SEQ ID NO: 1000276 - DNA, 120 bp, Artificial Sequence
  ENSG00000286187_38 (sequence is synthesized)
actcttctggaagagtggtttttagtgcagggggaggtgatttggacgctggcgggtcttggcccacctccaaattcactgcggattcatgatccacagaaaaataacacggagccatgc

SEQ ID NO: 1000277 - DNA, 120 bp, Artificial Sequence
  ENSG00000286187_39 (sequence is synthesized)
agcccaagcatagccacacagacaggccaccaaaatgtagtgaggctaaaaacaagaagcactgaagtgtgttagccccattcctttaagcagactccacttacaggcacacacacacac

SEQ ID NO: 1000278 - DNA, 120 bp, Artificial Sequence
  ENSG00000286187_40 (sequence is synthesized)
acacaatgccacacacactcgatgtcaaacactcacaacatgcccacagaaacacacagcatggcagatcctgaggttgcatagttctgcaggaggccccacctgggagacagcaacccc

SEQ ID NO: 1000279 - DNA, 120 bp, Artificial Sequence
  ENSG00000286187_41 (sequence is synthesized)
agggaacacaggcaggctgtacctagaaatcacattggggcaagtttcaaagcccatacaacttataggctggcctgaggaattctgcagatcctttgggatccttagggattttgcagt

SEQ ID NO: 1000280 - DNA, 120 bp, Artificial Sequence
  ENSG00000286187_42 (sequence is synthesized)
ttatttctggggctgtggttgatgtttcttcaggctgactcccacaagctctctgaccttggttgatgtttcttcaggctggctcacatctgccctctcatagtatcatgggactatcct

SEQ ID NO: 1000281 - DNA, 120 bp, Artificial Sequence
  ENSG00000286187_43 (sequence is synthesized)
gtggaatccacagaaaagacaggggagagtccactgtcaatgcacctccaagcagatctccttttctgccaagccacagggactttttgctaggcaacagtgacattcattgtgaggcta

SEQ ID NO: 1000282 - DNA, 120 bp, Artificial Sequence
  ENSG00000286187_44 (sequence is synthesized)
gccagaattcaccatcaggcctggtgccctgagaatagtacatgcacattcttcaggcaggttcaagaacccagctgtcagagctgccagcctgcctaggcagaagaaaatgcacaggca

SEQ ID NO: 1000283 - DNA, 120 bp, Artificial Sequence
  ENSG00000286187_45 (sequence is synthesized)
aagctggcctcacatcgggaaaatggctacctgtgaaaacccactgtgacaccctaaacgtcttgaccttagggtcccatgggcagtctccacggtctcctcccgctggaggagtaggca

SEQ ID NO: 1000284 - DNA, 120 bp, Artificial Sequence
  ENSG00000286187_46 (sequence is synthesized)
tttcaagactgttaggtggtcgctggaaactgctcttctgactccattcctgaaagagaatgtgtgtgtacaataccccaatcccatggggattgggatatagtctgttgtgttgttcag

SEQ ID NO: 1000285 - DNA, 120 bp, Artificial Sequence
  ENSG00000286187_47 (sequence is synthesized)
tgttctttgggtgatagaagaccccagaggcaggtgtcagcaaaagctggccagacccttaatctcactgcctcccttcatcctgggcctcacaggtgctctcccagataatcaagaacc

SEQ ID NO: 1000286 - DNA, 120 bp, Artificial Sequence
  ENSG00000286187_48 (sequence is synthesized)
aaaagaaaggcaagtcgatgttggagacatgttctcacactttgaactggcctgtcatgggtgcagatgaggttaagacagtgtctcagaggcggtctgtggagattgctacccttaggg

SEQ ID NO: 1000287 - DNA, 120 bp, Artificial Sequence
  ENSG00000286187_49 (sequence is synthesized)
tatccagtagtgttgatgtaagagcactgtggattcctaatgacaggagaaaaaaatcacttgagagaattgttgggaaaccagccccacaatgccccgtgggtaccctaaatccaacag

SEQ ID NO: 1000288 - DNA, 120 bp, Artificial Sequence
  ENSG00000286187_50 (sequence is synthesized)
agacaaataattagaaagagacagaatgagagtttaaaaggcaggtccaggggaccagagaattggaggcttgctcatggcctggagctctcagccaccacccaatttattgctttacaa

SEQ ID NO: 1000289 - DNA, 120 bp, Artificial Sequence
  ENSG00000286187_51 (sequence is synthesized)
gctctttgttcttagggcagatctgaggggtaggaagggctgagggaaaggattaatcagtgagggagaacccgtgagtcattcaataagatgtatagcagtagcagtttctgtgaattt

SEQ ID NO: 1000290 - DNA, 120 bp, Artificial Sequence
  ENSG00000286187_52 (sequence is synthesized)
cctctagcaaaggcgtgtgtctaaactacttaatatatttaacttatcaggactgaaatggatgggagaaggcttcaggagaagccaagatgtttgattatactccactgcttcaagaga

SEQ ID NO: 1000291 - DNA, 120 bp, Artificial Sequence
  ENSG00000286187_53 (sequence is synthesized)
gatgtttgattatactccactgcttcaagagagtgttatttccctgagcaacctgtggcagcccgctgagctgttatgctctctgggcataaggacatgaaggcaataaggagacttttc

SEQ ID NO: 1000292 - DNA, 120 bp, Artificial Sequence
  ENSG00000286187_54 (sequence is synthesized)
atgggagtctcacaccggagagatcaactcatttggcatcccagaaactctctttcccacatgtcccacttttttgtctccatttttttaaattaataaccaccattgctatcatagctc

SEQ ID NO: 1000293 - DNA, 120 bp, Artificial Sequence
  ENSG00000286187_55 (sequence is synthesized)
attcacggtgtctatctactctcccaagatgctgtctgcatcagtaggttaaaaaaaaaacagcataaaaagacacacaccaaagtaatatttgcaattgatgatccacctatggtttta

SEQ ID NO: 1000294 - DNA, 120 bp, Artificial Sequence
  ENSG00000286187_56 (sequence is synthesized)
attcactttaaaggattagtgttaaaaaggccctcagtggttccagcaagaatatcagctctaggcaacaggatgggatgagcctgagatgcggcaaaaagttgttttttcagtttagca

SEQ ID NO: 1000295 - DNA, 120 bp, Artificial Sequence
  ENSG00000286187_57 (sequence is synthesized)
ggatctaatgttaaattatcttcttctcctggtaggtgatgtctaatcatctcccagtggtgttcagtgatattataagagctaggaggaatacgaaatcagaagtattccaatcacatt

SEQ ID NO: 1000296 - DNA, 120 bp, Artificial Sequence
  ENSG00000286187_58 (sequence is synthesized)
gaatacgaaatcagaagtattccaatcacattgcatttgaattctatgctccaagttcataatccgatctcccattcagattactgtctgatgatcattaatttgatttgccaatttttg

SEQ ID NO: 1000297 - DNA, 120 bp, Artificial Sequence
  ENSG00000286187_59 (sequence is synthesized)
aagaatttttctgacaactatgcacagcgctcgcaggttgaatagaagagtgcaaagcaaagccagcagcagcagctatagctgtgacagatttaagacccatgatgagagctattaaag

SEQ ID NO: 1000298 - DNA, 120 bp, Artificial Sequence
  ENSG00000261742_0 (sequence is synthesized)
tcctgagtagctgcgattacagatacatagctctggccaagaagtgtggttttgaagagcccaaactgtatctgttacctgatttcaaagaatattccacctaggagagacccaggtcct

SEQ ID NO: 1000299 - DNA, 120 bp, Artificial Sequence
  ENSG00000261742_1 (sequence is synthesized)
gcagacttcctctggacacttttggcagtcattgttcccagctgattctgcaacagatgaaggacggaggatagaatcatgaatagcaacatcttaattgctgactgggtgttgattcta

SEQ ID NO: 1000300 - DNA, 120 bp, Artificial Sequence
  ENSG00000261742_2 (sequence is synthesized)
aggatacccccaataaacatctttcgtgctaaagcccattccagaatttacttcccagctatctttgatgttcatattgtcagaggtggtggccgctgaaacaggcaaagacatggagca

SEQ ID NO: 1000301 - DNA, 120 bp, Artificial Sequence
  ENSG00000261742_3 (sequence is synthesized)
tatcttgggtccaggaccttgggagtccagaggaaggtctttttaccatcagcattctctactgtgttcaatgactgtcagccaaagatggccaggttctctactgtgatggtgaatttt

SEQ ID NO: 1000302 - DNA, 120 bp, Artificial Sequence
  ENSG00000261742_4 (sequence is synthesized)
agaaagaaatgcattcaaagaacctacattcacaacataaagaaataaagcctgcacctacagatctacacacatgcccatgcacatgcaggaagtgttcatctaagactggacctttta

SEQ ID NO: 1000303 - DNA, 120 bp, Artificial Sequence
  ENSG00000261742_5 (sequence is synthesized)
gaagaaagctggcatacattcgtgaaggcatgggcttccaggcatgtcatcttcactcacgaagcacacacaagaccgccaagcattaagattctcctgtggagccaggctacaatcctt

SEQ ID NO: 1000304 - DNA, 120 bp, Artificial Sequence
  ENSG00000261742_6 (sequence is synthesized)
taaatgaagacagacagctaggtggctgcagcccagcgctacacctcacccctccctcagtgtcatgcagaaaaaatgtattcagaactcagaagtgaagttgtgcaaatccatcattga

SEQ ID NO: 1000305 - DNA, 120 bp, Artificial Sequence
  ENSG00000261742_7 (sequence is synthesized)
cactagcttcaaggttacctcgggggagcagaatgtacccctgccagagagctggatagatgatgatggggacagaaattctgggggagttgtaaatggcagccactgcctctataggaa

SEQ ID NO: 1000306 - DNA, 120 bp, Artificial Sequence
  ENSG00000261742_8 (sequence is synthesized)
acccaaagggaacacagcagaagaggaggtggtggaggagccactgccctctcgaagggttcaatgtcattctgcagacacaaccaaataactttttcttccctgctgctcctccatttg

SEQ ID NO: 1000307 - DNA, 120 bp, Artificial Sequence
  ENSG00000261742_9 (sequence is synthesized)
cttgctcgctgctgctgccacgtaagaagtgtgttgcttccccttcgtcttccaccatgaataacagaatggcaattttcgtgtggtgttaatttccgtggaagaagaaaaggctcgact

SEQ ID NO: 1000308 - DNA, 120 bp, Artificial Sequence
  ENSG00000261742_10 (sequence is synthesized)
caggtaaaggaggtgggtgcacacaagtgaaaagatgttgctgaagtcacgtggcttcaagcagtagagctgactgtcctctagtccagttgtccctacaggataaaagcttctctccat

SEQ ID NO: 1000309 - DNA, 120 bp, Artificial Sequence
  ENSG00000261742_11 (sequence is synthesized)
attacagacaaggccaaggcaatcccagggcattactacaaagctaaggggtccccaaagaactaaagagtcagctccacaaaaatcccgattcctagcatgaaactgaaatatgaaacc

SEQ ID NO: 1000310 - DNA, 120 bp, Artificial Sequence
  ENSG00000261742_12 (sequence is synthesized)
aaacgggcatagaaaaggtatgtgcattcgaatcacatagcagtgactggagtcctgagctgtgtctgaagactgtgagatcacgtttggagctgctgattggttttcagtgatggccct

SEQ ID NO: 1000311 - DNA, 120 bp, Artificial Sequence
  ENSG00000261742_13 (sequence is synthesized)
gttgcacagtgccgtgagacttagctccatggccaaagacgatggtatcccctaggagccctgtgaggttgctgctgttctcttaagacaccaggtagccatctgatcctccctgagcaa

SEQ ID NO: 1000312 - DNA, 120 bp, Artificial Sequence
  ENSG00000261742_14 (sequence is synthesized)
actaactgggcagacaggtttattaaacctctgttggtccgacttacatgaaacaagagagttattttgttgttgttgttttgttttgttttaaattaaacctgtctttggagcctcctg

SEQ ID NO: 1000313 - DNA, 120 bp, Artificial Sequence
  ENSG00000261742_15 (sequence is synthesized)
gccagctttccttcagaaagaaatgcattcaaagaacctacattcacaacataaagaaataaagcacacacaagaccgccaagcattaagattctcctgtggagccaggctacaatcctt

SEQ ID NO: 1000314 - DNA, 120 bp, Artificial Sequence
  ENSG00000261742_16 (sequence is synthesized)
aataaaggacgttccacctgttaagggtaaacatatgatggaagtattgcctcctgagaaagcacagtgttctgatggacagactaagtagaggcatatcttagaaacatgccccagacg

SEQ ID NO: 1000315 - DNA, 120 bp, Artificial Sequence
  ENSG00000264515_0 (sequence is synthesized)
aagttctgtctgggcagtgggattggggtcttcctcctgaagggtactgtggggtcttcagcgccttatctcaccaacagcttggctgagtgtgcccagatctgtgcactgtggtaaggc

SEQ ID NO: 1000316 - DNA, 120 bp, Artificial Sequence
  ENSG00000264515_1 (sequence is synthesized)
taacctttacacctctagatagttcctggatgcaaaccttgagaaatcaacttggagaacgagctaagtttccgttgtccagagctcaggtgctgggacaggtggcacccagatcttcca

SEQ ID NO: 1000317 - DNA, 120 bp, Artificial Sequence
  ENSG00000264515_2 (sequence is synthesized)
gccatatgtggagtcgctggtggagtcttatctctctctccagagtgtgtccctgcagtggaggctggcctttcatctcagcaccagggtgcccagggcccagttgatccaggaagtttg

SEQ ID NO: 1000318 - DNA, 120 bp, Artificial Sequence
  ENSG00000264515_3 (sequence is synthesized)
ttgaatgaatgagtgattggcacattctgggcaggagactgtctggcccagaagaatgcctggtttccctcagggcagggcactcccctgtgcagacaggcgggcatggagcagaaacag

SEQ ID NO: 1000319 - DNA, 120 bp, Artificial Sequence
  ENSG00000264515_4 (sequence is synthesized)
ccagggtggacgagcttttcagcagcatgaaggcaacagccgatttgttcacagtcgagagtgaaggaatgaatttacgagaacctgcatgaactatgtgatcatagtgttggtggtcag

SEQ ID NO: 1000320 - DNA, 120 bp, Artificial Sequence
  ENSG00000264515_5 (sequence is synthesized)
actgtgaggcacaggaagatggatcagagggtcaaaggggcaccatctacagctcatttccccgtcctccaaccaatgggcctgccccagacctgctcccctgtccctggggaggaggag

SEQ ID NO: 1000321 - DNA, 120 bp, Artificial Sequence
  ENSG00000264515_6 (sequence is synthesized)
gatattccagactcacggacctgaacctctctgggcatatgtccagtctctgtcctgcagagatgccttgggcctcccatttcaacagcatccttcccctgatgtgggaaagaatttcct

SEQ ID NO: 1000322 - DNA, 120 bp, Artificial Sequence
  ENSG00000264515_7 (sequence is synthesized)
aatcgccctcacctctggcttcaggtccatgcaacacaagccctgtttcgggcctcctgtgttcaggctcctgagcacggcttccctttttgaaaccagggaggctggtgttgcctgcag

SEQ ID NO: 1000323 - DNA, 120 bp, Artificial Sequence
  ENSG00000264515_8 (sequence is synthesized)
gcaccagccttcctgacttccagacccaggtcagcctcccgcctctcctcctgctgaatctttctgatcctgcggtttctcctctctgaaacggggatgctgatggttccataatcaaag

SEQ ID NO: 1000324 - DNA, 120 bp, Artificial Sequence
  ENSG00000264515_9 (sequence is synthesized)
tcctgtgctgattcattgcaatgatgactgtttagccccagctgcaggaaaaaaaaccgaacagaacaaaactagaccgggtatggtagctcacgcctgttaagtccagcactttgggag

SEQ ID NO: 1000325 - DNA, 120 bp, Artificial Sequence
  ENSG00000264515_10 (sequence is synthesized)
aggaggatcacttgaggccaggagtttgggaccagcccgggcaacatagcaagacccctatctctacaaacaacaacaatagcagcagcaaaatcccactaaaataataaaatgctcact

SEQ ID NO: 1000326 - DNA, 120 bp, Artificial Sequence
  ENSG00000264515_11 (sequence is synthesized)
tgctcactgtaagcagagagtacttctctgccctactgacttgctcctcctactgagcaggccacgtgacttgctccaacgaatggaatgtgtgcagatatgtatgtcacatccagccag

SEQ ID NO: 1000327 - DNA, 120 bp, Artificial Sequence
  ENSG00000264515_12 (sequence is synthesized)
aggctttcaatatgattgaacctggactcttgccctcttgccttgcacttggagaagaatgtgctccaggatgcttcagtagaaagtggaaatgctgtctcccgaatttgctgaacgatg

SEQ ID NO: 1000328 - DNA, 120 bp, Artificial Sequence
  ENSG00000264515_13 (sequence is synthesized)
atgttctgaggagacctgcacttgagaacaaaagtgactactcttttgtcctaatcttaaatcccatcaccttggctgcaactgctgagtgctggtaatgagtgttgagaggcaatccga

SEQ ID NO: 1000329 - DNA, 120 bp, Artificial Sequence
  ENSG00000264515_14 (sequence is synthesized)
ggatggtgattaggtattaagcctgggcaggtattaaccgagaggtgtgtggacctttcgctcagcaccacaagagcagatctctgccagcaagcttatctggccatcagccagggacag

SEQ ID NO: 1000330 - DNA, 120 bp, Artificial Sequence
  ENSG00000264515_15 (sequence is synthesized)
agctgcactgtggcaaagtgaaatgtgattttaatgattctgagcacatggtttctgcctccagcatgctagatttgtagactggcattttttttcccttgggtagattccagatgttgt

SEQ ID NO: 1000331 - DNA, 120 bp, Artificial Sequence
  ENSG00000264515_16 (sequence is synthesized)
ataacttgtgcctttctaagttacagcatggtagatggggacttgtctttgttatgagcatgtacaatgtgggtcgcagttaagcactgtcaaatagcctcctaaaagatgagtttgtgt

SEQ ID NO: 1000332 - DNA, 120 bp, Artificial Sequence
  ENSG00000264515_17 (sequence is synthesized)
ttcttcccagtctgcacggctcgagacggccgctcatccctgctccccgtgtgtccctcggtcctctctgcagctcccagccctcaactccttaccccagtttgggcaaccagctgcccc

SEQ ID NO: 1000333 - DNA, 120 bp, Artificial Sequence
  ENSG00000264515_18 (sequence is synthesized)
gctgtttggcccaggcctgggccatgacggatgggtgggcgcccggggccgcgagaagggcggaacgctgtgcccagccggagactacgctgggtggcggcggcagcgccgggagtctgc

SEQ ID NO: 1000334 - DNA, 120 bp, Artificial Sequence
  ENSG00000264515_19 (sequence is synthesized)
agtgcgcgagggagaagtgagcgcacagcgcccagcgagcaggtgcctgcggcgcggagagcgcacacgctagccagcccgcagcggccgaaagtgaccactgttcctggaggatttgca

SEQ ID NO: 1000335 - DNA, 120 bp, Artificial Sequence
  ENSG00000264515_20 (sequence is synthesized)
ttgctggagaagtgcattctaacagtggaattcaggcggcgagagtcggtcaattcaccgtaccatgtggactccccagtgtggagcagaatctgaggactgacttgctaagaatctctg

SEQ ID NO: 1000336 - DNA, 120 bp, Artificial Sequence
  ENSG00000264515_21 (sequence is synthesized)
tctgggcaccctggatagaaccttccctttggctctgagcatggtggctcacacctgagatcccagcacttcggaaggccgaggtgggagaattgcttgaggccaggagttcgagaccag

SEQ ID NO: 1000337 - DNA, 90 bp, Artificial Sequence
  ENSG00000264515_22 (sequence is synthesized)
ttatctcatggcaggaaaggcctcaggaaatttatgatcgtggcggaaggggaagcaggcacgtcttacgtggcggtaggtgagagagga

SEQ ID NO: 1000338 - DNA, 120 bp, Artificial Sequence
  ENSG00000264515_23 (sequence is synthesized)
ggaagcaggcacgtcttacgtggcggtaggtgagagaggatgtgtaggaagtgaaagggtaagagccccttataaaaccatcaaatctcatgagaaatcactctctatcatgaggacagc

SEQ ID NO: 1000339 - DNA, 120 bp, Artificial Sequence
  ENSG00000264515_24 (sequence is synthesized)
atgggggaaccacccccatgatccaaacacgtcccaccaggtctttccctcaacacctggggattacaatttaagatgagatttggtggggacacaaagtctgacccatatcaccaggtg

SEQ ID NO: 1000340 - DNA, 88 bp, Artificial Sequence
  ENSG00000264515_25 (sequence is synthesized)
atttggtggggacacaaagtctgacccatatcaccaggtgtgttggtgcacggatgtgggaggatcatgaatgcaccccggcactcta

SEQ ID NO: 1000341 - DNA, 120 bp, Artificial Sequence
  ENSG00000264515_26 (sequence is synthesized)
gaggatttccattcagagaacagagggaccgaggcaggatttgaatccaagcctagttggctcccaagctcagctggctcccaagcccacaccctcacagggctacccacgacctccaga

SEQ ID NO: 1000342 - DNA, 120 bp, Artificial Sequence
  ENSG00000264515_27 (sequence is synthesized)
tggggaggagctgggagaatggctgaggccgcagcagaagtgctgggtctggagtccatcagcctccagctctgcaggaagcatgaggcaggccaggccactctgcgggggaaaggcaga

SEQ ID NO: 1000343 - DNA, 120 bp, Artificial Sequence
  ENSG00000264515_28 (sequence is synthesized)
ggaccctgctgtcctgagggcagtggctggcccccagctcaccatgccaggccacagtcacccagcggggtcccagagtgtggcaggaaccacctcttccccttggccttgcgcttagaa

SEQ ID NO: 1000344 - DNA, 120 bp, Artificial Sequence
  ENSG00000264515_29 (sequence is synthesized)
agcaggctgtatgatgccgtgtgtgtgcatatcttgctcaccaatgcctccaattccgtgtttgaaattcaacccttggggttaagcaagttctggttcacgtttctcttaaaatacaga

SEQ ID NO: 1000345 - DNA, 120 bp, Artificial Sequence
  ENSG00000261744_0 (sequence is synthesized)
cggcttctccgatgttgatcctgagtctgcagttatcacgcaggggtggcccctacccccgcgccctcccctctgcggcctgctcgccacctctgcctcttgggaggaatttcagtgcct

SEQ ID NO: 1000346 - DNA, 120 bp, Artificial Sequence
  ENSG00000261744_1 (sequence is synthesized)
gggcaggtgcctctgcatcccgcttcacaggcgagatgggcccagagtgccggaggctcaagaatgaaactggatctgaccctggaattggttcctgcggctcttccagagcagcagaca

SEQ ID NO: 1000347 - DNA, 120 bp, Artificial Sequence
  ENSG00000261744_2 (sequence is synthesized)
agcgtcggccgtgccctggcagccgcagaagtgctagggcaggactcaggcaggccttgtgcaccagctgttgccaggtgtggggaacacagtgaacagaactgcatctcccgtgagtcc

SEQ ID NO: 1000348 - DNA, 120 bp, Artificial Sequence
  ENSG00000261744_3 (sequence is synthesized)
cgcccagaaatagcagggcagataagatggcagcgaaccaggaccgagaggccgaggaggcccgcgcccctttatcagcccccaggaagggaagagcggactgggggcagcaggagcggt

SEQ ID NO: 1000349 - DNA, 120 bp, Artificial Sequence
  ENSG00000261744_4 (sequence is synthesized)
tctgccgtctcagcttcagggctgccagcccacccagaatgcctgggtcccagcccagggctctgaccactaggccgccccctcccctgcccctgcagggcttggcaccaagagggtgac

SEQ ID NO: 1000350 - DNA, 120 bp, Artificial Sequence
  ENSG00000261744_5 (sequence is synthesized)
cagtgtgagcggggtcccagcatcacagtcacacgggccagctagcaccccgcggccctatgggggaccgggaacacccattcctgtgacggtcatccccctgcacagacaaggacatcg

SEQ ID NO: 1000351 - DNA, 120 bp, Artificial Sequence
  ENSG00000286824_0 (sequence is synthesized)
tacgagaccagtgaagcagagagccaattcttgtcggactggagacccacagtccaggtgaatttacctaagagaggcttgcaagtgctgtcctcagtgcccttgcctgggtgtaaaata

SEQ ID NO: 1000352 - DNA, 120 bp, Artificial Sequence
  ENSG00000286824_1 (sequence is synthesized)
atgcccgttcatgctttacctatattctgtgcaaaactaaaaaaaaaaaaattatactggagaagtactttttgaagcagaacagaagcagataccaacaaataaatatttgatgcataa

SEQ ID NO: 1000353 - DNA, 120 bp, Artificial Sequence
  ENSG00000262211_0 (sequence is synthesized)
ccaggtggacttgctgactgattagtttcatatactacttagtaacctcaagaagtagcaggaggatgccatgtatcaatcttgaacttcaagtctcactgcaacaaggatggagactcc

SEQ ID NO: 1000354 - DNA, 120 bp, Artificial Sequence
  ENSG00000262211_1 (sequence is synthesized)
agcagagtgcagggtgggcacagacaggccacaagatggcgcagcacctccatacttgggctcttgacaaccaagtactgctgaagttgtagcaggaactactagtccttcactgaggca

SEQ ID NO: 1000355 - DNA, 120 bp, Artificial Sequence
  ENSG00000262211_2 (sequence is synthesized)
tgtagccgccttgccgtacagtctgtgtacctggaccaaaagcatctgctgcagaaacttcctgaaacattttcatttgcccagatccacaggattgtgaaatatgatctgaaatctgct

SEQ ID NO: 1000356 - DNA, 120 bp, Artificial Sequence
  ENSG00000262211_3 (sequence is synthesized)
gattcatgctgactgcagttctgtttgaagtactgttgcctgggcaaaataccatcaccgccatctacatgatctactaattgtagatcttctggccgctcctctgaatctaacaagggc

SEQ ID NO: 1000357 - DNA, 120 bp, Artificial Sequence
  ENSG00000262211_4 (sequence is synthesized)
tgggtagactcggatcttgagaagacttggactgacggaacttggtgtctgtagccactgtgtaccacggtagaatactggacagtgctcgaagtgttttgtgaagattcattttcatca

SEQ ID NO: 1000358 - DNA, 120 bp, Artificial Sequence
  ENSG00000262211_5 (sequence is synthesized)
ctgctagaaatgcttggcctagaagatgacatgcatgaagaccccccaataccactgctgtgtccttcagtattaattttttcctttttgaacaggtccaatgatttcagatcttctgga

SEQ ID NO: 1000359 - DNA, 120 bp, Artificial Sequence
  ENSG00000262213_0 (sequence is synthesized)
cctcagctccacggggagctcttggacgctccgcagcgctttcgcagagtccccagttctcccgtcccgccgggactccaggaagggaaagagaggcgtggaattggcagagccctggca

SEQ ID NO: 1000360 - DNA, 120 bp, Artificial Sequence
  ENSG00000262213_1 (sequence is synthesized)
gatcaaattactgggaaacatcagatgggtccagattacgcaggacactctccatgacgactggcctggaatcctcaaaaacagcaatgctgtgaaagacataaataaaacagaaaaaaa

SEQ ID NO: 1000361 - DNA, 120 bp, Artificial Sequence
  ENSG00000286180_0 (sequence is synthesized)
gcgtggttcgcagccacgcgggctccgggcaattgcgctttagtctgggtggacagcttcgccggagctgagagcccgcgacctgccggaccagggctgggccgcgggtcaatgatccag

SEQ ID NO: 1000362 - DNA, 120 bp, Artificial Sequence
  ENSG00000286180_1 (sequence is synthesized)
gaaatcccgtcactcgcgtgcctgtggctgaagcgcggcagcttgtcttgtccgtttcgtgtcagtttcagggctgagtggcagcgtctggactttgcggacgccgagggctcagatgct

SEQ ID NO: 1000363 - DNA, 120 bp, Artificial Sequence
  ENSG00000286180_2 (sequence is synthesized)
gggctctggggagggagagggcgccggccggcctgtccctctccggggatttgcaggtaccacctgtcggctttgtttcatcatcaggagcccctttgcccagaaatcccgatcgtctac

SEQ ID NO: 1000364 - DNA, 120 bp, Artificial Sequence
  ENSG00000286180_3 (sequence is synthesized)
acccaggtctctactgatcagagattgagagtgagtcaacaggagtccaacacgtgacccccataagtctaccctcttttcccccaatacttgtagataccacccagtaacacccgtgtg

SEQ ID NO: 1000365 - DNA, 120 bp, Artificial Sequence
  ENSG00000286180_4 (sequence is synthesized)
aaaaatcctattctgggagttcttcggcagtttaaatcgcccatgaattactcatattttctcaatccaccgtgagcctggcacatttcttttcagtaattgattgggaaagtgcaagcc

SEQ ID NO: 1000366 - DNA, 120 bp, Artificial Sequence
  ENSG00000286180_5 (sequence is synthesized)
attggtgacctttagaagttttaaatgtttataacgaaagggctaaggacagaggagattacccacacttaagtattttgcaccttaaaaatgctagcaaaaatatgaatttatattcct

SEQ ID NO: 1000367 - DNA, 120 bp, Artificial Sequence
  ENSG00000286180_6 (sequence is synthesized)
tcagggagaagatttcgtctgaggacgtaggccgaaccttgtgttttatatgtcatatgaattacgctctgaaactaaaatatgaaatagattccataattaagccctttggaatatcag

SEQ ID NO: 1000368 - DNA, 120 bp, Artificial Sequence
  ENSG00000286180_7 (sequence is synthesized)
cctcatctgaattatttctaaggatatttttgccttttttggtttattaaaaacttccttttggggaaacttgtatagattttctgcacttaggcaaaataaagcattttattcaaaata

SEQ ID NO: 1000369 - DNA, 120 bp, Artificial Sequence
  ENSG00000225465_0 (sequence is synthesized)
caggatgcaaatggacacgtcaaatctctcggcaaggtcttgccgattctgtgtgatgcacccacttcggacgctcctgaggtcgtcagaaatgaggaggaagttgttggctgtgtcggc

SEQ ID NO: 1000370 - DNA, 120 bp, Artificial Sequence
  ENSG00000225465_1 (sequence is synthesized)
aatatctcttgactttggtttctttaattcttcttcccccaaaatcaaaacttttcatgaggcaacttccctagttcaaattctcataggtatgctttgtggcaatacccaactcttatt

SEQ ID NO: 1000371 - DNA, 87 bp, Artificial Sequence
  ENSG00000225465_2 (sequence is synthesized)
agtcgtgctccagtttgcagagggcaaggggctggttgcaggtggtgctgggaggatggatgtctcgatctcctgacctcgtgatcc

SEQ ID NO: 1000372 - DNA, 120 bp, Artificial Sequence
  ENSG00000225465_3 (sequence is synthesized)
attacaggcgtgagctaccacgcccggccctaggctccacaactctaagaagctttggtgagtaaacaggcctgaagaggtgaaatcatttgccaagcacagaaccaggattcaaaactt

SEQ ID NO: 1000373 - DNA, 120 bp, Artificial Sequence
  ENSG00000225465_4 (sequence is synthesized)
ctttctccctcatcctccatgtcctttctctgtggagccgtgtgccctgcccatatctaagtacatgtcctgggatccaggggatgacatatactggagtccctggtgcccatgccttct

SEQ ID NO: 1000374 - DNA, 120 bp, Artificial Sequence
  ENSG00000225465_5 (sequence is synthesized)
gactcctcctagaccatgagctgaggggacagagagtggctcttgcacctggggggctcagggtgtgtacagtgggtgaacaaatggggggacatttgaggcccaggcagaaggacacag

SEQ ID NO: 1000375 - DNA, 120 bp, Artificial Sequence
  ENSG00000225465_6 (sequence is synthesized)
ggccaagcgagaggatcgcttgagcccaagagctcgagaccagcccaggcaacacagaaaaacctcatttctacaaaaaataaaataaaataaaaatagctgggtgtggtggcgcgcctg

SEQ ID NO: 1000376 - DNA, 120 bp, Artificial Sequence
  ENSG00000225465_7 (sequence is synthesized)
ccagcctcggcaacagagcgagaccctgtcacaaacgaacactctccagagggggaaaccgaggccctgggactgcagaaccggtttctctgcctcggcatactgcctcggctggctctg

SEQ ID NO: 1000377 - DNA, 120 bp, Artificial Sequence
  ENSG00000225465_8 (sequence is synthesized)
cgcttgatagaatcgcgccagcaacagcgccccctgcaggcgacggcgggcacgcctgcgtcacagccatccccgcccttccgcagtgggaacgcccgaatgcttcatccggcctcggaa

SEQ ID NO: 1000378 - DNA, 120 bp, Artificial Sequence
  ENSG00000225465_9 (sequence is synthesized)
gattgaagagcgctcctccaaactggctcagggaagccgggcgcgccgccttcagccccgccttggccgccgcggcgtcgcatcagtggcatccccaggggctgcaggaaggtagccgta

SEQ ID NO: 1000379 - DNA, 120 bp, Artificial Sequence
  ENSG00000225465_10 (sequence is synthesized)
gccttggctgtcgtggcttccctcatcgtaacggcctgggggcagcggtgctcaaagaactcagggggtggggctcaggtaggggcatggccggtgctcttcctaggggcgggatcctgg

SEQ ID NO: 1000380 - DNA, 120 bp, Artificial Sequence
  ENSG00000225465_11 (sequence is synthesized)
cggccctaggctccacaactctaagaagctttgtgggggcttatttggcctccccaggatggactggagcatcagtagtgcccgggtttatcacaggacagatactcaagacactcttat

SEQ ID NO: 1000381 - DNA, 120 bp, Artificial Sequence
  ENSG00000225465_12 (sequence is synthesized)
caccattaggtggacttggaggagcaaaaaacaagtgcagtggctcctcagcagagacactcctgaatgtatagacatgggaaccaccttcagcatcaaaaaaggaaacgttctgcatgc

SEQ ID NO: 1000382 - DNA, 120 bp, Artificial Sequence
  ENSG00000225465_13 (sequence is synthesized)
ccatatccagaaaaatccccactcgctgtaacttgcggtctacgaagaggaaagtcagcggcaccgtgctggcagagaggcggcttccatccctcaaactcacagtccagaatccacgct

SEQ ID NO: 1000383 - DNA, 120 bp, Artificial Sequence
  ENSG00000225465_14 (sequence is synthesized)
ctgtggtcagatggatcctccctttgcggtgaacagattctctgcagactcccaggtcccattctgtgcttgttcccacgtccacctcccagtagtggcggccacaggtaaagcgagggg

SEQ ID NO: 1000384 - DNA, 120 bp, Artificial Sequence
  ENSG00000225465_15 (sequence is synthesized)
ctcctctacttcaaaggcccaaatatctcttgactttggtttctttaattctcttcttcccccaaaatcaaaacttttcatgaggcaacttccctgactagttcaaattctcataggtat

SEQ ID NO: 1000385 - DNA, 120 bp, Artificial Sequence
  ENSG00000225465_16 (sequence is synthesized)
gctttgtggcaatacccaactcttattcacagtagcaattattttactttatgtcacgtgtttgcttcattggacttttcttcatttagagtggagggtctctgaaggcagacaccatga

SEQ ID NO: 1000386 - DNA, 120 bp, Artificial Sequence
  ENSG00000225465_17 (sequence is synthesized)
ccccctttctaccaccttgatgcatgaaaaaatgaatgataattaagacaatgcaaatggtcgatgttaaatatgtttctgcttccatcttgtattgctcaactcagtatatagagcatg

SEQ ID NO: 1000387 - DNA, 120 bp, Artificial Sequence
  ENSG00000225465_18 (sequence is synthesized)
attccaggcctttgttttccatgtttgtaagcaaattaattgtgcatggttctgacagcaggtagggtatctctgcagctgacaatgtgatgacagaggtgccggtcctggacattagga

SEQ ID NO: 1000388 - DNA, 120 bp, Artificial Sequence
  ENSG00000225465_19 (sequence is synthesized)
ggctccaaggccaggaggaagaggggggccttagatgaaagaatgttttccatcctacatgggaggtgaaaccttaagcaaaacaatggtaaattttggagtgaagagaaaggtatttga

SEQ ID NO: 1000389 - DNA, 67 bp, Artificial Sequence
  ENSG00000225465_20 (sequence is synthesized)
cctgtagtcctagctactcggagagatcatgccactgcacctccagcctaggcggcagagcgagact

SEQ ID NO: 1000390 - DNA, 120 bp, Artificial Sequence
  ENSG00000225465_21 (sequence is synthesized)
gcgagactccatctcaaaaaataaaaaaaaaaagaaagttgttcgtcataactgactgatcgtagagaataagggcagtaaatacaaaggtcaataatttaatgcattgggtatgtggtt

SEQ ID NO: 1000391 - DNA, 120 bp, Artificial Sequence
  ENSG00000225465_22 (sequence is synthesized)
ggtcaataatttaatgcattgggtatgtggttgataggtgaagctgccaattctcatggaggaggcagtgtgatctggcctaaagaaaattaattgtccagagcattctgaaaaaaaaat

SEQ ID NO: 1000392 - DNA, 120 bp, Artificial Sequence
  ENSG00000225465_23 (sequence is synthesized)
ctacagaacatatgatccttcaagtcaaaaaactgatgatcaccaatatagattttatagattacagtaagacttgaggagactgattgctgtttgatggtgaattagggaatgaaatga

SEQ ID NO: 1000393 - DNA, 120 bp, Artificial Sequence
  ENSG00000225465_24 (sequence is synthesized)
gatgagtggacatggacaaggaaggaggaagagggttccaaacatgacttaggcagggtgaatctgtcctccatatttcagcagagacacagtcaggtatgggtaggtggatgagtagag

SEQ ID NO: 1000394 - DNA, 120 bp, Artificial Sequence
  ENSG00000225465_25 (sequence is synthesized)
atcatgggtgtcagggcagaagccaccaccatttataggtgtaattctttgcccaggctgaccataacctcttcatttaaatgtccctattccccagagttatggagagtgatagtattt

SEQ ID NO: 1000395 - DNA, 120 bp, Artificial Sequence
  ENSG00000225465_26 (sequence is synthesized)
tctgtagccaggacccctgttgaagtccatggcacaccgatgaggagaccagcgtctgcaactcgccccactcacagaaacaaacaccataggtgctccattccaaactcttcccaaccc

SEQ ID NO: 1000396 - DNA, 120 bp, Artificial Sequence
  ENSG00000225465_27 (sequence is synthesized)
tggggtgaggttgtttggtacagtgggtgccaatactcactgtgcattagaattaccaggcccatttaaatgtcagagtcctgggaacctttgctagagagaaattcaaattaagttgct

SEQ ID NO: 1000397 - DNA, 120 bp, Artificial Sequence
  ENSG00000225465_28 (sequence is synthesized)
ctgtgtttttgctactcagcaaagtccccaagccagcgggatcaatcctgagacttcccagttcagcatctgcattttaacaagatccccaggtaatctgagcacactaagtttagagaa

SEQ ID NO: 1000398 - DNA, 72 bp, Artificial Sequence
  ENSG00000225465_29 (sequence is synthesized)
caagatccccaggtaatctgagcacactaagtttagagaatcccttgtctaacccatgacatagacatcagg

SEQ ID NO: 1000399 - DNA, 120 bp, Artificial Sequence
  ENSG00000225465_30 (sequence is synthesized)
acaggcatgagccaccatgcccagccagccttttttttggagatcaccaggtgattctgtatgttgtcagggctgagaatctgatgatgaagaagcatctcaattttaggtgccagacag

SEQ ID NO: 1000400 - DNA, 120 bp, Artificial Sequence
  ENSG00000225465_31 (sequence is synthesized)
tgatgaagaagcatctcaattttaggtgccagacagcagctaatccccatatggaatgaggggccagttgcacagatgatttttcctggtctggtcgtaggaagggggcagtgtatacag

SEQ ID NO: 1000401 - DNA, 120 bp, Artificial Sequence
  ENSG00000225465_32 (sequence is synthesized)
atccctcaccttggaacttccgcatccttgggttcatctgcagaatcttcttcagcttgggctccagttccttgatgtgggaagccagcctctctagctgccaactgggcctgattttgt

SEQ ID NO: 1000402 - DNA, 120 bp, Artificial Sequence
  ENSG00000225465_33 (sequence is synthesized)
tcttctgagagaccatggaacagcaacagcaaagtagatcctccccatggggctccttctgcagtgaattgatgcacttgaagcagacagcgcatccacactccagggacattggtttct

SEQ ID NO: 1000403 - DNA, 120 bp, Artificial Sequence
  ENSG00000225465_34 (sequence is synthesized)
ctagatagtctgagcagacgggacagctgcttgcttcttggaagagtgcagccatgtccactgccaggggaaaagtgcacaagggaagaaaatttccgtgaggtgaaagcctgttagttg

SEQ ID NO: 1000404 - DNA, 120 bp, Artificial Sequence
  ENSG00000225465_35 (sequence is synthesized)
tgacaagtgacaaccttttcatgcataaaggtattgtgtcccagctttgtcacttctagaacaagaccatgagtacaaacactcaagcacatccccccaccccccgtcttcagagatttg

SEQ ID NO: 1000405 - DNA, 120 bp, Artificial Sequence
  ENSG00000225465_36 (sequence is synthesized)
aagttctattgggaaagaaagtcacgaatcatcactgtgctctgaactgaggtggaggaagggtccattctactggtgacccagcaactgagcctgagccagtgacacggcagcacccat

SEQ ID NO: 1000406 - DNA, 120 bp, Artificial Sequence
  ENSG00000225465_37 (sequence is synthesized)
gtgaggaacagcgagctggggtcatttcacctcctcctaggggaaccccagcaagagattgattgatgaacataagaattaggggctgggaggccgggcgtggtggctcaggcctataat

SEQ ID NO: 1000407 - DNA, 88 bp, Artificial Sequence
  ENSG00000225465_38 (sequence is synthesized)
taatcccagcactttgggaggctgacgtgagtggatcatctgaggtcgtcaaaagttcgagaccagcctgatggaattagccaggcgt

SEQ ID NO: 1000408 - DNA, 78 bp, Artificial Sequence
  ENSG00000225465_39 (sequence is synthesized)
aaaaaaaaaaaaaagagagggactggatgcatggaagatcccttgagccaaggagtttgagatcagcctgggcaacac

SEQ ID NO: 1000409 - DNA, 120 bp, Artificial Sequence
  ENSG00000225465_40 (sequence is synthesized)
gagatcagcctgggcaacacaggaagaccccctctctacaaataatagaaaaattagcagtgagcagagatcacaccaggtcactccaacctggacaacagagttaagaccctgtctcac

SEQ ID NO: 1000410 - DNA, 120 bp, Artificial Sequence
  ENSG00000225465_41 (sequence is synthesized)
caaaaaaaaaaaaaaaaaaatcacatccttctccagccttggaaatgaataccaaattgactgccaccactcctagactggagatctggggatccagggtgactggttttcaactctgag

SEQ ID NO: 1000411 - DNA, 120 bp, Artificial Sequence
  ENSG00000225465_42 (sequence is synthesized)
gcagcactcagacagcctttgttgaattcattaattacgaatttctctcattcatcccccaaggcataacccccatttctaggcatctaaggaggaaaaacacacacacaggcatgggct

SEQ ID NO: 1000412 - DNA, 120 bp, Artificial Sequence
  ENSG00000225465_43 (sequence is synthesized)
cacctcttctgctggaagctcctctgtcctccagctgcttccactgggcgctcaggtcttgtgcggaaggggcacatgagggcgttttattggtgagattcccacctcccactgggtcat

SEQ ID NO: 1000413 - DNA, 120 bp, Artificial Sequence
  ENSG00000225465_44 (sequence is synthesized)
gcccttccacaccctctaacctaatgaggctttgatttaattataacagggaattaggtttttactggtgatatatctccagttaattgtaactttagtaaatccttcatcctgacagtg

SEQ ID NO: 1000414 - DNA, 120 bp, Artificial Sequence
  ENSG00000225465_45 (sequence is synthesized)
tatttttctttcatatgaagataagattaaattgcctttatattaaattaggcttaatgtactaacttcaaaagcttattttagagatgtttccatcagttgtcagtaaagataattcct

SEQ ID NO: 1000415 - DNA, 120 bp, Artificial Sequence
  ENSG00000225465_46 (sequence is synthesized)
gtaatatgttgtaggcttcaagctttgcttggaaacctgaagtattaagtatgattggatttgcaattttacaaaatggtttaaattcatatacatcagactcaaaggtaataggggcat

SEQ ID NO: 1000416 - DNA, 120 bp, Artificial Sequence
  ENSG00000225465_47 (sequence is synthesized)
gcattccattgaggaaattctagggaatttttatttattttcattggtttatttctggttttgaaaaaatttcataattcataggaaaaaattggataattactattttgacaaatgacc

SEQ ID NO: 1000417 - DNA, 120 bp, Artificial Sequence
  ENSG00000225465_48 (sequence is synthesized)
attaagcttcttggaccttgagtacttcacacagtgttaagataaaagtcacaatttaaaaaaaaaagatgattttcttgtgaaacttgtgttctcaaataaaaattgttacccgtgaag

SEQ ID NO: 1000418 - DNA, 120 bp, Artificial Sequence
  ENSG00000225465_49 (sequence is synthesized)
tgagttgtgctttcttccatttgaatcaaccccgaatcttttcattttcatgcctttctgtgtagtgggatctttactgctttgttttcaaatttcaaataatttgaatataatcttatc

SEQ ID NO: 1000419 - DNA, 120 bp, Artificial Sequence
  ENSG00000225465_50 (sequence is synthesized)
attttccctattccctttggcacatattaaaggaattttctctttttgcataattaaaaataaagacctaattttggtcggctttaaatatgattcctcatgggattagaggactctgag

SEQ ID NO: 1000420 - DNA, 120 bp, Artificial Sequence
  ENSG00000225465_51 (sequence is synthesized)
acactcaggtcttgttttggtttacttttttttcctctttactttcagttgacatgtaataattgtacatatttatggcacacagtaatattttgatacatgcataaagtgtgtaataat

SEQ ID NO: 1000421 - DNA, 76 bp, Artificial Sequence
  ENSG00000225465_52 (sequence is synthesized)
cacagtaatattttgatacatgcataaagtgtgtaataatcaagtcaggataattagcacactctaaacattgcca

SEQ ID NO: 1000422 - DNA, 120 bp, Artificial Sequence
  ENSG00000225465_53 (sequence is synthesized)
acactgtgctgaggggacccgagaggggaggcaagtgatccagcagggtcacatagtgagccagggacccctccctggacttcctgtcgggggtccagttccgtgttttctgggctgttc

SEQ ID NO: 1000423 - DNA, 120 bp, Artificial Sequence
  ENSG00000225465_54 (sequence is synthesized)
ccctcctgcttagggacccctgcgaaaggacccctggggatgctgggagccctgagacgcccttgagagtttgtagactcgtacttccactctgaacctcccccaggcagttatctcaac

SEQ ID NO: 1000424 - DNA, 120 bp, Artificial Sequence
  ENSG00000225465_55 (sequence is synthesized)
acccactacacccctactttacgcgggttttcctgctccaggatccccaggacagaacagacatatcccccaggaaagacctctgccagttcctttctctttgccctctgtctccttcca

SEQ ID NO: 1000425 - DNA, 120 bp, Artificial Sequence
  ENSG00000225465_56 (sequence is synthesized)
gccccctagttctaagcagaccctcagagctgggaaattgatggcgctgtccctttaaccactttttactggaaggagagtgcgctgggaggagggaagagggggagggagtttctggtt

SEQ ID NO: 1000426 - DNA, 120 bp, Artificial Sequence
  ENSG00000229964_0 (sequence is synthesized)
aaagtgtcctgcctgcattccagctgtttccatccatgtccatgtcaactggcatctggaactactcgtagcagcatccactcaatataccagcctggaagacaacggagctgtcattct

SEQ ID NO: 1000427 - DNA, 120 bp, Artificial Sequence
  ENSG00000229964_1 (sequence is synthesized)
agaagctttggaagcgactggacacttttggccattgcagtccacaggtagcctctctgggggcaatagacagactttttcacttcttgtatttactccccaaatgcttgattacatagc

SEQ ID NO: 1000428 - DNA, 120 bp, Artificial Sequence
  ENSG00000229964_2 (sequence is synthesized)
ttgtcacctgtcaggggggccagctagctagttgctgggttgagtggttaatccaatgatttgtatagctggctcactaaggaaatcataggtactcaatatatagctactgaacaattc

SEQ ID NO: 1000429 - DNA, 120 bp, Artificial Sequence
  ENSG00000229776_0 (sequence is synthesized)
agcgatgagccctggagtgagcagctgtatctctggcacctggcacagggcatggcatgaagtgaaagattcccgaatttctgtcgaatgactggatggcaggctgctgaactgtcatga

SEQ ID NO: 1000430 - DNA, 120 bp, Artificial Sequence
  ENSG00000229776_1 (sequence is synthesized)
cctctacggaaactgatctcaccaaacttctttggacagacgcggagtcatctctgaagaccccaggtgtgccactaaatgggggaaagttaggcaggtccggtgggaaggggagacccc

SEQ ID NO: 1000431 - DNA, 120 bp, Artificial Sequence
  ENSG00000229776_2 (sequence is synthesized)
aggagaacagcggcttcctcagaggattcacaaacacaccaaagtcagacttttggcttgtttgaaaccagtaactggaagaagacactgccggacctgaggattgcacaactccgggaa

SEQ ID NO: 1000432 - DNA, 120 bp, Artificial Sequence
  ENSG00000229776_3 (sequence is synthesized)
agtcacctcattccactgataacagaaccaagcgtcagcaggctttcaacagcccggaactcagctaaaatctgcagacctcagaaccgccagcagcacgaggacagagtcggggaggtg

SEQ ID NO: 1000433 - DNA, 120 bp, Artificial Sequence
  ENSG00000229776_4 (sequence is synthesized)
tagctggacaacagctcatgaggcaaacttcatcctgtagccatcctcgtcctgcagaccccgctccagggcgcgacgctggcgagggcacttccctgaagttggggaacccatcagaca

SEQ ID NO: 1000434 - DNA, 120 bp, Artificial Sequence
  ENSG00000229776_5 (sequence is synthesized)
gtgtggggggggccccggccatcccgcctccactgccccgccccaggccctcagtctcaccctcagcacactggcagacttcagcagaacacaaggtggccaagagtctgctcttacttg

SEQ ID NO: 1000435 - DNA, 120 bp, Artificial Sequence
  ENSG00000229776_6 (sequence is synthesized)
gtgccccgtaaaacacagaacatctgcgctctggagaacagagaggagttagggcacaggcccctccattctgcctcctcagtcccagggagccccagggctctctgccccctcactacc

SEQ ID NO: 1000436 - DNA, 120 bp, Artificial Sequence
  ENSG00000229776_7 (sequence is synthesized)
ccggtgtccattgtcccataggagggcacctatgccaaagttctcctgaatttcagggtgtcctgcagtgctcaccggggttgtagtagtcgtacagggttgcgctggccggctgcacca

SEQ ID NO: 1000437 - DNA, 120 bp, Artificial Sequence
  ENSG00000229776_8 (sequence is synthesized)
gacctggccaagcgtggggaggagagatgagggacccactccctgggccctgcagccccctgtactgggtttccttggcctgtttttgtttgcttcctattggccttctctccagtgtcc

SEQ ID NO: 1000438 - DNA, 120 bp, Artificial Sequence
  ENSG00000229776_9 (sequence is synthesized)
ttcacattctgttaccttcctactcagagaactctcaaagctgctccgcaaggtctctggtgacttcacttcccagagggtgaccttgccccagtcttcactgctccaggccctcagcag

SEQ ID NO: 1000439 - DNA, 120 bp, Artificial Sequence
  ENSG00000229776_10 (sequence is synthesized)
agtcttgcatcatggacgtgttctctgtgaaactgtccctaagctaagggttagcttctggaccacccttggttctgacctggtcatttcttacgttccctccttcggaacttccttcct

SEQ ID NO: 1000440 - DNA, 120 bp, Artificial Sequence
  ENSG00000229776_11 (sequence is synthesized)
cagagctcccctgtgggggtctcaaccactccctggcttccaccaaaccaatccaggctgatgattcccaaactgaacttgcagctccatccttgcattaggattgtggcaggacctgta

SEQ ID NO: 1000441 - DNA, 120 bp, Artificial Sequence
  ENSG00000229776_12 (sequence is synthesized)
agttctccaaggcactctgcctgcccccaaacccactcgccctcctcgcggcctcatctttgtcatggatacaactgggtcctcctttatttgccacaacctaactgcaggttctgtcat

SEQ ID NO: 1000442 - DNA, 120 bp, Artificial Sequence
  ENSG00000229776_13 (sequence is synthesized)
cctgcctgaccccccgactcaggtcccaggcctgacccctcctcgtgcccacgcgggcccagtccacacggtgccgtgccagtgtccctcctgagctaggctgctgcaccgtcagctccc

SEQ ID NO: 1000443 - DNA, 120 bp, Artificial Sequence
  ENSG00000229776_14 (sequence is synthesized)
tatccgggaatcttgttggctctgtgttttctattgtgttcaacccagatgtgtcagccaggcttccccagctgatgggggctggcccctctgcacacactgggtaggggtctccctgac

SEQ ID NO: 1000444 - DNA, 120 bp, Artificial Sequence
  ENSG00000229776_15 (sequence is synthesized)
ctacaaacagctggctaatgacagccaccacacctttctcacattttctcccagaggttacagtaaatgttccaaaactttttttgaaggccgggcatggtggctctggcctgtaaatcc

SEQ ID NO: 1000445 - DNA, 80 bp, Artificial Sequence
  ENSG00000229776_16 (sequence is synthesized)
tttttgaaggccgggcatggtggctctggcctgtaaatccggtactttgaaaggcctaggccagaggatcggagaccctg

SEQ ID NO: 1000446 - DNA, 120 bp, Artificial Sequence
  ENSG00000229774_0 (sequence is synthesized)
gtgtgggatgacgaggaaagcccatgtgaagcgactgtctcctgcctgtttattgagggctccggagtgctcttcaaaaccatcttcctgcccttttcggcagacagcagcatctcaggg

SEQ ID NO: 1000447 - DNA, 120 bp, Artificial Sequence
  ENSG00000229774_1 (sequence is synthesized)
gccacagcccttctcgaggcgtgcgcccgaaatgcacttcttctagctggaggccaaagaggcgaggcaccgcgactcacacctgtaatcctagcactgtgggaggccaaggtgggcgga

SEQ ID NO: 1000448 - DNA, 87 bp, Artificial Sequence
  ENSG00000229774_2 (sequence is synthesized)
aaggtgggcggatcacctgagatcagaagttggaaaccagcccggccaacatggtaaaaccccatctctaatagcagaaagcagaca

SEQ ID NO: 1000449 - DNA, 120 bp, Artificial Sequence
  ENSG00000229774_3 (sequence is synthesized)
acgtctgacgatgggaacgttgatcttaatcatgccaggtgaaaagcttgaggagccgtgcgcacagcaggtgaaatgatcatcaaagaatgggctgcggcaggctggacggtaacgaag

SEQ ID NO: 1000450 - DNA, 120 bp, Artificial Sequence
  ENSG00000229770_0 (sequence is synthesized)
tggaggggccgcggcggcgccgggggtgccagccgcctcctctggccgccggcccgtcggccctgcaaagtttaacgccaattccccttgcgtcctgggagccgagcgttttctctccct

SEQ ID NO: 1000451 - DNA, 120 bp, Artificial Sequence
  ENSG00000229770_1 (sequence is synthesized)
gctgacgctcccagcagctctgcctggccaggccaggctggagagcacccggaccattttccagacggtgagatggagccctggaaaccgagcttatgagcagcccggagctttccattg

SEQ ID NO: 1000452 - DNA, 120 bp, Artificial Sequence
  ENSG00000229770_2 (sequence is synthesized)
cctgcccagccttccagatacatcccagttccagttctttccagagccctctgggatccagccagcctgcttccccgccagggcctcactgcttccaaactccccagccaacgcccagct

SEQ ID NO: 1000453 - DNA, 120 bp, Artificial Sequence
  ENSG00000229770_3 (sequence is synthesized)
tctgtggacactctgaggctcacagggagaagccacacactcgcagcaccaggtatattatctctgttctcccactagactttaagctcagtggatgccaggacccttagaacaaagcac

SEQ ID NO: 1000454 - DNA, 120 bp, Artificial Sequence
  ENSG00000229770_4 (sequence is synthesized)
atagcaagttttcagtgaagccttgttaactttcaaatgaaggaataaacgaatgactatatttccacttcgcagatgagtaaacagaggcttggaggggtgatgaaatttgccaacagt

SEQ ID NO: 1000455 - DNA, 120 bp, Artificial Sequence
  ENSG00000229770_5 (sequence is synthesized)
catcaatcgttccaggaacaggtgatgcttcccggcagtgagactcgaaaccagcgggagttcccagccagagacatgatctaagtgccaatggctgaatgtctgtgagcatttcaagtc

SEQ ID NO: 1000456 - DNA, 120 bp, Artificial Sequence
  ENSG00000229770_6 (sequence is synthesized)
attttaagaataggcaacattagcggcaccattaaagcctgctgttcctccagcccatcactgccatccccacctattaaaataatggcatgaaaaataaacagcctttatgtacaattt

SEQ ID NO: 1000457 - DNA, 120 bp, Artificial Sequence
  ENSG00000229770_7 (sequence is synthesized)
cttcctgtacccgcttccctatctgagcaggactacaaggcccacctctgcagcattcttgcccaggcctgattctcaagcaaagtcttttctccacaaatagagcctacttcccagaaa

SEQ ID NO: 1000458 - DNA, 120 bp, Artificial Sequence
  ENSG00000229770_8 (sequence is synthesized)
tttggtggctgcctctgtgctatgatttggttgctacctgctgaagcttcaacctctcatcactaccagaaggaccacatcactaaaagtccatcaatggggttactcactttgatgggc

SEQ ID NO: 1000459 - DNA, 120 bp, Artificial Sequence
  ENSG00000229770_9 (sequence is synthesized)
ctgtgcagcgtcattcaggaagcccgtggtactcacatcactctggccagacgctaacaagaaaatgatccactgtgacgcagccgaccccatccagtgcatccacattacctggaaaga

SEQ ID NO: 1000460 - DNA, 120 bp, Artificial Sequence
  ENSG00000229770_10 (sequence is synthesized)
agcaattatgcccctttggtttccttggaaatgcttggtctgtctctaccatccgccctggctcttgagaaatactcatgcacggtagagctttgacagggagacagtgtgtttattttc

SEQ ID NO: 1000461 - DNA, 120 bp, Artificial Sequence
  ENSG00000229770_11 (sequence is synthesized)
caactgaaagtttacagaatacaaagtgagcctgtaagatggtggccactctccagaggcttgttggtcagacaggaaagaaaaccagtgcaccatcgggaacgtggaggaggctgaaag

SEQ ID NO: 1000462 - DNA, 120 bp, Artificial Sequence
  ENSG00000229770_12 (sequence is synthesized)
agagggacaaacatattggattggattgggcccccacagtcaagttcctgcaaaccaagctgggagattttcctgactaagggttatgttcttgggcctcaaagctccccagccaacgcc

SEQ ID NO: 1000463 - DNA, 120 bp, Artificial Sequence
  ENSG00000229770_13 (sequence is synthesized)
cacagggagaagccacacactcgcagcaccaggtctgtggtttttcatgaccctacactgtcccctagaaggaagtaccacccagcagaaacagaagccaaggaatttccccatagagat

SEQ ID NO: 1000464 - DNA, 120 bp, Artificial Sequence
  ENSG00000229770_14 (sequence is synthesized)
catggcatgggcttgagttcaagaactcaatggacagcgggcagaaattggaaagcccagagcctccaccactaactcctgtgtgacttctgtaagtcccttgcccttaattcacccata

SEQ ID NO: 1000465 - DNA, 120 bp, Artificial Sequence
  ENSG00000229770_15 (sequence is synthesized)
tgaaaaattaggaaaaatgatctctcacttctgaaattcaataattctatgatgtcagcaactggacccaagagatgatgagttctgctacagttgtcttgatgaaagtaaaagctgaca

SEQ ID NO: 1000466 - DNA, 120 bp, Artificial Sequence
  ENSG00000229779_0 (sequence is synthesized)
agaccagtcttaacttctgagatgacccaaatatttggagccaagtttgttgattaagtaagttttcatcctcgacattcttttgcccaccttatgagaccaatgagtctactgaagatc

SEQ ID NO: 1000467 - DNA, 120 bp, Artificial Sequence
  ENSG00000229779_1 (sequence is synthesized)
taaagagcacttccaaaatctccttttcacatattctctgtgaagttatgcaacacaaaggcttcaaagcaatctcccaagtttcccagaaaataaatacatctgatttgaaaaatctta

SEQ ID NO: 1000468 - DNA, 72 bp, Artificial Sequence
  ENSG00000286451_0 (sequence is synthesized)
ggacttaggtgatcctcccgtctcagtcgctggagtcactgggactacaggcacgcaccactactcccagtt

SEQ ID NO: 1000469 - DNA, 120 bp, Artificial Sequence
  ENSG00000286451_1 (sequence is synthesized)
gagtcactgggactacaggcacgcaccactactcccagttaattttttttgtattttttgtagagtttctctacgttgcccagactggtctcaaacactttggctggagatccgcctgac

SEQ ID NO: 1000470 - DNA, 120 bp, Artificial Sequence
  ENSG00000286451_2 (sequence is synthesized)
tcggccttctgaagtgctaagattacaggcgtgagccgccatacctggtcgctgtttcatattatatatgcaagaagtagagaaatcaaatctaataaaaataaatggacctcagttcac

SEQ ID NO: 1000471 - DNA, 120 bp, Artificial Sequence
  ENSG00000286451_3 (sequence is synthesized)
ttttggacagcagaaaaagcaaactgtggaaagcagaattctacaatggcacgctggttcccaccccttggtgtacatgctctgcatgaagtgagcaggacctgtgaatataatgggata

SEQ ID NO: 1000472 - DNA, 120 bp, Artificial Sequence
  ENSG00000286451_4 (sequence is synthesized)
atcactcctgtgattacattatgttatatgattccattcccctcctggctttgaagaagtgagctgccatgtcatgagaacaccaggtggctaggacctgaagatagcctctaaggagct

SEQ ID NO: 1000473 - DNA, 120 bp, Artificial Sequence
  ENSG00000286451_5 (sequence is synthesized)
aattgaaacctgccaacaacctgaatgaacttggcagaggactctgagcttgtgatgagaacacatccccagcttgaaatcaaatcgacatattgattttagcactgtgagatactgagc

SEQ ID NO: 1000474 - DNA, 120 bp, Artificial Sequence
  ENSG00000286451_6 (sequence is synthesized)
tgagaacacagttcagctgttcctggacttcagaaccacagaactgagatgataaatgagtggtgtttcaagttgctaagtttgtggtcatttgcttacagtaattgtaaactaatacac

SEQ ID NO: 1000475 - DNA, 120 bp, Artificial Sequence
  ENSG00000286451_7 (sequence is synthesized)
aagtgtaagtttgttttcttaaagaagaaaaaaacggggaaggaggtaagtgttaaaggatcaaaactctgacaaaaggctggttgcagaacatgacaggttgttgcactggaaactatt

SEQ ID NO: 1000476 - DNA, 120 bp, Artificial Sequence
  ENSG00000286451_8 (sequence is synthesized)
tgtcatgcaagtttatgttaaaataagtagcttttgaggactttcatttttggtcttgtaaacatgccatttaatattgtccaactgataatactttttgcaaacagaaactgttaaaac

SEQ ID NO: 1000477 - DNA, 120 bp, Artificial Sequence
  ENSG00000286451_9 (sequence is synthesized)
ctttaaagcaaatattactgtagagaagaagtaatgtgttatgaaactgtgaggatactaagaaggatcctacttaagtttcttcagcataaataaacttgagcgtttcgaccactgtta

SEQ ID NO: 1000478 - DNA, 80 bp, Artificial Sequence
  ENSG00000286450_0 (sequence is synthesized)
acggttcagcacagttctggtgcacagagtcatccctggctgctgtgagtcactgggaatatcaatggtttcagaagttg

SEQ ID NO: 1000479 - DNA, 85 bp, Artificial Sequence
  ENSG00000286450_1 (sequence is synthesized)
tggaacctcctagagaccgtgaaccataagcttagtccaggctaaggtggtctcagatgcagatgaggaacttgttgggaactgg

SEQ ID NO: 1000480 - DNA, 89 bp, Artificial Sequence
  ENSG00000286450_2 (sequence is synthesized)
ggctgcagaaatttgcataagtagcaaacaaatgtctccaggccatgtcagagaccgttatagcagcccctcccatcacaggcccagag

SEQ ID NO: 1000481 - DNA, 68 bp, Artificial Sequence
  ENSG00000286450_3 (sequence is synthesized)
gccatgtcagagaccgttagttggttgggcccagggtccccatgctgtgtgcagtctagggacttggt

SEQ ID NO: 1000482 - DNA, 85 bp, Artificial Sequence
  ENSG00000286450_4 (sequence is synthesized)
tgtatggaaatgcctggatgcccaggcaagtttgctgcagaagcggggccctcatggaaaacctctgctagggcagtgcaggagg

SEQ ID NO: 1000483 - DNA, 120 bp, Artificial Sequence
  ENSG00000286450_5 (sequence is synthesized)
actgcctagtggagctgtgagaagagtgccaccgttctccagaccccagaatagtagatccactggcagcttgcactgtgtgcttggaaaagctgcagacactcaacaccgaccaatgaa

SEQ ID NO: 1000484 - DNA, 68 bp, Artificial Sequence
  ENSG00000286450_6 (sequence is synthesized)
tgtatttacccaatacctgtacccccattacatccaggaaataactagcttggtttcgattttataag

SEQ ID NO: 1000485 - DNA, 88 bp, Artificial Sequence
  ENSG00000286450_7 (sequence is synthesized)
gatctgatgggtttatcaggggtttctactttgcttcctcctcattttcttttgccaccaccaagtgaggcctccccaggcatgtgga

SEQ ID NO: 1000486 - DNA, 120 bp, Artificial Sequence
  ENSG00000286453_0 (sequence is synthesized)
aattgcttgaacccaggaggcgaaggttggagtgagccaaggtcacaccactgcaccccagcctgggagacatagtaagactctgtctcaataaaaaaaaaagaaagaaagaaagaaaga

SEQ ID NO: 1000487 - DNA, 120 bp, Artificial Sequence
  ENSG00000286453_1 (sequence is synthesized)
aagaaagaaagaagaaaaaggaagaagaaaagtggtttgattcttgtgaagcattcacccaaatttgtaaagctaagggtctaatgaacctgccaatgactttgtggagaatttatgagc

SEQ ID NO: 1000488 - DNA, 120 bp, Artificial Sequence
  ENSG00000286453_2 (sequence is synthesized)
tttttacagagattgataggattaaatgagataatgtttgtagagtgctgggcacagagtctggcacacaaggaagcactaaattttaaaaagcaattataacgctgataatactgcttg

SEQ ID NO: 1000489 - DNA, 120 bp, Artificial Sequence
  ENSG00000286453_3 (sequence is synthesized)
ttataacaagtctccagaatttattgaaatcaaagagtgggagaagtggaagatcatgtcaaccattgctcatatagctcttctacagtgctccagtatgtgatatatgatgtactcggg

SEQ ID NO: 1000490 - DNA, 120 bp, Artificial Sequence
  ENSG00000286453_4 (sequence is synthesized)
aacttcttggattcctatggaaacatctcccttttttatagtcagatttactctggagagacattctacaacacttctcaaactgcattggcttgcactcctctggcattaactatatgc

SEQ ID NO: 1000491 - DNA, 120 bp, Artificial Sequence
  ENSG00000286453_5 (sequence is synthesized)
tcttatcatttgagtccccagacagtcaactctggccttggctaacaactttcctccagacttaggaatacatcctgggtttcccaggatatcgtcatcagtttgtaactcatttcattg

SEQ ID NO: 1000492 - DNA, 120 bp, Artificial Sequence
  ENSG00000286453_6 (sequence is synthesized)
ccctgactctgttcttgaccaacctgctgtgtaagaaccatggcttctagtggttgttcaagacttggcaggtgaactgaactctaaaatgatgttttacagtaggacaaatcttactct

SEQ ID NO: 1000493 - DNA, 120 bp, Artificial Sequence
  ENSG00000286453_7 (sequence is synthesized)
ggctggatctgaatgcagcagcttcacctgggaggtagattgcatgtggaggaggagaggcaagagtatgccagctcagtctgaaactggcttaagtcccaaatcaccaataacttttcc

SEQ ID NO: 1000494 - DNA, 120 bp, Artificial Sequence
  ENSG00000286453_8 (sequence is synthesized)
gaaagtgaaccccatttcaatgaccaacctcaagctgaccttcaggacttggcttcacagtcaaagggccagacccccaccaggaatgggaatgtcttcaggtgcacttggcctgcaaac

SEQ ID NO: 1000495 - DNA, 120 bp, Artificial Sequence
  ENSG00000286453_9 (sequence is synthesized)
tcagtccggtggagatggtggtggtgagatgcagggagatggagagaaaaatgggagcaccacctttctttacaaagccaaaagctacatccccattgacctagatgtcataagagtttt

SEQ ID NO: 1000496 - DNA, 120 bp, Artificial Sequence
  ENSG00000286453_10 (sequence is synthesized)
ttttccccaaagggcaccatgatggagaatcggctttcccaaggacacacatacctttgtcacaccaagcaccaccttgtcctcagactgttcttgtactggctttgtttacaagccaga

SEQ ID NO: 1000497 - DNA, 120 bp, Artificial Sequence
  ENSG00000286453_11 (sequence is synthesized)
ttttttttaaaatgagaaaaatcaaatgttcacttaagaagtgaaatttgaataaaattacagtttcaggcaaagcctatattatttttaaaatcagcgaataaagcaagggatattaaa

SEQ ID NO: 1000498 - DNA, 120 bp, Artificial Sequence
  ENSG00000286452_0 (sequence is synthesized)
agtgattggcaagacctagaccaaacccctggcattttggtacgctgatctggaatgcattgcttgtggctttgctgtctgctgcaggctggaggagcttaaaagcctttctaagtagct

SEQ ID NO: 1000499 - DNA, 120 bp, Artificial Sequence
  ENSG00000286452_1 (sequence is synthesized)
gcctgtccttttaggactggatgtaggtttctgcctctctttttggccctggcattgctggccccaaccacattcctgattgcccgggaagaacagcctttgaaattcaacatctgcttc

SEQ ID NO: 1000500 - DNA, 120 bp, Artificial Sequence
  ENSG00000286452_2 (sequence is synthesized)
tgggtagttggttgaacaagcccacctgaccaagagagggaagcacgctaactgttttcagtttggacactcttgggggctttttagtaattgcatgtgtttctgagcaagtgagtgtct

SEQ ID NO: 1000501 - DNA, 120 bp, Artificial Sequence
  ENSG00000286452_3 (sequence is synthesized)
tttgtgggtaccagacaacaggattgctcctctcaactagggacagtctgaagaattttggtgtgcaaattcatcaagctcaccccatggaaagaggaagctccgctgtttcagtttgga

SEQ ID NO: 1000502 - DNA, 120 bp, Artificial Sequence
  ENSG00000286452_4 (sequence is synthesized)
agctgataatcttatgtaatactgtttggcctcatatctttgaatctggataagtttggcctctccatgtgcctcgttttgctgctgaatggcaaagcagggtggagttttgtgtattca

SEQ ID NO: 1000503 - DNA, 120 bp, Artificial Sequence
  ENSG00000286452_5 (sequence is synthesized)
ggcttttatgctgttgttcaaagcaaggtcaggcttgattagtacatgatgttcttctgtggttttttctggctccagtcatccttggagtgtggagagatttagcctttaaaaatcaaa

SEQ ID NO: 1000504 - DNA, 120 bp, Artificial Sequence
  ENSG00000286452_6 (sequence is synthesized)
atgccacagaaactgctatacccaaaactttggttcacaaccttcattggattgcctatcaggtcaaaagaagtttagccatgtgaacgtgttcataagcctgtgagtttgtattggtat

SEQ ID NO: 1000505 - DNA, 120 bp, Artificial Sequence
  ENSG00000286452_7 (sequence is synthesized)
ctcatggctagagttccaaggtaaaagttattggatctttgtttgcatgtatgtatatatgtttagatgtgtttacatgtatgtatattatttcatatgttgtgtctaccaaattggctt

SEQ ID NO: 1000506 - DNA, 120 bp, Artificial Sequence
  ENSG00000286452_8 (sequence is synthesized)
ataaataaaagagcactcctaaattaagtccaagcaattttcaagttcatgcgacttaagtaaatctttaataaacaagttgactttaaaagtactggtaaaataaaaatttaaatgtca

SEQ ID NO: 1000507 - DNA, 77 bp, Artificial Sequence
  ENSG00000286455_0 (sequence is synthesized)
ctctcatctgtgtaagatgaatcactcctggatccagactgactccgagggcagagccaggtcctgacgagtagagt

SEQ ID NO: 1000508 - DNA, 120 bp, Artificial Sequence
  ENSG00000286455_1 (sequence is synthesized)
acctcggcctcccaaagtgctgtgattgcaggcatgagctactgcacctgcccgagaatctttaaaaaatacagtaacccctccagccatggttgtcacaatggtgggaagaggagcaga

SEQ ID NO: 1000509 - DNA, 120 bp, Artificial Sequence
  ENSG00000286455_2 (sequence is synthesized)
tgggaagaggagcagagagacactcttcctttgaagataataccacttctaaatggtttacaacaaggagcttctgagcagaattgtcacacacaactgcgcaggactgcgattgacctt

SEQ ID NO: 1000510 - DNA, 120 bp, Artificial Sequence
  ENSG00000286455_3 (sequence is synthesized)
gcataactgaaaccgtggataagagagaacaacagtgcttccaaattgtgatgaatgctctgaaggagaaaagcaatagaacaatgaaaaaaggtgtctatggctctcctaaccctaccc

SEQ ID NO: 1000511 - DNA, 120 bp, Artificial Sequence
  ENSG00000286455_4 (sequence is synthesized)
acattgtgaatctaagtaccttacaacggaggccagcaggagggattcctctgagggcttcttctgcctcatggacctcacagtcttccctttctggcaaggactcttctggtgtgcacc

SEQ ID NO: 1000512 - DNA, 120 bp, Artificial Sequence
  ENSG00000286455_5 (sequence is synthesized)
agtgtcccatattggatcctgtgacttaattattttgttgttgattagtatattactaattgaaggagaaatggatttcttcacaaatatcaaacagtcaataagaagagaaaaatgtct

SEQ ID NO: 1000513 - DNA, 120 bp, Artificial Sequence
  ENSG00000286455_6 (sequence is synthesized)
gcaaaactggatgactttcctcacctgtaaggtgagaaagaaatggttctttgcctctcagagttgtgaggagtaaagacactaatataggtcaagcactgagcacacagaaggtaccaa

SEQ ID NO: 1000514 - DNA, 120 bp, Artificial Sequence
  ENSG00000286455_7 (sequence is synthesized)
ggaaaggatagagtcacggtggcacaccccaaatccttggggccagatgtgtttcagaattcagactttgtccaattttagaaaggttatacagcacagataccgtatattatgtaatat

SEQ ID NO: 1000515 - DNA, 120 bp, Artificial Sequence
  ENSG00000286455_8 (sequence is synthesized)
tcccagtggggcctgaggaaacactcttatttctgtaatcaaacatattattatttctttagtcaaatgtacgtgtgcccacacttggcatgataaataaatactataaatagcttcaaa

SEQ ID NO: 1000516 - DNA, 120 bp, Artificial Sequence
  ENSG00000286454_0 (sequence is synthesized)
aagcatgtgcgtagacctggacagacgaaagagcagacactaggaaacggccacgttacttctgttggggatattcggggtggagaagagccactgtgggtgagaggaagggatgaagca

SEQ ID NO: 1000517 - DNA, 120 bp, Artificial Sequence
  ENSG00000286454_1 (sequence is synthesized)
tgaccaactcagcattccactggaggctgtatgatcaaacagcaatctgtttatcatgaatgcaggatttgagcaaactcatgactgctcctgccaacagaaggtttgctggaggcaatc

SEQ ID NO: 1000518 - DNA, 120 bp, Artificial Sequence
  ENSG00000286454_2 (sequence is synthesized)
acagaaggtttgctggaggcaatcactgcctggcgccgaggatatctactgcgacatctagagaatacagtcttgcaagcctactctggactgagcagctgaccccttctttcaccaccc

SEQ ID NO: 1000519 - DNA, 120 bp, Artificial Sequence
  ENSG00000286454_3 (sequence is synthesized)
ccaccttctcactgtctcttttgcctaataaatacggagggctgtgtaaagctcagagcccttgtccactagaggaaggtgcccccgacctcttcttccaaatatactcttttgtctctt

SEQ ID NO: 1000520 - DNA, 120 bp, Artificial Sequence
  ENSG00000286454_4 (sequence is synthesized)
gtctttattcacgtgttcaccccgctttgttcagtccaacaggttcgcggcatagtggcaccccaaacagcgacaggatcgggtgttctacaaatattcaccaaaattcatgcataaaaa

SEQ ID NO: 1000521 - DNA, 120 bp, Artificial Sequence
  ENSG00000286454_5 (sequence is synthesized)
tcttcactgacttaattataatattaaaaacaacagaaacatgacgctgcactaaagaaggcagacaaatgattttatgccataggattccatttctatacattttaaacagataaaact

SEQ ID NO: 1000522 - DNA, 120 bp, Artificial Sequence
  ENSG00000286454_6 (sequence is synthesized)
aagttgtgcttttgaggtagcatagtgattattttggaagaggtattgatgggaaggaatgtttctgggaggtagatgattttttattccttgatttgaattttgggtacacaaatgtgt

SEQ ID NO: 1000523 - DNA, 120 bp, Artificial Sequence
  ENSG00000286454_7 (sequence is synthesized)
tcagtgtataaaatccattgaactttatatttatggtttgtgtactttcctttgttatgtaaatcttcactataatttcaattaatcaaaatatcgctaacatgaaagtaaaatgtattt

SEQ ID NO: 1000524 - DNA, 120 bp, Artificial Sequence
  ENSG00000286454_8 (sequence is synthesized)
tggagtcatgtagatttaggtccaaatgcatctctggtatttaagcaacttttgaatttcaggtgggaaagtagaactggaacatccacgttataatttttttttaagattaaaaccagt

SEQ ID NO: 1000525 - DNA, 120 bp, Artificial Sequence
  ENSG00000286454_9 (sequence is synthesized)
gaatagaccctttatagcaaaaaaatagatatttagataaagctattatgtttttgtttgttcatttttatttaaaagttcaaatgcatagcaaacacaactggaaatcaaatctatgtt

SEQ ID NO: 1000526 - DNA, 120 bp, Artificial Sequence
  ENSG00000286454_10 (sequence is synthesized)
cgattctaaagccatggtttttctttaaatcttgctgcatctctcctgatgtgattcttctcttaaggaacaattacgtcttacagcaatgaggaaaaattattacagaatgttatatta

SEQ ID NO: 1000527 - DNA, 120 bp, Artificial Sequence
  ENSG00000286454_11 (sequence is synthesized)
tgaagcatgattagaaaaaattcaactcttaataatcacttatagcctaaatctttcttaaaaaattcagaatgaaggagaaaatatttcaagttttgatttgcctgaactcttaatggc

SEQ ID NO: 1000528 - DNA, 120 bp, Artificial Sequence
  ENSG00000286454_12 (sequence is synthesized)
gatctgatgacttgcaacttaactaaggagaagaaaaaatcaagagggacagagagagaaacagataatgttcttcatagatctctttctaactgtgtcatcctgtcattgaactcccag

SEQ ID NO: 1000529 - DNA, 120 bp, Artificial Sequence
  ENSG00000286454_13 (sequence is synthesized)
gtaatgctggattaacagcttgtatatttctctgccttcagacagaacaaaaagatatccatttttttagggtactctttcttatatgtggaaaatgccataatttcttgtttgactcac

SEQ ID NO: 1000530 - DNA, 120 bp, Artificial Sequence
  ENSG00000286454_14 (sequence is synthesized)
catgtctcttgcaggtggcttttgaatcaccccaacttctttaccagctgattcattgaaatcaaataaaaatgtggggttcatttaagtgaggatacagattatttgcctctcctcatt

SEQ ID NO: 1000531 - DNA, 120 bp, Artificial Sequence
  ENSG00000286454_15 (sequence is synthesized)
ctacaaaagtataactaaactcccttggcatttcttggatgagtttagacacagaaatttgactttatggcaatgttagaagtcagggcaggagacaagcttggagccagacatgagatc

SEQ ID NO: 1000532 - DNA, 120 bp, Artificial Sequence
  ENSG00000286454_16 (sequence is synthesized)
tgcctactagttctgaaggaataaatgcagatgttgacattgattaggcaaaatagtacactgaggatgagaatttttcatacatgattcattacaatgcctagcaccaggaaggctaaa

SEQ ID NO: 1000533 - DNA, 120 bp, Artificial Sequence
  ENSG00000286454_17 (sequence is synthesized)
atgaggtatcagaattacaatcaggggcaaaatttctgtgttgggcaataaatgactattctgttatgaaagtgagcatttgacatttaagatgtgtatccataagaaacagagacccag

SEQ ID NO: 1000534 - DNA, 120 bp, Artificial Sequence
  ENSG00000286454_18 (sequence is synthesized)
tctcttactttgtgattccactcaatgcagaatttctcttaaagtgatgccttaagatcatgggaaagatcaaaattaatgaacaacaaaaaaagtacaagcagagttaaacgagtatca

SEQ ID NO: 1000535 - DNA, 120 bp, Artificial Sequence
  ENSG00000286454_19 (sequence is synthesized)
acaactgtggaaaaacaggtgtgtacaagaggtctttgtggcattgaacccaggtctaataatcagcacaggaatattggagaaataaagatctttttttttttttttgtgatggagtct

SEQ ID NO: 1000536 - DNA, 120 bp, Artificial Sequence
  ENSG00000286454_20 (sequence is synthesized)
acaacgctcggctaagtttttgtatttttagtagagagggggattcaccatgttggctaggctggtcttgaattcctgacttcaaatgatccacccgcctgggcctcccaaactgctggg

SEQ ID NO: 1000537 - DNA, 120 bp, Artificial Sequence
  ENSG00000286454_21 (sequence is synthesized)
atcacaggcgtgagcaactgcgtctagccaggctcttcgtagaatagtgcttggagtaagaatattctaagcaacaacaaatgaggctgggcctttgcaacagcaagttagcatgcttga

SEQ ID NO: 1000538 - DNA, 120 bp, Artificial Sequence
  ENSG00000286454_22 (sequence is synthesized)
aaactgtttcgttgttgttgttttctggaaacataggcagggctgcttctcaggaaagctcagatatttggagtctagggcaataggcatatgaggttcagttcacatgtgtctaaaata

SEQ ID NO: 1000539 - DNA, 120 bp, Artificial Sequence
  ENSG00000286458_0 (sequence is synthesized)
aggttacatctactacaatactgcagatacagtataacattggtattgctggtatgattcctctcccttagtatgtcatagacaccaacttcacatcatgtccagctgcctctcggagct

SEQ ID NO: 1000540 - DNA, 120 bp, Artificial Sequence
  ENSG00000286458_1 (sequence is synthesized)
cggctgcccacagaagctctggcgcaatggtgggtcattgagttacattttccagtgtggagtgataattgcaagatttactgagcagagaaatatgacccatcaaattcagtctaaaaa

SEQ ID NO: 1000541 - DNA, 120 bp, Artificial Sequence
  ENSG00000286458_2 (sequence is synthesized)
taatttttgctctgaaaaagaaaatcgaattaccttgctcttcactatgaaaaattggcttcatctgggtcaagagacatggaacctttctttgaagtagaccctacattccaaaatatc

SEQ ID NO: 1000542 - DNA, 120 bp, Artificial Sequence
  ENSG00000286458_3 (sequence is synthesized)
actggcaaactctggggcctgcttctgattaaataattgacataaacctccgccgaataaacactgaacccttcaaaaacagagaagtaaatgaaaaataaaaatgcatctatgctttaa

SEQ ID NO: 1000543 - DNA, 120 bp, Artificial Sequence
  ENSG00000286458_4 (sequence is synthesized)
gtagaagatcttctgcaataatttgttaccagaaagcaatttacttttccttttgtaaaccagcattaaaacctaagaagaaagcacactgggtgaaactctagttgaaacttcgaaata

SEQ ID NO: 1000544 - DNA, 120 bp, Artificial Sequence
  ENSG00000286458_5 (sequence is synthesized)
gtcttaaatctattctacatattatcagatttaatgttgaccttaagagagtgcttccatatttatggtttgctatcttatccctcaaaactaaatttattactcatagaatatgaagct

SEQ ID NO: 1000545 - DNA, 120 bp, Artificial Sequence
  ENSG00000286458_6 (sequence is synthesized)
taaaaagtaaaatattgtattttcctgagaatattttggtctttaaattgacaacagtataaatacattgtaagaaaaaaaatagcaacccaactgtgtgtatgtataccttgcctcttt

SEQ ID NO: 1000546 - DNA, 120 bp, Artificial Sequence
  ENSG00000286458_7 (sequence is synthesized)
cttcaaggaatgctatctgtgcatataaaactcaaaaacagttaaccaagaaataaagaaaaagagtaaactcttttgggtttattacagatgaggttataacaaaatgggctgacggca

SEQ ID NO: 1000547 - DNA, 120 bp, Artificial Sequence
  ENSG00000286458_8 (sequence is synthesized)
agtgtgacaaaaagtattgtttgaaaattctaaatcttgttgccacaaaactgtgactttttagaaatatatggggaaattttattgtaatagaatggaattgaatttattgaaatttta

SEQ ID NO: 1000548 - DNA, 120 bp, Artificial Sequence
  ENSG00000286458_9 (sequence is synthesized)
ccaatggatttctgccttcccagatgatttttttctcgtttagcttttgtatactttgaaaaatagaacaatgactttgttctgtccttcataggttgggatttataaaaatgattttgt

SEQ ID NO: 1000549 - DNA, 120 bp, Artificial Sequence
  ENSG00000286458_10 (sequence is synthesized)
gtgcctctgcaaaatgtggagaagtactgaataaacaacaaacaatcaggtgttcttcagttaaagggacagtttttagaggaaccccgtggttgtaatgaattatttcttgttttaaaa

SEQ ID NO: 1000550 - DNA, 120 bp, Artificial Sequence
  ENSG00000286458_11 (sequence is synthesized)
agaccttcttacctgaataacgttgtgaatcacacgaatgtcaatttcttgggttttggtattgcactgtagttatgcaagatgttactactggggaaaactgggtacctgggacctttc

SEQ ID NO: 1000551 - DNA, 120 bp, Artificial Sequence
  ENSG00000286458_12 (sequence is synthesized)
tatactattttgtaacttcctgttaatcttttactttatttcaaaataaaaatgtttaaaaatgaaaaaaattaaaataaatgtcagtggtcaaaaagagcaaataaagaaaaaagtcct

SEQ ID NO: 1000552 - DNA, 120 bp, Artificial Sequence
  ENSG00000286458_13 (sequence is synthesized)
ttctaaccagctcaagagggtgtatgtccatatgttgagattctgtttgttaaatataagtcttcttttaaggtagtcttgtagaagctcttagcaagcttgcctaccttgcattcctcc

SEQ ID NO: 1000553 - DNA, 120 bp, Artificial Sequence
  ENSG00000286458_14 (sequence is synthesized)
aaagatgcactctttacaattttgaccataaaggagaatagcagagataaaaaatttaaataaaaataaaaccgaagcagtaacaacatcctagcaaatgggaacagctctccgttggtc

SEQ ID NO: 1000554 - DNA, 120 bp, Artificial Sequence
  ENSG00000286458_15 (sequence is synthesized)
tgtgctctacaatactattataatatttgtgacaacaagtaatccaattcaatgaattgtctctaatcctctgacagctacttttccaaaaacagaagacataattttttaataaagcca

SEQ ID NO: 1000555 - DNA, 120 bp, Artificial Sequence
  ENSG00000286458_16 (sequence is synthesized)
ggaaggaaacaggtttcacaagagaagttcaagaagactgaagctcattgttctaccttctgacacagtagagtctcacctattgaagccatgggattgtcaatgaaatgtaactagtat

SEQ ID NO: 1000556 - DNA, 120 bp, Artificial Sequence
  ENSG00000286458_17 (sequence is synthesized)
gggaaacagtggaaatgtcttctccagtgtctatttgaatacattgatcctatgatggcacagttcacttcaaagtgtgcttactccctacattttacccattcgcctggaaacttctaa

SEQ ID NO: 1000557 - DNA, 120 bp, Artificial Sequence
  ENSG00000286458_18 (sequence is synthesized)
aatcctctgaccagctcagtcagagcaacagcataagcataaatcttccaaatgagttaatgttgcatatacaaaacagtctactgattgcttaaattggctgaagagaaaggggctatt

SEQ ID NO: 1000558 - DNA, 120 bp, Artificial Sequence
  ENSG00000214942_0 (sequence is synthesized)
agtgacaagcctgaagaccgtgagttaagatcatagagccacagaccagaagcagcctgcatccctgaatcccagtacggaataaagtgtcacctgaactgcttcagactttgtgggaat

SEQ ID NO: 1000559 - DNA, 120 bp, Artificial Sequence
  ENSG00000214942_1 (sequence is synthesized)
gagaaacaaaccttccttttacatggaatcatagcaattgatctttggaaccctggtgatctctgcggttggcgttataactgtttgaaggcttccaccatgtggggtggctgagaactg

SEQ ID NO: 1000560 - DNA, 120 bp, Artificial Sequence
  ENSG00000214942_2 (sequence is synthesized)
ttgtcctgcagctgagccagcacagttacacacttttggtccttccatctgagctgctacacagagagcaggttttggagcaggttcttacaacatgaagccatcatgactgaagcttga

SEQ ID NO: 1000561 - DNA, 120 bp, Artificial Sequence
  ENSG00000214942_3 (sequence is synthesized)
tgctccaaacacagacacattctcacttccacaaatgtttaagtaaaaagagaatgtgctgaaggaggaaattattgtctttttgtttccttcctttcattttcttttcttgaaaaaaca

SEQ ID NO: 1000562 - DNA, 120 bp, Artificial Sequence
  ENSG00000214942_4 (sequence is synthesized)
cacctcgtatggtgttttgacttacagaaaatgaaaaacaaagattaattctgaaactgctaattgtgtaaaaagcacggattttcaaagaaactaaatgttcttttattagcatggaaa

SEQ ID NO: 1000563 - DNA, 120 bp, Artificial Sequence
  ENSG00000214942_5 (sequence is synthesized)
aacttttgaagagaaagtatcaaccattttccttcgaatattttcccctaataaaacagatatttggacaagattcatcaaaatatgtctttccacccccaaaatatgtgtatctattat

SEQ ID NO: 1000564 - DNA, 120 bp, Artificial Sequence
  ENSG00000214942_6 (sequence is synthesized)
gtatcaattaaaagtaaaagtaaaaaatataactgtcaaaaatcccgccatatcatgctgatttttcaattttctataagatcatattttaaattagtataatttctaatgtagaaacac

SEQ ID NO: 1000565 - DNA, 120 bp, Artificial Sequence
  ENSG00000214942_7 (sequence is synthesized)
ttccttataaaacagcagatttttattttagctaaaaacattgatttcagatcatgattatctgaactgatagagttaacagtaaagaagtaatatttgcatttctcataggccaaggaa

SEQ ID NO: 1000566 - DNA, 120 bp, Artificial Sequence
  ENSG00000214942_8 (sequence is synthesized)
aatagaatacagttgtaaaactctatggattaaaaacatttgcccatggttaactattgctagaaatcacagtataaaacctcatctctggcttttccagtgcttcatcaccataagtcc

SEQ ID NO: 1000567 - DNA, 120 bp, Artificial Sequence
  ENSG00000214942_9 (sequence is synthesized)
tgaatgtggcaacccaaccataaaaaaataagaaggttcctaccccaaaatattattcctaacaaatctttgattggggattatcaatttagacagagcgcatgttgggtggacatccag

SEQ ID NO: 1000568 - DNA, 120 bp, Artificial Sequence
  ENSG00000214942_10 (sequence is synthesized)
catctacttaaaggcacatcgtatcgctcaatattttggtgtgcactttcgacgtaacaattggcattgaggaggtttgtgctctgaaagcatttctcattaccccactctacaggggtg

SEQ ID NO: 1000569 - DNA, 120 bp, Artificial Sequence
  ENSG00000214942_11 (sequence is synthesized)
agagaagaatgcgtgtgcccagttggcttctgaaacaataaccccaaatacagcatagctatagttgatatctttggggagtaactagcattattttatgaaaattatttaatgtatacc

SEQ ID NO: 1000570 - DNA, 120 bp, Artificial Sequence
  ENSG00000214942_12 (sequence is synthesized)
tgtatattgacctttgtaaaaaggagaaaacaatatggagtctgcaaggggaggttattttttaatgctacaggagtgagagaagttggtcaattaccacttaccgaaaaatgaaagaat

SEQ ID NO: 1000571 - DNA, 120 bp, Artificial Sequence
  ENSG00000214942_13 (sequence is synthesized)
aacctatgggtagcagcatcgtgatgaagagaataaatcaaaatgctcttatttattggggagttataactatcagagggattgtggaacaaaacactcctcatctctacatccaccatt

SEQ ID NO: 1000572 - DNA, 120 bp, Artificial Sequence
  ENSG00000214942_14 (sequence is synthesized)
caaatgcttcctctgctgtgttagcccattgggaaatcacagttctctataagttgcattttcctccttagccaagtaaacttattatgtgattacattgccatttaatcccccgtaatt

SEQ ID NO: 1000573 - DNA, 120 bp, Artificial Sequence
  ENSG00000214942_15 (sequence is synthesized)
gtagcaatatgtacagcggggtaagtcagcaaaaattctcctctgtccagggaggtgaaagccttgtggaatctgggcattccagtactttggaagagtaagcttccattgctcaagatg

SEQ ID NO: 1000574 - DNA, 120 bp, Artificial Sequence
  ENSG00000214942_16 (sequence is synthesized)
gtgacatcacttccaccaatggctgagactgaggaaaatgtgtgtttcttttcttaagagatgacaagttaagtaaatcatcctaggaaaatgctgagcaggttatttgatatatgctaa

SEQ ID NO: 1000575 - DNA, 120 bp, Artificial Sequence
  ENSG00000214942_17 (sequence is synthesized)
ctagatggatgctttagtgaagaagcaaaggtgcacaagcgatcttgagactgagaaatgttgcttccaacaagcttgtctctcagtggtcaaaatatgttttcactccctgctctcttc

SEQ ID NO: 1000576 - DNA, 120 bp, Artificial Sequence
  ENSG00000214942_18 (sequence is synthesized)
atctcctttactctggaaaactgataggtgaatcacttttgttcagctatgattatttttacacctcaaaacacagcctacaggctcacttttaggtcataatttcacacagagacaact

SEQ ID NO: 1000577 - DNA, 120 bp, Artificial Sequence
  ENSG00000214942_19 (sequence is synthesized)
tgttcaaaaggtgaaaaaaaatttaaaaagctctcaaagtcctagtaaatattaagcagcagataagtcaggttcaagtgaaagcaaaggaaacattaaccatttcttgctagaaacata

SEQ ID NO: 1000578 - DNA, 120 bp, Artificial Sequence
  ENSG00000214942_20 (sequence is synthesized)
ctgtatattatttagctgcatctaatcaacttcatttggttccttattttcacttcaaggttcctcagggcagtgtacacaatacagtgtctccacctttgcaaatagcttgaaatccaa

SEQ ID NO: 1000579 - DNA, 120 bp, Artificial Sequence
  ENSG00000214942_21 (sequence is synthesized)
aaatgcatttgtaaatcagtgttcgaattcagaatgtgtttactgtcgaggaaaaaaatatatgtgggggttagatttctaggctaccctaaggcatatgatgtcattttaatgtattaa

SEQ ID NO: 1000580 - DNA, 120 bp, Artificial Sequence
  ENSG00000214942_22 (sequence is synthesized)
caacagtgaacatttatatttgcaatgaaaattgcaaaattcaatattcttaaaatactaatacttgtacttacagaaaagcattttaactgttgcttgttttttcaaactgaaatgctg

SEQ ID NO: 1000581 - DNA, 120 bp, Artificial Sequence
  ENSG00000214942_23 (sequence is synthesized)
aggagtttctttccacagtggaagggagaataatgagaagaaggatgcagaagagaggggaaagttgaaagtagctgatatgggaccacagaatattggccaatcaattgtaatgactat

SEQ ID NO: 1000582 - DNA, 120 bp, Artificial Sequence
  ENSG00000214942_24 (sequence is synthesized)
acttatacctaaacaagtaataaataaatgcatttggcttccttaccttgagtattgaatcaacatttgaaaacaaagtaatcaacctttggcaatttgtccttcagagagagaaaaact

SEQ ID NO: 1000583 - DNA, 76 bp, Artificial Sequence
  ENSG00000214942_25 (sequence is synthesized)
catggggaaaaaggagcaagaggaagttgagaagaaaattcaagaaggtggtgctacaagggcttctcaattttgt

SEQ ID NO: 1000584 - DNA, 120 bp, Artificial Sequence
  ENSG00000214942_26 (sequence is synthesized)
aattcaagaaggtggtgctacaagggcttctcaattttgtactttttcctttcaacattttctctcctggacccaagaaacatcaaaggactttgtattctccagtgaatgaaggataaa

SEQ ID NO: 1000585 - DNA, 120 bp, Artificial Sequence
  ENSG00000214942_27 (sequence is synthesized)
actcctggatgattgtctgcctggcattgagacgacagaagcacgaagccaaaatatccttatgtgggcatagctgcctcttcatggcagagccaatttggatcccatccattggcaggg

SEQ ID NO: 1000586 - DNA, 120 bp, Artificial Sequence
  ENSG00000214942_28 (sequence is synthesized)
gagttgaaatggtgagggtaaacaaggagacaagttcaaagagtgagtgaatctaattgtgatattggatatcccaagatataaatagcttactattctgcccaaggagaagatgtgcca

SEQ ID NO: 1000587 - DNA, 120 bp, Artificial Sequence
  ENSG00000214942_29 (sequence is synthesized)
tgaacactgaaaacttgctcctgtcatcccccaagttataggttcatacatgaataatcagtcttagaagtataaaattgcaaaatatatttttgagaaaaatatattaatagtaaatta

SEQ ID NO: 1000588 - DNA, 120 bp, Artificial Sequence
  ENSG00000214942_30 (sequence is synthesized)
ttatgtcagtagccacacatagggatcaaagctattgaaaaatgtattcttataccttcatctcatgatgtgtgtgcagctctgtgcaatgagaattgtaataatgacttttaagaaatt

SEQ ID NO: 1000589 - DNA, 120 bp, Artificial Sequence
  ENSG00000214942_31 (sequence is synthesized)
ttgtcaatagatttgagagaaatgctttactttgactagatattttaaagctagaaaagaaataaagaccccagtaagggtaagattgaaagataaataaaacttttcattttcttataa

SEQ ID NO: 1000590 - DNA, 86 bp, Artificial Sequence
  ENSG00000214942_32 (sequence is synthesized)
acttggaaataaaagatcatgagaataaagtggacaacttttaaaaggtttatgagggctttacataattgttgtttgacccaagc

SEQ ID NO: 1000591 - DNA, 63 bp, Artificial Sequence
  ENSG00000214942_33 (sequence is synthesized)
gattacaggcacgtgccaccacacctgactaattttgaaccgcaggtgatccacccaccttgg

SEQ ID NO: 1000592 - DNA, 120 bp, Artificial Sequence
  ENSG00000214942_34 (sequence is synthesized)
caccacgcctggcctacataattattttaatgaacctctcagttcatcacattaatgcagggtctgtcatagaaaacattttttctaattcttgaaactgaagtttgtataattccaacc

SEQ ID NO: 1000593 - DNA, 120 bp, Artificial Sequence
  ENSG00000214942_35 (sequence is synthesized)
agtgtggaaatctatcttgcgataaccagaaatattcctccaccatgaggtccaaaataaagttgaaagtagctgatatgggaccacagaatattggccaatcagtgttttacataatgt

SEQ ID NO: 1000594 - DNA, 120 bp, Artificial Sequence
  ENSG00000214942_36 (sequence is synthesized)
ctgtggagtggccatgtgctctagaagagtgagacaaccttggcataaccttctttaagagccaatcacataacactgtgaatatttataaaattttagaccattacctgtttcagctcc

SEQ ID NO: 1000595 - DNA, 120 bp, Artificial Sequence
  ENSG00000214942_37 (sequence is synthesized)
cagatgcaaatgcatttctggaaaaaaaatatatgtgagatgtttctttgaatgacacaggaggacaatttaaaaatctgtcctggaatctctcaaattagtatctgagaccggatcctt

SEQ ID NO: 1000596 - DNA, 120 bp, Artificial Sequence
  ENSG00000214942_38 (sequence is synthesized)
tcagcagatctcagaggaagaaaaaggataatcggagtgatatacacccgtgggtgctgttgttcaccctgtgtcacatggattcacttcttcatttgtccagatgcagctactccaggg

SEQ ID NO: 1000597 - DNA, 120 bp, Artificial Sequence
  ENSG00000214942_39 (sequence is synthesized)
ttccagtgggcctcacttcctgaagagaaacttagaaaagggaggtttccaaaaaaaactgtatttcccatccctgaggttatctctaggccataagtggtattcactatctccttcctt

SEQ ID NO: 1000598 - DNA, 120 bp, Artificial Sequence
  ENSG00000214942_40 (sequence is synthesized)
cactatccattctaatttccccttgccctcatggatcccctctcctggaatggtatcttaattggtggaatgacacaaaactttcattcttaaaggatctgggccctgatgaccaccctt

SEQ ID NO: 1000599 - DNA, 120 bp, Artificial Sequence
  ENSG00000214942_41 (sequence is synthesized)
ataaatgcatttggcttccttaccttgagtattgaatcaacatttgaaaacaaagtaatcaacctttggcaatttggtttcctggatctttcagccatctcctcccccaactctctgctt

SEQ ID NO: 1000600 - DNA, 120 bp, Artificial Sequence
  ENSG00000214942_42 (sequence is synthesized)
ccccttcttctacctctcgcctcctccccctccaatctggctttccctccttcctggcagcatttttagctttaatttgatagtaaaaaactgaatccaaagttacaaaattcttcagat

SEQ ID NO: 1000601 - DNA, 120 bp, Artificial Sequence
  ENSG00000214942_43 (sequence is synthesized)
atgtggcaggtgccctatgaaggtgaaacagataatattcattcaggaaatattcccgtatttaaaaatgggttttcttttttagctcttagaacagccacttttctgggccccagagat

SEQ ID NO: 1000602 - DNA, 120 bp, Artificial Sequence
  ENSG00000214942_44 (sequence is synthesized)
aagaagggaacaaaacaaagtccccattctcattaaacttacgctctactggaacaacagacaaaaacaaatgaccaaaccaacatattaaaaatggttagtgataaatactatgaaaat

SEQ ID NO: 1000603 - DNA, 120 bp, Artificial Sequence
  ENSG00000287264_0 (sequence is synthesized)
atctcaggcactgatcttgggagcagtttagggaaggtcagaatcttgtggcctccaactacttgactcctaaaccgtaatttctaatactgtggctaactttagtagtctagtctccag

SEQ ID NO: 1000604 - DNA, 120 bp, Artificial Sequence
  ENSG00000287264_1 (sequence is synthesized)
gcaagaagggagtttgttctgggaaagggctgttattgtcattttttaaaactataaactaagttcctcccaaagttttttcagcctgcgcccagaaatgaacaaggacagcttggaggt

SEQ ID NO: 1000605 - DNA, 87 bp, Artificial Sequence
  ENSG00000287264_2 (sequence is synthesized)
gttgcagacaaaaggatccgcaggctccagtgactgtctgcatggcgggagaaaacacaagggccctaataagagtaagaaccgccg

SEQ ID NO: 1000606 - DNA, 120 bp, Artificial Sequence
  ENSG00000287264_3 (sequence is synthesized)
ggagaaaacacaagggccctaataagagtaagaaccgccgctttctaagaacctactgtgtgtccagcagggatctacagcattgcattcaattccgtcctcccccacgcctgcctttaa

SEQ ID NO: 1000607 - DNA, 120 bp, Artificial Sequence
  ENSG00000287264_4 (sequence is synthesized)
gaactattagggaggctccaaagcatcaaaggctaaactaaacaccatggctggagagggaatgaactggaggagggaaaggaggaaagactggggggacccagagctctccacccttgt

SEQ ID NO: 1000608 - DNA, 120 bp, Artificial Sequence
  ENSG00000287264_5 (sequence is synthesized)
cctctcgctccagcctggtctgttcttgctcattcagaaactggttggagtaaaaagattccccttttcaagatcgccaaaagtggaactgatcgctttcgaagggactccttcaggaag

SEQ ID NO: 1000609 - DNA, 120 bp, Artificial Sequence
  ENSG00000287264_6 (sequence is synthesized)
aaggagaaaaattcgagaaacttacctgtttctctccctggaatgccttctgaaccctgagatttactttcctcaataaagaagctcgcctcgcccacccagcccactcttcctaggagc

SEQ ID NO: 1000610 - DNA, 120 bp, Artificial Sequence
  ENSG00000287264_7 (sequence is synthesized)
agcgaggatcgctgtccctccagcacatactagtcaactcgagtcatctgaatatgggcatattgggcacatatttctttgtaatggttcctctcctattacaatatgtatctgttgttt

SEQ ID NO: 1000611 - DNA, 120 bp, Artificial Sequence
  ENSG00000287264_8 (sequence is synthesized)
catcgttagattgaaagctctttaagaattatggtaacagtgttacagctctttcagaatttgtttagcaggttttctggttttcacaggaaaataaaataaaaacaataattataataa

SEQ ID NO: 1000612 - DNA, 120 bp, Artificial Sequence
  ENSG00000286829_0 (sequence is synthesized)
gcacccgagccagcagctgcggaggggggctgaggagtgtgcgcaggtggcaggactggcaggcagctccaccggtggccctgatgagagatccactaggggaagccagctgggctcctg

SEQ ID NO: 1000613 - DNA, 120 bp, Artificial Sequence
  ENSG00000286829_1 (sequence is synthesized)
agtgagccgaggccaaatgtggagatggcataaccagaagagggaacgaactggcctggatgtgactcatgcttggaagggagctgtctggaaggaccacagtacctgcagccaactttg

SEQ ID NO: 1000614 - DNA, 120 bp, Artificial Sequence
  ENSG00000286829_2 (sequence is synthesized)
ttgtacttcttgttcttggcagatcctcattcctactggatatctgttgcacgccaattatcttaggctacagctgtttactgacagctgttctctctactgcccaccaggcagccaccc

SEQ ID NO: 1000615 - DNA, 120 bp, Artificial Sequence
  ENSG00000286829_3 (sequence is synthesized)
ttttgtggcaatccatgcctctgcctcccaagtggggctgctttggccggggcttcacccttagctcaggcacagagcttctgatctaaatcaatccaaagcttgcatttccagcaaaag

SEQ ID NO: 1000616 - DNA, 120 bp, Artificial Sequence
  ENSG00000286829_4 (sequence is synthesized)
tatcatttcttctcattggctatgaatgaggcttccattcatcagtcatttttctggggacttctgagggaaagattctttctctgtcctgctagatttttacctgagggaatgtgaggc

SEQ ID NO: 1000617 - DNA, 120 bp, Artificial Sequence
  ENSG00000286829_5 (sequence is synthesized)
ccaaagttgctgcagccatcttgacatcttcagtgggagccagtctgagaacagaggtgagagagagagagggagagagagagagaagcagaccctcgtgatacatttcaacctttaagc

SEQ ID NO: 1000618 - DNA, 120 bp, Artificial Sequence
  ENSG00000286829_6 (sequence is synthesized)
caagatagcagcaagccctatttccagacttttcagttacataatcaagtaaatttgctgctttgtttaagcatctttctctttccctctcaccttctgtcatgggatgactcagcaaga

SEQ ID NO: 1000619 - DNA, 120 bp, Artificial Sequence
  ENSG00000286829_7 (sequence is synthesized)
aggcccttgcaagatgctgacaccttgatattggacttcctagccttcagaactgtgaagaataaatttcttttctttataagttgcctagtcgctggtattcccttatagcagcacaaa

SEQ ID NO: 1000620 - DNA, 120 bp, Artificial Sequence
  ENSG00000286829_8 (sequence is synthesized)
atggactaagacgggcacgatagattgacctggctgtgtgactgcaatctctgggcttggctgagggccatttgtgcctggaattggaggacactgtgaagacattgtccatttcagaaa

SEQ ID NO: 1000621 - DNA, 120 bp, Artificial Sequence
  ENSG00000286829_9 (sequence is synthesized)
ggctttgttcctaagtcagtgcctctggccttctccacagtgacctttgccacactccaccccaggggtccacattcttgtcaaagggtgagaaatcttttgtgactggccatgatgatg

SEQ ID NO: 1000622 - DNA, 120 bp, Artificial Sequence
  ENSG00000286829_10 (sequence is synthesized)
tccccttaaacaggtcatttattttcatgcacaattgaaactgtaagtcaaactctgcttctttatggtggtaaatagtacgttgattatgctaaagaaagattattatcgtaagtgaac

SEQ ID NO: 1000623 - DNA, 120 bp, Artificial Sequence
  ENSG00000286829_11 (sequence is synthesized)
acctgtgtcttgtatcacagtggtactacatcagggaaacctggtggtctgttttatttatttatttacttattcaagagacaggatctcattctgtcacacaggctggagtgcagtagc

SEQ ID NO: 1000624 - DNA, 120 bp, Artificial Sequence
  ENSG00000286829_12 (sequence is synthesized)
acaattgtagctcattgctctaactcctatgctcaaacaatcctcctgcctcaatctctcaagtagctgggactgcaggtgtgtgccatacagtcagctaatttttttgtttttgttttt

SEQ ID NO: 1000625 - DNA, 77 bp, Artificial Sequence
  ENSG00000286829_13 (sequence is synthesized)
ttgtatttttagtagagatgagttttcatgcccgcctcagcctcccacagtgttgggattataggcatgagccactg

SEQ ID NO: 1000626 - DNA, 90 bp, Artificial Sequence
  ENSG00000286829_14 (sequence is synthesized)
gcccgcctcagcctcccacgcctggcctaatttttttttttttttttagattttgtagaggcagggtcttcctatgttgcccaggctggt

SEQ ID NO: 1000627 - DNA, 120 bp, Artificial Sequence
  ENSG00000286829_15 (sequence is synthesized)
gcctcaagtaatcctcccactttggtctccaaagtaccaggattacagatgggagccaccatgcctggccatgttttatttttaataggaaatttgttcgcatggctgaaagctcaaagg

SEQ ID NO: 1000628 - DNA, 120 bp, Artificial Sequence
  ENSG00000286829_16 (sequence is synthesized)
gtacaaataaatgtttgtgaaaactttccttcccgctcctgtttcccaggtgcccaattctcttccccagagctaatccatttcatgcttttgatgtagcctcccagagtgactttatgc

SEQ ID NO: 1000629 - DNA, 120 bp, Artificial Sequence
  ENSG00000286829_17 (sequence is synthesized)
atatttaagcaaacaatgtattatattccccctttgcctcaacactggtgtatggaccttctgagccttgctcttttcactgaagatatcttggatgtacttgcatgtagtacataaaga

SEQ ID NO: 1000630 - DNA, 120 bp, Artificial Sequence
  ENSG00000286829_18 (sequence is synthesized)
gcttcttcattctttttggtagcgtctgagtatcccacaatttcataatagcatgatttcattaatgtctgttgatggacatttcagttgctttgtatctttggctcttgaaaacaatgc

SEQ ID NO: 1000631 - DNA, 120 bp, Artificial Sequence
  ENSG00000251307_0 (sequence is synthesized)
cgggcgcagccaagcggctccgctgcgccggttaaaacattctcccagggggcatctctctgtccttggccagatggtctcgacacgtgcgggcacctctaacccaggctctcgctctgt

SEQ ID NO: 1000632 - DNA, 87 bp, Artificial Sequence
  ENSG00000251307_1 (sequence is synthesized)
acctcagccttgcaagcagatgggactataggacagtggcatactatcacatctatcaaagaaaatgtgaaaagtgcctgaaatgtg

SEQ ID NO: 1000633 - DNA, 120 bp, Artificial Sequence
  ENSG00000251307_2 (sequence is synthesized)
cacatctatcaaagaaaatgtgaaaagtgcctgaaatgtgctactgatcaaccaatagcagtgaaaactcacatatggtacacattccatttggatcacaaaagcaaagccaaacatctc

SEQ ID NO: 1000634 - DNA, 120 bp, Artificial Sequence
  ENSG00000251307_3 (sequence is synthesized)
tctgggcttggtcatgtgacttacttcagtcaatgggacattagcaagaataataaagcaggagtttgataagaatttgtacattttggcttatcatcttaaaatattcttggaagccag

SEQ ID NO: 1000635 - DNA, 120 bp, Artificial Sequence
  ENSG00000251307_4 (sequence is synthesized)
atgcaataagaagtccagccaccctaagaccactatatgtgaggaaacccaagctagtcatgtggaaaaaacatgtaaacagagggatgcctggctagtctccagcttagtcatgggagt

SEQ ID NO: 1000636 - DNA, 120 bp, Artificial Sequence
  ENSG00000251307_5 (sequence is synthesized)
gaagaagccactttggatgttccagccttggaagatacttcctggaaccgaagaaacaccttgctgagcccagcacagactgcagaatcatgagaaataatagttggtttaagccactac

SEQ ID NO: 1000637 - DNA, 120 bp, Artificial Sequence
  ENSG00000248874_0 (sequence is synthesized)
ggcgggccctgcactcggagcagccggctggccccgccgcggccgagcaatgaggagtacaccctccgggccagcgactgtggagggtgtactgggtaccccagcagtgacagcccaccg

SEQ ID NO: 1000638 - DNA, 90 bp, Artificial Sequence
  ENSG00000248874_1 (sequence is synthesized)
gtacaccctccgggccagcgactgtggagggtgtactgggtaccccagcagtgacagcccaccggcgctgcgttctcagggcagggctcg

SEQ ID NO: 1000639 - DNA, 120 bp, Artificial Sequence
  ENSG00000248874_2 (sequence is synthesized)
ccagctgggctcctgagtctggtgaggacatggagaacctttatgtccagctcaagttgcagtccgtaggcacttgctttaaccgtgaagaattaccttcagtacttcagtggcctcagg

SEQ ID NO: 1000640 - DNA, 120 bp, Artificial Sequence
  ENSG00000248874_3 (sequence is synthesized)
aaccgtgaagaattaccttcagtacttcagtggcctcagggtgaggaattgggagccaccagtgtgacaaataaacctggactctcagcaatgaggaaagaaacagaccaacaagttggg

SEQ ID NO: 1000641 - DNA, 120 bp, Artificial Sequence
  ENSG00000248874_4 (sequence is synthesized)
gaaagaaagctcacatactgcggtgaccaggtaactctgttcacagaccaagccctcagtcaaatactatcttctgaggagggaagaatcaaggttatgtagacccatacagaattgcca

SEQ ID NO: 1000642 - DNA, 120 bp, Artificial Sequence
  ENSG00000248874_5 (sequence is synthesized)
ctgctaacacactttcatactgcatgacttggatacactccctattgctaacaagaccacagtggaattaaaattgaaaatgaactcccaaaggaagcctcaaaactatgcaaatacatg

SEQ ID NO: 1000643 - DNA, 120 bp, Artificial Sequence
  ENSG00000248874_6 (sequence is synthesized)
aaaattaaataatctgcttttgaatgattcttgggttaacaatgaaatcaagatggaaattttaaaaacttttgaaatgaatgaaaatagtgacaaaacatattaaacctctgggataca

SEQ ID NO: 1000644 - DNA, 120 bp, Artificial Sequence
  ENSG00000248874_7 (sequence is synthesized)
tgcaaacagacagcctaaattcacacctcaaggaactgaagaaataagaacacactaaagccaaagcaggcagaagaatagaaataacaaaaatcagaacagaattaaattaaattgaaa

SEQ ID NO: 1000645 - DNA, 120 bp, Artificial Sequence
  ENSG00000248874_8 (sequence is synthesized)
aacaaaaagctggttctttgaaaagataagcaaaatttatagactattaatgagatttaccaagaaaaagagaaaaatcaaataagctctattagaaatgaaattgggacccccacattg

SEQ ID NO: 1000646 - DNA, 120 bp, Artificial Sequence
  ENSG00000248874_9 (sequence is synthesized)
aatgaaattgggacccccacattgaccagaatccgtggacgtggtgaaccaggttatcaagtacaagcctgcagttgcctggcagactggaaagcctctctccatagaggagatagaggt

SEQ ID NO: 1000647 - DNA, 120 bp, Artificial Sequence
  ENSG00000248874_10 (sequence is synthesized)
ggcacccccaaaggctaatgaagttcgaatcacaatcattgccactgtggtttgccacaccgacacctataccctgagtggagctgatcctaagggttgttttccagtgatcttgggaca

SEQ ID NO: 1000648 - DNA, 120 bp, Artificial Sequence
  ENSG00000248874_11 (sequence is synthesized)
tgaagttgcttggaattgtggaaagcgttggcgaggaagttactaagctgaagctgagcttcttccatgctccactaaaccatttcttgcatcacagtggagagtcgaagaattccatct

SEQ ID NO: 1000649 - DNA, 120 bp, Artificial Sequence
  ENSG00000248874_12 (sequence is synthesized)
cttggaatcactttcaagcagatgtctagcttggattcagccaatgggattcaataaagagagatttaaaagtcagaagaaaacaagaattccagtacagctgtagcaagatgcgcaggc

SEQ ID NO: 1000650 - DNA, 120 bp, Artificial Sequence
  ENSG00000248874_13 (sequence is synthesized)
atttggcagacatgacgttggcagcagcatccaagtgagttcctgtgaatcacccgctttgagaattcaagcaactagtgccattgcaggtggctttctcacattcttgaatttttagat

SEQ ID NO: 1000651 - DNA, 120 bp, Artificial Sequence
  ENSG00000248874_14 (sequence is synthesized)
ctctgaggctagttaacaatctctttgacatatacaaatgcaactttacaagggagaaaaaagcatccaattctctgcattgattttttttcctactcaaaataaattcttagaatgctt

SEQ ID NO: 1000652 - DNA, 120 bp, Artificial Sequence
  ENSG00000244358_0 (sequence is synthesized)
caaagacgggcagctttggctgcacccctgggcagttccctgggtatgcacattgatgcaattataatgtcctcgctatgagatttcccaccacccacgctggtgttcacatctagcggc

SEQ ID NO: 1000653 - DNA, 120 bp, Artificial Sequence
  ENSG00000244358_1 (sequence is synthesized)
atcacagagaggtagaactaaagggaagaagttgatggatgccatctggtattgcagatgatgacaggttttctcagctatgaagaggaaaactaacagattcctgagtcagcaacacaa

SEQ ID NO: 1000654 - DNA, 120 bp, Artificial Sequence
  ENSG00000244358_2 (sequence is synthesized)
agaacagagcataactgagacatgggaaaaatagctttcaggtaacagatttttgagcaccttgatacatctgagcctgaatacaattttgccacggagatgttgagttatatcaaccaa

SEQ ID NO: 1000655 - DNA, 120 bp, Artificial Sequence
  ENSG00000244358_3 (sequence is synthesized)
taaattctcttttgggttttatggcagttttcagaatgttttctgattcttgcaaccaaaagagttcttattaactcactaataaaatgaacacgtaggattgtgtcaaaaaacaaaatc

SEQ ID NO: 1000656 - DNA, 120 bp, Artificial Sequence
  ENSG00000244358_4 (sequence is synthesized)
tgtaactatggaaagagaacaccctaagttacaaagtgagtattactccagtgatttaccactgaaaaaggaaagcacttcctcagtgtggcactttcctgagagggaatgaggggtgga

SEQ ID NO: 1000657 - DNA, 120 bp, Artificial Sequence
  ENSG00000244358_5 (sequence is synthesized)
caggaagtgtggagtgaaggatgccgtgacacgctttggtccctaacagtgtaagcggcatgaggcaagttatcttctgtgtcactgacttcaccacatgaaaaccaggtcactgtctca

SEQ ID NO: 1000658 - DNA, 120 bp, Artificial Sequence
  ENSG00000244358_6 (sequence is synthesized)
atgggaaaaatagctttcagatctataaaaaagaagaggaaacatacatggtttaaggtaggagaaacaagctaaagaggaaaaacaaaaatgaccataggaagccaggccagagtaaga

SEQ ID NO: 1000659 - DNA, 120 bp, Artificial Sequence
  ENSG00000244358_7 (sequence is synthesized)
agagtctgttgtttttaacagagtttctctatattccagaaatgtgtatagtacccatatatcccttgcaagattgttttggagaaattgttccaactaaataaataaaaaatcagtcag

SEQ ID NO: 1000660 - DNA, 120 bp, Artificial Sequence
  ENSG00000241881_0 (sequence is synthesized)
gtggtgaaaaagggacacagattgtctccagagaccaggcctgctatagcaaatttctagttggaaaacaagaaagatcttggaggaaaggaatatacaggcgacactaaagccactgct

SEQ ID NO: 1000661 - DNA, 120 bp, Artificial Sequence
  ENSG00000241881_1 (sequence is synthesized)
gaggcactgagtaccagccgctgcacaggatcttggcagagagatggtggccacttgagagttgatggtggcgactgagctcagcttaatcagcatgatgtcattatcaatggtggctga

SEQ ID NO: 1000662 - DNA, 120 bp, Artificial Sequence
  ENSG00000241881_2 (sequence is synthesized)
gttatacttggggtggcaaataatcttggctgcatttatgaattgttcattgccttcatagaccttaatgttgtattctccaagatgcacatggatttggctggattaaaagatataaga

SEQ ID NO: 1000663 - DNA, 120 bp, Artificial Sequence
  ENSG00000232586_0 (sequence is synthesized)
ctggtataatagtctctctctcgcagtgttgccgtatggattcagggtgatttaatgacctcaacagagctctggaacatttgcgtagctggcagggcaaggcgagggacagcccaacga

SEQ ID NO: 1000664 - DNA, 120 bp, Artificial Sequence
  ENSG00000232586_1 (sequence is synthesized)
aggcaggtccttgaagtcctggttaacactggtttccaaaattcgagccggcctgcggtttttccagcacgcctgaaagctggggacactcatgcaccagtgttggaggctgtagccttt

SEQ ID NO: 1000665 - DNA, 120 bp, Artificial Sequence
  ENSG00000232586_2 (sequence is synthesized)
gaccaggcatgggaccaggaggtgaggccggctctcaggcatcaaccaaaggatccactgaatctcccttctccccctgccaacaaaggtacaagtagatgttgacaccccctcagacat

SEQ ID NO: 1000666 - DNA, 120 bp, Artificial Sequence
  ENSG00000232586_3 (sequence is synthesized)
ggaaggagacccatttttttctttttctagttctggataaatggccttaaacaaaatatgcaaacaggctccttgcgtctcccaaaggcagcccaccacagaagccctgccacagcccaa

SEQ ID NO: 1000667 - DNA, 120 bp, Artificial Sequence
  ENSG00000232586_4 (sequence is synthesized)
ggggttagatgctgccaggatctgtttccgccacagagcagctctgtgcagcacgttcctgccaaccaccctgagtgcttcagggcttccgaggccgtgacagtgagggcagcggcactt

SEQ ID NO: 1000668 - DNA, 120 bp, Artificial Sequence
  ENSG00000232586_5 (sequence is synthesized)
ctgggtcaccgtgggacaggtctctgcctcaggacacggattgacaagctctctgagtgggccaggagctccttaatgtgagccaagcccagccctgccaccttggccccgttcacctcg

SEQ ID NO: 1000669 - DNA, 120 bp, Artificial Sequence
  ENSG00000232586_6 (sequence is synthesized)
aggatctcatcgcccacccccagcagccctgagtacagcttggccatgctcatgtcagccatctcctgcacgtagatccctgcagaggaaaacaggagaatttcacaatgacacccaaat

SEQ ID NO: 1000670 - DNA, 120 bp, Artificial Sequence
  ENSG00000232586_7 (sequence is synthesized)
cgaagaagtgcatctctggaatgctgaccatgttgatgaggtgctgtttgtgtggcacagggaggaggtgctcataccaggcacttctctgtgcgcatgcacacatacacacacccctca

SEQ ID NO: 1000671 - DNA, 120 bp, Artificial Sequence
  ENSG00000232586_8 (sequence is synthesized)
ttattccatctcacaaccacaactggctttagacatagatacagtgcgcctcctccatggtctaactccattccactgtctctgcttttaaagtggaaatgctcctagtgcaaataacgc

SEQ ID NO: 1000672 - DNA, 120 bp, Artificial Sequence
  ENSG00000232586_9 (sequence is synthesized)
gttaaactgttgtcatttatttatacctgacagtgagtgagctaatctttttctgagatgagcttttcttgtagaattgggaggaaaatagtttttaaaaattaggaaccatacctactc

SEQ ID NO: 1000673 - DNA, 120 bp, Artificial Sequence
  ENSG00000232586_10 (sequence is synthesized)
agtgcctggcactatgatccagttgctgcctcaggtcacccaggcccagcgtaaaggccggggtggtgggaaggtatcatcggaagagcaaaagtggctgagccacatccaagcctggtt

SEQ ID NO: 1000674 - DNA, 120 bp, Artificial Sequence
  ENSG00000232586_11 (sequence is synthesized)
tgctgcactctattgccaaagactgacactggcctcagtcttactcagatatggctcctcaattgggatggggaagcatctgagcaaaaaaccccaggaaaaataaaaattctagccaca

SEQ ID NO: 1000675 - DNA, 120 bp, Artificial Sequence
  ENSG00000248870_0 (sequence is synthesized)
ttttgtttcatgtttggggagtaggaaaaatagaacctgaaagttgaaaatctccatcttataaatgaatatcattgcctctacctagaaagctactactgacctatcaaaaaccttgta

SEQ ID NO: 1000676 - DNA, 120 bp, Artificial Sequence
  ENSG00000248870_1 (sequence is synthesized)
gacaagttaatacttctgtgatgtgtgcagctctttaaacaatctgcctgtcatgccagagagtacattttcacttggcttctttaacagacagtctaagaagaaagaataataccaagg

SEQ ID NO: 1000677 - DNA, 120 bp, Artificial Sequence
  ENSG00000248870_2 (sequence is synthesized)
catctgtactgtagtatttggcccttaaataactttttacaccccacagtgcatgtctatataacaaggaaggaaagggagttggaactacatggggccacatgagaaatggaattgctt

SEQ ID NO: 1000678 - DNA, 120 bp, Artificial Sequence
  ENSG00000248870_3 (sequence is synthesized)
cttttggcttaagggcataggcaatctaagacgcttctccctgggacataccatgtagttttttattgacttccagtgattttaatgctgaaagagccaaagtcaaggtgagtgttctta

SEQ ID NO: 1000679 - DNA, 120 bp, Artificial Sequence
  ENSG00000248870_4 (sequence is synthesized)
acatattgacatcaatggcccagccaaggagctgccaacaggcctttgagagaacagttaggactccttgtttacctttccccacaaagacattggatcggggtggggtgcatataatat

SEQ ID NO: 1000680 - DNA, 120 bp, Artificial Sequence
  ENSG00000248872_0 (sequence is synthesized)
tcttctgtgcttagcttcactggagtgtcaacacttaatactagttatgtagaattacaactttatatttattacagtaaatacacaggcatgtaaggaaaaattctagaacagtttttc

SEQ ID NO: 1000681 - DNA, 120 bp, Artificial Sequence
  ENSG00000248872_1 (sequence is synthesized)
ttagtatggtaaaaattttaatcaccatttcacttttgaagatcattctctcttgcacagagcactaaattcagtacgagatctgctatgatgtttctctcttatatgtaaccaagaaat

SEQ ID NO: 1000682 - DNA, 120 bp, Artificial Sequence
  ENSG00000248872_2 (sequence is synthesized)
ttcccatgctgtcactaagaatcaggacctaaaattatattggaaatatcatcaaaggataaatcatactggatcttcttttggttacatttataggtatgttattcatataaattctat

SEQ ID NO: 1000683 - DNA, 120 bp, Artificial Sequence
  ENSG00000248872_3 (sequence is synthesized)
aatgtatggaagtctggtggttctaatgtgatgattctggtttttatcttactgtgctacatataatagaaatagctaaattttattgccaattgaaaattttcaaccaattttaaccat

SEQ ID NO: 1000684 - DNA, 120 bp, Artificial Sequence
  ENSG00000248872_4 (sequence is synthesized)
ggttattacaagtttctgtcacccacaattcctggagggtaggagctgccactcagtgaccatgtcaagggcacgttggctctcagccccagccactctcccatggccagcacacaaggc

SEQ ID NO: 1000685 - DNA, 120 bp, Artificial Sequence
  ENSG00000248872_5 (sequence is synthesized)
caccacagcctggtcctgacgtgatacccaagaccggtgggtacgaggggcatctggtgagttattgtttaaacttcttctctaaaagcatttacaataaactgtgatctaaattacttt

SEQ ID NO: 1000686 - DNA, 120 bp, Artificial Sequence
  ENSG00000248872_6 (sequence is synthesized)
tcatggaaaggactctgacaagtactcttaaacacaagattactttggacatcataccatcagagtagaaaaaactttcaagactctaagtaaaaagctaaaataagaactgctaatcta

SEQ ID NO: 1000687 - DNA, 120 bp, Artificial Sequence
  ENSG00000248872_7 (sequence is synthesized)
acatcaagcagaacaagagttaattacacaggattgaactgatagaatacgaagattttattcatgacattttcatttgaaatggctgattctctttatattttgttttccagagtcaag

SEQ ID NO: 1000688 - DNA, 120 bp, Artificial Sequence
  ENSG00000248872_8 (sequence is synthesized)
tccagagtcaagataaccttttttctttatttttaattgacaacacattagatagaatatatttttgtggacaaaaatttgaggtatttatatttctctctacctgatttctccagaatt

SEQ ID NO: 1000689 - DNA, 120 bp, Artificial Sequence
  ENSG00000248872_9 (sequence is synthesized)
gtgagtattcttaattaatggcaatacaattatttgcataagttcaataagaatctgtttccttttgtaacaggatacaactggagacactggttattttaccaaggctttgattagaat

SEQ ID NO: 1000690 - DNA, 120 bp, Artificial Sequence
  ENSG00000248872_10 (sequence is synthesized)
ggcatattttcagatatgatcaggctgctttgagaaattggtgctgacttcatagagccaatgaaaaacttagaaagactggactggtaccttgtctacaatgtttccttacagggtttc

SEQ ID NO: 1000691 - DNA, 120 bp, Artificial Sequence
  ENSG00000248872_11 (sequence is synthesized)
tgtccttctgataattaaagaatatcactttctgacaggcctgggaacctcaagatattttggaaccttgagaagagagaaatacactcattcatacagattttacagccacaatctgat

SEQ ID NO: 1000692 - DNA, 120 bp, Artificial Sequence
  ENSG00000248872_12 (sequence is synthesized)
ggattaaccatggctttactagactcaaggcttttaaaaatctaaaatttcttataaataggttccaacaaagctaattttaaaaaagaagcttataaggccaattattgctgcacttta

SEQ ID NO: 1000693 - DNA, 120 bp, Artificial Sequence
  ENSG00000248872_13 (sequence is synthesized)
tgcaaataatcatgccaggtagatataagactaaaacttattttgcaaacaagtcagtcctatgatttgtctctgataaaaatgagaagcttgagaaagataaattatatttcaacagca

SEQ ID NO: 1000694 - DNA, 120 bp, Artificial Sequence
  ENSG00000248872_14 (sequence is synthesized)
actataacacacctgttattggattccaacactgaccattgtttttaagtttttatcatttgttataatcaagactgaatcctgaatttttcctggcttcaataagtgtccctaatgaac

SEQ ID NO: 1000695 - DNA, 120 bp, Artificial Sequence
  ENSG00000248872_15 (sequence is synthesized)
ctgcatataatatattttaaaaacttcttgttatgatttccatcaggaataggatctatttttgaagtactacttaaactaggaattataattcaatatatgttggagtttctcttccat

SEQ ID NO: 1000696 - DNA, 120 bp, Artificial Sequence
  ENSG00000248872_16 (sequence is synthesized)
cttgttaagttcggtacctactatttgtttcttatttttaaaatcaaactgattatatcctacccaataccaatgacatgttctttaacctgtctttgttatgagtaaaccgaagacttt

SEQ ID NO: 1000697 - DNA, 120 bp, Artificial Sequence
  ENSG00000248872_17 (sequence is synthesized)
tccatgtttatcagggacactatgtgaacctcctgaatatgcatttatttgtcaacatattgaccacccctggttttatgcatgtgttgacagctgatgcaagagagttaattgtttatt

SEQ ID NO: 1000698 - DNA, 120 bp, Artificial Sequence
  ENSG00000248872_18 (sequence is synthesized)
aggttatctgactattcttctttctatttatagcttcactgcttctcaatattggaccagtttcttaaaactattttccaggaatagacaaaccctacctgcaaaccaagaagacagatt

SEQ ID NO: 1000699 - DNA, 120 bp, Artificial Sequence
  ENSG00000248872_19 (sequence is synthesized)
ttggcctatgtttagcaatattctcttgccatgatggagagtatcctctcatgaacaacgattataaatctgtcaatcaccctatgtaacttctcaaatgaagcagctaaagccatagct

SEQ ID NO: 1000700 - DNA, 120 bp, Artificial Sequence
  ENSG00000248872_20 (sequence is synthesized)
gcccaataaaaatctttaaactctttagccacagtagtaatggataacagaatacccctagactaagtattggtggaacaggaaagagtttctatggtagctaacatatcatgttgtgtt

SEQ ID NO: 1000701 - DNA, 120 bp, Artificial Sequence
  ENSG00000248872_21 (sequence is synthesized)
tacatcaatacatcttctgaagttgaaacacacatgaaataagaagacaacaagctaattaatcacaacaaattcccagggaagaaccaggtgccaactagttctcagatatatttttct

SEQ ID NO: 1000702 - DNA, 120 bp, Artificial Sequence
  ENSG00000248872_22 (sequence is synthesized)
gaatcccacatagaattcaatgtatgcccccaagccatatgaaaattaagactttacctattactaatgctcatttttggacatttggttatcaaatgctgcctctgatgttaaaccttt

SEQ ID NO: 1000703 - DNA, 120 bp, Artificial Sequence
  ENSG00000248872_23 (sequence is synthesized)
aaactgttaaaagagaaaccaatgtattaataatgctaaatgttaatattgtaccagatattagagaatatcttcaacttaatgcaaaatgatttcatcctttaggcccaaacctgcacc

SEQ ID NO: 1000704 - DNA, 120 bp, Artificial Sequence
  ENSG00000248872_24 (sequence is synthesized)
cctagtcagtaggaaaaagctagaatggatgttgcccctaatccctcatgactgaagaatgcacatagaacaggggggatttaaaccatgacccaaagatttagttaaagaaaccaatgg

SEQ ID NO: 1000705 - DNA, 120 bp, Artificial Sequence
  ENSG00000248872_25 (sequence is synthesized)
ctaaaagaagttattgagtttgcaggttggcagattaaaaaaagaagaagaggaaacaacaacaacaacaacaaaacaacaacaacaacaacaaaaacttgctgaaacactgaaactccc

SEQ ID NO: 1000706 - DNA, 120 bp, Artificial Sequence
  ENSG00000248872_26 (sequence is synthesized)
tttgcttattaactaaagaacactgactgaaattggttggactcaatatggccaactagagtctgcacagaaagagcttgctgacattgcaacctgaattttcagtgcatgtttcataac

SEQ ID NO: 1000707 - DNA, 120 bp, Artificial Sequence
  ENSG00000248872_27 (sequence is synthesized)
agctccctccaactttgtacatgtgatccatgcgatagaatgaagttaactgtatgcccagggactttctagaccttctctttccttccaccaattatttgatcatctcagaatccacct

SEQ ID NO: 1000708 - DNA, 120 bp, Artificial Sequence
  ENSG00000248872_28 (sequence is synthesized)
cctgaaactttttgtatacaaatactgctttgaagccagcatggggagaaaaacttgagtttgacatgcctgtcttcttgtgagtcaacttgcaaaataaagcttccctttcctcaaaaa

SEQ ID NO: 1000709 - DNA, 120 bp, Artificial Sequence
  ENSG00000248872_29 (sequence is synthesized)
tcttctgtgcttagcttcactggagtgtcaacacttaatactagttatgtagaattacaactttatatttattacagtaaatacacagagcactaaattcagtacgagatctgctatgat

SEQ ID NO: 1000710 - DNA, 120 bp, Artificial Sequence
  ENSG00000248872_30 (sequence is synthesized)
agcttcactggagtgtcaacacttaatactagttatgtagaattacaactttatatttattacagtaaatacacaggcatagcactaaattcagtacgagatctgctatgatgtttctct

SEQ ID NO: 1000711 - DNA, 120 bp, Artificial Sequence
  ENSG00000227398_0 (sequence is synthesized)
gagacacacacgggccaccgatctgccgccagtcggcgtgccttgcagctgttggcttgaccccaggccgggacgggcagagcggaacactgcccggcgggtccaggccgaccgtgcctg

SEQ ID NO: 1000712 - DNA, 120 bp, Artificial Sequence
  ENSG00000227398_1 (sequence is synthesized)
tggctctccggaacaataaacccccggccccagtgatgtgggccagaccggacctggagaggcggcaccgcgacccctcccgcaacccgcctggcggccgggggcagcgtgacccggccc

SEQ ID NO: 1000713 - DNA, 120 bp, Artificial Sequence
  ENSG00000227398_2 (sequence is synthesized)
gctaccgtgtcacagctggcgactgacaaacagcaggcgacgtcgggagaactccccgagacacccgagacatcagccttctcgctccgcggccctgcaggacctgcccgccgggagccc

SEQ ID NO: 1000714 - DNA, 120 bp, Artificial Sequence
  ENSG00000227398_3 (sequence is synthesized)
cggagtccgcggcagcgccgagggcccctcccccaggcctctgggctctgaggctcatccatggaataccaattctttttcttagtgttcacattggatttttctgttaaaaatagattg

SEQ ID NO: 1000715 - DNA, 120 bp, Artificial Sequence
  ENSG00000227398_4 (sequence is synthesized)
ttggagttggctaacaagttgattacttccagtcaggcactctcttctgtaaagtctcttttgtaaactcctacaagcagctatttcactggatttgaaaagactgactaaaaagaacca

SEQ ID NO: 1000716 - DNA, 120 bp, Artificial Sequence
  ENSG00000227398_5 (sequence is synthesized)
tgcactgtaactctcaagtatacaggaatattgttattagctcctgccatataaaatgccggctcctgctttgcctttcaccatgagtaaaagcctcctgagaccttctcagaaacagat

SEQ ID NO: 1000717 - DNA, 120 bp, Artificial Sequence
  ENSG00000227398_6 (sequence is synthesized)
gctgccatccttcctgtacagcctgcagtaccgtgagcaaaataagcctcttttgtctataaattacctagtctcaggtatttatttatagcaatgtaagaaagaactaatacaagtggt

SEQ ID NO: 1000718 - DNA, 120 bp, Artificial Sequence
  ENSG00000227398_7 (sequence is synthesized)
ttcacttcttatagcctaaaactacctagcatgcctttgaaattgcaactgctttctatttcttataattcagacttgtcttttcatttgtgaccaattcctgttatttcaaaaccaaag

SEQ ID NO: 1000719 - DNA, 120 bp, Artificial Sequence
  ENSG00000227398_8 (sequence is synthesized)
agtgcatgagggtgaattatattaccctgaagagatgagacaatgactctgtctgaaccattcagctggtctaggtgactagagactgcagagatgtcaggactgttgcctaggacacaa

SEQ ID NO: 1000720 - DNA, 120 bp, Artificial Sequence
  ENSG00000227398_9 (sequence is synthesized)
agcagacttacagggcattcctcactgaaagaacattttagggacacttacttatccagaaaggcataaataaggaactggtaaccctgataacttgagaaccctactgctacctggtga

SEQ ID NO: 1000721 - DNA, 63 bp, Artificial Sequence
  ENSG00000227398_10 (sequence is synthesized)
gaaccctactgctacctggtgattagaggcagtctgagacacataagagagtggttcaggcca

SEQ ID NO: 1000722 - DNA, 120 bp, Artificial Sequence
  ENSG00000227398_11 (sequence is synthesized)
aatgatccaagatcatgccactggactccagccagagcaacacagtgacactctgtctcaaaaatatatatatatattttgggacctggacaggtgaccatggtgagacctttgaagaca

SEQ ID NO: 1000723 - DNA, 120 bp, Artificial Sequence
  ENSG00000227398_12 (sequence is synthesized)
tatgtatgtccatagcatgcatatgtctttgaactgtgtatcttgaagtaatgttatgttaaattatgtaatagataatcataaagtgtctgagtcatttctaagtaagttaaaatgctg

SEQ ID NO: 1000724 - DNA, 120 bp, Artificial Sequence
  ENSG00000227398_13 (sequence is synthesized)
gctgagatatcaatttaatcttttagttttttgttgttgactttagacatctagaaatataaagcataatcaatttaagaataaaaaatacggcctgggtacagtggctcatgcctataa

SEQ ID NO: 1000725 - DNA, 82 bp, Artificial Sequence
  ENSG00000227398_14 (sequence is synthesized)
aggagaccagctcggtattagccaggtgtaatggcaggtgggtgtggtagtatgcgcctatagccccagctactagggaagc

SEQ ID NO: 1000726 - DNA, 120 bp, Artificial Sequence
  ENSG00000227398_15 (sequence is synthesized)
caggtgtaatggcaggtgggtgtggtagtatgcgcctatagccccagctactagggaagctgaggtcagatgatcacttgagcctgggaggtgtaggttgcagtgagccaagattgtgtc

SEQ ID NO: 1000727 - DNA, 120 bp, Artificial Sequence
  ENSG00000227398_16 (sequence is synthesized)
acagagtgagaccctgtctcaaaaagcaaaaactatgcaaataaggacaattattaacaaaacaatctgaaatccgtatctgaaaagtgtttctggccaggcgtggctcacgcctgtgat

SEQ ID NO: 1000728 - DNA, 120 bp, Artificial Sequence
  ENSG00000227398_17 (sequence is synthesized)
aatccatgtaagagacccctatgcttaagcctctctggatgggcttcagctcctcacagccatcagggaccatgcctggccggatgctgccgcctggcttcagtgccatctgcatgtcct

SEQ ID NO: 1000729 - DNA, 120 bp, Artificial Sequence
  ENSG00000227398_18 (sequence is synthesized)
cagggatgacaaaggactcattgtaccagatgtcaaattctacaaggagagacggggtctcactgtattgcccaggctggtctcgaactcctgtactcaagcaatccacccgcctcagcc

SEQ ID NO: 1000730 - DNA, 120 bp, Artificial Sequence
  ENSG00000227398_19 (sequence is synthesized)
tgctgagattacaggcgtgagccacttcgcctggcctaggagatatgagtttacttgatctgttcaagtaaattcaataaaataaagtcttcatctgtcacccagactggagtgcagtgg

SEQ ID NO: 1000731 - DNA, 89 bp, Artificial Sequence
  ENSG00000227398_20 (sequence is synthesized)
tgggcatgctaggattacaagtgtgtgccaccacgccctgctcctctgagaaataaatgagtaaaatgcaccccctgtgagtgagatga

SEQ ID NO: 1000732 - DNA, 120 bp, Artificial Sequence
  ENSG00000227398_21 (sequence is synthesized)
gaaataaatgagtaaaatgcaccccctgtgagtgagatgatgcatctgacttgcaggaataaaccaagtgacatctggagatcactcatggaagctggcctggaacagggttgtgattta

SEQ ID NO: 1000733 - DNA, 120 bp, Artificial Sequence
  ENSG00000227398_22 (sequence is synthesized)
gcgagggaaagcccagtaacctgtggtgtttcctgtctggaagaagacagtaagactgagccaggagtgtgaagaacagtgtggcctctgaaccacctgtcccagagttggaatggtcac

SEQ ID NO: 1000734 - DNA, 120 bp, Artificial Sequence
  ENSG00000227398_23 (sequence is synthesized)
tcactaaaatgcaggtcctgggccctgctccatctctcccaagtcagaaccactggctgaggggctgggaatctgcacttgaccagccctctcagataagtcatctgaacacgcaagctt

SEQ ID NO: 1000735 - DNA, 120 bp, Artificial Sequence
  ENSG00000227398_24 (sequence is synthesized)
ggtgggccttggccctcagtgcaggtgtgggcggcgcacgccaccaggacaaggacactgggtcagagtaaccaggtactcttcacatgttgaggatcacatatggttttgtttgatctg

SEQ ID NO: 1000736 - DNA, 120 bp, Artificial Sequence
  ENSG00000227398_25 (sequence is synthesized)
gtgcagaagctaacattagctgattacctaattgggcgtaattcctccttcggggagtctgagggaaggggctcaatgctggaagtttcccggtcccgcgaaagcatgtctttgacatcc

SEQ ID NO: 1000737 - DNA, 120 bp, Artificial Sequence
  ENSG00000227398_26 (sequence is synthesized)
ccatctttggaggatgggaccagctgggtcttggaggtggaaacgtaatccaagtccttcccattcacagggctgctggcaccttcctttcttgccaaggagctggaagaaggcacggaa

SEQ ID NO: 1000738 - DNA, 120 bp, Artificial Sequence
  ENSG00000227398_27 (sequence is synthesized)
gccccagggttcagtcatggacagtgagttatcagatgccaggatgagtgacctttctcagcactgactacactgggaaccccacctcattcagctcccatcttgttcatatgcctaggt

SEQ ID NO: 1000739 - DNA, 120 bp, Artificial Sequence
  ENSG00000227398_28 (sequence is synthesized)
aaaagcgcaaatagtgtgatgctaagccaggcagatgtggaggaagaagagggcatttttctcccttttatcagaacaaagagccctcggtggtcttggcaggagacgcttgggaaaaat

SEQ ID NO: 1000740 - DNA, 120 bp, Artificial Sequence
  ENSG00000227398_29 (sequence is synthesized)
gggtacaatctccagggattgaaagtgtatggacctgtaggatgggccacaggttctcaggaaccaccacggctgctgaggtctgagtcatacaggcttccccgggaaggactggcagag

SEQ ID NO: 1000741 - DNA, 120 bp, Artificial Sequence
  ENSG00000227398_30 (sequence is synthesized)
ccccacacagggtggttctgtctgtggatcaatggtaaagcaggatggctctgccctgctgttcttactggtccacaccctgttctccacaccagctcccagaaaagtagctgtcctccc

SEQ ID NO: 1000742 - DNA, 120 bp, Artificial Sequence
  ENSG00000227398_31 (sequence is synthesized)
tgctgaagtgacagtgcttggtgcctttctccgagaagaggcagatctgaggaccgaactggcaggaggatgcccatggctcttcccaaaggtctgaggatagaaaatctgtttcttcct

SEQ ID NO: 1000743 - DNA, 120 bp, Artificial Sequence
  ENSG00000227398_32 (sequence is synthesized)
ctttcctcctccttgcaacgagtatggctcagggaactgagcctcaacccattgaatactgcactgattatccggaagcagaacagagagggttggggtgtgactgcactcatgaagagg

SEQ ID NO: 1000744 - DNA, 120 bp, Artificial Sequence
  ENSG00000227398_33 (sequence is synthesized)
caggaggaagccagggacactggcatcctctgctgcctgactcttgtcctgcgtgtaacagttttctacaatcagctctggcctgtggcctgtgctcacacactcttgctcacaacaacc

SEQ ID NO: 1000745 - DNA, 120 bp, Artificial Sequence
  ENSG00000227398_34 (sequence is synthesized)
tgagaagtgcagagcagggaagggagcccaggcgtcagctccagagcctgtgctcttacccaccactacacagcaccctgggagggctcactaagtgaacctaaatgctcttcccacctt

SEQ ID NO: 1000746 - DNA, 120 bp, Artificial Sequence
  ENSG00000227398_35 (sequence is synthesized)
gcacatacaaacgagtcttgcctgaaaggtgaactggagttttaggtgacctgagtgccagtcggcgggaagaccctagtgaagtgaggggagggggtacaacataaagtaccagagggc

SEQ ID NO: 1000747 - DNA, 120 bp, Artificial Sequence
  ENSG00000227398_36 (sequence is synthesized)
atgggctctggagagctggtccagcttcttgctgccattccactactcattggtggtatggccttggtgagtgacttcccctctctaagcctctgtttcttcatcagtgtaatgaagaca

SEQ ID NO: 1000748 - DNA, 120 bp, Artificial Sequence
  ENSG00000227398_37 (sequence is synthesized)
ttaactcccacctcaccaggttgctgtgaggacgagagatgattcttgtgcggttccaaaccagccccagcccgggccccacagacttgctagtattggcagcagtgacgtccattgtgc

SEQ ID NO: 1000749 - DNA, 120 bp, Artificial Sequence
  ENSG00000227398_38 (sequence is synthesized)
caacccagtagctgagacaccagggggaaagtgggaacagtgcacatcctcccatgcacccaccgaggagggccagctgctgaggaggcagagcggcaaggtcactcacctgagtggctc

SEQ ID NO: 1000750 - DNA, 120 bp, Artificial Sequence
  ENSG00000227398_39 (sequence is synthesized)
tttgaatgtcttcttggacttggctttcttcccaggtttggtagagaaaggggcgactccgagtccaaagttttgtccttcaggctcacccactaggtggccatcaacatccacaagccc

SEQ ID NO: 1000751 - DNA, 120 bp, Artificial Sequence
  ENSG00000227398_40 (sequence is synthesized)
cgcctacatagagaggccagccaaaggtctgtgagttagattaagggcttggaccccttggggacccacatgtatatggcccaaggctcagggtggacatgttcaccatacacaccaagg

SEQ ID NO: 1000752 - DNA, 120 bp, Artificial Sequence
  ENSG00000227398_41 (sequence is synthesized)
tttgacagctgctgatgccagcctcaggctgtcccctgtagagcggtccctgaccactctgccaaatgtccactttccacatgcaccccctcaccagtatggcacctcattccatactct

SEQ ID NO: 1000753 - DNA, 120 bp, Artificial Sequence
  ENSG00000227398_42 (sequence is synthesized)
ggggatcttaaagcttatttccaacctaattccaggaaatcgtctttaatattattatccatgtctctaccttatggaaattatttttaattcaaaagtggtttactcttaacacaggtc

SEQ ID NO: 1000754 - DNA, 120 bp, Artificial Sequence
  ENSG00000227398_43 (sequence is synthesized)
acctgtgttcattctggtgttacctttatctgttgcaatcctagctctggtttaatgcattaatacttgctggctctgcaaaggtctgaggatgggaaatctgaggtgagtgctgtcggc

SEQ ID NO: 1000755 - DNA, 120 bp, Artificial Sequence
  ENSG00000227398_44 (sequence is synthesized)
aagtagcaactatgcttaccttctggatagcagaaatggctgcaaagtcattcctgtcaatgagggtgtacttcctgcgcaaagtggactccacttcctgttcctgttggcttgggagac

SEQ ID NO: 1000756 - DNA, 120 bp, Artificial Sequence
  ENSG00000227398_45 (sequence is synthesized)
agcaagagagaacagcttgtacctggggccatgctgaatccactggggcaagaaccaagtactggggttaaaagtcatatgggtgaggccccttgtgtggggccacaccttcatcatgaa

SEQ ID NO: 1000757 - DNA, 120 bp, Artificial Sequence
  ENSG00000227398_46 (sequence is synthesized)
ccagaccagacaaaaggacaaaggactcacttccccctgccccattgcatatacccactgtccgacccccatacccacaagggctaccttatgtcatgtgtgtctgctccaagatgacac

SEQ ID NO: 1000758 - DNA, 120 bp, Artificial Sequence
  ENSG00000227398_47 (sequence is synthesized)
ttgataaggaccgtaagcttcacttgggaccatgtggggttctgtcttaggttctgtctctaagaggccacttggaatcacatgaccagctttagtgacaccacctagcataagctgctc

SEQ ID NO: 1000759 - DNA, 120 bp, Artificial Sequence
  ENSG00000227398_48 (sequence is synthesized)
agactatgggtatgtttgcacccaaataaaccacaaatgcctcctgaggtgggagtgtgtgttgcaatattcacaaggtgaatattcacaatgccctgctctgggcactctcagagctgg

SEQ ID NO: 1000760 - DNA, 120 bp, Artificial Sequence
  ENSG00000227398_49 (sequence is synthesized)
cactccataaacacctcctgtccaattaatgaactcactgaatatccaccagggacccaggcatgcccccaaggactctgatttggctcttcatccacaagcaagaagaggagctcttgg

SEQ ID NO: 1000761 - DNA, 120 bp, Artificial Sequence
  ENSG00000227398_50 (sequence is synthesized)
aggcaagtgcccagatggcaggagatgaaaatggcagcctgatgtaggaatgaggtaggggtgggggtctctcacctcagaaccacccggaactggttgaacacctccttgatctgtcta

SEQ ID NO: 1000762 - DNA, 120 bp, Artificial Sequence
  ENSG00000227398_51 (sequence is synthesized)
aggctgattatctggagggaagacagcaaggcagaggttagaccaagggcacctcgagggaccagggggcatctatgttagtagagaaatcaagaccccttggctgacccctggaccatc

SEQ ID NO: 1000763 - DNA, 120 bp, Artificial Sequence
  ENSG00000227398_52 (sequence is synthesized)
tgtctcgagaagaggacgtgtgcacacagcctctcagcgaagtggcagccaagccctcctccagagcagagaaacacctgattaataattttaaaactaagtatttgctgaggctataaa

SEQ ID NO: 1000764 - DNA, 120 bp, Artificial Sequence
  ENSG00000227398_53 (sequence is synthesized)
aaccaccttttcgaagtggagacctctataaaatgaaatgattctataccttgaaaataccttctaaaggttttttttttttttttaataaaatgtacttctcagctttctcttacttcc

SEQ ID NO: 1000765 - DNA, 120 bp, Artificial Sequence
  ENSG00000254224_0 (sequence is synthesized)
aagaagagagaaaacggagcaagctgcagcaaaaataaacggtgaagcgcgacgatgccggccaagaagacccccagttacttaccggcctgcttaccagccattttgaccagaaagaga

SEQ ID NO: 1000766 - DNA, 120 bp, Artificial Sequence
  ENSG00000254224_1 (sequence is synthesized)
tgtatacagcactaaagctgatgaatgatctatcttacactagccaaagtgaagtctgaaagatgtgaagaaatgcagtacatttgtacattggcacattgccctgcagaggactggcaa

SEQ ID NO: 1000767 - DNA, 120 bp, Artificial Sequence
  ENSG00000254224_2 (sequence is synthesized)
cactccagaaatgatggagacaggatacatcaacctgtatcactgaagatgatgtggagcagagcctttgtggtcctaagaaacatgtataagataaaaacttttgtggtttttcaatca

SEQ ID NO: 1000768 - DNA, 120 bp, Artificial Sequence
  ENSG00000254224_3 (sequence is synthesized)
ttgttcactgggttattcataaaggcaaaatgaggttgtgagccacagaaagagaggacaggatggttccatggtgtccccagcttattttttattgtttcctgtttattgatctcatcc

SEQ ID NO: 1000769 - DNA, 120 bp, Artificial Sequence
  ENSG00000254224_4 (sequence is synthesized)
attggagaactccatgaaagcacatatctatgccacactcaccactgtattatagaactcaaatgtcggttgcatgaataaaatatgtaacaggaaggccactatacctggccctgacca

SEQ ID NO: 1000770 - DNA, 120 bp, Artificial Sequence
  ENSG00000254224_5 (sequence is synthesized)
aacactttctcccaattctgaattccgctgggtcgttctgcttagtgtagtatctactaagtctgggacatcccagataatttcttcatgcatgtctggtgctcagttggcatgtctgaa

SEQ ID NO: 1000771 - DNA, 120 bp, Artificial Sequence
  ENSG00000254224_6 (sequence is synthesized)
aaagctgggtttggccagacatctttctgtccacctagtttctccagcagagtaaccagacctctctacacagtagcttagggtgccaagagcaaatgttccaagagggcaagccctgat

SEQ ID NO: 1000772 - DNA, 120 bp, Artificial Sequence
  ENSG00000254224_7 (sequence is synthesized)
gtgcaaatccttaagcctctgcttgacaaatgtcctctgggccaaatcacatcggcccagagtcagtgtgggagaggactaactacacaagagtgcaaataccaggtatggttcatgggg

SEQ ID NO: 1000773 - DNA, 120 bp, Artificial Sequence
  ENSG00000254224_8 (sequence is synthesized)
gcccccagtgttaacagtctacccaatctggtgatcataaggcagacaactgaagtcatgatgcttcgttttacaaataaaaaagcaaaggctcagaaatgaaatcacttgcccaggata

SEQ ID NO: 1000774 - DNA, 120 bp, Artificial Sequence
  ENSG00000254224_9 (sequence is synthesized)
acacatgttgtaaatggaaaacaaatatttgtttactggtaataagtcaaaggctagttaagcctttcactatatctcattgcccctaatctttaaactccactttccttttccttattc

SEQ ID NO: 1000775 - DNA, 120 bp, Artificial Sequence
  ENSG00000254224_10 (sequence is synthesized)
ttagccaactgtgaatatctgtgttcaagaagttaacaatgtagataatccaaaatgaagtgtgttttgtagcattatctgagcagtagatattagatgactaatgtagtatgctctgga

SEQ ID NO: 1000776 - DNA, 120 bp, Artificial Sequence
  ENSG00000254227_0 (sequence is synthesized)
tcttcttgcagttcctgtaagaaggcagaagtatttgcagaggggagaatgtggaagaaatagagaataattatctcttaccaaatgtaatggcttttgttgtgttttttcttttctaat

SEQ ID NO: 1000777 - DNA, 120 bp, Artificial Sequence
  ENSG00000254226_0 (sequence is synthesized)
catcaggaaaataatagaagttaacgcagatatggggctgccactgaggagagagaagactgaaagaagcatatagataaaagattatctgagtaggctgaaccatcggtgaaaaggagg

SEQ ID NO: 1000778 - DNA, 120 bp, Artificial Sequence
  ENSG00000254226_1 (sequence is synthesized)
acagaagcgtgaaaaactcttgtgtgactgggatagctcctctgcaatgagaacatgcctgggataatgtactgaaaagatgtgagaaatacatgaagcagagtccagtcatcccagcca

SEQ ID NO: 1000779 - DNA, 120 bp, Artificial Sequence
  ENSG00000254226_2 (sequence is synthesized)
agaaccagctgtgaatgtaaccgcatgactttgaggcaagtccagaccaagaacaaagaaccactggtcttaaagacagacctgcagattcctgagctaaataaaagtttattgttgaaa

SEQ ID NO: 1000780 - DNA, 120 bp, Artificial Sequence
  ENSG00000254226_3 (sequence is synthesized)
accccatgactggtatagaactgaaagtaaatcaagctggacttatgaaggattcctctctccattcgtggatgaatttgagtggcactggaacaagtttcagttacctgaggtcaacct

SEQ ID NO: 1000781 - DNA, 120 bp, Artificial Sequence
  ENSG00000254226_4 (sequence is synthesized)
tctttttacccagcaaagtgcctcctccaaggtccgcgaaccattgagggtttttggggggtttcagggctgggagtagagagagcatgagtgaagattggaccactcccaggactagac

SEQ ID NO: 1000782 - DNA, 120 bp, Artificial Sequence
  ENSG00000254226_5 (sequence is synthesized)
cagagaataggagattgctgcttactgactattatattcctactactcgacctctagtaggtggtaggtatatagtacttgagtattaatttaatatctgactgttattgataagaacag

SEQ ID NO: 1000783 - DNA, 120 bp, Artificial Sequence
  ENSG00000254226_6 (sequence is synthesized)
tcctgaatattagtatattgctttacaattcttaaagtggctttccgtgattcccaaacagcacccatctcttgagcagagacccaagagggcaggacaggaagaatggaagtgagattt

SEQ ID NO: 1000784 - DNA, 120 bp, Artificial Sequence
  ENSG00000254226_7 (sequence is synthesized)
ggaccagatgcatcaggatcttctggtaagtgtgctaaaatataggctactgagacccaccctatgtctgtcaaatcagaatattctaaggaagcaggtcccagggaatatatattttaa

SEQ ID NO: 1000785 - DNA, 120 bp, Artificial Sequence
  ENSG00000254226_8 (sequence is synthesized)
agctccctaaatacacttcatgggctgccagatttgggaatcgcaggattaggtagctacctaaatgaagacacttaaatgtgccaaaagcttctctttcacccatccatttatccatct

SEQ ID NO: 1000786 - DNA, 120 bp, Artificial Sequence
  ENSG00000254226_9 (sequence is synthesized)
attcacccatccatcaaccaaacatgtgccagtatctggtatttgcttcatgacctgctactgctgtggtgggtgcaaagataaatgatcaatgttctcaaagagtcaatagtctaagag

SEQ ID NO: 1000787 - DNA, 120 bp, Artificial Sequence
  ENSG00000254226_10 (sequence is synthesized)
aatggatgaatgaagtataaataataaaagatgtgctatgaagtacgataggggtccagaaaagtatatacttattccagattgtggcagaagactctggagaggtttcgttttatataa

SEQ ID NO: 1000788 - DNA, 120 bp, Artificial Sequence
  ENSG00000254226_11 (sequence is synthesized)
tggcatgaattccccttcagatccatctctaaatcaagcttcacctacttctgactgtttgtgttagataccaatcctatggatttctatagttttctggaattactttttacacactac

SEQ ID NO: 1000789 - DNA, 120 bp, Artificial Sequence
  ENSG00000254226_12 (sequence is synthesized)
agtagagttatgtggctgcttccatgttttacttagaagctgagagcttgataaaagtgaaggctgcatcttaatcatcaccttttcccccacctcctagctagggtctggctctgccta

SEQ ID NO: 1000790 - DNA, 120 bp, Artificial Sequence
  ENSG00000254226_13 (sequence is synthesized)
agcagctgccattggtgctcaataaacattgaagaagttgggttgttgcactggttatgcaaagaaagggacacagtgggtgtaagcgtggggcggggagcaaagctgggaccaatcatg

SEQ ID NO: 1000791 - DNA, 120 bp, Artificial Sequence
  ENSG00000254226_14 (sequence is synthesized)
gaacacctagaatttgaatcaaatttgggctttagtttttaggcaatgagcctaagacaattttggaagcatcctttgttcacaaaaaagttagaaatggtgagaactagggcagtctat

SEQ ID NO: 1000792 - DNA, 120 bp, Artificial Sequence
  ENSG00000254226_15 (sequence is synthesized)
cacaaagtgtgggagaggtaattttatatgtaaactattataaatcacatttgagttatgaagtgagacaattattccctttgcagtttcatttcattctgtctaattatttcagggaga

SEQ ID NO: 1000793 - DNA, 120 bp, Artificial Sequence
  ENSG00000254226_16 (sequence is synthesized)
cattctgaattgggtgctagtattttaacacttctctaacactttctctttttaaattttgtttatttttaattgacaaataataattgtgtatatttatggggtacattgggcatggag

SEQ ID NO: 1000794 - DNA, 120 bp, Artificial Sequence
  ENSG00000254226_17 (sequence is synthesized)
cttgacctgtgtgtacattgtaacacttctctaatactttctaatccagccatccccaacctttttggcaccaggaaccagttttgtggaagacgatttttccacagatggttgggggat

SEQ ID NO: 1000795 - DNA, 120 bp, Artificial Sequence
  ENSG00000254226_18 (sequence is synthesized)
ttagattctcataagaagcatgcaacgtagatccctcacatatacagttcacaatagggttcatggttctatgagaatctaatgctgccactgatctaacaggaggcagagctcagctga

SEQ ID NO: 1000796 - DNA, 120 bp, Artificial Sequence
  ENSG00000254226_19 (sequence is synthesized)
aatgctgccactgatctaacaggaggcagagctcagctgataatgctttttcacctgctactgacttcctgctgtgttgcccagttcctaacaggccatagactggtaccagtccatagc

SEQ ID NO: 1000797 - DNA, 120 bp, Artificial Sequence
  ENSG00000254226_20 (sequence is synthesized)
ctggggcttgaggacccctgctctatgatgtctatacaacaataaaattgcctaatgatacatttctcagaatgtatacccatcattaagtgacacatggctgcttgtgtatttttatat

SEQ ID NO: 1000798 - DNA, 120 bp, Artificial Sequence
  ENSG00000254226_21 (sequence is synthesized)
atagctaaatgtggctagattagatgtgatatctctttggatgcagggataggtgggcaagtttctaaaacacgaaactaactgtgtcttttctctgcttaagaaccttccatgactccc

SEQ ID NO: 1000799 - DNA, 120 bp, Artificial Sequence
  ENSG00000254226_22 (sequence is synthesized)
tgttgttcataaccggataaattctaagctgcctaactcagaattctagcttagagatgtctacgcctggctgctcccaacagttagtctcatgtcctgtctcaaacatggggcttcagt

SEQ ID NO: 1000800 - DNA, 120 bp, Artificial Sequence
  ENSG00000254226_23 (sequence is synthesized)
aagaatgaaatttccaaggagaattttatattctgcatgcctttaaaggctcaagcctggagaccccccttcttgcctctcttacccttttcaccagggcaccctctattcatccttcca

SEQ ID NO: 1000801 - DNA, 120 bp, Artificial Sequence
  ENSG00000254226_24 (sequence is synthesized)
gagccttctctgggaagtcctttcccaaagcccacttcccagcctaagcttagtgctatttctgtagatacccagaaacacatcaactatatgtacagtttaccctagtatgtcaaagtt

SEQ ID NO: 1000802 - DNA, 120 bp, Artificial Sequence
  ENSG00000254226_25 (sequence is synthesized)
atagttactgccttaggagggattttgagcttttcatctttattactcgggcttctgctactgtgtcaagcaggtagttgacactcaacaaatgtttgtttagcctaactcagcagaaca

SEQ ID NO: 1000803 - DNA, 120 bp, Artificial Sequence
  ENSG00000254226_26 (sequence is synthesized)
catggagtgtgttcacatggagtaacctgattttgcttagtctgcaacatttcttgcatgcatcccctgcttgcagtctcaattacagtcatcctgtttcagttttcttaacttgtcact

SEQ ID NO: 1000804 - DNA, 120 bp, Artificial Sequence
  ENSG00000254226_27 (sequence is synthesized)
cccttcctctgataacttttgccatacctctgtataacatggcctactttttgaaaaagatttttttacattcacctacatttgtctcaaatttttttttaaaagaaactttgtattact

SEQ ID NO: 1000805 - DNA, 120 bp, Artificial Sequence
  ENSG00000254226_28 (sequence is synthesized)
accgtcattgaaaaccttcatcacttggcacaaaagaaagtttaaaaaatacaacaaaagacattctactaaattctggctagacaaccttgcctgctctagtagatgcactgagaccat

SEQ ID NO: 1000806 - DNA, 120 bp, Artificial Sequence
  ENSG00000254226_29 (sequence is synthesized)
taatgaatctttcatcccaccttgtgtcatattctttgccacatgactttgggtctccctcactactaggcaagttcctgtctccatctcttgattctgaattcagccataatacttgct

SEQ ID NO: 1000807 - DNA, 120 bp, Artificial Sequence
  ENSG00000254226_30 (sequence is synthesized)
agacatgtggaagcccttgccactggcactctcttgtactctgaaacaacccatttctctcagctcagacaccaggctgctggagaattggagaaccaaaatagactgaacgtctagtca

SEQ ID NO: 1000808 - DNA, 120 bp, Artificial Sequence
  ENSG00000254226_31 (sequence is synthesized)
ccctcctagaattccccatctgctctgacaaagttctggggacacccaaggtgaaacccacccagcagaacattgagaacatgaccgagatttagctggactttggttcctaaccacagt

SEQ ID NO: 1000809 - DNA, 120 bp, Artificial Sequence
  ENSG00000254226_32 (sequence is synthesized)
ggctcattcacagaaaaaggccctaagacaatgtctctagtcagctttgtcttcaacacattcctaaggtttaagattgggatgtgttagagacgaaggtttggttcgtatctgacttcc

SEQ ID NO: 1000810 - DNA, 120 bp, Artificial Sequence
  ENSG00000254226_33 (sequence is synthesized)
ggtgctgcagaccattgattgctgctgaaatgtagcagccaaaccttttagagccacgctagccatctgatgtaaagcaaaaagctggagacctttgacaattctgcttggaaacaattt

SEQ ID NO: 1000811 - DNA, 120 bp, Artificial Sequence
  ENSG00000254226_34 (sequence is synthesized)
ttatatattaatgatcatagcagcagctaatattagtttggcttttagggaatcagtagatggtacctacatctttctctaagtccaaagccaatgaagagacagatataagaatcagaa

SEQ ID NO: 1000812 - DNA, 120 bp, Artificial Sequence
  ENSG00000254226_35 (sequence is synthesized)
caatcgatatcaaaatatcaggtccattattgatgaatatgaggttggaggatttggcttagggatgaggcaacaaggcatatgttaatactgtgcctaagaggttttcagcccttcttt

SEQ ID NO: 1000813 - DNA, 120 bp, Artificial Sequence
  ENSG00000254226_36 (sequence is synthesized)
gttcctgcacgtcaaaatgggatgagtgaggagtaggtattttccacagtcttattgactgagttcttactagttgccagatactgtgcagacagcatccatgtagactatccagtttaa

SEQ ID NO: 1000814 - DNA, 120 bp, Artificial Sequence
  ENSG00000254226_37 (sequence is synthesized)
ttctcttttccacctcataaggaaagtgctagtattatcttcatcttactgataaggaaacagaggcccagaaagacccacaactttactaaggtgacacagctagtacgcgtcaagatg

SEQ ID NO: 1000815 - DNA, 120 bp, Artificial Sequence
  ENSG00000254226_38 (sequence is synthesized)
ggatccagaccaaagtcggtccgaggccacaacagatcttggaagcaacaggctgcagagcctcccctgccttactgcacagcgttgctgggtgctatgaggagataaaggaacatgacg

SEQ ID NO: 1000816 - DNA, 120 bp, Artificial Sequence
  ENSG00000254226_39 (sequence is synthesized)
ttctggatcagaaggcttgggctatagcccaggctctgccattttttagcctccacaactacagtgcccttgcctgcaaaatagggatgataatgcctttcttgagaagctcagggagtt

SEQ ID NO: 1000817 - DNA, 76 bp, Artificial Sequence
  ENSG00000254226_40 (sequence is synthesized)
aacttgctcctcatatctgagtaggctgaaccatcggtgaaaaggaggccaagcatctcaaaaataggacacgtga

SEQ ID NO: 1000818 - DNA, 120 bp, Artificial Sequence
  ENSG00000254226_41 (sequence is synthesized)
gctagaatgcactgtctttgaagcattgagcaggccctcaccagacaccaaatctgctggttcctggatcttggacttcccagcctcataactaggcatcacaaatctccgagaggaacg

SEQ ID NO: 1000819 - DNA, 120 bp, Artificial Sequence
  ENSG00000254226_42 (sequence is synthesized)
catccacttcctggcctggtagagcggagagcagaggtgggcccaggagtccaagaacttcccctaaggctgctagtcgcacccatctcttgagcagagacccaagagggcaggacagga

SEQ ID NO: 1000820 - DNA, 120 bp, Artificial Sequence
  ENSG00000254220_0 (sequence is synthesized)
tgctcagctcctggggctgctaatgctttgggttcctggatccagtggagatattgtgatgacccagactccaccctccctgcccgtcaaccctggagagccggcctccatctcctgcag

SEQ ID NO: 1000821 - DNA, 120 bp, Artificial Sequence
  ENSG00000254220_1 (sequence is synthesized)
tagtcaaagcctcctgcatagtaatggatatacctatttgcattggtacccgcagaagccagggcaatctccacagctcctgatttatagggtttccagtcgtttttctggggtcccaga

SEQ ID NO: 1000822 - DNA, 120 bp, Artificial Sequence
  ENSG00000254220_2 (sequence is synthesized)
caggtttagtggcagtgggtcaggcagtgatttcacactgaaaatcagctgggtggaggctgaggatgttggggtttattactgcatgcaagctacacagtttcctaacacagtggtaca

SEQ ID NO: 1000823 - DNA, 120 bp, Artificial Sequence
  ENSG00000260505_0 (sequence is synthesized)
attgtgtatttccaggaatttatatattttctctagattctagcatgtgtgtatagaggtatttctagtagtctctgaggatctttgtatttctgtgggatcagctgtaatgtcaccttt

SEQ ID NO: 1000824 - DNA, 120 bp, Artificial Sequence
  ENSG00000260505_1 (sequence is synthesized)
tgtgcttatttggatcttctctctttttttcttttttaatctagctagtagtttatcaatcttttttttcctttcagaaaactaacttttgatttcattgattctttgtatggattttgg

SEQ ID NO: 1000825 - DNA, 120 bp, Artificial Sequence
  ENSG00000260505_2 (sequence is synthesized)
tatggattttggggtttcaattttgttcatttctgctctgattttagttatttattttattctgctagctttggggttagtttgttcttctttagtttctttaggtgtgatgttaaatca

SEQ ID NO: 1000826 - DNA, 84 bp, Artificial Sequence
  ENSG00000260505_3 (sequence is synthesized)
tttgttcttctttagtttctttaggtgtgatgttaaatcattaatttgaaatcttctaactttctgaggtcagcatttagcact

SEQ ID NO: 1000827 - DNA, 120 bp, Artificial Sequence
  ENSG00000260505_4 (sequence is synthesized)
atttcaaataatttttttattcctgcctcaatattattgtttacccaaaagtcatttgagaggaagttgtttgatatccatgcaattgtgtagttttgagagatcttcttggtattgatt

SEQ ID NO: 1000828 - DNA, 120 bp, Artificial Sequence
  ENSG00000260505_5 (sequence is synthesized)
tttttattccactgtagtccaagaataaggctgatttggttttgatttttttgaatttattgagacttgttttgtggctgagcatgtggttgatattggaatatattccatgttcagatg

SEQ ID NO: 1000829 - DNA, 120 bp, Artificial Sequence
  ENSG00000260505_6 (sequence is synthesized)
agagaaacatgcattttgtagttgatgaatagaataatctgtagatgtctatcagcttcagctgataaagagttgaatttaaatccggaatttctttgttagttttctgccttgatgata

SEQ ID NO: 1000830 - DNA, 120 bp, Artificial Sequence
  ENSG00000260505_7 (sequence is synthesized)
tatctaacactttcagtggggtgttgaagtcccctagtattattgtatggctgtgtaagtctttttttatgtctagaattattttttttatgaatctgtgtgctcaaatattgggtgcac

SEQ ID NO: 1000831 - DNA, 120 bp, Artificial Sequence
  ENSG00000260505_8 (sequence is synthesized)
atatatttaggatagttaagtcttcctgttaaattgaatcctttatcattatgcaatgcccttctttgtccccccccccccccccacattttttggtactgttttttgttttaaaatctg

SEQ ID NO: 1000832 - DNA, 120 bp, Artificial Sequence
  ENSG00000260505_9 (sequence is synthesized)
ttttatctgatataagaatagtaatacctgatcttttttgttttctgtttgcacaatagatctttctccaattctttactttgagccaatgggtgtccattacatatgagatgagtctct

SEQ ID NO: 1000833 - DNA, 120 bp, Artificial Sequence
  ENSG00000260505_10 (sequence is synthesized)
tgaagacagcagattaatgagtttgtttgttttttttttcaatccagcttgccactctgtgccttttaagtggggcatttagaccatttatattcaaggttaatattggcatgtgaggtt

SEQ ID NO: 1000834 - DNA, 120 bp, Artificial Sequence
  ENSG00000260505_11 (sequence is synthesized)
ttgatcctattatgaagttgttggctggttgtgttttagtttctattgtgtgattagcttacaggatttgtaggctatgaacataagtgtgtttttgtagtagcaggtatcgttctttca

SEQ ID NO: 1000835 - DNA, 120 bp, Artificial Sequence
  ENSG00000260505_12 (sequence is synthesized)
tgtaaggctgccctagtggtaacaaatttccttagcccttccttgtctggcaaaaattttattttccctctgtttatgaagtttagtttggtgggatatgaaattcttgtttggaacttc

SEQ ID NO: 1000836 - DNA, 120 bp, Artificial Sequence
  ENSG00000260505_13 (sequence is synthesized)
ttttctttgagaatgctgaaaataggtccccaatctcttctgcttgtaaggtttctgctgagatgtccacagtttacctgatggagtttcctttgtatgtgatctgacctttttgtctag

SEQ ID NO: 1000837 - DNA, 120 bp, Artificial Sequence
  ENSG00000260505_14 (sequence is synthesized)
ctgcatttaagattttttctttagcgttgaccttagacaggctggtgaatgtataccttggcgatatttgctttgcaccgtgtcttgcaggtgttctctggatttcttgtgtctggatgt

SEQ ID NO: 1000838 - DNA, 120 bp, Artificial Sequence
  ENSG00000260505_15 (sequence is synthesized)
ctacctctctaacaagattagggaaattttcttgaattattccctcaaatatgttttcccatttgtttactttttctcctcctctctaaggaatgccaataattcataggtttggtcact

SEQ ID NO: 1000839 - DNA, 120 bp, Artificial Sequence
  ENSG00000260505_16 (sequence is synthesized)
ttacataatcctgtatttctggtagactttgttcattgtttaaaattctttttgcttcatttttgtctgactggaatagttcaaaaaccaagttttcagatctgaaattctttcttctgc

SEQ ID NO: 1000840 - DNA, 120 bp, Artificial Sequence
  ENSG00000260505_17 (sequence is synthesized)
ttggttcagtctattggtaaaactttcaactgtattttgaaattccttaaatgagtatttcaattccagaagctctgattgatttctttttaagatgtttatctcttccttcatttcctg

SEQ ID NO: 1000841 - DNA, 120 bp, Artificial Sequence
  ENSG00000260505_18 (sequence is synthesized)
aattgctttagaagtttctttgtggtgtcttggatctcattgagcttccttgaaatccatgctttgaattctttatcttttatttccatcatcactacttaggagccatctcaggtacta

SEQ ID NO: 1000842 - DNA, 120 bp, Artificial Sequence
  ENSG00000260505_19 (sequence is synthesized)
tttcttcagcttatttgtctggtcagcatgtctacttgcaggggcttcccagcagttctaaacaatagagaccatttcctttgaaaatcagcactttattaatgtgctgtgcttgtgtca

SEQ ID NO: 1000843 - DNA, 120 bp, Artificial Sequence
  ENSG00000260505_20 (sequence is synthesized)
gaagaaaaaggaaacttttttatgacagggagagaaaagtaaagtttgcgggaaaagaaaataccaaaagtcaagatgctgaaactagaacctcatctgcatcagggccacacatcacag

SEQ ID NO: 1000844 - DNA, 120 bp, Artificial Sequence
  ENSG00000260505_21 (sequence is synthesized)
cttcctctagtttggttccatgtcctggtgttcattagatcacagaacctcagagtaggatgagctattgaagatttctcaatgttgcacccttccctctcacaccctgatgacctggta

SEQ ID NO: 1000845 - DNA, 120 bp, Artificial Sequence
  ENSG00000260505_22 (sequence is synthesized)
aatatttctaatcccctcacttttctcttacatcgtatggcaggaagcagagtgatgtagtagaaagactatgggctttggaatcaaattgatctgggattgaattccatttctgctatt

SEQ ID NO: 1000846 - DNA, 120 bp, Artificial Sequence
  ENSG00000260505_23 (sequence is synthesized)
ctgaactctataatattgggcaagttgcccatttctgtctcagtttctttattaggaaaataaagatagtaatagctacattttagggcttttgtcaagaataaatggcaaaattaccaa

SEQ ID NO: 1000847 - DNA, 120 bp, Artificial Sequence
  ENSG00000260504_0 (sequence is synthesized)
agccaaggaggtgggtctcatacgaagaccatgaggaccccgggcccagcgtgatgggacggtgggcctggcacccagtcccaaaagccttgcttccttcctttctcctggataacccac

SEQ ID NO: 1000848 - DNA, 120 bp, Artificial Sequence
  ENSG00000260504_1 (sequence is synthesized)
tcttgggcaagtgacttcacctccctgggcctcagtctccatttgtgaatggggccataattcccacctctcaggggtgtggggagagtcggtgacataatgacccaggtcaacagggtc

SEQ ID NO: 1000849 - DNA, 120 bp, Artificial Sequence
  ENSG00000260504_2 (sequence is synthesized)
aagttcaaactcagcgtgtgaaccggctggcacctgcttagctttctagccccacatcctctcactcttgggtgccccctttccctggccatgcccacctgcttggaggtccttgaactt

SEQ ID NO: 1000850 - DNA, 120 bp, Artificial Sequence
  ENSG00000260509_0 (sequence is synthesized)
gtttaaaaacagtaaaaccatttctgtcattttttagttcttctatcgtagcatctgtactgacataatccgcactttagggtgatgaatgtcaattgctacttctatctagcctcctgc

SEQ ID NO: 1000851 - DNA, 120 bp, Artificial Sequence
  ENSG00000260509_1 (sequence is synthesized)
caaaattgatgctcagaatcgcagaatcggggaggtccctcctgagcatctctaagctccccactcagaaaaggaggcggcttcgggctttcgttggctgccgccccatccctaagaagg

SEQ ID NO: 1000852 - DNA, 120 bp, Artificial Sequence
  ENSG00000260509_2 (sequence is synthesized)
aaggggagcgtgtctgcttcctgaaggttcggaaatcaatcgaaaataatccatgcaaccgtcccacgacgtgagccccacccctgcgccccaggcctcgcggagccagttggtcgcagt

SEQ ID NO: 1000853 - DNA, 120 bp, Artificial Sequence
  ENSG00000260509_3 (sequence is synthesized)
tgttgcgagcccgacgcccagccccgaagggggcccagaagagcgtcccaggcgtccgtggggtggccggctgtggtcctggcgcccagaagtggccaggcccgctggatttcctgggat

SEQ ID NO: 1000854 - DNA, 120 bp, Artificial Sequence
  ENSG00000260509_4 (sequence is synthesized)
gcggtcaagtccacaaatactgtccgtgcatcctgatgctggagggcgggaccttgggccgagcgagtgtggctccgccagaagggccctcggacacaaccggtgctggaggaactacaa

SEQ ID NO: 1000855 - DNA, 120 bp, Artificial Sequence
  ENSG00000260509_5 (sequence is synthesized)
gcgaagcatcaggaaaggcttcctggtggtggtgcattcgagggttgtcatcatagtgttagtttttatttttccctcagggattgttacattactcccccaaatggttttcctactcgt

SEQ ID NO: 1000856 - DNA, 120 bp, Artificial Sequence
  ENSG00000260509_6 (sequence is synthesized)
gatctctaacaaaatccatcccataagcaacccccggatttatgatctaaaaagcccagtggctctttagtttggcacttgatgacctccgtatgattagtctttctaacctcatctcac

SEQ ID NO: 1000857 - DNA, 120 bp, Artificial Sequence
  ENSG00000260509_7 (sequence is synthesized)
agttctccctaattcagtactttaatcttccgttgagcttgggcattgccaccagctgtggactgaactatttccctcctcccccaatccatatgttaaagccctaccccaccccaatat

SEQ ID NO: 1000858 - DNA, 120 bp, Artificial Sequence
  ENSG00000260509_8 (sequence is synthesized)
gttggtatttggagatggagcctttgggaggtaattcaatttagatgaggtcaccttggtgggtcgcccatggcgagattagtgcccttatgagaaaaaacaacgaagagcttgttctcc

SEQ ID NO: 1000859 - DNA, 120 bp, Artificial Sequence
  ENSG00000260509_9 (sequence is synthesized)
tctgtgtgccatgtgaggacagagcaagaaggggctttcacctggaacccaaactgccccatctttatctgggacttagcctccagaattgagagaagtaaatgtctgttgttatagcca

SEQ ID NO: 1000860 - DNA, 120 bp, Artificial Sequence
  ENSG00000251619_0 (sequence is synthesized)
gcctccagctgagaaagcaaagccaactcacagttccttggctgtcccgcggagcctgcggtggcaaaccacctccttcagaagggtctgtggattctcctggcttttctgtccttgccg

SEQ ID NO: 1000861 - DNA, 120 bp, Artificial Sequence
  ENSG00000251619_1 (sequence is synthesized)
gcttcagacatgcgctgcattcagggcagggacttttcttggacagagaagctgagaagtatcagataaagatgacctgcatgtactggaaaataatctgtggtttatatgtaggcggat

SEQ ID NO: 1000862 - DNA, 120 bp, Artificial Sequence
  ENSG00000251619_2 (sequence is synthesized)
ggaagcaaaccagggtaatatacatttagaggcagagggctctcacaatatcctcttcaaaaaacattaggatgaaaacagttgcagaacatttctagtaaaatatatcattaaaactta

SEQ ID NO: 1000863 - DNA, 120 bp, Artificial Sequence
  ENSG00000216895_0 (sequence is synthesized)
caacgtagaggaccctgcaatgtggagaggcatgaaactggaggtccagtgccgtgagttaacaatcaagacgtccatacaggagatgcattggtggatgggtgaagagatgataaaacg

SEQ ID NO: 1000864 - DNA, 120 bp, Artificial Sequence
  ENSG00000216895_1 (sequence is synthesized)
agcccgtctcccgttaggagccggggaggcaaggtccagcgtacggtccgggggaaccttaactgtcgtttctgtgcctggacagtaggttggagagtggggtctgaatgagctacagta

SEQ ID NO: 1000865 - DNA, 120 bp, Artificial Sequence
  ENSG00000216895_2 (sequence is synthesized)
cctcctctcgtgccagggcttggaatcttgagcagactggctcaaggatgaagaacaattggggtcctgtgcttctcccacctggagctgccccgccctgtgcttcccaagtgtggttct

SEQ ID NO: 1000866 - DNA, 77 bp, Artificial Sequence
  ENSG00000216895_3 (sequence is synthesized)
acaaaaaaattattcaactgtgagaactcactccccaaaaaaaatgttttgcaagcaactcattgaaaaatggtctc

SEQ ID NO: 1000867 - DNA, 120 bp, Artificial Sequence
  ENSG00000216895_4 (sequence is synthesized)
aatctcataagccacttgaaactgaatttctctagaacaagagtctataaaattttttgatcaaacacccactggaaaaattttttagcgtggacacccagtatttgaagttcttggtaa

SEQ ID NO: 1000868 - DNA, 120 bp, Artificial Sequence
  ENSG00000216895_5 (sequence is synthesized)
attactgtgagtaaagatttaaccaaccccttgtccttatctatgaacaaacttcactttgtgttaactttaacttgtcatagaaaccttatgaaggcagagtgttcattgtggtataaa

SEQ ID NO: 1000869 - DNA, 120 bp, Artificial Sequence
  ENSG00000216895_6 (sequence is synthesized)
gacaagagtgaaactccatctccaaataaataaataaaacattgctcatggtaaaaatgacctctgacatgtagactgcctctggcttgaaagtactgaataatcttaaaacacctagtg

SEQ ID NO: 1000870 - DNA, 120 bp, Artificial Sequence
  ENSG00000216895_7 (sequence is synthesized)
ggaagccatacctttagcctctgttactgtcttaactgaatgtgggaatctaaaagacaaactcagggaactggtttcccgccggtcaaggacttccaagccaagcccccacccataatg

SEQ ID NO: 1000871 - DNA, 120 bp, Artificial Sequence
  ENSG00000216895_8 (sequence is synthesized)
gtttgctcctgaattgcatttgggccaaagagtagagctcttccatgcctgtaccgcagtgaagtgtgtttcttctcctcagtcctccaaagtggagctgctgccaggcgtggcattata

SEQ ID NO: 1000872 - DNA, 120 bp, Artificial Sequence
  ENSG00000216895_9 (sequence is synthesized)
tgagtgtcaggggttaaacctaagaagactacctagtgagcgctgcagtttcatacatatcctactgaaaatcttaaaagcaagctttgcttttttgtaaataaagcgaatatagaagtc

SEQ ID NO: 1000873 - DNA, 120 bp, Artificial Sequence
  ENSG00000248266_0 (sequence is synthesized)
ggccccgggaggcggcggacgcggggacatcttctcagcgcgcggattctctccacggtccggcctccccgtccccgccccgccctcgcgccagccacctccggccgccggctcagatct

SEQ ID NO: 1000874 - DNA, 120 bp, Artificial Sequence
  ENSG00000248266_1 (sequence is synthesized)
gacggtaccttcttaaggatttctggtgtggctctgacatataagcaactcagataactacagaaaactgtgtgtaaaaatcagcccaccagtatttgaaacaagtatgcactgttcttt

SEQ ID NO: 1000875 - DNA, 120 bp, Artificial Sequence
  ENSG00000206344_0 (sequence is synthesized)
atttctctactcacctgtctccgaatccgtcgtggtgtttcaagcgagtcaagattccagatcgcgccccaggctggactcggaattactgccccgcgggtctgcattttcacagcggca

SEQ ID NO: 1000876 - DNA, 120 bp, Artificial Sequence
  ENSG00000206344_1 (sequence is synthesized)
ggtggcttgtggtccctgacaaggaggaccctgagggcaaccacaccttgccatgcagagcacctggcttctcatctgccaagctcactctgacccggctgcaggaagggaaggagccaa

SEQ ID NO: 1000877 - DNA, 120 bp, Artificial Sequence
  ENSG00000206344_2 (sequence is synthesized)
ccccggactcaagactcaaggggaccagaaccagggagatgagacataccagggctgggcagctgtgggggtccttccagagaggagctgagatacgcctacctggaggggcccctgggc

SEQ ID NO: 1000878 - DNA, 120 bp, Artificial Sequence
  ENSG00000206344_3 (sequence is synthesized)
ctggaggggctcctcagtgtgactgggtgaagtgttttcagaggaccagggttgaggttgggggcatctcatccagaccctgccggcatctgccccagaacccaagggcccctccttcct

SEQ ID NO: 1000879 - DNA, 120 bp, Artificial Sequence
  ENSG00000206344_4 (sequence is synthesized)
ccctcctcaatggaaatgctggagatgtcctcagtcaccctctgagcactcacacatcaccccttatttggaaatttttctcactctaaccttccttcctgccgcaccttctgccccatc

SEQ ID NO: 1000880 - DNA, 120 bp, Artificial Sequence
  ENSG00000206344_5 (sequence is synthesized)
cccaggctctggcctctctctctcctcttctaccctttagcaggtaatgactcagttcccactgaggagccagctgtaggtgagagtttgggctctcggtgaggttgggagaaggaaaag

SEQ ID NO: 1000881 - DNA, 120 bp, Artificial Sequence
  ENSG00000206344_6 (sequence is synthesized)
gcttatgggccagggggtgggagggagaatgggcacagccagagcagagtggaagggttgggggaggcgataaagacagatgtttccgtattaccatttttctttcatggtccgagggag

SEQ ID NO: 1000882 - DNA, 120 bp, Artificial Sequence
  ENSG00000206344_7 (sequence is synthesized)
ggaacagtaaaatactccacaggaaagaaaaatcttagtgatccctcctgctgtctctttccttttgcctattctggcaaattttgtaagtgaaatttgttaccaagatgtgaaaatctt

SEQ ID NO: 1000883 - DNA, 120 bp, Artificial Sequence
  ENSG00000206344_8 (sequence is synthesized)
ataagaaagtctctaaatatttgagaataaaattatcaatgtctcagctctgcaggctgaaaaaacggaggctttacaaaataaaatcatgcttggaaaacttctcctctgagggatgtc

SEQ ID NO: 1000884 - DNA, 120 bp, Artificial Sequence
  ENSG00000206344_9 (sequence is synthesized)
aaaggctgcactgaataagctctaaggtggtgctgaaatgagtcatttatttgcctgtgtaagctcaggcaggtgttggaattgaggaagtataggtaatgaaaaaagtaaacatgtcct

SEQ ID NO: 1000885 - DNA, 120 bp, Artificial Sequence
  ENSG00000206344_10 (sequence is synthesized)
cgggacatagcgactggtgatgaccacacaatcaacacaataaactctagcattcacattgtagtccagctcattcaagcaaagctatctccaatagggagtttaccctgtacagaacac

SEQ ID NO: 1000886 - DNA, 120 bp, Artificial Sequence
  ENSG00000206344_11 (sequence is synthesized)
gtgcatttccacctgttctcagactgaccctttgctcatcacaatagtgaaaaaaaacacagccctgggtggagatttaagatgctaatgagtcatgagatgtatgaacaagcatgtaca

SEQ ID NO: 1000887 - DNA, 120 bp, Artificial Sequence
  ENSG00000206344_12 (sequence is synthesized)
gctactgcacacgtgcacccagaagaccgcccagaacatgcttgctagtaacacctcttcccacccacctcctgtgaataatcatgtaagactcccataaagggagtttctccagcagtg

SEQ ID NO: 1000888 - DNA, 120 bp, Artificial Sequence
  ENSG00000206344_13 (sequence is synthesized)
atcaatgctgtctcatccttaggagcagcccaccctgaatcctctcagggtgtacagtttattttgcacttaactttcaaaataatatttttcctttgtaataaattgctttgtacttca

SEQ ID NO: 1000889 - DNA, 120 bp, Artificial Sequence
  ENSG00000206344_14 (sequence is synthesized)
agtggcgcctaaagtctgcaaggaggaggtcgcctctgtgctgtgggtccaggaatctaaggcatcttctttattctggaatgagcctgcccatccctcaggaagactgaaaggaattcg

SEQ ID NO: 1000890 - DNA, 120 bp, Artificial Sequence
  ENSG00000206344_15 (sequence is synthesized)
gtcagaagaatattattgacttttatccagacttgatttcagtagagttctgggacctgccatatcctatgggtgagctctatccaggtccccttccctgaattacctgtcctctcccca

SEQ ID NO: 1000891 - DNA, 120 bp, Artificial Sequence
  ENSG00000206344_16 (sequence is synthesized)
ctgactgggatgacacctaattttacaacctgctgtagcatctttgctcccactgtgacagtaaactccttgagactggtggccatcttgggaagtgattagattcagaagaggttgaga

SEQ ID NO: 1000892 - DNA, 120 bp, Artificial Sequence
  ENSG00000206344_17 (sequence is synthesized)
gcaggaagagggccctcaccaggaactgaatctgctggttccctaacctcagatttccagggtccagaattgtgagaaagaaatgtctgttgttaaccaatccatctgtggtgttttgtt

SEQ ID NO: 1000893 - DNA, 120 bp, Artificial Sequence
  ENSG00000206344_18 (sequence is synthesized)
atggcagcacaagctgactaaacaagtgccaaaaccaaaccagtaactcccactttctagtctcggacccagtattaaggaattctggtcacatagtttattcatccatttaacaaatat

SEQ ID NO: 1000894 - DNA, 120 bp, Artificial Sequence
  ENSG00000206344_19 (sequence is synthesized)
ttagtaagtgcttctgtgccaggcatttttctaggcctggtgatcatttaatcaaaagagactaacacctgctccctgatgcttacaatctgaaagacaataaagaaaaatatagtaaca

SEQ ID NO: 1000895 - DNA, 120 bp, Artificial Sequence
  ENSG00000258733_0 (sequence is synthesized)
ctattcatctaattcttcttccttgagaaagaactgtatttgacccagcattttgaaaagttgtaccaatatttgtatacagctttcatattttttttttctctaataggtgcttttttt

SEQ ID NO: 1000896 - DNA, 120 bp, Artificial Sequence
  ENSG00000258733_1 (sequence is synthesized)
tctgaagctttggtagtgtaactgtaagagtcctggaattggaaaagcaaatccagaagttgagttccatgacttttttgctgtttgcctttggaatttttactgaacactacaatgact

SEQ ID NO: 1000897 - DNA, 120 bp, Artificial Sequence
  ENSG00000258733_2 (sequence is synthesized)
agatgacatctctaagcctgaaagccagaaggaatgttgggaatatattgtttagaggataactttgcagaaaggtcagcaaacatgcaagctacaacatgagaagaaatctgttccaga

SEQ ID NO: 1000898 - DNA, 120 bp, Artificial Sequence
  ENSG00000258733_3 (sequence is synthesized)
gctcagagtgggtgggaaggacaaagtgggagctgccagggcagaagggaaggctggtgaatagtctataatggagattctggctacaattaaatcacttgaagacatttttattaacat

SEQ ID NO: 1000899 - DNA, 120 bp, Artificial Sequence
  ENSG00000258733_4 (sequence is synthesized)
gcagccgcacactctttgggtccgcccgtttctctaatcaagttgtaacactcgctgctgtggtccacagcttcattccttgaagcccgtgagacacgaacgcttccattgagaaaaacc

SEQ ID NO: 1000900 - DNA, 120 bp, Artificial Sequence
  ENSG00000258733_5 (sequence is synthesized)
ttccatcagaagaagacttctcgtctcagtgggactgctgagttgaatggccctatacatcaaaaggtgaagctgggtcatgaaggtcatgaaggccctcagtgtgcagcctctgtaaac

SEQ ID NO: 1000901 - DNA, 120 bp, Artificial Sequence
  ENSG00000258733_6 (sequence is synthesized)
ctgctaaaactattctatggtgcttttttttctgaagctttggtagtgtaactgtaagagtcctggaattggaaaagcaaatccagaagttgagttccatgacttttttgctgtttgcct

SEQ ID NO: 1000902 - DNA, 120 bp, Artificial Sequence
  ENSG00000258733_7 (sequence is synthesized)
ttggacttgcatcatttatatttttaattcatcgaggatgagaaaattgattaacacaaaatcttttcatgtcttttctgatgagagactagctgaatccaagaagagaagcccttgaag

SEQ ID NO: 1000903 - DNA, 120 bp, Artificial Sequence
  ENSG00000258733_8 (sequence is synthesized)
agtgtattctattctagacaagcattcacacattggcttctttggtgccagcatgtttctgatcagcatgaaaactgcgcaggagcttttctgtcttgcagagctagttaatgagattgt

SEQ ID NO: 1000904 - DNA, 120 bp, Artificial Sequence
  ENSG00000258733_9 (sequence is synthesized)
tgagacatccaggggggaagagttccctggcaaaactccaatctgcctgagcactgaggtggagccacagaagtccgggtcatttgcacctgggaggagcctggcccctcctcttcctgt

SEQ ID NO: 1000905 - DNA, 120 bp, Artificial Sequence
  ENSG00000258733_10 (sequence is synthesized)
atttaatctgtgaggagggaaggccaagggcaggaagcacaggctctcacttcactaagagtctctgtttcccctttttttcctttatgcctaattaataaatcccatttttctcactct

SEQ ID NO: 1000906 - DNA, 84 bp, Artificial Sequence
  ENSG00000258733_11 (sequence is synthesized)
tcctttatgcctaattaataaatcccatttttctcactcttcaaatagtcttcaagcctaaattttcatgaccatggaacaagg

SEQ ID NO: 1000907 - DNA, 120 bp, Artificial Sequence
  ENSG00000258733_12 (sequence is synthesized)
ttcttaatcttaaaagaaatatatttcaatggttaacgttttagtaattcaaaaattatcaagcatttgttcacaaccataagatgtgcattgttttatattcctacttaataatagact

SEQ ID NO: 1000908 - DNA, 120 bp, Artificial Sequence
  ENSG00000258733_13 (sequence is synthesized)
ataattgtctaattagactgccgatgttgatctttgtggctcattgcattgattataagcagtgttttgggtttgtgtgtgtgtgtcaaatttagggtttttttggtatggctgctggtt

SEQ ID NO: 1000909 - DNA, 120 bp, Artificial Sequence
  ENSG00000258733_14 (sequence is synthesized)
tgcttctttttataaggaaactaatccaataatgaaggatccattttcataacctaataacctccctaaaaccctatctaaaaataccatcacattggagattacggtttcaacatatgg

SEQ ID NO: 1000910 - DNA, 120 bp, Artificial Sequence
  ENSG00000258733_15 (sequence is synthesized)
attttgaggggaacccaaacatttagtccacagcaatagtatcagaagacatagatcactgattttaagatgggcacataccaattaaaaatatttgaactctgggagcccataccctaa

SEQ ID NO: 1000911 - DNA, 120 bp, Artificial Sequence
  ENSG00000258733_16 (sequence is synthesized)
tacagaatccacatcttaggacagcacacctgacatcagaaagatcacactatgccctaggactatacagtcttcctttatctatatgcatgctgtatgtcagaaaagagttttcatttg

SEQ ID NO: 1000912 - DNA, 120 bp, Artificial Sequence
  ENSG00000258733_17 (sequence is synthesized)
attcaagatatggagactaaaaatatgtatcaaagagttttctcacacttccatgaaaacctcattataaacatctatgaagtcttgctcttttatccacggggatactgcttgaggata

SEQ ID NO: 1000913 - DNA, 120 bp, Artificial Sequence
  ENSG00000258733_18 (sequence is synthesized)
aatccccggagcttctagctgtgaactgcgggattctggttgctgatgccagccacgcggagtagtccctacatttggaatcccagcttgaataaactctctgtgaaagacttggagggc

SEQ ID NO: 1000914 - DNA, 120 bp, Artificial Sequence
  ENSG00000258733_19 (sequence is synthesized)
cttgagtctgcaaggtgcttttttttctgaagctttggtagtgtaactgtaagagtcctggaattggaaaagcaaatccagaagttgagttccatgacttttttgctgtttgcctttggg

SEQ ID NO: 1000915 - DNA, 120 bp, Artificial Sequence
  ENSG00000258733_20 (sequence is synthesized)
taagtctacgatatccagtttctgcatctctcaattttgttataaagactaaataaggtagtatacatgtacacatgtacagctagactgtaaatcactattcaagtatgtgttgttttc

SEQ ID NO: 1000916 - DNA, 120 bp, Artificial Sequence
  ENSG00000258733_21 (sequence is synthesized)
atactcagttttctcatccctactgcatacatttgtggtgttattttaataaaagaatgaacctcttaagtttctagccaaatgtttggtaatataatagtcaatacatgttaatcttcc

SEQ ID NO: 1000917 - DNA, 120 bp, Artificial Sequence
  ENSG00000258733_22 (sequence is synthesized)
gcattcacacattggcttctttggtgccagatcctggtcacagattttggtgtggatgtggtaaaaagggagcacttttacactgctggtgggaaggtaaattagtacaaccacaatgga

SEQ ID NO: 1000918 - DNA, 120 bp, Artificial Sequence
  ENSG00000258733_23 (sequence is synthesized)
gagtatatacccagaggaaaacaagttattatatgagaaagataagcacatgcatgtttataacagcacaagttgcaattgcaaaaatatggaaccagcctaattgcccctcggtgaaca

SEQ ID NO: 1000919 - DNA, 120 bp, Artificial Sequence
  ENSG00000258733_24 (sequence is synthesized)
agtggataaagaaaatgtggtatatctgcacaatggaatactactcaaccaaaaaagaaaaaaaaaatgacatttacagcaacctggatggaggttgaagacaattattctatgtgaagt

SEQ ID NO: 1000920 - DNA, 120 bp, Artificial Sequence
  ENSG00000258733_25 (sequence is synthesized)
aacctggatggaggttgaagacaattattctatgtgaagtaactcattgatgcaaaaccaaatattgtaggttttcccttataagtggggcctaagctatgaggacacaaaggcataaga

SEQ ID NO: 1000921 - DNA, 120 bp, Artificial Sequence
  ENSG00000258733_26 (sequence is synthesized)
agggaagtgagggataaaagactacacgctgggtacaatgtacactgctcaagtgacgggttcaccaaaatcttagaaatcgccactgaagagcttttccatgtaaccaaaagccacctg

SEQ ID NO: 1000922 - DNA, 120 bp, Artificial Sequence
  ENSG00000258733_27 (sequence is synthesized)
atggtatcagtgaattgccttttcatttattatcttgtttctcaagtgggatataagtgtcatggggaggatctgaaaatggactccatagaaagagactctgagatgaaagacacaaaa

SEQ ID NO: 1000923 - DNA, 83 bp, Artificial Sequence
  ENSG00000258733_28 (sequence is synthesized)
tgcactccagcctcggtgatagagcgagactatagcaaagctatgtatggtttctctgagttttgtaatttatcattgttaac

SEQ ID NO: 1000924 - DNA, 120 bp, Artificial Sequence
  ENSG00000258733_29 (sequence is synthesized)
tgtatggtttctctgagttttgtaatttatcattgttaactgcagaaatttattatatgagacatattatatgagacatataagtgaatttggattgggtttaattttatatttttgaat

SEQ ID NO: 1000925 - DNA, 120 bp, Artificial Sequence
  ENSG00000258733_30 (sequence is synthesized)
atagttcttcaagataaattttatcttagacctcaagaaataaaaataaaataaattagatatacaaacgaacacaaatgtatgcagtcctagcctaatttaagacattaacttggataa

SEQ ID NO: 1000926 - DNA, 120 bp, Artificial Sequence
  ENSG00000258733_31 (sequence is synthesized)
gtcaaaggtatatgttgcaattcctggagtaaccactaaaaataatacaatactattatatctagaaatctaatagagtaattaaaaagttttattaatccccaaaaaggcagaaaagtt

SEQ ID NO: 1000927 - DNA, 120 bp, Artificial Sequence
  ENSG00000258733_32 (sequence is synthesized)
ttctcgtctcagtgggactgctgagttgaatgagacgaggtttcaccatgttacccaagctgatctcgaactcctgggttcatgcgatccacctgactcagcctcacaaagtggtaggac

SEQ ID NO: 1000928 - DNA, 120 bp, Artificial Sequence
  ENSG00000258733_33 (sequence is synthesized)
gtgtattctattctagacaagcattcacacattggcttctttggtgccaggtaattagaatttgtaatttggtcttaattaaactgcagactacccaaaggccttgatcagtggcctttt

SEQ ID NO: 1000929 - DNA, 120 bp, Artificial Sequence
  ENSG00000258733_34 (sequence is synthesized)
atatatttatattggctataaaaatatgcccattgatttctcctcatctccccaaacatatacaaccccaccagatatatatttatattgggtataatgtcaacatatatcaaatgtgcc

SEQ ID NO: 1000930 - DNA, 120 bp, Artificial Sequence
  ENSG00000258733_35 (sequence is synthesized)
aattaaacacagagctcctctaaactaccaagcatgttattattattattttaatttttaaaacatttctaacttaacagaaacattggccgggcagcactaattgtatcattcctatgt

SEQ ID NO: 1000931 - DNA, 120 bp, Artificial Sequence
  ENSG00000258733_36 (sequence is synthesized)
actaccaacttctcaccagtattgaacttgatcttcaaaactcttcccagatagggctatttttccactgactctattgttattccttcccattttccctcctctgtttttgatgctttt

SEQ ID NO: 1000932 - DNA, 120 bp, Artificial Sequence
  ENSG00000258733_37 (sequence is synthesized)
tattttggttagcatgtttctgatcagcatgaaaactgcgcaggagcttttctgtcttgcagagctagttaatgagattgttgctgccttcagattctataaaggacttctccaatattg

SEQ ID NO: 1000933 - DNA, 120 bp, Artificial Sequence
  ENSG00000258733_38 (sequence is synthesized)
ggtgagattaaagtcaaaatcaagagaatttatatttcagttgaatctatgtaagtctgttaaaaaagtaatgggctcagggtcaaacatcagtaattgaccctcactctacagattatt

SEQ ID NO: 1000934 - DNA, 120 bp, Artificial Sequence
  ENSG00000258733_39 (sequence is synthesized)
aattgtatgactgtatttctcagtatcctcatctataaaaccaggttagcaaaaactgccttcctacttcaaaaggcacaaataaaaactaaactaaaagccatacaaaacaaagtggat

SEQ ID NO: 1000935 - DNA, 120 bp, Artificial Sequence
  ENSG00000258733_40 (sequence is synthesized)
tgatttcacacatattggctcattaaattcttcgtattatcaagagttgcttaatacatttgagaacacaaaacaatggccttttctgtgccttttttaggtggtaattattctttagta

SEQ ID NO: 1000936 - DNA, 120 bp, Artificial Sequence
  ENSG00000258733_41 (sequence is synthesized)
aagtcgggttgttttaattgaaaatgaatttaggtttttaatcaggattagcacaagtcgatgtgttctcagttgttgaaagttaaactagtattgctatatttcaatgattgctagaat

SEQ ID NO: 1000937 - DNA, 120 bp, Artificial Sequence
  ENSG00000258733_42 (sequence is synthesized)
attgctatatttcaatgattgctagaataaagaaataaaaaaaaaatagacatgttgagtaaagctttatgagttatataaatgcataattatatttgcataggtaaacaatacattttt

SEQ ID NO: 1000938 - DNA, 120 bp, Artificial Sequence
  ENSG00000258733_43 (sequence is synthesized)
tgtatccagtatcctgtattaattctaatatttgcattttgaacatatttacaagttgctaaaatagcaaagcttcgagatgagcctggctgatatggcaaaaccccgtctctactaaaa

SEQ ID NO: 1000939 - DNA, 120 bp, Artificial Sequence
  ENSG00000258731_0 (sequence is synthesized)
ggaagcccgggctgcaccggcgccgcgcgcggggttcccccctgcccctctggctgggagggcagggtggtgtcaggtcgcccgccgctcttgggcctcctcggctcccttcctccttcc

SEQ ID NO: 1000940 - DNA, 120 bp, Artificial Sequence
  ENSG00000258731_1 (sequence is synthesized)
cttcctccttccttgcggtcttcatgcacagctgcctcggtcccccgcttctggaattcacagcccagatgtggataggctttaccccactcatccttacaatgtgggtcatgagcccag

SEQ ID NO: 1000941 - DNA, 120 bp, Artificial Sequence
  ENSG00000258731_2 (sequence is synthesized)
agccttaagctacgtgttaggagggccccaggatgtaggattcagcattgctctttttgaccttaggccctactgcggcctcgcctggacgttttgtcacctggccctggtgcctccaga

SEQ ID NO: 1000942 - DNA, 120 bp, Artificial Sequence
  ENSG00000258731_3 (sequence is synthesized)
cagaaccaggacgcatagatcatcttctcaggtaatatgatcctgaccagagggagatgggttggggcatctattctagtccccacctgccagaataggtgtcaggtggctcctcaccac

SEQ ID NO: 1000943 - DNA, 120 bp, Artificial Sequence
  ENSG00000258731_4 (sequence is synthesized)
aaataagtgtgattgattcagacttctggcattactgggccatgctgccgcaagaaacaggtgcatgtggaatcaagcctgacggagttattggtgtgcagaaaaaaaaaaaggattact

SEQ ID NO: 1000944 - DNA, 120 bp, Artificial Sequence
  ENSG00000258731_5 (sequence is synthesized)
acttatctggtttttaaagatgagagtgttttatctgatgccctgaccaaatgaaacaacaacctagactgaagcagggaacattcgctggacatttcaggcactgtgctaggctctaca

SEQ ID NO: 1000945 - DNA, 120 bp, Artificial Sequence
  ENSG00000258731_6 (sequence is synthesized)
gtgaagcattcacagtctagtggtgtctataaataaaaccaaaatgctaacttttaaattcctatgaggaatataattgtaatgccactatagctgcatcactaccatggggtcattctc

SEQ ID NO: 1000946 - DNA, 120 bp, Artificial Sequence
  ENSG00000258731_7 (sequence is synthesized)
tccctacagacagatcaataaacaaaatcaaattacaatccaaaggaagcaaggtgggcagaaataacgtagggattcatgatgaataaagtcattaatccttccatttattcattcaac

SEQ ID NO: 1000947 - DNA, 120 bp, Artificial Sequence
  ENSG00000258730_0 (sequence is synthesized)
gactcagtgcatcaaaggctggagaaagaatcaccctagaactgagtgccacaggcttcggaagctgcacaagactgcaacacggtgacagcttctatttctaacagcaaacctaaaaag

SEQ ID NO: 1000948 - DNA, 120 bp, Artificial Sequence
  ENSG00000258730_1 (sequence is synthesized)
ctcaggaaccaaaataaaacggatagaaatgaaaccactcagagtatgacgacagtactcaaagcaactcacgagcatttccccacgctgtcttccaaaatgtgaaaaatgtgatttttt

SEQ ID NO: 1000949 - DNA, 120 bp, Artificial Sequence
  ENSG00000258730_2 (sequence is synthesized)
tttaatggccacattggagaactgctatgagcagacctcatttatataacccttcccagcacctcatgtatcatcattattaaaaaacactatggggatcatgctttcacataactttgt

SEQ ID NO: 1000950 - DNA, 120 bp, Artificial Sequence
  ENSG00000258730_3 (sequence is synthesized)
cttatttgttatctacatagcctaagcaaatagtaaatgatggagaatgaaaataattgtcaatgtttagggggaaaaaaatacctgcatttcaaattttttaaaaaaaccataaaatct

SEQ ID NO: 1000951 - DNA, 120 bp, Artificial Sequence
  ENSG00000258730_4 (sequence is synthesized)
atcttttaaaaaaggaaggagtaagctggaatccacaattgttagaaacccaaaagtgatacagaggggaggcaaaaaaaaaaaaaaaatactatattctccacactgaaacaatgtatc

SEQ ID NO: 1000952 - DNA, 120 bp, Artificial Sequence
  ENSG00000258730_5 (sequence is synthesized)
tttctcaacagcccagtttcatctgtagctgtattttccccactgaaatgccaccattaatcataacaacagatgagtaaaaatcaattaatattccttcagcatctcttaggtgtcttc

SEQ ID NO: 1000953 - DNA, 120 bp, Artificial Sequence
  ENSG00000258730_6 (sequence is synthesized)
aatcctgtgcgctgtcatccctttaaagaggaaggaaaagatccacagccaggaaacagactcagaaactcaaacccaggtctctggaccccacagggaagtgaggcacagccaagagca

SEQ ID NO: 1000954 - DNA, 120 bp, Artificial Sequence
  ENSG00000258730_7 (sequence is synthesized)
atctgtgtccattactggcctcaaatgaccacatggaaacactgtgtgcagagccagccccccaagcccgtggcggtcctccttggagatgatggggtctggggagaggtcagagtcagg

SEQ ID NO: 1000955 - DNA, 120 bp, Artificial Sequence
  ENSG00000258730_8 (sequence is synthesized)
ctcacgtgaacttcagaaagccactgcccaggatatgggtggaccgcaagtctaccatgggctgtcccagctccaaagacgtcagaaccccacagcgattgttattcccaaagcccttta

SEQ ID NO: 1000956 - DNA, 120 bp, Artificial Sequence
  ENSG00000258730_9 (sequence is synthesized)
cgcttggctccacagcacacggcagagaaaatcgacagaaggaaggatgttcacaggtgtccacccctacctatgccccagtgacctggaaataaaatccatcaagagcaccggggtcag

SEQ ID NO: 1000957 - DNA, 120 bp, Artificial Sequence
  ENSG00000258730_10 (sequence is synthesized)
ccagctggggtacgctggagagtatgggtggcagagggaaccccgctgtggattgatcatttgacactgtgttcagcataccttttaaaaaaatgttggtaccatgtaaaaatataacct

SEQ ID NO: 1000958 - DNA, 120 bp, Artificial Sequence
  ENSG00000258730_11 (sequence is synthesized)
aaataacaagtacatttttaatgctgagatggagaatttagcacctataatccttccagagatgcacaccacgcaaccacgtgagtcccctctggctctgaattccgagagcagctacca

SEQ ID NO: 1000959 - DNA, 120 bp, Artificial Sequence
  ENSG00000258730_12 (sequence is synthesized)
acacaggcctccgctgcctgcactcagcacacctatcggaaagcgccagtgctggcatgggctttccctccctggcggctgctcctcctgcacccccatgcccaggcactccggccagaa

SEQ ID NO: 1000960 - DNA, 120 bp, Artificial Sequence
  ENSG00000258730_13 (sequence is synthesized)
acaagggaggagtctggggactgatcctccccctctcacctcccacatctacccaggtaccacaccctgccatctgtctcctgctgccctctgtcactgcaggagcccctggagagcaca

SEQ ID NO: 1000961 - DNA, 120 bp, Artificial Sequence
  ENSG00000258730_14 (sequence is synthesized)
tcacccctcactaggctgcagccacagcccctctcagaaaaccctgctgtctgctttccagtgcagccctgtctaatcaccctccatgtatcctccccatggctcttcccccatagcctc

SEQ ID NO: 1000962 - DNA, 120 bp, Artificial Sequence
  ENSG00000258730_15 (sequence is synthesized)
aggttggagcacccagctttcgcctgcagaagcccctccatgcccccgacacagcaccccatgaacaactcacctggcaccgctactctctccagcctggtctctcactagccccctcaa

SEQ ID NO: 1000963 - DNA, 120 bp, Artificial Sequence
  ENSG00000258730_16 (sequence is synthesized)
gcctggggctgtagcctttccaagccattggcagccaaaggacccccttccccagctgctgtgtgtggccctggccatgctccttgtctgtaaggccattctaacacctcgcctcctgcc

SEQ ID NO: 1000964 - DNA, 120 bp, Artificial Sequence
  ENSG00000258730_17 (sequence is synthesized)
agcccctacgcccagtttattccatgtcaggaggtatggcctccatcccctgatggcccactcctccttacatgcccagccttgcgtcctcaccactcccccacagctcagacaggcctg

SEQ ID NO: 1000965 - DNA, 120 bp, Artificial Sequence
  ENSG00000258730_18 (sequence is synthesized)
ccctgcccctgggcttgggcatccccacggtttccctgccagtgggcatccccacagttccttcgcctccagaggcccagcacccagttctgcctcggccccaggcacatggaccttccc

SEQ ID NO: 1000966 - DNA, 120 bp, Artificial Sequence
  ENSG00000258730_19 (sequence is synthesized)
tcagacttgccttttcttggtggtttgatggtcacccacccaacctccttccctgaaagtctggtgcaggaaggggtaaaaacacatatacaaaggtcaccagcaagccagccagcacca

SEQ ID NO: 1000967 - DNA, 120 bp, Artificial Sequence
  ENSG00000258730_20 (sequence is synthesized)
gctctggagaaaacacggacagaaagacgtatgcccaccattcactcattcgcaagccgggagaacttacttacttccttgcctgcttgagaaacagccgccgcaccagagactgggttt

SEQ ID NO: 1000968 - DNA, 120 bp, Artificial Sequence
  ENSG00000258730_21 (sequence is synthesized)
catagtgtctgaattctcaaggaatgtggatggaggacagtgaatctctaactggctgctgcacttctcacacttacagcttgctcattcgcactttaaagtcaaacctcgagtcccctc

SEQ ID NO: 1000969 - DNA, 120 bp, Artificial Sequence
  ENSG00000258730_22 (sequence is synthesized)
atgccagcagtcaccttctccccgatcttttacagtaactggggaaaggcagcccagagaacaggccagggcagaggtcaggctgcaaaacatgcttccctaaggacgtccaggctggag

SEQ ID NO: 1000970 - DNA, 120 bp, Artificial Sequence
  ENSG00000258730_23 (sequence is synthesized)
ggggcccggcagcaggtgggtctttctttcagggtcttcctccaccaaattcaggactattccagaaagaggcagtgagtccctggatggggaaaccgctcctcctgagccttccccaca

SEQ ID NO: 1000971 - DNA, 120 bp, Artificial Sequence
  ENSG00000258730_24 (sequence is synthesized)
gattggatcggagtggaaggtgcccccaggtgacagcacctagcaaggctgatgcaggccttctgcctggcccacaggagagccccagccccactccccagatcacagacgaccaaggct

SEQ ID NO: 1000972 - DNA, 120 bp, Artificial Sequence
  ENSG00000258730_25 (sequence is synthesized)
cctgtgtacgggggaagtaatcatagtgccgtgcttggcacttggtcattttagcaactaggtgttttagaaggaagcacaaggacctaggaactgggttgagctctgtcaggccttgcc

SEQ ID NO: 1000973 - DNA, 120 bp, Artificial Sequence
  ENSG00000258730_26 (sequence is synthesized)
tctcagttaggatctgttgggtagatgggctcattgccactaaccagactcgtcttccagggagccttcctgatttaccaggctgcgtgagggccctcctctgtgcctgtctggtgtccc

SEQ ID NO: 1000974 - DNA, 120 bp, Artificial Sequence
  ENSG00000258730_27 (sequence is synthesized)
tgcctaccttggccactgtctgcagacatcacagagagttgaaggggcctggcttgggcctgtgtgagcccccagcacctggggcctatccatagcaagtgtcggggaaactgctgcatg

SEQ ID NO: 1000975 - DNA, 120 bp, Artificial Sequence
  ENSG00000258730_28 (sequence is synthesized)
ttactgcgtcccatctgcacggcctggctatgaggggccctcagctcagcactcagtgagaccaactcaacactgaaatggtggagtcagggtggcccgtgcgtccagcattcccattac

SEQ ID NO: 1000976 - DNA, 120 bp, Artificial Sequence
  ENSG00000258730_29 (sequence is synthesized)
catactacagagcacggggctgaggaaacaggcacttgccaccatcaccatcatgacaagtagcctctcaagacaggaggtagagagcatctggtcccacgacccttactacactcttcc

SEQ ID NO: 1000977 - DNA, 120 bp, Artificial Sequence
  ENSG00000258730_30 (sequence is synthesized)
cttgtcctgcagcccaactccctgctctaaacacaaagtaggacatcctcttcttctgagctacctgggtcctggctcccctgcaacttcctttcctgcctgagcagccctgagcagaca

SEQ ID NO: 1000978 - DNA, 120 bp, Artificial Sequence
  ENSG00000258730_31 (sequence is synthesized)
gtgctgtgtctttcatgatcatcatcacgtggcccaacagaccaggtctgcagacaagtccactgccaagcaagtctcggagcacagttctgggccccagagtcagcccagtccagccca

SEQ ID NO: 1000979 - DNA, 120 bp, Artificial Sequence
  ENSG00000258730_32 (sequence is synthesized)
gccccatcagggcctctggacagcctgagagcaaggcctcgtgctgtccctctccgaggaaggatttgcctcaggcctggttctgagaagtaaacagggtaatgttctgaagcagtggac

SEQ ID NO: 1000980 - DNA, 120 bp, Artificial Sequence
  ENSG00000258730_33 (sequence is synthesized)
ttcaaaccaaacccccacaaaataaatgtttaaaactacatatctatttgcacatttttaagttgatatgaaaaatttctcatcataagtctaaatacttgtagaggatgtaatttccaa

SEQ ID NO: 1000981 - DNA, 120 bp, Artificial Sequence
  ENSG00000258730_34 (sequence is synthesized)
catactgtaaatattaacatttaaaaataaaactgttaatgtttctcttttaaatggatccaatggtatctaaataccacggcgattagagattcgccatcatccatttttaaattacat

SEQ ID NO: 1000982 - DNA, 120 bp, Artificial Sequence
  ENSG00000258730_35 (sequence is synthesized)
aatcaagctcttctttaaccattggaaatttaacagtgttccttttttcctccacaaactctgatctccctcagagatgtttatactatcacagtgtattttatgcttgaaagccttata

SEQ ID NO: 1000983 - DNA, 120 bp, Artificial Sequence
  ENSG00000258730_36 (sequence is synthesized)
ctgattatcctattatatactatagggccaaaaaatacaaaaatcaatgttttaattttttttaatttcctgtgatttcctgtgatcataaagctctgtcagaagttttctcctggactg

SEQ ID NO: 1000984 - DNA, 120 bp, Artificial Sequence
  ENSG00000258730_37 (sequence is synthesized)
aattattataacaattactataagtatacaattgatcaataagacagaaatatattgcaaaattgtataagaaataacctttaaaaataaacttaattaggccaggcgcagtggttcacg

SEQ ID NO: 1000985 - DNA, 120 bp, Artificial Sequence
  ENSG00000258735_0 (sequence is synthesized)
ccctcgctctcagcggcggccaggtccaggccctggtgacacagccttgagcaaaacagtgaggtccctgtcctcacagagtttgtattccggccaggcaagaagacgatagacaagaac

SEQ ID NO: 1000986 - DNA, 120 bp, Artificial Sequence
  ENSG00000258735_1 (sequence is synthesized)
acaaatgctggcctctgtcacaggatcactgtccaggggtaggggtcgccatgcccagaactcagcaagtgttcagctgactgcagcctcatcttcctgcgaggactcagagcggggcag

SEQ ID NO: 1000987 - DNA, 120 bp, Artificial Sequence
  ENSG00000258735_2 (sequence is synthesized)
gcgttctctgaagcccagagaggctttgccacttgcccagggccacagagctacggagcctgtgactggaacccggagccaagtctatggcctccacctggtggccgctgcctccaaaaa

SEQ ID NO: 1000988 - DNA, 120 bp, Artificial Sequence
  ENSG00000258735_3 (sequence is synthesized)
ctcccagctccacaagtcccgccctctgccttggcagggtttgcctggtgtcctacacacactgtactggtctttcagggtctaaacctctctttctcccttccttctggaatctgtctg

SEQ ID NO: 1000989 - DNA, 120 bp, Artificial Sequence
  ENSG00000258735_4 (sequence is synthesized)
gggcccctgtgaggaagaaaaggctgctgggccaggacacttcatccattcattcattcctgacctttcttgcgtcctccgtgctaggcccgaaggagggtaggagtcttggtccctgca

SEQ ID NO: 1000990 - DNA, 120 bp, Artificial Sequence
  ENSG00000258735_5 (sequence is synthesized)
cacagcgagctttccctctggatgttgtgtcaggccacacactttagtcttccgtcttttcttcttcaccaagcatcccaccctaagcgcccgctcactcctgcctttatttcgggtttt

SEQ ID NO: 1000991 - DNA, 120 bp, Artificial Sequence
  ENSG00000258735_6 (sequence is synthesized)
ccctgacattcttctacctaacccactgcttttccccagctctctgcctcttggctgcttccagttcccgccattactcacaacgctgtcacatcagtcagggtcccatagggaaacaga

SEQ ID NO: 1000992 - DNA, 120 bp, Artificial Sequence
  ENSG00000258735_7 (sequence is synthesized)
tggcttcctcaaattagggaaattccaggaaggcgatttacaaagggggatgcttacagaaggaaggggggaccactaggggagggcaggactctgggaccagcattagggggactcttt

SEQ ID NO: 1000993 - DNA, 120 bp, Artificial Sequence
  ENSG00000258735_8 (sequence is synthesized)
aaggaagagaaaggggagctctccagcaaagaagaaagtccagaggaggctggcctggagggcagtggcattggtcagaggcaggcccaaagagggaggggatccattcccgcatcgctc

SEQ ID NO: 1000994 - DNA, 120 bp, Artificial Sequence
  ENSG00000258735_9 (sequence is synthesized)
cctctcctgcctttgacctcccacagggcacctccacatctggctgcagcccatggaggtggccccaaaaggcaaaagcagggtgaaggatggagcatcaatctgggaggacgagagccg

SEQ ID NO: 1000995 - DNA, 120 bp, Artificial Sequence
  ENSG00000258735_10 (sequence is synthesized)
gacacccagcacaggtgtgcaggaaacttctgcacaaacacctttcttctttgtagggggtttctgtagtatgagacatcaagagaattcctgagccagagccttcctggtttgtaagaa

SEQ ID NO: 1000996 - DNA, 120 bp, Artificial Sequence
  ENSG00000258735_11 (sequence is synthesized)
caactgcattttaacagaaccccaaaatacgtatgtcactaccccactgaaggcccttccatagcaccatctatggctgtcatgtaacagccacacctggtggcctcgccggcagtgccc

SEQ ID NO: 1000997 - DNA, 120 bp, Artificial Sequence
  ENSG00000258735_12 (sequence is synthesized)
caactctgctcccagcaagccagactgctgtgttctccacagcccctgtggtccgggctgtggctctccaaggcccctctcttccattctaggtggatctgctgacacgtggtctgtcct

SEQ ID NO: 1000998 - DNA, 120 bp, Artificial Sequence
  ENSG00000258735_13 (sequence is synthesized)
tcaaggcctcctccgatagtgcaaatgtatttccaaataccaccaccttaagggttaggatttcaacacatgaatttggggagagcacattcagtccataacaagcagagcctcatgaat

SEQ ID NO: 1000999 - DNA, 120 bp, Artificial Sequence
  ENSG00000258735_14 (sequence is synthesized)
agcctcatgaatgggattaatgcccttataaaaggggtcttagagagacccctcaccccttctggcatgtgtggacactgtcaaaaggtgctgtcgaccgggtgcggtggctcacgcctg

SEQ ID NO: 1001000 - DNA, 68 bp, Artificial Sequence
  ENSG00000258735_15 (sequence is synthesized)
cgaaggttgcagtgagccaaggtcgtgctgctgcaccccagcctagcgacagagcaagactccatctc

SEQ ID NO: 1001001 - DNA, 120 bp, Artificial Sequence
  ENSG00000258738_0 (sequence is synthesized)
ggaggcagagaaccgcgggcccgggggccacccgtcactttcaagtcgccccgccagaagcccagggcgaggaaaaggagagagacaaaagagcgctgcggggggagtccccacaccccc

SEQ ID NO: 1001002 - DNA, 120 bp, Artificial Sequence
  ENSG00000258738_1 (sequence is synthesized)
cgcggccccgcacacggcccggctcttactcgtagtggcggaagatctcgttggtgactttacagtagaaaacttcctcgtcgggccgcaggtccgcgggcggcttctgtctcacaaacg

SEQ ID NO: 1001003 - DNA, 120 bp, Artificial Sequence
  ENSG00000258738_2 (sequence is synthesized)
gctttcggtgtagcagcggcatctcccgtccgcccgcgggctcgcctggaccctcggccgcccgcgccggccccgcttccctatcaaaattggagggaaaggaaagccggtaaggtgggg

SEQ ID NO: 1001004 - DNA, 120 bp, Artificial Sequence
  ENSG00000258738_3 (sequence is synthesized)
agccctcggcggcagcgtgggccggtccgcgcgctgggagaagctcggctgccttttgtgtgactgacgcgccgcggccgctaccggagccgagttcgttcctgccgctgcccgggtgtc

SEQ ID NO: 1001005 - DNA, 120 bp, Artificial Sequence
  ENSG00000258738_4 (sequence is synthesized)
agttcgttcctgccgctgcccgggtgtcgagcgagcggagccgccgccgcccctgccccccgagcgcgccctacctcctctcgtcctgccgccgcctcacaatggggcaggacgccccgc

SEQ ID NO: 1001006 - DNA, 120 bp, Artificial Sequence
  ENSG00000258738_5 (sequence is synthesized)
gccgccaggctcacaacgtgctcggcgcgcagctggccggccggccagcccaacgccgccagagcgctcgccgcgggcggaccccggagctgctccgctttgttcccggctcgcctccac

SEQ ID NO: 1001007 - DNA, 120 bp, Artificial Sequence
  ENSG00000258738_6 (sequence is synthesized)
cggagctgctccgctttgttcccggctcgcctccacttccccgccggcgccggccggctcccgagcgaccctcacctgcgatcacgccgactgccacttgtccaccttctccactacaaa

SEQ ID NO: 1001008 - DNA, 120 bp, Artificial Sequence
  ENSG00000258738_7 (sequence is synthesized)
ggcaacgaggggagaccccgtcctcccaggggaccgcctctctccggccccgccgcgcccctggctgccgcttctcccgctgccactgcccgactccgcgcggggaattgcgtcccaccg

SEQ ID NO: 1001009 - DNA, 120 bp, Artificial Sequence
  ENSG00000258738_8 (sequence is synthesized)
gagcttttcactcctcgcttctacctttttattggctactcgatgacttttacagcctgtcactgatacaggaagagacagcggagagcctgggagaactacattattaattaatggagc

SEQ ID NO: 1001010 - DNA, 120 bp, Artificial Sequence
  ENSG00000258738_9 (sequence is synthesized)
aacccctcgtgaagattcagaagcatcctccatgtttgagattatcagccaaaagatctagggaaagcgctgggggttcataaacacatggctaacaaagtaaagccttcaagtctggca

SEQ ID NO: 1001011 - DNA, 120 bp, Artificial Sequence
  ENSG00000258738_10 (sequence is synthesized)
cagactcttgactacacgatgggaaaagggattccaattacgatttaacttgtattttaaagatgagaaaagaaatgaataagaaaatttgttgctatttttcttcttccaaattagaat

SEQ ID NO: 1001012 - DNA, 120 bp, Artificial Sequence
  ENSG00000258738_11 (sequence is synthesized)
ctatatctctaaaaatactttgcatgtttagtaaacatccatcttgaacagaagataccttgacatcagttctatttaatacttatggcaattaagagatttagaaagcagaggaaaaga

SEQ ID NO: 1001013 - DNA, 120 bp, Artificial Sequence
  ENSG00000258738_12 (sequence is synthesized)
ccaaaaaaaaagtatgtgttacaaagtgtcatcatgcttgtaggaccccagcattcttgaaactaacgcacctttaaaaagtaatatttacactgctgtaaatatttgcaaagtatcaat

SEQ ID NO: 1001014 - DNA, 120 bp, Artificial Sequence
  ENSG00000258738_13 (sequence is synthesized)
gtttaattcacttagaattttaaggattatggatttactagcgaaaattcccctaaagcaactttcccatatcagtaacttttatttagggaaacaagtttaatgtacataatacatgtg

SEQ ID NO: 1001015 - DNA, 120 bp, Artificial Sequence
  ENSG00000258738_14 (sequence is synthesized)
accttggaattcaatagaattttcgaaactagaagtaactcagaacgttcactagatgtgttttaaagtcttttttgatactgtccttaacatttgcttatttgcaaattaatatgtaag

SEQ ID NO: 1001016 - DNA, 120 bp, Artificial Sequence
  ENSG00000258738_15 (sequence is synthesized)
aatgagtctaaaagtaagttttaggaatggttattcgacaaagatgttattcctattaccaatactgcgaaatgataattacagaaacaatgtgggatccgttttataacttcaaattta

SEQ ID NO: 1001017 - DNA, 120 bp, Artificial Sequence
  ENSG00000258738_16 (sequence is synthesized)
agttcctttgtactttggagcagaaaatgtaagaaatcgaaatcaagagttagtattttttatctttcaggctggctttaactgttcatacacctagcaaaataaacatttgtgaaaggc

SEQ ID NO: 1001018 - DNA, 120 bp, Artificial Sequence
  ENSG00000245080_0 (sequence is synthesized)
gcttcccctcactcctcgggccttgctcttcccccaggtgcccactgccctccctgctgtgtaccactttcttgctgcctgtgaaggtatttgtcctcactcttgtgctgctccttcaat

SEQ ID NO: 1001019 - DNA, 120 bp, Artificial Sequence
  ENSG00000245080_1 (sequence is synthesized)
gatagaactttgggactttctcatccagcagcaccagcctgaaaaagcagtggcttgcaccaccacacacatacctggtctcagatataagctccatgagaacagccaccttgtttacct

SEQ ID NO: 1001020 - DNA, 120 bp, Artificial Sequence
  ENSG00000245080_2 (sequence is synthesized)
tgttcatggatacagaacagtgcctggtgctcaataaatgaacagtgagtgaataagtgagtgttgagtcatctaagtgagcttagatgaactgacaatgagactgtgcacaatgaagag

SEQ ID NO: 1001021 - DNA, 120 bp, Artificial Sequence
  ENSG00000245080_3 (sequence is synthesized)
aaaggaggactcttgaggaattccaccagcttgaagatggctgaagaaagatgacagaaagcaatcagagggatggagggcaaactaagaaagcagagtcaagagtaggaagattgggaa

SEQ ID NO: 1001022 - DNA, 120 bp, Artificial Sequence
  ENSG00000245080_4 (sequence is synthesized)
gtggtagacaacattaggaaatactgcagaaaaacctaaaaggatgagaattaggaaagacactattgaatttggtctttggggctgaaaaaaaaggcagctgcagaaaagaaattggag

SEQ ID NO: 1001023 - DNA, 120 bp, Artificial Sequence
  ENSG00000245080_5 (sequence is synthesized)
tggaaccccatttgcacagaaattatggagtaattaggacaccaggcagaaagtttggcaatgaatggaaggagagatgacagccttgggcattcgctcgcagaacgcaaggacattcat

SEQ ID NO: 1001024 - DNA, 120 bp, Artificial Sequence
  ENSG00000245080_6 (sequence is synthesized)
tcttaattcagtagaaaagtgtcgtgttgttactgtctcaagtggaagcgccctctcactccttcattgtcctaagagaacaaaaggggccttgaatttcatgactgccccagtgatgct

SEQ ID NO: 1001025 - DNA, 120 bp, Artificial Sequence
  ENSG00000245080_7 (sequence is synthesized)
tctgagagcttgagctttggaatcagactgcccacattcaaaccccagttcttcctattgctggctgtgtgatttggggaaaattacttgattccctaagttttctcatctgtgaaatgg

SEQ ID NO: 1001026 - DNA, 120 bp, Artificial Sequence
  ENSG00000245080_8 (sequence is synthesized)
ggattcactcagttagtgaatattattcagctcctaccatgtgcagacactgttctagtgggggattcagcataccagcagtaaatggatctctgtacaatgccaaaaacatgaagccaa

SEQ ID NO: 1001027 - DNA, 120 bp, Artificial Sequence
  ENSG00000245080_9 (sequence is synthesized)
ctattcatagtatttttaagtgatatcctggtgctgcttccaggaagatggagtagatatacttttccctattgctcccactaagtacaactaaaaccctggacattatgtataaacatg

SEQ ID NO: 1001028 - DNA, 120 bp, Artificial Sequence
  ENSG00000245080_10 (sequence is synthesized)
gcaacccagaaatgccaacgggagcaaataaaaaatccccaacaaaagcctgtttctctagacaaaggactaggacaggggcagcctaacaaaacagaaaactcttagtaacaacttact

SEQ ID NO: 1001029 - DNA, 120 bp, Artificial Sequence
  ENSG00000245080_11 (sequence is synthesized)
ccagctaaatagcacagaaaaacctatggtccactcccacccacaccacccaagggtgtgggagtccaggctatcacaaggggcctcgcctccactggtgtggtatcgcaaaagccacag

SEQ ID NO: 1001030 - DNA, 120 bp, Artificial Sequence
  ENSG00000245080_12 (sequence is synthesized)
ggagctggttctttcatccccatctgacaaaaggctcccacccccatggtgtcagcggagaccacactgggagcctgaacttccacccactcacagctgtaacaaggcagtccctccacc

SEQ ID NO: 1001031 - DNA, 120 bp, Artificial Sequence
  ENSG00000245080_13 (sequence is synthesized)
tccctgctggggtggtgtcagaggaggccaagtggagagtcaggactttcaccatagcccagtgacaatgaagccacctccctatggtgtcagtggaggccataaggaacagtaacgagg

SEQ ID NO: 1001032 - DNA, 120 bp, Artificial Sequence
  ENSG00000245080_14 (sequence is synthesized)
tctagtgggaatccagaactgccaccctgcccagcagtaaccaggagcccctcccctccgtgtggacagaggccaagtgctgaagctggactttgctccccctagccctgctaggtggct

SEQ ID NO: 1001033 - DNA, 120 bp, Artificial Sequence
  ENSG00000245080_15 (sequence is synthesized)
attagaacagccagctaaaactggtttcaccaagacagatttaggaagacagtgccccgggcaggaaaatgaaggcacggagaggttaaatataataacttgctagtggtcaatcagtag

SEQ ID NO: 1001034 - DNA, 120 bp, Artificial Sequence
  ENSG00000245080_16 (sequence is synthesized)
gcagtagaggagccagcatataaacccaagctgcccagctgcagaaccacattcttgtcccatatgctatgcctctcaaaaaaggaggccctctccttgggacacaaaggtaataaaaat

SEQ ID NO: 1001035 - DNA, 120 bp, Artificial Sequence
  ENSG00000245080_17 (sequence is synthesized)
gcctgccctgagctgtgtctctgtctaggtacacagttcatgagtgaaggagctcctggagtcatgaataatggaagtccagattggtcaagtaacttgtcccagccccagcccatgcat

SEQ ID NO: 1001036 - DNA, 120 bp, Artificial Sequence
  ENSG00000245080_18 (sequence is synthesized)
ctggtatgtggttggacaggtttctaactcattacgtaacatcaagaacattttaaactgctttgagacatttgtgaattaagatctcaataaatagtcctccctggcaccagctccatc

SEQ ID NO: 1001037 - DNA, 120 bp, Artificial Sequence
  ENSG00000245080_19 (sequence is synthesized)
cacattaaatgagacttgaaaatttctttgaatggatattagtttagaaggagctaagttattagttggcctcacattcctcagttgggccctgggcccagcatgccacttctcctggtt

SEQ ID NO: 1001038 - DNA, 120 bp, Artificial Sequence
  ENSG00000245080_20 (sequence is synthesized)
attatggttcacatctgaggtaacccatcgggaaactggatgggacaacaaactaaaaatgttttagtttggacctgtccaaaaccaagagaataaaaacaaaatggatagtcaagatga

SEQ ID NO: 1001039 - DNA, 120 bp, Artificial Sequence
  ENSG00000245080_21 (sequence is synthesized)
agctccgggcagcgacccgcgatgcggcatccttccgtccggtcggagccctcctagccctcagcgcgtctattcctagcttcggtccccgcagccatataagcaatgacaccctcgccg

SEQ ID NO: 1001040 - DNA, 120 bp, Artificial Sequence
  ENSG00000245080_22 (sequence is synthesized)
actcgcctgccagcttggccgcctccctgcagagggctgacgcttctccagaagttgtaagaaaaggagggaaagcaggccaacctcgaggatctccccagccttggcgttcaggtgctg

SEQ ID NO: 1001041 - DNA, 120 bp, Artificial Sequence
  ENSG00000266821_0 (sequence is synthesized)
caattaggcactttttattgcccacgctgtcataatcctcagagcttggctacgatgaaggagaggaaataggataggatggaattccaagatgcctttagagttcatcccagccattcc

SEQ ID NO: 1001042 - DNA, 120 bp, Artificial Sequence
  ENSG00000266821_1 (sequence is synthesized)
cctgcttctagatgggaaagttcaaataccatccacaagaactttcctccaagtgaggcccttagccctggaagtcaataggcctttgcatctattgcatctaacaagaatcattcaacc

SEQ ID NO: 1001043 - DNA, 120 bp, Artificial Sequence
  ENSG00000266821_2 (sequence is synthesized)
tcatagaggggttttctcctgtcctttgctccagcgactcagggaagacgaatcttatttgtgttttttcccaggacacggtgggtggggagctaggctcatgcagtcgtgaagacctct

SEQ ID NO: 1001044 - DNA, 120 bp, Artificial Sequence
  ENSG00000266821_3 (sequence is synthesized)
ggtaccacctggatggtggcattagggatcagggaactactgatttttcaagtgcaatctgactcctctctcagactagcaattcccagaggacagaggtcttgtctcctccctcagact

SEQ ID NO: 1001045 - DNA, 120 bp, Artificial Sequence
  ENSG00000266821_4 (sequence is synthesized)
gaaagctcctggagaaactgccttccctcacttccctctcttgtcccctgccccttctctcagttgcccagggcagagctttgtccacagagggccactcctgctgtgcatagaaccttg

SEQ ID NO: 1001046 - DNA, 120 bp, Artificial Sequence
  ENSG00000266821_5 (sequence is synthesized)
actgtgtcggtgactcagagggggttacaatctgattgggaagtgctaccgtggtctgtcggtgcctccatttcctcttgtgtagaatggagttgtaatgaagattaatttttttttttt

SEQ ID NO: 1001047 - DNA, 120 bp, Artificial Sequence
  ENSG00000266821_6 (sequence is synthesized)
aggtgtgagccaccacgcccagccatgaagattaaatttttaaaaagcatgtgcctggctcgtggtaagggctcagtaaatgagagcttttattgccttcaggacagctggcgcccctcc

SEQ ID NO: 1001048 - DNA, 120 bp, Artificial Sequence
  ENSG00000266821_7 (sequence is synthesized)
aggacagctggcgcccctcctagctttctgcttatcagaaatcaggatggggagatccagcagcctaagcttagaaaggtagccttcaaaatgagaatcacagaagccagccagcctagc

SEQ ID NO: 1001049 - DNA, 120 bp, Artificial Sequence
  ENSG00000266821_8 (sequence is synthesized)
agccctatgcgggtctcgggctgagaccctggtggacaagtgaagtccattatctccaggaggtagcaaggagatcagtagtcagcatgggcaacctcggagatcttcagcagacagggt

SEQ ID NO: 1001050 - DNA, 120 bp, Artificial Sequence
  ENSG00000266821_9 (sequence is synthesized)
ggcaacgaagatggatttcaagttaggacccaactgccaaggcagggcagagcagacaagggagagtacatttcgttgcttcataacacctgggaggggtatggtggttccttttccagg

SEQ ID NO: 1001051 - DNA, 120 bp, Artificial Sequence
  ENSG00000266821_10 (sequence is synthesized)
gggttgtggcagaggctgggggagggatgcagtgacttttccaagatcacggattccataatcacctgaaagaaggggaagggacagagagaggtgaaaaacacacccaggctgagcaaa

SEQ ID NO: 1001052 - DNA, 120 bp, Artificial Sequence
  ENSG00000266821_11 (sequence is synthesized)
gagaggtgaaaaacacacccaggctgagcaaacatccaccttccctgtcttttttttttttttttctttttctgaggctgagtttcactcagtcgcccaggctggagtgcagtggcatga

SEQ ID NO: 1001053 - DNA, 67 bp, Artificial Sequence
  ENSG00000266821_12 (sequence is synthesized)
tctccacctcctgacgccactatgctggctaattttttgtgtttttactagagacggggtttcacca

SEQ ID NO: 1001054 - DNA, 88 bp, Artificial Sequence
  ENSG00000266821_13 (sequence is synthesized)
cgcacccggctacaccttccctgtcatgggcagacatacacccctgggttcagagtgtgttcgtgcatggatggattcagggcacaga

SEQ ID NO: 1001055 - DNA, 120 bp, Artificial Sequence
  ENSG00000266821_14 (sequence is synthesized)
ttcagagtgtgttcgtgcatggatggattcagggcacagaaggggacctagaggttggcagctgctgtgaggaagaggagacattgtctccccagttggttctgtcctgagtaagcaccc

SEQ ID NO: 1001056 - DNA, 120 bp, Artificial Sequence
  ENSG00000266821_15 (sequence is synthesized)
tggatgaggctgagcaggtgacacctggcatggagccaggccctcaggcgagcagggtgggcaagtgggaggaggggaagtgcaacaggactttataagagatgaggcggacccctgcat

SEQ ID NO: 1001057 - DNA, 120 bp, Artificial Sequence
  ENSG00000266821_16 (sequence is synthesized)
ccttctgccttgggcctccaaggaaggagcaagtgcgaatggggaggtggggcaggaggagggattctgaagctctctggaaaatcctgagtgtaggggagaataactcactcttctttt

SEQ ID NO: 1001058 - DNA, 89 bp, Artificial Sequence
  ENSG00000266821_17 (sequence is synthesized)
taaatataaaaattatctggtgtggtggcgcgtgcttctagtcctagctactcagaagactgaggctggaggatcgcttgagcccagga

SEQ ID NO: 1001059 - DNA, 120 bp, Artificial Sequence
  ENSG00000266821_18 (sequence is synthesized)
aggatcgcttgagcccaggagtttgaggatgcagtgagctatggtcataccaccgcactccagcctgagcaacagagtgagatcccaactcaataaataaataaataaaataaaatcatg

SEQ ID NO: 1001060 - DNA, 120 bp, Artificial Sequence
  ENSG00000266821_19 (sequence is synthesized)
ataaataaaataaaatcatgttcactgctaaatatatacaattgtaattggccaactaaacaaaaaataagctgggtgcagtggctcacgcctctaatcctggcactttaggaggctgag

SEQ ID NO: 1001061 - DNA, 120 bp, Artificial Sequence
  ENSG00000266821_20 (sequence is synthesized)
agtttaagaccagcctgggcaacacaggatgaccccatctttacattttttttttttttaattagctggatgtggtggtgtgcgcttgtagtaccagctacttggatggctgagatggga

SEQ ID NO: 1001062 - DNA, 88 bp, Artificial Sequence
  ENSG00000266821_21 (sequence is synthesized)
tttaattagctggatgtggtggtgtgcgcttgtagtaccagctacttggatggctgagatgggaggattgtgggatcacaccactgca

SEQ ID NO: 1001063 - DNA, 120 bp, Artificial Sequence
  ENSG00000266824_0 (sequence is synthesized)
ccttcccctcctctgcatgcctttagcttcccaccaagctgggcctgagaaacaagggacccgaacctggagaggccggtgttcctggactgctctgcagtcacagattgtcacggagcc

SEQ ID NO: 1001064 - DNA, 120 bp, Artificial Sequence
  ENSG00000266824_1 (sequence is synthesized)
agaagagacaggatgaggcttggacaaaggaggtggagggtatcaaaagatatttagaagataaaggaagtctggacttggtgctgtgggtataccctccctcatggcacacaccaggtt

SEQ ID NO: 1001065 - DNA, 120 bp, Artificial Sequence
  ENSG00000266824_2 (sequence is synthesized)
attttgaagcaaatcctagacgtcatcaaacagttcaaattgcccaagtgtctcctacacacttcttttttcttttacagtttgtttgaatctgggtccaaataaagtccacacattgca

SEQ ID NO: 1001066 - DNA, 120 bp, Artificial Sequence
  ENSG00000228809_0 (sequence is synthesized)
gggcaggagaagagtccggaaatggaaatggggaaagagaagggggttgtgaggaccatgctgcgagggaatagtgaaggggagtgaatcatttcccctaccacgaccttgcgaagcttt

SEQ ID NO: 1001067 - DNA, 120 bp, Artificial Sequence
  ENSG00000228809_1 (sequence is synthesized)
acccggcgcaacagtgccttccacctttacaaatcctatgtaattttacaggcgctgcccctcatgctatggggcagttagtcctggtttcgcccttctttgggctctagctaccccggt

SEQ ID NO: 1001068 - DNA, 120 bp, Artificial Sequence
  ENSG00000228809_2 (sequence is synthesized)
ttcctcctgcctccgagtctcctctgattcatggggctctgcaggaactgtcctccaacactgtgctgatgaacttgaatctcagaggctactcagtttgagggcccagggcagacagaa

SEQ ID NO: 1001069 - DNA, 120 bp, Artificial Sequence
  ENSG00000228809_3 (sequence is synthesized)
ctggtgtctgcccaattctcatctctcaccagataaggcaaccatgctgactagaacccagtcatctatgtggtaaaagcccttgagagtaagtgtggcacactttggcaagcctggaaa

SEQ ID NO: 1001070 - DNA, 120 bp, Artificial Sequence
  ENSG00000228809_4 (sequence is synthesized)
gcctggatgaaatgaaagacttcattagtgtcttcaccttccctaggctgaaaagcatcctttccctcttcagaagatctcaaatgcattatattcttgcgatcaacccagaactgaagg

SEQ ID NO: 1001071 - DNA, 120 bp, Artificial Sequence
  ENSG00000228809_5 (sequence is synthesized)
atcagcggtaaacacttaagagtagctattattaacagctattaccaggtaaggaacttgcctaaggtcacacagctaataagcatcaggcctggaaattcagcccttgctttctcctct

SEQ ID NO: 1001072 - DNA, 120 bp, Artificial Sequence
  ENSG00000228809_6 (sequence is synthesized)
acacttgtcttcctcatataccacactattgcattttttacatggtttttacttgcaaattgtgaacttggatgatttccttgtgtgccccacatattcctttatctcacagtatttaca

SEQ ID NO: 1001073 - DNA, 120 bp, Artificial Sequence
  ENSG00000228809_7 (sequence is synthesized)
gagcatccactgtatgtgaactgcattggatgattgacaagggaagagcctacaagcaggggctgcacttgtgcaggtaacaggtaaaacgtaacgcttctcaaagccttgcgaccccct

SEQ ID NO: 1001074 - DNA, 120 bp, Artificial Sequence
  ENSG00000228809_8 (sequence is synthesized)
aaatcgaaatctggagaaggggcaggggtcgcaaaggagacgacgaaagggaagtgactgaggcagaggtcaaagtgaagtcttgcgatcaacccagaactgaagggaaggggaataaac

SEQ ID NO: 1001075 - DNA, 88 bp, Artificial Sequence
  ENSG00000228809_9 (sequence is synthesized)
gaagggaaggggaataaactggacaagcctgatagttacagtcacaaatagtggaggaagccaagcacagagagacgaggtctccttc

SEQ ID NO: 1001076 - DNA, 120 bp, Artificial Sequence
  ENSG00000228809_10 (sequence is synthesized)
tacaggtgtgagccactgtgcctagcccccactcttttaggccactggaggaaattccagtcactagggagggggctctggggcgaaccaccccgctgtgctggagctgaccatccccca

SEQ ID NO: 1001077 - DNA, 120 bp, Artificial Sequence
  ENSG00000228809_11 (sequence is synthesized)
tgtgtgtggcagggcagagcatcctttacagaagaatgagagactggaaggctgctgctataaccacattttctagatttcttcctcatcttctcttgcatgaggcccttttctctcttt

SEQ ID NO: 1001078 - DNA, 120 bp, Artificial Sequence
  ENSG00000228809_12 (sequence is synthesized)
cttcccttgtcagcggccttctgggctggcaccatttgctttcagggctgacagttggctgggaaaagtgcctgtatttctcttctctcattggcatctgtcttaaccctccttatcgca

SEQ ID NO: 1001079 - DNA, 120 bp, Artificial Sequence
  ENSG00000228809_13 (sequence is synthesized)
gctgctgctgtgagctcatgcatcctctgtgtgctgttttccacccccaaattgccgaacctgccctgtttgctgtttctggtggtgcagagcatttcaaaattaaaaatttaagacatt

SEQ ID NO: 1001080 - DNA, 120 bp, Artificial Sequence
  ENSG00000223859_0 (sequence is synthesized)
acacacacacacacacacacacacgctttacctattcatcccatccctcccctatcctcccaactatccacccactagtcatcatccatcccatctaggattgtcagttttaagaaaatc

SEQ ID NO: 1001081 - DNA, 120 bp, Artificial Sequence
  ENSG00000223859_1 (sequence is synthesized)
ttgtcagttttaagaaaatcaagacacccagtgaaatttcaattcagataaacaacaaataatactttagtataagtcccatgcaatacttaggacacattttttctgaaatatcattca

SEQ ID NO: 1001082 - DNA, 120 bp, Artificial Sequence
  ENSG00000223859_2 (sequence is synthesized)
ttatctcctaattccatgactctttcaactgcttttctcctttaactcctattatttcagatttcagctaaacaaactacaacctattttcccagtgtttccaaacctgtcccgaggcag

SEQ ID NO: 1001083 - DNA, 120 bp, Artificial Sequence
  ENSG00000223859_3 (sequence is synthesized)
agatgattgtaaagagcccctcaggagcacttatttgtggtttctaggctgaaggctggctgtgcaactttggcattcttgatctatcacctgtgactgaaagctcccaaactgatgcaa

SEQ ID NO: 1001084 - DNA, 120 bp, Artificial Sequence
  ENSG00000228802_0 (sequence is synthesized)
tggagaaaaaaaactttattggtattacagcaaaaaattcacataagatacataaattatgatacctcaaagctagacgcaaataaaatacacctaattatacaaattctatacaattaa

SEQ ID NO: 1001085 - DNA, 120 bp, Artificial Sequence
  ENSG00000228802_1 (sequence is synthesized)
atcccagcactttgggaggccaaggcaacatagtgagacctctgaaaaaaaaagaaaaaagaaagaagataaatagtaattaaataaaaaggaaaaaaaaagagcttcaaaacaggctca

SEQ ID NO: 1001086 - DNA, 120 bp, Artificial Sequence
  ENSG00000228802_2 (sequence is synthesized)
aaaacaggctcagatttttaaatcattttatatatttctaatccactctaatttattcccaagtgaggtaacactcaatgttggctatgagtattctatcgataaatctaatgtaggtat

SEQ ID NO: 1001087 - DNA, 120 bp, Artificial Sequence
  ENSG00000223855_0 (sequence is synthesized)
ggcgtccccgcccaggcccgggagacagaggcgctgaccccgggacagagcctggctttgtgcgggaggcagacgcgccccgcgcgccgcccccgaaacattcgcaccccatgctgaggc

SEQ ID NO: 1001088 - DNA, 120 bp, Artificial Sequence
  ENSG00000223855_1 (sequence is synthesized)
gcgcgtctgggagtccgtgggcgccccgagaaatgaagttgaaaatagcacaggagcccactatcactgtgtgaacattttgtgaatgaagacatgtatgaaaggatgtttggaggcttc

SEQ ID NO: 1001089 - DNA, 120 bp, Artificial Sequence
  ENSG00000223855_2 (sequence is synthesized)
aagaaacgaaagccgagagtctagctagaccagagccatccagcccaggagcgatggccacgtgtggccgctggacacgagagacgtggccagtccaaactgtgcagtgcggtaagggca

SEQ ID NO: 1001090 - DNA, 120 bp, Artificial Sequence
  ENSG00000223855_3 (sequence is synthesized)
gaacacatgccagctttcgaaggcttagtaaagaatgcaaaatttctcaattgggaatttttgtatgaatttcaggttgaaaaaaacattttggatatatggtgttaaataaacatgatt

SEQ ID NO: 1001091 - DNA, 120 bp, Artificial Sequence
  ENSG00000223855_4 (sequence is synthesized)
acaatgactttcgctgtcagcctcccggaggctcattttgctcctctgggccacagccagctcagagggttgctctaggaaatatctacacgttcttgaagcacaggtttatgtgccagg

SEQ ID NO: 1001092 - DNA, 120 bp, Artificial Sequence
  ENSG00000223855_5 (sequence is synthesized)
aaaggatttcaggcccaggtcaggaaggccttgtctgaggagtctgagaagaagtcaattgacaacagctagaacatctaggtcaggcactccaggccgacacgacaaagcaggtgcaaa

SEQ ID NO: 1001093 - DNA, 120 bp, Artificial Sequence
  ENSG00000223855_6 (sequence is synthesized)
ggccccagggcgggaaccagcgtggcttgttcacagaacaaggaggtagatcgcttgcccttgggaccaaaggaaggctctggattttattctaggggcagtggaagccgttggagggcc

SEQ ID NO: 1001094 - DNA, 120 bp, Artificial Sequence
  ENSG00000223855_7 (sequence is synthesized)
tcaggcaggaacacaaggtgtcgtggcagaaaggaagaaggggccgggcacggtggcccacacccgtcatcccagcactttgggagggaggccaaggcaggaggatcgcttcaatccagg

SEQ ID NO: 1001095 - DNA, 120 bp, Artificial Sequence
  ENSG00000223855_8 (sequence is synthesized)
agttcaagatcagcctgggcaacacagcaagaccccgtctctactaaaaccctaaaacttagccaggcttggtggcatgtgcctaaggtcccaggtcctcgggagactaaggcaggagga

SEQ ID NO: 1001096 - DNA, 120 bp, Artificial Sequence
  ENSG00000223855_9 (sequence is synthesized)
ttgcttaagcccaagagtttgaggctgcagtgaactattatcacaccactgcactcagcctgggtgacagagtgactctgtctcaaaactaaataaataaacaataattgtgttattctg

SEQ ID NO: 1001097 - DNA, 120 bp, Artificial Sequence
  ENSG00000223855_10 (sequence is synthesized)
actcacctggcggctgccacgcgcccccgcccaggatccgaggcctggggcatctgaatgaggaccctccacccacatttccacttgggagcgagctccagtcggggaaagggcctgcag

SEQ ID NO: 1001098 - DNA, 120 bp, Artificial Sequence
  ENSG00000223855_11 (sequence is synthesized)
cccgcctcgtccccaccctgggaccccgcgccccccagtcccccactcccgcgccgaaggcagggccgcgccctgagccgggaagtcgaggggatggaagggaaaggagccaccggtgag

SEQ ID NO: 1001099 - DNA, 120 bp, Artificial Sequence
  ENSG00000223855_12 (sequence is synthesized)
ggtcccccgggttctgagcctcccgcgtcgggatccgtggggcgcacagagcgccacctccggccgaggcgcagctcagagcgcgatgcgggggaggaacgcgcgcggaggccgaggtct

SEQ ID NO: 1001100 - DNA, 120 bp, Artificial Sequence
  ENSG00000223855_13 (sequence is synthesized)
gagcgtggctagacggctcccacgccgagaaagggcgggtgcgcctgggctggatggatttcgcctccctagaccaggagggattggaccctgactacaggtccaggtgctcgtcagtgc

SEQ ID NO: 1001101 - DNA, 120 bp, Artificial Sequence
  ENSG00000223855_14 (sequence is synthesized)
cctgccagggggtctacgcgtcctggtaccgggtccagcggggtggcgtgctgtgcagaccccgaggctagacggcctaggcccctggagcccaggagacgcttccttgggtgagcagcg

SEQ ID NO: 1001102 - DNA, 120 bp, Artificial Sequence
  ENSG00000223855_15 (sequence is synthesized)
gagaatcccgcccggcccagccgtcacccccaaccctgtcgattaaacccctgcccccgtcgcggtcgccctccctccagacaaaggccgttaaggcgcagccccgcgggcggtctttca

SEQ ID NO: 1001103 - DNA, 120 bp, Artificial Sequence
  ENSG00000223855_16 (sequence is synthesized)
tccccagctaggccagctctagcatttcaaaggccgaatccggagagcgcttcgggggctctccccttcccccaaatatttggggagcgacgcctctccctccgctcccagtgggtcgcg

SEQ ID NO: 1001104 - DNA, 120 bp, Artificial Sequence
  ENSG00000223855_17 (sequence is synthesized)
tctacacgcgcccttccacacacctgcaggccccctccccacgtctctcccttccgttggccgcagccccacaccacgacccccgcggtcaagcatgccctctgggtggtcaggaccaag

SEQ ID NO: 1001105 - DNA, 120 bp, Artificial Sequence
  ENSG00000223855_18 (sequence is synthesized)
cgggaccgggacagaaccaggggagccttggaaacgtggaggagccccttaaagccaggccttgtccctccagggggaacttgcggcttgggaggggacacccactgcatggcttctgga

SEQ ID NO: 1001106 - DNA, 120 bp, Artificial Sequence
  ENSG00000223855_19 (sequence is synthesized)
aagagccggactcgcagggccaggacgcaggccggaccccggcctcattcttcggccagttatcccggagtggcgcgcatcctgtcttcctgggcctcggactgctcgcgcgcagagggg

SEQ ID NO: 1001107 - DNA, 120 bp, Artificial Sequence
  ENSG00000223855_20 (sequence is synthesized)
gcccgaggacacctctgtggggttagaggactcggtaagacggtgtggaaggcaaggaggaaggtcgcgttgtattggggatggggtacccgtccctcccagcttgagggatcctggggg

SEQ ID NO: 1001108 - DNA, 120 bp, Artificial Sequence
  ENSG00000223855_21 (sequence is synthesized)
tcctcgccgcctctgagggcctagatggctgcttccctcggctcccctgcccggcctggagctacgggtgcgcccagctagagtttagggccacctggggacgtgcaaggggcgctggag

SEQ ID NO: 1001109 - DNA, 120 bp, Artificial Sequence
  ENSG00000223855_22 (sequence is synthesized)
cgaggcgggggctggggcggggcgtgggtgcttcacccgcgggggacgcagagcttaggcgaaagcggtgcaggcatctctctaatcgccggccgctattaaaaataaaaccgcgacccg

SEQ ID NO: 1001110 - DNA, 120 bp, Artificial Sequence
  ENSG00000223855_23 (sequence is synthesized)
tcgccatggcgaccacaacaacagcggccgcgcgagggaggcgaaaacttgtgcagccgcgcgacagccgccttctggggagactcggggcacgacgcacccggcgtgggactgggaccc

SEQ ID NO: 1001111 - DNA, 120 bp, Artificial Sequence
  ENSG00000223855_24 (sequence is synthesized)
gccggatccccggaagacacaaggagacgtggacccccacaggcttttttggggggattgggcgttgaaaccgcagggctgacttaaccaagaggtcaccgacttggataaaaaacccac

SEQ ID NO: 1001112 - DNA, 120 bp, Artificial Sequence
  ENSG00000223855_25 (sequence is synthesized)
gcccgcgcggacccccctccccggccttcgtttccattcaaactcccagcgtcctcattgcagcccctggggagggggacggagggacgaggtgggtttcaggtgctcggcccaggaggg

SEQ ID NO: 1001113 - DNA, 120 bp, Artificial Sequence
  ENSG00000223855_26 (sequence is synthesized)
gacggtgcgacccgggccccgccggcgggttttgcgcgcggaggctgcggcacctgccccgcccgccctgccgcgatccttgcagacgggggcggtcacatgcttctttctggccaggaa

SEQ ID NO: 1001114 - DNA, 120 bp, Artificial Sequence
  ENSG00000223855_27 (sequence is synthesized)
gaggtgagcccggggcccctggcggaagcagcggggagctcccggcgggtgcggggaggtgctggtgggaagcaaggtgcacctggcggcctgggatgtccggtcgcccccggagccggt

SEQ ID NO: 1001115 - DNA, 120 bp, Artificial Sequence
  ENSG00000223855_28 (sequence is synthesized)
cggtgcatccggcctctcccggcgcgccccgacgtgcccgcgggctcataattaccgtgagtcaggtgccccaaataggccgagcgaggggggccgtcgcgcagcaggggcgggtggccg

SEQ ID NO: 1001116 - DNA, 120 bp, Artificial Sequence
  ENSG00000223855_29 (sequence is synthesized)
gacgtctgcccgggactggttgcctcccgcccctccccaagaccctggcacccagggagggcgggaaaggccttggccattcctctgggtaggggactggagaggggaagaaactttcgc

SEQ ID NO: 1001117 - DNA, 120 bp, Artificial Sequence
  ENSG00000223855_30 (sequence is synthesized)
cgagtccagcgctgccccctcatacccatccccacccaggctgcgtgtccggggcccctccggggcttggcaccagcaggcacgcagcgatcgccgtcgttgttatttagtagtagtagt

SEQ ID NO: 1001118 - DNA, 120 bp, Artificial Sequence
  ENSG00000223855_31 (sequence is synthesized)
aacggctgacatttacagcgacgtcgatggcgccaggtgccaagctctttccttgtataatttcatggacactcacgcatcaactctaagcgaagacttggagcggggctcagcacccca

SEQ ID NO: 1001119 - DNA, 120 bp, Artificial Sequence
  ENSG00000228801_0 (sequence is synthesized)
gtgctcctcctgcagcggacggaagatgctgggccacgcaagtttccctgggcttggttaaccaccccaaagcccatttccagaaggaaagggtgttgaggaggagggatagaaagtcga

SEQ ID NO: 1001120 - DNA, 86 bp, Artificial Sequence
  ENSG00000228801_1 (sequence is synthesized)
gggaggaaatgaggcataggggcaggcgagccgggaaaatattgctactaaggatcctaagcagtgaacatgctgttaatacttag

SEQ ID NO: 1001121 - DNA, 85 bp, Artificial Sequence
  ENSG00000228801_2 (sequence is synthesized)
aaatgaggcataggggcaggcgagccgggaaaatattgctactaaggatcctaagcagtgaacatgctgttaatacttagatgag

SEQ ID NO: 1001122 - DNA, 120 bp, Artificial Sequence
  ENSG00000228801_3 (sequence is synthesized)
ggatcaaagtcacttgcaaaaatacctcaaaatgtgtttgtcaagaaattacactttctcttgattttgtggaccactttctaatttccaacccagacaaaagcctcctagtgaagctgg

SEQ ID NO: 1001123 - DNA, 120 bp, Artificial Sequence
  ENSG00000228801_4 (sequence is synthesized)
agctgcatcccagagatgatggtgtccagggcatgacgaggaagctctttgtgtggcctggagacgtcccgggagctggctggcgcccaccttctctcacttccttaccaccttctttct

SEQ ID NO: 1001124 - DNA, 120 bp, Artificial Sequence
  ENSG00000228801_5 (sequence is synthesized)
tgtgttgctgctttctccttcccagctctaaactcccatggtgctggagcagccagagaagaagtgttactagacctgccactgctacctacagtgagccccattctgcacacagaggct

SEQ ID NO: 1001125 - DNA, 120 bp, Artificial Sequence
  ENSG00000228801_6 (sequence is synthesized)
gcggactcctttttcccaatcatagaccagaatgcttgtgaaagaagatgtggctgttctgcaggttggagctctaggatcggaagaactcatctgtatcacatatgatccagctgaaag

SEQ ID NO: 1001126 - DNA, 120 bp, Artificial Sequence
  ENSG00000228801_7 (sequence is synthesized)
tccctacaaactgggccctctgtgtctttagaagcagcttccaagggcaggaagacttccagagtgcaggactgagcgtgctgctaatcttgttctggtcgagagactgatgagagagac

SEQ ID NO: 1001127 - DNA, 120 bp, Artificial Sequence
  ENSG00000228801_8 (sequence is synthesized)
ggggagatcacgcgagagcatggcctccacctctcctccccaccgccatctccacgttctcgcaccggcgctggggtgcaggctttcagtggtctcagggctacggcttgtcggtgcctc

SEQ ID NO: 1001128 - DNA, 120 bp, Artificial Sequence
  ENSG00000228801_9 (sequence is synthesized)
gccgcacagtcccctttgcattgaaggacacggtcttacggtgtaggagcatttttgaggtgcattcctggatttggaggcgaacccccaatggttacctccacagaggctttgcgaagg

SEQ ID NO: 1001129 - DNA, 120 bp, Artificial Sequence
  ENSG00000228801_10 (sequence is synthesized)
gcgctcactgacttaggtgaagagcgaaggctcaagactgtgccgctttatagtggccccttgacgtccagaagttccccccagcgccggtcataagcactcccgccgcctgggccccgc

SEQ ID NO: 1001130 - DNA, 120 bp, Artificial Sequence
  ENSG00000228801_11 (sequence is synthesized)
agactgatgagagagacaagaattatggcgcgagaaaagcagcagcagcagcagcaagtctgcagaggggaatgccaaactcgctactgggtgtttttttttgttttgttttgttttgtt

SEQ ID NO: 1001131 - DNA, 120 bp, Artificial Sequence
  ENSG00000228801_12 (sequence is synthesized)
acaggtgtgagccaccatgcctggcctgctgtgatttttcattgaacctaattaactcatttttagcccctatttttggtacaataatagaacttaggttgtaatcaactggtgggttct

SEQ ID NO: 1001132 - DNA, 120 bp, Artificial Sequence
  ENSG00000228801_13 (sequence is synthesized)
tcaactggtgggttctttccgcacactgcacagataagatcagtccacagagaccacagcgttgcagtaaagaaagagtttgatgtgaggccagccacgtgggaaaactggagttatcac

SEQ ID NO: 1001133 - DNA, 120 bp, Artificial Sequence
  ENSG00000228801_14 (sequence is synthesized)
gggcagggagctagggaatgggtgttgctgatgggtagggggtgaaatcataggggtgtggaaaacagtcctgatgtgctgagttttcctctgggtggggccacaggaccagctgaatca

SEQ ID NO: 1001134 - DNA, 85 bp, Artificial Sequence
  ENSG00000228801_15 (sequence is synthesized)
gagttttcctctgggtggggccacaggaccagctgaatcatgaatccaggtggggccagtgtgaagaacgtatcaaaaaatcaat

SEQ ID NO: 1001135 - DNA, 120 bp, Artificial Sequence
  ENSG00000228801_16 (sequence is synthesized)
gactcctgggcagtaagagattactatgtctacattttagcagagttcatgcctttcccacaactctaatcttgtagcccttcattaatcttacaaaggcggttttcagtccctgagcaa

SEQ ID NO: 1001136 - DNA, 120 bp, Artificial Sequence
  ENSG00000228801_17 (sequence is synthesized)
ggaggggtttatttttgggagggactattatcatcctttatttcaggttaaactataaactagattcctgccaaagttggcttggtctacgtccaggaatgacaaggacagctgggaggg

SEQ ID NO: 1001137 - DNA, 120 bp, Artificial Sequence
  ENSG00000228801_18 (sequence is synthesized)
cagaagcaagatggagtcaattatgtccaatttatcttactgtcataatttttcaaaggcagtttcaaggttactattctcatgattcaacacatcctcaaggagtgagattcagtctgt

SEQ ID NO: 1001138 - DNA, 120 bp, Artificial Sequence
  ENSG00000228801_19 (sequence is synthesized)
gtaagtgtatcatgactttctataacacgccttgtcatgcactcttctaccctgctagaattggagtctggcctcagctggttcctaccagcagtactgccatcacctcatcctcatctg

SEQ ID NO: 1001139 - DNA, 120 bp, Artificial Sequence
  ENSG00000228801_20 (sequence is synthesized)
ccccatctgttgttttggaaccacttgtgtcctctgaaatgcatatgttgaagtcctaaccacctgtgcctcagaatgggactatgtttggagaaagggttttaaagaggtacttaaagt

SEQ ID NO: 1001140 - DNA, 120 bp, Artificial Sequence
  ENSG00000228801_21 (sequence is synthesized)
taaatgagatcattactgtgaaccctgatccaaattgacttatgcccttataagaaaaggaaatttggccacttacactcacagaggaagaaatcatttgaagacacagagagaagaggg

SEQ ID NO: 1001141 - DNA, 120 bp, Artificial Sequence
  ENSG00000228801_22 (sequence is synthesized)
ccgaggagagaggtctcagagaaaccaacccaatgacatttcgtcttggatttccagcccccagaattactggaaaatacatttttcttgtttaggccacccaatctgtactactttgtt

SEQ ID NO: 1001142 - DNA, 120 bp, Artificial Sequence
  ENSG00000228801_23 (sequence is synthesized)
atggcaaccctagcaaactaatgcagtcaccaacccagggtgaaaatgggacattcccaactctagctcttaggccaagcttatttgtaatagattcttgttttcaaaggatatagatat

SEQ ID NO: 1001143 - DNA, 120 bp, Artificial Sequence
  ENSG00000228801_24 (sequence is synthesized)
tgagattctcaatgtatttgttaaaatacattgtttcttgttaaaagcataagactttgaaatgtctctgtgttgcagatatgtagatgttctgagccataatttttggaaaattctttc

SEQ ID NO: 1001144 - DNA, 120 bp, Artificial Sequence
  ENSG00000228801_25 (sequence is synthesized)
aaagaaaaggaaatctactggacaaatagcatgattaatggggatctagtgacaaaataatctgccctaattggatttgtgatgtttttgcaacttgaaattagcttcaaaatccaacaa

SEQ ID NO: 1001145 - DNA, 120 bp, Artificial Sequence
  ENSG00000228801_26 (sequence is synthesized)
taatacgaaagaatgttcagtatcacgaatcaaattaaaaccataattaaatcacctcctttcattagggtagctactataaaaaaaaagtaaaacaaaacagaaaatagcaactgtcgg

SEQ ID NO: 1001146 - DNA, 120 bp, Artificial Sequence
  ENSG00000228801_27 (sequence is synthesized)
caaagatgtggagaaattggaacccttgtgaaaccatcccacagtgttgacaagaattgcatgctgggttctggacagaaatagttccaattaagtactaatcagtctgcacttgggccc

SEQ ID NO: 1001147 - DNA, 120 bp, Artificial Sequence
  ENSG00000228801_28 (sequence is synthesized)
acttactcgttgttaaaagtcatgtagccctggatgctgaccatgtacatctgcattgttcctatagataagatctctgacattagaatcataaggcttttgtttaaggatcacttatga

SEQ ID NO: 1001148 - DNA, 120 bp, Artificial Sequence
  ENSG00000228801_29 (sequence is synthesized)
tgtttttcacaccccaaattccagcagccagtttgaagactcccacagagtaatgggatcaatatgagaatacagcttcttcatctccctatctcatgacttcaccctctactcttccaa

SEQ ID NO: 1001149 - DNA, 120 bp, Artificial Sequence
  ENSG00000228801_30 (sequence is synthesized)
ccaatcagtgatctccacattgcagcccattccaacactcttaaaaacccctacccccaaatgcctcagggagacagatttgaggtttcttctcatctcatttagtgaccctatgattaa

SEQ ID NO: 1001150 - DNA, 120 bp, Artificial Sequence
  ENSG00000228801_31 (sequence is synthesized)
cggaagatgctgggccacgcaagtttccctgggcttggttaaccaccccaaagcccatttccagaaggaaagggtgttgaggaggagggatagaaagtcgagaagagggccggggtcttg

SEQ ID NO: 1001151 - DNA, 120 bp, Artificial Sequence
  ENSG00000228801_32 (sequence is synthesized)
cctcctgagtagctgggaccacagatgtgtaccaccatgcccagctacatgtctttcttttggggggacagcagaaacctgggcagaggaggaatcctgatacccagttctgaaacaaag

SEQ ID NO: 1001152 - DNA, 120 bp, Artificial Sequence
  ENSG00000228801_33 (sequence is synthesized)
ctgatacccagttctgaaacaaagtggcagaatttgtaatacagaagaaggatcttgtgactggtattctgttatccacaagagtaaatgttcccaaataaacaaaactgggatatgaaa

SEQ ID NO: 1001153 - DNA, 120 bp, Artificial Sequence
  ENSG00000223850_0 (sequence is synthesized)
actaaaccaggacacttttgagaatgaacttgggtgctattggtaatcacaccgagacacagcaacgtccgggaccaactcaaccctcagtccgctcatggggcacaggtttcctggtcc

SEQ ID NO: 1001154 - DNA, 120 bp, Artificial Sequence
  ENSG00000223850_1 (sequence is synthesized)
ttccctaccctgacttctcttcttctgatgtttggtggtctgcatccttttaaaccactgtgctcccagaactgattcccatatgtgtctgccatactggaaaataccaaataggcaagg

SEQ ID NO: 1001155 - DNA, 120 bp, Artificial Sequence
  ENSG00000223850_2 (sequence is synthesized)
agatcgtttcaatactgtctgctgaacaccttaatagaggcaagagagaacgcagaggaagaaacaatggactctttctgagagagtggaagatggcttcgcagaggagctgctgtctga

SEQ ID NO: 1001156 - DNA, 120 bp, Artificial Sequence
  ENSG00000223850_3 (sequence is synthesized)
gacggatagcatgagtaggagtttccccaggcagggaaggtgttgttgtttctcctcagggtagaggggagagcagggttccccgtgtgtctgttgctgaatgtgactcatgctgttttc

SEQ ID NO: 1001157 - DNA, 120 bp, Artificial Sequence
  ENSG00000223850_4 (sequence is synthesized)
ttcagatttatcgtaaggaagaacagccgatgtacaggcagaacttgacaaatgaggcaacaagcaacttgatctgggatccatcgtcctctagaccccagtaggagtctaagcaccagc

SEQ ID NO: 1001158 - DNA, 120 bp, Artificial Sequence
  ENSG00000223850_5 (sequence is synthesized)
gtggtggccaccccagcagccttggacccctgaaggcttgagcaccaaagcacacacagctgcctctggctgagttctgtggtcgcctgcaccccctccacctgcttcccccggaggatg

SEQ ID NO: 1001159 - DNA, 120 bp, Artificial Sequence
  ENSG00000223850_6 (sequence is synthesized)
gatcatgaagagtggaattgcttttcctcttggggcaggcacaccaacagtgtatgtgaggcccctgctcccactccccaggctggccagtactttgggccaatctgctagacccaaaaa

SEQ ID NO: 1001160 - DNA, 120 bp, Artificial Sequence
  ENSG00000223850_7 (sequence is synthesized)
tgttaatctcactgagatttaatttgcattcccctgactaccggtgaagttgagcatcttttcatatgtttattgacaatttgcatttcttattcagtaaattacctgctcgtatcctag

SEQ ID NO: 1001161 - DNA, 120 bp, Artificial Sequence
  ENSG00000228804_0 (sequence is synthesized)
tgagttaggcttcagaggcagcgctgggtaggcctgagaggagcaagcacagtgggaggcccaacctcagaccacactcatctggatttccagaggtctccaggaggcaaggactatttg

SEQ ID NO: 1001162 - DNA, 120 bp, Artificial Sequence
  ENSG00000228804_1 (sequence is synthesized)
tcatctggagagcaagaagcagaatgtctgaaatcttcctatggtacagaactgctggatgagaccatcagtgggaatttggctatgaatgacaaataaataaaaatatgcctacatcta

SEQ ID NO: 1001163 - DNA, 120 bp, Artificial Sequence
  ENSG00000228804_2 (sequence is synthesized)
tggtacagaactgctggatgagaccatcagtgggatccctcacctgcaggccatgaggaccgttttatgggctctaaactgctcacggctcacaacaatgacaacatcagtcaagatgtc

SEQ ID NO: 1001164 - DNA, 120 bp, Artificial Sequence
  ENSG00000228804_3 (sequence is synthesized)
tcgactccggagacgattaaggttgagaagaacatcactggcatggcgggtgaactggatacagctgtcagccggcgaggccattttgtcttcacttgaaaaaagaggccaaaatcctgt

SEQ ID NO: 1001165 - DNA, 120 bp, Artificial Sequence
  ENSG00000228804_4 (sequence is synthesized)
tagtcctccagaacctgtttcctgcttgccacaggtatcagagcaggtggcttagcctgctaaggtacagaatgcaactcaggtcccttgtatttgatctttgaacaattcatagtccaa

SEQ ID NO: 1001166 - DNA, 120 bp, Artificial Sequence
  ENSG00000241158_0 (sequence is synthesized)
gttgccatgcagaatgtctgttggtcagttgggcacatctgcacacatttacaatatctgccacctcttttaaccctcaaccccgccccacaaaatgagtgatggtgcttgttgatttgc

SEQ ID NO: 1001167 - DNA, 120 bp, Artificial Sequence
  ENSG00000241158_1 (sequence is synthesized)
agattcacagtctggtgagacaagtttgagatctcatattttcagctcatccttgaaaacctttcttcgatttgactgaccttgatggctccctggaatctcacctacattttatgggaa

SEQ ID NO: 1001168 - DNA, 120 bp, Artificial Sequence
  ENSG00000241158_2 (sequence is synthesized)
attcaactctccagagagaagagctttcagatagctgcgggacttgcaactgtgactttcagctttcgcttttgaatgaggctccaaatgtctcaatggtggcactatttccagatttgg

SEQ ID NO: 1001169 - DNA, 120 bp, Artificial Sequence
  ENSG00000241158_3 (sequence is synthesized)
tcaagcttctacaaggtggctacctggtgttttccacttttgccgtctcctaaaaagcatcattcaagccttgccctttcaacccactgaacacataaacatgctttctccttaactgaa

SEQ ID NO: 1001170 - DNA, 120 bp, Artificial Sequence
  ENSG00000241158_4 (sequence is synthesized)
cttatggccacgatgaacttgaactctgagattcacagaggagagtttgttttaacagctgcttttacaatgaagccctggagttactactctcaagacccctggttctgataggccatc

SEQ ID NO: 1001171 - DNA, 120 bp, Artificial Sequence
  ENSG00000241158_5 (sequence is synthesized)
ttttcactgtcctctgcattttctaatgcccagctgtcaaggaacacccactgaagttttccaaaacaaaggcacgaaacacaagaaagagaactgtgtgcaggcccaaggagaacaact

SEQ ID NO: 1001172 - DNA, 120 bp, Artificial Sequence
  ENSG00000241158_6 (sequence is synthesized)
ggaaagagccagcattgtaaccgtgctcggtgacttctctggctttatagggaacagatgtgaggatagcaaggggcgcacacgtgaaatgcctggcaggtacccctttgtggctctact

SEQ ID NO: 1001173 - DNA, 120 bp, Artificial Sequence
  ENSG00000241158_7 (sequence is synthesized)
tacttcttgccattcctctgccctccaagtgtagaggggacaccgtgggccttggcagtcgcgttccgactccggtctggtgtatgggttgcactcggtctctctggctattttgtgtgt

SEQ ID NO: 1001174 - DNA, 120 bp, Artificial Sequence
  ENSG00000241158_8 (sequence is synthesized)
tccgatctgacagcccacatgcctctgctgtacgcctcggccacaggacacagagcactaagaagacagagaaccactaagaaagacaacaagggctgttaaggaaatcatgacattgca

SEQ ID NO: 1001175 - DNA, 120 bp, Artificial Sequence
  ENSG00000241158_9 (sequence is synthesized)
gaagaagatctgcatctcagaactgatgaatgacttgattgcatgaattcatgattgattaatgcattgcgccagtttggataatatctcaaggcttaatagggaaggaaggtggcattg

SEQ ID NO: 1001176 - DNA, 120 bp, Artificial Sequence
  ENSG00000241158_10 (sequence is synthesized)
aaaaaaaaaatgtccacagcattacagcagcaatcctgtgtggcatttttggctcactcaagagtgtgggtaaatcctgagaattggagccaaaaataaagctcatgaacctgaaattac

SEQ ID NO: 1001177 - DNA, 120 bp, Artificial Sequence
  ENSG00000241158_11 (sequence is synthesized)
caaccaaaaagaaggaaataatgatttcaccaagaaaggacacataccaaggcaggaatagagccctgcaaagctaatctgctcaaccttcacctactgggttcaatgaatatgaaaagc

SEQ ID NO: 1001178 - DNA, 120 bp, Artificial Sequence
  ENSG00000241158_12 (sequence is synthesized)
tgccttcctgaaacttttccttcaaagagggaatgatctcctggaattcaagcttctacaagagaactgtgtgcaggcccaaggagaacaactacatgaaataaaccttatgttttcagt

SEQ ID NO: 1001179 - DNA, 120 bp, Artificial Sequence
  ENSG00000241158_13 (sequence is synthesized)
aaaaatttagcgtatttagaaagtgtttaaggaagagaataccatggaaattaatttataattctctaagacttatgtttttccccctgttttcccaaataattcttcctggagaggtaa

SEQ ID NO: 1001180 - DNA, 120 bp, Artificial Sequence
  ENSG00000241158_14 (sequence is synthesized)
atatagaataatcaatggaactgagatgatcaatggaattgagtctgggaagggaaatgcaggtttctttttttcaccaaaccacaagaatatgcaataaatagccttgtgtgtttcttc

SEQ ID NO: 1001181 - DNA, 120 bp, Artificial Sequence
  ENSG00000241158_15 (sequence is synthesized)
aaccaaaactgtctccagacattgccaaatgtccaccgcaggctaaaatcacctcccaattgagaactattgaattatactaaggttctcagaaagtccttcagcaagttctcaaaactg

SEQ ID NO: 1001182 - DNA, 120 bp, Artificial Sequence
  ENSG00000241158_16 (sequence is synthesized)
tgagaaattcatagaactacctggcagaaaaggaagggtgatattgcctcccagggaacatttggcaacgtctgaagatatttttcactgtcacaaccgagggggtatgctattggcatc

SEQ ID NO: 1001183 - DNA, 120 bp, Artificial Sequence
  ENSG00000241158_17 (sequence is synthesized)
cagtaggtagaggtcaaggatgctgataagcatctacaatgtcccaaacagtccctacaacaaaaaattatctggccccaaatatgaatagtgccaaggttgggaaacccttcttcatac

SEQ ID NO: 1001184 - DNA, 120 bp, Artificial Sequence
  ENSG00000241158_18 (sequence is synthesized)
ctattcacaatccatggaacactttatgtactgctgtcttagtccctaatcagaaattatcaggtaaaatgctcactagaattaatcctacttccagaagagttctcaaaagagaaacct

SEQ ID NO: 1001185 - DNA, 120 bp, Artificial Sequence
  ENSG00000241158_19 (sequence is synthesized)
atatactcaactctgatgctcaagtctgaccaatccctagatactgctgacctattcatatattcatattctatcactgatatgggaagctctgtttgaaacataaacttaaaaaggaat

SEQ ID NO: 1001186 - DNA, 120 bp, Artificial Sequence
  ENSG00000241158_20 (sequence is synthesized)
ctctatatatgaactatcagtgctatcagacaatgctaacattatgaacatgatgaggatataacccttgttttcttagaaatgcccacccacatttatgctgtttttagtttattactc

SEQ ID NO: 1001187 - DNA, 120 bp, Artificial Sequence
  ENSG00000241158_21 (sequence is synthesized)
tatttttataaatttattgatttctttgctagtttgttattaattgttagagatgtcctgttgcctgaggttgccctgtccgatatggtagccaccagcgacaggtagctatttagagta

SEQ ID NO: 1001188 - DNA, 120 bp, Artificial Sequence
  ENSG00000241158_22 (sequence is synthesized)
tcctactatgaaatagtgatatatttcttcaacaaaatgcctgtgattcactgactgggataaaggtgcatttccaaaatacaactatgttcaatttcttaattaaatgatttaagaata

SEQ ID NO: 1001189 - DNA, 120 bp, Artificial Sequence
  ENSG00000241158_23 (sequence is synthesized)
aaactcttgaaccattttccagaggataagctctcgttttcccagtccactgggaagaggtgaaaaaggcacgttagaaactgaaaggtaagctagcaggaatatggaaagagaaattct

SEQ ID NO: 1001190 - DNA, 120 bp, Artificial Sequence
  ENSG00000241158_24 (sequence is synthesized)
gctgtgagaaattcatagaactacctggcagaaaaggaagggtgatattgcctcccagggaacatttggcaacgtctgaagatatttttcactgtcacaaccgagggggtatgctattgg

SEQ ID NO: 1001191 - DNA, 120 bp, Artificial Sequence
  ENSG00000241158_25 (sequence is synthesized)
tttttttttttttttttgaggcggccagacttggaacactcaggaatacagacagacgtaggaattgcttaaaaacaagaagttctcccacccttgttggagcgaatgcgcgagtctgac

SEQ ID NO: 1001192 - DNA, 120 bp, Artificial Sequence
  ENSG00000241158_26 (sequence is synthesized)
attggtgtgttaccttcattctaatctgataatttattctttttatttttgatctttattttaaaaactctatagcgataggataagttaaaaaagttttactgtgaaacgctttttgta

SEQ ID NO: 1001193 - DNA, 120 bp, Artificial Sequence
  ENSG00000241158_27 (sequence is synthesized)
tcatgggaatattgagtcttcacatttgtcagtctgaatcaagaacttgatgctaatttttgtcgtaaaagttcataggcattccttagctcttgattaaaaatatctaaacaaatgaaa

SEQ ID NO: 1001194 - DNA, 120 bp, Artificial Sequence
  ENSG00000241158_28 (sequence is synthesized)
tctttgttgatgggagttgtaaagggcctgctgaacatccgctcaatgaagtcaggggctccagctaaaagggttaggaagcccccatctatagaaaacgtgccgtgtacaacgtgaaat

SEQ ID NO: 1001195 - DNA, 120 bp, Artificial Sequence
  ENSG00000241158_29 (sequence is synthesized)
caattcccatgcacaacaatgaagatcccaattacaatgaacaaacacgttcttctgaacagaacttcctccctgacattatgtccatgaccctgcaccctgcggggggctcggatatgt

SEQ ID NO: 1001196 - DNA, 120 bp, Artificial Sequence
  ENSG00000241158_30 (sequence is synthesized)
caggaatagacattaagttttgcaaaattaaatgactacatttacagtcatggaggagagacattgcctcaactcggtttcttctgatgtgtctttgaaacagagccctgcaaagctaat

SEQ ID NO: 1001197 - DNA, 120 bp, Artificial Sequence
  ENSG00000241158_31 (sequence is synthesized)
tacatcgctgcagaaagctactagatttttttggccaaggcataagctctttctcataagagaaaggggatgcagatcttgctaagagtgatggatttctgggttcagcctacatgagtc

SEQ ID NO: 1001198 - DNA, 120 bp, Artificial Sequence
  ENSG00000241158_32 (sequence is synthesized)
atcttccatactacccctggacatgctttccttggctgccaattttctattttataaatttcaggaaagagagattatggttgttaaaaccattcatgacaatgatcccactttagagaa

SEQ ID NO: 1001199 - DNA, 120 bp, Artificial Sequence
  ENSG00000241158_33 (sequence is synthesized)
aacaacagcaacaagcaaagaagatggtgtggagatccgcacattccacatcttttaattggtacccattaaataacaaagggaaaaagtaccctcagaccacaactctccaccttgtgt

SEQ ID NO: 1001200 - DNA, 120 bp, Artificial Sequence
  ENSG00000241158_34 (sequence is synthesized)
ggaggccaaggacccagcagggagaaggcagaagattaggttctccactcatcctggctctcagaccactgaactcacatttgggttctaatggaatggtgattggaagcatattctcca

SEQ ID NO: 1001201 - DNA, 120 bp, Artificial Sequence
  ENSG00000241158_35 (sequence is synthesized)
atttaaaatgactggccagttgcacgtttaaaagcaaagataaaattgctaatttatacttactgaataaacatcagcagtatccatgaaggtacctaccctaatagcaagttgtatttt

SEQ ID NO: 1001202 - DNA, 120 bp, Artificial Sequence
  ENSG00000241158_36 (sequence is synthesized)
tatttttatggtggtggcgaagctgccaggaaaaccaaagcatcagttctttaattacatttgtttagtattgatttaatactaaaatttctcttgctcccttagaacaaagagctctaa

SEQ ID NO: 1001203 - DNA, 120 bp, Artificial Sequence
  ENSG00000241158_37 (sequence is synthesized)
cttgtacactgctgtatccttagcacctggaacagtccctggcctacaataggcacttagaaagtatttgttaaaaattgattttttttttttaaagaaacaacccagagtttttttatt

SEQ ID NO: 1001204 - DNA, 120 bp, Artificial Sequence
  ENSG00000241158_38 (sequence is synthesized)
ctgccccaacccccaacccctggcattaaaataaatcttcctcaactgccatcactaatcgccaggattccctcctagccaattatgcttggactcaacctctacctcccactccacatt

SEQ ID NO: 1001205 - DNA, 120 bp, Artificial Sequence
  ENSG00000241158_39 (sequence is synthesized)
ccaaagtttctatttctttccattccagaagggcaactccacaacaggagtgagggagaggacctggactcctcctcagagtccaataacactcctaaccctgctcccccaacctgtgga

SEQ ID NO: 1001206 - DNA, 120 bp, Artificial Sequence
  ENSG00000241158_40 (sequence is synthesized)
ctttttaaatccatgaaaatagaacctgtcaagctaccacaaaatagcatcagaaggcaggatcagtctttcataggcatacaatctctgtaaatactgaaaaaagattattaaaagcct

SEQ ID NO: 1001207 - DNA, 120 bp, Artificial Sequence
  ENSG00000241158_41 (sequence is synthesized)
gctaagttttgtctccagtgaaatagatgcaggcaagtattttgattgttctgaacacattagagatgagtgctacacagaactaaggtaaactttgtaaattcgtatgtcataacactt

SEQ ID NO: 1001208 - DNA, 120 bp, Artificial Sequence
  ENSG00000241158_42 (sequence is synthesized)
tgttccacaaaaaactatcttattttttatactccatactgatacagccaaataatgtggctcttattttctaaagatgccagcaatatgtttaaacatgtcttcattgtagtaaaagta

SEQ ID NO: 1001209 - DNA, 120 bp, Artificial Sequence
  ENSG00000241158_43 (sequence is synthesized)
tcatatttataaaaaatacatatgcatttaatgtgatattccttatagtcaaaatcttgatatcatcctgttaatctggctaaaaatgtatctgtaaaatgaaagagaggaatattttgc

SEQ ID NO: 1001210 - DNA, 120 bp, Artificial Sequence
  ENSG00000241158_44 (sequence is synthesized)
cattccctaaacaacagttgtttgaagcttttgtaattgctggttatgggaatttaccaataacaggaatgaatttggattttcttttgctggaatcaaatggacaatgtcataattagc

SEQ ID NO: 1001211 - DNA, 120 bp, Artificial Sequence
  ENSG00000241158_45 (sequence is synthesized)
taaataatgttgaggctaaatgaagtttgagttttaggcacatcctttatggaatataaacaggaacctaaaagttcattctgaacataggttgtttctttctgccaaaacaagattaat

SEQ ID NO: 1001212 - DNA, 120 bp, Artificial Sequence
  ENSG00000241158_46 (sequence is synthesized)
agtcagtaccctaacgacaaggtcctatcactgaagtagattatcggctagtcaaatgggttcctaacagcacctccctcatgggttaaaacaagagggttaatgtgatgtgtatttgct

SEQ ID NO: 1001213 - DNA, 120 bp, Artificial Sequence
  ENSG00000241158_47 (sequence is synthesized)
taatttggcttgttatacagtaaacacacagcaaacgttagctattgttatcttcatttcctttggagaagttatcttatttctcaccttattaaaaataaaccctaactcatacaggga

SEQ ID NO: 1001214 - DNA, 120 bp, Artificial Sequence
  ENSG00000241158_48 (sequence is synthesized)
ccctccttaccttggtcctttcacccatgaataccataataacctatactgcaaaaaggaggctcaggaggaggatgaggtatcaataggcctccgggtcatttttatgatttaggtatt

SEQ ID NO: 1001215 - DNA, 120 bp, Artificial Sequence
  ENSG00000241158_49 (sequence is synthesized)
ttttgaaaagggtaggctctcttgaaacttccaaggtagttgttgtagtattttattttcctttcataagaaatgctttctgaaatgtattgcagtgaacaaataacaaaattgacaaat

SEQ ID NO: 1001216 - DNA, 120 bp, Artificial Sequence
  ENSG00000241158_50 (sequence is synthesized)
gctgtaagccttttacagttatctgaacacacagaataaagtgtaatcaaatttgtgcacattaggtttgctttttcctgtacctagctgtctcttatgtgttcagaaccatttcttcca

SEQ ID NO: 1001217 - DNA, 120 bp, Artificial Sequence
  ENSG00000241158_51 (sequence is synthesized)
atcacctttttttgtcttctggctataatttatcattatctacaaattcaataaatggagcatgcatatttcatagttgagattcaataattcaggacaacagtactagaaaagaaaaaa

SEQ ID NO: 1001218 - DNA, 120 bp, Artificial Sequence
  ENSG00000241158_52 (sequence is synthesized)
ctatgccagagaggagaaccatatgttcacatcaaagctagctgaacagaagaaaatattttggatcaacatagctactattgtttgggctcaattgtattaattggattgaatgagttt

SEQ ID NO: 1001219 - DNA, 120 bp, Artificial Sequence
  ENSG00000241158_53 (sequence is synthesized)
gtgacccacaagaaaccagacttttaaagtcattatgtcctgggtgtaatgggaggattcctgaacacaagtgatgaccctatctatagagaatggccatttaatgctcattagagctac

SEQ ID NO: 1001220 - DNA, 120 bp, Artificial Sequence
  ENSG00000241158_54 (sequence is synthesized)
atgaataatatttcccattgattacactggaaaagaatgtactgtaacatgatagagttaccccataaatgatggacatgttcaaatattatcatcatcaataaacaacaaccaaaaagt

SEQ ID NO: 1001221 - DNA, 120 bp, Artificial Sequence
  ENSG00000245556_0 (sequence is synthesized)
aagcgatgaaaagcgttccacacgccacgagcccgcgggatcctcggagagtatggaacccttcccctccgctctcagccggaggccagctgcgtccagccgggctcggtcttctgaaca

SEQ ID NO: 1001222 - DNA, 120 bp, Artificial Sequence
  ENSG00000245556_1 (sequence is synthesized)
ccgatttcaaatcaggtcctcggggcccagcgtcacttagggaagtggtggcattttgtgatataagaaagattggagaactgtgtgcctggcaattgccttgctgaaaggaagccctca

SEQ ID NO: 1001223 - DNA, 120 bp, Artificial Sequence
  ENSG00000245556_2 (sequence is synthesized)
gatggtgagagctggccaagccagaaagacaaaccaagcgactttgagtgggggctttgtgtcacaaggcatcagtagacctggagactgagttcaggcaatcaatcaatcaatcaatca

SEQ ID NO: 1001224 - DNA, 120 bp, Artificial Sequence
  ENSG00000245556_3 (sequence is synthesized)
atcaggcctacagaatgaaactccaactaaaaactgtggacaccaaagctcagctgatttcctggttggcaatactccatgcatattgtcacacatcaatgccagctggtcagtggtaga

SEQ ID NO: 1001225 - DNA, 120 bp, Artificial Sequence
  ENSG00000245556_4 (sequence is synthesized)
tcaaatcaggtcctcggggcccagcgtcacttagggaagtggtggcattttgtggttgctgctaaatcacggagagcagccttggcgctgccggtcccaacttgatccaaggagccttga

SEQ ID NO: 1001226 - DNA, 120 bp, Artificial Sequence
  ENSG00000245556_5 (sequence is synthesized)
gaaggagatgagattcagtaccaggggccggccgtggctcccatcctccggaatctgcaaaatggctacttcttcagaaataatggggagagggatggcaagaggccagagatcaaggcc

SEQ ID NO: 1001227 - DNA, 120 bp, Artificial Sequence
  ENSG00000245556_6 (sequence is synthesized)
ctcgagtattaacttgagcatttgggcacaaaatagacacttttggattttcccgtcttttccaacaccaaggatgagattatcaaaagatgtgttaaattaatttgtaccggccgggcg

SEQ ID NO: 1001228 - DNA, 120 bp, Artificial Sequence
  ENSG00000245556_7 (sequence is synthesized)
aaaaaaaatcaatttgtaccattccttgccccaccctgccgaacttattgaaagagcatcgctttcctcacttttctcctctaacagaaaagcacttagatgaagctacagggagccaga

SEQ ID NO: 1001229 - DNA, 120 bp, Artificial Sequence
  ENSG00000245556_8 (sequence is synthesized)
attcttttgacttggtgggtaccggaggattggaagaatctagattgagtattccttggcctttggggagcttgctctatgcaaagtcacccaggaaatgatactccccccactgtgaaa

SEQ ID NO: 1001230 - DNA, 120 bp, Artificial Sequence
  ENSG00000245556_9 (sequence is synthesized)
cactagctagagatgatagacaaaaagcacatttgttgtaatctccctttgacgggattcaggttgggatagatgtcgaagcagctgcttctaggtagtcaacgaagatgtcaactagta

SEQ ID NO: 1001231 - DNA, 120 bp, Artificial Sequence
  ENSG00000245556_10 (sequence is synthesized)
aatgacaacagacaaggatgagcacagcagagctgtacgattctagatatcaaaaagagcaagcagtctgttgtactcaccatcgcatcctcagcagctgcccagtgcccggttttaact

SEQ ID NO: 1001232 - DNA, 120 bp, Artificial Sequence
  ENSG00000245556_11 (sequence is synthesized)
tagtgctcagtgtatgtgtcaggtttgaatcccaattctgatactacctgtgctactctcttcacctctctgagtctgtaaaggattatttaagaattaaatgaaacaacatacagaaaa

SEQ ID NO: 1001233 - DNA, 120 bp, Artificial Sequence
  ENSG00000245556_12 (sequence is synthesized)
tggcaaggaggctcagtatgttcttatacgctttgcctcccttctcctgagcaagcatgtccttgcccagctcatctgcttctctcaccacttttgccctcactccctccacctgtcctc

SEQ ID NO: 1001234 - DNA, 120 bp, Artificial Sequence
  ENSG00000245556_13 (sequence is synthesized)
caaatgactcaaaataatctgcactatttattatgcatctactatgttccaagacaatgagggtcagctgagcccgcattgcaggatggaaatttccaactatgttctgtttacagctaa

SEQ ID NO: 1001235 - DNA, 120 bp, Artificial Sequence
  ENSG00000245556_14 (sequence is synthesized)
tgatatttgcacctaatgcaaaggtttacagactttactgttatagaatcatttggaatacctgttgaagatgcagacacccaccttaccatacctcctattgctaagattacgcttgaa

SEQ ID NO: 1001236 - DNA, 120 bp, Artificial Sequence
  ENSG00000245556_15 (sequence is synthesized)
aggatctgaggtaggggctctggatctgcattttttattttttacatctctatacattattttacataaatgtataaatggagtcatgacatacatattgaatttttcacttacaaaaat

SEQ ID NO: 1001237 - DNA, 120 bp, Artificial Sequence
  ENSG00000245556_16 (sequence is synthesized)
ttttattccgtgtattccctcttctcttcccctacattaacaacctagtacatttctttaaatattcttgtaatagtgtatatctgcacttacataaaataacatgtaattgtataaaaa

SEQ ID NO: 1001238 - DNA, 120 bp, Artificial Sequence
  ENSG00000245556_17 (sequence is synthesized)
caatacatattcatgcagatatgcatacactctaatactgagctttggcattgtcttgaaaaagttagatcatatgtatatttttctgcagctgtttttctcaatacgtatggcagaatt

SEQ ID NO: 1001239 - DNA, 120 bp, Artificial Sequence
  ENSG00000245556_18 (sequence is synthesized)
tctcagcaagatgtgcattgtcagagagacagtcttaaggtttcttcccctagtatgccacataaatattatcactttttatgtgtagcatgcctatagagtgaaaagggaagcatggcc

SEQ ID NO: 1001240 - DNA, 67 bp, Artificial Sequence
  ENSG00000245556_19 (sequence is synthesized)
ttttttttttttttgagaccacaacctccacctcccttgtttaagcaattctcctgcctcagcctcc

SEQ ID NO: 1001241 - DNA, 86 bp, Artificial Sequence
  ENSG00000245556_20 (sequence is synthesized)
acctgagatgactttggtggtggctgatcacacttttgggaacactgatatgaggacatgcagacatatggtccatgggtgagggt

SEQ ID NO: 1001242 - DNA, 120 bp, Artificial Sequence
  ENSG00000245556_21 (sequence is synthesized)
gatatgaggacatgcagacatatggtccatgggtgagggtcttaatctgtttgtgttgctataaaggaatacgggaggctggataatgtatgaagaaaagaggattatttgactcatggt

SEQ ID NO: 1001243 - DNA, 120 bp, Artificial Sequence
  ENSG00000245556_22 (sequence is synthesized)
tctgcaggctgtcagcttcagatgagggccttatgctgcttccactcatgcagaaggcaaaggggagacttcgtgcagagatcacatggctacagtgcaagatggggcatcaggggagag

SEQ ID NO: 1001244 - DNA, 120 bp, Artificial Sequence
  ENSG00000245556_23 (sequence is synthesized)
aaagggagaagctgactctcggttcttttgaacaacctgttctcaaggatgagaactcactctcaggagaatagcaccaagccatttgtgaggaattcatccatatggcccaaacacctc

SEQ ID NO: 1001245 - DNA, 120 bp, Artificial Sequence
  ENSG00000245556_24 (sequence is synthesized)
ccaccaggccccaactccagcactgggactcatatttcaacatgacactttgcaggtccaaagccatacccaaaccatagcagggagcttattaattcattagcctccatgaaatttaga

SEQ ID NO: 1001246 - DNA, 120 bp, Artificial Sequence
  ENSG00000245556_25 (sequence is synthesized)
attatagaatgtgcgagctgagaaggaacctcagcctctctcatgattgaagaaactggagtttggacaggttaagtaatttgtctcagacaccaaggaagtgaatggggaaacagggaa

SEQ ID NO: 1001247 - DNA, 120 bp, Artificial Sequence
  ENSG00000245556_26 (sequence is synthesized)
cagaactcaggtctcttgactaatgttttagacattaaataaataggttattaaatgaatagaattattctatatgaataatttcatatagaaggaagaaatgctatgtgcaaggtagag

SEQ ID NO: 1001248 - DNA, 120 bp, Artificial Sequence
  ENSG00000245556_27 (sequence is synthesized)
agaaattatacaagaagcctcatttggtgcaggagttcattttacggaaggtacctcctaaatttggtagaacaaagactcaaaaccagtctatgccctctctcctgcaaaccaaccgtt

SEQ ID NO: 1001249 - DNA, 120 bp, Artificial Sequence
  ENSG00000245556_28 (sequence is synthesized)
tgatcttgaacatatcaactcacctttctaaccagagtttctactctagtacatcattcaagtatttcttgagcaactaaaacagtgatgttgtggataaagcagtaaaccaggtataaa

SEQ ID NO: 1001250 - DNA, 120 bp, Artificial Sequence
  ENSG00000245556_29 (sequence is synthesized)
gcgtaaggcctgctccagaaaacttcctaaaaggcctagaacatggctaaaggatatctcagatcctttggacagttctaacgttctattaatctgggacagtggctcactcctccctaa

SEQ ID NO: 1001251 - DNA, 120 bp, Artificial Sequence
  ENSG00000245556_30 (sequence is synthesized)
ccctgtttcttttcccctcagagtgtgcctcccatcatcatcatgctgcttctcctcagactgacacttttaattggtgaacctattgagcagggtctagagtctgaattccttgttttc

SEQ ID NO: 1001252 - DNA, 120 bp, Artificial Sequence
  ENSG00000245556_31 (sequence is synthesized)
taaactgcctagcttatagctggggaatgctaggaaaatgccaagttagatatttacgtttcttgcctcaaaaggttcactggattctgggttcactgatggattagaactgaaatccat

SEQ ID NO: 1001253 - DNA, 120 bp, Artificial Sequence
  ENSG00000245556_32 (sequence is synthesized)
catctcttacagtgggtctagtctccagatttgctgctgtgtctgctgataccctcgacgccccagcaccagcctatctggctccctattctgccactggctacattttcaggcaataac

SEQ ID NO: 1001254 - DNA, 120 bp, Artificial Sequence
  ENSG00000245556_33 (sequence is synthesized)
agaggaggtgcaggcattgtgtggtaggccaaataatcctcccctcccccaaagatgtccatgctataatccctagaatctgtaaatatgttaccttacatggcaaaagagactttgcag

SEQ ID NO: 1001255 - DNA, 120 bp, Artificial Sequence
  ENSG00000245556_34 (sequence is synthesized)
gtgtaattaaggttaagaaccttgagaggaggggattatcctggattattcaagtaggcccaatgtaatcacgagtccttgaaagtggaagaggaaagcagaagagttgctgactttgat

SEQ ID NO: 1001256 - DNA, 120 bp, Artificial Sequence
  ENSG00000245556_35 (sequence is synthesized)
gattgaggaaggggttcttaaactagggcatgtgagtggcttctgaagctggaaagaaccctcagctgacagccaccaaggaaacagagatttcagtcttacagactcaaggaactacat

SEQ ID NO: 1001257 - DNA, 120 bp, Artificial Sequence
  ENSG00000245556_36 (sequence is synthesized)
tctaccaatgatcaatgtacaaggaaatagattttccctcgagcctccagaaaggaacctagccttgctgacactttgattttagactggtgaaattcatgctgaacttatgacctacag

SEQ ID NO: 1001258 - DNA, 120 bp, Artificial Sequence
  ENSG00000245552_0 (sequence is synthesized)
atttcccatgggcataaagttcaagatgctttactggttcctttcgagactgaactacagacacaggactaccatccaaacaatttgaaaacgggggttgttgagcaaggcgcgcaaggc

SEQ ID NO: 1001259 - DNA, 120 bp, Artificial Sequence
  ENSG00000245552_1 (sequence is synthesized)
agaagcaaccgaataaacaaaaacaacactcgcaagagttagccacagcaaagaggggccaggttcctcgggatccgacccagctgctctgatttcacaccgacctccatcaacagctaa

SEQ ID NO: 1001260 - DNA, 120 bp, Artificial Sequence
  ENSG00000245552_2 (sequence is synthesized)
actgcacagggaggaggatcgaacggatccctcccgccctccgcccaaggagccgacccggggtagcaagacccccgcccccgccaggctaggacgagcagccgccaccgctgccaccgc

SEQ ID NO: 1001261 - DNA, 120 bp, Artificial Sequence
  ENSG00000245552_3 (sequence is synthesized)
caccaccgccgccgcagcgcctcagtgcggccccgcctccgccgccccaccaccttcaccacctccacgctccggtaccgcccctcccgccaatcggacagctccggctacgcccccagg

SEQ ID NO: 1001262 - DNA, 120 bp, Artificial Sequence
  ENSG00000245552_4 (sequence is synthesized)
gcgctagcccgcagccaatgagcaacgagagcccgactgggagtcgcgccggccaatcgcaggggccgaggaagccttgaatctccgggcaagttaagtttatctccgaggctcggaact

SEQ ID NO: 1001263 - DNA, 120 bp, Artificial Sequence
  ENSG00000245552_5 (sequence is synthesized)
gaagggaggtggcggttagctaagtagtagggtagcagggaacagtttgctctcctctgccaataagaggacgagggtgtgtcatatgcaaatatactgccctccaagccccacccccaa

SEQ ID NO: 1001264 - DNA, 120 bp, Artificial Sequence
  ENSG00000245552_6 (sequence is synthesized)
ctgaggcagctgttcggatacatgcagagcacagcgccctgctcagaaaggaaggttcagagaacaaattgtcgtttaaaactattgggacaaacctacctcttctaaagcttaaaatgg

SEQ ID NO: 1001265 - DNA, 120 bp, Artificial Sequence
  ENSG00000245552_7 (sequence is synthesized)
tctccagcgtaccaggatttgtgaaggcctgaagttcgtagaatgaaatctatgtggagatgatttaaaagaacggtttcactgagaccaacacatataaaccaagtctacacaagaaac

SEQ ID NO: 1001266 - DNA, 120 bp, Artificial Sequence
  ENSG00000245552_8 (sequence is synthesized)
aaagctaaaatcctttcgaaatgagttcctttaagttcttcagtaactaaatcctccagaaaggaaagccgagagaatctagtcctatacaataacaccctctaacaaagatcgctaaag

SEQ ID NO: 1001267 - DNA, 120 bp, Artificial Sequence
  ENSG00000245552_9 (sequence is synthesized)
gaagattttagtagatgaatatcttcaataatacatggtcacatacatgtatctgaccatatgatggctctctgcaccaaattcctccaaactattataatatgtattgtctgtagtgct

SEQ ID NO: 1001268 - DNA, 120 bp, Artificial Sequence
  ENSG00000245552_10 (sequence is synthesized)
atttatttggcagttaatcatgtattacattgtgacatttcttacagtgaaccattatgtatgtgtttatgttctgccctcaactactcaatgccagtaccttattcttaacacagcaac

SEQ ID NO: 1001269 - DNA, 120 bp, Artificial Sequence
  ENSG00000245552_11 (sequence is synthesized)
caccctttctggtctgtcctcacaccctcattcccatcatagttattctcctctctcatggaaatgttcagtttctggacatctcctttctcttccattcttcacctgaccttccttcct

SEQ ID NO: 1001270 - DNA, 120 bp, Artificial Sequence
  ENSG00000245552_12 (sequence is synthesized)
aactttagctgtaaagaagactgcagttatgtagtactttgtatccagggatctcaaagaactttacgcatcatttattgtgaaccttgttttgcaaagatttcagttacttgaggcttg

SEQ ID NO: 1001271 - DNA, 120 bp, Artificial Sequence
  ENSG00000245552_13 (sequence is synthesized)
ggaggcggataggggataaatgtctgagttatatatatatttacgcaagtaatcgagtttgaggggagagacacaaaacctctggtttagcggtttcctcttgtttgtgaagcaccttct

SEQ ID NO: 1001272 - DNA, 120 bp, Artificial Sequence
  ENSG00000245552_14 (sequence is synthesized)
tgttatgcaaaatcggaaaggtacacttggaggagctagcaagtttagcatatcaaagctattagaccaatttgtgcggttaaaactgccattctcatttctcaacagctgtctcctctc

SEQ ID NO: 1001273 - DNA, 120 bp, Artificial Sequence
  ENSG00000245552_15 (sequence is synthesized)
tgtccctttttagagaccaacacatataaaccaagtctacacaagaaacaaaggtaatggaaatctgctagtatcaggtttaaatagatcaaaatagagtagaaaaccccaaaagggtct

SEQ ID NO: 1001274 - DNA, 120 bp, Artificial Sequence
  ENSG00000245552_16 (sequence is synthesized)
aagttatgtagttgggtaaaggtgttgatctatttagccagtgttagctaaaggtcgcttgatgctgtgtagacatacataactaaagagcaatgaatggtgtggggaaggtgcttaaga

SEQ ID NO: 1001275 - DNA, 120 bp, Artificial Sequence
  ENSG00000245552_17 (sequence is synthesized)
ttcagttagaagaaactgtaaaagcaagtaaattcagaaaaggagggaattaccacatgcccttcgatgcagagaaccaagaaatgcagggagaaagtcagcaaggcacagtttttctaa

SEQ ID NO: 1001276 - DNA, 120 bp, Artificial Sequence
  ENSG00000245552_18 (sequence is synthesized)
gaaacacatatgtgtccccatttagtggtaaatttcttgggctatattcctggctggttctggcttttaaagcagattttatgtgagtacattttaaaggaaaggagaaattgaaggatg

SEQ ID NO: 1001277 - DNA, 120 bp, Artificial Sequence
  ENSG00000245552_19 (sequence is synthesized)
cacaaacaactttgagtcccgggagggcggaggtggagagagattctccgcttggataagggcggctggatagccgagtactctcttttggggctgttggccgtctccggagtctcggga

SEQ ID NO: 1001278 - DNA, 120 bp, Artificial Sequence
  ENSG00000245552_20 (sequence is synthesized)
gcgccttgatgtcccttcccagggctcgggttcctttgagagaatcaagaggaaggtgtttttcactaggactcgcggtgggccccacctgcctaccgtggccggccgggagctattaca

SEQ ID NO: 1001279 - DNA, 120 bp, Artificial Sequence
  ENSG00000245552_21 (sequence is synthesized)
gcagggtctgcccgtccgacgacggcggctccaatctggggtcccgccggcgccgacccctcagctctctcccgatacctgctggcctctctcatctttggtggcactcgccgccacggg

SEQ ID NO: 1001280 - DNA, 120 bp, Artificial Sequence
  ENSG00000245552_22 (sequence is synthesized)
gacggtgagatcaaagaggtagacctaggccaggagggactgccagggctccttcccgcgggccagcctctcgtccttcctcccgggacggggctctttccctttctccggatgcgggcc

SEQ ID NO: 1001281 - DNA, 120 bp, Artificial Sequence
  ENSG00000245552_23 (sequence is synthesized)
tttgagagtcagcgacgccttagactcctcccagaaaaatgcaccctcatctacccaattctgccctaccctttggagctcctggaccctctaaccgctcggtggggtcagagcccaccc

SEQ ID NO: 1001282 - DNA, 120 bp, Artificial Sequence
  ENSG00000245552_24 (sequence is synthesized)
ccggaagggccgctggtcggggactggttcgccctctcctggcctcctcggaccagtgcgcggggaggatcccgctaacgccgggcgcctgcagaccttgagcggcctcgccctggtgac

SEQ ID NO: 1001283 - DNA, 120 bp, Artificial Sequence
  ENSG00000245552_25 (sequence is synthesized)
ctccccgggaaaggctgggcggtgcttccacaatgagggccacctgttaatttgcacgagaaagtgctgccgagggcccacacgtgcgaatccacctgtggagtgcgtcccctctctggg

SEQ ID NO: 1001284 - DNA, 120 bp, Artificial Sequence
  ENSG00000245552_26 (sequence is synthesized)
gccaaggcctaggggaggccgaagcggagaagttgcctgaagactgggaagtaagagtaggggcgtcggaggaatcgaagttgcagtgacatcaggctcggacagccggcggactcctcg

SEQ ID NO: 1001285 - DNA, 120 bp, Artificial Sequence
  ENSG00000245552_27 (sequence is synthesized)
gatcggatacttccgagagccccacagtcctcctgggcctttgccctcgcgtctgggatgcgctcgggcgcccccagtctgcgatgcgttcgtacctccagtagggtgacgttttcgccg

SEQ ID NO: 1001286 - DNA, 120 bp, Artificial Sequence
  ENSG00000245552_28 (sequence is synthesized)
ggcccctctgcgaacagtctccgccctcctccactgtgagatatttcacagtttcacccgcagagggcaaccttattccaagttcccgagcgccctaggcctctttctcctccctgccta

SEQ ID NO: 1001287 - DNA, 120 bp, Artificial Sequence
  ENSG00000245552_29 (sequence is synthesized)
actggcctcaaacttcttcatgggaaaagatggcttctcttttttaattgaatgaactagaagaagttcattgttattcatcaacttcaaagagactatatgaggccccttggccaggac

SEQ ID NO: 1001288 - DNA, 120 bp, Artificial Sequence
  ENSG00000245552_30 (sequence is synthesized)
tacagagcagtattttttaatcagaaattatagccaaaaagaagagaccagaacacatggatgaagaaggaaggcattaaagattatgtaatttgctgggtgtggtggctgacgcctgta

SEQ ID NO: 1001289 - DNA, 90 bp, Artificial Sequence
  ENSG00000245552_31 (sequence is synthesized)
ggctgaggcatgagaatcgcttgaactcgggaggcagatgttgcagtgagcagagatggcgccactgcactcctccatcactgaaccagt

SEQ ID NO: 1001290 - DNA, 120 bp, Artificial Sequence
  ENSG00000245552_32 (sequence is synthesized)
gcaagactccgtctcaacatcactgaaccagtagggggcagagctggaagttgagcctaggtgtgtctgactccacagcctacgccccgaaccttgactttgtgctttctcacaatgcct

SEQ ID NO: 1001291 - DNA, 120 bp, Artificial Sequence
  ENSG00000245552_33 (sequence is synthesized)
atggctgctgctttaaaacagcactttccatttgccttgttaaatgggattgtatatgaattatacttcactgtttatttctagagaaataaaagaatctaataaaggaatctgacacgg

SEQ ID NO: 1001292 - DNA, 120 bp, Artificial Sequence
  ENSG00000245552_34 (sequence is synthesized)
tttctcctccctgcctaactggtgaggtgggacttcaatgccttttaggtttacagtcttttcctccccacggcttctctttcctccccgtctcaggcactgggcatttccagtcgatcc

SEQ ID NO: 1001293 - DNA, 120 bp, Artificial Sequence
  ENSG00000245552_35 (sequence is synthesized)
agcaggtctggcttctctcacatatgcagtaagggttaggggagaaggtcccagctcctcttgtctctagcagagtgtaaactggctctgctgaggaggtggctgtgcttttattccttc

SEQ ID NO: 1001294 - DNA, 120 bp, Artificial Sequence
  ENSG00000245552_36 (sequence is synthesized)
tcctgagaactgtttatatattaaggagcttcacagcctccaacataaggaaagcaggtaggaactgatcatataacgctttgtaaatgttttagactttggctttaatgggaaagaaat

SEQ ID NO: 1001295 - DNA, 120 bp, Artificial Sequence
  ENSG00000245552_37 (sequence is synthesized)
ggggagccattcgtgggtttttgagcagcaggtggacattgcttttcataatgaccacgccagctgctgtttggagaatagactgtaggggtcactgcgcaaattggaggccgcgatcca

SEQ ID NO: 1001296 - DNA, 66 bp, Artificial Sequence
  ENSG00000245552_38 (sequence is synthesized)
tgcagaaaactgaaactggaccccttcctgataccttaaacaaaaattaattcaaggtagattaag

SEQ ID NO: 1001297 - DNA, 68 bp, Artificial Sequence
  ENSG00000245552_39 (sequence is synthesized)
aaaaaaagctcatcatcactggtcattatagaaatgcaaatcaaaaacacatgattaaatcataggaa

SEQ ID NO: 1001298 - DNA, 120 bp, Artificial Sequence
  ENSG00000245552_40 (sequence is synthesized)
cttaagaggaaaagaaacaaaagccagttctttttattgcacatagaacaaggagaaactccaccccttttgttgtctggtatgtttaaaacaagaaagaactttagaaaagtaggatat

SEQ ID NO: 1001299 - DNA, 120 bp, Artificial Sequence
  ENSG00000245552_41 (sequence is synthesized)
gtacatcatttcaaaactgttatctcataatcatgttgcttgttttgaattattcttttaaagtgtaatttttttaagcaaagaatccataaaattacatggcttggatgtaccataact

SEQ ID NO: 1001300 - DNA, 120 bp, Artificial Sequence
  ENSG00000245552_42 (sequence is synthesized)
cactctgaggtcaagataaactttgttaaaattacatggtgtttcatctggatgtattcacagtaaaaattagttcaatatagtttatttttagcttgcaaaaaagcatatagggagaaa

SEQ ID NO: 1001301 - DNA, 120 bp, Artificial Sequence
  ENSG00000245552_43 (sequence is synthesized)
gatcagaaaggacactcagtggggaggagagcagagtttttgatgtcgttatcattattttaatacacttgagagctaagtaggggggctcagtttgtgaacattcactgagctttatgc

SEQ ID NO: 1001302 - DNA, 120 bp, Artificial Sequence
  ENSG00000245552_44 (sequence is synthesized)
ctaagatatgtgcacttttctatgcatatgaaaacaaaaagaacacaacatatggagtaaacaatgtcctaatgagactgtgactagaatattaccaaagtggcattcaggaagatagca

SEQ ID NO: 1001303 - DNA, 120 bp, Artificial Sequence
  ENSG00000245552_45 (sequence is synthesized)
attattggttttccttaaatagtctagttttggtgtgtgagaggaagaaagttgcaagtgcttatgtgccaggtactgtgctaggatctgaggatgcagaaatgaagaaaatgcaatccc

SEQ ID NO: 1001304 - DNA, 120 bp, Artificial Sequence
  ENSG00000245552_46 (sequence is synthesized)
tggccctcccacctgttgggggaagtggacttcgcaccctgtggataaggagtacacagtgtagcactgtggttagaagcaccagctctgtcatcacagggcttggcttgtttcctggct

SEQ ID NO: 1001305 - DNA, 120 bp, Artificial Sequence
  ENSG00000245552_47 (sequence is synthesized)
tcattttctggaaagtcttgaactaagtacttgaaaatacaaagataaatgaagcacaagtgctgacttcaaggaaatgccagaattgaaagaaactactttaaatttcatatggaacca

SEQ ID NO: 1001306 - DNA, 120 bp, Artificial Sequence
  ENSG00000196366_0 (sequence is synthesized)
cgtctgccgcctcaccgcttggccccgcccctcgccacctgcccggccaggcgcgccggggccgtcccagtacgtcgccctgtttacgctggctctttctcccagtcttttttcgtttta

SEQ ID NO: 1001307 - DNA, 120 bp, Artificial Sequence
  ENSG00000196366_1 (sequence is synthesized)
agatgtgagaagagatgggattcttcaatcaaggccacaagcgggaaatcagtctgcaggaccgatgccagcaggctcacgcaccgagaacggctactccgcccagctgagaagcgcggg

SEQ ID NO: 1001308 - DNA, 120 bp, Artificial Sequence
  ENSG00000196366_2 (sequence is synthesized)
gctcctcgcattcttccgttgggctgggaggctggagggcaggcggcggcggccgcgcatgcgccgggagcggccggagctgcgggacgcggagggccgactgcgcctgcgcgctggttg

SEQ ID NO: 1001309 - DNA, 120 bp, Artificial Sequence
  ENSG00000196366_3 (sequence is synthesized)
gcctgcgcgctggttgcctggttacggcgtggccgcgggcaccgagcggcgccggaagttggtcgatggctgccgccagtccctggccagcgtcctggggtttccccgacgcatcctcta

SEQ ID NO: 1001310 - DNA, 120 bp, Artificial Sequence
  ENSG00000196366_4 (sequence is synthesized)
ctgtcccttcgctctgcacagaggcccgggcagggaggggcggcccggccaccgcgcggagccgggtgtccgccgactcgcaagggggacgcgcgggctcctcgtccccaagctccgccc

SEQ ID NO: 1001311 - DNA, 120 bp, Artificial Sequence
  ENSG00000196366_5 (sequence is synthesized)
caagctccgccctgcgcctttgctgcgccgggccctcccaggcccaccctggccccagccctgctgtcctcccggggaggtgcggcctactcggttcgttcccccggccgccagccccac

SEQ ID NO: 1001312 - DNA, 120 bp, Artificial Sequence
  ENSG00000196366_6 (sequence is synthesized)
gtcccagccttggctgagtgcacgtcggtggcgagtgggcccgggcgctcgggcggccagagcgacccagcggaggggtgaggcgggtaggcgctcctgtgcctgccacggccaggccag

SEQ ID NO: 1001313 - DNA, 120 bp, Artificial Sequence
  ENSG00000196366_7 (sequence is synthesized)
gcagcatccacgccctcccgcggaagatcgcagggaacaggtgggcactatcctctgtgccctcatttttcggaggagccgagggaggctgagcggttgaggaagcggccagccatgccg

SEQ ID NO: 1001314 - DNA, 120 bp, Artificial Sequence
  ENSG00000196366_8 (sequence is synthesized)
ggcccactcacctgcacacctgcctggcaagggcagggaagagccgcggccttcctctgctgctccttccagagggcaggcgccgtggtgggggtgcccgcccgatggcatcgcgggagg

SEQ ID NO: 1001315 - DNA, 120 bp, Artificial Sequence
  ENSG00000196366_9 (sequence is synthesized)
ctgagctcccagcagcggctgaggtcctccctgggtgggagccacccttgtccccagctgggccggcggctggtgagggagggggtgatatccgtgccacgccagcagggccgcaggcgg

SEQ ID NO: 1001316 - DNA, 120 bp, Artificial Sequence
  ENSG00000196366_10 (sequence is synthesized)
taacatttgcctttcaggagtcagattcctgacctgtttgaacagagttagggagcacgtggtagggcccagccccagccccgctgcccccatctgcttcttcccagtggtcgaggcgct

SEQ ID NO: 1001317 - DNA, 120 bp, Artificial Sequence
  ENSG00000196366_11 (sequence is synthesized)
ctgcaccctccgcggaaggaggtgtcattgtttgccctttccaaagagggggatgcagaggtggatgctgcctctcaggcgtggggctcgccttttgccgctcgcgagttcaaagaaccc

SEQ ID NO: 1001318 - DNA, 120 bp, Artificial Sequence
  ENSG00000196366_12 (sequence is synthesized)
aagagccaggagcccagggctcgaccctctagggtcctccgaaaccctgtggtcccaccggggtgggcactaagctatgggagagaccatagctgcagaaaccaaccctgccctaggcat

SEQ ID NO: 1001319 - DNA, 120 bp, Artificial Sequence
  ENSG00000196366_13 (sequence is synthesized)
aaaatgcaaggtctctggacctcagggcagggatgttagacagcggcttctgttggctcctaggggtgtgaatcaccacatcacctgcagggggcgcggctgtctttcttccccctcttc

SEQ ID NO: 1001320 - DNA, 120 bp, Artificial Sequence
  ENSG00000196366_14 (sequence is synthesized)
tccctaatcctgagtgcacggagacagctctcagcagtttgtagcctgatgtggagtggagggttcctgcaccctacacccgagcccatccagcctctgggccatagacccttccgttga

SEQ ID NO: 1001321 - DNA, 120 bp, Artificial Sequence
  ENSG00000196366_15 (sequence is synthesized)
aggcccagcctgcccctgagacgctgtgtgccctttttcaacttccttagtctctgagcatcaggtcttcatctctaagatagagcaagatgagcacctaaacgtttcagggctgaaatg

SEQ ID NO: 1001322 - DNA, 120 bp, Artificial Sequence
  ENSG00000196366_16 (sequence is synthesized)
gggttgccaggacaacaagcatggcaggggcgaatggggacatcaggtgactgactgcgagccagcagaggcctccacccagtgctgggaggtgtcccgccggtggtggccatcactatt

SEQ ID NO: 1001323 - DNA, 120 bp, Artificial Sequence
  ENSG00000196366_17 (sequence is synthesized)
cctggtggggctttgctgcttttgcctgcagcatccgctggtttctccattctccaagtctctgcccctgctcacacctggaggctggacacaagtgtcaccacttccctgaacccccct

SEQ ID NO: 1001324 - DNA, 120 bp, Artificial Sequence
  ENSG00000196366_18 (sequence is synthesized)
aggtgggctggaatcagcatctggtgcaaagctctgtgaccactgctgtaccacattatgcagagcacacaggacaggctggtgcacctccaggctgtgccaggaaacccgctgcctttg

SEQ ID NO: 1001325 - DNA, 120 bp, Artificial Sequence
  ENSG00000196366_19 (sequence is synthesized)
cgtcaccacagccttggtcacagcgtgaccttggtgcctccgacgggtcagctcctcccattagccatgctgtccagcacgggggccgctggtgcttgctgtgagactgagctgggctct

SEQ ID NO: 1001326 - DNA, 120 bp, Artificial Sequence
  ENSG00000196366_20 (sequence is synthesized)
gagtgtaaactacatggtaggttgtgaaggatgcaaatatcgaatcaatcattttttattgcatattaaaatgacaatatcttggatgtatcagattaaacaaaatactatttaatttta

SEQ ID NO: 1001327 - DNA, 120 bp, Artificial Sequence
  ENSG00000257754_0 (sequence is synthesized)
acacagtgtggcaagctggaaagcccctggcacttccagttttcagcagcttccagcttttcgtctgcttatcccacagagcactgggaaatgtggtgaacaacctataggaaaaactgg

SEQ ID NO: 1001328 - DNA, 120 bp, Artificial Sequence
  ENSG00000257754_1 (sequence is synthesized)
tcccaaaggctgcctgtgatgggtcatccactgctctgtgttctccaacatatgctgtagctgaatactgaccagagttacatctgcctggaatattctgtctctgtctaatgtctatgc

SEQ ID NO: 1001329 - DNA, 120 bp, Artificial Sequence
  ENSG00000257754_2 (sequence is synthesized)
ataaacaccaatcagctatgtgaaaagaatgtcaagtaagactttccttcaaattatgctataaaacaaaacaccatgtgagtcagagtttaaaaattttaaacattaaaaaggtagaaa

SEQ ID NO: 1001330 - DNA, 120 bp, Artificial Sequence
  ENSG00000257756_0 (sequence is synthesized)
gatgcttgcctgtcccagtggaattaatggaagctgtcaacagcccgcccccgacctcactggatataactgtgtcctcggcagacgagagaataaccagaggaagggctgaaaatcctg

SEQ ID NO: 1001331 - DNA, 120 bp, Artificial Sequence
  ENSG00000257756_1 (sequence is synthesized)
gagaacaccaacattaacaagcttcagtttgtcagaaccagttgggatgcaacaggattttcagttttgctgccttccatgcatgaatggcttctgttaggttggaatgaccaagatgat

SEQ ID NO: 1001332 - DNA, 120 bp, Artificial Sequence
  ENSG00000257756_2 (sequence is synthesized)
cactgactcaactgatctgagggaccccatgagaagcctactcatcaaagaatgcagtttctaaatcctgatgagttcaccccccttgccctgaccaatcaacaatcctaattctccagt

SEQ ID NO: 1001333 - DNA, 120 bp, Artificial Sequence
  ENSG00000257756_3 (sequence is synthesized)
cccttgccctccatgatcctcttaaaaaccctagcccagaattcctcaggaagatggatttgagggtctccttccaactcctcactcagcgccctgtggtcattaaactttctctgctgc

SEQ ID NO: 1001334 - DNA, 120 bp, Artificial Sequence
  ENSG00000257756_4 (sequence is synthesized)
ttgctgccttccatgcatgaatggctgttggaatgaccaagatgatttttccacccattcttgggacctggactatgatggccacagcagctaaagatgccaggttctgcatactatgaa

SEQ ID NO: 1001335 - DNA, 120 bp, Artificial Sequence
  ENSG00000257756_5 (sequence is synthesized)
agttgatgcttgcctgtcccagtggaattaatggaagctgtcaacagcccgcccccgacctcactggatataactgtgtcctcggcagacggctttgatccagaggctttgacaaggcta

SEQ ID NO: 1001336 - DNA, 120 bp, Artificial Sequence
  ENSG00000257756_6 (sequence is synthesized)
ctgctcatccaactcagccagaaagtagggtaaactgagcgctaatatctgagacaactttttcagggtggtatcgaatgaagactggataggttccagagaatcattcttcacatacta

SEQ ID NO: 1001337 - DNA, 120 bp, Artificial Sequence
  ENSG00000257756_7 (sequence is synthesized)
ttcctctctagctcgccatccactggtgatcttgttgatgtatctgtttggttacttcctgactccccaccgccccatatccgtggccagaagaaagctcaggagcaaagctcaggagta

SEQ ID NO: 1001338 - DNA, 120 bp, Artificial Sequence
  ENSG00000257756_8 (sequence is synthesized)
ctgtctgccttgtttgtcaccagtgtgactagcacagtgtgtgacacagcaggcgaacaaaatgaaccagttgtggaataaatctctcacctgctttcaactcacccctaagatccctgt

SEQ ID NO: 1001339 - DNA, 120 bp, Artificial Sequence
  ENSG00000257750_0 (sequence is synthesized)
acagagtttctaatcattttcctgctgcatggaaacatttgctactgttggacatattacctctaatagcagaccctattctactgcctcagctccactggagtctcactgagcctactc

SEQ ID NO: 1001340 - DNA, 120 bp, Artificial Sequence
  ENSG00000257750_1 (sequence is synthesized)
gttcttatctcacaaccaggaagacttaggtgcacagaccctggagagtgagtggagtaaaaattattcagcaagatggaagctctcagcaaagagggagtgtggggtgtggttccccta

SEQ ID NO: 1001341 - DNA, 120 bp, Artificial Sequence
  ENSG00000257750_2 (sequence is synthesized)
cccaaagctgccaatgaaaaactaatacttcttcataatcagctactaagaaatttgatagatgaaaaaagataatgaaagctggtgtaagcaatcaaaataaacatgagttaaccaaaa

SEQ ID NO: 1001342 - DNA, 120 bp, Artificial Sequence
  ENSG00000257750_3 (sequence is synthesized)
ctacttgtcataaattgatgctaatcttcccatagtacagaggaagacaagtaaattttatataccctattctactgcctcagctccactggagtctcactgagcctactctggctttgg

SEQ ID NO: 1001343 - DNA, 120 bp, Artificial Sequence
  ENSG00000257750_4 (sequence is synthesized)
aagaatacaaatgaaggttcacctgaaagttatgaaggaggctaagaaattgttacataatacgtaatataattttctaccatgtaaaatataactctataaaaacagaattgaagcaca

SEQ ID NO: 1001344 - DNA, 120 bp, Artificial Sequence
  ENSG00000257759_0 (sequence is synthesized)
gctgttcctattcggccatcttggctccctcctctgctactcggacttacagagaccaaagctcctgaagtaccatcattctaccatggatactgtgaagtggtaccaccgtaaatccat

SEQ ID NO: 1001345 - DNA, 120 bp, Artificial Sequence
  ENSG00000257759_1 (sequence is synthesized)
tacaaattttggtgcccaacgtggggcatccttcactggctggaacactgcttgctcgaaactgctgcacctgaaatcctggccctctgacaaaaggccagcaaaggtaagaattcttaa

SEQ ID NO: 1001346 - DNA, 120 bp, Artificial Sequence
  ENSG00000257759_2 (sequence is synthesized)
tactgtcagtctgctggatctctgcctgtggagaatggtcaaggtgagagtggtaagactcttttcttcctctttccctctctaaatttagactggcaggagaaaatatttatgtgaact

SEQ ID NO: 1001347 - DNA, 120 bp, Artificial Sequence
  ENSG00000242686_0 (sequence is synthesized)
agcagcaggggtttaactcaagcctgacacaggcaaacatccgaccagcccttcctccgcccggctgctccagaaccacctgcggcgagcagggctttgagaacatcgggccgtggtttc

SEQ ID NO: 1001348 - DNA, 120 bp, Artificial Sequence
  ENSG00000242686_1 (sequence is synthesized)
cgcacgtcaggccgcctgtggcctccgccaagcgtctgagagtgaagcattgctgacgcactccacgaggtcctggccagaccccactcaggacatcccgctgcacaggcccctggttgc

SEQ ID NO: 1001349 - DNA, 120 bp, Artificial Sequence
  ENSG00000242686_2 (sequence is synthesized)
ggccctccttgggccacctttctctgcctccttggtcaaggcccagacccaggccccaccaggccctgcctcctcacactcgcggcggccgctgggtcttctaccgcatggtgccagctc

SEQ ID NO: 1001350 - DNA, 120 bp, Artificial Sequence
  ENSG00000242686_3 (sequence is synthesized)
cctctcctccgctgcggtgtcctagcccagctctctccctgccaggccctctgaagttccaccccctggcactcagctcatggtgggaacaggaccaggctctcctgttgccaagggcag

SEQ ID NO: 1001351 - DNA, 120 bp, Artificial Sequence
  ENSG00000242686_4 (sequence is synthesized)
tgagatgttcgtagctttatttcccagtacattgattttactgattttagtttatcttcagttgaataattgtgtgtattgatggggtttatgttttatggggtttggcgtgatgttctg

SEQ ID NO: 1001352 - DNA, 120 bp, Artificial Sequence
  ENSG00000242686_5 (sequence is synthesized)
gccctgccaccctgaccctgacttgtgctcaagcctggcacctggatcctggttcctgcttggggcctggggatggggtcccaataggcttatgggatcacagggccactgggccaccag

SEQ ID NO: 1001353 - DNA, 120 bp, Artificial Sequence
  ENSG00000242686_6 (sequence is synthesized)
ctgcccctcccttggctggagtcctgccctgacctccggactggagttcccctcctcttccagccccacggggccaagactcggcctcctggctggaggctccactgtctgggtggggct

SEQ ID NO: 1001354 - DNA, 120 bp, Artificial Sequence
  ENSG00000242686_7 (sequence is synthesized)
ctcaattgttgctgacgaggccgcctggacagcttgcctggtcccctgtatgtccactctggatgtccacagtgactcgggctcctcagcagcccacgtcctcctcaccatctcccagaa

SEQ ID NO: 1001355 - DNA, 120 bp, Artificial Sequence
  ENSG00000242686_8 (sequence is synthesized)
cagaggcccacggagtaccgctcgcagttgaggtaggcccgcaccgtgtagaaggccttgtggaactgcctctcgatgtccgtcagctcctcaaacaccttgttggccgaccacagcagc

SEQ ID NO: 1001356 - DNA, 120 bp, Artificial Sequence
  ENSG00000242686_9 (sequence is synthesized)
acctggagggaggggcacacctgtgggcctgtggccactcccaccctcacgccggtctgaccacagcagcaggggtttaactcaagcctgacacaggtgcgctccctgatctgaccacct

SEQ ID NO: 1001357 - DNA, 120 bp, Artificial Sequence
  ENSG00000242686_10 (sequence is synthesized)
aaaacagcggaaggtctgttatgatctaaaatggcctctgtggccctgaggtgagcttttaagtaggtaaagcagggcagctgggggcttcactgaggcacgtggagctggccgggaggg

SEQ ID NO: 1001358 - DNA, 120 bp, Artificial Sequence
  ENSG00000242686_11 (sequence is synthesized)
cgggacgtggcagagacaaggagaagcacacatcgccgcacccagtgagggcaaggctgtggggactccagacagcacgggactcacaaagccgctttctgccacgtagcttggaaggcc

SEQ ID NO: 1001359 - DNA, 120 bp, Artificial Sequence
  ENSG00000242686_12 (sequence is synthesized)
gctggccagggcccagtgatcggctgagggtgtgctgtgggcagagagcaggggtcagataggccacgccgggctggatgtgcgcgtgcaggagtcagagggactggatgtctgtgtgca

SEQ ID NO: 1001360 - DNA, 120 bp, Artificial Sequence
  ENSG00000242686_13 (sequence is synthesized)
ggggtgagaggggctggtctaggctgcacgtgtgtgtgcaggggtcagaggggctggtctgggctgcacgtgtgtgtgcaggggtcagaggggccaggctgcgctggatgtaggtgtact

SEQ ID NO: 1001361 - DNA, 120 bp, Artificial Sequence
  ENSG00000242686_14 (sequence is synthesized)
ggggtcagatggactgggcgtgtgtgcaggggtctgggggtctctggctcatgtgccatcctcagcatttactctcttctctgagtgccagggggttcaggaggcgaggaggccagggcg

SEQ ID NO: 1001362 - DNA, 120 bp, Artificial Sequence
  ENSG00000242686_15 (sequence is synthesized)
tgggttggaggacggctgtgctgccttcttcctcctccccaggctgccgtgctggggcccctccctcttgggaacccctccctctccggaggccgtatggcttcagcctgctttctagga

SEQ ID NO: 1001363 - DNA, 120 bp, Artificial Sequence
  ENSG00000242686_16 (sequence is synthesized)
acaggccctgggcccctcccctaagactcacccggccatcaggcgtgcgtgggcccgagtacggctgggactctcccatcagcacagaccacacgtcaaaaaattcctgggcagagaaga

SEQ ID NO: 1001364 - DNA, 120 bp, Artificial Sequence
  ENSG00000242686_17 (sequence is synthesized)
ggagctggctggcggtgaggcctcgaggctgcggtcgtgtccctgatcactcaggagtggacgagtggaaagtggaatctgtcgctttgagcttgacaggcaaacatccgaccagccctt

SEQ ID NO: 1001365 - DNA, 120 bp, Artificial Sequence
  ENSG00000179523_0 (sequence is synthesized)
tgggtcgggcttccagctccctacaacgcagaccagtactggagttcgtggtgctggaagaccgccgcccgactctgggccccgggtaggaaacagtctacaaataaacattttataaag

SEQ ID NO: 1001366 - DNA, 120 bp, Artificial Sequence
  ENSG00000179523_1 (sequence is synthesized)
atgatccttcaatacatattctacagcccagttaaaatgtgagaggccatgatctacagacagccatttataaaggtggatcagggccggacacggtggctcaacgtctgtaatcccggc

SEQ ID NO: 1001367 - DNA, 86 bp, Artificial Sequence
  ENSG00000179523_2 (sequence is synthesized)
gaccccatctttacaaaaaaatatatatatccaggcatagtggtgtgcacctgtggtcctgtggtcccagctactcaggaagctga

SEQ ID NO: 1001368 - DNA, 120 bp, Artificial Sequence
  ENSG00000179523_3 (sequence is synthesized)
ctactcaggaagctgaggcagttgaggctgcagtgagccacgttctggccactacactccagcctgggcatcaaagtgacaagaccaaaaaaaaaaaaaaatgtggattggaaggaggca

SEQ ID NO: 1001369 - DNA, 120 bp, Artificial Sequence
  ENSG00000179523_4 (sequence is synthesized)
agggaggggcacagggggctgaggagtgctgggtcgggcttccagctccctacaacgcagaccagtactggagttcgtggtgctggaagaccgccgcccgactctgggccccgggtagga

SEQ ID NO: 1001370 - DNA, 120 bp, Artificial Sequence
  ENSG00000179523_5 (sequence is synthesized)
aacgtaagtgccaggaagttagcagagtggttctttggctggcgcctgaacctcgccagtcttcgtcgcccctcccctgccaacgcctaccccgcttcgaccggagggtgcgctgtccct

SEQ ID NO: 1001371 - DNA, 120 bp, Artificial Sequence
  ENSG00000179523_6 (sequence is synthesized)
ctggtcactgtgatcaccgtccatggccgcctgcggatacccacgccgtgctcagaagagggctctgaggccacgcccgcctgtggggtcggtggccgggcttccgggaccccagaggga

SEQ ID NO: 1001372 - DNA, 120 bp, Artificial Sequence
  ENSG00000179523_7 (sequence is synthesized)
gtcgtcgcgcgctaggtggaggggacccctctggaatccggcgatccccgggcgcagatgcaggagcgggtggggagagccgcgttcctggcatgtttgcctcgagttagtcacgaagga

SEQ ID NO: 1001373 - DNA, 120 bp, Artificial Sequence
  ENSG00000179523_8 (sequence is synthesized)
atcgaagagagccttagtcttcgaggcttttcccttcctgtgagcccctttgaggccagcacattgatttttttttctttcgcagaacaatttcggacctcctggggtctatgctaggta

SEQ ID NO: 1001374 - DNA, 120 bp, Artificial Sequence
  ENSG00000179523_9 (sequence is synthesized)
tgaggtgtatctttgccctccatcaagtagcaaagatggacatgtaaacaaatttcgacactgtgatgactgccacaaaaagcagcattatgaggttgaatgtaaaaggataaccttagc

SEQ ID NO: 1001375 - DNA, 120 bp, Artificial Sequence
  ENSG00000179523_10 (sequence is synthesized)
ggcggcgggggccggaggatgaaggaaggcttcctgaggtaggcgctggttgaaactgaagttggagagagcaagtggcatttgctgaagtgcatttccggtagaaaactccagtggtcc

SEQ ID NO: 1001376 - DNA, 120 bp, Artificial Sequence
  ENSG00000179523_11 (sequence is synthesized)
ttaaggcaatggcaatggagaagaagaaaccaacttgagaaatatttaaaggtcattgtcaatggaacttagtgactttaatggttaattttatctatcaacttggctaggcgatgctac

SEQ ID NO: 1001377 - DNA, 120 bp, Artificial Sequence
  ENSG00000179523_12 (sequence is synthesized)
ccatgttactcagtttttggtcaaacactagtctagttgttgctatgaattgtatttgttagatgtgattaacatttaaatcagcagactttgattaaagtacattaccctctataatga

SEQ ID NO: 1001378 - DNA, 120 bp, Artificial Sequence
  ENSG00000179523_13 (sequence is synthesized)
gggtgggccgcatccggtcagttcaaattaaaacgagacccttaagaagaagcaattcagcctccagactgcagcgtcaaatctccctgggtctccaggctgtttgtctgccctgcagat

SEQ ID NO: 1001379 - DNA, 120 bp, Artificial Sequence
  ENSG00000179523_14 (sequence is synthesized)
ttcagacttgccagctcccagaataatgtgagccaattccttaaaataaatctctttctgcatatacacatcctattgattctgtttctctggagaacccgtactaatatagtgtctgac

SEQ ID NO: 1001380 - DNA, 120 bp, Artificial Sequence
  ENSG00000179523_15 (sequence is synthesized)
tagatatgaaggaggaggggaagggagaaatagatagacgatgcctttggatattgagtgacacttatctagttgcttaagtcaaaaacctgaaaactggttaggcacgcctattacggg

SEQ ID NO: 1001381 - DNA, 69 bp, Artificial Sequence
  ENSG00000179523_16 (sequence is synthesized)
gtcaaaaacctgaaaactggttaggcacgcctattactttgaagtaattcaagaccagcctggccaaca

SEQ ID NO: 1001382 - DNA, 72 bp, Artificial Sequence
  ENSG00000179523_17 (sequence is synthesized)
gggcgtggtggcacatgcctgtaaccccagctcctcaggaggctaaagcaggaaaattccactccagcctgg

SEQ ID NO: 1001383 - DNA, 74 bp, Artificial Sequence
  ENSG00000179523_18 (sequence is synthesized)
ttgcagtgagccgagattgtgctactccactccagcctgggagagactccatctgaaaacaaacaacaaaaaaa

SEQ ID NO: 1001384 - DNA, 120 bp, Artificial Sequence
  ENSG00000179523_19 (sequence is synthesized)
ccatctctactaaaaataaaaaaaaaattagctgggcatgttggcgggcaccgtaataccagctactcgggaagatgaggcaggagaatcacttgaaccgggaggcagaagttgcagtga

SEQ ID NO: 1001385 - DNA, 88 bp, Artificial Sequence
  ENSG00000179523_20 (sequence is synthesized)
ttgaaccgggaggcagaattagcctgggcgacgagcgaaactccctctcaaaaaaaaagaagaaggctgggcgcggtggctcatgcct

SEQ ID NO: 1001386 - DNA, 66 bp, Artificial Sequence
  ENSG00000179523_21 (sequence is synthesized)
tggatcacttgaggtcagtagttcgagactagcctggtcatgcctataattccagctacttgggag

SEQ ID NO: 1001387 - DNA, 120 bp, Artificial Sequence
  ENSG00000179523_22 (sequence is synthesized)
gaagaattctgtgctcgcaggaaagatctgtaggaataatgaaatgctttcttcattgatgagatgaagtctctgtttttcaggcaagttgacagaacaaaacaatgagaaacgaacttc

SEQ ID NO: 1001388 - DNA, 120 bp, Artificial Sequence
  ENSG00000179523_23 (sequence is synthesized)
tttagaaggttgaatgaaagtaagatctagatgaaaaagtcattggccaaagataattttttaaaaaaaacattctatgttaacccttggaaaaaaaaacaaaaaacaacccagagaaat

SEQ ID NO: 1001389 - DNA, 87 bp, Artificial Sequence
  ENSG00000179523_24 (sequence is synthesized)
ttttgttattttcgcaatttattttcaaatatgtaatacgcgaacttggtacaacattcatgtgataaaaaggtagatacgtgggca

SEQ ID NO: 1001390 - DNA, 120 bp, Artificial Sequence
  ENSG00000179523_25 (sequence is synthesized)
tgagtggcgcagtcagagataaatggaacaggtacactgaccagaaagggcaagatgggctaaacttcgccgttgggccactgggctcccccgcaggattttaaagagctagccagtaga

SEQ ID NO: 1001391 - DNA, 120 bp, Artificial Sequence
  ENSG00000256481_0 (sequence is synthesized)
aggtgagggcgtgtggctgaagcctgttcctgcttgggggttggccacacagcatcccaactccaggtccagagccgagcctgacagccctcctccactgcctcctggagctgccggaga

SEQ ID NO: 1001392 - DNA, 120 bp, Artificial Sequence
  ENSG00000256481_1 (sequence is synthesized)
gaggtccgggtccgttctccccaattcacagacatgaagactgaggccgtggttccagtggctgctcggtggtggggctggagcttggcagcatcctgcagccctctggactcccggctc

SEQ ID NO: 1001393 - DNA, 120 bp, Artificial Sequence
  ENSG00000256481_2 (sequence is synthesized)
tcgagtgccgcgttctacctgctgtgttctaaatggacatgccatccccacagctgtgtcaataaagcagccatttacagagcgggcgccggatcccgtgacaggttgaaaacagctgcc

SEQ ID NO: 1001394 - DNA, 120 bp, Artificial Sequence
  ENSG00000256481_3 (sequence is synthesized)
cacctcctgtgtgccaagtgctggcttagtctcccctggcgttttctcatatcccattaacaacccacccagtgggtatcatcatccccatttcacaggagctgtcactgcctctctcct

SEQ ID NO: 1001395 - DNA, 120 bp, Artificial Sequence
  ENSG00000256481_4 (sequence is synthesized)
tgatggcggggtatgaagagaagccttttgacgcagggagatgacccctccccggcctccacctacacagcagccacgtggccaccctgaacagctgccacagtgaccgacaccccctgg

SEQ ID NO: 1001396 - DNA, 120 bp, Artificial Sequence
  ENSG00000256481_5 (sequence is synthesized)
atgtgtttgtcctcccacagcaaagcacaattaacatccccactggtaaatgatatggggccatatttcacctggacccaaatgtgggccacagaggcattaaaataaatgacggcacgg

SEQ ID NO: 1001397 - DNA, 120 bp, Artificial Sequence
  ENSG00000256484_0 (sequence is synthesized)
attcaaggctccatcagccggggccctggcaggaaccagagttcactcaaccgttcacagaagggtgccttgcagaggcgcaggcaggaatgagctttggtgtggatttaacctgaacag

SEQ ID NO: 1001398 - DNA, 120 bp, Artificial Sequence
  ENSG00000256484_1 (sequence is synthesized)
ggcaggcacagagtgtatgctctgtgtgaattgaccttctgtattttcatccttcagacgtggaaccaatagaatctcctttataaatgtatcgatcatttctgcccagaatctcttcct

SEQ ID NO: 1001399 - DNA, 120 bp, Artificial Sequence
  ENSG00000256484_2 (sequence is synthesized)
gttccctcaggcagcaggctccttaaagaaaaaactttactcttttttttaatagagtaagtgagtcacatccttttcagaagtagcatcctaacgttagtacataagatgaagtcacaa

SEQ ID NO: 1001400 - DNA, 120 bp, Artificial Sequence
  ENSG00000256484_3 (sequence is synthesized)
atagcagaatgaccaaaggcaacaccttcgtaagcccttgaaatacagtgacggacacaacacccctccctggacccatgggtgttgcttcctgcagccagggaccaggttcctgtgtct

SEQ ID NO: 1001401 - DNA, 120 bp, Artificial Sequence
  ENSG00000255666_0 (sequence is synthesized)
gagactgtgaattcttcaaaagcaggtactgtgtttaatgaagtgtgcccaggactttgctcagtgactggatgacacagtaggagtaacaagaaagttcacatgggtgaaccgtgaagc

SEQ ID NO: 1001402 - DNA, 120 bp, Artificial Sequence
  ENSG00000255666_1 (sequence is synthesized)
attttctaaaacaaggtgcagcaatcagttgagtgaatttgtcaccagagcttatgttttctgaaagaaccctatcctcaggcagttgttcctaagagccttttcctttcccttgaagat

SEQ ID NO: 1001403 - DNA, 120 bp, Artificial Sequence
  ENSG00000255666_2 (sequence is synthesized)
tccacaaatatgtcagcgctggaaatgatcctttggctttgaactatgtgaagactgcagaaggactggttggtcaggctgcatttgtatcctgggtccacaagacatcgtttccttaaa

SEQ ID NO: 1001404 - DNA, 120 bp, Artificial Sequence
  ENSG00000255666_3 (sequence is synthesized)
accaatccccctgattttgctaagtgtctgcaagcctaatatttcatggatgtttgacaaggaccccgtctttagctgaactaaggagaaagtcctgcaacacacacatggagctcagca

SEQ ID NO: 1001405 - DNA, 73 bp, Artificial Sequence
  ENSG00000255666_4 (sequence is synthesized)
ctaaggagaaagtcctgcaacacacacatggagctcagcaaacggaggatgtaacgcacatgaaatttggtgc

SEQ ID NO: 1001406 - DNA, 65 bp, Artificial Sequence
  ENSG00000255666_5 (sequence is synthesized)
gacgaagaaactgaggtccagagaagttaaacgaccttcctaagattacacagcttagtaagtgg

SEQ ID NO: 1001407 - DNA, 120 bp, Artificial Sequence
  ENSG00000255666_6 (sequence is synthesized)
gttaaacgaccttcctaagattacacagcttagtaagtggcagaaccacagctggaagccaggtccttcctcacgcaagtcctggctcattcattcctcttccaaagacttgctgagcac

SEQ ID NO: 1001408 - DNA, 120 bp, Artificial Sequence
  ENSG00000255666_7 (sequence is synthesized)
cttctaggtgccagatgcggtgctggctcctggggacatgggagtgaacaggccaggcgtggccctgaaccatcaaatagacaaccacagaaataacaacgaatgatgctggaggctgac

SEQ ID NO: 1001409 - DNA, 120 bp, Artificial Sequence
  ENSG00000255666_8 (sequence is synthesized)
gaagataagggtggaaagtgggcaataaatcaggagctgttgcaacattcccagcaaaggataatggtgaataacaaagacaaaaccgggcccttccacacagtagctggaacacaaagg

SEQ ID NO: 1001410 - DNA, 120 bp, Artificial Sequence
  ENSG00000255666_9 (sequence is synthesized)
aagatcagccaagcctcaacataatctcataaaaattcttcaaatatcccattgttatggattcatacatcaggaaagcagatgccaagaacctgaacaccttctactggtaacatatat

SEQ ID NO: 1001411 - DNA, 120 bp, Artificial Sequence
  ENSG00000255666_10 (sequence is synthesized)
tcctccaccattgggatgaatttgaccctaacaatctaaagaaaaggcatatgattttttactgcaatattgtttgacacaattatgagctgcccaatccggaacaatgggcagtcaatg

SEQ ID NO: 1001412 - DNA, 120 bp, Artificial Sequence
  ENSG00000255666_11 (sequence is synthesized)
gtagccttaattatgataccatcctgtatctagacctattttacaagaggcagggcaaatggtcagaagtcccacatatacaggcctacatgaccctatacgaagacctaagaatctagg

SEQ ID NO: 1001413 - DNA, 120 bp, Artificial Sequence
  ENSG00000255666_12 (sequence is synthesized)
aaactcccagaacccatcccccgaaggaaagttctggggcagaactagatattatagatgaacccccttttacaagggatacctgtctctcagagtgagcagtgactgtccccatataac

SEQ ID NO: 1001414 - DNA, 120 bp, Artificial Sequence
  ENSG00000255666_13 (sequence is synthesized)
ccctcaccaagtgctcctgaggctgaaacccaggggcaaacatggggaaccctactaagtccccctcacacttggaggggaacactgtattcaactctctatccagccctgctactctca

SEQ ID NO: 1001415 - DNA, 120 bp, Artificial Sequence
  ENSG00000255666_14 (sequence is synthesized)
gagaaatagcaggggctgaggggccaatcctagtgtgggtccccttctctatgattgatatacaacaatgtaaggaaaagctaggaagctattctgaggattccgggaagtttgcagatg

SEQ ID NO: 1001416 - DNA, 120 bp, Artificial Sequence
  ENSG00000255666_15 (sequence is synthesized)
ggttccaaactttgaccttagcctttgatctctcatggagagacgttcaattcactctagcaacctgttgcacctcctcggaaaaggaacgaatctttgaggctgccctccgagaagtgg

SEQ ID NO: 1001417 - DNA, 120 bp, Artificial Sequence
  ENSG00000255666_16 (sequence is synthesized)
acgaattattcacccaaaaccgtaaaggcagtcacccaggcccagccacagttcccactacgcatcctaattgagaccaagacacccccgcaggaaggaacaactgggctaaatttcttg

SEQ ID NO: 1001418 - DNA, 120 bp, Artificial Sequence
  ENSG00000255666_17 (sequence is synthesized)
aggctcttggaggaatgagaaagggaataactaaggcagtaaattatgataaagtaaggcagattacacaaggcagggaggaaaacccagctgtgttttacggcaggctgcgggaagcct

SEQ ID NO: 1001419 - DNA, 120 bp, Artificial Sequence
  ENSG00000255666_18 (sequence is synthesized)
ttaaaaaatatatactaatttggtcccttcctctcctgaaggcaagttattaatggcacaacgtttcattagccaatccacaccagacattagacgtaagctccaaaagctacacatggg

SEQ ID NO: 1001420 - DNA, 120 bp, Artificial Sequence
  ENSG00000255666_19 (sequence is synthesized)
gccacaaactaaccaaaatcagcttcttggtactgccttcatggtgtataacaatcgtgacctggaggaaggagaagggaaacagagtaaagaaaaacggcaagccaaaattatgttagc

SEQ ID NO: 1001421 - DNA, 120 bp, Artificial Sequence
  ENSG00000255666_20 (sequence is synthesized)
catcactggtgatgccctaaatgcacaaagattgtccaagggaaactcaaagggccataaggataatgccagcaaaggctcttgcttcaaatgcaataaaagtgcgattgggcacaggaa

SEQ ID NO: 1001422 - DNA, 120 bp, Artificial Sequence
  ENSG00000255666_21 (sequence is synthesized)
gtactgtgtttaatgaagtgtgcccaggactttgctcagtgactggatgacacagtaggagtaacaagaaagttcacatgggtgaaccgtggtaggtggacatcgtctctctcacctctt

SEQ ID NO: 1001423 - DNA, 120 bp, Artificial Sequence
  ENSG00000255666_22 (sequence is synthesized)
cccaaatcaaggatgaagtacatcttcataaatcctcatgtgaattattttgctacctctagaagcattttctaaaacaaggtgcagcaatcagttgagtgaatttgtcaccagagctta

SEQ ID NO: 1001424 - DNA, 120 bp, Artificial Sequence
  ENSG00000255666_23 (sequence is synthesized)
cccagaaagaaaaaataaataactttttagactatacaaaagggtcaatgtcatgttacataagatgctcaaactcctgtcttgatgttaagtccactggtcttaccacagcttctgaac

SEQ ID NO: 1001425 - DNA, 120 bp, Artificial Sequence
  ENSG00000255660_0 (sequence is synthesized)
aataaatgctgcgttccatgtgctaagtactgaagttattaccatgacaacaagaccaccttcttgcctacagttcggagattaataaagggctcctgagataaccacaaggcacatgaa

SEQ ID NO: 1001426 - DNA, 120 bp, Artificial Sequence
  ENSG00000255660_1 (sequence is synthesized)
tctggacaacctcatactgccatccacgtaagtgtctatgctgcattgtaacttttggaaaaacatgcacacacctggtgccacctgggtaggtgtgaccagaacctgcctgttggaaaa

SEQ ID NO: 1001427 - DNA, 120 bp, Artificial Sequence
  ENSG00000283240_0 (sequence is synthesized)
gagagaaacttgaagagcttgaagaatgttaccaagaatgaaaaagtttgaagataggggagttggaaggaatacctggtagaggacattcttgaaggtgtggaaatagagtctagaaca

SEQ ID NO: 1001428 - DNA, 120 bp, Artificial Sequence
  ENSG00000283240_1 (sequence is synthesized)
caactgaataaagagagctccccattttgtgagattggaggtgaagagggaaatttgtggaaagaggaacttggcaaggatgaccaaggggaacccagcccacggccacggacctgttag

SEQ ID NO: 1001429 - DNA, 120 bp, Artificial Sequence
  ENSG00000283240_2 (sequence is synthesized)
gaaccggactgcagagcagtaggtgagtggcagatgggaacatctagttgcaggaaatcaagctcacggatcccactgattctacattatgatttttgttttaggctcttggtacaataa

SEQ ID NO: 1001430 - DNA, 120 bp, Artificial Sequence
  ENSG00000283240_3 (sequence is synthesized)
tttaaaggggacaattaacaaacttgattgtttctgggagagtatgaccaagtcgtgtcatgaaagcgtttgatttactcaacataggctgagaggtgccacagttaaattctttctgct

SEQ ID NO: 1001431 - DNA, 120 bp, Artificial Sequence
  ENSG00000283240_4 (sequence is synthesized)
aagtagcaattgagctcagagccactggtcgcatgtttttcaagactgggggaaggaaacagaaaactgaggcatctgaaacagcaaagtctgccgctttgcctctgggacaacaataag

SEQ ID NO: 1001432 - DNA, 120 bp, Artificial Sequence
  ENSG00000283240_5 (sequence is synthesized)
acacagagagtatgaccttcaatttctaaaatcagttacacgggcaccaactggcagtgaagtgagttgaaattcttcctgcaaatcactaaagaccatgtacgaccaggaaatctgcct

SEQ ID NO: 1001433 - DNA, 120 bp, Artificial Sequence
  ENSG00000283240_6 (sequence is synthesized)
cttaaaggatagcagagcagtgatgctgacacctttgggagaagatggggaacctgtcagcagtttcagcgtcttctggccctttgattaaactcttcccacccccactcccaaactaac

SEQ ID NO: 1001434 - DNA, 120 bp, Artificial Sequence
  ENSG00000283240_7 (sequence is synthesized)
taaagctttttgctattcaagtagtggtagacaaccagtgaactgtttctgcttggagagcctactttactttccataaccttcctttctatccaatgaaaagcaactgtggccttttac

SEQ ID NO: 1001435 - DNA, 120 bp, Artificial Sequence
  ENSG00000283240_8 (sequence is synthesized)
taagtaaatgagcaaatattttcccagtgttcaccaggttagatccccatttaattaaactggctcattatgtccctatctgattagcagagtagaatcaattattcaatgcacaaacat

SEQ ID NO: 1001436 - DNA, 120 bp, Artificial Sequence
  ENSG00000257286_0 (sequence is synthesized)
tccaggttggcaatcacgccgtttattcgcacttggcagcaagacaatggatgatgtgggaggtgccaggctacgtgtgaacggcccgcgaatccagaaacccagaacccagcactttgc

SEQ ID NO: 1001437 - DNA, 120 bp, Artificial Sequence
  ENSG00000257286_1 (sequence is synthesized)
accagggagcagccagcagcactgcggacgcggcccggaccattcgcgcccgcggatggggggagtccgcccaggggcgggcgccacgctcctgaggcccaggaggtccctaaacatgga

SEQ ID NO: 1001438 - DNA, 120 bp, Artificial Sequence
  ENSG00000286792_0 (sequence is synthesized)
gtacggggactgggaacagtgagcatggtttttgcagcctctccagacagtcttttcctgggtactgccatgatcagctccaaaggctacacgacagaggctgctgtccgtcaggccagg

SEQ ID NO: 1001439 - DNA, 120 bp, Artificial Sequence
  ENSG00000286792_1 (sequence is synthesized)
atcaagcctgaagacacgatcaatccttcaagataagagaattttatcgtggaagcagagcgagtggcatctccccactgcaccagaaaggcttctggagttcacgcactgcccttggct

SEQ ID NO: 1001440 - DNA, 120 bp, Artificial Sequence
  ENSG00000286792_2 (sequence is synthesized)
cctccagttgctatcaagttgatttacttctgcatggagcatcttaggacctaagaatagcaatgatgaaacccagaaagaaaaggcagactcacagcagaggaaatttggacacagaca

SEQ ID NO: 1001441 - DNA, 120 bp, Artificial Sequence
  ENSG00000286792_3 (sequence is synthesized)
cacacagagggaaaatgatgtgaagacacagggagaaggtggccatctacaagctgaggagagaggcctcagagaaaaccaaccctgccggcaccttgatctcagacttccagcctccat

SEQ ID NO: 1001442 - DNA, 120 bp, Artificial Sequence
  ENSG00000286792_4 (sequence is synthesized)
taattaattttctctctctccagtgagaaaattgatttctattgtggaaattcattaccacagtctgtggtactttgagttagggcagccctggcaaactaacatatcagtaaataaaaa

SEQ ID NO: 1001443 - DNA, 120 bp, Artificial Sequence
  ENSG00000286792_5 (sequence is synthesized)
tttgttgaagaaggaactctgtcacaccggccttctaaaaggcctttagaatgtcttcttacaattgatagtgtctgacctcattaaccttctcatcaacgtcttctacaacctgtcttc

SEQ ID NO: 1001444 - DNA, 120 bp, Artificial Sequence
  ENSG00000286792_6 (sequence is synthesized)
accagactctttacagacctcaattcatcctctgatttgctgtctccaaggctttcttcaagatgtggccccacctggaacggtcacttctccttccaaaccccaaaaacacttttgtgc

SEQ ID NO: 1001445 - DNA, 120 bp, Artificial Sequence
  ENSG00000286792_7 (sequence is synthesized)
ttgttatttgataatcatgatttgcaatattctattcgtattgtttatgagcttttcatgtgcaagtatttcttctctgtaatgtaaacttcctaataacaaaaactacatttgatgctt

SEQ ID NO: 1001446 - DNA, 120 bp, Artificial Sequence
  ENSG00000286792_8 (sequence is synthesized)
ctctctgctcttcacagcatggaacacactgtctggctcaactaatatttgttgcctaaagcaggcaccatgagaaggaaaagtaaatcgctgcagcctgagaaaatgtggtaccctcaa

SEQ ID NO: 1001447 - DNA, 120 bp, Artificial Sequence
  ENSG00000286792_9 (sequence is synthesized)
agaaaatgtggtaccctcaactgggtaaaaccatcgtaggcaacatggctcatggtgcaaggttcttaaaaagaagaaacaacattgcttgcttcagcagcacatatactaaaattggaa

SEQ ID NO: 1001448 - DNA, 120 bp, Artificial Sequence
  ENSG00000286792_10 (sequence is synthesized)
tggcccctgagcaaggatgacatgcaaattcatgaaacgttacataggtttttactataggtaacaatacattatatagtttcaactagctagggggaggatattgaatgtttccaatcc

SEQ ID NO: 1001449 - DNA, 120 bp, Artificial Sequence
  ENSG00000286792_11 (sequence is synthesized)
aaagaaatgatcagtgtttgagaggatggatatgctcgctcattaccctgacctgatcaccatacattaaatgtatcaaaacatcactgtccacccatgaatatgtacaattattttttg

SEQ ID NO: 1001450 - DNA, 120 bp, Artificial Sequence
  ENSG00000286792_12 (sequence is synthesized)
tcaattttaaaaaataagacacaacaaactatatgcagcataatccacagaaacaataagagctccaagactgatatgaaggaaaggaagagctccttgtttatcttgaaacatatgaat

SEQ ID NO: 1001451 - DNA, 120 bp, Artificial Sequence
  ENSG00000257284_0 (sequence is synthesized)
atacccttttgaacaacgagatctgaaatgctaaggataaagcagccatctgctggccatgagaagagaggcaataggaaaaaaaaaactacattctaaagatgaagctgtgttacctgt

SEQ ID NO: 1001452 - DNA, 120 bp, Artificial Sequence
  ENSG00000257284_1 (sequence is synthesized)
acagtgtgccttcgtctctgtacatgaactacagaaaaaccccactgtcacttctcacttttctgctgtattacaggaaccgttacataaacggagaaagtgaaaatcaatcctagctga

SEQ ID NO: 1001453 - DNA, 120 bp, Artificial Sequence
  ENSG00000257284_2 (sequence is synthesized)
cagtgacttcgggataatcagcgctcactggatgcctctgtcagttcgcctgcatcaaacaccgtgtgacttctgtcagatctttttaataaaactatattctcactttcagcaacctaa

SEQ ID NO: 1001454 - DNA, 120 bp, Artificial Sequence
  ENSG00000257285_0 (sequence is synthesized)
ctatctgaagaacgccgttgagagactacaccgcccatgaaaccctgcagtataaccttgaagtaccatcacggagagaaacagtgccatctcagggccagtggcgcaatggataacgcg

SEQ ID NO: 1001455 - DNA, 120 bp, Artificial Sequence
  ENSG00000257285_1 (sequence is synthesized)
tctgactacggatcagaagattccaggtactgaagcatccaatatggaaatagtcaagatatagaaaatgcaagctcttgaaggattcaagatatagaaaggatctgagatatggaaaga

SEQ ID NO: 1001456 - DNA, 120 bp, Artificial Sequence
  ENSG00000257285_2 (sequence is synthesized)
actcaggatatagaaggatctgaaattttggagactaagatatgagaatatttaagacacaggtgagcagaaatccccggatgccatttgattttcttgggattctaatctgtggaacca

SEQ ID NO: 1001457 - DNA, 120 bp, Artificial Sequence
  ENSG00000257285_3 (sequence is synthesized)
agaagtgaaagaaaacaaaaagatgaataaacagctggctgctccaaggacactaccttatgttcaaatttctgctgtccacaagctggaaaggaacctcaaggatgacttttacagagg

SEQ ID NO: 1001458 - DNA, 120 bp, Artificial Sequence
  ENSG00000257285_4 (sequence is synthesized)
gcctataccacacatcctgggtcccaagctcttacacaagctttatggacaaacagatttacaagtgccaaaacatgtcacattctaagcacacatgtgtttccacttgctccaagctgt

SEQ ID NO: 1001459 - DNA, 120 bp, Artificial Sequence
  ENSG00000257285_5 (sequence is synthesized)
ccaaaaggagcatcctaaaaagagaactttccaattcactgagtctaaacaagaggattctccaccaccaccaccattatgccaaagttaaaactgagctgcagcttcccagttatgagt

SEQ ID NO: 1001460 - DNA, 120 bp, Artificial Sequence
  ENSG00000257285_6 (sequence is synthesized)
tgttggtagttttttttttttttatcattaactctagaatcatccttcaggaatgacaaatcattccacacttgaacaactggttttcacataacagcctaagaaaagagcacctggagg

SEQ ID NO: 1001461 - DNA, 120 bp, Artificial Sequence
  ENSG00000257285_7 (sequence is synthesized)
aaacagcgtgacaagaagactgacagtgaggtcagtggcaaaagagtaatgcaaaggtgtaatgtggctacaacgagaacgtgagctgtgggtgttttgccagaacatggagtgcgctga

SEQ ID NO: 1001462 - DNA, 120 bp, Artificial Sequence
  ENSG00000257285_8 (sequence is synthesized)
aaggaatgacaccaacacaggggcagtaaagatgggcacagtttgacctcaggagacaaaaattttcccttgacattacttttcatgtttttgctctgcccctcctctctgcaaggtatc

SEQ ID NO: 1001463 - DNA, 120 bp, Artificial Sequence
  ENSG00000257285_9 (sequence is synthesized)
aaactccaaagggcaactgagcctcccaaagctgaacaggcattgaaggttattatgatttaacgcttcatgtttatagaacatttggtttactcgatcgttttatgagtaacatcaaag

SEQ ID NO: 1001464 - DNA, 120 bp, Artificial Sequence
  ENSG00000257285_10 (sequence is synthesized)
taactactcatttgttttctaacatggtctagagggggacgcagctgaggaggcagaatgctgggacttaatttgcagctcggccggccgttgcttctgagaacttaaggaaaatgcttt

SEQ ID NO: 1001465 - DNA, 120 bp, Artificial Sequence
  ENSG00000257285_11 (sequence is synthesized)
tttctgtgccaaacttttcccacctgcaaaactgagataacgattcctgccttggatgagacattaagaattaataacacaatcgacttgtcaacaaaagccactacttagttaagttca

SEQ ID NO: 1001466 - DNA, 120 bp, Artificial Sequence
  ENSG00000257285_12 (sequence is synthesized)
tggagactaagatatgagaatatttaagacacaggtaggaaggacaccttcaaggaatttgctggctacccttatttttataatatgcttgctaacatcagcatgggagcatcttgagtt

SEQ ID NO: 1001467 - DNA, 120 bp, Artificial Sequence
  ENSG00000257285_13 (sequence is synthesized)
tttagcctactacacaagcagatattgaaccaacattaacaggaattagtgtagtctgttttccaataagagagtgttcaaggatcttcatgtattccagtttcctcagaaacacatgct

SEQ ID NO: 1001468 - DNA, 120 bp, Artificial Sequence
  ENSG00000257283_0 (sequence is synthesized)
ttatgctggggtttgatgaagaatggacagctgtgtaggcctgcaactggataaaaaggactggagtgtgtgccagagggcgtgccaagctacaagacaatcaccttcgatttccctgga

SEQ ID NO: 1001469 - DNA, 120 bp, Artificial Sequence
  ENSG00000257283_1 (sequence is synthesized)
gagtcaatttgaccataaggaatgaccgaaggattggggaagaaaatactccccctgctgatgctcctttggttctacttgggagtgaagctcacaagaggagggactgcaataaacgtt

SEQ ID NO: 1001470 - DNA, 120 bp, Artificial Sequence
  ENSG00000257283_2 (sequence is synthesized)
tcgccttcctgtctgcggggtgtctgaacgaacacagcaagatgtgcaggtcactgagttagaagaagtcggcagggcctaaggccttctgcaaggtgtgactctctccctccatactga

SEQ ID NO: 1001471 - DNA, 120 bp, Artificial Sequence
  ENSG00000257283_3 (sequence is synthesized)
gaacattttgaagtgacttcagaggctgcagggcttgggaagtcccatgagaaccgctcccctttcccaaggcaccgacatggcctgtagccaggcattgctgtttctcagcagactgat

SEQ ID NO: 1001472 - DNA, 120 bp, Artificial Sequence
  ENSG00000250250_0 (sequence is synthesized)
agggtaaagagggctccgcgcatgcaggaagaccaccctaagggaagaatcatgggaaagagatgtcacatgaaagtctgtaaatatgaaccacactctactgcccagtgatggagaaac

SEQ ID NO: 1001473 - DNA, 120 bp, Artificial Sequence
  ENSG00000250250_1 (sequence is synthesized)
ctactgactgtggtgcgcagattcctaagacgccctcatggtatccatgtccgcatcatctcctcccccttgagagtgggctgaacctgtgactggcctctaaccaacaggctatcgtga

SEQ ID NO: 1001474 - DNA, 120 bp, Artificial Sequence
  ENSG00000250250_2 (sequence is synthesized)
tgcttctctccactgtcttattttcaagctgctactggtgcaccatgagaacctgatttaatactaagtgtccataccaaagttcaatgtctgtccctacagcataatataacatcggtt

SEQ ID NO: 1001475 - DNA, 120 bp, Artificial Sequence
  ENSG00000250250_3 (sequence is synthesized)
atctcaaacaattgatctggcttagttcctggcccaggtgcatattagtttttggaagaaactgaatacatattgtaaaagtgtattagctctttcaagccaaaggggagtgattaaata

SEQ ID NO: 1001476 - DNA, 120 bp, Artificial Sequence
  ENSG00000250250_4 (sequence is synthesized)
gatgacttctccaggggtggaggccttcaagtggggcgagatgaggaggcagagaatcctaagcactctgtttcattttcttgtgagcaaaaaacatgagacagtgtcctttgtttttga

SEQ ID NO: 1001477 - DNA, 120 bp, Artificial Sequence
  ENSG00000250250_5 (sequence is synthesized)
tggctacttgtagaacctccgaactacctacagagtccccgtggtgacatgctgtaaagtactccgtatttgtttccactaactgggtgattgaaaataataaaaatttattatctgaca

SEQ ID NO: 1001478 - DNA, 120 bp, Artificial Sequence
  ENSG00000250250_6 (sequence is synthesized)
gggtaaagagggctccgcgcatgcaggaagaccaccctaagggaagaatcatgggaaagaggcagaaaattaaaactggattgctacctggtgcttccatacactgaaaagaaagaacac

SEQ ID NO: 1001479 - DNA, 120 bp, Artificial Sequence
  ENSG00000250250_7 (sequence is synthesized)
tccaatctgccagccttacgatgttgggaaaacgcatcaaacagtgctaaggttttaagcatggagaatataatccagttgtaaagctattaacccagaaaagatgtcacatgaaagtct

SEQ ID NO: 1001480 - DNA, 120 bp, Artificial Sequence
  ENSG00000250250_8 (sequence is synthesized)
ctggccaatgccttcattgcagcactgtgagacccgaacaaaagatccagctaatgcatgttcagaattctgattccaggaaactgtggaataataaatgctcctatgttaagctgctaa

SEQ ID NO: 1001481 - DNA, 120 bp, Artificial Sequence
  ENSG00000250256_0 (sequence is synthesized)
acacagccagtgaaggaaagggctgaaatcaaaccaggcctgtctgactgcaaggcagggtcttacggctgcctccggtgggtaggtccgggacccagctggtttccgtcctgtggctca

SEQ ID NO: 1001482 - DNA, 120 bp, Artificial Sequence
  ENSG00000250256_1 (sequence is synthesized)
ggtgcgaggagagcctccctgggccacctggggaagtctgactgacgtgccagatcctcacagaacaaagcaccccctctctcagcaccagggagctcctccaggagcacttcctcccat

SEQ ID NO: 1001483 - DNA, 120 bp, Artificial Sequence
  ENSG00000250256_2 (sequence is synthesized)
ggccctcagtggatgtaaaataggtacatgaggccttgaactgaacatttttttcacttcaccataacctggattttcccagtttaggagcatctgtttgtcttgataacgtttggaaca

SEQ ID NO: 1001484 - DNA, 120 bp, Artificial Sequence
  ENSG00000250256_3 (sequence is synthesized)
aagtgaaaaaaactggactttgaagagaacttcagcctcccagcagccctgttttacagatgaagaaactgaggctcaaagagctggagaaagttgttgcccagggtcctgtggagagaa

SEQ ID NO: 1001485 - DNA, 120 bp, Artificial Sequence
  ENSG00000250256_4 (sequence is synthesized)
aactcaagctccggctgttccactactctgggacaccacccccagtgggaaccccacttttacaaggattcgaagctttactccattctttgccacacataaggaggccgaggagggaag

SEQ ID NO: 1001486 - DNA, 120 bp, Artificial Sequence
  ENSG00000250258_0 (sequence is synthesized)
cagcctgggtcctagagtgaggatgacatgagacagagccacagccaacccacaatggacgtatggcaaaaggtctcattctgatacccaggctggattccagtggcacgaacatgggac

SEQ ID NO: 1001487 - DNA, 77 bp, Artificial Sequence
  ENSG00000250258_1 (sequence is synthesized)
gctagcgagggtgcatgcgcagttgcattagacagttttcgacataccttctctgacctcagctcattgcaacctct

SEQ ID NO: 1001488 - DNA, 120 bp, Artificial Sequence
  ENSG00000250258_2 (sequence is synthesized)
tgagtagctgggattacaggagagacagaacagctgaggaaacagcagaacggtggaaaatttttgaaagtgttttgagcccacccaacctgaggagagcattcaaagaaaaacaggaag

SEQ ID NO: 1001489 - DNA, 120 bp, Artificial Sequence
  ENSG00000250259_0 (sequence is synthesized)
caagatgtcccctttttgttctctgtcctccccagggtagaccctacttctctcccctgaggaagtcctgactccttggacggtgacagcttcaggcatggccctggaggcctgggagca

SEQ ID NO: 1001490 - DNA, 120 bp, Artificial Sequence
  ENSG00000250259_1 (sequence is synthesized)
aggaggcgggcagaggcgcccagggcgtgagtgtggccagcaggacagagggcaggactgcgcttctgacagtggtctgctccggccaagcacctgaaagatggggagcccttcacccca

SEQ ID NO: 1001491 - DNA, 120 bp, Artificial Sequence
  ENSG00000211814_0 (sequence is synthesized)
atgctccttgaacatttattaataatcttgtggatgcagctgacatgggtcagtggtcaacagctgaatcagagtcctcaatctatgtttacccaggaaggagaagatgtctccatgaac

SEQ ID NO: 1001492 - DNA, 120 bp, Artificial Sequence
  ENSG00000211814_1 (sequence is synthesized)
ggtgaattgacctcaaatggaagactgactgctcagtttggtataaccagaaaggacagcttcctgaatatctcagcatccatacctagtgatgtaggcatctacttctgtgctgggcag

SEQ ID NO: 1001493 - DNA, 120 bp, Artificial Sequence
  ENSG00000255599_0 (sequence is synthesized)
gaggcagatcctgcagctccgaaacaccctccaagcttcacgttgccacacggttctgggagatgaggccatggcaatctgtggcttcccttgctcctgaacttgagcctctgattccct

SEQ ID NO: 1001494 - DNA, 120 bp, Artificial Sequence
  ENSG00000255599_1 (sequence is synthesized)
tccagagtagctgggattacagcacccctcccacaagctagcaggagggtggaagtgaggatgaaggatccttgtggaagctgagtccagcccaggatgcctctgcccacttctgctctg

SEQ ID NO: 1001495 - DNA, 120 bp, Artificial Sequence
  ENSG00000255599_2 (sequence is synthesized)
ctcttagcacaggtgcctggctcccacctgttgagttacaggccactgacttccaagtcaggccaggaggtcagtcatcttttccaccgatcctctgccctgagctgagttatctcgcac

SEQ ID NO: 1001496 - DNA, 120 bp, Artificial Sequence
  ENSG00000255595_0 (sequence is synthesized)
agggactgcaggagcgaattcccgaaggcttgcaggagccgcccggctctgcctccagcctttctctctgggcctagcgggactctcccaggcaggcccctccctgcccgcgggcgcact

SEQ ID NO: 1001497 - DNA, 120 bp, Artificial Sequence
  ENSG00000255595_1 (sequence is synthesized)
ttccccgcctgcatctgaggcgtggcgcagctgggagcaaagcacagttatcctggatcctatctttggtaccaatgtgacccatcctgagtgaaggtcacatgaggtattgaaagagaa

SEQ ID NO: 1001498 - DNA, 120 bp, Artificial Sequence
  ENSG00000255595_2 (sequence is synthesized)
ctggaaatgaaattgcctaatgagtcatcagacagcaactaaaagtcttgaactgtgacagccaccaaaagtacgaatagctcacatccctccagtggtgtgaatctgacatttgataga

SEQ ID NO: 1001499 - DNA, 120 bp, Artificial Sequence
  ENSG00000255595_3 (sequence is synthesized)
ataaagtgggtatggatggctaagattcatcattattagttccgaacataatagtgatatgggttcaaggctctctggttaatgaattcattccgtttgaaaaggcaaatgagacttctt

SEQ ID NO: 1001500 - DNA, 120 bp, Artificial Sequence
  ENSG00000255595_4 (sequence is synthesized)
caagcagcaaagaacaggcagtggctccatgctgtgtgcctcttctctcactcccccttctcttactcgctcattctgagggaagccaactgccatgttgcgagctgccctacagagtgg

SEQ ID NO: 1001501 - DNA, 120 bp, Artificial Sequence
  ENSG00000255595_5 (sequence is synthesized)
ttcatgggactcgaaaccaaaggatgcctccaggctccagtcaatggggaactaaggtcctcagtccaacagcccgtgagaaattgaacgccctgaagctacagaatgcattgggaactg

SEQ ID NO: 1001502 - DNA, 120 bp, Artificial Sequence
  ENSG00000255595_6 (sequence is synthesized)
ggtctcccccagtagagctttccgataaacctggatccacagccacacccacctgactgaacctcatgagggcgctatagcccgaagcacacaaatgagatctctctgtaaaaagaaaaa

SEQ ID NO: 1001503 - DNA, 120 bp, Artificial Sequence
  ENSG00000255595_7 (sequence is synthesized)
gatatccaggaacttccaagatggtagcttgcctgtggttgagaagatagtcttataggcttcaagatcaatgtgcagtcaagaaaaaaagaaagaaatcagtattctacattcccctaa

SEQ ID NO: 1001504 - DNA, 120 bp, Artificial Sequence
  ENSG00000255595_8 (sequence is synthesized)
tagaatagaagtgattcccacagctgcttcttacgatttattgatgagttcagggctgtacaagcacggcgccaacatctgttcagcttctggggaggcatcaggaagcttacgatcatg

SEQ ID NO: 1001505 - DNA, 86 bp, Artificial Sequence
  ENSG00000255595_9 (sequence is synthesized)
gttcagcttctggggaggcatcaggaagcttacgatcatggtggaaggtgaagcaggagcaggcacgttgtatgatagaatttccg

SEQ ID NO: 1001506 - DNA, 120 bp, Artificial Sequence
  ENSG00000255595_10 (sequence is synthesized)
ctcctgcctcagccccctgcgtagctgggattacaggcactctccctcttccttctatgacaaggaccctgattcgacacggctgcccatgttcccagctccaggagataaacgaagtca

SEQ ID NO: 1001507 - DNA, 120 bp, Artificial Sequence
  ENSG00000255595_11 (sequence is synthesized)
aacctaagccactcatgacaaatttgtctcctgtgtaattggtctaggcacaagcacatgacccatttatagacaatgagacaggcccttgttgaattagaacactgctgctaaaattga

SEQ ID NO: 1001508 - DNA, 120 bp, Artificial Sequence
  ENSG00000255595_12 (sequence is synthesized)
aagcatgatggggaaactgaggcctggagtaaccagtcatattgcttccatgctgggaactctccaatgacatatcgcacaatacagagccaacctcaagttccccaccatagaccacaa

SEQ ID NO: 1001509 - DNA, 120 bp, Artificial Sequence
  ENSG00000255595_13 (sequence is synthesized)
ggacttgcaagttctaaccttgcccaatctcccttatacgccctcagtccatgtgcctctgtgatgatggattgggtccttcttggcttcctccaaaggggcagaactgctctggaaggt

SEQ ID NO: 1001510 - DNA, 120 bp, Artificial Sequence
  ENSG00000255595_14 (sequence is synthesized)
tcctcatggcattggcaatgatcttattctatgctgcttaaagagattaaattgactttgctcttgttacataattaatggttaagaataaaattctgaacattttcaaggaaactttta

SEQ ID NO: 1001511 - DNA, 120 bp, Artificial Sequence
  ENSG00000255595_15 (sequence is synthesized)
gttgtcttgggggcagcgccagccaccagagcccgagtcagcgcggccaggactctgcaggggcaggtagcgacccttagagacgcaacgtggcgcagcggactcggctgcgtggggcaa

SEQ ID NO: 1001512 - DNA, 120 bp, Artificial Sequence
  ENSG00000255595_16 (sequence is synthesized)
gggccggggccggacacaggagcagcggggatgccgggtgcgctccgagggtgtggcccccgggctgtgcggggctcagagctgcttgctgggcgcggtgcccgacaaagttatcctgga

SEQ ID NO: 1001513 - DNA, 120 bp, Artificial Sequence
  ENSG00000255595_17 (sequence is synthesized)
tcctatctttggtaccaatgtgacccatcctgagtgaaggctccatttctggcctttggtctctttctcggaaagcaggcctcagtggcctcagtttcttcccagaacctgcaatgcccc

SEQ ID NO: 1001514 - DNA, 120 bp, Artificial Sequence
  ENSG00000255595_18 (sequence is synthesized)
aaccatgttgggacagtccatttgctgcgttttgattatttgctaagagcaaataccttttctgtttgggttttgcttttagaaaaaaaatgtggcagatggtggtggctttccccgtca

SEQ ID NO: 1001515 - DNA, 120 bp, Artificial Sequence
  ENSG00000255595_19 (sequence is synthesized)
ttgaaagaagaaaggtagtaactctactggtgcactcctctgagttgtgctaacaaagaagaatgctgaaagaaaagggaaatgaacaccattttcaggcagcttctccaagtttttttg

SEQ ID NO: 1001516 - DNA, 120 bp, Artificial Sequence
  ENSG00000255595_20 (sequence is synthesized)
acagtgttataattttcctttagcgactgttgaagcaaatatctgtatttatgttcagattaaaccgagagagcaaagactgctaaagccagtaatttctgggctgcaaatgcaggatag

SEQ ID NO: 1001517 - DNA, 120 bp, Artificial Sequence
  ENSG00000255595_21 (sequence is synthesized)
ccagccagctactgaaccttatgtgtgcctaggggccattttgagacaatttgctgaatattaaaagtacaaccaataatgtttctctccacatccacaatagcgcttagaggaagcatc

SEQ ID NO: 1001518 - DNA, 120 bp, Artificial Sequence
  ENSG00000255595_22 (sequence is synthesized)
tgggattgagccatctcacatctgtctaatcacattcattcaaatgtgatgggcccaactggcctacgtacatggctgcatatcaccatgggtggaaattaaatcagaatttggctcagg

SEQ ID NO: 1001519 - DNA, 120 bp, Artificial Sequence
  ENSG00000255595_23 (sequence is synthesized)
agagagatgaagagaaaatgcacgtagataattggctcagataacattctgtttctggaagtcacaaagagtggaaattggaatatgtaaattaaagaaaaacagtccttaagatcaagt

SEQ ID NO: 1001520 - DNA, 120 bp, Artificial Sequence
  ENSG00000255595_24 (sequence is synthesized)
ccgcaatggaagaagagcattcatctggtacaggttgatgattgtgtaagcccaaggagtgatgtcaacactggggttcacctgagaacatggacatggttgatgagggtttaggagatg

SEQ ID NO: 1001521 - DNA, 120 bp, Artificial Sequence
  ENSG00000255595_25 (sequence is synthesized)
ctcatacgaagtcttcatatgttccctggatcccagctctgccttcccaccagagaggatgtaattcagccgagatgcccagagtcagctctctgctcatatctgttccgcactgaagcc

SEQ ID NO: 1001522 - DNA, 120 bp, Artificial Sequence
  ENSG00000255595_26 (sequence is synthesized)
atttggggcataaacaagagtcgatgaaggaatgtgaaagtactcgaaatcctgacttttatctctataaaaatggcatagggatgaaacacacttggttgttatgactgtactcttttc

SEQ ID NO: 1001523 - DNA, 120 bp, Artificial Sequence
  ENSG00000255595_27 (sequence is synthesized)
agatttactacttgcctttctactgatttttctgtgccacaggtcttgactcctgtaggctaaatttctcagcctcttctgctcactgatatatgggaaggtttggccaaaggtgggtga

SEQ ID NO: 1001524 - DNA, 120 bp, Artificial Sequence
  ENSG00000255595_28 (sequence is synthesized)
ctggtggggagaaggatgagggaattcaggggattgctgagcccattctctagacagtgctgctggcactggctctgtcttctccgtttccatctcgcatcagacggttcttccctctat

SEQ ID NO: 1001525 - DNA, 120 bp, Artificial Sequence
  ENSG00000255595_29 (sequence is synthesized)
gggcctagtcctacctagacactttccagttggattccagttctggggatgctccctcctgcagggatctaagtccttcccattgtcttcggctcctgggctcagctagaaccatctttt

SEQ ID NO: 1001526 - DNA, 120 bp, Artificial Sequence
  ENSG00000255595_30 (sequence is synthesized)
cccattgtccctgtggtgctagggctttcagtggttattaacgtctgtgttgtatcatcttgcctgaatttcagctctctgtaaccagttccccaaataaaattccccccatttacctac

SEQ ID NO: 1001527 - DNA, 120 bp, Artificial Sequence
  ENSG00000255595_31 (sequence is synthesized)
ggacacaggagcagcggggatgccgggtgcgctccgagggtgtggcccccgggctgtgcggggctcagagctgcttgctgggcgcggtgcccgacaaagctccatttctggcctttggtc

SEQ ID NO: 1001528 - DNA, 120 bp, Artificial Sequence
  ENSG00000255595_32 (sequence is synthesized)
cgggaggctcttgtcatttattggattagttatagcactttacacaagcctgtaatatttgttctgctgctgtggtgtgactggtaaaatgaaaaggtatgtcaagggagtgcttgactg

SEQ ID NO: 1001529 - DNA, 120 bp, Artificial Sequence
  ENSG00000255595_33 (sequence is synthesized)
acgttcttatttcttccgtcttcttatattgctgggaggattctaccactgcagggctagaaattaatatcacactcatttgataggaagagcaaaagcaaggttatgagtcagagacat

SEQ ID NO: 1001530 - DNA, 120 bp, Artificial Sequence
  ENSG00000255595_34 (sequence is synthesized)
tttggtcccagaacaataactctattgattgagtcaaatatgtttaactccaacagcaagaccttccatctgcgtgaaataatcatgtccgttaattgtaaacaggagcatctttgaaag

SEQ ID NO: 1001531 - DNA, 120 bp, Artificial Sequence
  ENSG00000255595_35 (sequence is synthesized)
ctgagctagaggcggagcaactggtaaaccagatgtcccaaatttctaggtttgtacattgtaattgttctagacttgtgtgtggatattggtaaaatgacatagtcagatatctcacag

SEQ ID NO: 1001532 - DNA, 120 bp, Artificial Sequence
  ENSG00000255595_36 (sequence is synthesized)
tggtgcctgtgagcagttggagtttgaatttttcagtcagtaaggtttgctgtttattcgagggctgctcctaaaaaataatcaggtctagtcaagaatatagaaaagtgaaattatgca

SEQ ID NO: 1001533 - DNA, 120 bp, Artificial Sequence
  ENSG00000255595_37 (sequence is synthesized)
tattttcctggggaatataatagatgttctcatagtcttacaatgtaaaaaaaatgaaggtaagactctagctccctttcttctatctttctggcctcattttaggctaatattttcttt

SEQ ID NO: 1001534 - DNA, 120 bp, Artificial Sequence
  ENSG00000255595_38 (sequence is synthesized)
tgcaaccatataccaaattattacatatggaagctgtgaaactgaaggttctgtaaaactttaaagccagagaacttatgactcctccatataggaagagaaatgggagaatattaggct

SEQ ID NO: 1001535 - DNA, 120 bp, Artificial Sequence
  ENSG00000255595_39 (sequence is synthesized)
gcatctgaggcgtggcgcagctgggagcaaagcacaggtctgcctggacaatattgggtcacctgtcatctccagaggacctgggaaagtgaatctttattcagtatctattctgggatg

SEQ ID NO: 1001536 - DNA, 120 bp, Artificial Sequence
  ENSG00000255595_40 (sequence is synthesized)
tgagcttggtcaatcaggaggaaagagaaggggacctgtggatggacactcaagaggcggctccagaaaaaggctgtacaagcacggcgccaacatctgttcagcttctggggaggcatc

SEQ ID NO: 1001537 - DNA, 120 bp, Artificial Sequence
  ENSG00000255595_41 (sequence is synthesized)
aggctggtctccaacccctgacctcaagtgatccaacgacctcggcctcccaaaatgttgggatgacaggcatgagccacagtgcccagccagttttccaattggaaacggccacctgaa

SEQ ID NO: 1001538 - DNA, 120 bp, Artificial Sequence
  ENSG00000255595_42 (sequence is synthesized)
tgacccatttatagacaatgagacaggtgggacgtcttaaagcactggaaatatttttctccttgacacatagaaagtagtcacacttggtaaagaccttcaactgcgctcacattctgt

SEQ ID NO: 1001539 - DNA, 120 bp, Artificial Sequence
  ENSG00000255595_43 (sequence is synthesized)
cctgctttctggggaccacatgatggtgcctgaatcagaggcagccacctagggaccatgaacgactaagccttaaataagctaaagaaggcaggagaggatggaaaaagacctccagga

SEQ ID NO: 1001540 - DNA, 120 bp, Artificial Sequence
  ENSG00000255595_44 (sequence is synthesized)
atttccaagtcaaccctgggagtgtccaccatggtaggctaaacaatggcctatcaaagatgcccatgttctaattcccaggactgctaggtcactccctacatataattgaacctctgt

SEQ ID NO: 1001541 - DNA, 120 bp, Artificial Sequence
  ENSG00000255595_45 (sequence is synthesized)
ggaattgaaggatccatggaagaaagatgaaaaccgtttgtttatgtaaaagacagagcaagtatactaaaatcacagagcggtcacttaatagtaggttttgaaaacttaatttgcatg

SEQ ID NO: 1001542 - DNA, 120 bp, Artificial Sequence
  ENSG00000255595_46 (sequence is synthesized)
ggaaaatactatacacagttttaaaatcaaattgatactgtcttggtgccattttaaaaaatcagaacaaaattctaaatttgcagatctggtagctctgtaagtatggttttatggtag

SEQ ID NO: 1001543 - DNA, 120 bp, Artificial Sequence
  ENSG00000255595_47 (sequence is synthesized)
agtatggttttttttattccatattttaaaaacaatagataaataagctttctgcagtctatatgctgaattacattaataggcacgtatatgttgtttacattataattacatttccca

SEQ ID NO: 1001544 - DNA, 120 bp, Artificial Sequence
  ENSG00000255595_48 (sequence is synthesized)
ggccggggccggacacaggagcagcggggatgccgggtgcgctccgagggtgtggcccccgggctgtgcggggctcagagctgcttgctgggcgcggtgcccgacaaaggtctgcctgga

SEQ ID NO: 1001545 - DNA, 120 bp, Artificial Sequence
  ENSG00000255595_49 (sequence is synthesized)
caacaaatgaggcttcctgcagtcactaaggatcacgattctaaataaatctgagaagctcagcaatagaggtcgccccctcccccgggcggagtccttgatatctgaaacaaggcttca

SEQ ID NO: 1001546 - DNA, 120 bp, Artificial Sequence
  ENSG00000255595_50 (sequence is synthesized)
catcatctggcattaaactatggggctgcttgaaggcagaatttgtcttattctgatgtaggatgaccaaaacatctggagaaacaaattggggtgagccctctccaagcgtgttaataa

SEQ ID NO: 1001547 - DNA, 120 bp, Artificial Sequence
  ENSG00000253505_0 (sequence is synthesized)
agaattctggagatgtggccataaatataacaatctagtttccttatttggtgctttttaaactgtcatacccgtgccctgattatgcaaagaggtaccggggacaagaaactataagat

SEQ ID NO: 1001548 - DNA, 120 bp, Artificial Sequence
  ENSG00000253505_1 (sequence is synthesized)
aagatcccccagagtgacactggtacagaacctaacacaagggaacaaggctcttttgtctttgattttccaatcaaaccagaacaatttgcattctggtttgcctcttctccaaagaat

SEQ ID NO: 1001549 - DNA, 120 bp, Artificial Sequence
  ENSG00000253505_2 (sequence is synthesized)
agaacaatttgcattctggtttgcctcttctccaaagaatcacaactcctcgccagcaagggagaaaaactgggcagagaatgaatttaatgagttgacagaagtaggcttcagaaagtg

SEQ ID NO: 1001550 - DNA, 120 bp, Artificial Sequence
  ENSG00000253505_3 (sequence is synthesized)
accccaatacagcaagcgcttagtaaacgtcttctgaaggaatactcgtaaccggatagaatggagacgaggaaccaatttaaaataaaagtacctgcctgtgattcccagcgtgtttcc

SEQ ID NO: 1001551 - DNA, 120 bp, Artificial Sequence
  ENSG00000253505_4 (sequence is synthesized)
caaggccatggtttcccattctatatccagacccttccagggacaggactattctcagagcaaagagtcattttctctagcttctttgcagtgatgaataaaagccactgtggaactcat

SEQ ID NO: 1001552 - DNA, 120 bp, Artificial Sequence
  ENSG00000253505_5 (sequence is synthesized)
ccagagtgacactggtacagaacctaacacaagctaagaaggactagaagaaacaattatcacacatacctagcaagtggatattggtttctaatgccattcaccagtaaaaaaacacac

SEQ ID NO: 1001553 - DNA, 120 bp, Artificial Sequence
  ENSG00000253505_6 (sequence is synthesized)
aggactacttggagaaattgactgattctaggactgaggctagaaatactcaagatcagcctggagtttcttatagtgccagaaagtaagaaagtgcttgaaaaaaaagaaccacagagt

SEQ ID NO: 1001554 - DNA, 120 bp, Artificial Sequence
  ENSG00000253505_7 (sequence is synthesized)
cccacaataataggagtatgtcaaagacatgaaggagccaactgaaggagctcttaatggccaaaactcgaaaaattggagcaatgaaataaagtaaagcagaattggattataacctaa

SEQ ID NO: 1001555 - DNA, 120 bp, Artificial Sequence
  ENSG00000253505_8 (sequence is synthesized)
agtataaaataagtattcataagtctatgccaatagaaatgattgaataaataaatgaggaaaaggggcaaatttcctgtgcagagaaattccagctgatttatgtactcctctctcaag

SEQ ID NO: 1001556 - DNA, 120 bp, Artificial Sequence
  ENSG00000253505_9 (sequence is synthesized)
ttggagtataacacctaacttcttaagtgtcggttggacttagtgacttccttcaaaactatacagtatgaaaggggaaggaaaaggtaactttacctggaaaaagctgacacatgctac

SEQ ID NO: 1001557 - DNA, 77 bp, Artificial Sequence
  ENSG00000253505_10 (sequence is synthesized)
gaggcatacccaagattgaagatcaacgtaatggaataaagcatgaatacaagattagagaaaaaagaatgaaaagg

SEQ ID NO: 1001558 - DNA, 120 bp, Artificial Sequence
  ENSG00000277463_0 (sequence is synthesized)
aggactgagatcccagaacatgccacaccaagaagacatgtcccaaggggcagtggagccacagccaccagaagggacctggccctgtcggacctgctgaagctagccgtggagtgcagg

SEQ ID NO: 1001559 - DNA, 120 bp, Artificial Sequence
  ENSG00000277463_1 (sequence is synthesized)
gggatttcagtgggggcttgcttcgaggctctattaccactggactgtttaccaagagcctcagcctgacagagatgggaagagacgagtgagcatttctgacccaacacccccactgca

SEQ ID NO: 1001560 - DNA, 120 bp, Artificial Sequence
  ENSG00000277463_2 (sequence is synthesized)
gagttggggaaacatttacccaagataggaggaataaaaaggaaaaaaattgaatttatttccaaaaaacataccaaggtggacaagataggaaacaatacaatttatattacagtttta

SEQ ID NO: 1001561 - DNA, 89 bp, Artificial Sequence
  ENSG00000253507_0 (sequence is synthesized)
tttatacatggatgcacaagacactcttgactttgattttctgcagtatgaatatgggacatgcatgaaatttggtgccgtgactcaga

SEQ ID NO: 1001562 - DNA, 120 bp, Artificial Sequence
  ENSG00000253507_1 (sequence is synthesized)
ggtgccgtgactcagatcgggggacctcctttgggagatcaatcccctgtcctcctgatctttactccatgagaaagatccacctacaacctcaagtcctcagactgaccagcccaagaa

SEQ ID NO: 1001563 - DNA, 69 bp, Artificial Sequence
  ENSG00000253507_2 (sequence is synthesized)
gatctttactccatgagaaagatccacctacaacctcaccctactgaaaatcagactgttcaactcacc

SEQ ID NO: 1001564 - DNA, 120 bp, Artificial Sequence
  ENSG00000253507_3 (sequence is synthesized)
ctgtttggtggtctcttcacacggatgtgcatgaaactacctacacccatacggaagggaacaaatcatgaaaagtaatggaatgctacagcctagtcagttttgagaaaaggctaacca

SEQ ID NO: 1001565 - DNA, 120 bp, Artificial Sequence
  ENSG00000253507_4 (sequence is synthesized)
gaatgctacagcctagtcagttttgagaaaaggctaaccaacaacaacaacaacaaatcatagtcatgctcagattgcacatgaacaaaaaaatgttggagagaaaccattgaaataact

SEQ ID NO: 1001566 - DNA, 120 bp, Artificial Sequence
  ENSG00000253507_5 (sequence is synthesized)
caccggtcctcttgtgttgctgcttatctgattatctgaggtcaagggaactgaggacaacaaaggaaattaggtctttcatagttctcattaaatgctggaggagtctgactactgctg

SEQ ID NO: 1001567 - DNA, 120 bp, Artificial Sequence
  ENSG00000253501_0 (sequence is synthesized)
ccatggaagttccagctcagctcctctcctttctggtactctggctagataccactggagaagttgtgctgacatggtccccaatcaccctgtgtttgtccccaggggaaggagccaccc

SEQ ID NO: 1001568 - DNA, 120 bp, Artificial Sequence
  ENSG00000253501_1 (sequence is synthesized)
ctggttcccaggctccttatttatagggcatctaccaaggctaccagcatcccagcccggttcagtggtggtgggcctgaggcagactttaccccaaccatcaacagcctagaccctgaa

SEQ ID NO: 1001569 - DNA, 120 bp, Artificial Sequence
  ENSG00000253500_0 (sequence is synthesized)
acactctttgaaagaaagtcactatgtgcagttatggcccagttccttgaggttggagtatctgatttttctgcacagagcaaggcaatttacttctatagaagggtgcgccctcacaga

SEQ ID NO: 1001570 - DNA, 120 bp, Artificial Sequence
  ENSG00000253500_1 (sequence is synthesized)
gacactcattgggatgaactgcctgtggaaaggagctacccactttgggtctctagagagctgttctgttgctcagtgaagctcctgtgcatcttgctcaccctccaattgtctgcatac

SEQ ID NO: 1001571 - DNA, 120 bp, Artificial Sequence
  ENSG00000253500_2 (sequence is synthesized)
ttcattcttcctggacatgggacaagaactcaggaccaaatggtgggactgaaagagctatgacacaaacagggctcaagatttaacagccaacaacaaaacaaaataaagcaaaataaa

SEQ ID NO: 1001572 - DNA, 89 bp, Artificial Sequence
  ENSG00000253500_3 (sequence is synthesized)
aactaccagccaacacttacggaaaattcctctatacaagaggagtcatgaatatttatgaaaggagaaatcgcacatgcacagcaagg

SEQ ID NO: 1001573 - DNA, 120 bp, Artificial Sequence
  ENSG00000253500_4 (sequence is synthesized)
catgtcaggcaataattttttgtatatgttatggatagtttgtatgtatgtgtgtggtggggatggtatgaatgcatgtgctggctgggaagtaaagcgatgaactgcaacagatcccaa

SEQ ID NO: 1001574 - DNA, 120 bp, Artificial Sequence
  ENSG00000253500_5 (sequence is synthesized)
tttagttttgtttaacactgaccccttctttggaaacatcaccacccctattcagtgaactgcaactccactcatattcacatggtccttggcctcttaggccacagaaggttagttttg

SEQ ID NO: 1001575 - DNA, 120 bp, Artificial Sequence
  ENSG00000253500_6 (sequence is synthesized)
gaatcccttaagcctatccttgtaaaacctgcctgaatttagaaaactaaactaaggtttagttttaatgtagaccatattttagttttaacctgttttttattgtaaaatttagtgact

SEQ ID NO: 1001576 - DNA, 120 bp, Artificial Sequence
  ENSG00000253500_7 (sequence is synthesized)
aaaaaatgtttcttcatttaccaaaagtattcatttgaagactccttttagtaggaattttttaattcttataaacactatatagagaaaactatgtgccaagaaaatgaatctttattg

SEQ ID NO: 1001577 - DNA, 120 bp, Artificial Sequence
  ENSG00000253500_8 (sequence is synthesized)
aattaacagaaacaattaaatctgaattactttggacatcagtaaaatataatttctaaggaaatatatcttatgaaattcaccaaaatgtcaattgatataaaagttaaggtgtaatga

SEQ ID NO: 1001578 - DNA, 120 bp, Artificial Sequence
  ENSG00000253500_9 (sequence is synthesized)
agtatttaacatactagtaacataatttgtttcattgtactcagtatcataatctctaaagaggtggaaatagcagaaaacagcatggtagaaagaaagagaggtttataatctgtgtgc

SEQ ID NO: 1001579 - DNA, 120 bp, Artificial Sequence
  ENSG00000253500_10 (sequence is synthesized)
ggcagaatgaatgagagaaattgaattgaaaatgatatttaggctcattaacatactatgaaaactttgtccaaatttttaaaattgaaattatctaaaatatagaaacagattagatat

SEQ ID NO: 1001580 - DNA, 120 bp, Artificial Sequence
  ENSG00000253500_11 (sequence is synthesized)
ttcagaaagtgtatttttcacagggtcaattttaagacagtgttaggagcaaaataactatttctacataaaaatgatttaaaagccaagtaaatgtactttaaatgtaaaaatgtagat

SEQ ID NO: 1001581 - DNA, 120 bp, Artificial Sequence
  ENSG00000253500_12 (sequence is synthesized)
cctcataaacaagctactgaataatgtatattaaattacatttagagtactagtattatccggtgtttaatacagaaatggaaaaagtaaagatttggaaaacaatgattttcttgtttt

SEQ ID NO: 1001582 - DNA, 120 bp, Artificial Sequence
  ENSG00000253500_13 (sequence is synthesized)
gttttgaatttgaaaaatggcttaaatataaatagcatattaccaaattgtttaaaacaacactccaaaacttgaaagtacattgaagagctgaaaaagcttcattaaaataaagcaatt

SEQ ID NO: 1001583 - DNA, 120 bp, Artificial Sequence
  ENSG00000253500_14 (sequence is synthesized)
tgggaacatggaggccaagggggaactcctcgggagctgcaactgacacacaaaggaaattttaagcaaggcagtggaaatgagaatgtgaattcgaattgttgcagaatgtcaaaggag

SEQ ID NO: 1001584 - DNA, 120 bp, Artificial Sequence
  ENSG00000253500_15 (sequence is synthesized)
catgctaaggggtaaccccaaaagacagataagcctttgtctatgacgtgcctcaagccaatacaaggagaaaaaagaagagcaataaaggaaagaccatgaggatgggtttctgtgaga

SEQ ID NO: 1001585 - DNA, 120 bp, Artificial Sequence
  ENSG00000253500_16 (sequence is synthesized)
agagctgtagatttttcctttcttctccataccttgagccaagttgggaggttgtaaaaatcctctgacagagcttgggtgtgcttcctgccaggaggaagactaacctggaacaagcgg

SEQ ID NO: 1001586 - DNA, 120 bp, Artificial Sequence
  ENSG00000253500_17 (sequence is synthesized)
acaagcgggtggggagagaccttcagagaatttggactccctacagtcgggggcacagggttttgtgttgacttgcacttgtagaagtccgatgccagccgggcgcggtggctcacgcct

SEQ ID NO: 1001587 - DNA, 120 bp, Artificial Sequence
  ENSG00000253500_18 (sequence is synthesized)
aagaaagtcactatgtgcagttatggcccagttccttgaggttggagtatctgatttttctgcacagagtatgaatgatggataacagaaccagagactgggaacatggaggccaagggg

SEQ ID NO: 1001588 - DNA, 120 bp, Artificial Sequence
  ENSG00000253500_19 (sequence is synthesized)
gaactcctcgggagctgcaactgacacacaaaggaaattttaagcaaggcagtggaaatgagcaaggcaatttacttctatagaagggtgcgccctcacagatggagcaatgaatgtgaa

SEQ ID NO: 1001589 - DNA, 120 bp, Artificial Sequence
  ENSG00000253509_0 (sequence is synthesized)
agttagcagcaggattctggatggctgacaccgatgctgctgcaccttttggaaaaaatggatccaactgcttgccccgtcatcccagatggctaggcccccattcatcccctctcgctc

SEQ ID NO: 1001590 - DNA, 120 bp, Artificial Sequence
  ENSG00000253509_1 (sequence is synthesized)
tgctgtatgaatcataaagctctgggtagggaagcagggagcaggttccaggcagagctgacaagtgacttcacttttgagcatcggttgaaccagatttaacgtctcttccagttctaa

SEQ ID NO: 1001591 - DNA, 120 bp, Artificial Sequence
  ENSG00000253508_0 (sequence is synthesized)
actgggcagaaataattacaacgggtctcagagatttccaaacctctgcgggcggttatgcggcgacataggtcctcccccaggtactggggtgtgaactcggagagctacctgatgtcg

SEQ ID NO: 1001592 - DNA, 120 bp, Artificial Sequence
  ENSG00000253508_1 (sequence is synthesized)
cgcccctcggggacagaggcgcggccccaaaccctccacgcttctacaagaaccccctactcaaaatggaggctcaggccggtgtaaagcgggcctccctctgacggcacgcgggccagt

SEQ ID NO: 1001593 - DNA, 120 bp, Artificial Sequence
  ENSG00000253508_2 (sequence is synthesized)
atccttccaagaagagagttgttgggaggcctcaggtctgggcccttctcagctcctggctctgcctggctgctctgtgctctgtgtcctctcctttctttcgcttcctccaaacattgc

SEQ ID NO: 1001594 - DNA, 120 bp, Artificial Sequence
  ENSG00000253508_3 (sequence is synthesized)
tccttcaatcctgcaggatggggagcatattttgccttcttaatttattttttttcctcttctcaagaaagctagactcagagtattgctatggcctctctctatccttagcacaaacct

SEQ ID NO: 1001595 - DNA, 120 bp, Artificial Sequence
  ENSG00000242029_0 (sequence is synthesized)
ttgatcccacccccatggcgcccagcaaggttttgagcaccttttggattaatgccagaagaaatccttcaaaagtcaaagctccattccactctctggcttctgtggaggaagggctga

SEQ ID NO: 1001596 - DNA, 120 bp, Artificial Sequence
  ENSG00000242029_1 (sequence is synthesized)
tttgggacaaaccaaagaattgagcatagtggtgaatcgttttgaaatgagagacctagccaaggatatgttcacttagtaagaggtcacatcttctgcaaaataaaaaaatcaatcaaa

SEQ ID NO: 1001597 - DNA, 85 bp, Artificial Sequence
  ENSG00000242021_0 (sequence is synthesized)
ggcagaccctcgcgcatacctgccatgcaagaaatgtgaaaagttcttcggagagaaggaaaattatataggtcagaaactgaga

SEQ ID NO: 1001598 - DNA, 120 bp, Artificial Sequence
  ENSG00000242021_1 (sequence is synthesized)
tgagacctacataaggaaagaagagcattggatgaagaagaaataaataaaggtaatatgaaattctttatttttcatatttttattagtctttattttcatatcgttaatatttttctt

SEQ ID NO: 1001599 - DNA, 120 bp, Artificial Sequence
  ENSG00000242021_2 (sequence is synthesized)
tgaatgatagaataaagagatactgacttccccggagcctccaaacttgagtagtcaggcattgggatccgtggaaggcttgttaaatccaaatagattggtcctactccatccgcagag

SEQ ID NO: 1001600 - DNA, 120 bp, Artificial Sequence
  ENSG00000242021_3 (sequence is synthesized)
ttgctgacgaggtgcgtccaggccttctcctcacctctcagggagatataccatgcagtgccttcagttatggtgttgtgactgaggatgcttcggtcagacatgtccctgaaaacctgc

SEQ ID NO: 1001601 - DNA, 120 bp, Artificial Sequence
  ENSG00000242021_4 (sequence is synthesized)
aaatcactttccagaggcctcagggctaactggagacagagctcagactgcaactgagaaaagttggactccaaaacctgtactctgagctttactgcatgagaaagttattgaaatgtg

SEQ ID NO: 1001602 - DNA, 120 bp, Artificial Sequence
  ENSG00000242021_5 (sequence is synthesized)
ccttgtgacattcagaataagtgacttttcagaggtctcagagtcagtaagagacagaactcagattgtaaccaagaagagctgaactccaaacttctgtgtccggaattggtgggttct

SEQ ID NO: 1001603 - DNA, 120 bp, Artificial Sequence
  ENSG00000242021_6 (sequence is synthesized)
tggtctcactgacttcaagaatgaagcggcagaccctcgcgggccaggtctgctcagcaactcagtatgttgactttatttcctgagagagaaacagagagaagaaaagaaagaggagga

SEQ ID NO: 1001604 - DNA, 120 bp, Artificial Sequence
  ENSG00000230010_0 (sequence is synthesized)
gatggtagggcttcctctgtggtccagtaatggtgacgtccctaactggcagcctgggccccagcgtcaggagttgggctcatggtgacacaaaggctccttggatgcaagagcacaaac

SEQ ID NO: 1001605 - DNA, 84 bp, Artificial Sequence
  ENSG00000230010_1 (sequence is synthesized)
gagtctctgatctcaggatttgtctgatctctcacgattgggatggcccattcctagagggggagaagacctggaaaacactgc

SEQ ID NO: 1001606 - DNA, 120 bp, Artificial Sequence
  ENSG00000230010_2 (sequence is synthesized)
agacaattcagaggctttgttccccataatttggaacttttcttcagatttgaccaagtcgggtagagatgatcaaacctaatgggaaaaagactgaaacaacaaaaacagaaacaggca

SEQ ID NO: 1001607 - DNA, 120 bp, Artificial Sequence
  ENSG00000230010_3 (sequence is synthesized)
aggagcacaaatgctccagtgtgaaactgacttctcctggggatggtagggcttcctctgtggtccagtaatggtgacgtccctaactggcagcctgggccccagcgtcaggagttgggc

SEQ ID NO: 1001608 - DNA, 120 bp, Artificial Sequence
  ENSG00000230010_4 (sequence is synthesized)
tcatggtgacacaaagcatttcactatccaacaaaatgtttattccaggattttggttgatttcattaatcagaaaatgcattttagaagaaaatgagtctctgatctcaggatttgtct

SEQ ID NO: 1001609 - DNA, 120 bp, Artificial Sequence
  ENSG00000230010_5 (sequence is synthesized)
gatctctcacgattgggatggcccattcctagaggggtaaggtcccacgttgttaggaaaactcatttttagccagttatgaagtcttatattctacaaagaaaaaataggtgaaggaca

SEQ ID NO: 1001610 - DNA, 120 bp, Artificial Sequence
  ENSG00000230010_6 (sequence is synthesized)
gagaaaggaagcagaggaaagatgagaaaataacaaatattttttaaaaagggagaacaatcctggaaaactgatataggccatattactccgaagtcaatacatcagtagggagaagac

SEQ ID NO: 1001611 - DNA, 79 bp, Artificial Sequence
  ENSG00000230010_7 (sequence is synthesized)
gagaagacctggaaaacactgctcttctaagccatatgtctatgtgtaagtatgcattcatctaaagacataagtgatt

SEQ ID NO: 1001612 - DNA, 120 bp, Artificial Sequence
  ENSG00000230010_8 (sequence is synthesized)
aacttcttttaatctgtaactaagatctgagttctgaagaccttcctctggagcctgagtaaatttacttaatctaaatgggtccaggttccggggtgattacccttatcttgtctcctg

SEQ ID NO: 1001613 - DNA, 75 bp, Artificial Sequence
  ENSG00000230010_9 (sequence is synthesized)
ttaatcctaaatgtatcctgttaagaattccttcattatcttgtcatgtttcaaggccaggaaaggcttaggcaa

SEQ ID NO: 1001614 - DNA, 120 bp, Artificial Sequence
  ENSG00000230010_10 (sequence is synthesized)
ttatcttgtcatgtttcaaggccaggaaaggcttaggcaaaactcttggtgggcttctgttacagcccagcctttgcataaggtcactggccctttcagcttttaatatttaacttaatc

SEQ ID NO: 1001615 - DNA, 120 bp, Artificial Sequence
  ENSG00000230010_11 (sequence is synthesized)
agtcagtgctgaaacagttgttatgaaggcccgcattagtgagacctggcctgccacacttggacttcctgttttatcttaaatatccgctttcttaaataaccagtcattttattttgg

SEQ ID NO: 1001616 - DNA, 120 bp, Artificial Sequence
  ENSG00000230010_12 (sequence is synthesized)
gacaaaaaatttaccatacaaattctttctcatataaaattattttccttttaacctttattatcttttgccttgtttcataaataacctttgaattagaaattatttccctttaataag

SEQ ID NO: 1001617 - DNA, 120 bp, Artificial Sequence
  ENSG00000230010_13 (sequence is synthesized)
gaacctgtctgtttatattcttggggttccatatggaagaacagagatttctccccagaaaggagtctggtgccttctctcttttctttaaggaatcccaggctgttagaaattatttag

SEQ ID NO: 1001618 - DNA, 120 bp, Artificial Sequence
  ENSG00000230010_14 (sequence is synthesized)
atccttcatgcagcagagagtggcaagaggaaggagagacaggccaaagtaatttgaggaaacagaactcagtcaactgagaagcaaaaaactttttctcaaaaaacaagatcctaggac

SEQ ID NO: 1001619 - DNA, 120 bp, Artificial Sequence
  ENSG00000230010_15 (sequence is synthesized)
agagaaaaagcataaaggccttatattcatacacacacatcttggatattagcttttaattaagctgagttttaaccactgagctcttaaaaatccttttaaatctcttttaaccatgtt

SEQ ID NO: 1001620 - DNA, 120 bp, Artificial Sequence
  ENSG00000230010_16 (sequence is synthesized)
ttagctgggacaacctgctgatatttcaaaagtactaataacacaaaatttaagccagaaaggacctgattcaggaaccaaacccaggctgctatggtgaaagcaggcagaacctttagc

SEQ ID NO: 1001621 - DNA, 120 bp, Artificial Sequence
  ENSG00000230010_17 (sequence is synthesized)
tactgaactacgctgcggggcagccaccatagttctttcagtttgggcttggctggcgaaagatggccttgttatgtaaacaaagcccctcaggtagtcaaaatctttcttttcttcctt

SEQ ID NO: 1001622 - DNA, 120 bp, Artificial Sequence
  ENSG00000230010_18 (sequence is synthesized)
agggcagccaccataagacttccagagaactttggtctccacaatcttttatcttaacccgaacattccttttctatcaatcccgggtctttaggcaaactcaaccaattgtcaaccaga

SEQ ID NO: 1001623 - DNA, 120 bp, Artificial Sequence
  ENSG00000230010_19 (sequence is synthesized)
tcccgggtctttaggcaaactcaaccaattgtcaaccagaagatgtttaaattcacctatagcctggaagcacaccccaccctatcccgtttttgagttgtcccgcctttctggaccaaa

SEQ ID NO: 1001624 - DNA, 81 bp, Artificial Sequence
  ENSG00000230010_20 (sequence is synthesized)
ccaatgtatttcctaaatgtatttgattgatgtctcatgcttctctaaaatgtatacaaccaagccgtgccctgaccacct

SEQ ID NO: 1001625 - DNA, 120 bp, Artificial Sequence
  ENSG00000230010_21 (sequence is synthesized)
agcagggcagtacctcctattccttaacagcatcaggaatgaacctgccacagaagaaaaggagaaaagaactgcgggcagcttcctgggaacacagctggggtacaggttgaaagcacg

SEQ ID NO: 1001626 - DNA, 120 bp, Artificial Sequence
  ENSG00000230010_22 (sequence is synthesized)
acctgccctgatatgctgttgacgctgagcatgaagcgaccttctctgtgcctgttattaatgaaaggtaatattcactgaacacttagtatacaccagagactgttacagccactgtag

SEQ ID NO: 1001627 - DNA, 120 bp, Artificial Sequence
  ENSG00000230010_23 (sequence is synthesized)
gagtttcacctcattctatcctttcaacaacccaatacgatagatgctattatcctctttaggataaaatcgaggaaactgaggtacagtgaagtcagcatcttgcccaaggtgacacag

SEQ ID NO: 1001628 - DNA, 120 bp, Artificial Sequence
  ENSG00000230010_24 (sequence is synthesized)
ctataaagtgacagagcctagaggaaatgtggctgtggagaccgtgctcttacacagtaagggcagtgacggtgaactctggattgcaaggattctctgtgtccattctgagatgaatca

SEQ ID NO: 1001629 - DNA, 120 bp, Artificial Sequence
  ENSG00000230010_25 (sequence is synthesized)
agattggtcataaggttttaagtgttgaatctgggtgatggagatctggtctatagagttctatctacttctggctgtttgaaatttctccgcaataaaaacttaaatggaatgtaaaat

SEQ ID NO: 1001630 - DNA, 120 bp, Artificial Sequence
  ENSG00000230013_0 (sequence is synthesized)
gcgcgcttgcgcgccgcccgctgcccgccgcccgccgcggctgggagtccggaggtttcatcttgtgatggtttcggttcggctctcaaatggagggtatggctacgttgaagacagctg

SEQ ID NO: 1001631 - DNA, 120 bp, Artificial Sequence
  ENSG00000230013_1 (sequence is synthesized)
gggctgccgcacgcctcggggttactgtcgggcacccggcgggcggggccggcgctggggcgggggagggcttcctcgccctcagaaaccacattcgcagaaacgtttttaactggcaag

SEQ ID NO: 1001632 - DNA, 120 bp, Artificial Sequence
  ENSG00000230013_2 (sequence is synthesized)
agttcccaaccacagcaccctcagtgatggttttcagaagaccttgttagctcctctcctccagagacccatccttcgctgacatcccaccgatttgggagcaggaaaaaacagactcct

SEQ ID NO: 1001633 - DNA, 120 bp, Artificial Sequence
  ENSG00000230013_3 (sequence is synthesized)
gcaaaatacctcttcttccagtgccctgtacccctctctacttacttcgagtccctgcagtccagcaacaaccccaaacgagtgaagggaggagacataggtttgtccaggctctgccac

SEQ ID NO: 1001634 - DNA, 120 bp, Artificial Sequence
  ENSG00000230013_4 (sequence is synthesized)
cgacgggtgatttgggatgagtccttctccagtatcattatcttcaactgtaaaacatgagggttagtccgaatgatctccaaacgcttcagcattaaagttaggtgatgaatcctaaga

SEQ ID NO: 1001635 - DNA, 120 bp, Artificial Sequence
  ENSG00000230013_5 (sequence is synthesized)
gcccgctgcccgccgcccgccgcggctgggagtccggaggtttcatcttgtgatggtttcggttcggctctcaaatggagggtgtgagctttgcagacgtgccctaattctggatggcta

SEQ ID NO: 1001636 - DNA, 120 bp, Artificial Sequence
  ENSG00000230013_6 (sequence is synthesized)
aaggtaccatctatgaatcagaaagtgggccctcatctgaacatgaccatgctggcaccacgatcttggacttctcagcccccagaactgtgagcaacaaatttctattgtttataaatt

SEQ ID NO: 1001637 - DNA, 120 bp, Artificial Sequence
  ENSG00000230013_7 (sequence is synthesized)
acccagcataagatattttggtatggcagcctgaatggactgagacactaggaaaaaggaagagagagaaagattaaggaattcagcaggaggccagatcttaaaatgtggacctggtcc

SEQ ID NO: 1001638 - DNA, 120 bp, Artificial Sequence
  ENSG00000230013_8 (sequence is synthesized)
cctggtccaaggccttaaagaatagagatgactgatactgaatttaaaattgattgggttctgggaggcggagattgtggtgagccgagatctcaccattgcattccagcctgggcaaca

SEQ ID NO: 1001639 - DNA, 120 bp, Artificial Sequence
  ENSG00000230013_9 (sequence is synthesized)
actccatctcaaaaaatatatataaataaataaaataaaattgacggtttttttgtaatgtaaaacctccttttttccaaactttaataaatgtcactacatacgtgaacgcctctataa

SEQ ID NO: 1001640 - DNA, 120 bp, Artificial Sequence
  ENSG00000230013_10 (sequence is synthesized)
ttcaacttggagcacccgctatatgccccacgctgtgacagactctcaggggacaccaagggaagtaaggcccagctcccgcctcaaagagctgaccatcaactggcggggattagacaa

SEQ ID NO: 1001641 - DNA, 120 bp, Artificial Sequence
  ENSG00000230013_11 (sequence is synthesized)
tgagagaagtccaagctaaagaaagtaccacaggagaaacaccaggcgcttgaggtttcaaaggagggaaaggatatatcaggttggagatactaacaaaagactttattcattcatcca

SEQ ID NO: 1001642 - DNA, 120 bp, Artificial Sequence
  ENSG00000230013_12 (sequence is synthesized)
tgtatatccaatgaaaatatttattgggtgcctactatataccaggcactaagttagctatcaggaataagatataagtaagccattattcctagcctcaaagacttcataaaaaagtag

SEQ ID NO: 1001643 - DNA, 120 bp, Artificial Sequence
  ENSG00000230013_13 (sequence is synthesized)
catttaatgagtatctattaagtcccaagctcaagagtggtgagaagaaaggtctctgtggtaaaggaacccacagtctagctcagatgataggtgtataaacagaacatttctatgtaa

SEQ ID NO: 1001644 - DNA, 120 bp, Artificial Sequence
  ENSG00000230013_14 (sequence is synthesized)
agtagtgtgttcagtgctgtgataggtatgttaaaaaaaattgcaaagtctcaagatagagggtgaagggcaataaactctttctggggtcagagaaagcttctgtagagaacacaacag

SEQ ID NO: 1001645 - DNA, 120 bp, Artificial Sequence
  ENSG00000230013_15 (sequence is synthesized)
agggagtattacaggacgaaggagcttttcaggtaattatagagaggcaggaggaagagtatctgaggcaggttgtaccaatatggctggaataagaagagtagagatgtaccagagaca

SEQ ID NO: 1001646 - DNA, 120 bp, Artificial Sequence
  ENSG00000230013_16 (sequence is synthesized)
gagggtggccaaatggtgcgaggttttagagcccttcagctgaaagaatggaatgtcaaggtataatgaccactcagaggagcaggtaaacaactgagtgcagggtgtggatggaatctc

SEQ ID NO: 1001647 - DNA, 120 bp, Artificial Sequence
  ENSG00000230013_17 (sequence is synthesized)
agggaaaggttcctggtggagtacatatctgagagttttaagtaatgtgcaggaacttgttaagaagaaacagcattcctcagaatggattttgcaggtgaaaataatggagagaagaaa

SEQ ID NO: 1001648 - DNA, 120 bp, Artificial Sequence
  ENSG00000230013_18 (sequence is synthesized)
tttcagagtcaacagcttgagcaaaaagcaaagaagcaaaaagcccacgtacatacaatcagggagaggtgagagcctgtgaaggcggctcttcacatgtctctaatctcagtgaactct

SEQ ID NO: 1001649 - DNA, 120 bp, Artificial Sequence
  ENSG00000230013_19 (sequence is synthesized)
gtgtttctgccctgactctgctcattgtacaacatgggggaggggtcctccttccatccctttctcctcttcaagggtgactcttgggtactcagagttttatgaaattaggagaccaaa

SEQ ID NO: 1001650 - DNA, 120 bp, Artificial Sequence
  ENSG00000230013_20 (sequence is synthesized)
agactcggggccccgcgcgcttgcgcgccgcccgctgcccgccgcccgccgcggctgggagtccggaggtttcatcttgtgatggtttcggttcggctctcaaatggaggatggctacgt

SEQ ID NO: 1001651 - DNA, 120 bp, Artificial Sequence
  ENSG00000230013_21 (sequence is synthesized)
cagggaatcttgttaaggataactgccatcgaagttacaagtttgttctgtgattgaagagtttcaggtcttctagatttctttggcatgacgcataactatttcaagatactaacattt

SEQ ID NO: 1001652 - DNA, 90 bp, Artificial Sequence
  ENSG00000230013_22 (sequence is synthesized)
ctttggcatgacgcataactatttcaagatactaacatttgggcagggcgtggtggctcaggcctgtagtcctaactgagggtaggagtt

SEQ ID NO: 1001653 - DNA, 120 bp, Artificial Sequence
  ENSG00000230013_23 (sequence is synthesized)
gccactgcaccccagcctgggcaacagagggagactccttctgaaaaaaaaaaaaaaaaaaagatactaacatttaaggttaagaatgtaggtcatttccccagaggactaacagactcg

SEQ ID NO: 1001654 - DNA, 120 bp, Artificial Sequence
  ENSG00000230013_24 (sequence is synthesized)
agggcacacaccccaaattttatttctttgactctgtcattgcccccagaacagtatataatgtagccaattgttgtggatttattgttaatgaataaaataaaatttgtgactagcagg

SEQ ID NO: 1001655 - DNA, 120 bp, Artificial Sequence
  ENSG00000230013_25 (sequence is synthesized)
caagtgacttctggctcttcccaactatcaaatccctaaaggaacgagatgttcctgtgctgaggaggtccaaaagaatgtgctgtagattcaaaagccatttccacaaggagcattcca

SEQ ID NO: 1001656 - DNA, 120 bp, Artificial Sequence
  ENSG00000230013_26 (sequence is synthesized)
aggatatttgaagaaatccagagtccctggaaagcacagcttctccagatgaccacctagaagagggtagcatctccgtacctgtgctggttggctcttaaataatcagtccctttccca

SEQ ID NO: 1001657 - DNA, 120 bp, Artificial Sequence
  ENSG00000230014_0 (sequence is synthesized)
cttcgttctttttcctactccggatcaagagcctggatttccggctgaaatacaacaccgtgcattctccaatgtatagcctagctttgggtcaaaaatctaggacctgctgcaagaatt

SEQ ID NO: 1001658 - DNA, 120 bp, Artificial Sequence
  ENSG00000230014_1 (sequence is synthesized)
actacgcactcaagttctctgcacactgagcacgaaggttcattggaaaggagactcttgtgaggccttgaagcacatccattcacacctaataattgtacagatatgaaaagtaacatc

SEQ ID NO: 1001659 - DNA, 120 bp, Artificial Sequence
  ENSG00000230014_2 (sequence is synthesized)
ttttctaggaggccatttaggttttgctctgtgctttattctatcacattaggctgccttattctctgttacctgcatatctatggtagtattaaaagtaagccattttcagtttgcgtt

SEQ ID NO: 1001660 - DNA, 120 bp, Artificial Sequence
  ENSG00000230014_3 (sequence is synthesized)
aacaagatggatgtctgaaaaccaaatacaactggaaaattcaatccaagttactgaggtttgactgagatatattgattcttaaaaaacaagataataaactctaaatatccattgaaa

SEQ ID NO: 1001661 - DNA, 120 bp, Artificial Sequence
  ENSG00000176728_0 (sequence is synthesized)
aggacgtttggtgctcatattcatgaaatagatggatctgtattggcttttttattgtctttagtttgatgtctagaggcttggtggcatgcatgtttagtcccagctacacagcaggga

SEQ ID NO: 1001662 - DNA, 120 bp, Artificial Sequence
  ENSG00000176728_1 (sequence is synthesized)
ggctgaggctgaaggaatacttgagcccaggaattcaagactagcctgcacaacataagcctcctctgtcacctgggctggagtgcgatggtgtcatcttgggtcactgcagcttctgcc

SEQ ID NO: 1001663 - DNA, 120 bp, Artificial Sequence
  ENSG00000176728_2 (sequence is synthesized)
tgcctctgcctcccaaagtgctgggattaaaggaatgagccactgggtcgggcaaacacagagataaattgaaagcatatttaaatgtttcctgtttcatcagtgttttgtctcctcagt

SEQ ID NO: 1001664 - DNA, 120 bp, Artificial Sequence
  ENSG00000176728_3 (sequence is synthesized)
atgtttcctgtttcatcagtgttttgtctcctcagtaccaaataaaacaatatgataacatccaacaatagcttcacataatgaaataaaattgtttgaatacaaagatagggcaacatg

SEQ ID NO: 1001665 - DNA, 120 bp, Artificial Sequence
  ENSG00000176728_4 (sequence is synthesized)
gctaatgcctttatgaaatgcatttggaatttggattctgaagattgtattgtgaaattgtagttgccacttaacaaatgtaatagcaattgctattgctgcctgcttcaaaaacacatg

SEQ ID NO: 1001666 - DNA, 120 bp, Artificial Sequence
  ENSG00000176728_5 (sequence is synthesized)
gatccaatgtagaaacaacacactgaaagctacatttcatataatttcaattactaaaattggccttgtcaagaacatgagtaatctaaattgggtgtgtgaacttataggtccataaac

SEQ ID NO: 1001667 - DNA, 120 bp, Artificial Sequence
  ENSG00000176728_6 (sequence is synthesized)
ctactcctcaattaaagaagaaaatcaaagggttgttattgttactcttcccatgttggcaagtgaagccaagcacaatattatcgctgttgttttccgttttttccttttctgcaaata

SEQ ID NO: 1001668 - DNA, 120 bp, Artificial Sequence
  ENSG00000176728_7 (sequence is synthesized)
tattttccaatatattctgaagcaagtggtgagcaaatatattctccaatatattctgaagcaagtggtgagggaggctgacttcagttattttgtagagtctcagaacttacatttaag

SEQ ID NO: 1001669 - DNA, 120 bp, Artificial Sequence
  ENSG00000176728_8 (sequence is synthesized)
gtgttgccagatgactatttataaggaaacagaagttaactcttctgcaatagtttctgctagttataaaacatctttgattgcacacttaacaccaacccagtcatctttatttaaaga

SEQ ID NO: 1001670 - DNA, 120 bp, Artificial Sequence
  ENSG00000176728_9 (sequence is synthesized)
aacccagtcatctttatttaaagaatgcattcaaggctgggtgtggctgctcatgcctataatcccaacagtttaagaggctgaggcaagagtattgcttgaactcaggagttcaagacc

SEQ ID NO: 1001671 - DNA, 120 bp, Artificial Sequence
  ENSG00000176728_10 (sequence is synthesized)
aaagcaagatgctatctttataaaaaatttgaaaatattaggcatggtggtatgtgcttataattccaggtactttggaggctgacattgctgagaccagctcagtcggggagaccctaa

SEQ ID NO: 1001672 - DNA, 120 bp, Artificial Sequence
  ENSG00000176728_11 (sequence is synthesized)
taaagacacacacacagaaatatagagccacagcatgttccgaagagatgattggaagatggaagtggagggttaaataatgaaatgcagctaacatttcggaaagtttctaaaagttgt

SEQ ID NO: 1001673 - DNA, 120 bp, Artificial Sequence
  ENSG00000176728_12 (sequence is synthesized)
aaagttgtacaacatgccctacagctactctttaaatctccaaatcaaatgagtttcaggtggagcctctgggaggtgatgaggtcatgagagtggagcctcatgaatgggatgagcact

SEQ ID NO: 1001674 - DNA, 120 bp, Artificial Sequence
  ENSG00000176728_13 (sequence is synthesized)
ggacacagagggaaggctctgtctatgaatgagaaagtgggtccccaccagacattgaatctgccgcatcttgatactggacttccagtctccagaactgtgggcaataaatgtctgttg

SEQ ID NO: 1001675 - DNA, 120 bp, Artificial Sequence
  ENSG00000176728_14 (sequence is synthesized)
tttattacctgtccagtatctttggtattttgctatagcaacccaaatggactaagaaaacaccagaggccatacctaataaaaatattgacatcacaatttgttgtatcaggtgactgt

SEQ ID NO: 1001676 - DNA, 120 bp, Artificial Sequence
  ENSG00000176728_15 (sequence is synthesized)
ttttccactaaaatagttactttaattcacgaatagcctgccaacaggacattgttcatccaccttgaaacggccattcatcaaccaagcaggttgttgttgtcaatagggagctcttca

SEQ ID NO: 1001677 - DNA, 120 bp, Artificial Sequence
  ENSG00000176728_16 (sequence is synthesized)
aagggcattgcccatgtgacagtgggatccagtaattcctgaggtggttccagactacatgctagaaaattccctactacctgctcttgaacaggatgagcaactccttgcacttccctg

SEQ ID NO: 1001678 - DNA, 120 bp, Artificial Sequence
  ENSG00000176728_17 (sequence is synthesized)
gtttgtgatgaagaaataaacaatgcccagttcctgccctggagaagctcattgcatagaaaaaggaaaaaggcagatatacatgccacagtacagtgctgagacaacataaatcacaag

SEQ ID NO: 1001679 - DNA, 120 bp, Artificial Sequence
  ENSG00000176728_18 (sequence is synthesized)
caaccaagtacaaagtgaattatacagaatctggttttcttctgtttggatttgatactgagctatactggattcactgacaagaagagtttgaattagcagcatgctgagaatggacac

SEQ ID NO: 1001680 - DNA, 120 bp, Artificial Sequence
  ENSG00000176728_19 (sequence is synthesized)
agtgtttgaagagactgataaagaaagtacaggaggagttttatttttggaagaagaaatggtccttgggcacagaccccatatgagttttcctttcagcgttctctgctcagctgttct

SEQ ID NO: 1001681 - DNA, 120 bp, Artificial Sequence
  ENSG00000176728_20 (sequence is synthesized)
ctgctgtggtgaggcgcctatgctttgtatatgtctgaaattaattgaaaagctagtgacagattctgatgtcatttgccatgagctttattattgtgcaggtaattttggatcaaatca

SEQ ID NO: 1001682 - DNA, 120 bp, Artificial Sequence
  ENSG00000176728_21 (sequence is synthesized)
ccctaacgtttttcaacaaagactttagaagaaataaagctgcattactttttcttggcgcattcttcctttaggacctatagtgaggcaatgtgtccatgcccgtctcttgtgggtcag

SEQ ID NO: 1001683 - DNA, 120 bp, Artificial Sequence
  ENSG00000176728_22 (sequence is synthesized)
tcaccactgacaccttattttgaccactcgatgccatcatctttctctcatcgatcctaatccttgggactacgcatcaatgtctgcacagtgatgacccacccaacagtggcctcagct

SEQ ID NO: 1001684 - DNA, 120 bp, Artificial Sequence
  ENSG00000176728_23 (sequence is synthesized)
tggggacatctggagtcgcatccaccatgaggacgaagcctccttctcttctggacctgcccaggagtggccgttgctacaagacctctgttgctacgtccagggtgagaataaagactt

SEQ ID NO: 1001685 - DNA, 120 bp, Artificial Sequence
  ENSG00000176728_24 (sequence is synthesized)
ctcctcaggactctcccaggagaagacatggcattgagacatctggtggccaggaaactttggaaaatagtggaaagtgaccaattcaagtctatttcatgggatgagaatggaacttgc

SEQ ID NO: 1001686 - DNA, 120 bp, Artificial Sequence
  ENSG00000176728_25 (sequence is synthesized)
atagtgattaatgaagaactcttcaagaaagaaattttggaaacaaaggctccttacagaatatttcaaactgatgctatcaaaagttttgttcgacagctcaacctttatggatttagt

SEQ ID NO: 1001687 - DNA, 120 bp, Artificial Sequence
  ENSG00000176728_26 (sequence is synthesized)
aaaattcaacagaattttcaaagatctgcctttctagccacctttctgtcagaagagaaagaatcgtctgtcttaagcaaggtatttgacatatttgagttaccactttatgtaaagtat

SEQ ID NO: 1001688 - DNA, 120 bp, Artificial Sequence
  ENSG00000176728_27 (sequence is synthesized)
atatgtaattttactttgtacatcagtaaatatgttaatacatgcagtaagaccagcttttgaaaattatataaaatattaaggtagaaattttgttttgaaattattgtgttcagcttg

SEQ ID NO: 1001689 - DNA, 120 bp, Artificial Sequence
  ENSG00000176728_28 (sequence is synthesized)
cggataaggggtgtggggtgcggggacaatgggccagagcttctcatgcagcctgcaccagcgccgggtcggagagtcagaggccaccctgagatggaccgagatcttcagttggggagg

SEQ ID NO: 1001690 - DNA, 120 bp, Artificial Sequence
  ENSG00000176728_29 (sequence is synthesized)
cgcctccggtgagcttgcggccagatgccccctcagtagtcctccgcaacaggtgccgcgcagccgagtggcgggctagcataccgcctgcccgcaattcggccaggcctcgagcctgct

SEQ ID NO: 1001691 - DNA, 120 bp, Artificial Sequence
  ENSG00000176728_30 (sequence is synthesized)
ccgccttcccgctgcggtagcgccgccggggaaacgccgccacgggctgcatgggcagcgctcgcgccccgccgctgagccgccggggagccgtccagtcttcgaatcccagaaacacaa

SEQ ID NO: 1001692 - DNA, 120 bp, Artificial Sequence
  ENSG00000176728_31 (sequence is synthesized)
agtgcaaggattgtgcctgtcctcttcccgggctgatcttcccctgtgcctggaacagcacctgctatataaattatgtgctggatacacacactcgaaaagcaagagatcaggctccct

SEQ ID NO: 1001693 - DNA, 120 bp, Artificial Sequence
  ENSG00000176728_32 (sequence is synthesized)
gagaaaggcagtttacttctatagaagggtgcaccctcacagatggaccaatgtgtcaggagaattcagtcacacccaaagcaggagatgcgggaggccagatgcgcaagatggacactc

SEQ ID NO: 1001694 - DNA, 120 bp, Artificial Sequence
  ENSG00000176728_33 (sequence is synthesized)
ggctcctccttcgtccccgcctctcctcgcttccagggtagcagcctcaacaagggaaactattgttccagtggaggctgcgaggatgtcggtgatttacgcgccgagctgtagctgcaa

SEQ ID NO: 1001695 - DNA, 120 bp, Artificial Sequence
  ENSG00000176728_34 (sequence is synthesized)
aaggacaagggcaagtgccggcccgacctagggcccaccggtctctggcttgctcttgtgagtaggtgcaccctgcccgcttgtggtggcctcaggggtaagaaatcaggacccacccag

SEQ ID NO: 1001696 - DNA, 120 bp, Artificial Sequence
  ENSG00000176728_35 (sequence is synthesized)
tccttagaagaaaagattcagatcatagggattttatttacagaaatgtatttacctgtttgtaatgtatgccagtttagagagtctcgttctgtcacccgggctggagtgcaggaggac

SEQ ID NO: 1001697 - DNA, 120 bp, Artificial Sequence
  ENSG00000176728_36 (sequence is synthesized)
aacttctttgggttcaaatgaacttcccaccttagccacctgagcatctcgcctatctggactccacctatcctcccctgtcagcatctcacagcataggcatgggccaccagaaccagc

SEQ ID NO: 1001698 - DNA, 120 bp, Artificial Sequence
  ENSG00000176728_37 (sequence is synthesized)
ttatttttgtatttttttaagcagaagagatcttaccatgttgtgaagactggtctcgtacttctggctgaagtgatttgttctcctaagccttccaaattggtgggattacatatgtga

SEQ ID NO: 1001699 - DNA, 120 bp, Artificial Sequence
  ENSG00000176728_38 (sequence is synthesized)
accaccacacaaagactcctactggtatatttagaaggatataagtatgccggtttttggatgcatgcatggagaagaccccaaagcttttcacttttccctgagtttgggctaaacact

SEQ ID NO: 1001700 - DNA, 90 bp, Artificial Sequence
  ENSG00000176728_39 (sequence is synthesized)
cttggattgtttttaaaaaatatgtcgagaatagtagaccatcaaaaaggtgacagaacacagattaagtggatatacaacacaaagaat

SEQ ID NO: 1001701 - DNA, 120 bp, Artificial Sequence
  ENSG00000176728_40 (sequence is synthesized)
atagctctggagggttgctacacaagtaaacaacccacaaactaaggaattgtggatgttaagaatttgttatccaaatatgctgaatactatccaatatttcaattcacttcattttac

SEQ ID NO: 1001702 - DNA, 120 bp, Artificial Sequence
  ENSG00000176728_41 (sequence is synthesized)
tattctcaaagacctaagggaacccaggagtacagtgattcaaaactgaaaataccagtaaagacatacagattattttaaaaatgaaatcaataaccttgaagttactaggaagctgtg

SEQ ID NO: 1001703 - DNA, 120 bp, Artificial Sequence
  ENSG00000176728_42 (sequence is synthesized)
tgattgaaagtcagtcactcaatcacatgatcctgggattttcctctacatgtgggactacccataccttgcagcattgctgtgagttcacctgagcaagacacctgcacatggtggtgc

SEQ ID NO: 1001704 - DNA, 120 bp, Artificial Sequence
  ENSG00000176728_43 (sequence is synthesized)
tcaggaaatgttaatttccctttattgaaatggaacaacccatgggtattatgtcttgaggtctggattacagttgagcaagatacagaagacgttgtaaaccctgaggaggcatcactg

SEQ ID NO: 1001705 - DNA, 120 bp, Artificial Sequence
  ENSG00000176728_44 (sequence is synthesized)
atcactgggagtctggaaaggcagcagagaaaaagtgacctgcagctggaaatggccaatgggtctgttacaggaagttacacaggcatgagtggggcagaagagagttctcccatccac

SEQ ID NO: 1001706 - DNA, 120 bp, Artificial Sequence
  ENSG00000176728_45 (sequence is synthesized)
ctaccaggaatgtcaggccatcgggtaatggttggacagttatcacattgcttttctaaaaataataatttagcagcagagccagggatagacaagttcctactgatacacagctggtaa

SEQ ID NO: 1001707 - DNA, 120 bp, Artificial Sequence
  ENSG00000176728_46 (sequence is synthesized)
cattaaagtgttaactaaagtcacactcccgggagggggaaaaagggcttctagtaaaattttacatactgggtgagtgaactgagacatgcacattaagagacgaaatggtacagcatg

SEQ ID NO: 1001708 - DNA, 120 bp, Artificial Sequence
  ENSG00000176728_47 (sequence is synthesized)
actttctggggtcactccaccaaaaaaagggaggaagcttcagatgggcatgcatataaatgctcaaacacactgcctatgctcacttctcaagggtaaggagggcactgtgcctgctgg

SEQ ID NO: 1001709 - DNA, 120 bp, Artificial Sequence
  ENSG00000176728_48 (sequence is synthesized)
cagcccacacttaggaaagaatcatggaaaaaggtgcaccagatgctcaaggtgggccagcctataaagtcccagaatgaagagaaatggccacacttgttcttcaagtcacccacttgg

SEQ ID NO: 1001710 - DNA, 120 bp, Artificial Sequence
  ENSG00000176728_49 (sequence is synthesized)
atctcttccaagtgcacttttcattctttcctgctctaaagctttttaataaatgtccactcctgctgtgaaacttgcctcaggattttttttccttctttatgcccatcagttgaactc

SEQ ID NO: 1001711 - DNA, 120 bp, Artificial Sequence
  ENSG00000176728_50 (sequence is synthesized)
tttcacctgaggaggcaagaactgacattgctaaagacgcagatggatttgctgccagtaactccgatactttccaccagtaacagatctaggagctggtggacatagttgctgaagcat

SEQ ID NO: 1001712 - DNA, 120 bp, Artificial Sequence
  ENSG00000176728_51 (sequence is synthesized)
gtgtccagaatgtttctgcccaggccacaagcagtcctgcactgtaaagggacttgaaccccaagctcaggggacaccatggaaagagacttcagcccgctgatggaatactggagatag

SEQ ID NO: 1001713 - DNA, 120 bp, Artificial Sequence
  ENSG00000176728_52 (sequence is synthesized)
gaattttttattgaggtataattcccataatatgttaactgttttttaaggtataattcagtgacacaggaatgtgcatgttctaccacttcttaattccaaattattttcatcatctca

SEQ ID NO: 1001714 - DNA, 120 bp, Artificial Sequence
  ENSG00000176728_53 (sequence is synthesized)
aaaggaaatcccctacctattaaggagctactacccaatctgtcctctttctgactcctgacaattaacaatctgttttctttctctgtgaaattatttattttggatatgtttataaat

SEQ ID NO: 1001715 - DNA, 120 bp, Artificial Sequence
  ENSG00000176728_54 (sequence is synthesized)
attagcattgtttctatagatattaaatcaactaaaatatcccttatgggaaacaaagggatgggccaaattaaaggaatcggttgggctagttaactgcaacaagagcatgtcctcaag

SEQ ID NO: 1001716 - DNA, 69 bp, Artificial Sequence
  ENSG00000176728_55 (sequence is synthesized)
agggatgggccaaattaaaggaatcggttgggctagttaactgcaacaagagcatgtcctacgttttct

SEQ ID NO: 1001717 - DNA, 77 bp, Artificial Sequence
  ENSG00000176728_56 (sequence is synthesized)
ggggcagtttatggccagattttggagggcttgctcccaacagacatggtaggattgtttgactccaagaagtcatg

SEQ ID NO: 1001718 - DNA, 120 bp, Artificial Sequence
  ENSG00000176728_57 (sequence is synthesized)
ttggagggcttgctcccaacagacatggtaggattgtttgactccaagaagtcatggctgcattcaactatgatcacaccgtgcaatccaggctaggcaacagagcaagaccctgtctca

SEQ ID NO: 1001719 - DNA, 120 bp, Artificial Sequence
  ENSG00000176728_58 (sequence is synthesized)
gggtaggcaggtcggaggagggagttgggaggaaagcggcggcggtggcggcttcaacagcagctcttgcccttaaggaacaatgaaacacaaagatggtgcagacccaggccctgcttt

SEQ ID NO: 1001720 - DNA, 120 bp, Artificial Sequence
  ENSG00000176728_59 (sequence is synthesized)
gactgggagaaagatgcattcagttgactaaaacttgaatgtcaggagaattcagtcacacccaaagcaggaggtaataagacaccgaagtgaggacttcacaggctgcttgggagaaga

SEQ ID NO: 1001721 - DNA, 120 bp, Artificial Sequence
  ENSG00000176728_60 (sequence is synthesized)
tgagagaaataacccaagctgtcagcaacgcggaaagaaatgggctagcaacctcttaaagcatcctcacgtactgcggcgatgactctgtgcacagaccaaggaaggagagaggccgcg

SEQ ID NO: 1001722 - DNA, 120 bp, Artificial Sequence
  ENSG00000176728_61 (sequence is synthesized)
agagcttctcatgcagcctgcaccagcgccgggtcggagagtcagaggccaccctgagatggaccgagatcttcagttggggaggcgcctccggaaacacaaagatggtgcagacccagg

SEQ ID NO: 1001723 - DNA, 120 bp, Artificial Sequence
  ENSG00000176728_62 (sequence is synthesized)
caaaagcaacccttcttgctccaggcatgtgcaggaggttttttggtttcagcattttgttgcatgctgactatgtcctttaccttctcttaaattatgtatcaattcatgctggtttat

SEQ ID NO: 1001724 - DNA, 120 bp, Artificial Sequence
  ENSG00000176728_63 (sequence is synthesized)
tcacttcctgatgtctatatgaagaggctgtctgccaacatctttcatcactctgcctgcaactatgaaaaatttagttctaaaaaatgcaaccttgctaaattgagtactaataggatt

SEQ ID NO: 1001725 - DNA, 120 bp, Artificial Sequence
  ENSG00000176728_64 (sequence is synthesized)
ggttcaattatgttctatgtctgttccatattgacattgtgtgcatctttgccatgcaggctttttaggaattatcgcatctctaacttcccacgagtgtttatgaaaatgtttagattt

SEQ ID NO: 1001726 - DNA, 120 bp, Artificial Sequence
  ENSG00000176728_65 (sequence is synthesized)
aaagaactttattgctttagacagaataaggcatgcagttctaacagaaagatccatgaattccagaaatatcactgaaaattattgacatttaagattattttctgtttgttactatgg

SEQ ID NO: 1001727 - DNA, 83 bp, Artificial Sequence
  ENSG00000176728_66 (sequence is synthesized)
attattgacatttaagattattttctgtttgttactatggttcacaattcaagaataactctggccaggtgcagtagctcaca

SEQ ID NO: 1001728 - DNA, 120 bp, Artificial Sequence
  ENSG00000176728_67 (sequence is synthesized)
catggcaaactcccaccattacaaaaaaatacaaaaattagttggtcatggtggtgttcacctatagtcccagtgacttgggaggctgggatgggaggatctcttgagcccaggagatgc

SEQ ID NO: 1001729 - DNA, 120 bp, Artificial Sequence
  ENSG00000176728_68 (sequence is synthesized)
aaaaaaagtaaaagaaaaagaaaagaaaataactcccattgctaaagacatatatgcttatcaggttaagataaagtgaattttgttcttcccaatgacatttcaggatatttgttcaca

SEQ ID NO: 1001730 - DNA, 120 bp, Artificial Sequence
  ENSG00000176728_69 (sequence is synthesized)
tttcaggatatttgttcacaggaaagaacatgttgggaattggtactggctagaaatttctgttgagtatttattaccccatggtaataatggtaaaccacagtttagaaagattttttt

SEQ ID NO: 1001731 - DNA, 120 bp, Artificial Sequence
  ENSG00000176728_70 (sequence is synthesized)
tagtgagaccctgactttaaaataaatttaaaaaaattaaaagcaacaagactttctgcttgtatatgatgatgttagtatgctgacttacaaggttagatcattttgatatgtgtgatg

SEQ ID NO: 1001732 - DNA, 120 bp, Artificial Sequence
  ENSG00000176728_71 (sequence is synthesized)
taggttttcaaagctggcactgttttatgcttcaaatattatttttattcattggttctcatgggatttcatcactaagctgtaaatcaataatcataatgttgaggggaggggattaca

SEQ ID NO: 1001733 - DNA, 120 bp, Artificial Sequence
  ENSG00000176728_72 (sequence is synthesized)
atctttgcatttctcaataaacagcattcccttttggactacagtgaaaaatattgagctttgtttactttgaaaatgagtcttagtctatgaatgcctgggtagggtcaagaatgaaaa

SEQ ID NO: 1001734 - DNA, 120 bp, Artificial Sequence
  ENSG00000176728_73 (sequence is synthesized)
atgagaggaagagagaagcatcaggaagataaaatgatcaatctcacaaaacttgctatttttagaaagcatcattctaattttgaaaccaaaaaaatggggaaaaacagagtaatggaa

SEQ ID NO: 1001735 - DNA, 120 bp, Artificial Sequence
  ENSG00000176728_74 (sequence is synthesized)
taatagaatgcctcatgtacaaaagcaacaatttcagagatgatctaaaacaacttattagttataggaagaaatatacctgaaaagggcaaaaataagttgggtttggcctcttgtcac

SEQ ID NO: 1001736 - DNA, 120 bp, Artificial Sequence
  ENSG00000176728_75 (sequence is synthesized)
tgaaattatctactaaatctaacagcatctatgttcctttagctgttgtgtatattgtacacaaatgtgaaaccataactcatattttacctataacaatttgcaataaataactaatta

SEQ ID NO: 1001737 - DNA, 120 bp, Artificial Sequence
  ENSG00000176728_76 (sequence is synthesized)
ggatagtcagagggaaccccctcacaggatatccccccagatatgctgaaaaagtgaagatatacagccatcctcaatagaagccagtcatgatcacatacctaagtggggttgaatgca

SEQ ID NO: 1001738 - DNA, 120 bp, Artificial Sequence
  ENSG00000176728_77 (sequence is synthesized)
cacagaaatctattaatttcagactcttcctctatttgggggcatctctactagctaggatgctgccatagcacttgaattttaattttcaatatcaaacctaagattacttcactcctg

SEQ ID NO: 1001739 - DNA, 120 bp, Artificial Sequence
  ENSG00000176728_78 (sequence is synthesized)
ctggatattactttgtctatttaaacaattttttgtctttgtttcctttcttcctctctcccaccttccttctttcctttctttttcccaccctcccttcttctttccttcttctcgctc

SEQ ID NO: 1001740 - DNA, 120 bp, Artificial Sequence
  ENSG00000176728_79 (sequence is synthesized)
tcccttggcgatgtgaattttgttctggcatacattgaatgactcgtctgccacaaagttgaattctaatacacaatggtgtttggtttcgcatagtgtaatcacaattttgtgcatttt

SEQ ID NO: 1001741 - DNA, 120 bp, Artificial Sequence
  ENSG00000176728_80 (sequence is synthesized)
aaaattaccttagacaacactcagatttgcaagagcaaaggaaatcattaacaaatgaactatcaacgattgccaaaattctttccatattggctgcctatacttgggtcttctgcagcc

SEQ ID NO: 1001742 - DNA, 120 bp, Artificial Sequence
  ENSG00000176728_81 (sequence is synthesized)
agagtttgctctgtttcctcttttggaagctagaaaaattaaaaattgttgttctatgtttaaaaactatagaaatgctgttctccaaagagaaaatactggagcagaacaggtatatat

SEQ ID NO: 1001743 - DNA, 120 bp, Artificial Sequence
  ENSG00000176728_82 (sequence is synthesized)
tctgtgaactttgttttccaaaaagtctggttgagtatttaaggtccagctacctaccaagaaatatgccaaggtctgcgaagtgtagaatgccaaacaatggcatttgtttcatcaatt

SEQ ID NO: 1001744 - DNA, 120 bp, Artificial Sequence
  ENSG00000176728_83 (sequence is synthesized)
caatccatgtgtttcatcaattcatgcattttttttcccttaaataataagtcaattttatccttttgattcaaccagcacagcttaggggatgacacatgcatacagtagactgtcaga

SEQ ID NO: 1001745 - DNA, 120 bp, Artificial Sequence
  ENSG00000176728_84 (sequence is synthesized)
gtggtatactttgtataatagaaataaatgaagataaaatagaaaggaaaaaaagcagatgatttgctaggaactctgcctgacctgtagtccctcagcacataacattgtctctgggga

SEQ ID NO: 1001746 - DNA, 120 bp, Artificial Sequence
  ENSG00000176728_85 (sequence is synthesized)
agaaaagtttatcttgggctgcaaacagacaataaatggtaagaagcctcaagttctgagacttggataaccacagtaagtatcccttatggtagggcagtgcagagctcagctttctaa

SEQ ID NO: 1001747 - DNA, 120 bp, Artificial Sequence
  ENSG00000176728_86 (sequence is synthesized)
gatggagatttctaacgaagagacacatttccctatgtaatgagaaagttgggcttagaggattttttattttgcttatttattgtgtgcatgaaaatttttgctctcaagttcattttt

SEQ ID NO: 1001748 - DNA, 120 bp, Artificial Sequence
  ENSG00000176728_87 (sequence is synthesized)
gtcagatattgacaaaattcagactgcataaagtttaaaaaggtatctacagcaatttttttaaaagcatagttgaaaatctcttatcttctccctactccatttaattcatcaacctag

SEQ ID NO: 1001749 - DNA, 120 bp, Artificial Sequence
  ENSG00000176728_88 (sequence is synthesized)
aagatgtggttaaagccctcttcttaacagtttagaagtgttgtgttaccatagacttttgtttgagtaatgtaaaataactcgtggatagtctgacactttgcaagaaagcatgtaact

SEQ ID NO: 1001750 - DNA, 120 bp, Artificial Sequence
  ENSG00000176728_89 (sequence is synthesized)
ctgttgttcagatataacaccaggaggccttgggattatctacctatcagtgctgagatggagaaagagtcaaaagcaacccttcttgctccagccacagcatgttccgaagagatgatt

SEQ ID NO: 1001751 - DNA, 90 bp, Artificial Sequence
  ENSG00000176728_90 (sequence is synthesized)
ttggaggccaaggcaaatggatcacttgagatatggagttggagacaaacctggccaacacagtgaaaccccgctcttgggcaagcacct

SEQ ID NO: 1001752 - DNA, 120 bp, Artificial Sequence
  ENSG00000176728_91 (sequence is synthesized)
ttgaacccaggaggtgaagttggcagccttggatcaggccactgcactccagcatgagcaacaggatccatggccagaaattaggaatcttcccctacgcaagccgtaccccatgagaca

SEQ ID NO: 1001753 - DNA, 120 bp, Artificial Sequence
  ENSG00000176728_92 (sequence is synthesized)
ttaggaatcttcccctacgcaagccgtaccccatgagacaagaagctttctagagttgcaggcatgtcccccatgtctgcttctagcttccgtatcttagtgcacctgaagggaaaggaa

SEQ ID NO: 1001754 - DNA, 120 bp, Artificial Sequence
  ENSG00000176728_93 (sequence is synthesized)
gaaatgcatgaggctaaaaagagagctggaagttaatgtggcagtatttgttcaagatgaaggtgctcctgctctatcactttctagtcagaaatgcaacaacttgagcaagagtgatca

SEQ ID NO: 1001755 - DNA, 120 bp, Artificial Sequence
  ENSG00000176728_94 (sequence is synthesized)
gatactgtgatcatgaaggtggctttcccagggcaaggctgatctattgcattctggatgtgctgactcctacgatttccccaagtgtgggaaactcaactgcataatttgtggaaaatt

SEQ ID NO: 1001756 - DNA, 120 bp, Artificial Sequence
  ENSG00000176728_95 (sequence is synthesized)
tgaagccagatgacaaagatgccttagatgagcataagtcctctccaacagaatatgctccattatatcctcatccaacaggctttatgtatcaatagcctgccaacaggacattgttca

SEQ ID NO: 1001757 - DNA, 120 bp, Artificial Sequence
  ENSG00000176728_96 (sequence is synthesized)
actagtacatttgatgtgccaggagtacatgggtggtgtgtgccaaaggacacttgagattttttccattgtctcatggtggaatactggaggagtaagtgttcctacttgttaagcagg

SEQ ID NO: 1001758 - DNA, 120 bp, Artificial Sequence
  ENSG00000176728_97 (sequence is synthesized)
tattctgtgtgtgctgaaagcaggcctttcgctgacgtgtgcgggcagccagtgctgtggagcaaggccaccatggactgtctgctgttgatgccacagcatgttccgaagagatgattg

SEQ ID NO: 1001759 - DNA, 120 bp, Artificial Sequence
  ENSG00000176728_98 (sequence is synthesized)
agagccgcgggctgggaggcgctgtggatggcagcggggcgctgtgagagtatcaagaggtactgaggctagacaatgggagggacttcccagtgaggagggagtgagaagtgatagctc

SEQ ID NO: 1001760 - DNA, 120 bp, Artificial Sequence
  ENSG00000176728_99 (sequence is synthesized)
tgtgcacccggagacgcaaacacgcccaaccctggggccaccgggccgaggctgatgggagacaatgggagacggctttgatgagtggagaaacaccagggttttttgttttctgttgaa

SEQ ID NO: 1001761 - DNA, 120 bp, Artificial Sequence
  ENSG00000176728_100 (sequence is synthesized)
ttggataaaatgacagcaacacacgtggagtgaatttaaggagcggagagtttaataggcagcatgaaggaaggagctttcttttacagagacagagggaggagggctctatagccgaga

SEQ ID NO: 1001762 - DNA, 120 bp, Artificial Sequence
  ENSG00000176728_101 (sequence is synthesized)
taggaaacctggagtgccccgagatactagccagttatatgaggagtcggtgtttgatatgcttagggtattggtttgaccaggaatattgttcccatagtctttgaaaaaactgaccct

SEQ ID NO: 1001763 - DNA, 120 bp, Artificial Sequence
  ENSG00000176728_102 (sequence is synthesized)
tgcaccttagccttttaatatgcaaacacaggggccctgatgttctatacacgtggggatatgtcgaggtggccatgttgccaggcaaatatgggggcaagggcaagaggaaaaccgtga

SEQ ID NO: 1001764 - DNA, 120 bp, Artificial Sequence
  ENSG00000176728_103 (sequence is synthesized)
gaatcgccatgtttgggtggacccagtttctaatggtgtgcatttgcatgtcaaaggttgccagcgggctcttagctaggctttcctgctagacaagaagcgttcctggagctgctttag

SEQ ID NO: 1001765 - DNA, 120 bp, Artificial Sequence
  ENSG00000176728_104 (sequence is synthesized)
aagagatgaaagcttttcaaggaccctttttcccctctatctgcctgaaataatttcctaataactcctgtaacattcctccttctgaacaagttaaccctaactgctgttagggtgttt

SEQ ID NO: 1001766 - DNA, 120 bp, Artificial Sequence
  ENSG00000176728_105 (sequence is synthesized)
agggccaccacattttctcactgctttctgctgaaaagggacgctgaatggggaacagcagctaaggcttctccgggggttttaagggtccttggaagaatggcatattcatgcgtggtt

SEQ ID NO: 1001767 - DNA, 120 bp, Artificial Sequence
  ENSG00000176728_106 (sequence is synthesized)
tagtttgcagcaccattgggagctggattgcttttaggcaagaagaaacaatttgacttatagtattgttagatatgagctgtaaatttctcttcaaaaaatcagtatgtatgttcaatt

SEQ ID NO: 1001768 - DNA, 83 bp, Artificial Sequence
  ENSG00000176728_107 (sequence is synthesized)
tgtaaatttctcttcaaaaaatcagtatgtatgttcaattctttgctttctacttttaaacttaacatccttgtagcacaacg

SEQ ID NO: 1001769 - DNA, 120 bp, Artificial Sequence
  ENSG00000176728_108 (sequence is synthesized)
tgctctgccctgactcattttccaccctgactctttctgatttcctgctctgccataaccatttttccagccaaaccactcacccgtacactatctttaaattagccaattggaattagt

SEQ ID NO: 1001770 - DNA, 120 bp, Artificial Sequence
  ENSG00000176728_109 (sequence is synthesized)
acagcagcagggtccacgtggatcgggaataagaacctcctctcctcccttgtccaggtgtgtgctcactattgctccaaatgtaagggggcacccttctatagaattacattgccttgc

SEQ ID NO: 1001771 - DNA, 120 bp, Artificial Sequence
  ENSG00000176728_110 (sequence is synthesized)
tgagaattaaaaaaaaaaaaattatatttgagtgctgtttcttttgcggcacaaaactttataacaatttggggggctcacctgtaattacattcctctcagggcccaccggtctctggc

SEQ ID NO: 1001772 - DNA, 85 bp, Artificial Sequence
  ENSG00000176728_111 (sequence is synthesized)
cacaggcttagcctccctagaagctgggactacagagtctcgttctgtcacccgggctggagtgcaggaggacaatctcggctcg

SEQ ID NO: 1001773 - DNA, 89 bp, Artificial Sequence
  ENSG00000176728_112 (sequence is synthesized)
gcttagcctccctagaagctgggactacagagtctcgttctgtcacccgggctggagtgcaggaggacaatctcggctcgctgatgggt

SEQ ID NO: 1001774 - DNA, 120 bp, Artificial Sequence
  ENSG00000176728_113 (sequence is synthesized)
cagttggctaatgtttaaaagagatggggtttcaccgtcttgaccagcctggttttgagaaaaatcataattttaaaaaactgtgcttatgctaaaaacagatccttagcattcttccag

SEQ ID NO: 1001775 - DNA, 120 bp, Artificial Sequence
  ENSG00000176728_114 (sequence is synthesized)
tattcttagttgtgtcatttgctttaaaataagcctaagaattgcaccagaattagctgcacaactccgccaggaaatgcaaagttttattgttataggattctagaaacaatcatatta

SEQ ID NO: 1001776 - DNA, 120 bp, Artificial Sequence
  ENSG00000176728_115 (sequence is synthesized)
tatatctggaaactctatacacacatgcccacacacacaaaaacacacacaattttcactgaatagacatcataataagcacactgaaaacctaataaagttattataaagctgtagaac

SEQ ID NO: 1001777 - DNA, 120 bp, Artificial Sequence
  ENSG00000176728_116 (sequence is synthesized)
acaatgattaaaagcaaatgataatcttaaattttaaagaactgaaaatattagaatttaagaattaaaatgttctaattgttctttggtccactatcatagatttcaagcagattaatt

SEQ ID NO: 1001778 - DNA, 120 bp, Artificial Sequence
  ENSG00000176728_117 (sequence is synthesized)
aatgtagtagaatgacattaatagttcctatcaatgggatttaatttataccattttgaaaatagtttgttgtcatatattgtttactgtgtgacttcttgtatttgctctaaagtaagg

SEQ ID NO: 1001779 - DNA, 120 bp, Artificial Sequence
  ENSG00000176728_118 (sequence is synthesized)
ctaaatcacatcttagcctcatctcatccaaggaagtgattacagtaaaggtatccatgttgggttaatgtgtaaaatagtggttgtggattaatgtgggtttgatgtaggaatttatta

SEQ ID NO: 1001780 - DNA, 120 bp, Artificial Sequence
  ENSG00000176728_119 (sequence is synthesized)
gattagcttgaaatgtactgtgtgacgaatatttagtctattcaataagtggtattcaacagatatatatcaacaagtgctatgtaccaaccactgttcaaggtggcagataaaaatata

SEQ ID NO: 1001781 - DNA, 120 bp, Artificial Sequence
  ENSG00000176728_120 (sequence is synthesized)
ggcaaagataatattaatccaaattgcacatgaaaacatttgatactattgataatgtggcagatgaaatgattttcactttattataatttttaagagaatgagataattaaatgtgta

SEQ ID NO: 1001782 - DNA, 120 bp, Artificial Sequence
  ENSG00000176728_121 (sequence is synthesized)
ctgtaagtgttacaagaagcctatccatgttattctttactgaaataattagattacaaaaatcacctttttcaaaagaaatttatattataaatgctcccatggcaaaaacaaaaagcc

SEQ ID NO: 1001783 - DNA, 120 bp, Artificial Sequence
  ENSG00000176728_122 (sequence is synthesized)
tggtctttgacttggaatatattcttattatataaagtaagatacatggcagagagaagaaaaaacaattttattcatctgtcctggtaatgacaaaaaagacagaagtcatattttttt

SEQ ID NO: 1001784 - DNA, 120 bp, Artificial Sequence
  ENSG00000176728_123 (sequence is synthesized)
tgcaattttagattggactcctaagaatagcagacagttggcagtgtaaatatgttgtaaattagctagccctgaaacaaaatgactgatcattagcaaatcgggcaacttttattattg

SEQ ID NO: 1001785 - DNA, 120 bp, Artificial Sequence
  ENSG00000176728_124 (sequence is synthesized)
ccattgtaagttgctttacctatcatgagtgtgctcttatactattagaattgaaatctattctgtactgccaatttatatccctgttttataatcttgggattcttgctttacattcta

SEQ ID NO: 1001786 - DNA, 120 bp, Artificial Sequence
  ENSG00000176728_125 (sequence is synthesized)
aaatgttgtctctgaacaattagtgaatatcaagtaagttttttattttttttaaaggtagtcttaaaagtctaatgatctttagtgaaaataatgaggagatttggatatggtggttca

SEQ ID NO: 1001787 - DNA, 120 bp, Artificial Sequence
  ENSG00000176728_126 (sequence is synthesized)
tttctgtaatcccaagtagttggaaggatgaggcaggagtatattacttgaaccctggagtgtgaggactgattgagctatgtgctatcatcatgccactgcagtccagcctgggccaca

SEQ ID NO: 1001788 - DNA, 120 bp, Artificial Sequence
  ENSG00000176728_127 (sequence is synthesized)
gagcataatctgaataaaaaatagaactataaaaagtaatatagcattgctgtttttaattcacttgtagtaatgcatagatagcatatttagccaaaacgttttaaactggtaatatgc

SEQ ID NO: 1001789 - DNA, 120 bp, Artificial Sequence
  ENSG00000176728_128 (sequence is synthesized)
caagaggtcagatgtttgagtcagattgctagctagctcctcaactggctaaatctgtagtattttgcaaagtatttctcctaaatgtaattagtttttttatttgttaaatggatttac

SEQ ID NO: 1001790 - DNA, 120 bp, Artificial Sequence
  ENSG00000176728_129 (sequence is synthesized)
taatgctacctgcttaggaaactaactctgatattaattagtttacctcaaaaacttgttctgaatgacatatattaggcaataaaatattagctactacttgatattacaaattctttt

SEQ ID NO: 1001791 - DNA, 120 bp, Artificial Sequence
  ENSG00000176728_130 (sequence is synthesized)
catctgtttacttttaaagctcatagtgagcacaataaaattccagaagaccgatgatggctgttagatataacagaacgctctgagagtcactatcagaaatgagcatatcagtgcata

SEQ ID NO: 1001792 - DNA, 120 bp, Artificial Sequence
  ENSG00000176728_131 (sequence is synthesized)
aaatgtatggtagctttatttagcagctgtttcattgtttaccatagcattttttcttacaattttgtagaagcctgtgtcagaatcaagaagttttttttagaagatgataatcatgga

SEQ ID NO: 1001793 - DNA, 120 bp, Artificial Sequence
  ENSG00000176728_132 (sequence is synthesized)
aaacgcatgaagatgtacattggtttggtccagaaaggacgcacaacttgaaaatagccatggtgcaggtctgggctttcaagttacaggaaactttggaaaatagtggaaagtgaccaa

SEQ ID NO: 1001794 - DNA, 120 bp, Artificial Sequence
  ENSG00000176728_133 (sequence is synthesized)
cttaatgaaatattactattaatatataacatgttttcacttgagggcttaacaacttgagtggtttttcacaataagcacattcttaaaaatagtaaacgatgtttatgagttatttga

SEQ ID NO: 1001795 - DNA, 120 bp, Artificial Sequence
  ENSG00000176728_134 (sequence is synthesized)
tgagcacctgcatgggaggacactagtctggcaagtggaaggagggtgcatgaacgagttttatgtgtatgtcggtgtgcctaggtagctcctcagcctggctgggacccaatatggctt

SEQ ID NO: 1001796 - DNA, 120 bp, Artificial Sequence
  ENSG00000176728_135 (sequence is synthesized)
ctcctttttccacacacaagagctcagggatcctccattctggcgtctctcacctccttcatcccctacctcctgcagctccagtgccctgagctcccagccacagtgctcactgctggc

SEQ ID NO: 1001797 - DNA, 120 bp, Artificial Sequence
  ENSG00000176728_136 (sequence is synthesized)
tctggttatccactaccagctgcaccacaagcagctccagctgctccactctgacaccgaatcaattctgagagggcagccccagggggtcagggatgagccaagggaagagagacaggc

SEQ ID NO: 1001798 - DNA, 120 bp, Artificial Sequence
  ENSG00000176728_137 (sequence is synthesized)
taggagttgactgcctgttggcctactggctctggtgggaagatacccatgatgttccctattattgtcattttctggaaggagccagtatcttcctcacctctcggccttcccacttgc

SEQ ID NO: 1001799 - DNA, 120 bp, Artificial Sequence
  ENSG00000176728_138 (sequence is synthesized)
tgtgcctcccaccagaaacactctttctgtacttcatgtaactgccaaccagctctacctgactcctgctgcaacatcttctcctccaggaaggcttcctagatgccccgagtctgggtc

SEQ ID NO: 1001800 - DNA, 120 bp, Artificial Sequence
  ENSG00000176728_139 (sequence is synthesized)
aggtgcctcctgtgagcctcctctctgctctgtgccctatgcacccccaactgcaccccagccacaccatgtcaatgtttgtgtccaccaccagccagaagagcagggatggtgttatct

SEQ ID NO: 1001801 - DNA, 120 bp, Artificial Sequence
  ENSG00000176728_140 (sequence is synthesized)
ttgttgcccagtgtacccagtacacattagatgcccaacacatgtttcttaaatgagtcctcaaggtcaccagcaccagtgaccttgagcaggacctgtcctgggaaatgcagactctct

SEQ ID NO: 1001802 - DNA, 120 bp, Artificial Sequence
  ENSG00000176728_141 (sequence is synthesized)
gtcagtataatattcagataacttagacattgaagatccttgaattgggatccctactgtctggagttgtctggcaccgtccttgtggaattgactcatctgtaaaagggagttaagggt

SEQ ID NO: 1001803 - DNA, 120 bp, Artificial Sequence
  ENSG00000176728_142 (sequence is synthesized)
acatcaatatcccgtgtccataaatttagaggtgactggagaactctcacataagcggccacctcacttcactggctggatcatggggcagctctttcccaagcccggcgagtgcctgca

SEQ ID NO: 1001804 - DNA, 120 bp, Artificial Sequence
  ENSG00000176728_143 (sequence is synthesized)
cattctggctgccttggcctttcctttcctcagttgagccaggaaacacaaagatggtgcagacccaggccctgctttgactgggagaaagatgcattcagttgactaaaacttgaagct

SEQ ID NO: 1001805 - DNA, 120 bp, Artificial Sequence
  ENSG00000176728_144 (sequence is synthesized)
ataattatacacctatgccatatatatgtatgtatgtgaataatgaacacacataggtaatttgagattgattcctctaaaaaactgtgctcaccaggtgtggtggctcatgactgtatc

SEQ ID NO: 1001806 - DNA, 77 bp, Artificial Sequence
  ENSG00000176728_145 (sequence is synthesized)
cccatatcaagggtgtggtggcatgcacctgtaatcccaacttcttgggatgctgaggcaggagaattgcttgaatg

SEQ ID NO: 1001807 - DNA, 120 bp, Artificial Sequence
  ENSG00000176728_146 (sequence is synthesized)
gcaggagaattgcttgaatgcaggaggtggagattgcagtgagccgagaacgcatcactgcactctagcctgagcaacagagcaagactcagtctccaaaaaataataataatagtaata

SEQ ID NO: 1001808 - DNA, 120 bp, Artificial Sequence
  ENSG00000176728_147 (sequence is synthesized)
tcagtctccaaaaaataataataatagtaataataataatactcggagcttactaatttttataggtttcttaaaaaatagttctaagttttagaactccatgttttatgtgaatactga

SEQ ID NO: 1001809 - DNA, 120 bp, Artificial Sequence
  ENSG00000176728_148 (sequence is synthesized)
ttattagactttcttttcccatttaattcctttagcattcttgccaaaaagcaacatgctatataaatgagggtcagtgtatgtcctctttatgcattgctaatttgcctctatgtataa

SEQ ID NO: 1001810 - DNA, 120 bp, Artificial Sequence
  ENSG00000176728_149 (sequence is synthesized)
taataacaggacctctgaattcctgatgtttacagtaaattctgggattacacaacctcctgtatatacagttctttttcaatatcatgtgtctcttcttggtccttcacatttccagat

SEQ ID NO: 1001811 - DNA, 120 bp, Artificial Sequence
  ENSG00000176728_150 (sequence is synthesized)
aatacttagataacacttctccatttctgcttaaaaatcctatcagtataatgagaaaatttgcattaaatatatcaaccaatttgagaaggttttgtatttaacaacattaagtcgttt

SEQ ID NO: 1001812 - DNA, 120 bp, Artificial Sequence
  ENSG00000176728_151 (sequence is synthesized)
caacattaagtcgtttaatccatgcacgtggtatatattccaatttatctcagtcttcttattttcttttttttattattatactttaagttaaagggtacatgtgcacaacgtgcaggt

SEQ ID NO: 1001813 - DNA, 84 bp, Artificial Sequence
  ENSG00000176728_152 (sequence is synthesized)
agctccccacctcccaacaggccctggtgtgtgatgttcctcgccctgtgaccatgtgttctcattgttcagctcccacctatg

SEQ ID NO: 1001814 - DNA, 76 bp, Artificial Sequence
  ENSG00000176728_153 (sequence is synthesized)
acttagaatgatgatctccagcttcatccatgtcactgtaaaggacatgaactcatcctttttaattcagcgttct

SEQ ID NO: 1001815 - DNA, 120 bp, Artificial Sequence
  ENSG00000176728_154 (sequence is synthesized)
tgtaaaggacatgaactcatcctttttaattcagcgttcttcttttcttaaaatcgtgctatgtggatttcagtggtgagatcttggataatttttttttcttttaaatattctggccag

SEQ ID NO: 1001816 - DNA, 86 bp, Artificial Sequence
  ENSG00000176728_155 (sequence is synthesized)
atcttggataatttttttttcttttaaatattctggccagtcatggtggctcatgcccagcactttgggagctgaagtgtgtgcgc

SEQ ID NO: 1001817 - DNA, 120 bp, Artificial Sequence
  ENSG00000176728_156 (sequence is synthesized)
tgtctgctgttgatggtaagagtgtgccactcctgttctttgtcatggcctctgctgtaagatgagagaagtctgacaccagtgtgattcatgactcttttgtggccacagcatgttccg

SEQ ID NO: 1001818 - DNA, 120 bp, Artificial Sequence
  ENSG00000176728_157 (sequence is synthesized)
cacagtgataaaatgttcacccagcctggagtgcagtagtgagacctggactgactacagcctcaaattcctgggctcaagaaatcttcctgcatttgtctccacagtagctgagactac

SEQ ID NO: 1001819 - DNA, 120 bp, Artificial Sequence
  ENSG00000176728_158 (sequence is synthesized)
agatgcacaccaccacacctggctttttattgatgttgttttgagacaaaagcctcttctgttttaaacttgtagttctaatgaattcaaccagtgttatgacctttggattcctataca

SEQ ID NO: 1001820 - DNA, 120 bp, Artificial Sequence
  ENSG00000176728_159 (sequence is synthesized)
ttatgcttttatttttttacaagcaccccaagattaagatagctaaattgataacttcccctgaacttctttacactttctacatgcctctctcttccatcactatcttgtctaaaaata

SEQ ID NO: 1001821 - DNA, 120 bp, Artificial Sequence
  ENSG00000176728_160 (sequence is synthesized)
atctgtataacataaaaactgaggtattccaaatatattattttccctcatatctttcatattttatctacaataacttttttattatataccacttacaaattttttttcttgttgctg

SEQ ID NO: 1001822 - DNA, 120 bp, Artificial Sequence
  ENSG00000176728_161 (sequence is synthesized)
gctgtttatacattccagttgaggtcatcattcattgttccctaaatgatagtatcaacatcttaatttatttcctacttcaactgatttctcactgagggtctagaattattcttcttt

SEQ ID NO: 1001823 - DNA, 120 bp, Artificial Sequence
  ENSG00000176728_162 (sequence is synthesized)
tcaatggataaaacacatctcttttctttttctttctattcttcttcctttctgctttactattaactgttattgtatacagtgaggagctatttcagtgttatttactattatatccac

SEQ ID NO: 1001824 - DNA, 120 bp, Artificial Sequence
  ENSG00000176728_163 (sequence is synthesized)
ccaccattttaagctaaaattcagagatataataacttctctataagtgcttaatattatagtaaaaaatgcaactttgtaatttcagtgttaaatatttgaataccacgtctatagatt

SEQ ID NO: 1001825 - DNA, 120 bp, Artificial Sequence
  ENSG00000176728_164 (sequence is synthesized)
atgaaacaagatttcagttgagttgcagataagcttatgttaattttttattcactccttccatttctatccatcctagctataagacatttagaggtgggaacttggcatactcttccc

SEQ ID NO: 1001826 - DNA, 120 bp, Artificial Sequence
  ENSG00000176728_165 (sequence is synthesized)
tatacttgagagcctgttgaagtcacatgaataacgaaatgtacactgaccatttaattcatataactaaatataaatattttatatttaaaatgtattgaaaagtttttattgcttaaa

SEQ ID NO: 1001827 - DNA, 120 bp, Artificial Sequence
  ENSG00000176728_166 (sequence is synthesized)
tttattatgacagctattatttagatttttcattatttaaaactcaaacaatacaggaaacaaacatgtagggaaatctcaagtaattcattatttattgttctttttatcacagaagac

SEQ ID NO: 1001828 - DNA, 120 bp, Artificial Sequence
  ENSG00000176728_167 (sequence is synthesized)
acaagccatctccttactggttagggccatattatccagaaccgtcagaacatttcacttttcatttcccattgaaatctgaggagtgtgttttgaactctatagtgaaatgcctacaac

SEQ ID NO: 1001829 - DNA, 120 bp, Artificial Sequence
  ENSG00000176728_168 (sequence is synthesized)
tacccagtgtaactctgtcttcttaggagggtatgattctgcaagatgaatatgataatgtcctaaaatatcacccttacatttaattatataaaacaccactaatgcaataataataca

SEQ ID NO: 1001830 - DNA, 120 bp, Artificial Sequence
  ENSG00000176728_169 (sequence is synthesized)
cgtgaatgatcaaaaacaaccctacttgcggtgttgttcatgtggatggtgacaagtcctactgctggatggcgtcagtgggtttctctccgtggttccgtagctacctcatatggctta

SEQ ID NO: 1001831 - DNA, 120 bp, Artificial Sequence
  ENSG00000176728_170 (sequence is synthesized)
gggcggattatgccatgggatttataccggcacccaacattaagaggggcctaattctcccttaagggggcaacgaaagaggataacatgagtgggaagtgtgcaagggaccttcagagg

SEQ ID NO: 1001832 - DNA, 120 bp, Artificial Sequence
  ENSG00000176728_171 (sequence is synthesized)
gggaaagggaggaaacaggtgaaccttctggtacaggcaaggctagacatccctggtttgaggtggtgaggctttggggtcaggcaaggtgagacatccctggtttgaaggtttgaggct

SEQ ID NO: 1001833 - DNA, 120 bp, Artificial Sequence
  ENSG00000176728_172 (sequence is synthesized)
ttcaggacaggcaaggcaagccatcacctggtttgagtggttgagccttccgaggcaggcaaggcaagacatccttggtttgaggggttgagccttctggggcaggcaaagtgagacacc

SEQ ID NO: 1001834 - DNA, 120 bp, Artificial Sequence
  ENSG00000176728_173 (sequence is synthesized)
cctgctttgaggggttgagccttccgcagatttcagggggttgaaccttacacaaacctctggtggtaagaaaaatactcaaaactcccctttcctttcatcttggggaaagaaagagta

SEQ ID NO: 1001835 - DNA, 120 bp, Artificial Sequence
  ENSG00000176728_174 (sequence is synthesized)
gctccactcccactggtccctcctctagaggaaggggaaggggaaggagaggagagaacagcagcatgagcggctggcagaggcagagaaagagaaacaaagtcaaagagaaaaagaagc

SEQ ID NO: 1001836 - DNA, 120 bp, Artificial Sequence
  ENSG00000176728_175 (sequence is synthesized)
agagagagacagacaaacggaatcagagagagaaagagagagatagtggtaaagagaaaacagtgtatcctattcctttaaaatccagggtaaattaaaaacctataattaataattgaa

SEQ ID NO: 1001837 - DNA, 69 bp, Artificial Sequence
  ENSG00000176728_176 (sequence is synthesized)
ccctagccttcctaataaaaattcttaacccagtaacctgcggatggtccaaataccttcaatctattg

SEQ ID NO: 1001838 - DNA, 120 bp, Artificial Sequence
  ENSG00000176728_177 (sequence is synthesized)
ccagtaacctgcggatggtccaaataccttcaatctattgtgtccaatgctttgctaatggaagaaagtagaaaaataacttttagaggaagcctcattgtgagcccaccttatcaggtc

SEQ ID NO: 1001839 - DNA, 120 bp, Artificial Sequence
  ENSG00000176728_178 (sequence is synthesized)
acgcaggaccctgcccaatcgtcaatgcgacgtcctcctactcccacctcagagctgtcacagagactgtcagttccgtccctccccttcagccctttaacgcacgtcttcccgaccgca

SEQ ID NO: 1001840 - DNA, 120 bp, Artificial Sequence
  ENSG00000285169_0 (sequence is synthesized)
gagaagaagctggtacaattcaaaagcaagtgaactatttctcaataagacttggaattccaacttctggttaattgtaaatatgatttggaggaagaagtagcacatcagggagctaag

SEQ ID NO: 1001841 - DNA, 80 bp, Artificial Sequence
  ENSG00000285163_0 (sequence is synthesized)
gacaaagttaaggatgcgcatccgtgacacgacctcgggaagtcctgacgacatgtgcccaaggtggtcggggcacagcc

SEQ ID NO: 1001842 - DNA, 120 bp, Artificial Sequence
  ENSG00000285163_1 (sequence is synthesized)
tacatgtaagaagtacactggttccatccagaaagacggggacagctccaagcaggaaaggggtttccaggtcacaggtaggtgagacaactggttgcattcttttgagtttagagacaa

SEQ ID NO: 1001843 - DNA, 120 bp, Artificial Sequence
  ENSG00000285163_2 (sequence is synthesized)
ccggttgcattcttttgagtttctggtaagcgaggcaatcagaatatgcatctatctcagtgagcagagggatgagtttgaatagaatgggagggagttttgccctgagcagttcccagc

SEQ ID NO: 1001844 - DNA, 120 bp, Artificial Sequence
  ENSG00000285163_3 (sequence is synthesized)
ttgaagggacccaagagatttttcctttcacagccccacgtcatcgcaggagtcgttgtgagagggaggcaggagggtcagggtcagcaaggagatggttgatggaggcggaggtcaggg

SEQ ID NO: 1001845 - DNA, 120 bp, Artificial Sequence
  ENSG00000285163_4 (sequence is synthesized)
cgatgcgaccgctggctttgaagatggccgtgagccagggactgcaggtggcctctaaaggctggagaagcgaggaaacagattctcccctaaagcctccagaaaggaaccgttctgccc

SEQ ID NO: 1001846 - DNA, 120 bp, Artificial Sequence
  ENSG00000285163_5 (sequence is synthesized)
acactttgacttctcaaaactgtaaaagaatgaatgtgtgttgtttcaagccactaaatttgtggtcatttgttacagccgccataggaatctcacacagaacctcagagagcagtgtga

SEQ ID NO: 1001847 - DNA, 120 bp, Artificial Sequence
  ENSG00000285163_6 (sequence is synthesized)
ggacgcagagcacggagagcacctggggcagggccggcgccaacggcataacacatgctgctgctcctctcccgcggggcccatggagatggctggaagcagcccaacgtcagggcagat

SEQ ID NO: 1001848 - DNA, 120 bp, Artificial Sequence
  ENSG00000285163_7 (sequence is synthesized)
ccctaccttcacactcacataagagaagagtgaagtttcggggactccacacctcaaggtagttccaccgtgcgaggtgctgcgctcacagtattactcatgcacctttctgataagaaa

SEQ ID NO: 1001849 - DNA, 120 bp, Artificial Sequence
  ENSG00000285163_8 (sequence is synthesized)
agtgaaaatgtgaagttgaaaactgaagacgcccagcaacttcctgaatccagccctccacgtcctgccctacgggacggacgactcccaaagaggaatcgttggtggaagtcccatgtt

SEQ ID NO: 1001850 - DNA, 120 bp, Artificial Sequence
  ENSG00000285163_9 (sequence is synthesized)
tcgttgccgttggaagggggaactggtcaagggctcatctctggacccacaccccataaccaacatggaagcctggatttggccctggatcaggctggctccccagggaagggtccagtc

SEQ ID NO: 1001851 - DNA, 120 bp, Artificial Sequence
  ENSG00000285163_10 (sequence is synthesized)
tctccggggagacatcccgacttcgggtcctgctttctctactgtaattcgaggctggccatgcccctcagtgggcctcagtttcctcacctgtacagtggggaaatccataggacctac

SEQ ID NO: 1001852 - DNA, 120 bp, Artificial Sequence
  ENSG00000285163_11 (sequence is synthesized)
ctcctgggagggcactgaggaccgagggaatgaatgcctgtccagtgctcatgatcgtgacaagcactgcgcagaataaatccggaataaacgctcaccgggtgagggagggcagggaag

SEQ ID NO: 1001853 - DNA, 120 bp, Artificial Sequence
  ENSG00000285163_12 (sequence is synthesized)
ggccccagggcacacctgatctcaggctttctcttcaagcacaccgttcattaatctgttaaaaggcctagctcatgtgtgaagatagaagcttcctccagtgaagcagcagccccggca

SEQ ID NO: 1001854 - DNA, 120 bp, Artificial Sequence
  ENSG00000285163_13 (sequence is synthesized)
agaggtcaacagcaactgccctctgggatggctgccccctgccccagccgggagcgggaagggcaacagcaccggaaggcgggaggcaggcagtgggtatgtgtgtgggggggctctgcc

SEQ ID NO: 1001855 - DNA, 120 bp, Artificial Sequence
  ENSG00000285163_14 (sequence is synthesized)
cgcctttgctgtgtctgtgccgtttcaggcaagtcccttcagctccttgagcctcagtttcctcacctggcaaatggggtgggaagacgcaatgtgatgttttcttgctaaagagcctca

SEQ ID NO: 1001856 - DNA, 120 bp, Artificial Sequence
  ENSG00000285163_15 (sequence is synthesized)
gctgctgcagaatgggcctgggggaatcacctcctccccaccttccgcttggccgggctggcgcctaacacgcgtaacttctcccctgccaagaggagacgctggtgggaaggcagcctg

SEQ ID NO: 1001857 - DNA, 120 bp, Artificial Sequence
  ENSG00000285165_0 (sequence is synthesized)
tgaccgggaccacctcggaaccgcccgggggcgtctgcaccagcgggcgcagggactcggcccccagctggcgctgctgtcgtagggcgtgtcggacaggcccttgtcccctgtggaaag

SEQ ID NO: 1001858 - DNA, 120 bp, Artificial Sequence
  ENSG00000285165_1 (sequence is synthesized)
ctgtgacacattgggagtgactgatggaaatctcatcaagttgaagcgggggtaagtctccaaaagctaaaaggggctgcaaacgttcattcaccaaagcattctccaggctcctcacct

SEQ ID NO: 1001859 - DNA, 120 bp, Artificial Sequence
  ENSG00000285165_2 (sequence is synthesized)
gacagaggacgccatccctgcttcttaaggtgagaagattgaggcctggaggaatcgcctgtaagccccagatccctggctgactggcagaggagacagcactctggctgcagggctctg

SEQ ID NO: 1001860 - DNA, 120 bp, Artificial Sequence
  ENSG00000197180_0 (sequence is synthesized)
ggatggggcccagctagaccgactaggacgagacaagagggacagggaggcttcgcggaaccctacgcccacccgacgcgttcgcccgtccgtttttatttttatttttattttggtttt

SEQ ID NO: 1001861 - DNA, 120 bp, Artificial Sequence
  ENSG00000197180_1 (sequence is synthesized)
ttggtttttttgttgttgttctcttcttttgtcttttttttttctttagagacggggtctagctatgttggccaggctggtctcgagtccccgggctcaagcgatcctcccgcctcagcc

SEQ ID NO: 1001862 - DNA, 120 bp, Artificial Sequence
  ENSG00000197180_2 (sequence is synthesized)
aaaaagagacagacacagggaggagagcactgcacgcagctgaaggcagagattggaatgacacctctgcaagccaaggaacacggagcattgctgggaaccaccggaagaagccagaag

SEQ ID NO: 1001863 - DNA, 120 bp, Artificial Sequence
  ENSG00000197180_3 (sequence is synthesized)
acaggcctggagctggctttccctcacagccccagaaggaacccaccctggtgccaccttgatttcggacttctggccttcagaactgggagagaataaatttctgttgctttaaacttc

SEQ ID NO: 1001864 - DNA, 120 bp, Artificial Sequence
  ENSG00000197182_0 (sequence is synthesized)
cccccctccccgggcagccagtgccagatgagagcaggagacaaaagtagcattttcctcgtactccggggctggcagcggggccttcccccagcaccacatggctcctggcagccctgc

SEQ ID NO: 1001865 - DNA, 120 bp, Artificial Sequence
  ENSG00000197182_1 (sequence is synthesized)
agcaccacatggctcctggcagccctgccccctgtgccggggtggccgaggcccagccgggcccactggaccgagggacggcggcggccagagactagggggcccgtgggcccatagctg

SEQ ID NO: 1001866 - DNA, 120 bp, Artificial Sequence
  ENSG00000197182_2 (sequence is synthesized)
cctcccccacccgggtgaccggctgggcccagggacgtcattttcacttcctggctttggagaagacgcctccatcctccggcacctcggaatgtggccccgtcccagagcaccacccga

SEQ ID NO: 1001867 - DNA, 120 bp, Artificial Sequence
  ENSG00000197182_3 (sequence is synthesized)
gacatcaggagcccatcgtgggctagggaagatcctccgggacctaacggcccaggtcttccacccttggccacctccccaggtgatgcctgaagctcaagggactgtgtccaccctcag

SEQ ID NO: 1001868 - DNA, 120 bp, Artificial Sequence
  ENSG00000197182_4 (sequence is synthesized)
ggcctgggctgagtcctcaggggtcgacgcaggtcctctgggcagcatggggtggtgccgggtggaccccacggtggcctgtgttcgccacgtggccgtgggtcagttcctcgctggagg

SEQ ID NO: 1001869 - DNA, 120 bp, Artificial Sequence
  ENSG00000197182_5 (sequence is synthesized)
aaacccttgaggcctgggaaggtctctggatgccaccctacaccccgcccagactcctctccctgtggttcctggacagaacattccgtcaccacgaaacgaagtttgcccaggccctgc

SEQ ID NO: 1001870 - DNA, 120 bp, Artificial Sequence
  ENSG00000197182_6 (sequence is synthesized)
cttcaccctgggaaaacccagccgggcatgggaaggaggaatgctgcccgcctgcccgcccagaccagagtcgccccacatgccaggccaggcccgcatcctcctggggcacacgggagc

SEQ ID NO: 1001871 - DNA, 120 bp, Artificial Sequence
  ENSG00000197182_7 (sequence is synthesized)
cccaggcttcccggcaggaaaagccccccaccgcagaagggctggtctctggtggggagttgctgctgggtggggtgaccacagggcggggttcaggctggggtatttttaatgatgtag

SEQ ID NO: 1001872 - DNA, 120 bp, Artificial Sequence
  ENSG00000197182_8 (sequence is synthesized)
ttgcatctggtcaccgccccctgccacccccgattctttcctgccctccccaccttgtgacccagactgtggcttgaattaagaatgttttcagataagtacacgcctttgaggttaaaa

SEQ ID NO: 1001873 - DNA, 120 bp, Artificial Sequence
  ENSG00000197182_9 (sequence is synthesized)
caactcgatgagaggaggactcctcctgggcctggtgcttcgaggtccagacgagcagacactggcgcctgtgaccctgcagcggacgcccttcaaagtccgtgtggccgcatttggaag

SEQ ID NO: 1001874 - DNA, 120 bp, Artificial Sequence
  ENSG00000197182_10 (sequence is synthesized)
agtgagctgggcctcctgccatcctggctctggagggcccagcctgcctcgagcactccctggggacagaagctcctgcgctggcctctcctgtcacctagccaccgggcatcctggagt

SEQ ID NO: 1001875 - DNA, 120 bp, Artificial Sequence
  ENSG00000197182_11 (sequence is synthesized)
gcagccctcatgccccgaggccacctgccatcgcccaggatgactcaagatgccacctgggtaagtctagcccagaacgagaaaggccgaatgagggaaactgagtcacatctgcttctc

SEQ ID NO: 1001876 - DNA, 120 bp, Artificial Sequence
  ENSG00000197182_12 (sequence is synthesized)
ccaggtggggctgggggcccagggggagggcacttgtggtgacgaccagggtggactaggggcctgtctcccattctgtctctgccacacgttatagagcccgacctgtgggctgggtcc

SEQ ID NO: 1001877 - DNA, 120 bp, Artificial Sequence
  ENSG00000197182_13 (sequence is synthesized)
ccccatggtgagcactgtaggctctaggaggctgaagtcctggcctgggggacctgtgggggccaggctggggccattggaatcagtatggtggtccccacctgcactccagctccgatg

SEQ ID NO: 1001878 - DNA, 120 bp, Artificial Sequence
  ENSG00000197182_14 (sequence is synthesized)
gctgatgacgggggccctggcagctgaccccttgcctcagtggggagaccacggctcacgagggcatgagacctgcccagagcatagcccagaggccggcctggattctcacagctccgc

SEQ ID NO: 1001879 - DNA, 120 bp, Artificial Sequence
  ENSG00000197182_15 (sequence is synthesized)
ccactgggctgtcctgccccaccccctttttagcctgctgggaccatgagtcagaacccagtaggtgtgaggggacccagccagcccaggtggccagtccagcctgagggggtgggggtc

SEQ ID NO: 1001880 - DNA, 120 bp, Artificial Sequence
  ENSG00000197182_16 (sequence is synthesized)
tcagagattaagtcaggagcccagagtgcgtgcttagggtgcaacccaccccacagcctcccccaaggcacctcccgggggtgcagatgggggcagacgcagggacactcagggtggacc

SEQ ID NO: 1001881 - DNA, 120 bp, Artificial Sequence
  ENSG00000197182_17 (sequence is synthesized)
acctgactgggagctgatcatgaggtgtgcgacagcctgagtcagcctcagctcagaggagctgggatggccttgatcttccccctccggccactcaccacagctgggagggtccaagga

SEQ ID NO: 1001882 - DNA, 120 bp, Artificial Sequence
  ENSG00000197182_18 (sequence is synthesized)
gaccctcagccactgtcccttcagccctcaccccaccctggctggctctgcccggacagtccttagggacatcttggtcctgcccaccagccaggggacccagaattggagcaggggagc

SEQ ID NO: 1001883 - DNA, 120 bp, Artificial Sequence
  ENSG00000197182_19 (sequence is synthesized)
aggacccccagaccctctcataccgcttttgttctgaggccttgagggaacacggggtcttcgcgaccccaggcgagatgatgctgggacagaggagggtcgggctgcatcggggccctc

SEQ ID NO: 1001884 - DNA, 120 bp, Artificial Sequence
  ENSG00000197182_20 (sequence is synthesized)
ctggtccccactcctgggtgagtcagcatctcagtctccagttctgggtgggcggcaccaggtgtgagcctcagcggtctccttgctggctaaggacctgggatttgctccagtgcccct

SEQ ID NO: 1001885 - DNA, 120 bp, Artificial Sequence
  ENSG00000197182_21 (sequence is synthesized)
cgggagggagtaggacacgtgcccagagagcaagcagaccccctccccgaccaacttctgagagcaaagacacctagagctagagattcagcaccccctgagcctcagtttctccactat

SEQ ID NO: 1001886 - DNA, 120 bp, Artificial Sequence
  ENSG00000197182_22 (sequence is synthesized)
gaagtgggatccgtgatctcagccttaccagggctgtgaggattaaatggtccagcccagcctggggcctgcctggagtaggcagcctgctcaggatgggctgtggaaggagggctgggg

SEQ ID NO: 1001887 - DNA, 120 bp, Artificial Sequence
  ENSG00000197182_23 (sequence is synthesized)
aggatgggctgtggaaggagggctggggtagacctttcaagtccacttgggcatggggagctgagagctagcatgccgtttaacttggcaggaagcaggccgggcgcagtggctcatgcc

SEQ ID NO: 1001888 - DNA, 120 bp, Artificial Sequence
  ENSG00000197182_24 (sequence is synthesized)
aaaaaaaaaaaaaaaaaagcttggcagggagcaggacatttggacctcactctgctgcccccttggctgtgtgacatccaggtcacgttgcctctctgggcctcggtctcctcacctgtt

SEQ ID NO: 1001889 - DNA, 120 bp, Artificial Sequence
  ENSG00000197182_25 (sequence is synthesized)
taagaggggttgacagtcgtatctgccccctcagcttttccccaggaaggtggtagccacaattagcatttgttgaggctgaccctgcaccaggcccaggataggcggggcttagggagg

SEQ ID NO: 1001890 - DNA, 120 bp, Artificial Sequence
  ENSG00000197182_26 (sequence is synthesized)
cccgtctctcgccacgttcccctgctaggggagccccgaggccctctcagtgtcatcctcatgctacactctgtcccagccctgtgcgtcccaagctagggcactgagtgtgccagcacc

SEQ ID NO: 1001891 - DNA, 120 bp, Artificial Sequence
  ENSG00000197182_27 (sequence is synthesized)
cgcagggacaggcactggaccctgggtggacctgagggtctgtgactacccccccagctgctctcccctagaggccacttccctcaaggaaggaaagaaccttcccgccacctcctgcag

SEQ ID NO: 1001892 - DNA, 120 bp, Artificial Sequence
  ENSG00000197182_28 (sequence is synthesized)
tgcggtcagctcaggccagcctgcacagcagggccagaaccagggcccctggggagggatgcctgcctgcccagtgggaggagacggcacgcccgtgaagccgctactcagccagcctgg

SEQ ID NO: 1001893 - DNA, 120 bp, Artificial Sequence
  ENSG00000197182_29 (sequence is synthesized)
gggccacgagtgctgcttctggtggcgctgtgcggggagggagggggccgagcagggtgggcactcgcatgcctgtgtcttgctggccttcgacagatgacagccctcctcctagggtct

SEQ ID NO: 1001894 - DNA, 120 bp, Artificial Sequence
  ENSG00000197182_30 (sequence is synthesized)
ccagtgcagagttccttggggacattatggccactcctgtccagatgagagggagccggctgcctgtgacagcgtcgcaaaatgccgccagggctttccctccctcctcctttctctctt

SEQ ID NO: 1001895 - DNA, 120 bp, Artificial Sequence
  ENSG00000197182_31 (sequence is synthesized)
cctcgtccctctctggttggtggtttcctgcaggctcccgtccctgctggtgctggccacaatgtccccactcccagggtttcggcgtcccagccccctgcgcccaccgcgcctgcccgc

SEQ ID NO: 1001896 - DNA, 120 bp, Artificial Sequence
  ENSG00000197182_32 (sequence is synthesized)
cagaatccctgtgcccttggtgcgtgtggcctgccgagcctcgagcccctgttctcctcagccctctttcctcccgcgtccccaggaggtgcctctggaagccacggagtcccatcggca

SEQ ID NO: 1001897 - DNA, 120 bp, Artificial Sequence
  ENSG00000197182_33 (sequence is synthesized)
ccaagaccgactgccctttggggtgaggtagtaggttgtatagtttggggctctgccctgctatgggataactatacaatctactgtctttcctgaagtggctgtaatatctgcggtgga

SEQ ID NO: 1001898 - DNA, 120 bp, Artificial Sequence
  ENSG00000197182_34 (sequence is synthesized)
cagagcgtctggaaccctggctgggagcgggcagggccaggtttgggggcagccttggcagcagtcgggggcaggggccgcctacactgagaagtctgacaggcctaggtgccacttgct

SEQ ID NO: 1001899 - DNA, 120 bp, Artificial Sequence
  ENSG00000197182_35 (sequence is synthesized)
gtgtgaccttggacaggcccctgatctctctgggtctcagtttcctcctctgtaaaatggaggcaaatgaggatggaaggagatgcagtgtggagcatcgagggcagaggagagctgagc

SEQ ID NO: 1001900 - DNA, 120 bp, Artificial Sequence
  ENSG00000197182_36 (sequence is synthesized)
cgaccccaccctctgccccagccgcactgagagaggcgatccacgcagctgtttgtctgacctctgtctcccaacactccccaacactccccccgccatcaggcccaggctcatgggtgg

SEQ ID NO: 1001901 - DNA, 120 bp, Artificial Sequence
  ENSG00000197182_37 (sequence is synthesized)
ccctgagccgtaccctccactgagcaccaggagaaggcaccgtggggccaggggtggccgagacgtttggaggtcacagggctgcgagtattggcgttgcccatcaccccaggttcccag

SEQ ID NO: 1001902 - DNA, 120 bp, Artificial Sequence
  ENSG00000197182_38 (sequence is synthesized)
cacgtgccccagcctggccagctcagtggcagggcctctgcctgtggaggaagggaggccaaggcacctttcctgagcaggaagtgagaggaacagctctgcatacactgggtcccacat

SEQ ID NO: 1001903 - DNA, 120 bp, Artificial Sequence
  ENSG00000197182_39 (sequence is synthesized)
ggcacaatctgaaggcagacagtggctcctctgtacctggggaaactgaggcccagagagccagggacttcccaagaccagccagcagcagctgccccttcctggggtgccatctcccct

SEQ ID NO: 1001904 - DNA, 120 bp, Artificial Sequence
  ENSG00000197182_40 (sequence is synthesized)
gccatctcccctgtccctcctgccctgcgcctgcccagccctcctgctctggtgactgaggaccgccaggcaggggctggtgctgggcggggggcggcgggccctcccgcagtgcaaggc

SEQ ID NO: 1001905 - DNA, 120 bp, Artificial Sequence
  ENSG00000197182_41 (sequence is synthesized)
ggtgaggtagtaggttgtgtggtttcagggcagtgatgttgcccctcggaagataactatacaacctactgccttccctgaggagcccagtgacacgaccccatgggagggccgccccct

SEQ ID NO: 1001906 - DNA, 120 bp, Artificial Sequence
  ENSG00000197182_42 (sequence is synthesized)
acctcagtgacacgaccccacgggagggctgccccccacctcagtgacctgcagggggcctgagccgaagctgggtgggcatctgggagctagattcaataaagctgttctgaccatgaa

SEQ ID NO: 1001907 - DNA, 120 bp, Artificial Sequence
  ENSG00000197182_43 (sequence is synthesized)
ctgagtcctcaggtcaagaagtggcgctgacctggagcccctgcctggggctggccttcctcacagtgagctgggcctcctgccatcctggctctggagggcgtctgagtggaagaggct

SEQ ID NO: 1001908 - DNA, 120 bp, Artificial Sequence
  ENSG00000256155_0 (sequence is synthesized)
cttgcttattaaactctcctctccttaaaaccactccacgtatgtccaagtcgttttatctaattcggtgcaagattaaggacactagtgttcttccagtcatcatagccatatcaatac

SEQ ID NO: 1001909 - DNA, 120 bp, Artificial Sequence
  ENSG00000256155_1 (sequence is synthesized)
ttggtgtcagaaggaaggaccaaaggtgattcaccttaaggagactcaccaggccttggaactacagcatgaggtacccacactggggctctttagggccgccgaccctgacttccacgg

SEQ ID NO: 1001910 - DNA, 120 bp, Artificial Sequence
  ENSG00000256155_2 (sequence is synthesized)
gaaagatcttttcctccttgtttgaatctcttgttgaagaggactcttttcctctgttgaccttgtctatgaagtttgaacctagaggtttgaatgaggaaatttttttcttcatttgga

SEQ ID NO: 1001911 - DNA, 120 bp, Artificial Sequence
  ENSG00000256155_3 (sequence is synthesized)
gaaggccattgtttttcttgttgtgcctggaacctcagcgaggcagaatcattcactcccctggaaagggggctaaagccagggagccaagtggtctcgctcagcaggtcccactttcct

SEQ ID NO: 1001912 - DNA, 120 bp, Artificial Sequence
  ENSG00000256151_0 (sequence is synthesized)
atgggaaagatttccccctgacgaggagggagtctcccgacccgttctttccctcctggacgtgccagggtaaggcgagggtgctgggggcctgcagctgggcgagaaaagggccgagtg

SEQ ID NO: 1001913 - DNA, 120 bp, Artificial Sequence
  ENSG00000256151_1 (sequence is synthesized)
ccgagagaattgtggcggtgcctatccagcccctgctgtcaaacagaaacatctatggtcccggtaagggtgccacgcccggtccaccagacacagacatcaaatagccttaccttggtg

SEQ ID NO: 1001914 - DNA, 120 bp, Artificial Sequence
  ENSG00000256151_2 (sequence is synthesized)
agattcaaggctgtctgctccgagagggacttactggcaaacagcccaagcagaagaacatcagcaagggggaccaaggaagatgtgtctgctcaccacggggcttgctgtggatgtcat

SEQ ID NO: 1001915 - DNA, 120 bp, Artificial Sequence
  ENSG00000256151_3 (sequence is synthesized)
gaagaggcttggcagcgttgaagacaataaagcatgctttcctggaagaaacaatgctggattaaggactaaaacatggtcacttttttcaccacgaggaagacctgtccttgttaaaaa

SEQ ID NO: 1001916 - DNA, 120 bp, Artificial Sequence
  ENSG00000256151_4 (sequence is synthesized)
tgtactggcttcagacacatggaagagagtctgagaatgttttgagtaggaatgttgctggagataaattatgggctaagaaatcagctgactgagtcgaccgtatagattttcccaggt

SEQ ID NO: 1001917 - DNA, 120 bp, Artificial Sequence
  ENSG00000256151_5 (sequence is synthesized)
atacaaggattaccgatttcaaataaataaagaaccaaaagaaatagatttcaattgcatccagactggttggagataaaatgaggagtgctacaactcgctgggccagcacagacagga

SEQ ID NO: 1001918 - DNA, 120 bp, Artificial Sequence
  ENSG00000256151_6 (sequence is synthesized)
gccctgggagcgctctcctctgagatcgatgaagtgagaataggccccagtaaagcagtggagaaaactgtcttcctgagccccctctagcccaaggattccagctattctttgcactca

SEQ ID NO: 1001919 - DNA, 120 bp, Artificial Sequence
  ENSG00000256151_7 (sequence is synthesized)
gcccccatggggttaatgatgaattattacaaacaatgaagacatttaaggctgaagactaagccatgatttgctgttctctgcctgttcacccccaactatttctaatcccactatttc

SEQ ID NO: 1001920 - DNA, 120 bp, Artificial Sequence
  ENSG00000256151_8 (sequence is synthesized)
ctgatgagaacacacacttaaccagatattctacttcatttttggaaaatctcttgaagttgctttggatgagctgaggaaatgacatcatcaccccttgctggctgcaggagtgactga

SEQ ID NO: 1001921 - DNA, 120 bp, Artificial Sequence
  ENSG00000256151_9 (sequence is synthesized)
gcccttgggtttgggtggggttgggctgctggtgaacgcagaaggtgtggcgctgccgagagaactggaccccagaaccgctctgttctccaagtcagagtgacattcactcctcaggtg

SEQ ID NO: 1001922 - DNA, 120 bp, Artificial Sequence
  ENSG00000256152_0 (sequence is synthesized)
aataattctctatttattaaaaagggtcctacagctttacagccacagcaccggacacggccctggacagcgacggcgagcccggccaggggccgctttgcaacttcaatgccaagctca

SEQ ID NO: 1001923 - DNA, 120 bp, Artificial Sequence
  ENSG00000256152_1 (sequence is synthesized)
cgtctggctgcgaccgtggcaggctgtggcatccccgacagcgtggccggtgggtgagacacataggactgtctttcgaaaataaaataagtatcatgaaccatgctcattaaataaagc

SEQ ID NO: 1001924 - DNA, 120 bp, Artificial Sequence
  ENSG00000256152_2 (sequence is synthesized)
acagaaggaccacgattctaaatgggactgggggagaggcctatttcttcccaaacatgagttcatcaacgctaagatacttagaaatcacacggataatgcaaaccgatgcaacgcaca

SEQ ID NO: 1001925 - DNA, 120 bp, Artificial Sequence
  ENSG00000256152_3 (sequence is synthesized)
ggtgtcaggctgtaacccggcacacacaactgccttgatgcccaaagcctgggctcctactactcaccactgacctacagttctaaaatcagacagacacgctggcccagggccccagag

SEQ ID NO: 1001926 - DNA, 120 bp, Artificial Sequence
  ENSG00000265113_0 (sequence is synthesized)
attcctgtgcaaaatgcacagccagatattccactctgagaataatccaggaacaaacttgcttgcaaaagcaggggaaataatgttgtgtgactaacttagtttcacttaaactcatag

SEQ ID NO: 1001927 - DNA, 120 bp, Artificial Sequence
  ENSG00000265113_1 (sequence is synthesized)
agaagttgatgtttataaaagaggttgatccatttatccaaatatgtgtgtttgcagccgtaggctgtgtctgccctattatgtatcctttttggataaggtttttgtttcgtttcgttt

SEQ ID NO: 1001928 - DNA, 120 bp, Artificial Sequence
  ENSG00000178734_0 (sequence is synthesized)
ttttattctttttagatgattatcccggggctcctctgagaaaagtaggagtagattgctggaattaccatgggttaaaatgaaagaggatgacctggctggacaaaggcgtatggactc

SEQ ID NO: 1001929 - DNA, 120 bp, Artificial Sequence
  ENSG00000178734_1 (sequence is synthesized)
aggaagacgagaactcctgctccttctctgaatcggattttcctggctgtagagaccagatcaacccttccattccatcgatttggaccgcagtttcgggaatgatgatttcgctggaag

SEQ ID NO: 1001930 - DNA, 90 bp, Artificial Sequence
  ENSG00000178734_2 (sequence is synthesized)
atttggaccgcagtttcgggaatgatgatttcgctggaagtgcggtggtggataaaggggaagcagggttacgtaatttcactgggtcaa

SEQ ID NO: 1001931 - DNA, 120 bp, Artificial Sequence
  ENSG00000178734_3 (sequence is synthesized)
caagctatcctcccgcctcagtctcccaagtagttgggaccacagctttgtatctggtggaggaggcttgggccgaagctggtaaaatgagaagttaggggaggatgtcctcagagagct

SEQ ID NO: 1001932 - DNA, 120 bp, Artificial Sequence
  ENSG00000178734_4 (sequence is synthesized)
ttaagggacactgaacaggaactcagttttggaaaacaaagtggaatttctggaaactgctagcataaaagctttgacagggtcacatgcagattagcataattttattacattttctat

SEQ ID NO: 1001933 - DNA, 120 bp, Artificial Sequence
  ENSG00000178734_5 (sequence is synthesized)
tttagtcctgtgagatactaatttggatttcattgtgcccattgagcggcttttgttctttggctgtgagtttaattatttagttatttatgagtgcatctgggcataagtgccacagtt

SEQ ID NO: 1001934 - DNA, 120 bp, Artificial Sequence
  ENSG00000178734_6 (sequence is synthesized)
ttatttcggtgacaaatttatggtcagtgaattttagtaattaatgaataaattatttctcctccataaatgcccctgcaatttctgattttcataacaattcataatacttaagaaaaa

SEQ ID NO: 1001935 - DNA, 120 bp, Artificial Sequence
  ENSG00000178734_7 (sequence is synthesized)
ttctttattagttgaaaaagccaatgctaatggaatcaggaaaaggagatttcaaattgctttaattaactgtattaattaatatccaatatgtgtaagatattgaattggctttggttg

SEQ ID NO: 1001936 - DNA, 120 bp, Artificial Sequence
  ENSG00000178734_8 (sequence is synthesized)
tctctcttagcatttagttgcctaaaatctgtttaacatatgaatatactgtgttaaaataaattctaattcttttgtgaagtaaatggcaagaataaaaggatctcctttataatcttt

SEQ ID NO: 1001937 - DNA, 120 bp, Artificial Sequence
  ENSG00000268262_0 (sequence is synthesized)
tccccccaccatggcgcggagcgaggcagcggcggcggggccgggcccggggcccccccgggctgggtgctggcccaggccctgactccctgaagagagatgaagaaaccgagaatcaga

SEQ ID NO: 1001938 - DNA, 120 bp, Artificial Sequence
  ENSG00000268262_1 (sequence is synthesized)
gaggttcagatacttgctggaggtcacacagctagtctcacctcccacccctcctgccttcccactgcaccatggctccaggacccttctcctcggccctcctctcgccgccgcccgctg

SEQ ID NO: 1001939 - DNA, 120 bp, Artificial Sequence
  ENSG00000268262_2 (sequence is synthesized)
ccctgccctttctgctgctgctctgggcgggggcatctcgtggccagccctgccccggccgctgcatctgccagaacgtggcgcccacactgacaatgctgtgcgccaagaccggcttgc

SEQ ID NO: 1001940 - DNA, 120 bp, Artificial Sequence
  ENSG00000268262_3 (sequence is synthesized)
gctgcggctcaccgacaacttcatcgccgccgtgcgccgccgagacttcgccaacatgaccagcctggtgcacctcactctctcccggaacaccatcggccaggtggcagctggcgcctt

SEQ ID NO: 1001941 - DNA, 120 bp, Artificial Sequence
  ENSG00000268262_4 (sequence is synthesized)
cgccgacctgcgtgccctccgggccctgcacctggacagcaaccgcctggcggaggtgcgcggcgaccagctccgcggcctgggcaacctccgccacctgatccttggaaacaaccagat

SEQ ID NO: 1001942 - DNA, 120 bp, Artificial Sequence
  ENSG00000268262_5 (sequence is synthesized)
ccgccgggtggagtcggcggcctttgacgccttcctgtccaccgtggaggacctggatctgtcctacaacaacctggaggccctgccgtgggaggcggtgggccagatggtgaacctaaa

SEQ ID NO: 1001943 - DNA, 120 bp, Artificial Sequence
  ENSG00000268262_6 (sequence is synthesized)
caccctcacgctggaccacaacctcatcgaccacatcgcggaggggaccttcgtgcagcttcacaagctggtccgtctggacatgacctccaaccgcctgcataaactcccgcccgacgg

SEQ ID NO: 1001944 - DNA, 120 bp, Artificial Sequence
  ENSG00000237548_0 (sequence is synthesized)
gtctgttgagagggaaccatttccaagatgtatggggaagaatttcctgagctgatgtgagagtgtcattccacagggccatcagacaggagccgagcccctctgccggcagggaaacgg

SEQ ID NO: 1001945 - DNA, 120 bp, Artificial Sequence
  ENSG00000237548_1 (sequence is synthesized)
tctcttatggaaactgggaatcatatgaagaagaatcctaacctcaaagggtcgtggtgagaatcaaataagaggatgtgcttagcacacaggtgtccaagcagcgagagctccagcatc

SEQ ID NO: 1001946 - DNA, 120 bp, Artificial Sequence
  ENSG00000237548_2 (sequence is synthesized)
ctgaccccacagcctttgtggttaaccactgctcactgctttccacttgctaggatgccccagaatatttgaatcagagcctccaaatggaaaacggacagtggaagacttctgtacaag

SEQ ID NO: 1001947 - DNA, 120 bp, Artificial Sequence
  ENSG00000237548_3 (sequence is synthesized)
tccccagaaaccaggctgaggaagagggagaatccgaagctgacttcagggttttgagcttggctcactggggtgatgaagttgccagtaacaacatggaaatagcaagaagcaggttca

SEQ ID NO: 1001948 - DNA, 120 bp, Artificial Sequence
  ENSG00000237548_4 (sequence is synthesized)
aaaatgattcttcaaagctacacgaggactaagagtgtgggaaataattgatcccatctgggcaaattcaagtgttttcctgggtgaagacttctgggggcagagagcaaactagaaaac

SEQ ID NO: 1001949 - DNA, 120 bp, Artificial Sequence
  ENSG00000237548_5 (sequence is synthesized)
agaaaacagaagtgggtactcatgggtttgtggtcacggcattcagttttcttgcctgcagagtgggtgccttgctttgttcttcccaagctgttgttgaggctgcattaggtcaggaat

SEQ ID NO: 1001950 - DNA, 120 bp, Artificial Sequence
  ENSG00000237548_6 (sequence is synthesized)
gggaaattgccctgtagattgtgccctgagctgtggcgagaggcagcagacagtagcgtcaaccccagtctcccaaatgctgagcaggacaggagaggtacaagtgaagtgccccctgtc

SEQ ID NO: 1001951 - DNA, 120 bp, Artificial Sequence
  ENSG00000237548_7 (sequence is synthesized)
tctgtgtcatagctgagaaattaataattgttccctcttctggtttgaactggccttttgaataggctctaaatttgttcataattgccaaaggaacgacacaataaaaactggaatttc

SEQ ID NO: 1001952 - DNA, 120 bp, Artificial Sequence
  ENSG00000277543_0 (sequence is synthesized)
gtcctggggcggcgggcctgtgaacaggtgggcagggtaggggagcccccggatccgcccgttccccactcacctcctgctcctccgtggcctcctttggcagcgctggccaagccccgg

SEQ ID NO: 1001953 - DNA, 120 bp, Artificial Sequence
  ENSG00000277543_1 (sequence is synthesized)
cacctgttgagtctggagcactggcggctattcttaggggtttctatatttaaaatggggcctgactggcttgaggtcatctccagacagctgttgtcctgtgcctcttattttggcaag

SEQ ID NO: 1001954 - DNA, 120 bp, Artificial Sequence
  ENSG00000277543_2 (sequence is synthesized)
gaggcatttaagtacaatatgccattctttttatatagttgcagggaaactattttgttccctattctatgcctggtggctggcacacagttgggctttaataaatatttgtagaatgaa

SEQ ID NO: 1001955 - DNA, 120 bp, Artificial Sequence
  ENSG00000185186_0 (sequence is synthesized)
gtggctctgacgatgatggtgaggtggtggagacgccctcacagctgggccaccctcccgtcgggagacacgttttgtcagttgcttcctctggagtccttggaaggaaatgaccgcaga

SEQ ID NO: 1001956 - DNA, 120 bp, Artificial Sequence
  ENSG00000185186_1 (sequence is synthesized)
tgcggccaatgggcagtgctgggagatgaaaccaacagcggcgattgccccagaaagaacttggcgctgctaaggcaatggcggcccgaaagaggcccctgacgcatgaggagcggccgc

SEQ ID NO: 1001957 - DNA, 120 bp, Artificial Sequence; identical to SEQ ID NO: 921267
  ENSG00000185186_2 (sequence is synthesized)

SEQ ID NO: 1001958 - DNA, 120 bp, Artificial Sequence; identical to SEQ ID NO: 921268
  ENSG00000185186_3 (sequence is synthesized)

SEQ ID NO: 1001959 - DNA, 120 bp, Artificial Sequence
  ENSG00000185186_4 (sequence is synthesized)
tctcgggcttctcatcagcttattggcccatttagccagggcaaaggtgcatgacaactctgagcaagtcaaaacaaccgtcagcagcgggaaacctcgatgaacaaacaccgggagagt

SEQ ID NO: 1001960 - DNA, 120 bp, Artificial Sequence
  ENSG00000185186_5 (sequence is synthesized)
ggagcatctggaggccccagacagcacccgcctgacgttcagcagagggggagaccgaggcctgcagcagagtgttttgtcagatgctgctccctgaccgggagtgagagggaacccacc

SEQ ID NO: 1001961 - DNA, 120 bp, Artificial Sequence
  ENSG00000185186_6 (sequence is synthesized)
tagagtttctgcagatcctgctttgtgacttcgagtgaagtgtggaagcgctggaagcacttagaccctgcctgtgagttgtcatgtatcatgtctgcaaacattaaaaatctcaccaga

SEQ ID NO: 1001962 - DNA, 120 bp, Artificial Sequence; identical to SEQ ID NO: 921276
  ENSG00000185186_7 (sequence is synthesized)

SEQ ID NO: 1001963 - DNA, 120 bp, Artificial Sequence; identical to SEQ ID NO: 921277
  ENSG00000185186_8 (sequence is synthesized)

SEQ ID NO: 1001964 - DNA, 120 bp, Artificial Sequence; identical to SEQ ID NO: 921278
  ENSG00000185186_9 (sequence is synthesized)

SEQ ID NO: 1001965 - DNA, 120 bp, Artificial Sequence
  ENSG00000185186_10 (sequence is synthesized)
gcttgcgtgacagtttccactcacagtgcgctcactctgaacctctgtgcacacgatgggcctgcatctcttcccactatctgctaggaaacacgaggcttctgggtgccaagctcaggc

SEQ ID NO: 1001966 - DNA, 120 bp, Artificial Sequence
  ENSG00000185186_11 (sequence is synthesized)
taaggggatttctgacgggctggacgtctgggcttcagccctgaaataagagttttgagaaggaagagggcagcgctggaaccctcacccgtcttttaatgaagggatttggctaagaag

SEQ ID NO: 1001967 - DNA, 120 bp, Artificial Sequence
  ENSG00000185186_12 (sequence is synthesized)
tcatcctgaggtcaggatgtggtcggtgtgtctgtccctgagcagtcagacctgatggtggctggagctccggaaagctcgggacccctctagcgtcctaggccttctgttttccttcct

SEQ ID NO: 1001968 - DNA, 120 bp, Artificial Sequence
  ENSG00000185186_13 (sequence is synthesized)
gctccagggggcaggactggcagattcaaggaagctttcaagaggggttagaaagaaggggtgtgctccaatctgccagcctgatgtccttcatgggaccacaggccaggaactgaggtt

SEQ ID NO: 1001969 - DNA, 120 bp, Artificial Sequence
  ENSG00000185186_14 (sequence is synthesized)
ccctgcgaggggtggatgctgcgtctgtgagcctccccaccttcttgaaggcaagagcgcccagaggtgttcgcttttggtgtcggcctttgagctggagcctggagctgtttctctgaa

SEQ ID NO: 1001970 - DNA, 120 bp, Artificial Sequence
  ENSG00000185186_15 (sequence is synthesized)
ttccttctgcttgtttccttgtgctcttgcctgggaagaatgaaatgaaaagaaaatgcaaagcccagaacctggcagagatgggatgccccaggccggagtgggcagggcggcgctctc

SEQ ID NO: 1001971 - DNA, 120 bp, Artificial Sequence
  ENSG00000185186_16 (sequence is synthesized)
agcccactctcagcacaaacgctgccccgttcacctctccgcgcttgttgccagagcgtgtcaaagaccccgaagaatgaaatgacttcggaagaggaggccacacacccgtgaaacaag

SEQ ID NO: 1001972 - DNA, 120 bp, Artificial Sequence
  ENSG00000185186_17 (sequence is synthesized)
ccggatctgcagcggaacattctttacgtgttttgggacatttcaaagactgatggcgtgctgcctttgtgatgtgtgatctgaagattccatcaaagaaagtgtgtcctttgtgtgaaa

SEQ ID NO: 1001973 - DNA, 120 bp, Artificial Sequence
  ENSG00000185186_18 (sequence is synthesized)
cctccagctttctgcttacagagcaggacctgcaggagctcgctgactgcctgcacagtggaaggaagacctgtttcttttactttccttgaggagaaaaaattaaagttctgagcaaac

SEQ ID NO: 1001974 - DNA, 120 bp, Artificial Sequence; identical to SEQ ID NO: 921270
  ENSG00000185186_19 (sequence is synthesized)

SEQ ID NO: 1001975 - DNA, 120 bp, Artificial Sequence
  ENSG00000185186_20 (sequence is synthesized)
gcccagagaggaagtggcagaagctgggcatgggatgctggtccttgaaggagtgtgtgggggccactgggttgaacgcagcccgctgcagccctgtgaccttgattaaaagactacttt

SEQ ID NO: 1001976 - DNA, 120 bp, Artificial Sequence
  ENSG00000185186_21 (sequence is synthesized)
cactcacagtgcgctcactctgaacctctgtgcacacgatgggcctgcatctcttcccactatctgctaggaaacacgaggaatcatgggatttgccgcagtttgcacccaggcctgtgc

SEQ ID NO: 1001977 - DNA, 120 bp, Artificial Sequence
  ENSG00000185186_22 (sequence is synthesized)
ggatgccccccgactgcccgagatgctgcacctgccactgctgggggtgtacctgcctatgcccactcacaggggcacctccagggtagctgcctggtgcaggcattggctctaagcaga

SEQ ID NO: 1001978 - DNA, 120 bp, Artificial Sequence
  ENSG00000185186_23 (sequence is synthesized)
gcagcactatgggcccatctggggctggctcttgcctgggcctgtgagcaccatcacagccagccgatctgggagtatccagggtgttcttgtcattgcggacactgaatagccattggt

SEQ ID NO: 1001979 - DNA, 120 bp, Artificial Sequence
  ENSG00000185186_24 (sequence is synthesized)
gggtggcgatgggggcttggaagccgagcatcagtggcaatgagaagcaggccctgtggtttaattccgaagcacatgaacccacagagccgccaacagtcgttattcggcaggaggggg

SEQ ID NO: 1001980 - DNA, 120 bp, Artificial Sequence
  ENSG00000185186_25 (sequence is synthesized)
acagcagcctgcggagcgttctaggcaggacagggcagcaaacctgacatgcggagctgggggcaggggtaatggggccagggggtaatggcaggtgaggccatggcctagagggttgcc

SEQ ID NO: 1001981 - DNA, 120 bp, Artificial Sequence
  ENSG00000185186_26 (sequence is synthesized)
atgcttggtgcaggggaggagaggcccaggtgtggctgcagtggcagcaggagtcagtgtggctgtgcccagtgggatgttgtcagagaatggacctggctgctgggaaaggtgattgtg

SEQ ID NO: 1001982 - DNA, 120 bp, Artificial Sequence
  ENSG00000285836_0 (sequence is synthesized)
ttgctttccctgcatgcagtgattctactaaaaccaccatctgtggacttacagattcaccttatctactgtcatagtattccacacaccgttgcttctgaccaaagaactcacttcaca

SEQ ID NO: 1001983 - DNA, 120 bp, Artificial Sequence
  ENSG00000285836_1 (sequence is synthesized)
gcaaagaagtatagcaatgggcccatgctcacggaattcactggccttactatgttccctaccatccagaaccaggtggattgatcgaacaatggaatagccctttgaagacttagttat

SEQ ID NO: 1001984 - DNA, 120 bp, Artificial Sequence
  ENSG00000285836_2 (sequence is synthesized)
agcaccagctaggtggcaataccttgcagggctggggaaggttcttcagaagtccgtacatgctcttaatcagtatccaatacatggcatggtttctctgatagccaggattcaagggcc

SEQ ID NO: 1001985 - DNA, 120 bp, Artificial Sequence
  ENSG00000285836_3 (sequence is synthesized)
caggaatcaagggatggaaatgagaatggtacactattacccctagtaataccactagcaaaattttggcttcctgttcccatgactttatgctttactagcctagaggtcttagttcca

SEQ ID NO: 1001986 - DNA, 120 bp, Artificial Sequence
  ENSG00000285836_4 (sequence is synthesized)
gagggaagaatgctttcaccaagagacataatgattccacttaactgcaagttgactgctacctggccactttcggctccttgtgccactgaatcgatggcaaagaagggagttatgagg

SEQ ID NO: 1001987 - DNA, 120 bp, Artificial Sequence
  ENSG00000285836_5 (sequence is synthesized)
ttggggtgactgatccttcctgccaaggggaaactgaactactactctacatgaaggatagtcaagcgtctaccaaagtgcctgtcctatctctggaagaagtctgcattttgtgataaa

SEQ ID NO: 1001988 - DNA, 120 bp, Artificial Sequence
  ENSG00000285836_6 (sequence is synthesized)
agtagaaaactcaatcaacctgtcatcagttacgtaacttaaaagtttctccaaaagaatccttttctacttgggaagcacaaacagccaaaagcagcactggggttttgactgtcaagg

SEQ ID NO: 1001989 - DNA, 120 bp, Artificial Sequence
  ENSG00000285836_7 (sequence is synthesized)
agattatttggacattatgaaaaggcaaagagagaaacacttctgtaactataacaagactaaaaaagaaaagcaagatgcatttttagaagaaataagtggatgactccttggactgca

SEQ ID NO: 1001990 - DNA, 120 bp, Artificial Sequence
  ENSG00000285836_8 (sequence is synthesized)
agtgagactcagcacaggctcaacaaggaaagatggttgctaaattacgaataaaaagagagagatttgtggttgcttcagagagaaagtgggaagaacagaaagaaaaggggcaaaaga

SEQ ID NO: 1001991 - DNA, 120 bp, Artificial Sequence
  ENSG00000285836_9 (sequence is synthesized)
aaaaagcccacaagtctgggcccttcatggcggacaggccagtgagcggaaatcgaggtggcaaacacacacgtcagcgaggggagctagaggatgaggaaaacaactgacatttaaata

SEQ ID NO: 1001992 - DNA, 120 bp, Artificial Sequence
  ENSG00000285836_10 (sequence is synthesized)
acgaacataataagtaatttcaatgtccaggtgagtgaaccacagaattacctgtgttttgtcaatctggtcagagctaagtttctatagtgagtaaccacgataataaatgctctctcc

SEQ ID NO: 1001993 - DNA, 120 bp, Artificial Sequence
  ENSG00000285834_0 (sequence is synthesized)
aatgaaaatgtattttattaacagacattttacttccacatccataaggaggcagtggccttgcagatgtaattagttgagtttatactgaattatagaaggtcctaaatccatcgactt

SEQ ID NO: 1001994 - DNA, 120 bp, Artificial Sequence
  ENSG00000285834_1 (sequence is synthesized)
attttcttataagaagacctacaaagacatgcagggaaaataccatgtgaaatttcatatggaattttcatatggaaaataccatatgaaaggcagaacttggagtgacggattacaagc

SEQ ID NO: 1001995 - DNA, 120 bp, Artificial Sequence
  ENSG00000285834_2 (sequence is synthesized)
caagaagcttcaaggattaccagcagacaccagatgctgaaagaggcaaggaaaaatacttttctagaaccttcagagagagcatggtcctgctgactaagaagtggggtgctgcagtaa

SEQ ID NO: 1001996 - DNA, 120 bp, Artificial Sequence
  ENSG00000285834_3 (sequence is synthesized)
caaatagcaaaaatcatgacctttaccagttttgctaaaaggagttgtgaattcttctctgggtgcctcactacacagaaccaggatactgattgcagccaagagaacatgatttacaga

SEQ ID NO: 1001997 - DNA, 120 bp, Artificial Sequence
  ENSG00000285834_4 (sequence is synthesized)
tagagtggatttacacaaagagctatcaagttagaaaaaaaaaaaaaggtataagggctgctgcttaccaaaccaactggacacattctgatttgaagatataagtaaagcatcaacagc

SEQ ID NO: 1001998 - DNA, 120 bp, Artificial Sequence
  ENSG00000285834_5 (sequence is synthesized)
agttgataaggatttattatcagagcataacaaaaaagagaacatggctttgactgtctcacgttgaaatttggaggaagtcaggattatcatctggatacaaagcagctctcaagttgc

SEQ ID NO: 1001999 - DNA, 120 bp, Artificial Sequence
  ENSG00000285834_6 (sequence is synthesized)
agcagtaacttctggggccactggatgatctggccatcctcttgtttcctcagcaggcagagcacattgcttcctgctccagcaaccttacttctgctgttatggtgactcagaagtcct

SEQ ID NO: 1002000 - DNA, 120 bp, Artificial Sequence
  ENSG00000285834_7 (sequence is synthesized)
gtctgcttgtcaccgtaactgctccttctgatacagtaaatctctctccttctctgtctctggttctgtgcagctttctctttggcatggctgctgctcaacatctcttgcttgtgtatc

SEQ ID NO: 1002001 - DNA, 120 bp, Artificial Sequence
  ENSG00000285834_8 (sequence is synthesized)
tgccagttttgggctccttcgttcacttgtgtcccattctctgtgatcacctcacataggcaagaaggatctgagtgtgttccggtcaggagccaagatggtacagtgctatcaagcaga

SEQ ID NO: 1002002 - DNA, 120 bp, Artificial Sequence
  ENSG00000285834_9 (sequence is synthesized)
actcttctgtggcagcgcctaggccattgctatgcctgtaaacaatggccctacaattttctctgatttgcttttttgtggccagggtggtggtggtgtgtactaaaagattattgacat

SEQ ID NO: 1002003 - DNA, 120 bp, Artificial Sequence
  ENSG00000237092_0 (sequence is synthesized)
ctccttgccaaccagcagctcccttggtaggggcatgcagaagacctgatgacacaaaccctccaaagagtttcaccctcaccacaacaggtggcttcctgctcggcagcccatcctgca

SEQ ID NO: 1002004 - DNA, 120 bp, Artificial Sequence
  ENSG00000237092_1 (sequence is synthesized)
tcacttcagtggacttctctgacatctactagaccacattaaatgaatcacagccttgaaactgaactggaaggacttccttcaaggagccagcatatgaacttgctgcctatctttagc

SEQ ID NO: 1002005 - DNA, 120 bp, Artificial Sequence
  ENSG00000237092_2 (sequence is synthesized)
aaggagatgcaaatgacatccacaaacctcttctgctgtatacctggatgaaagcaaggctagctgtgtgtcctgtgagtaagaaggaaagatgcttaccttagatccacccataatctt

SEQ ID NO: 1002006 - DNA, 120 bp, Artificial Sequence
  ENSG00000237092_3 (sequence is synthesized)
acacctccagttgagaaagctgtactcattctgaacatcagctcatcctaggggaatcacagctttctccacagatacagaacaaggtgaagagccctaggctgttctattccctggacc

SEQ ID NO: 1002007 - DNA, 120 bp, Artificial Sequence
  ENSG00000237092_4 (sequence is synthesized)
aaagatgaaactggggtgaggtacctctgggtcactgttaagaagtaaaatgtagaggctcttcattgcagtagtatcttaagaattccaaaatcaggctaccacctctaaaccaggcaa

SEQ ID NO: 1002008 - DNA, 120 bp, Artificial Sequence
  ENSG00000237092_5 (sequence is synthesized)
gaggacaatgagacaaagtgataagcctgaagggttaggaaccatgaggagcttatgtcagggagattctgagagaaggaagggaggagagacccaaagaaacttcatggagctaatgaa

SEQ ID NO: 1002009 - DNA, 120 bp, Artificial Sequence
  ENSG00000237092_6 (sequence is synthesized)
caagcacccacagaggatttatatacaatatctgcaaccaagagaggggtatgctaatttagaggaaaccagaaggtagccaacaccttcatttcacagctggcagaaggaagaaaaaaa

SEQ ID NO: 1002010 - DNA, 120 bp, Artificial Sequence
  ENSG00000237092_7 (sequence is synthesized)
aggctaaaacctgggtttagttttcattttataaattattctttaaaaataaattatttcaactgtcttgaagagtctgtaaaacaaggtctgtgaagtcacagagggaaaaagaatcag

SEQ ID NO: 1002011 - DNA, 120 bp, Artificial Sequence
  ENSG00000237092_8 (sequence is synthesized)
aaatcagtagacagcagttagaccacgggtgtttgttatacattcgttctagacattcatcaaaagctcagaaagggaaagtcaagcgtgccaaatcaataaagtttctatcgtatttca

SEQ ID NO: 1002012 - DNA, 120 bp, Artificial Sequence
  ENSG00000237092_9 (sequence is synthesized)
tccaaaaaggtggaacacctaatgtacagccccaaggaaggagcatacttggagaattcaaggaacagaaagaaaaacaggaaggctggagtgaaactgattaaataaagcatcgtaaca

SEQ ID NO: 1002013 - DNA, 120 bp, Artificial Sequence
  ENSG00000237092_10 (sequence is synthesized)
ttagaggtccatcatagaggccaagccaaatacaactatgttttcaagcataagatggatagatgtggtaaaccacaagaagcaaacagccctttagaggtgtggattgaccttgcagag

SEQ ID NO: 1002014 - DNA, 120 bp, Artificial Sequence
  ENSG00000237092_11 (sequence is synthesized)
cagtaacagtcagatttcaatacgctgagactgtgacgtgggacttttgagtgagtaacatctgctcctagaactgagttgagtggggatcctcccacaccacccaggcaagagaactaa

SEQ ID NO: 1002015 - DNA, 120 bp, Artificial Sequence
  ENSG00000237092_12 (sequence is synthesized)
caattgatgactgctccaaatcagtcgccagtctacctaatacttctacctggtaggtagcctgatacccactaacatcaggtaggttctatatgattaatagttcataagataaatatt

SEQ ID NO: 1002016 - DNA, 120 bp, Artificial Sequence
  ENSG00000237092_13 (sequence is synthesized)
aatcattagcaattttcaaagctgaggtacagctacttcaaaaatgaagaaggaatgcagatgaagagtctccagactcttcaagagactctctgcaagcaaagtctccagagttctgag

SEQ ID NO: 1002017 - DNA, 120 bp, Artificial Sequence
  ENSG00000237092_14 (sequence is synthesized)
ggaaagaagcaaacaaagaatcacagccattctttgagggagcaacctactcattaaagaaatgcaatcatgattatgctgatcaaatgaaaatctcaaaaatagagaggccatgggaaa

SEQ ID NO: 1002018 - DNA, 120 bp, Artificial Sequence
  ENSG00000237092_15 (sequence is synthesized)
agggctagttatgagcactgaattcatttacatataaaacaaggcaaaataattgtcataatactttgtaatggttataaacaccaaataaatgttatatagaggtgaatcgcataaaaa

SEQ ID NO: 1002019 - DNA, 120 bp, Artificial Sequence
  ENSG00000237092_16 (sequence is synthesized)
cctgcatatcatcaaaagggaaatagtactcatcgaagatgtgcctttgctaggaactaggacaagggtggcctttataaattcatgaagagaaggagccagcatatgaacttgctgcct

SEQ ID NO: 1002020 - DNA, 120 bp, Artificial Sequence
  ENSG00000237092_17 (sequence is synthesized)
atcttcaagtatgcttgtcagcaccgagaactggaaaaaaatctctgattgtcctgcagcaatggcattaaaggctcctcataacatacagaaccagaattgtgccataatttactgaaa

SEQ ID NO: 1002021 - DNA, 120 bp, Artificial Sequence
  ENSG00000237092_18 (sequence is synthesized)
ttgaacattgctctgtgactgctaattttccatcgagatgattctgtctctaaccaagaaaagaaaagtttgtcttcctgactgctgacactgctgaccaagcccaccaccagatgcctg

SEQ ID NO: 1002022 - DNA, 120 bp, Artificial Sequence
  ENSG00000237092_19 (sequence is synthesized)
gctgcacacccagagggcagccgcttcccgtggtcctctcgaagaacttcccttttgcaatgcatgtttagcaagtggatgagtttgtcttttctgatttctctgcaagctctgcattgc

SEQ ID NO: 1002023 - DNA, 120 bp, Artificial Sequence
  ENSG00000237092_20 (sequence is synthesized)
ccacctgaaccagtgcttcagaagaactaatgggatctctgaccctccaacatcctcttccagactttcactttcctggctccttgcagggacatgtaataaacgtgctctccagagaaa

SEQ ID NO: 1002024 - DNA, 120 bp, Artificial Sequence
  ENSG00000237092_21 (sequence is synthesized)
aggctagctgtgtgtcctatggcaccaaggactgaaagattgtaagaagtaagagtgaatattcagcttaaacaaaaaatagcctttctacccagagacagcgtgtaccaaagaaaatgg

SEQ ID NO: 1002025 - DNA, 120 bp, Artificial Sequence
  ENSG00000237092_22 (sequence is synthesized)
cgtccgcgtgcaggccgtctgcgcgcagcagtgggaagaggcgggctccctgaggagacaacatccctgacagacctcccaacaaagccctgcatatttttcagtaaatcatgtatattt

SEQ ID NO: 1002026 - DNA, 120 bp, Artificial Sequence
  ENSG00000285833_0 (sequence is synthesized)
aggtcatgagcgagctggggggcgagcagtaggagtaggagcccagcggcagatccttgagcacctcgtggggcttccagcagaactcccggaagcctgggtggtccatgatcttgcgct

SEQ ID NO: 1002027 - DNA, 120 bp, Artificial Sequence
  ENSG00000285833_1 (sequence is synthesized)
cgatctcatggatcgtgaccaggcgctcactggtgaaaatgttgcgctccgcgtcgccgcgcgccaggaagatgagctcgatgcgccagtgcgcgtgcgtctgagtgttggcactcacat

SEQ ID NO: 1002028 - DNA, 120 bp, Artificial Sequence
  ENSG00000285833_2 (sequence is synthesized)
aggcgcgcgagtagtcccagcgcgaggcgcctcggcgggcacggctctgattggccgcgactgccgcgtggggcgggatgctgggctggtaccgcccattcttgctcagccgctggtttc

SEQ ID NO: 1002029 - DNA, 120 bp, Artificial Sequence
  ENSG00000285833_3 (sequence is synthesized)
gcgggtcttcactctggttggctgccagatcctccaggggcggggtctcacgccgaagtcgcccgctccgattggctgtgggcttttgagccgcggaagtgtcccggatccaaactggga

SEQ ID NO: 1002030 - DNA, 120 bp, Artificial Sequence
  ENSG00000285833_4 (sequence is synthesized)
gggtagtaaaggaacatgaaggctgacagggccatggggatgctgcagcccaggaagagcaccagcccagcacagcacggattggtgaaggcccagcccagggtactccagaagcccgaa

SEQ ID NO: 1002031 - DNA, 120 bp, Artificial Sequence
  ENSG00000285833_5 (sequence is synthesized)
gctgggggtcgggaagccaggggccagtgccgccagcaacactgtccccctgccccaggttggggccctggcttctgggcccctaaaaaggtttcacccgttgcttcttcctcctcctgc

SEQ ID NO: 1002032 - DNA, 120 bp, Artificial Sequence
  ENSG00000285833_6 (sequence is synthesized)
tcctcctctagccacacatcctgcagcaaggggtcatcctccgtgtccatagtctgcaggagagggagagggtcagcaggctagagagacagtgaggggaaggtgccctgtggtgcagtt

SEQ ID NO: 1002033 - DNA, 120 bp, Artificial Sequence
  ENSG00000285833_7 (sequence is synthesized)
cgcccagccctaggtaccaaccctgtccactcataaccaaatactaatactgcaatggaattgcatcaagcatgcatcaacacaactgaattaaaccaccggtaaaaaatacagagaaaa

SEQ ID NO: 1002034 - DNA, 120 bp, Artificial Sequence
  ENSG00000285830_0 (sequence is synthesized)
ttattgttttacaagtgaacctttaagtttctccccacctactcccgcagaaaaaggcatattcaattgtcccatactaatttttgaataacctaactctccctttgtttctactaagag

SEQ ID NO: 1002035 - DNA, 120 bp, Artificial Sequence
  ENSG00000285830_1 (sequence is synthesized)
aggtttctttttggctacaagtaacaatatacatatacccaaagcaaatggaacaatataaagaatatctcacataacaaaaagtccaaaggtaaagcagttcctggattggttaattca

SEQ ID NO: 1002036 - DNA, 120 bp, Artificial Sequence
  ENSG00000285830_2 (sequence is synthesized)
gaagcacaattcaggtgctttctatctacatcccactattctcagtgtgatagctttcatctccatacttgtcctttcatggccatcagaaggctgttgcagattagcttcaaacatcca

SEQ ID NO: 1002037 - DNA, 120 bp, Artificial Sequence
  ENSG00000285830_3 (sequence is synthesized)
tatcacatatcttcactgagaagcagaagagggatgctggcaaatccctaacttgtatcaattgttaagagcaacagaaaatttcttattcaaagccttcagacttcctttgtctcgtta

SEQ ID NO: 1002038 - DNA, 120 bp, Artificial Sequence
  ENSG00000285830_4 (sequence is synthesized)
gcctagattccatcaaatgatcaagtaagccaattaccatgattggcacagaatctaatcaacactcaccctctctaggctagggaagcaccctattctatagcacaaggcagccataca

SEQ ID NO: 1002039 - DNA, 120 bp, Artificial Sequence
  ENSG00000285830_5 (sequence is synthesized)
gagttttaggccaaaaaaaaagaaaaaaaaaatggggctttgtcagcaaggaagggagaacgaaatggctgatgggtaggcatatgaatgtctaacaaaccaacttatttgaacccagct

SEQ ID NO: 1002040 - DNA, 120 bp, Artificial Sequence
  ENSG00000285830_6 (sequence is synthesized)
ttttcacacacacaattctcacacctgttttattttgaagttctctattgtgttctattttgatctacttctgtgtcattagctattcctgggtcattatgacttttaataaactttata

SEQ ID NO: 1002041 - DNA, 120 bp, Artificial Sequence
  ENSG00000285830_7 (sequence is synthesized)
catgtatatttggtaggaactttcctaaattttttcaaaattaaaattttttccccaaaacatgtgagaattaggattgcagtcatgcattgcttagcaaaggggatacattctgagaaa

SEQ ID NO: 1002042 - DNA, 90 bp, Artificial Sequence
  ENSG00000285830_8 (sequence is synthesized)
agtcatgcattgcttagcaaaggggatacattctgagaaatgcatcatcattaggagattttaaaattgtacaatcacgatctactatac

SEQ ID NO: 1002043 - DNA, 120 bp, Artificial Sequence
  ENSG00000285830_9 (sequence is synthesized)
acagcatattattgtagtgaatactgtaggacactgtaacacaatggtaagtacttgcatatctaaacataaagaaggtacagtaaaaatacagtattgtaatcttatggaaccactgcc

SEQ ID NO: 1002044 - DNA, 120 bp, Artificial Sequence
  ENSG00000285830_10 (sequence is synthesized)
atatatgaggtctgtcactgactgaaacatcattatagggcacataactagaatttaataaatcaagttaaacaaattatctttgtaatactgtacccttccatgaaaggaaaatggtat

SEQ ID NO: 1002045 - DNA, 120 bp, Artificial Sequence
  ENSG00000285830_11 (sequence is synthesized)
gcttctaacttgagttttctttaatgtcctaaagtacatttttatagtttttattttgtgtttttaatataatgtttggtatagtcaatcttcttaatctgccatttctatggcagagta

SEQ ID NO: 1002046 - DNA, 120 bp, Artificial Sequence
  ENSG00000285830_12 (sequence is synthesized)
cccagtgaaacatcttgtttggtgtgtcagtcaccccctgctgcagagttccctgtcacacaaatacatgcaaaagggtaataaataaatgggaaacaaagtatagttttagtaatcaac

SEQ ID NO: 1002047 - DNA, 120 bp, Artificial Sequence
  ENSG00000285830_13 (sequence is synthesized)
ttatgccagataatttaagtaagagaaagtaagtagaagaggtggtaagaaagatatatcagatgagcactgaccccaaaccactaagatgatatggtccaaagaatgtcagaatgacta

SEQ ID NO: 1002048 - DNA, 120 bp, Artificial Sequence
  ENSG00000285830_14 (sequence is synthesized)
attcaattatccaactctgctcagctggaagaggaaagaagggaataaagatgttagatcctttaccaggacttccatgcacggggagagaagttgaaagtcaaaactgtaacaggaata

SEQ ID NO: 1002049 - DNA, 120 bp, Artificial Sequence
  ENSG00000285830_15 (sequence is synthesized)
aatacaaaaattctttccaaacatacctaatattctttggccctagagtcactgaattcacatttaaactaatctatatttcattttgattacattaatggagctctgaaggaatgaaac

SEQ ID NO: 1002050 - DNA, 120 bp, Artificial Sequence
  ENSG00000285830_16 (sequence is synthesized)
aaggaatgaaacctattaaagaaaaattaaatttataaacaatttaggcagtcatatatgtatttatatatacacacatacaatgtatatatgaaatccttatacaggtgtaaacattct

SEQ ID NO: 1002051 - DNA, 120 bp, Artificial Sequence
  ENSG00000285830_17 (sequence is synthesized)
agcaataaaataaaaaaaatttagtatgtttgctttttaaaataaaacaaattcatactttatcaaaatttgttcattcttctcacaaataattctgttggtacataattttctctcatg

SEQ ID NO: 1002052 - DNA, 120 bp, Artificial Sequence
  ENSG00000285830_18 (sequence is synthesized)
ctaattcaacaaaccctgagctttgtttctccatctatggctaaatacatatcactctaaccaaataaaaaggtttaaaataagggccctgcatcttggtgtctggttatttgaaatccg

SEQ ID NO: 1002053 - DNA, 120 bp, Artificial Sequence
  ENSG00000285830_19 (sequence is synthesized)
gttttcattttgaatagttttggttaagtgtatgtcatggcagaatgtcccttcatctcctttgatctgtgttaaattgataaaaatacatgcttactcctgtacaaacatcgaacaatg

SEQ ID NO: 1002054 - DNA, 120 bp, Artificial Sequence
  ENSG00000285830_20 (sequence is synthesized)
taattaaatcatcactacttgaaatacttttacatgaataatttatctctttacactgttgaagccttgcatttcagtatgttctacagcttctgtatcatcacctgaaatttgcctaaa

SEQ ID NO: 1002055 - DNA, 120 bp, Artificial Sequence
  ENSG00000285830_21 (sequence is synthesized)
aaaaaaaatacaaataattctttgattttagatacaaagaaaacaagtctaaacatcaattttctgttccatataggaaatagtttcagtcaagaaatctgctatgtcaaaaactttttc

SEQ ID NO: 1002056 - DNA, 73 bp, Artificial Sequence
  ENSG00000285830_22 (sequence is synthesized)
tagtttcagtcaagaaatctgctatgtcaaaaactttttcgcattcttcataatattcaataaagtcaattct

SEQ ID NO: 1002057 - DNA, 120 bp, Artificial Sequence
  ENSG00000285831_0 (sequence is synthesized)
catttctgtggaatcccggatgatgagcatcaccaagtgcagaagctgagttgggtggaacagttgctcacagtggggcagctcactcattgccttgacacatgctcttgttttgccatg

SEQ ID NO: 1002058 - DNA, 120 bp, Artificial Sequence
  ENSG00000285831_1 (sequence is synthesized)
aacataaacttgtggtggggcctatttacagccctggtgccaaagtttcaaccacagtgagagacctaaggatttcaaggaaaactcaaagcaccaatattcagtgatagaagactcaga

SEQ ID NO: 1002059 - DNA, 120 bp, Artificial Sequence
  ENSG00000285831_2 (sequence is synthesized)
ggtttgatgcagagttcactctctgaaaatgaacgttcagtaaaagcatgtctgatttggaggcttcatataaactgcctgtgaagtagacgccactttgcaggaatccggtcagctgta

SEQ ID NO: 1002060 - DNA, 120 bp, Artificial Sequence
  ENSG00000285831_3 (sequence is synthesized)
acattcctgaaggaggaggaggatggttcagagaatgcggttcttcttcgaaacaaagatccacatcagaatcatgaggctgaaggagcattttgcatataataggcactcactcagtgg

SEQ ID NO: 1002061 - DNA, 120 bp, Artificial Sequence
  ENSG00000285831_4 (sequence is synthesized)
gttgaatgaatcaatatattaacaaagaaacaaataaatgaatgaagagaagaatgaaaactcataaagagccagtttcctttattcatctgaaaatttggttatttgcaaatgtaattc

SEQ ID NO: 1002062 - DNA, 120 bp, Artificial Sequence
  ENSG00000285831_5 (sequence is synthesized)
acttaagacgagttcatcagggtggaccctaatccaatatgactggtgtccttataataagagaagacagaaatacacagggagcgtgccgtgtgacaacagaggcagacactgaactga

SEQ ID NO: 1002063 - DNA, 120 bp, Artificial Sequence
  ENSG00000285831_6 (sequence is synthesized)
tgttattgcaagctgaggaacataaaggattgccggcaacaccagaagctaggatgactcaaggaatgaccctcctctagaaccttcagagaaagcacggccctactgacaacttaactt

SEQ ID NO: 1002064 - DNA, 120 bp, Artificial Sequence
  ENSG00000285831_7 (sequence is synthesized)
tggacttccaatctctagaactgtaagataataaatacctgttgttttaagccaccaaagtttgtggcacattttcttgttatagcagccctaggaaacagagctatccatatttgtata

SEQ ID NO: 1002065 - DNA, 120 bp, Artificial Sequence
  ENSG00000285831_8 (sequence is synthesized)
gattgtatgatacagttgcacagcttccagtgaccgccattatagaagctaggaagagtcaaggaagagagttctgtcagagactcagagggagctgagtagccagaccaggctgacatc

SEQ ID NO: 1002066 - DNA, 120 bp, Artificial Sequence
  ENSG00000285831_9 (sequence is synthesized)
ttgatttcaaagttttagcctccagaaagaacacatttttttttgtttgaagcacccagtttgtcgtactttgtaatagcaggtctgggagactaccatggatggtatcccttccaatga

SEQ ID NO: 1002067 - DNA, 120 bp, Artificial Sequence
  ENSG00000285831_10 (sequence is synthesized)
ctccatcatgatattatcactgagcatttcccatacggtgtccaggaattatgtgcatacaacccaccacaagtgagaaagtagtcatttcccagctttgccactgggctctgttttcaa

SEQ ID NO: 1002068 - DNA, 120 bp, Artificial Sequence
  ENSG00000285831_11 (sequence is synthesized)
ggatgagtcaggtagcagcccactgtgtgtcccagactgcaggggacacattttccctcactggggcaggaggaggaactgacattgagccaacacccttttatttctaacagcttcaac

SEQ ID NO: 1002069 - DNA, 120 bp, Artificial Sequence
  ENSG00000285831_12 (sequence is synthesized)
cctttcatagcttctcgttggcattaggctgtatggataagaggcctctattgcaggatctgcacaagtcattcagtgcctcactttggagattggaaatactgcacctgttcttttagt

SEQ ID NO: 1002070 - DNA, 120 bp, Artificial Sequence
  ENSG00000285831_13 (sequence is synthesized)
ttctgacttttggagcttttgagaaaactgaaacagaaattgtcccatttcgatattctgatttaaacctaaattaatttctgccagattttcaggtttattgatattaagttgcacaga

SEQ ID NO: 1002071 - DNA, 120 bp, Artificial Sequence
  ENSG00000285831_14 (sequence is synthesized)
gtgttttttaaagtttaaaaaatcttctttggatatatttggtttttttctctcacatgttttcttaatcaaacttgctgacctttgttttgtattctgtactagtctctaaaaaaagaa

SEQ ID NO: 1002072 - DNA, 120 bp, Artificial Sequence
  ENSG00000285831_15 (sequence is synthesized)
tcatctttctattttactgataattctaccaatatatttgttatcaattttactatttttccttttaatatttattactttctatcatctctctggtttatttcattgcttagcttctag

SEQ ID NO: 1002073 - DNA, 120 bp, Artificial Sequence
  ENSG00000285831_16 (sequence is synthesized)
agttgaatacttctttggtttttatgcaaaatttttttctaataaatgcattttttttcccttgggtatcagcttggccatgtaggagacatgcccagccagcgttcatctgcctgcctc

SEQ ID NO: 1002074 - DNA, 120 bp, Artificial Sequence
  ENSG00000285831_17 (sequence is synthesized)
accttttcctcttttctacttgctgtatggaacttacatctggttaggaatcggtcccactacattagatacatagggctgtcatgccagttttctatatggtatttttaaaaattctgc

SEQ ID NO: 1002075 - DNA, 120 bp, Artificial Sequence
  ENSG00000285831_18 (sequence is synthesized)
accttagtcttctaaatatctgctgatgctttggaatggttgctggccttttgttgttagcttttgggttactgaccctttgatgttaaatttgaattttcattggattttaatttactg

SEQ ID NO: 1002076 - DNA, 120 bp, Artificial Sequence
  ENSG00000285831_19 (sequence is synthesized)
gattttaataaaattttattatatttcaataagttaaaagggtctgcatgagttgtgctttgaaaatttgtcaccatttaaaaaaatttcccaatatattgtaaatttgtgaatgttcca

SEQ ID NO: 1002077 - DNA, 120 bp, Artificial Sequence
  ENSG00000285831_20 (sequence is synthesized)
tctgtttgaaaataacatgtattctgttccttggatacaaagttctaccacaatttatagatcaagcaattgaattatgcatcctaaattctcaatatctttaatttgttaattaatatt

SEQ ID NO: 1002078 - DNA, 120 bp, Artificial Sequence
  ENSG00000285831_21 (sequence is synthesized)
taaagatacacttgttgaagtttctcattgtgattatgaaattgtttatttttcttttaataagatttttatttcaaaattaagttgttaggagcacaaatattcatgataatagtaaag

SEQ ID NO: 1002079 - DNA, 120 bp, Artificial Sequence
  ENSG00000285831_22 (sequence is synthesized)
ttttaatggagttaacattttattaatatgaaatatccatctttgtcccctttcagtagtttttatcctgaattctactttatctcattttaatgtccctatatatgctctccttttgtt

SEQ ID NO: 1002080 - DNA, 120 bp, Artificial Sequence
  ENSG00000285831_23 (sequence is synthesized)
agcctttgctttcaatacctttttgccttcttttatttttaacctccctatgttgtgtcattgtatttggatttctgaaaaataacaaatggctgtaacatttctccagtaggagaatct

SEQ ID NO: 1002081 - DNA, 120 bp, Artificial Sequence
  ENSG00000285831_24 (sequence is synthesized)
ttgtcttttaatatatacatttaacccaggaaaatgtatcatgattactgataaaattgactatgttctcagaaccatagttcgtagtttatcttttatatgctttcttgccgtctcttt

SEQ ID NO: 1002082 - DNA, 120 bp, Artificial Sequence
  ENSG00000285831_25 (sequence is synthesized)
tccttaactgcttatgtgattaagttatttgttcctttttttcctccaaatgatttgggagtaaggcatcctaattctcagtggttaacctcaagtctttaataagtatgcttaaatata

SEQ ID NO: 1002083 - DNA, 120 bp, Artificial Sequence
  ENSG00000285831_26 (sequence is synthesized)
cctcaagtctttaataagtatgcttaaatatatacagaaaatcaaatcaaaaccacaatgagatacctaccatctcgcatcagttagagtgactattactaaaaagtcaaaaaataacag

SEQ ID NO: 1002084 - DNA, 120 bp, Artificial Sequence
  ENSG00000285831_27 (sequence is synthesized)
tggtgaggttgcagagaaaaagcaacccttatacacggttagtgggagtgtgaatcagtttaaccattgtggaagacagtggggcgattcttcaaagacctaaaaacagaaataccattt

SEQ ID NO: 1002085 - DNA, 120 bp, Artificial Sequence
  ENSG00000285831_28 (sequence is synthesized)
atatacccaaagaaatataaatcttctatcataaagacacatgcatgagtatgttcattgcagcactattcacaacagtaaagacatggaatctacctaaatgcccacaatggtagactg

SEQ ID NO: 1002086 - DNA, 81 bp, Artificial Sequence
  ENSG00000285831_29 (sequence is synthesized)
ggcagccattaaaaaagactgagatcatgtcatttgtaggaacatagatggatctggaggccactatccttagcaaactaa

SEQ ID NO: 1002087 - DNA, 87 bp, Artificial Sequence
  ENSG00000285831_30 (sequence is synthesized)
tatagagcagaaaaacagacactgggacctattggagggtggaggttgagaggtgggagaggatcaggaaaaataactagtgggtac

SEQ ID NO: 1002088 - DNA, 120 bp, Artificial Sequence
  ENSG00000285831_31 (sequence is synthesized)
gagaggtgggagaggatcaggaaaaataactagtgggtactaggcttaatacctcagtaataaaataatctgttcaacaaaccctcatgacatgagtttacctatgtaacaaacctgcgc

SEQ ID NO: 1002089 - DNA, 120 bp, Artificial Sequence
  ENSG00000285831_32 (sequence is synthesized)
ctgaacttaaaataaaagttaaaaaaatgtcaaaagctagagtcaatcagcatgtatatttctcctcctgggatgacaagaacatcacctttctttctgatatccctccctgttcttcct

SEQ ID NO: 1002090 - DNA, 120 bp, Artificial Sequence
  ENSG00000285831_33 (sequence is synthesized)
ttcttccttgccacatgcccctctgcagcctcctagctcccaatcagcttcatctcatttttctctctccctgcagtggagtaggtgggttggcagcagaagtaatttcaggttcctcaa

SEQ ID NO: 1002091 - DNA, 120 bp, Artificial Sequence
  ENSG00000285831_34 (sequence is synthesized)
ttcttctgcattgctggtgagggtcttaagtgctgaaagtcattcatactgaaaatagataattctcttgtcaatactgacaaactcttacaacatacttttgatgaattatttactcta

SEQ ID NO: 1002092 - DNA, 120 bp, Artificial Sequence
  ENSG00000285831_35 (sequence is synthesized)
acacaatctttgtctcttttcttcatttaaccaaagactcagttccatgacccgaagaagacggatgtagagagcaaagaaagaggagtggaaaaactctcctatattgaaatagcacaa

SEQ ID NO: 1002093 - DNA, 83 bp, Artificial Sequence
  ENSG00000285838_0 (sequence is synthesized)
ccttttactttagtttcgggggaggcggaagagaaagagagagagaggacacagggaaacttacagcaaaagtttcgagatcc

SEQ ID NO: 1002094 - DNA, 120 bp, Artificial Sequence
  ENSG00000285838_1 (sequence is synthesized)
tggtgttaggaatattttaagcatgtatcttcaatattattcatccaggaccgaagtaagtcctgatgcaggaaatgagtgactttcacagctttctgagcccctactcaacccaggaag

SEQ ID NO: 1002095 - DNA, 120 bp, Artificial Sequence
  ENSG00000285838_2 (sequence is synthesized)
attgctcgagcccaggagtttgagaccagactggacaacatagtaaacctcatccctacaaaaaaaaaaaaaaagtaaaaaacgaagctgaaggatcttttgagcccgggaggtcgagat

SEQ ID NO: 1002096 - DNA, 120 bp, Artificial Sequence
  ENSG00000285838_3 (sequence is synthesized)
cttttgagcccgggaggtcgagattgcaatgagccgtgatcatgccattacacttacacctgggtggcagagtgagaccctgcctcaaaaaaataaataaataaaaaataaatcttaaat

SEQ ID NO: 1002097 - DNA, 120 bp, Artificial Sequence
  ENSG00000285838_4 (sequence is synthesized)
agagacacagaccgagagagaaaaaggctgtaggctttattgagcagattgaaaggacaaagcttccacagtgtggaaggggtcccgagcgggtagccagagttagattatgtgactgcc

SEQ ID NO: 1002098 - DNA, 120 bp, Artificial Sequence
  ENSG00000285838_5 (sequence is synthesized)
ttttaaactctttaaggccggaaatacgtgtggcgagatgttaccagagcgagaaacaaaggcaattaaccgtttgtaacatgtcttagatcttgaggaaaactggaattgcaacttagg

SEQ ID NO: 1002099 - DNA, 120 bp, Artificial Sequence
  ENSG00000285838_6 (sequence is synthesized)
aactatatccaaatatttagttatttctgatagggttccatttctcattttcagagaaagctgccaggatatgatcagtgttcctaacagttcttgctgattagaagaacttcatcagga

SEQ ID NO: 1002100 - DNA, 120 bp, Artificial Sequence
  ENSG00000285838_7 (sequence is synthesized)
gttagtattcaacactctactgtactgtaatataatctttttctgcctctactgccccatgcatgcattatagatgggattcacaaaaacacacagagaacaaatatttgattccccgaa

SEQ ID NO: 1002101 - DNA, 120 bp, Artificial Sequence
  ENSG00000285838_8 (sequence is synthesized)
gacagtaatttcaaattcaacttagaacaaatatatttttctccaaaagtctaatctatgattttatgtggttcactttatcaattgatcattctaattttcttgccaacctctggcatt

SEQ ID NO: 1002102 - DNA, 120 bp, Artificial Sequence
  ENSG00000285838_9 (sequence is synthesized)
ctgagaagttcaccttccattcacatataagaagatgtcctcatgtgtttatagtgtggctgtgagtcattgggtggcaccaactctttgtgccatttcatttatctattttaaagcaaa

SEQ ID NO: 1002103 - DNA, 120 bp, Artificial Sequence
  ENSG00000285838_10 (sequence is synthesized)
ctttcatctgattagatctacttaattttgttataaatagtcctttcatcctattgctgtttatagagtatccttcagtgtataaaaataaaggcaaatatagctataatgtattttaga

SEQ ID NO: 1002104 - DNA, 120 bp, Artificial Sequence
  ENSG00000285838_11 (sequence is synthesized)
aatactctactattaccttttcgcttaacatatttttatacaattattatctggaacaaagtttctcaagctttggtcgacattagtatcatctatgaattttttttcttgtatttgcaa

SEQ ID NO: 1002105 - DNA, 120 bp, Artificial Sequence
  ENSG00000285838_12 (sequence is synthesized)
attcatccaggaccgaagtttgagaagtgccaaaaaacagctgtttggagtaaaggagatgaacgaacaacatgtttgcaggcaaaggtactcaccgctaccctgcgttcctgcatagac

SEQ ID NO: 1002106 - DNA, 120 bp, Artificial Sequence
  ENSG00000285838_13 (sequence is synthesized)
ttccatcagagagaacatgttaggaaagttaaattgcagtaagcacatcacagcaatgacgaggacaggtacttttctgggaaacactggaagacagctggagaggattctgctgctgtg

SEQ ID NO: 1002107 - DNA, 120 bp, Artificial Sequence
  ENSG00000285838_14 (sequence is synthesized)
aaagcacctaaagcctccttgactcagcctcacatcctatcttcaagaaaacatcatatggttattatataaacctcttacgggatttctaaggttaatttcaatatataaatggctact

SEQ ID NO: 1002108 - DNA, 120 bp, Artificial Sequence
  ENSG00000285838_15 (sequence is synthesized)
caacagaatcaaggtaattagagtttgcttatattcaaaaagagttgcaaaatgtctcctagaaaacagaattaactataagaacctgaaatttgcatttcataactttaaggagtttaa

SEQ ID NO: 1002109 - DNA, 120 bp, Artificial Sequence
  ENSG00000285838_16 (sequence is synthesized)
atgcgtgatcgaatatgaaaacacatgacctgtgaactgagcaaaaggtatgctttctgaagcatatactctgtgtgattaggtcactgatgccattgaaatatgtagatttaatgttaa

SEQ ID NO: 1002110 - DNA, 120 bp, Artificial Sequence
  ENSG00000285838_17 (sequence is synthesized)
agctactggttctctgagtgttttcatgatctcaccagatttttttttttgtaccattcactcttttctatttaaaagactttcagtcgtagtctaaaaaaaattccaaacactttagtt

SEQ ID NO: 1002111 - DNA, 120 bp, Artificial Sequence
  ENSG00000285838_18 (sequence is synthesized)
ctggaatttcacttattctctacaagttattattactacaatttagtacaaactctcattttcatagcttactattccaacttctcctagtatgtaacccttatgctctataactgaaaa

SEQ ID NO: 1002112 - DNA, 120 bp, Artificial Sequence
  ENSG00000285838_19 (sequence is synthesized)
cattctggtaaaaggaatcagcatgctaatactattttaaacacacatcctcattctctttcctattattcataaaactagaaaaataaaaaaacacttttcttccagcagtggatagaa

SEQ ID NO: 1002113 - DNA, 120 bp, Artificial Sequence
  ENSG00000285838_20 (sequence is synthesized)
gaaaaagaaattcaaatttacaatttaattgtcatgggtcactcacttgcagtgacttgctctagttgcttctgttgttttaatgctaaggtaagatgatgaagatctgttttgagtaaa

SEQ ID NO: 1002114 - DNA, 120 bp, Artificial Sequence
  ENSG00000285838_21 (sequence is synthesized)
gtaagctccaaatatgagctttgcactactaccattcttaatttgtggatcatatcaatgttaggagttgaaggtttaatttgcatttatttaaataaattatccctagactataactta

SEQ ID NO: 1002115 - DNA, 120 bp, Artificial Sequence
  ENSG00000249419_0 (sequence is synthesized)
aggattctaaacccctggaaagagttttaggcacaagattaagaggtggatggaactggaggtcatatcttaaatgaaacaagccaagcaaagaaagtcaaatatcacatattctcactc

SEQ ID NO: 1002116 - DNA, 120 bp, Artificial Sequence
  ENSG00000249419_1 (sequence is synthesized)
ctaagtagggactaaaaaatgtgtacacatggatgtagagaatggaatgattgacagcaatatagacacacagatgacccaacatggaaaataatatattgtaaaagtcattcagttgtg

SEQ ID NO: 1002117 - DNA, 120 bp, Artificial Sequence
  ENSG00000249419_2 (sequence is synthesized)
gggaaatgtgcagagaggattctatttggacttgttataaataagcaagattgtatcaacaatctagagagcctctgaagtgtaactaccctttcagcatttcagaagaccatacactat

SEQ ID NO: 1002118 - DNA, 120 bp, Artificial Sequence
  ENSG00000249419_3 (sequence is synthesized)
tcccgttgatgagactatacaggatgaacaaaacagaaaaaaattgtgtcctcatggagcagactgcataaattttattcagaaaagatatgctacagaaggtgacagtgttggagtgga

SEQ ID NO: 1002119 - DNA, 120 bp, Artificial Sequence
  ENSG00000249419_4 (sequence is synthesized)
cagtgttggagtggagtgactgaaattatacatgtagccacagggataaattgatttttgaataaaattctgaatgagaagttatatgaagcaggcctggcacggtggctcatgcctgta

SEQ ID NO: 1002120 - DNA, 120 bp, Artificial Sequence
  ENSG00000249419_5 (sequence is synthesized)
aggagaatcacttgaacccaggacacggcagttttgcattattgttttgtactactaagctttgacacgaactatggggaagatctaaaattaatatacaaccatacctcaaaatattgc

SEQ ID NO: 1002121 - DNA, 120 bp, Artificial Sequence
  ENSG00000249419_6 (sequence is synthesized)
aggatcagttccagaccactgccatgaagtcaatattgcaacaaagtgcccaaaaatcatggtctagttttccctgctttcaccctcacaactggagggttcatggagctctccagggga

SEQ ID NO: 1002122 - DNA, 120 bp, Artificial Sequence
  ENSG00000249419_7 (sequence is synthesized)
tgacggttgtgccatgcagagcagcatttctaagcaagtgtgagttcatgtgagtagagccaaacacgagtcaaatttccattaaaaaaactatgagttccgcgaggtgcggtggctcat

SEQ ID NO: 1002123 - DNA, 120 bp, Artificial Sequence
  ENSG00000205611_0 (sequence is synthesized)
gtgcgtgggcagtgtgttgtttgagtgctgcggtaggatgcctgcctcttcggattgctgtgcaggggcctgaacacagcaggcatttgagctcagagatgcccgggaagacggggggcc

SEQ ID NO: 1002124 - DNA, 120 bp, Artificial Sequence
  ENSG00000205611_1 (sequence is synthesized)
cgaacggaagcagaaaaacacttatggccgctgggaagttgggagagcgaggctggggctctggcaggcccagggaaagttccctgtctaggctctttattaaaaaatttaaaaggagga

SEQ ID NO: 1002125 - DNA, 120 bp, Artificial Sequence
  ENSG00000205611_2 (sequence is synthesized)
gttgaggcaccttgaatattccttcgcgagtttggagactagccgatttttcatgaagcaagcaaagaccgcggtcccggatcctgcaacttctacctcattttctccaggcctctccac

SEQ ID NO: 1002126 - DNA, 120 bp, Artificial Sequence
  ENSG00000205611_3 (sequence is synthesized)
ttgcccgagctctcagccaccaggagacagacggaaggggcttctggattgcgttgggagcgggcactgtcccctacccactcctgctcagtttcccaaagtccagcgacttccgaccct

SEQ ID NO: 1002127 - DNA, 120 bp, Artificial Sequence
  ENSG00000205611_4 (sequence is synthesized)
ccttggggggaaaaataccagtacccagacacctttgcaccctgttatatgactgggcttgcttcaggaatatcttacaaagaagaagaagaagaaagaacggcttggagtcatgtttac

SEQ ID NO: 1002128 - DNA, 120 bp, Artificial Sequence
  ENSG00000205611_5 (sequence is synthesized)
atctagttctactgatccgttcacatctggagagtttatttataactccctctataactctctgtttggagacactgtggctctattgacagactgatatctaggaaatattgctctatg

SEQ ID NO: 1002129 - DNA, 120 bp, Artificial Sequence
  ENSG00000205611_6 (sequence is synthesized)
tctaaccgtacctaaatgtgctgtggttgtatttacagatttatgtttgagggaaatataactatttccattgtatttgtgcatatacagtagttataggagcagatttatatatgggaa

SEQ ID NO: 1002130 - DNA, 120 bp, Artificial Sequence
  ENSG00000205611_7 (sequence is synthesized)
aatatacgactctcttacagccatccagctttatgtacatttgatatcctgacagatttatatctctgaacagctatatagataaaaacgtatattgttagaattatgtatcagaagata

SEQ ID NO: 1002131 - DNA, 120 bp, Artificial Sequence
  ENSG00000205611_8 (sequence is synthesized)
tatacttattgattgtgaaatagagtagttagagcattcatttagagccatatatggctatggagatattgctatattattatcactatatataggcatatctatttataactacatagt

SEQ ID NO: 1002132 - DNA, 120 bp, Artificial Sequence
  ENSG00000205611_9 (sequence is synthesized)
tataaaaatacatataagtaattacagtcctatatgtgcatgctgcaatctctctctagagttatagacactttcaaatataactctatagagagatctgtatgcatataaggtgtaatt

SEQ ID NO: 1002133 - DNA, 120 bp, Artificial Sequence
  ENSG00000205611_10 (sequence is synthesized)
atcttgtgatgtgtttacattgggacttaggcccgtctgtctagaacacacatatttatatgtaggggctgggagagacttgttcatagatatctgcagagggccaactggaaacactgt

SEQ ID NO: 1002134 - DNA, 120 bp, Artificial Sequence
  ENSG00000205611_11 (sequence is synthesized)
atctgccctctaggaaaccagctaggagagttgtgtacttacggagggatggagttacaaaaggtaacccctgagactgcgggattctactctcgacgagaacgaccctcggatgagaga

SEQ ID NO: 1002135 - DNA, 120 bp, Artificial Sequence
  ENSG00000205611_12 (sequence is synthesized)
gcagcccaggggcacgcaggccgacctgtcttagagatcacggatggcggcacgacttttggggagagtcaacccaaccaacacggtccgggcaggcctgaggctgggatgctgtgctgc

SEQ ID NO: 1002136 - DNA, 120 bp, Artificial Sequence
  ENSG00000205611_13 (sequence is synthesized)
tgggatgctgtgctgcttttcccggactccgcctggggtttcctcatcctgtttggcgctttgcgactcctggcatctggagacgttcccgtcgaccccgtggagaggtcaggccggagc

SEQ ID NO: 1002137 - DNA, 120 bp, Artificial Sequence
  ENSG00000205611_14 (sequence is synthesized)
ggggactggtttctaagacaaccgtggaaccactgtgatgggaaaagccactcgcgcctcgcccaggagcattggctgggcggactcgcgctccgctcctggcagtcaggctgcgtcccc

SEQ ID NO: 1002138 - DNA, 120 bp, Artificial Sequence
  ENSG00000205611_15 (sequence is synthesized)
cggactcgcgctccgctcctggcagtcaggctgcgtcccctttaaataatggcagcgctgcggggtggcagcgaggctcctgctgcagccgcggagtcggctgcatccggggtccaattt

SEQ ID NO: 1002139 - DNA, 120 bp, Artificial Sequence
  ENSG00000205611_16 (sequence is synthesized)
gaggcagcgtgggagaggggccccgggtatattgtcccagggcaaaagccccaggagtcctgtcctcaggacctccttgagccgacttccaccgatggagcgggagcttcaggaggcttg

SEQ ID NO: 1002140 - DNA, 120 bp, Artificial Sequence
  ENSG00000205611_17 (sequence is synthesized)
ctgtgttctcaggactccccttcagatccattttggcctgctgaatgagataggatgggctcactacatctggtgaggccgtagggcctcgctgcagcacagaataatcccataagtctc

SEQ ID NO: 1002141 - DNA, 120 bp, Artificial Sequence
  ENSG00000205611_18 (sequence is synthesized)
tcgctgcagcacagaataatcccataagtctcaaggcctagtgtcagctgcactttcactgatccatcagccctctgcttccttcctcctttgaaagagcagtggcctgccccgcttcta

SEQ ID NO: 1002142 - DNA, 120 bp, Artificial Sequence
  ENSG00000205611_19 (sequence is synthesized)
tgaccacgcgtggcactggtgtatcccacagcagatggtgtgaatgtgtgtcaccggaggcatacattgtgatggcgaaaccaacaatggtgtccaggaatgtgcccggtcgaagggggg

SEQ ID NO: 1002143 - DNA, 120 bp, Artificial Sequence
  ENSG00000205611_20 (sequence is synthesized)
aatgagtgacctttccatcaatgccaaggaaaatcaaagaacacctgggaacgaggagggtgcctgtgccttagtccaagccacattttgaaatgcctgccagaggattaaagaggtttt

SEQ ID NO: 1002144 - DNA, 120 bp, Artificial Sequence
  ENSG00000205611_21 (sequence is synthesized)
ggcaaaattcaccccacccccaaccctccatggcccaggtagccctgacccaacctcccctgcaaccagccgcagacccagccccagccccagcccagtccctttggttcctttccccga

SEQ ID NO: 1002145 - DNA, 120 bp, Artificial Sequence
  ENSG00000205611_22 (sequence is synthesized)
cattcgttatggtcaaaagatccagagactcagtccacccaggagcagaggagaggatgtctctcacgaatgagacatgaagtgcagaggaaatgcgacaccacctgtcctagaagacaa

SEQ ID NO: 1002146 - DNA, 120 bp, Artificial Sequence
  ENSG00000205611_23 (sequence is synthesized)
ggtctgtcacggtcgactagcgctcattccaggcaatccacccacccatgaggtgaaacacggagaggaaggaagcttccctgtctgagagaagtatggaagccaagagctccagggtcg

SEQ ID NO: 1002147 - DNA, 120 bp, Artificial Sequence
  ENSG00000205611_24 (sequence is synthesized)
tctatcctgccccatcaagcagaaacaggttgaaagagataaacgatcacgacagggatctccagtaagtgtctacctgacggactgggttgtgatcattgttgaagacattcagcgaga

SEQ ID NO: 1002148 - DNA, 120 bp, Artificial Sequence
  ENSG00000205611_25 (sequence is synthesized)
gcgagaggcatctaggcccctcagaaacaggggagacagagcaagaggcaggacaaagcagaggccaaagcccaggcaggatacagcactgtgccactgccacggccatgaggggagggg

SEQ ID NO: 1002149 - DNA, 120 bp, Artificial Sequence
  ENSG00000205611_26 (sequence is synthesized)
taccaaaaaggtggcttttccagaaaggccagcgttccagtgactatctgtgaaaatgctttgtgatgcgtgggttatccctcagagttaaacatttgttttgacttagcagtttggaaa

SEQ ID NO: 1002150 - DNA, 120 bp, Artificial Sequence
  ENSG00000205611_27 (sequence is synthesized)
cactcttttttaagaatcaatgaagggatattttgaagcccatggatgagtatattgagaaactaaatatcccaccatagaaactagcaagaaattattagtgaaaatgctctgtgatgt

SEQ ID NO: 1002151 - DNA, 120 bp, Artificial Sequence
  ENSG00000205611_28 (sequence is synthesized)
gtggattcatctcacagagttagacttttgtttttattctgcaggtttcaaacacttttttgtggaatctacaaaggaacatttcagagcccacagaggcctatagtgaaaactgaatat

SEQ ID NO: 1002152 - DNA, 120 bp, Artificial Sequence
  ENSG00000205611_29 (sequence is synthesized)
cttgtgataaaagctagaaacaagctatctgtgaaaatgtttgtgatgtgtggatttatctcatagagttatacctatgtttatatacagcaggttggaaacactcttttagtagaattt

SEQ ID NO: 1002153 - DNA, 120 bp, Artificial Sequence
  ENSG00000205611_30 (sequence is synthesized)
aaaataagaaatttctgagtccttgaggcctattataaagaaatgaatatccctgataaaaactgacaacaaattatctgtgaaaatgctttgagatatgtggattcatctcgcaaagtt

SEQ ID NO: 1002154 - DNA, 120 bp, Artificial Sequence
  ENSG00000205611_31 (sequence is synthesized)
tgtaatatctatgaagggatattttggagcccatagaggcctatactaaaaaccaaatatcccaggataaaaactagaaacaaggtatgtgagaaaatgttttgcaatgtgtagaatcat

SEQ ID NO: 1002155 - DNA, 120 bp, Artificial Sequence
  ENSG00000205611_32 (sequence is synthesized)
caaggtatgtgagaaaatgttttgcaatgtgtagaatcatctcacagagttaaaccttgttttgattgggcaggttggaaacattctttttgtagaataaaagaagggacattttggagc

SEQ ID NO: 1002156 - DNA, 120 bp, Artificial Sequence
  ENSG00000205611_33 (sequence is synthesized)
tcattgaggcctatagtgaaaaaccacatatgccatgataaaaactagaacaagctatctgtaaaaatcttttgcaatgtgtggtttcatctcacagagtttaacctttattttgactta

SEQ ID NO: 1002157 - DNA, 120 bp, Artificial Sequence
  ENSG00000205611_34 (sequence is synthesized)
gcgctttggaaacactatttttctagaatctgcaagggtacatttcaaacccaatgaggcctgtagtaaaaaactgaatatcccacgatgaaaactagaaactagctatctgtgaaaatg

SEQ ID NO: 1002158 - DNA, 120 bp, Artificial Sequence
  ENSG00000205611_35 (sequence is synthesized)
ctttgagatgtgtggattcatctaatggagttgaatgttagttttgattcagcaggttggaaacttagcagtttggaaacattcattttgtagaatcaaagaggggacttttcttagccc

SEQ ID NO: 1002159 - DNA, 120 bp, Artificial Sequence
  ENSG00000205611_36 (sequence is synthesized)
cctgaggcctatagtgaaaaatcaaatatcccgtgataaaaactagaaacaagttatctgtaaaaatgctttgcaatttgtggatttgtctcacaatgttaaacctttgttttgatttag

SEQ ID NO: 1002160 - DNA, 120 bp, Artificial Sequence
  ENSG00000205611_37 (sequence is synthesized)
taggttggaaactctctttttgtacaattgatgaggagatatttcaaagcccattgattgaggcttgtagtgaaaaacctaaaatcctaataaacactataaagaagctgtctctgaaaa

SEQ ID NO: 1002161 - DNA, 120 bp, Artificial Sequence
  ENSG00000205611_38 (sequence is synthesized)
ctctcatttctttcggaaagcggaaaccagacgacccagcggccatgggacgagccgccccaactcaaccccagcaggacgctggaggggcctccctcccccgcctctcttcgccggcgc

SEQ ID NO: 1002162 - DNA, 120 bp, Artificial Sequence
  ENSG00000205611_39 (sequence is synthesized)
ctccgccatctcgcaggtgtgcggccgctaggcctgggggatccgaatgactggggctggataggaatgccttcgtgtttcccaagacccctgggcctgctccacaaagtttgaagggag

SEQ ID NO: 1002163 - DNA, 120 bp, Artificial Sequence
  ENSG00000205611_40 (sequence is synthesized)
atatgacaaaagcccatgatggatttggtatatgttaattcacaatgccctttcctccagaatttaactataagttaatacacaccggaaaccacgcgcatacacgctccttaatgggct

SEQ ID NO: 1002164 - DNA, 120 bp, Artificial Sequence
  ENSG00000205611_41 (sequence is synthesized)
taggtattagcgagtcctaacgatgcatacaaatgtgctctgcgctctgtagaaccctcaagatttatgtgccttgagctctctgaagctgtaaacaaggagaaaaaaaaaaagagaaag

SEQ ID NO: 1002165 - DNA, 120 bp, Artificial Sequence
  ENSG00000205611_42 (sequence is synthesized)
cgaaagcgactggggggaagagacagaggcctgactcgcccctccaggttgtggagagaagggattctttatgtattttcctttccttgcaagctcggtgcgtgtgggttttggcgttgg

SEQ ID NO: 1002166 - DNA, 120 bp, Artificial Sequence
  ENSG00000205611_43 (sequence is synthesized)
tctgggggtggtgttctgcctgaatgctggtgtgcgtgggcagtgtgttgtttgagtgctgcggtaggatgcctgcctcttcggattgctgtgcaggggcctgaacacagcaggcatttg

SEQ ID NO: 1002167 - DNA, 120 bp, Artificial Sequence
  ENSG00000205611_44 (sequence is synthesized)
tgagcatatatgcatgagtgtgcactgtgttagggtgtgtgtgtgtgtatgtgcgtgtgagaaagagagagagacagagagggagaggcaggcttccccctgggccaggctgctgtcccc

SEQ ID NO: 1002168 - DNA, 120 bp, Artificial Sequence
  ENSG00000205611_45 (sequence is synthesized)
aaaatgcaagaggaaatattttgaggtggagacagaaggagtcaggatcacagcatctgagggggagataggaaaggaagggaggaagaaatcttaatatgctcttggtggggctggggt

SEQ ID NO: 1002169 - DNA, 120 bp, Artificial Sequence
  ENSG00000205611_46 (sequence is synthesized)
tgggaacccctttcccagacaagggacggaagaggggaaggagagccagagaccactctttattgctttttttctcaggcttctgctttgtgtgatcagagaagggatcccacatatggg

SEQ ID NO: 1002170 - DNA, 120 bp, Artificial Sequence
  ENSG00000205611_47 (sequence is synthesized)
aatggttagtggcttttgggactctccaggagcctctgttttaagaatgaggccaaatgtgcaggctcaggccaagcggcagagatgaatgaggtgatgaccacagccttgatccggcag

SEQ ID NO: 1002171 - DNA, 120 bp, Artificial Sequence
  ENSG00000249412_0 (sequence is synthesized)
aaatcgatgccaacatttccctcaaatgcaacgaagcagacgtcaacggaggtgtaagccaagattggcccaaggaagtgaagcaggaggtttgccagagagctactaactggagaaggg

SEQ ID NO: 1002172 - DNA, 120 bp, Artificial Sequence
  ENSG00000249412_1 (sequence is synthesized)
ctttcattcttagtcaaaggctgaggagcacggagcagcagttctccaggtcctgtgggtgctcccagccgtctgcgagccggcctcccatggcatccatggctacattcttctctctta

SEQ ID NO: 1002173 - DNA, 120 bp, Artificial Sequence
  ENSG00000249412_2 (sequence is synthesized)
ggagcagcactggctgtccaggctgtgacaagcacaagtaggaggggcgggcgactgaccgggtacttggccaccacagagctgaaaacctctggtgcttacaacaataaggatgtttac

SEQ ID NO: 1002174 - DNA, 120 bp, Artificial Sequence
  ENSG00000249412_3 (sequence is synthesized)
tagactgtctctctctctccatccagatattctcctttaccttttcagagcctatgttgtcaaggtaacattttaaaaacagtatttattgagaacctctaaaacaacctaagaaccaat

SEQ ID NO: 1002175 - DNA, 120 bp, Artificial Sequence
  ENSG00000249413_0 (sequence is synthesized)
tctcgtggtgtgccgttttttaagcccttcggaaaagtgcagtattcgggtgggagtgacctgattttacagatgccgtccgtcacccctttctttgatttggaaagggaactccctgac

SEQ ID NO: 1002176 - DNA, 120 bp, Artificial Sequence
  ENSG00000249413_1 (sequence is synthesized)
cctattcggccatcttggctcctctcctcagcggaatctagtttgttcccaagttaccatatctcagaggcatataatgctgtccaattctcttgaaaacaaaaataattcaagctccaa

SEQ ID NO: 1002177 - DNA, 120 bp, Artificial Sequence
  ENSG00000249413_2 (sequence is synthesized)
caattctcttgaaaacaaaaataattcaagctccaataataaagatttttctgctttgttcttctgagtcccttgtgctgagaaaactcatctagcatatgggttttgactcttgggtct

SEQ ID NO: 1002178 - DNA, 120 bp, Artificial Sequence
  ENSG00000249413_3 (sequence is synthesized)
gaaaaaggcagcgatccctgctaaattctgaacactgacattagtcgtcagccttggaagaagcaacaatcacaacgatctgctttttaatgaggcaaaggaccagaaattaagactatt

SEQ ID NO: 1002179 - DNA, 120 bp, Artificial Sequence
  ENSG00000249417_0 (sequence is synthesized)
agattccagactcagaaagagttggaactgtggtgtggttttagagtgcaggaggagtgagaagggattgggaacagatctggacctgacaatgaaaatgcctctgggcacctccctgct

SEQ ID NO: 1002180 - DNA, 120 bp, Artificial Sequence
  ENSG00000249417_1 (sequence is synthesized)
ggcaactggacataaagcattctgaggaaaagcaaattaaaactcccagaaatcaaacagaaagtaaaatctttaagaaaaggaccaaaattaacaaaaaatacagaatttaaaactttg

SEQ ID NO: 1002181 - DNA, 120 bp, Artificial Sequence
  ENSG00000249417_2 (sequence is synthesized)
gtcacaatgaagagatggcgatatgacagaactcttaggttaacaatgtaaaccttcactttcaatttctcatactttttgtctccagctgaacaaaataaaagctcaggaggaagcgca

SEQ ID NO: 1002182 - DNA, 120 bp, Artificial Sequence
  ENSG00000241648_0 (sequence is synthesized)
ctactgtggcctagaagtaatatgcaccacttctggaactgggcattgaggtattactgtccaagaatcccttcaactaagatatcacatagaaattgaaccactcttgggaacagatag

SEQ ID NO: 1002183 - DNA, 120 bp, Artificial Sequence
  ENSG00000241648_1 (sequence is synthesized)
tgaggacgagaaaagaaaaaaaaagaagaaggaaattgaagcactgacatatgagggaatagttttgtaatgattcaataattactacaagcaccacttgaggttatgctggaactattg

SEQ ID NO: 1002184 - DNA, 77 bp, Artificial Sequence
  ENSG00000241648_2 (sequence is synthesized)
ggcagaagtagtgcctggaactccagcaagacagaactgttcactccaatggaaagacggctgaagccagggagcca

SEQ ID NO: 1002185 - DNA, 89 bp, Artificial Sequence
  ENSG00000241648_3 (sequence is synthesized)
gagcagtctgaagtcaacctgggatactcgagcttcgtagagggaggggtgtctgctattactgaggcttgagtaggcagtttgcccct

SEQ ID NO: 1002186 - DNA, 120 bp, Artificial Sequence
  ENSG00000241648_4 (sequence is synthesized)
tgtctgctattactgaggcttgagtaggcagtttgcccctcacaatgtaaacaaagcctccaggaagttcagactaggtggagcccactgcagcgacaaaaatcctctgtttccacactg

SEQ ID NO: 1002187 - DNA, 87 bp, Artificial Sequence
  ENSG00000241648_5 (sequence is synthesized)
ccctaaaagaaaggcagcagccgtagtcaggggcttatagatgaaacttccatcttcctgagacagagcccttggggaaagggacgg

SEQ ID NO: 1002188 - DNA, 120 bp, Artificial Sequence
  ENSG00000245662_0 (sequence is synthesized)
cagagggccctgaaggcgcgggctgcgttctgcgtctctccgcgatctctgccggaccggaactaagaccagaccattttcttctggatgacaattatgctttgtctcaagcacactgct

SEQ ID NO: 1002189 - DNA, 120 bp, Artificial Sequence
  ENSG00000245662_1 (sequence is synthesized)
aaaccactgctgacttcagatccaggaagctaaggacattaggtattactagtaaagacaacagaattaatcagatccactccctaaactttgtcattattcataactttttcactttag

SEQ ID NO: 1002190 - DNA, 120 bp, Artificial Sequence
  ENSG00000245662_2 (sequence is synthesized)
ataggtgctgagaacaattatttttaatatacaatctaacttttaattatatatgtgtttaaagatatcaaaacaaagaaaataaaaatcactactacgatgtctcttacatgtgtagat

SEQ ID NO: 1002191 - DNA, 120 bp, Artificial Sequence
  ENSG00000245662_3 (sequence is synthesized)
tttactatttacgtattattgtaaatttttttgccgaaacactttatccagtaactttttttagatattttttatgtcttaaattattctctgggataaagatgtaaattattgtccaca

SEQ ID NO: 1002192 - DNA, 120 bp, Artificial Sequence
  ENSG00000245662_4 (sequence is synthesized)
cacatacttaattattaccttaagagtaattcttagatctgattccacaaccatttttgagacttttgatatgcattgttaaatttcttctacaaataactgtattatagtggtaacctg

SEQ ID NO: 1002193 - DNA, 120 bp, Artificial Sequence
  ENSG00000245662_5 (sequence is synthesized)
tggtggaaataattgcatgtttttgtctactttatttggaacaccagattggatatgttaataatagcttttaaaaagcacatgctactgaaagattttgaatagtaaattcacacaaaa

SEQ ID NO: 1002194 - DNA, 120 bp, Artificial Sequence
  ENSG00000245662_6 (sequence is synthesized)
tttaatatactttacagtagtaaaactataacatctcaattgttttttttaaataaatttgaataatggtttaggtcatttgataaatatcaccttgtaactaataagatgaaacaaggc

SEQ ID NO: 1002195 - DNA, 120 bp, Artificial Sequence
  ENSG00000245662_7 (sequence is synthesized)
atgaaacaaggctaaataggaccaattaagcacgtgatttaaatatcgatatgtagtgagtaaaagagtaatccaactaccagtagaagattactacatttagtactataacaagtataa

SEQ ID NO: 1002196 - DNA, 120 bp, Artificial Sequence
  ENSG00000245662_8 (sequence is synthesized)
cactgttcctaaaaaaaagtgctttcttatgtttaagatttattttaatgtcaaacacaaataattagatctttaaatgaacaatttgggagttaaatccattgcttctgatttttatag

SEQ ID NO: 1002197 - DNA, 120 bp, Artificial Sequence
  ENSG00000245662_9 (sequence is synthesized)
attttatggtctaggaaatctatactgtctgatttgatcccatttaactgtaagatttttacacatgttgcactctactagctggcaggaaaattattttaatcgactgaatgaaagtat

SEQ ID NO: 1002198 - DNA, 120 bp, Artificial Sequence
  ENSG00000245662_10 (sequence is synthesized)
tatttcatgtaaaagtttattatatcaaggaaatgatttaggtcagaagctagaatctatataaagtcagcttttgaaaataaagacagacaaatctttttttacattattataaaagag

SEQ ID NO: 1002199 - DNA, 120 bp, Artificial Sequence
  ENSG00000245662_11 (sequence is synthesized)
ctaagttgcaaacaactatccttgagaccagaccatttttttttaagctgaaattttctaataattgcaatggcaaaacaccatttgcaatttcttccctcccacctcccaggtggttca

SEQ ID NO: 1002200 - DNA, 120 bp, Artificial Sequence
  ENSG00000245662_12 (sequence is synthesized)
acaattccacttccaaacagcatttcccatcagtttttaaaagctacttacaaagtgttattctactaccacttttaaatacatcaagcacttccaaatatctagaaagactagatattt

SEQ ID NO: 1002201 - DNA, 120 bp, Artificial Sequence
  ENSG00000245662_13 (sequence is synthesized)
catataacttgtccaccacatacacatcactgttaaataaaattgcacacacataacaatggttatcatctgaggtatcttctaaatgtggccattttggccttgaatcattccctcctc

SEQ ID NO: 1002202 - DNA, 120 bp, Artificial Sequence
  ENSG00000245662_14 (sequence is synthesized)
ccttccttctctgccttcaatccagtggacaagtacaggcacatgtaatgcttagagatggtcgaacaaattcctatgcaaaagtctttacagaagacaagttttcctatgaattttaac

SEQ ID NO: 1002203 - DNA, 120 bp, Artificial Sequence
  ENSG00000245662_15 (sequence is synthesized)
acaaagcgtacaaaatatgctaattttactactttgtcatacactggcaacctctttaacaactagagactagatgttgaaaaattaggactatttgtccattatatatactatatacag

SEQ ID NO: 1002204 - DNA, 120 bp, Artificial Sequence
  ENSG00000245662_16 (sequence is synthesized)
agcaaaacaaaatgcacaaaacgtatagaaaaatggtgtctgaaaatgtccaagtatgaacacactagtatattacctcttgcaatttcttccctcctacctcctctaaaccattgaaca

SEQ ID NO: 1002205 - DNA, 120 bp, Artificial Sequence
  ENSG00000245662_17 (sequence is synthesized)
gcatttcctatgaattttagcaaaaagatatttacaaagtggtattttactacctatacatttaacatacatcgggcacttctaaacatctagatagactagatgtttcaagtaaggagt

SEQ ID NO: 1002206 - DNA, 120 bp, Artificial Sequence
  ENSG00000245662_18 (sequence is synthesized)
taatttgtctactatgtatacagcagtcttgaataaactgcaaacatgtaacaacagttataatttgaaagagtcttccaaatgtgaacattctggcctagaacccttcccatcgccatc

SEQ ID NO: 1002207 - DNA, 120 bp, Artificial Sequence
  ENSG00000245662_19 (sequence is synthesized)
aacccagaagacatcaaattttcagaagacaatctttcctaggacttgtaaaacaaaatgtcttccagctccatgtcatctaacccacttaacaaacgtgaacgtatcgcttccagaggc

SEQ ID NO: 1002208 - DNA, 120 bp, Artificial Sequence
  ENSG00000245662_20 (sequence is synthesized)
cgtcttaacaattccatttccaaaagtcatctccagaagacatgtattttctacgatttcttttaaacaaatgagaatttacaagatgtgtaactttctaactcttttatcataactcga

SEQ ID NO: 1002209 - DNA, 120 bp, Artificial Sequence
  ENSG00000245662_21 (sequence is synthesized)
caacctctttccatctagaagggctagatgtgacaaatgttttctattaaaaggttggggtggagttgagagcagctttttcatattatatacacaggccttccataaacggccagtaaa

SEQ ID NO: 1002210 - DNA, 120 bp, Artificial Sequence
  ENSG00000245662_22 (sequence is synthesized)
tcttcccagagggtggtgggcatttccaactggccaaacgtggcctgtcattctaccatttctctcttccgacagcaaagtctggtagaatgaagaccaaccgcccgatggccgctaacc

SEQ ID NO: 1002211 - DNA, 120 bp, Artificial Sequence
  ENSG00000245662_23 (sequence is synthesized)
gttccacccgtcgttgttcgggacttcgctcacctttcaggccccttaaggcctttgtccgttgtcgtcaggactagggcagagggctcggcctgtcccgaggccccccagttcatccgc

SEQ ID NO: 1002212 - DNA, 120 bp, Artificial Sequence
  ENSG00000245662_24 (sequence is synthesized)
cggcccggggccagagggccctgaaggcgcgggctgcgttctgcgtctctccgcgatctctgccggaccggaactaagaccagaccattttcttctggaagatccagaaggctggtaatg

SEQ ID NO: 1002213 - DNA, 120 bp, Artificial Sequence
  ENSG00000245662_25 (sequence is synthesized)
cattgtttctgggtgtgtttatgaggatgttgccaaaggagactgacatttgaattggtggactgggagaggaagacccaacttcaatgtgggtggacagcatccaatcatctgccagcc

SEQ ID NO: 1002214 - DNA, 120 bp, Artificial Sequence
  ENSG00000245662_26 (sequence is synthesized)
ctgctagaacaagcaggtggagagaggtgggatcactttgcttcactaagtcttctggctgtctctttcttctttctgtgcctgatgtttgcttctgcttctcttgaccttggacatcag

SEQ ID NO: 1002215 - DNA, 120 bp, Artificial Sequence
  ENSG00000245662_27 (sequence is synthesized)
actccaggttcttcggcctttggactctgggaagcaccagtggtttccccagggctccctggtcttccaccgcagactgaaggctgaaatgtcagtttccctagtttttaggctttcaga

SEQ ID NO: 1002216 - DNA, 120 bp, Artificial Sequence
  ENSG00000245662_28 (sequence is synthesized)
cttggtctgagacactactactggcttttctgtttcctcagcttgcagatggcctactgtgagactttgccttgtaatcatgtgagacaattctccctaataaaccatcttttgtatata

SEQ ID NO: 1002217 - DNA, 120 bp, Artificial Sequence
  ENSG00000245662_29 (sequence is synthesized)
aagttgttcttggccaaaaacatcaatcagcctcatctccagagtgatcctccaaactcagggagaattgcagtgaatgacagttcctatttctcaacatcattgtcagcatttgatgcc

SEQ ID NO: 1002218 - DNA, 120 bp, Artificial Sequence
  ENSG00000245662_30 (sequence is synthesized)
gtcagtgtcctagattttgaccattataatagtcatcctccttagccacctctgatgagtgcattgaagaggatgacctgcttggttattctgcttcccgaatacaaaaaattaggcttc

SEQ ID NO: 1002219 - DNA, 120 bp, Artificial Sequence
  ENSG00000245662_31 (sequence is synthesized)
tgaaatcaaacataagaagtcattgttgcttttattccagagactgggtctcgctgtgtttcccaggcaggtctctaactactgggctcaaatatctgtctgctgcagcctcccaaagtg

SEQ ID NO: 1002220 - DNA, 89 bp, Artificial Sequence
  ENSG00000245662_32 (sequence is synthesized)
caccagctcggctcactgcaacctccgcctgctggattcaagtgattctcttacctcagcttcccgagtggctgggattacaggcacct

SEQ ID NO: 1002221 - DNA, 120 bp, Artificial Sequence
  ENSG00000245662_33 (sequence is synthesized)
ccaaagtgctgcaattacaggcatgagccccctcgcccggccaagatgaactaatttaaacaaatatttatattgatcatcatagtacatccatctttgttggatgtattaataccacag

SEQ ID NO: 1002222 - DNA, 120 bp, Artificial Sequence
  ENSG00000245662_34 (sequence is synthesized)
catagtacatccatctttgttggatgtattaataccacagtataaattgataatattaaatattaccaattctatcagactatcagatgttcagacatctgaagtccttgttggtatcac

SEQ ID NO: 1002223 - DNA, 120 bp, Artificial Sequence
  ENSG00000245662_35 (sequence is synthesized)
aaaggcgctgcgtcctggcggctctgcgggggtttcgtcgaggcccagcaggcttgggtcgggagacccgggtgccggcgggggccgggctgggagacgccacggccgccatcagtcacc

SEQ ID NO: 1002224 - DNA, 120 bp, Artificial Sequence
  ENSG00000245662_36 (sequence is synthesized)
gaggtggggtgggaaagagaggttcgctgcggcttcaaggtctgagcacagccagtgggcagccacagcagaggcctccggtgtctgcagggcagagggctcggcctgtcccgaggcccc

SEQ ID NO: 1002225 - DNA, 120 bp, Artificial Sequence
  ENSG00000245662_37 (sequence is synthesized)
aaccgttccacccgtcgttgttcgggacttcgctcacctttcaggccccttaaggcctttgtccgttgtcgtcaggactaggttttctaatttgggtaacttgatgagtggtgctgccaa

SEQ ID NO: 1002226 - DNA, 120 bp, Artificial Sequence
  ENSG00000245662_38 (sequence is synthesized)
tactggaattaagaaatataaatttaatgcttggattgatgatataactcaatgaagagactgaccatgcttgttcacgtttcataaaaagaacataaaaaatagatttctattcatggc

SEQ ID NO: 1002227 - DNA, 120 bp, Artificial Sequence
  ENSG00000245662_39 (sequence is synthesized)
aaacagaagatctcacttctcaatctactgccatcatgggaccatgacctaaatatctcaacttaaggcaagaaaataaagtacaagcaaaccaaacttgaatttctcatgttacagaag

SEQ ID NO: 1002228 - DNA, 120 bp, Artificial Sequence
  ENSG00000245662_40 (sequence is synthesized)
atgcattcaggataatattttatattattgagaaaaagcaaaagaaaatcagaaatttgtattgatgaaaaaaaaaagttgttcttggccaaaaacatcaatcagcctcatctccagagt

SEQ ID NO: 1002229 - DNA, 120 bp, Artificial Sequence
  ENSG00000245662_41 (sequence is synthesized)
catataactgttgcaaatctcaggaagaagaaaaatgtttccttttctctgcagttccatagaataatccatattatagaactactactataactttaaaggttaaatgttaccttgtaa

SEQ ID NO: 1002230 - DNA, 120 bp, Artificial Sequence
  ENSG00000245662_42 (sequence is synthesized)
gagaaataaaattttgattggctatttaataattgtggcccttaaaataacatttaattttctattttatgatagtaataaatgtaagtttcatttgtcaaaccgtaagtccattggcca

SEQ ID NO: 1002231 - DNA, 120 bp, Artificial Sequence
  ENSG00000245662_43 (sequence is synthesized)
ttattatgtttttctttctacatgcatcacacttgcagcgtaagcgacaataataaacatgaaaacgatggcaatgaaaataaaatgtctattaaatgtatttgatttaatatttggaaa

SEQ ID NO: 1002232 - DNA, 120 bp, Artificial Sequence
  ENSG00000271646_0 (sequence is synthesized)
attttcgcttccccaggtcgcggcggcgggagcaacaagcagcggctcgtgagtccgcggctcgcacccaggggcgcccgcacgtgcggctagaacgtccgagtcggggtccggggcggg

SEQ ID NO: 1002233 - DNA, 120 bp, Artificial Sequence
  ENSG00000271646_1 (sequence is synthesized)
gggcgcaggcccgcggcggtaggggaggagagcgggcacccgagtctccatcctcagggtggcctgaaggttccaggagggcgtccggcgaaggcacggggctgcgaccatccagttagc

SEQ ID NO: 1002234 - DNA, 120 bp, Artificial Sequence
  ENSG00000271646_2 (sequence is synthesized)
agggctggtgtgactgttgagagtaaatgaaaattcgttttgtgacaccgaccacctccaaggaatgaaaggagcagtcagccgaaacgacagcattacttgcgtccttacctaattgga

SEQ ID NO: 1002235 - DNA, 120 bp, Artificial Sequence
  ENSG00000271646_3 (sequence is synthesized)
accttatccgtggctgagggtgccaccattggaggggccgccgccccctctgacaccacctggcgctccgctccatttaggagctagaacgaaaaggaggcccatcccccagtaagtcac

SEQ ID NO: 1002236 - DNA, 120 bp, Artificial Sequence
  ENSG00000271646_4 (sequence is synthesized)
agcccacgccaagatgagttctggagcctgtgcgaccgaagtttcttcaccgcagggcgaggtggacaagggtgtgagttactttgacttcaagacgtctcagtggcggctggttctgga

SEQ ID NO: 1002237 - DNA, 120 bp, Artificial Sequence
  ENSG00000271646_5 (sequence is synthesized)
gagaggctttatgctggagcacttccagcaaagttcggctggggcctccttaactcactggctggtcacccttggcctcggttttcaaccaaagcctaaggcctcagttttcaacgctgt

SEQ ID NO: 1002238 - DNA, 120 bp, Artificial Sequence
  ENSG00000271646_6 (sequence is synthesized)
aaatggaaataaatgagagaagaaagtacagcccgtgtgacaagtgcagcaagcaatgcaacttccttgggacctaccctttgtggtcccttgctttaaaagtatagattcacatttagt

SEQ ID NO: 1002239 - DNA, 120 bp, Artificial Sequence
  ENSG00000271646_7 (sequence is synthesized)
tagacctgtttcttcctcgcatgcaatttcaccagtcttttcccagacttctgtactcaacagaggaagttccttcctgggagaccatagctgtttgtatgtaaagagttgcgaaaaaac

SEQ ID NO: 1002240 - DNA, 120 bp, Artificial Sequence
  ENSG00000271646_8 (sequence is synthesized)
aaaagcaaaacaaaaaactccaacacctctctgtcacagaagtattgaattatatagactggaaaaatggaagtatccaagaaaacgcgtgtggtaagaaaatggctaaggtgcaggatt

SEQ ID NO: 1002241 - DNA, 120 bp, Artificial Sequence
  ENSG00000271646_9 (sequence is synthesized)
ctgttttgtggctctggtctcagaaatagacctcacatacacattattccttatcccctctattataatactcacttttttttttttttaagagacagggtaggccgggtgcagtggctc

SEQ ID NO: 1002242 - DNA, 120 bp, Artificial Sequence
  ENSG00000271646_10 (sequence is synthesized)
caaaaaaaaaaaaaaaaaaaaaagagagggtcttgctctgtcactcaggttgtgctatcatagcttactgtaaccttgaactcctggccttaagcgatcctcctgcttcaacctcccaag

SEQ ID NO: 1002243 - DNA, 120 bp, Artificial Sequence
  ENSG00000271646_11 (sequence is synthesized)
caagtagctgggactacaggcctgtgacagtgcctggcccaggcactgactttcttatgtcatatagcaatgaccactaagggaaagtctatacaaactatagaatagttgtcattcttt

SEQ ID NO: 1002244 - DNA, 120 bp, Artificial Sequence
  ENSG00000271646_12 (sequence is synthesized)
aagtctatacaaactatagaatagttgtcattctttacccaacccgggacacaagttaaaaacctagtattcattttttttttcctgtaccaaaacaatcatcttcctttatttttcctg

SEQ ID NO: 1002245 - DNA, 120 bp, Artificial Sequence
  ENSG00000271646_13 (sequence is synthesized)
gagcgggaagaggagagtggagaagaagggaagaatgcaaagtgtcactttgaacttctcgttcaccacacacgtgggagtccactcatgtcagcagcctccgtgcacaggccccaggtg

SEQ ID NO: 1002246 - DNA, 120 bp, Artificial Sequence
  ENSG00000271646_14 (sequence is synthesized)
aaagaaagaatgaggtctagttggaccagctaacactgcctgccttgtgtttacgaaaggcagctgcctctgtggtgtgatttcaggggagccagacagggccggggccacgaacctgca

SEQ ID NO: 1002247 - DNA, 120 bp, Artificial Sequence
  ENSG00000271646_15 (sequence is synthesized)
tcctgcatcctaagcacctattgccatgcgtgaggctaactggaaactcacttgctgggtgcagatagcttccaaactattgtgatgctcatgcttgacttcccaaggaacgtgtttcag

SEQ ID NO: 1002248 - DNA, 120 bp, Artificial Sequence
  ENSG00000271646_16 (sequence is synthesized)
gaaaggccattgccctcattatggtctttgataagcaggaagaagtttgttgttccttttttttcttaatgccctacttcgtgcaacatacatccaatcagtcatatcctattgacgcta

SEQ ID NO: 1002249 - DNA, 120 bp, Artificial Sequence
  ENSG00000271646_17 (sequence is synthesized)
cccctaaatatctctgggcctggcccgtgctcagggcactgccttcattcagttactgcacttgcctgctgcctgtgctcctggtctcctgcttggactcccccaggccagcagccacac

SEQ ID NO: 1002250 - DNA, 120 bp, Artificial Sequence
  ENSG00000271646_18 (sequence is synthesized)
tactgccaaaatccagtcgaaaattaacttcaggtaaagcacaattccaaacctaacactgcccccctcaaaagcctctctgtagccttcagaataaagaccatattatttgacaagaca

SEQ ID NO: 1002251 - DNA, 120 bp, Artificial Sequence
  ENSG00000271643_0 (sequence is synthesized)
gtccgcggtcacgtgaaggtgtcgcggcggctacgcccacctggacccagtttaccctgtactgtgctgcaaaatattactttctccccatctggaattcttcccttcctccttcctgcc

SEQ ID NO: 1002252 - DNA, 120 bp, Artificial Sequence
  ENSG00000271643_1 (sequence is synthesized)
gcagtggtgtactgagcactttcacaaagaacaaaattttaaataaattaaaaacgacacctgtaatttgagaagatgcttgatatcagaagaggagaagagtggagaggggtggagtgg

SEQ ID NO: 1002253 - DNA, 120 bp, Artificial Sequence
  ENSG00000271643_2 (sequence is synthesized)
caaaggagagcctccaaaccaaaagcctgcggcagaggccctaggaggcaagcacttaaccatgtttcaggactagaaacgaaacatgtgacaagacctttaaaaacaaatagaatggga

SEQ ID NO: 1002254 - DNA, 120 bp, Artificial Sequence
  ENSG00000271643_3 (sequence is synthesized)
tggaataaagttggatgagtaagcaggcatcaaatcattcagaaacttgttgtccaagttgaagaatttgtttagtattgtataataaatgcagaggaagctatatacacttataattta

SEQ ID NO: 1002255 - DNA, 120 bp, Artificial Sequence
  ENSG00000271643_4 (sequence is synthesized)
cattttttaaaggccacgttgtagctcaatcggatagtttgtcttttgatgggatgtagtatacagtatcatcatggtatattccaggcaaaaatatttaacttgaatctgtcaagcctt

SEQ ID NO: 1002256 - DNA, 120 bp, Artificial Sequence
  ENSG00000271643_5 (sequence is synthesized)
tgcatctaacacagtttataaaaaatacaacagatagatgaacaaactaaatgatgccagaggaagtaactagacagatccagaaggtgaaacattctgcaggataactggcccatctct

SEQ ID NO: 1002257 - DNA, 120 bp, Artificial Sequence
  ENSG00000271643_6 (sequence is synthesized)
tcaacaatttgtcatgataaaagcaactgctttatgaaaagaaatttaagggacataacagtttgaattggatcctggtttgaacagactgtctataaaatgcattttcaggaccattaa

SEQ ID NO: 1002258 - DNA, 120 bp, Artificial Sequence
  ENSG00000271643_7 (sequence is synthesized)
agaaatatgaatgtagatggactgagtattggataaaatagaactgtattgccatggaaaagatcattaactgaaaagagcaagtcacgaaatagtatgttacagcatctcattttggtt

SEQ ID NO: 1002259 - DNA, 120 bp, Artificial Sequence
  ENSG00000271643_8 (sequence is synthesized)
taaaaatgcacatatatgtatttatgtacaactaaaaaaatagtgggcttataccctaaggtgttagtattggtaatctttggaagtggaaatgtgtatttttttctttgtgtttgccta

SEQ ID NO: 1002260 - DNA, 120 bp, Artificial Sequence
  ENSG00000271643_9 (sequence is synthesized)
tgtgtttgcctatctttttcattgtaacttttgcagcacatagactactttcattatagtaaaagtttattttaccacaatttttttttttttagaaagagtctcactctgtcacccagg

SEQ ID NO: 1002261 - DNA, 120 bp, Artificial Sequence
  ENSG00000271643_10 (sequence is synthesized)
ctattttaccacaatttataaaaatttttgtttattttaattaagctattctatgttaaaataagtagccacccttggctgatgcataaagaaaaaattagaggaaggaaagaatggagg

SEQ ID NO: 1002262 - DNA, 120 bp, Artificial Sequence
  ENSG00000271643_11 (sequence is synthesized)
caaggaggcaaatcatgagaccatttcagaaatcaagacgaaatcaggaaagctaacattagcaagagtgaaccaaactgataatatctttgagtttaaaactgaagaatttaccaatga

SEQ ID NO: 1002263 - DNA, 120 bp, Artificial Sequence
  ENSG00000271643_12 (sequence is synthesized)
actgcataggaaagtaaagaaaagagagtggtcaagataggtcctggttttggggcctgaacatctgagtggttagtagaatcattaccagttgataacccatggaagagggtgggggat

SEQ ID NO: 1002264 - DNA, 120 bp, Artificial Sequence
  ENSG00000271643_13 (sequence is synthesized)
gggtggtgtcttgtaggttggttgacaggactgacccattgggaagataacgaagaagcaaagtatatgaaaagaggagaaagggtaaccagaggagggaggatacaaagggagtgatta

SEQ ID NO: 1002265 - DNA, 120 bp, Artificial Sequence
  ENSG00000271643_14 (sequence is synthesized)
gccatcagaaagatgagggacatgacatttgttgaggcagatggcggagaaaagaaagttaacatagatgtggttagttttgtggcattgaccaaaggaagattaaggtgatactatctg

SEQ ID NO: 1002266 - DNA, 120 bp, Artificial Sequence
  ENSG00000271643_15 (sequence is synthesized)
atggcttggaatgaaaaccaaactccctgccacaacatgatgatctttctctgcaacttcatattttgcctcttgttcctcatttgttaccactgagtcacaatggtctttttagtttct

SEQ ID NO: 1002267 - DNA, 120 bp, Artificial Sequence
  ENSG00000271643_16 (sequence is synthesized)
ctcatcatcatactatctaaagtagattccctcccttgttaacctctagcgcagccattagttccttcataacacttaccctaacttgcaagtattttgtttgttgatataatttttatc

SEQ ID NO: 1002268 - DNA, 120 bp, Artificial Sequence
  ENSG00000271643_17 (sequence is synthesized)
tgacttccccactaaaatgtaagctccatgagggcaaaaattgtgtgttttgtatactgatgcatctctagcacttggtatagcaggcattcaataaatatcattaaataagtttcaccc

SEQ ID NO: 1002269 - DNA, 120 bp, Artificial Sequence
  ENSG00000271643_18 (sequence is synthesized)
ttgtaaaaaaaaaaaatatatatatataaaatatattctctacttccaaaataacacactttcaccaacaacaagcactccagctaattaggcaataggccaataagcaaagaattatgg

SEQ ID NO: 1002270 - DNA, 120 bp, Artificial Sequence
  ENSG00000271643_19 (sequence is synthesized)
tatattagtcaagattggctagcttatgttctgacaataaacaatttcaaaatctcagtttcaattttaaactcaaagatactaataaacatttgttctttgctcacacaaagtctaata

SEQ ID NO: 1002271 - DNA, 120 bp, Artificial Sequence
  ENSG00000271643_20 (sequence is synthesized)
tggaacaggcttagagttgtcctccaaccagtgtctgagcaatccagaccactttgatcttgtaactctgccatcccaacatgagattccactttcactgcagaagaggaaatctgtagc

SEQ ID NO: 1002272 - DNA, 120 bp, Artificial Sequence
  ENSG00000271643_21 (sequence is synthesized)
atcatgcagcagcttgtcactacctcagccctcctacttccacttgcatttcactagctagaacctttcacatggctccaccaaactgcaatgggactgggaagggagaatcagatatta

SEQ ID NO: 1002273 - DNA, 120 bp, Artificial Sequence
  ENSG00000271643_22 (sequence is synthesized)
gggagcatttataatgccttccaagggtgtgtttcactgcttccaaacttgcttatgatgatgtttttcatttatgtaatgaaatgccatatgttcttagtgtgtattctcagcataacg

SEQ ID NO: 1002274 - DNA, 120 bp, Artificial Sequence
  ENSG00000271643_23 (sequence is synthesized)
agtacatttggagaatattaagtcagtggactttccttcttgaaaattcctggttctgggcctatcattaaccccactgattgaaccagtggaaatagttgcctcttcgaatggagagaa

SEQ ID NO: 1002275 - DNA, 120 bp, Artificial Sequence
  ENSG00000271643_24 (sequence is synthesized)
ccctgctgaaggcagctttgagtttcaaaatagtgtgtttcaagtccacatggagacgatagcctgaaagtaagcacttatgatttttggaggagtctttgttattaaggagaaaagagg

SEQ ID NO: 1002276 - DNA, 120 bp, Artificial Sequence
  ENSG00000271643_25 (sequence is synthesized)
cttacagaagtcagattcagaagactgtagtatttttacaataaatgagagtaaacagtataaggatttgatgtaagggaagttcctgcagtgcaagaaagaaagtccttttggtgctga

SEQ ID NO: 1002277 - DNA, 120 bp, Artificial Sequence
  ENSG00000271643_26 (sequence is synthesized)
gcggaacagtctaagagagaaaaggtgaagaacaaaaggaaaatgtaaatgtggtattcacacttccctactccacactcaggataaacctagagtatgaggtagaggcgggaatctaga

SEQ ID NO: 1002278 - DNA, 120 bp, Artificial Sequence
  ENSG00000271643_27 (sequence is synthesized)
ggggaggaagcatagaataggaacacccaaatagacttgatgaaacaaaaaacatcaaggatggctcccgtgtcacctgggaagacacacttcatgtaaggaatggaaaaaaggcaatgg

SEQ ID NO: 1002279 - DNA, 120 bp, Artificial Sequence
  ENSG00000271643_28 (sequence is synthesized)
taagggacaggggccctggattttttacaacatgcgatagagaactatttgtctccttaatttatttaactttaaaaaataataatgaatgaaagaaaaattacccatttttcaaatatg

SEQ ID NO: 1002280 - DNA, 120 bp, Artificial Sequence
  ENSG00000271643_29 (sequence is synthesized)
ggtgtgtaagttttttccactttgtacaaaaaattttaaagaaacgaaaactgctgaacaccttatattcagaattactccctgtataagcccattccaattccatatactgctgattaa

SEQ ID NO: 1002281 - DNA, 120 bp, Artificial Sequence
  ENSG00000271643_30 (sequence is synthesized)
atttccatcagttggcagttctctaatatcagtttcactgctatttaactaactactgccctttgctaccagtgtctctcttggatgagagtcactttacttgaataagataacttctga

SEQ ID NO: 1002282 - DNA, 120 bp, Artificial Sequence
  ENSG00000271643_31 (sequence is synthesized)
gaataaatctatgcactattttggaagaattgctctatagagtaaaaaataattctggataattgaaagttatcttgtgagtatctggacattaaggatacatttcaagactcctgtttt

SEQ ID NO: 1002283 - DNA, 120 bp, Artificial Sequence
  ENSG00000271643_32 (sequence is synthesized)
cactaaaatccaatatttgtttaagcacttcaagttaaagaggagcaccttcccctttcaccctgactatcgttgttaattcgtttttgaagctatataagaacgtttctttaatcggtt

SEQ ID NO: 1002284 - DNA, 120 bp, Artificial Sequence
  ENSG00000271643_33 (sequence is synthesized)
ttcccttaggcatacattagctctctgttcaagacttagtagcagagagtagtaagtaaatggttattagtggttcttcatataaaacacatttgagtttcttagaagaaaactatgcat

SEQ ID NO: 1002285 - DNA, 120 bp, Artificial Sequence
  ENSG00000271643_34 (sequence is synthesized)
aaagattactttcagatatcatgtctgtagttcgttaatagagaagtttctctgaacgtgtggaacactgtaataagataaataaatttttaaaaagaaaaagtaagcatatatacaaaa

SEQ ID NO: 1002286 - DNA, 120 bp, Artificial Sequence
  ENSG00000276691_0 (sequence is synthesized)
acctgagagagtaactgtgtggacatggggttagtggcaaggagagggaagggttcagggttacacatatcaggaaccactctgtcttgcataaagtcatgaagttatgaggagatcaga

SEQ ID NO: 1002287 - DNA, 120 bp, Artificial Sequence
  ENSG00000276691_1 (sequence is synthesized)
aaccaagctcggttacagaggggcaggtacacgaggcccagccccatccctcgtagggagagctgggccctacactcgactcacaggaccatgcgggaactcaagtgtgcaaaggtcctc

SEQ ID NO: 1002288 - DNA, 120 bp, Artificial Sequence
  ENSG00000276691_2 (sequence is synthesized)
agcagttaaacgcaagcactctagagctaacccgcctgggttcaaatccatctcatgacttacgaatgactgtgtgtgagttacttaatctctctgtgctcactttcatctgtaaagtgg

SEQ ID NO: 1002289 - DNA, 120 bp, Artificial Sequence
  ENSG00000276691_3 (sequence is synthesized)
gttatagtcaggattaaatccatcatgtgtaaaaccatcagtgtctggatgtgattagtggtgtactgatgttatctgctattattcttatcatcactacctgtacaggaaatgcagaaa

SEQ ID NO: 1002290 - DNA, 120 bp, Artificial Sequence
  ENSG00000268970_0 (sequence is synthesized)
cccaggctggagtgtggtggcaagatcagagctcactgcagcctccaactttctggctcaagtgatcctcccacctcagcaccccaagcagctgggaccacaggtgtggactaacacacc

SEQ ID NO: 1002291 - DNA, 120 bp, Artificial Sequence
  ENSG00000268970_1 (sequence is synthesized)
aacacacctggctgtttttttttatttttagtagagatgaggtcttactatgttgcctaggctgatttcgaattcctgggcttaagcgatcctccctccttggcctctcaaagtgctggg

SEQ ID NO: 1002292 - DNA, 74 bp, Artificial Sequence
  ENSG00000268970_2 (sequence is synthesized)
tctctaaaatggacaggaggcatccctgtgatattaggggtaatatcacggcacatcagaaactatccaccaat

SEQ ID NO: 1002293 - DNA, 120 bp, Artificial Sequence
  ENSG00000268970_3 (sequence is synthesized)
taggggtaatatcacggcacatcagaaactatccaccaattagtacccggagaatctagtcctgcagggcaagaggatgacagcagacgacacctggggtccagctgaggagaaagccag

SEQ ID NO: 1002294 - DNA, 120 bp, Artificial Sequence
  ENSG00000268970_4 (sequence is synthesized)
gacccgccccctcgagaccctgcccttcaaaacaccacttccagaccttgccctcaagatgacgatcaccctctggcccggcctccaggcagcctcctcattcttgccccgcccagattc

SEQ ID NO: 1002295 - DNA, 120 bp, Artificial Sequence
  ENSG00000279418_0 (sequence is synthesized)
ttcctccattttaaaattttattctagttaccacattgttcttgcaattgcttggatttttcagaatagtaataaataataacgggaatcctaggcattcgtgtttttctatgtttttaa

SEQ ID NO: 1002296 - DNA, 120 bp, Artificial Sequence
  ENSG00000279418_1 (sequence is synthesized)
caggattttctctaatgtttcgctattaaataccatgcaggaaattgggaaataatatcacaacccaaggtaaatggagctaacagcatagatgggacaagctaagacatgaggaccagc

SEQ ID NO: 1002297 - DNA, 120 bp, Artificial Sequence
  ENSG00000279418_2 (sequence is synthesized)
cctgggaagaccccatgagaagcagggagagggtgggggcagtcatgggcaggctgggaaactccctctgctcactgagcctgtgggagcaggcccctggagaccccaggtttcacatag

SEQ ID NO: 1002298 - DNA, 120 bp, Artificial Sequence
  ENSG00000279418_3 (sequence is synthesized)
tagccacacgaagcagaaagtcagaagcacagaaggcttcttcccaaggtggtgtggcaggccaggaagcaggtggcagggcgctggcatgaaggccagccagagagcagaacgccaaac

SEQ ID NO: 1002299 - DNA, 120 bp, Artificial Sequence
  ENSG00000279418_4 (sequence is synthesized)
accagcccctggggttccactggcatcaccagctcccgccgtgctaagtggaattttcaggtggaggagagttgggaaaggatagaagtgatatgctatggaaatccttacattgtatgc

SEQ ID NO: 1002300 - DNA, 120 bp, Artificial Sequence
  ENSG00000260260_0 (sequence is synthesized)
cttttcggggtcgagtccgagggggaagaggtttgttaatacgttcgccatgtgctacgatcttgggacgaactgagccacgagcgtggctttgagggccgtccgaacgctgcaggccgg

SEQ ID NO: 1002301 - DNA, 120 bp, Artificial Sequence
  ENSG00000260260_1 (sequence is synthesized)
tcgcgagccggctgcaagttttgaacctaagtaaacctcaatccggagggcctagcggtaaggtgggcgctgtgtctattgaagtgcttagcaataaagaaaggtagtgagttgattcgg

SEQ ID NO: 1002302 - DNA, 120 bp, Artificial Sequence
  ENSG00000276698_0 (sequence is synthesized)
ggcatgagccactgcacctggccttatcctttttttttgaacagtgcaaatgtcaccttctctataaagccttcccttacatctcctcccaggtttgtttatagcatatctcactgtagt

SEQ ID NO: 1002303 - DNA, 120 bp, Artificial Sequence
  ENSG00000276698_1 (sequence is synthesized)
tcccttgctaatttcaaactcctcagaggaagactgtaatttattcatctctgtttcctcaggacctagcagtgtttttgtatatgttaggcagcttaatacatgatcttcgcatgaact

SEQ ID NO: 1002304 - DNA, 120 bp, Artificial Sequence
  ENSG00000276698_2 (sequence is synthesized)
ggtttaccccctgtacatgatgagagactagagttgccaccaagttacctatccgggggccagcctgtgggatcagatgggcaggattgggtgggcccccttaccatggtgtgccctgga

SEQ ID NO: 1002305 - DNA, 120 bp, Artificial Sequence
  ENSG00000276698_3 (sequence is synthesized)
aaactgctcatcttgctagattgaggatatagagctggcttccaacagaactttggaaccatcctgccagcaaggtcagactgtcaataaatgggaatttattgcatgcctgtggcataa

SEQ ID NO: 1002306 - DNA, 120 bp, Artificial Sequence; identical to SEQ ID NO: 927910
  ENSG00000276348_0 (sequence is synthesized)

SEQ ID NO: 1002307 - DNA, 120 bp, Artificial Sequence; identical to SEQ ID NO: 927911
  ENSG00000276348_1 (sequence is synthesized)

SEQ ID NO: 1002308 - DNA, 120 bp, Artificial Sequence
  ENSG00000276348_2 (sequence is synthesized)
caacatggtggaggccagcccggccgcaggtgagggaagatgccacagcaaacctctgagcaaccaagatgacaagcacctgcttggaaaaggtgacaagccacaaggccataggcccag

SEQ ID NO: 1002309 - DNA, 120 bp, Artificial Sequence; identical to SEQ ID NO: 927913
  ENSG00000276348_3 (sequence is synthesized)

SEQ ID NO: 1002310 - DNA, 120 bp, Artificial Sequence; identical to SEQ ID NO: 927914
  ENSG00000276348_4 (sequence is synthesized)

SEQ ID NO: 1002311 - DNA, 120 bp, Artificial Sequence
  ENSG00000276348_5 (sequence is synthesized)
ggagtcctcaatccttcaagcctttcttcatgtttttctaagttgggcttcctaaacttctcactcttgtgaatagggggaaacattggcctttggctcttgcatgagccttgacagttt

SEQ ID NO: 1002312 - DNA, 120 bp, Artificial Sequence
  ENSG00000276348_6 (sequence is synthesized)
ggttttctgggctcctcgtgcaccagtttgctccttctggctgccatgaggtcatgtagctcctgggaagcccgcatgttcccagtaggcatgctctggagatggccctggggcacttga

SEQ ID NO: 1002313 - DNA, 120 bp, Artificial Sequence
  ENSG00000276348_7 (sequence is synthesized)
acaaacttgaggctgggtctctgactttgtggccattccaggctcaaattcactaacaacctcctccataagacacagctttcttggatcttgggagacagacactctagggtgtagaga

SEQ ID NO: 1002314 - DNA, 120 bp, Artificial Sequence; identical to SEQ ID NO: 927918
  ENSG00000276348_8 (sequence is synthesized)

SEQ ID NO: 1002315 - DNA, 120 bp, Artificial Sequence
  ENSG00000276348_9 (sequence is synthesized)
agcctttgaagattgggctcctaagctcctgctctgctgggtgctgcctgtgaggctgtacgtgaggggcttagatggccacctgccctcctgtccagctggaggaggcttcaagggttc

SEQ ID NO: 1002316 - DNA, 120 bp, Artificial Sequence; identical to SEQ ID NO: 927920
  ENSG00000276348_10 (sequence is synthesized)

SEQ ID NO: 1002317 - DNA, 120 bp, Artificial Sequence; identical to SEQ ID NO: 927921
  ENSG00000276348_11 (sequence is synthesized)

SEQ ID NO: 1002318 - DNA, 120 bp, Artificial Sequence; identical to SEQ ID NO: 927922
  ENSG00000276348_12 (sequence is synthesized)

SEQ ID NO: 1002319 - DNA, 120 bp, Artificial Sequence
  ENSG00000276348_13 (sequence is synthesized)
cacctgggctgtgttcacacaggctttcccacttttcggggctgctagattgctggttttcacatgggtgttggacacgggaagagcctggttgacagcaagccaggatcgacgcacacg

SEQ ID NO: 1002320 - DNA, 120 bp, Artificial Sequence; identical to SEQ ID NO: 927924
  ENSG00000276348_14 (sequence is synthesized)

SEQ ID NO: 1002321 - DNA, 120 bp, Artificial Sequence
  ENSG00000276345_0 (sequence is synthesized)
gctgtgccaggcggcggccgtgcggggcgggcgcgctgctccttccgcctcgcggaccccggaagcgcgcgtggccgccatggcgcggaatgtggtgtaccccctgtaccggctgggtgg

SEQ ID NO: 1002322 - DNA, 120 bp, Artificial Sequence
  ENSG00000276345_1 (sequence is synthesized)
ccggctgggtggcccacaacttcgggtgttccgaaccaacttcttcattcagctggtgcggcccggtgtggcccagcccgaggacaccgtgcagttccggatccccatggaaatgacaag

SEQ ID NO: 1002323 - DNA, 120 bp, Artificial Sequence
  ENSG00000276345_2 (sequence is synthesized)
ggtggacctcaggaattacctcgagggcatctataacgtgcccgtggctgctgtgcggacacgggtgcagcatggctctaacaagagaagagatcacagaaacgtgaggatcaagaagcc

SEQ ID NO: 1002324 - DNA, 120 bp, Artificial Sequence
  ENSG00000276345_3 (sequence is synthesized)
tgcagctggcccatggacagaccttcacgttcccagatctgtttcccgagaaagacgagagccctgaaggcagcactgccgacgacctctacagcatgctcgaggaggagaggcagcaga

SEQ ID NO: 1002325 - DNA, 120 bp, Artificial Sequence
  ENSG00000276345_4 (sequence is synthesized)
cagaggcagagcagcgacccgcggcggggcggcgtccccagctggttcgggctgtgacggggtggccagcagggacgcgccccaggtgggcagctgtggcagagcagcgacccgcggcgg

SEQ ID NO: 1002326 - DNA, 120 bp, Artificial Sequence
  ENSG00000276345_5 (sequence is synthesized)
gcatccccagctggttcgggccgtgacggggcggccagcagggacgcgccccaggtgggcagctgtggcagagcagtcccgacacctaaataaaagtcttgctgcaggagaaagagccgg

SEQ ID NO: 1002327 - DNA, 120 bp, Artificial Sequence
  ENSG00000233739_0 (sequence is synthesized)
aggaacgagagtccagccaagtccccccggtctctcccgggttggcctgagccacctgctatccctggcagaccaggccctggggagctgcctctgtcgctcaccggaagcgttggtccc

SEQ ID NO: 1002328 - DNA, 120 bp, Artificial Sequence
  ENSG00000233739_1 (sequence is synthesized)
ggtggccgcgattgtcacgtcacttccggcaagacgcggaagtcccggctttccccccactggatatttgctccaatccctgcagacaatccttcccttcccggctcccgggacgctcgg

SEQ ID NO: 1002329 - DNA, 120 bp, Artificial Sequence
  ENSG00000233739_2 (sequence is synthesized)
aaccaagaacgagaacaagtattggcggaagctcgctgttagtaggaacaagcgaaaacagaggaacggtctggacaggctgacagcgtctaaccccgccctttgccctgccgccgccgc

SEQ ID NO: 1002330 - DNA, 120 bp, Artificial Sequence
  ENSG00000233730_0 (sequence is synthesized)
aaagtttatacctgcttgtggggacatgagtgaagaaagagaggggactttgaaacaagagaagagagcaaactcaaaaggtttttcatggcagcatgtgacaagatgatgctgaaaaat

SEQ ID NO: 1002331 - DNA, 120 bp, Artificial Sequence
  ENSG00000233730_1 (sequence is synthesized)
ttatatggaaattcaaaggatcaagaatagctgaaacatcactgaagaagaacaaagtgggctgaactcgctctactagatatcaagatttataagcaactacagtatttaggacagtgt

SEQ ID NO: 1002332 - DNA, 120 bp, Artificial Sequence
  ENSG00000233730_2 (sequence is synthesized)
aaaaaaaaaaaaactaaaaggaaaaagagcccagagactgacttttgtgtatgtggacagtttgtttatgatgaaagtaccactgctatgcactgtgggaaaatgtcctcaaagaatgac

SEQ ID NO: 1002333 - DNA, 120 bp, Artificial Sequence
  ENSG00000233730_3 (sequence is synthesized)
tcaaagaatgacactagggcaactgggtatccccatgtaaaaacaattaaccctaatctcacatcacacacaaaaatcaactccatttggggtatatacttaaatggaaggtaaaactat

SEQ ID NO: 1002334 - DNA, 120 bp, Artificial Sequence
  ENSG00000273483_0 (sequence is synthesized)
actccaagccacttgactcttccaggaatgacagtgatgggtgaaaacaaacagtaccgaagatagctgaggttttttggctccacttcacccaagtcctgacgctgagcctgtagaaaa

SEQ ID NO: 1002335 - DNA, 120 bp, Artificial Sequence
  ENSG00000273483_1 (sequence is synthesized)
gagcctgggagccccacagcaataaccagaggagaagagttctgctgcattgcatgttcctagtttaacctatctgaaccagaaatgtgagccaggatggtaactttcattcccttgggg

SEQ ID NO: 1002336 - DNA, 120 bp, Artificial Sequence
  ENSG00000273483_2 (sequence is synthesized)
aatacctcgaacagactgaaaaacaaccatttgctgctttacctgcctttggtagggatctcttcttcgtttctttttcagctgtttcagaatcttcaatggcagcacactggataaagc

SEQ ID NO: 1002337 - DNA, 120 bp, Artificial Sequence
  ENSG00000273483_3 (sequence is synthesized)
ctttcaaggacatctttctagctttaatctcccttagagagaacctttacccagcagattggtctgttctctgtccctgggacagatcatgtgctttcccacctactactctctgataag

SEQ ID NO: 1002338 - DNA, 120 bp, Artificial Sequence
  ENSG00000273483_4 (sequence is synthesized)
aaattgcccactcgtctctcaagctatccagatactccctacacttcaaggagcagcttaaattctagtttcttttttttccctacattttcaaataaactttattgatttctccatctc

SEQ ID NO: 1002339 - DNA, 120 bp, Artificial Sequence
  ENSG00000232065_0 (sequence is synthesized)
gttctccttcctgtgccgagtgtggtttgctatcaagcggtggcagttcagccacaatcaggggcagggggagggagaggccccccgaagaggcagaggccctgcctcggccgccctgag

SEQ ID NO: 1002340 - DNA, 120 bp, Artificial Sequence
  ENSG00000232065_1 (sequence is synthesized)
gtgccatagctctccaggagaacccctctgtgtcacagcgaacctcagtcactgacactcaaaagaaggaattatttcaactcaataataaacaaataaccctattttaaaatcagcaaa

SEQ ID NO: 1002341 - DNA, 120 bp, Artificial Sequence
  ENSG00000273481_0 (sequence is synthesized)
tgtaaacgaccgtttgagtaactaaccaaattaccgtaattgcaatcaatgacttttccccctcccgtatgctacaagactcccttagtaaatcaggccgtgggatggacgctgggttcc

SEQ ID NO: 1002342 - DNA, 120 bp, Artificial Sequence
  ENSG00000273481_1 (sequence is synthesized)
tagaagggcgcgcaggaagacggcggacggggaagacgttctttctgactgcccttttcctacttatcttggaggacgatgcggagtttaagctccttaacatttcgggaatggcgcggt

SEQ ID NO: 1002343 - DNA, 120 bp, Artificial Sequence
  ENSG00000273481_2 (sequence is synthesized)
caaccgcgtcagtcttttcgccgttagaggcccgactcgaggccgtggttctgcctccgaggtcaccaacctgcctgggcagcctgtgacctccagcatccatatgcccagccctccagg

SEQ ID NO: 1002344 - DNA, 120 bp, Artificial Sequence
  ENSG00000273481_3 (sequence is synthesized)
gaggggctggacagggccaggttgggagaggtgagtgaaacgacaaaggcttggagggcacaatcccttcttccaaacaaaacgaaaccatattaggccaaacaaataaacaaaaacacg

SEQ ID NO: 1002345 - DNA, 120 bp, Artificial Sequence
  ENSG00000273489_0 (sequence is synthesized)
gtcatcttcctttggcggcagaagctcctaacgcagcaacttccaagctctgtagtacagtctccacatgtgcttgacctgggagcagctggctctcatctgtgtttagggccaagcctt

SEQ ID NO: 1002346 - DNA, 120 bp, Artificial Sequence
  ENSG00000273489_1 (sequence is synthesized)
ctttacttactgctgtcttcccaccagaaggtagtgacaaatatatcaagggtagtgtcctgcattttgatccttttgagttaattctctggaggactgaccaaggaaaggccgattcct

SEQ ID NO: 1002347 - DNA, 120 bp, Artificial Sequence
  ENSG00000273489_2 (sequence is synthesized)
taccttatcactgcacctcatgctttcctgttttgagaacacaaagaaacgttacttaagggccacactcaaaggacaccctagaaatgaaagctctgcagtaaggtttggattattcaa

SEQ ID NO: 1002348 - DNA, 120 bp, Artificial Sequence
  ENSG00000273489_3 (sequence is synthesized)
tttgtaaactgagaaagcatgatccctgtttggaataaaatcagctgacaattcactccagaatgcatgatcacaaagccacgatgtaaagcagaccaggaggtggaaagggcagagagg

SEQ ID NO: 1002349 - DNA, 120 bp, Artificial Sequence
  ENSG00000273489_4 (sequence is synthesized)
ggatctcattactaagagtcccaccactcggccccagtgacccaggacttttatctggcatatttctcagcttagttttttcaagatttggcccataaagtgtctttcccctttaatggg

SEQ ID NO: 1002350 - DNA, 120 bp, Artificial Sequence
  ENSG00000273489_5 (sequence is synthesized)
gacagggatccagaattttcccaaactgcaacacttctaggttctctccctttactatcttttctacagtgaattttccatttcagttcagtctttccttctagttccagcctgtacaag

SEQ ID NO: 1002351 - DNA, 120 bp, Artificial Sequence
  ENSG00000273489_6 (sequence is synthesized)
catatcccctttaaagaggaacataagtccaagtggacaaagcaaataaaataagggtggtcattaacagtagatagaagaacatttcatgaaataatttaccagtggtctttaaataag

SEQ ID NO: 1002352 - DNA, 120 bp, Artificial Sequence
  ENSG00000273489_7 (sequence is synthesized)
tggaagcctccccgcagaaactttgtgagcatggccggtacttgttcatctgagcaccgtctcaaaggaaaacacccaaaggcccttcgaaagcgtatcactttccttttggaagcctaa

SEQ ID NO: 1002353 - DNA, 120 bp, Artificial Sequence
  ENSG00000273489_8 (sequence is synthesized)
ataaaactcacctttctgggggaaaaaacacaactgtaaagtacaaaaacattttaaaagttcacttcaaaagtagtttgagcaaatacaagagatatcttgtagcatccatatataaca

SEQ ID NO: 1002354 - DNA, 120 bp, Artificial Sequence
  ENSG00000273489_9 (sequence is synthesized)
ttttattaagaaaatgaacaaaatacattctttctccatatgtacattacatacaacataattctacaattgccatttttagcagatcactcatttatttattcacaaagtagaattaac

SEQ ID NO: 1002355 - DNA, 120 bp, Artificial Sequence
  ENSG00000273489_10 (sequence is synthesized)
acatttaccaaagctgggatctgaaaattatttgtactataagaaaaaaaaaatcctaaaaagtccatacagattggataaaagataagccagagatcatgaggggaatggggaagattg

SEQ ID NO: 1002356 - DNA, 120 bp, Artificial Sequence
  ENSG00000273489_11 (sequence is synthesized)
cagaacacgacagagcccaacaatgatttgaaacaattgatgtcagaagagatctgatacccataaagcacttctgtttaaaagctccaaccagctcatgccagctttccagagtcccat

SEQ ID NO: 1002357 - DNA, 120 bp, Artificial Sequence
  ENSG00000273489_12 (sequence is synthesized)
gatttccatttaagaccatgtggatactttaggatacggccctgaccccacattgccacagaagagggggtaagagtagaaccaaacaagttagcggttttctccacacattgagtctca

SEQ ID NO: 1002358 - DNA, 120 bp, Artificial Sequence
  ENSG00000273489_13 (sequence is synthesized)
tctgaaatactactgaggtgcaaaatgtgtgaatctcagctaatgtgcacagaaatacaattttttttgagagacatttgcttaaacgtggtaaagaactcttgttttatggactccttg

SEQ ID NO: 1002359 - DNA, 120 bp, Artificial Sequence
  ENSG00000273489_14 (sequence is synthesized)
cttcatgttcattttgtctgtttttcttttggcttttgacaatagctcatcctttttgagtgtgagtttaattatggccatattaaaaagtccatcataaacaaagactcctcctcatgg

SEQ ID NO: 1002360 - DNA, 120 bp, Artificial Sequence
  ENSG00000273489_15 (sequence is synthesized)
tccatatgcccataatggtgcataacggacttagaaattccaatgagtcttagggttgaaatttccaatgacctgagcaaggcagctccctatagcttctggataacattttacacccag

SEQ ID NO: 1002361 - DNA, 120 bp, Artificial Sequence
  ENSG00000273489_16 (sequence is synthesized)
agttcaggcttaaacagacctatcaacacaattattttcggattgtctgtctagaaaacggcaatgctcaaaggaatataaataagggtggggggacatatgcttccagcctggtccttt

SEQ ID NO: 1002362 - DNA, 120 bp, Artificial Sequence
  ENSG00000273489_17 (sequence is synthesized)
ctccatgtggtaaaaaacaatggaatggctgtgttaattttttttttaatcttttctggcctttactatgtttggtaatggaaataagtcagggaaaacaaaatgaacaggtctcatcac

SEQ ID NO: 1002363 - DNA, 120 bp, Artificial Sequence
  ENSG00000273489_18 (sequence is synthesized)
ttaattaatactggtttttcttctttatacttagtaatttcctagttttttaaatgataaacctattttgacaatcactaacatcaatacattttatcgtaagtcccatataagatattt

SEQ ID NO: 1002364 - DNA, 120 bp, Artificial Sequence
  ENSG00000273489_19 (sequence is synthesized)
aacattctccaactttcggctcagctggttacagcaccacatttccagtccaggagatgttttcacaaacagaaggagcgattcacagcattaataagcagacttggaaagacagatttt

SEQ ID NO: 1002365 - DNA, 120 bp, Artificial Sequence
  ENSG00000273489_20 (sequence is synthesized)
attggctatggaggaagttgtatctttcttctcaatctaattttcagtccaattttggttttgagaatctatctctatcagaggggatcttaatttctgactactgagtacttccaattt

SEQ ID NO: 1002366 - DNA, 120 bp, Artificial Sequence
  ENSG00000273489_21 (sequence is synthesized)
ataaaagagctgacttttaaaaaattctaacatctttcccaaactgtttagaaatatgccatatttgaaagacggaatactgtttgttcccaagaccaacacaagaaaaggaggtcctca

SEQ ID NO: 1002367 - DNA, 120 bp, Artificial Sequence
  ENSG00000273489_22 (sequence is synthesized)
tcttcgctttcctgtactcttcctctgaggctaataactcaactgtacatagcttttggagtgggagcaagataagaatctctttaaaaagagcattttaaaaatgtatgtgtatgtgta

SEQ ID NO: 1002368 - DNA, 120 bp, Artificial Sequence
  ENSG00000273489_23 (sequence is synthesized)
tgtatgtatatttataaagtatgtacgcataaaggaatctgttcacaggaaaatgttacattattttcaactctaaattatgcagaagactatacaaagtagttaattaatactatacta

SEQ ID NO: 1002369 - DNA, 120 bp, Artificial Sequence
  ENSG00000273489_24 (sequence is synthesized)
tctactttcttttcaaaagacatttcacacaaatccaaaaagtaagccggcttaaagaataagacaatcataacacctcttgcccaggctaattgtaatgcttaggaaaggaagtccact

SEQ ID NO: 1002370 - DNA, 120 bp, Artificial Sequence
  ENSG00000273489_25 (sequence is synthesized)
tttatttttctgaacggatgatttgtaagtaaggaagaaaattgtttacaattgatcagtcaccaaaataatttttttttctgggaaaggaaaaaaaatcccaagaaaaagatcagtaca

SEQ ID NO: 1002371 - DNA, 120 bp, Artificial Sequence
  ENSG00000273489_26 (sequence is synthesized)
tgactctttaataaatttatcttcccccacggaagactactcctaagtaaccttttggactttgatatcttattaaatttgggagtgagttgataattacttggtattatttataacttg

SEQ ID NO: 1002372 - DNA, 120 bp, Artificial Sequence
  ENSG00000273489_27 (sequence is synthesized)
gtattatttgaggcaacacactacagctgtcacttgcaaacacctgatggcatggctctaatggtgtaggatcctctcctttgttgtaactgaatttataaagatttataaagctctgcc

SEQ ID NO: 1002373 - DNA, 120 bp, Artificial Sequence
  ENSG00000273489_28 (sequence is synthesized)
agttgcaatgggattgggatttattctacacgcctcctctaatttaatcaatcactttacagatgtggaggaaacctaaataaaaaaccaaaattatgaaatacttctaatgccaaaccc

SEQ ID NO: 1002374 - DNA, 120 bp, Artificial Sequence
  ENSG00000273489_29 (sequence is synthesized)
agatctcattattgcttggcaaagcagaattaacagagacccttgggatgacatataattaatttaaggcaaggaaactagtatcagttcaattctgtgttacaagttatacatgaaatg

SEQ ID NO: 1002375 - DNA, 120 bp, Artificial Sequence
  ENSG00000273489_30 (sequence is synthesized)
acaattttcctcctatgttaaagggctagaaaataaaaccaaccaaatgacatgagctaaactgtaacaaaggctttcttgagatttgttaacaacggagaaataaagctcaaaattggc

SEQ ID NO: 1002376 - DNA, 120 bp, Artificial Sequence
  ENSG00000287157_0 (sequence is synthesized)
agggcttaaggctacaacagcaagaattgctaaagcctgtccctgcatagtgttgcctatagtttaggatgcctcagagaatggggagaaaaaaggacaactgcagcctaaatcttccac

SEQ ID NO: 1002377 - DNA, 120 bp, Artificial Sequence
  ENSG00000287157_1 (sequence is synthesized)
tctgagtaagtaccaaaaacaactacccgaattaaggccatctggaacacttagtccaggtggtgaaagcagagagctaatgaggccaacgctgtggttcatacttatgtaagggccaag

SEQ ID NO: 1002378 - DNA, 120 bp, Artificial Sequence
  ENSG00000287157_2 (sequence is synthesized)
caaactcagacaaagaaagcactgtgccccagccacaggcagaacccggcccaccagctgtctcacaaatcaaacccgtggtcacccagaggatgagagaggcacatacagagggagatg

SEQ ID NO: 1002379 - DNA, 120 bp, Artificial Sequence
  ENSG00000287157_3 (sequence is synthesized)
actcagtgctcactctgcctcattccaagaaaaatgcaaaggaatacctcctactgatattggataagatgtgctctgcagagaagaagcctagtccacctgtccacccctgcctggtaa

SEQ ID NO: 1002380 - DNA, 120 bp, Artificial Sequence
  ENSG00000287157_4 (sequence is synthesized)
caagatgcagaaaggtgaaataagtaaactccatttccttcaagccacagctcaaaagccaccttctcggaggcctgctctgagaccagaacggcaggtgagacctacaccttctcccat

SEQ ID NO: 1002381 - DNA, 120 bp, Artificial Sequence
  ENSG00000287157_5 (sequence is synthesized)
agtaacgtgcccagccaacaacatcaggtacagaagagtgagcagtatttgctttcctaacttcccactcaactgtgactccccaagggaaggggctgtgtttctcaatcctttccccca

SEQ ID NO: 1002382 - DNA, 120 bp, Artificial Sequence
  ENSG00000287157_6 (sequence is synthesized)
aacattggtatggatgctagacatggcctatgcccttgaggattttggaatctcaagaccgtcacctccattcttgaacaccataaactgctcccaggagcaaatgccagcagatgacag

SEQ ID NO: 1002383 - DNA, 120 bp, Artificial Sequence
  ENSG00000287157_7 (sequence is synthesized)
cagcagacaccatctattgggctgtcctcatgtgcaagcataactctgaaaaacatttgattatcagaccctctccacaactccacgaagccagcagtgccatcctgcttgcacaactgt

SEQ ID NO: 1002384 - DNA, 120 bp, Artificial Sequence
  ENSG00000287157_8 (sequence is synthesized)
ggaagcagccttagagatattcaggaacttgtttaaggttacacagcttgagagtggccaatgcagggattgaccctagtgctctcaaccacaccaaatactgcctcccacgagaggaga

SEQ ID NO: 1002385 - DNA, 79 bp, Artificial Sequence
  ENSG00000287157_9 (sequence is synthesized)
ctatgttctcacttatgagtaggaggctcccagtgctaatatccaagtcttccgattcctagcttggactctttcttca

SEQ ID NO: 1002386 - DNA, 120 bp, Artificial Sequence
  ENSG00000287157_10 (sequence is synthesized)
tatccaagtcttccgattcctagcttggactctttcttcacaagaagcaaaggaaaaacacacttaaaagtaccaggttccacatctatgaagctccccaggaggagaaggtagaaacct

SEQ ID NO: 1002387 - DNA, 120 bp, Artificial Sequence
  ENSG00000287157_11 (sequence is synthesized)
ctgacaacagtggacatgtggacgcttaggaaccagcacctcaaagtcatggcctcaggagccccagaaaggaccacggaggccaagaggagcgtggagagatgcacactgtcatcggtc

SEQ ID NO: 1002388 - DNA, 120 bp, Artificial Sequence
  ENSG00000287156_0 (sequence is synthesized)
ctgccgcgcgcgtgggtcgctctgcgcaagggcctcttcgaaaacccgactaggcgcaactcagcgttcagcagggccgggagcgccaggtcgtccccggggcccgggccccatgactcc

SEQ ID NO: 1002389 - DNA, 120 bp, Artificial Sequence
  ENSG00000287156_1 (sequence is synthesized)
tgccccaaagcccactccacccgacctccctttcctgaggctgttcccagttgctgctttgggtcgctccggagctcaagaactcgggttgcctgccgccccactctccacgcacatact

SEQ ID NO: 1002390 - DNA, 120 bp, Artificial Sequence
  ENSG00000287156_2 (sequence is synthesized)
tggttttcttcttaggggcattggcaggtagactttgaggaagaaaagtaaaggatcgaacagctcagccctccctcccgaccgtggatgcccggagtcgaccaacacctcaggtccggg

SEQ ID NO: 1002391 - DNA, 120 bp, Artificial Sequence
  ENSG00000287156_3 (sequence is synthesized)
tgcggaggccgcgggcgcccctgcgcgaccgtccgcgcccggcaagagccgcgcggctttcgcctttgctggtcccgcgccaccgctggggcgggctgcgaaagggttgggaagagcaaa

SEQ ID NO: 1002392 - DNA, 120 bp, Artificial Sequence
  ENSG00000287156_4 (sequence is synthesized)
gggtttttttgttttgttttgagacgcagaagccctttaaaaagcccggcgaggagaggtccagaagtagagaaagcagacggaggcaagctgtgcccgcggggcaaagggacagtagaa

SEQ ID NO: 1002393 - DNA, 120 bp, Artificial Sequence
  ENSG00000287156_5 (sequence is synthesized)
ggggcgggcgcccgggttccccggaaaaccctcggccccaaggaatctcctggggcgggagagcgcggttctaaaaccgagaggataggaaggggaagggggagttgtgtttcaatttcg

SEQ ID NO: 1002394 - DNA, 120 bp, Artificial Sequence
  ENSG00000287156_6 (sequence is synthesized)
gattcaccaggattcatctctagtcacatttttcttctcaaatttttaaatcgaaaagataaaagccaaaagaactttcatccccagagctttttattgggggaaaggaatgtaactcgg

SEQ ID NO: 1002395 - DNA, 120 bp, Artificial Sequence
  ENSG00000287156_7 (sequence is synthesized)
ggtggttgtccttcacttccctactcgaatcttctcctaatgccgaaatgtgtttacaggtagcctcagtttaccaagtatgtatcttttgggggtttaacctctcacaaagccttcaac

SEQ ID NO: 1002396 - DNA, 120 bp, Artificial Sequence
  ENSG00000287156_8 (sequence is synthesized)
acctttcccgtcggttccgggcctggagggccaggaagagccgcgcgtccgcctttcgtcccgccaggaactccccataggacacgacaccgcaggaacaagcgtcctgggagcccctgg

SEQ ID NO: 1002397 - DNA, 120 bp, Artificial Sequence
  ENSG00000287156_9 (sequence is synthesized)
gatcttggctgtcgtctctagggaccctacaccgtgaaatgatagaggcgaggttccttgggttccgcaagtcgacgaaaatagctcgtggagaaggcgcgtcctgcaactgcagttcgc

SEQ ID NO: 1002398 - DNA, 120 bp, Artificial Sequence
  ENSG00000287156_10 (sequence is synthesized)
aagctctcagggcgccccgccagctgggggccagattgggtgacactcccctcgacgcagcctccggagcggcgcgcactctccagaggccagcaggactgcgctctctaccgcagaacc

SEQ ID NO: 1002399 - DNA, 120 bp, Artificial Sequence
  ENSG00000287156_11 (sequence is synthesized)
tgctccagctaggtgttctctccccatctcgccgtcgctctgccccctcactctctctggacctcagagccggttctctccttcctcctcccgcgctttccgtccggggatcgcaacctc

SEQ ID NO: 1002400 - DNA, 120 bp, Artificial Sequence
  ENSG00000287156_12 (sequence is synthesized)
cagcccgtgggcaacgcgttcagcccaagaccccacagtttttcccaacgacccccctaccaagggcttctcttgtttctgctctcctgccccgcacttcccaaagtgtgtgggaacagt

SEQ ID NO: 1002401 - DNA, 120 bp, Artificial Sequence
  ENSG00000287156_13 (sequence is synthesized)
gtaacctgaacaagaacgtagtgtctataggatgagtgacacttggaagcagaggcagagtgctacatggacacctgactgtaccaaatggttattgtgttttctcaatcagacgccaat

SEQ ID NO: 1002402 - DNA, 120 bp, Artificial Sequence
  ENSG00000287156_14 (sequence is synthesized)
tgcggaataccagctgatattctaccctcaactcatgctaaaagctttctagtctttctcaaggaaacctgtccaaagggatatgtgatcccaggaattattattgtataagtaatactt

SEQ ID NO: 1002403 - DNA, 120 bp, Artificial Sequence
  ENSG00000287156_15 (sequence is synthesized)
ggatgtttttactaatagttcacacatttcacagccctttggtggagagcctttttcgttaatgttctgttcaagaataattgcatagtatttataatcctctcagggattaagtataga

SEQ ID NO: 1002404 - DNA, 120 bp, Artificial Sequence
  ENSG00000287155_0 (sequence is synthesized)
ggcatggcagcaaccagggttcaaccatgtagccatccccaggggatggtagaaacaacaacctggaagaaacctggggccctgaatgaccaggtggagctgactagcacaatctggaac

SEQ ID NO: 1002405 - DNA, 120 bp, Artificial Sequence
  ENSG00000287155_1 (sequence is synthesized)
acacatttcagaccttcacatgaggaagagctaaacttccttgttatttaaggctctgaaacactggcatgatgaggagcaactttcaccatgcagatggaagcaacatcctagtggatg

SEQ ID NO: 1002406 - DNA, 120 bp, Artificial Sequence
  ENSG00000287155_2 (sequence is synthesized)
aaggccacccattccttgattgccttccagctcaaatcattttgggtgagagaaattaatctcacagcattttaatccattgttatttcacttctgtttaagcagacaaaccaatttccg

SEQ ID NO: 1002407 - DNA, 120 bp, Artificial Sequence
  ENSG00000287155_3 (sequence is synthesized)
atctagaacttgctgttagcagaacgctggtactcttcatggggctcccttctggaggtgtaatgagtaagtgcacaggcgttcatgagctgcattaggcagaaaacctcgtcactgacc

SEQ ID NO: 1002408 - DNA, 120 bp, Artificial Sequence
  ENSG00000287154_0 (sequence is synthesized)
aaccgaagaaaaccaaaaccgtcaacgctcagctccgaggcccgcaggaggctttaaaaatggcctcctgacgacacttcctgctcggcgcggacgagagacacggcggtggggaagaca

SEQ ID NO: 1002409 - DNA, 120 bp, Artificial Sequence
  ENSG00000287154_1 (sequence is synthesized)
cctagacttcgggatttccaggactggccctatctcctgctgggtgtgaggactctggccaagtttgccacctctccggggtttcatttttctcttagggctttggcctactgtcctctc

SEQ ID NO: 1002410 - DNA, 120 bp, Artificial Sequence
  ENSG00000287154_2 (sequence is synthesized)
ctgtattcaggcaccttggatgtgtgggttcccccagcagctgagcatcaccccagcctgctccttccaggtgacactaaggaagtgcaacccctcccagaagagcatgagcctggtgaa

SEQ ID NO: 1002411 - DNA, 120 bp, Artificial Sequence
  ENSG00000287154_3 (sequence is synthesized)
gtcctcagtggaaccagaactgttcttctcgtcaagcagttatctatgttatctttcttggcacgattgtcttatggattagggagattaggggtaataaatgtctcgtttgagtgacaa

SEQ ID NO: 1002412 - DNA, 120 bp, Artificial Sequence
  ENSG00000287153_0 (sequence is synthesized)
accttttgaaaaaaaaatgtctgcttaccccagaatgcagtgctcatggcctcacctctcctatccttcaaggtccacttaaagcaaaccactgcccatgaagcttttcccagacaggta

SEQ ID NO: 1002413 - DNA, 120 bp, Artificial Sequence
  ENSG00000287153_1 (sequence is synthesized)
tatgtatgaagaaaatcaacatggcaatctggagctaaacctgtttctaaatcaactgacttttcttcaaattgagatgccatgagacatttttagttttcttctcttatgaatggatat

SEQ ID NO: 1002414 - DNA, 120 bp, Artificial Sequence
  ENSG00000287153_2 (sequence is synthesized)
agataaattttatggtgatatcacaaagagctttcttcctcttttttaaaaatatctgcttcaactgcaaactgaaatacgtgaaatgagcagccatactggcttacaggagtcaaacct

SEQ ID NO: 1002415 - DNA, 120 bp, Artificial Sequence
  ENSG00000287153_3 (sequence is synthesized)
ctcccagttacgactgaatatggggaagctacagtgctccaaagattgagctcacggctgtgaaagtagctcacagctgataaagtgcaaaagagaaatctacatgctactcctaggaac

SEQ ID NO: 1002416 - DNA, 120 bp, Artificial Sequence
  ENSG00000287153_4 (sequence is synthesized)
tagtgaaggggaagagaaagagaaaaggagagagacctgtttggaataagtgaaatctgtcagctttcaaaaggaatatactttggtttggtttgatcgaatggccctatttacaagacc

SEQ ID NO: 1002417 - DNA, 120 bp, Artificial Sequence
  ENSG00000287152_0 (sequence is synthesized)
agaagaaattggaaaagacatttggaaatacaaagagattttcgaggatcctgaaatcagggcacaggtgcagctgccagccctgcctcctgttcatgctggctcttgagtgtccctggt

SEQ ID NO: 1002418 - DNA, 120 bp, Artificial Sequence
  ENSG00000287152_1 (sequence is synthesized)
ttgtacttccactgtctgcattaaacttctggggaccattaaggctgatatttctccaaggagctcctcttccctaacttgggtggctaaatggcacctttatatttagtttggttttta

SEQ ID NO: 1002419 - DNA, 120 bp, Artificial Sequence
  ENSG00000287152_2 (sequence is synthesized)
tcctctccttcatggtcctctcccctacaaattatagatggaagatgtttaaggccagtgctatgaagaaattaataagttcaaatacagtatctgagggggattggttccagaacctcc

SEQ ID NO: 1002420 - DNA, 120 bp, Artificial Sequence
  ENSG00000287152_3 (sequence is synthesized)
aggtgtatactaaacaacatttggaagaagaaaaacctggcatcattctgagaaagtattttctctaactctgagcatgcagttaattctatggataaactgaaaggaacaggatggata

SEQ ID NO: 1002421 - DNA, 120 bp, Artificial Sequence
  ENSG00000287152_4 (sequence is synthesized)
ttggacagcttccctgcttttctagaatcaaatgcaaaactattgttttaattcaaatcaattatcaaactgtgccacattattcttcttatttttaatccaacgtttaaggagaacctt

SEQ ID NO: 1002422 - DNA, 120 bp, Artificial Sequence
  ENSG00000287152_5 (sequence is synthesized)
ctgtgagcaagatcattctctgggcataaggtatattcaaagataactaagatagtctctctctctctctcagagagctcgtaatgtgtacaggaaataaattacatttgttggcaaaaa

SEQ ID NO: 1002423 - DNA, 120 bp, Artificial Sequence
  ENSG00000287151_0 (sequence is synthesized)
ctaactgttttttatagtgttaatactaatttatgtttgcacaaacagttcccctttctggcaattcataccaggaattgtctttttaaatattttgatctttttgtaatgttcattcta

SEQ ID NO: 1002424 - DNA, 120 bp, Artificial Sequence
  ENSG00000287151_1 (sequence is synthesized)
ttggagtgagataagatctgagtgtggttttgatctgcatttttctcatgagtagtaatgttaaccacgtttttgtagacattcggtcagtttcctgtcttctttggaaaaatatctaat

SEQ ID NO: 1002425 - DNA, 120 bp, Artificial Sequence
  ENSG00000287151_2 (sequence is synthesized)
ccggttatttgcccagtttttgtctggcaattgttctgttgttttgttatttttttgccagctggtagtatgactggcttgtaccttttcaaaaataatcccttatcccaaacttgtaat

SEQ ID NO: 1002426 - DNA, 120 bp, Artificial Sequence
  ENSG00000287151_3 (sequence is synthesized)
ttttagtgtgcctttttattttgtttattgtttcctttgttggtcacaaatgcttcagcttgacgtggtcccacatgtgcataatttcttggtggctgtgctgttggttactaatcaaga

SEQ ID NO: 1002427 - DNA, 120 bp, Artificial Sequence
  ENSG00000287151_4 (sequence is synthesized)
aaaaacaaaatcactaccaaagcagtcccttgtcaataatttttttcccttgtatttttgtttactttttgtgaaccctgagcatacatccaagttgctctaaatatacgcacacccgag

SEQ ID NO: 1002428 - DNA, 120 bp, Artificial Sequence
  ENSG00000287151_5 (sequence is synthesized)
gttgtctttataggagctttatggttgcaagttttgtgtataatctttaatcattttgagttgattattgtgtatctagtaccataagggtcctgtattacccttttgcatatggatatc

SEQ ID NO: 1002429 - DNA, 120 bp, Artificial Sequence
  ENSG00000287151_6 (sequence is synthesized)
tagtttcggaagtcttccctgttgtgtcattttggtggtgttttgaaaaatgtgttcattccatataaatttttgtttattattgagcacattcattttgctcactggtctgtgtttctc

SEQ ID NO: 1002430 - DNA, 120 bp, Artificial Sequence
  ENSG00000287151_7 (sequence is synthesized)
tgtctatgccagtaacatatgggtttgttaactacggattttcatttaattagaactcagggaatgtgatgcatcccgtatggtttgtatttctcagaatagctttggaaattcagggtg

SEQ ID NO: 1002431 - DNA, 120 bp, Artificial Sequence
  ENSG00000287151_8 (sequence is synthesized)
tttcacatttccacataaattttggcattgtttctttatacttcctaaaacactatttgtcatatactaaatgtatacaattagaaggtacaaggaaggttttcatacatgtatatgttg

SEQ ID NO: 1002432 - DNA, 120 bp, Artificial Sequence
  ENSG00000287151_9 (sequence is synthesized)
aataatgataaaatcaggttatttagcatctcttcatctcatatagttattatttttggtaacaacattcagaatctttccttccagctactttgaaatatatgatacatttgtgttaag

SEQ ID NO: 1002433 - DNA, 120 bp, Artificial Sequence
  ENSG00000287151_10 (sequence is synthesized)
gctagtcacgctgctgtggaatagaaggccagaattgatcactatcatctgagagtaactttgtacccatcactgattccttccgagactgcctccacttccccagcagcctctgatttc

SEQ ID NO: 1002434 - DNA, 120 bp, Artificial Sequence
  ENSG00000287151_11 (sequence is synthesized)
ttcatgtggctgcagatggcaggatttcccaaaggtttatggctgcaacatattccgtggtgtatctgtacagcagtttcctcattcctgcagctgtgtttgaacaggtcatttaccatg

SEQ ID NO: 1002435 - DNA, 120 bp, Artificial Sequence
  ENSG00000287151_12 (sequence is synthesized)
cggtcctccaggttcaacagtatggctccaaatgatgaaatttcattctgattttctggctgaagactattctgtttgtgtatgtccaccacagttactttatcccttcatctgtggatg

SEQ ID NO: 1002436 - DNA, 120 bp, Artificial Sequence
  ENSG00000287151_13 (sequence is synthesized)
ggcaggaaactccaaactgtccaagggatagttctgttgtgattacttcattgagaaatttaacttatgagcagttgaaaggaatgcaagttgctggaaaatcagaatgaagagtgcaaa

SEQ ID NO: 1002437 - DNA, 120 bp, Artificial Sequence
  ENSG00000287151_14 (sequence is synthesized)
atgaccaagctacaatgtattgtcattattcactctgatgtgaaaaaggcagtgaattcaatagaaaataactttgcagaataaaatctcaggtgtgtttttttagtgccacagtcttgg

SEQ ID NO: 1002438 - DNA, 120 bp, Artificial Sequence
  ENSG00000287151_15 (sequence is synthesized)
atgatgggcttctagatgttgagtcctagaagctctcaacatctcttcttaattggagaaagtgttaagccccaaagtagctggagcagtacatcttcaatttttgacaagaaagcagga

SEQ ID NO: 1002439 - DNA, 120 bp, Artificial Sequence
  ENSG00000287151_16 (sequence is synthesized)
acttggttactttgagtgttattcattagtttctgctttcattgagaatgcagcaaaagccaacgaggctgctgctaactccttgctggacatcttctgccactatcacaggaactgtga

SEQ ID NO: 1002440 - DNA, 120 bp, Artificial Sequence
  ENSG00000287151_17 (sequence is synthesized)
tctcactggacaattaactagggagcctttcatcttgaatgactgctgcacaaatgatcttcaaagcattttagccaccagaggaattctcttcaaatacccaaaatccatcagtatctt

SEQ ID NO: 1002441 - DNA, 120 bp, Artificial Sequence
  ENSG00000287151_18 (sequence is synthesized)
ctgttaaatttgatttcaagaaattacaggaaaactttccaaagttccgtctcacagaatttatttttacaaagaattccaagataagtttagttttatggaagatttttatgtggtttt

SEQ ID NO: 1002442 - DNA, 120 bp, Artificial Sequence
  ENSG00000287151_19 (sequence is synthesized)
tactcactcttcatctcagacatcaaccgatgattacatcacttatttagctagtaaatttattaatataaaactcagagacattccaatatccacattgcttacatcatcaggcataga

SEQ ID NO: 1002443 - DNA, 120 bp, Artificial Sequence
  ENSG00000287151_20 (sequence is synthesized)
ttcaatgtcagctatgacaattgaaaataagctgttttgtgatttaaaggtttaaatttctctaaccaaacagcttgatccagatgcagcactgcaaatgttaatatttgttctggaaga

SEQ ID NO: 1002444 - DNA, 120 bp, Artificial Sequence
  ENSG00000287151_21 (sequence is synthesized)
gcaatcaaataagacttaagaggaaaaggaatggccacaatccacctgaaattttttttaaaaaagtatgcagcctactaaatcagaatgaaaatagaagtacaagattataaacaaaat

SEQ ID NO: 1002445 - DNA, 120 bp, Artificial Sequence
  ENSG00000287151_22 (sequence is synthesized)
gcaatcaaacttttcttaagcttacctaaagttattttatctgaaaatttcaagcaactttgatcaacattaaattgacaatctaaactaacaagtcttttgaatttatgtatggtagta

SEQ ID NO: 1002446 - DNA, 120 bp, Artificial Sequence
  ENSG00000287151_23 (sequence is synthesized)
aacattctctctattaattttattacctaaggctaaacctaaaatttttaagcaaaattagaaagtcttcacttatcaaaaaataaagtttgttacatttagtattttcccaataaaatt

SEQ ID NO: 1002447 - DNA, 120 bp, Artificial Sequence
  ENSG00000287151_24 (sequence is synthesized)
ggtcattcttggttttttatttggagaatctgtgcaaaatttcactgaaaataaattagaactagaaattatttctaaataccaaaaaaaaaatgaagaatggtttcacaaagaaaaaaa

SEQ ID NO: 1002448 - DNA, 120 bp, Artificial Sequence
  ENSG00000287151_25 (sequence is synthesized)
gaaaacttgcttaattagcagagtatcatctctgtgatttttgtgattatttgatcagtgtcctgagatggatacaatggcaagtaatgacaaaattaaaataagcatgcagattttttt

SEQ ID NO: 1002449 - DNA, 120 bp, Artificial Sequence
  ENSG00000287151_26 (sequence is synthesized)
aaattaagtgccaaaaaataattggtcatgcaaagcccttaaaaatattgtggcctaattctaaagttttttgctactatgctacatcacacgcaacatcagttaagtgctcattctgtg

SEQ ID NO: 1002450 - DNA, 120 bp, Artificial Sequence
  ENSG00000287151_27 (sequence is synthesized)
acaggtagtacattacattttagcaaactacacaagacccctatgtgataatatgcttcagggttgtaaggttgggtgcatttactagtcttgaattttctgggagtatacaaacccaat

SEQ ID NO: 1002451 - DNA, 120 bp, Artificial Sequence
  ENSG00000287151_28 (sequence is synthesized)
attagtctagatgcccacaaatctatttagacgtcacagtagaatggagagtaatcttgaccacaggaagctgtgttgtggcatttattttgaaattattttttcttgatttttttgcct

SEQ ID NO: 1002452 - DNA, 120 bp, Artificial Sequence
  ENSG00000287151_29 (sequence is synthesized)
tttgttttgtgagttttataatgtacagaatatttttaaattattatatatatcaactaattagtcttcatttaaacttacgcctctggggtcttacttgggtttctcctaacaatatta

SEQ ID NO: 1002453 - DNA, 120 bp, Artificial Sequence
  ENSG00000287151_30 (sequence is synthesized)
tacacatatttgcaataatttctctcatactgcttttaactcatttaatttttcaactttttaagaataacaaaagtgatattaattgtaaaaatgctgaagtgacatatgaatttatga

SEQ ID NO: 1002454 - DNA, 120 bp, Artificial Sequence
  ENSG00000287151_31 (sequence is synthesized)
agtgcatatgtattttttagtttaccaatgagatgggagaaatgctgtcttatattttaacatacattttggccattacacagatgaagcaacttttcatttgttaatacataatgcata

SEQ ID NO: 1002455 - DNA, 120 bp, Artificial Sequence
  ENSG00000287151_32 (sequence is synthesized)
ctttttcttctgtgcaattcctctttgtattctttgctcattttcccactgggatttgcaagttctttattatttgataatctctatacattctgaatatcaattttttgttatatatac

SEQ ID NO: 1002456 - DNA, 120 bp, Artificial Sequence
  ENSG00000287151_33 (sequence is synthesized)
ataccatgtaaatattttcttctaatttgttatttgtcttttaatggtatttatcaattgtttgctaaaaatgagtttgtttagttagtaaaatttgtctatctttaacttcatgatatt

SEQ ID NO: 1002457 - DNA, 120 bp, Artificial Sequence
  ENSG00000287151_34 (sequence is synthesized)
tatcatgtcatgaggaaaaggcatgaatattttaaaaacttccttgtagtgttaattttattttttatttcattctttaagttatttgaaatttattgtttatttcttcaaattccaaat

SEQ ID NO: 1002458 - DNA, 120 bp, Artificial Sequence
  ENSG00000287151_35 (sequence is synthesized)
aataaccaactttctcaaagcaatacttctttctactgatttcaaacgttacatttgtcttctctgaagttcttgtttttttgatacctgactgtcacactactgctgtggatgtgcttc

SEQ ID NO: 1002459 - DNA, 120 bp, Artificial Sequence
  ENSG00000287151_36 (sequence is synthesized)
ataccatcacagtactgcagggttataagattatctgatagccaatagaagcagacgtctactcactgtcattcttttgtcttttggagaataaagttagctatttttatctgggttctc

SEQ ID NO: 1002460 - DNA, 120 bp, Artificial Sequence
  ENSG00000287151_37 (sequence is synthesized)
cctcccatgttaacactattgtttctttctgtttactttcagttggttggcagagaatttgaactggagatgaactttattatccaggatgctgagagtataacatgcatgacagagctt

SEQ ID NO: 1002461 - DNA, 120 bp, Artificial Sequence
  ENSG00000287151_38 (sequence is synthesized)
ttagagcactgtgatgtaacatgtcaagcagaaatagggagcatgtttacagccattctatgaaaaagtgttcggaatgtacagactagcacagaagctggactaattgaacaagtattg

SEQ ID NO: 1002462 - DNA, 120 bp, Artificial Sequence
  ENSG00000287151_39 (sequence is synthesized)
ctgaaaatgagtgctgtagatgacatgatagcagagtaccttcaagtttaaatctgagagtgatattcatttggcagaacatcataaacaggttttgtatgatgggaaacttgcaagtag

SEQ ID NO: 1002463 - DNA, 120 bp, Artificial Sequence
  ENSG00000287151_40 (sequence is synthesized)
cattacctttacatatactgctaaggccactgatgctcaactctgcctggaatcatcaccaaaagagaatgcatcaatttttgtgcattcccaacatgctctaatgcttcagattcaagt

SEQ ID NO: 1002464 - DNA, 120 bp, Artificial Sequence
  ENSG00000287151_41 (sequence is synthesized)
gctttttccactgtttccccaattggataatcggcagctcaatgacagtcaagtggaaacaactgtctgctcctgcttcaggtgcagaaatacagcgatttccagtgccagctgttgagc

SEQ ID NO: 1002465 - DNA, 120 bp, Artificial Sequence
  ENSG00000287151_42 (sequence is synthesized)
gggcagattcccctccagggacagcgctggagctagaggaagctccagagccctcctgccgctgccctgggactgcccaggaccagcccagtgaggagctgcctgacttcatggcacctc

SEQ ID NO: 1002466 - DNA, 74 bp, Artificial Sequence
  ENSG00000287151_43 (sequence is synthesized)
gaccagcccagtgaggagctgcctgacttcatggcacctcctgtagagccacagagaggggtggccagcacagc

SEQ ID NO: 1002467 - DNA, 76 bp, Artificial Sequence
  ENSG00000287151_44 (sequence is synthesized)
gctcccagaggcgacctcctcctccaggcatggaggtttgccctcagctgggcatctgggccatttgcccctaacg

SEQ ID NO: 1002468 - DNA, 120 bp, Artificial Sequence
  ENSG00000287151_45 (sequence is synthesized)
tttgccctcagctgggcatctgggccatttgcccctaacgtgctgcccaggatggcctcctcttgacaggcggacagggggtgagggggccagggggcatctccaaaggaagcttttaaa

SEQ ID NO: 1002469 - DNA, 120 bp, Artificial Sequence
  ENSG00000287151_46 (sequence is synthesized)
ctcagcagctgcaccccagaatctgtatgcctgcacctgcccaaggatttattcatagcttacctaagaatttcaaatttctaccataacactgaataaagtttgactttttgaaacttc

SEQ ID NO: 1002470 - DNA, 120 bp, Artificial Sequence
  ENSG00000287151_47 (sequence is synthesized)
gggacgtggtcaagtggccctttggagattctacggcttcggatccctactgcaggatgctccactgtgtctgccagcctctagcgttttgctgaggggtaacctcggaatggctaaaaa

SEQ ID NO: 1002471 - DNA, 120 bp, Artificial Sequence
  ENSG00000287151_48 (sequence is synthesized)
taagaacactgggatggcccagtcatgccccaggcattcccgcacacgtggtggcaaaggcaggcgcgcagacaagagtgcccagtcggcttggtcagagttctttacaggttcatctgc

SEQ ID NO: 1002472 - DNA, 120 bp, Artificial Sequence
  ENSG00000287151_49 (sequence is synthesized)
gttgctctaaatgggactgtttcattattttgatggctgaagaatatttcctagtgtatgtatatgagagtttcttgatctctttatctgtggatgaacagctactttgaaatatatgat

SEQ ID NO: 1002473 - DNA, 120 bp, Artificial Sequence
  ENSG00000287151_50 (sequence is synthesized)
aatgtttataaagtttcacatacttctctttatattctataggtaatgtagatttgttgacactgctttgatttaaaataaatggaaatgtatagaaattttactttttatattaatgga

SEQ ID NO: 1002474 - DNA, 120 bp, Artificial Sequence
  ENSG00000287151_51 (sequence is synthesized)
ctgaaaagtgaaagaagaaaaacataattattatagtagacaaacataattactaacgttgttttctaaattttagaaaatctcagtaccacggagtgctatgaagtctatcagaaaaat

SEQ ID NO: 1002475 - DNA, 120 bp, Artificial Sequence
  ENSG00000287151_52 (sequence is synthesized)
aaacagtatctttttatgtagtatttcattcagcttttacataattaaaatgccacaataggtattacagttctgtataatgagcatttcaccaaattcccctagttctgtgcccctcaa

SEQ ID NO: 1002476 - DNA, 120 bp, Artificial Sequence
  ENSG00000287151_53 (sequence is synthesized)
gagactgcagttcctgcgacgcccctgcagcagcagcagcgtggtcagagcgagcttctgagcggtggtgggttccatgtgatggtggagtaggagacaggtctccgcggttcatctgcg

SEQ ID NO: 1002477 - DNA, 120 bp, Artificial Sequence
  ENSG00000287151_54 (sequence is synthesized)
gaaatgttctgtgcaataaaaacagcagtggtaacacagatgtaggctctgagtgtctcactggagactgaagtccacagatatgcaacaaagcctttgtctccctgatgtttttgcctc

SEQ ID NO: 1002478 - DNA, 120 bp, Artificial Sequence
  ENSG00000287151_55 (sequence is synthesized)
ttgtccacatttacaatcgatggagaaacagtgaaattcagtgttatgttaatggacaactggtatcttatggtgatatggcttggcatgttaacacaaatgacagtaccttcaagttta

SEQ ID NO: 1002479 - DNA, 120 bp, Artificial Sequence
  ENSG00000228528_0 (sequence is synthesized)
ctgtttcaaagaggtttgcgctagactgggcatgcagttttgctctgcagatattgtcgctaccgatttagtggaatgcaattaggaagcctaaattaagtgtcttaacaggatgagcac

SEQ ID NO: 1002480 - DNA, 120 bp, Artificial Sequence
  ENSG00000228528_1 (sequence is synthesized)
tggaacatgtccggacagatccaggcagctggtgaaaactcatgaattctctgcagcacagaagggagcaggtttgcattcaggccactgagacgacggaggctgcatcacagaagaggc

SEQ ID NO: 1002481 - DNA, 120 bp, Artificial Sequence
  ENSG00000228528_2 (sequence is synthesized)
cgtgggaggtcacaggtacggcctctccttctgactgtacaatgaactctgcaagctgtgtggtcagagtgccagggacagccaggaactgctgtcatcgttccaggtggagctgacaga

SEQ ID NO: 1002482 - DNA, 120 bp, Artificial Sequence
  ENSG00000228528_3 (sequence is synthesized)
ctgtctccgaagcgcccacctgcgcgtgcgccccctcttcccggcacaggctagagatgcgcagaatcctaactacggccaccgtttcctgcctcaacgagccatgccctaaaagaaaca

SEQ ID NO: 1002483 - DNA, 120 bp, Artificial Sequence
  ENSG00000228528_4 (sequence is synthesized)
tcaacttaaactttaatttcaggtatcttctatacaacacagaagtcacgctctggatagaattaaaaggaaattaacttggggtttagggtggacgttttttgccttattttgcttctt

SEQ ID NO: 1002484 - DNA, 120 bp, Artificial Sequence
  ENSG00000228528_5 (sequence is synthesized)
agtaaatgaaagtgaagcctgaataatgagaatattattaatccatctccatttttctactttaaaggcacagcatagattttggttccagttgttactactttaatgagagtaatgaat

SEQ ID NO: 1002485 - DNA, 120 bp, Artificial Sequence
  ENSG00000228528_6 (sequence is synthesized)
attccatgtgagggcagtgtgcatgaaagtgtgctgggaaagttctatggatctttgtgttttgtttcagttttgaggattaaatgcaagtttaatcctttaatgaatatataagtcggt

SEQ ID NO: 1002486 - DNA, 120 bp, Artificial Sequence
  ENSG00000228528_7 (sequence is synthesized)
tgatgccctttcttgagaaagttatggttaaattgttgtgtcaaatcattgtatttcattctgtctccagtgtgggggtagcatagagaggtggtgggtagggctgggggtgaatatgtg

SEQ ID NO: 1002487 - DNA, 120 bp, Artificial Sequence
  ENSG00000228528_8 (sequence is synthesized)
tgtttttcttaagcgacgctagttttggaaaatgtaaggattccaaaggttaatgtggattaaaatgctgtctgccatgaactttagaaattgaaataaatgtggttggtaaaagaagaa

SEQ ID NO: 1002488 - DNA, 120 bp, Artificial Sequence
  ENSG00000228528_9 (sequence is synthesized)
agattctgctcgtgttttccctttgtaacatgtcatagatttgcaagactttcctatttactaatttgttattaatcttctttccagcttactactcttttaaaagtccacgtttcattt

SEQ ID NO: 1002489 - DNA, 120 bp, Artificial Sequence
  ENSG00000228528_10 (sequence is synthesized)
ctctgtacattcggcaattaaccatcgaggctgtcttttgccagcctaactagcaagaggagacagttaaaagataatatcaaagcaggtgtattgctaaacacagttgtttaaaacagc

SEQ ID NO: 1002490 - DNA, 120 bp, Artificial Sequence
  ENSG00000228528_11 (sequence is synthesized)
tatgaagaacttgtacttttgtaaaactcattttctttcatggtaggaattcctattgttttattgtagagttgtcatttttgcttaggtgcatcagaaatgcttacactcatgcacacg

SEQ ID NO: 1002491 - DNA, 120 bp, Artificial Sequence
  ENSG00000228528_12 (sequence is synthesized)
tacacagctacacttacgcatgcatttttttagtggggaaaaaaatcaaattgggttctgcaaagaggagaggaggatggaatcaaatttggggtctcctagctgtaatactctgtttaa

SEQ ID NO: 1002492 - DNA, 120 bp, Artificial Sequence
  ENSG00000287159_0 (sequence is synthesized)
acatactgtcctcctgagccaggacgcagaccatgactacttttgcctctgcacgtctgttctgatttctttcttcatgtgggatgcctctctatccttctcctgcttttaatatggagc

SEQ ID NO: 1002493 - DNA, 120 bp, Artificial Sequence
  ENSG00000287159_1 (sequence is synthesized)
ttcagtctctaagctaaaaggccaagtccagattcacctgccaatgaagctctttaaattatctcttctttctcaggactcactggctatcagacattactttaggtgaagactttccag

SEQ ID NO: 1002494 - DNA, 120 bp, Artificial Sequence
  ENSG00000287159_2 (sequence is synthesized)
tctgacttccctcacctgagccttaaggatccattttctgacatggtgatagtaaagatattggttgtcaagtggaatctcagcagtcattttcagacaaagggaaagaaaaagtatgga

SEQ ID NO: 1002495 - DNA, 120 bp, Artificial Sequence
  ENSG00000287159_3 (sequence is synthesized)
agatgcctgattctcaaagagtcatccggtcctgggattacagcctaagtccatggaagtgaaagtcctctttttctttgtacctcttactgagataagtctgatgcaattaattatatt

SEQ ID NO: 1002496 - DNA, 120 bp, Artificial Sequence
  ENSG00000287159_4 (sequence is synthesized)
tttattatggtcataaaattattttagatatcctcatatctcttatatatctgaactgcccaggaactttcatgattataatgtaccacataggacatattgtagttgatcactaagcag

SEQ ID NO: 1002497 - DNA, 120 bp, Artificial Sequence
  ENSG00000287159_5 (sequence is synthesized)
agaaatctacctagattaagcaaaaaaaaaaaaaaaatatgtattgagattgatatggttagcctttttgtccccactcagatatcatctcgaattgtaaatccccatattttcccccat

SEQ ID NO: 1002498 - DNA, 120 bp, Artificial Sequence
  ENSG00000287159_6 (sequence is synthesized)
ccaggtggaggtaattgaatcatgggggtgatagtgagtgagttcccatgaaatcggatggttttctaaggggctcttcctccttcacttggcaattctccttcctgccaccctgtgagg

SEQ ID NO: 1002499 - DNA, 120 bp, Artificial Sequence
  ENSG00000287159_7 (sequence is synthesized)
ctgccaccctgtgaggaaagtgcctgcttccccttcaccttccaccaagattgttaaatttcttgaggcttccccagccatgctgaactatgagtcaattaaatctctttctttataaat

SEQ ID NO: 1002500 - DNA, 120 bp, Artificial Sequence
  ENSG00000287158_0 (sequence is synthesized)
acagtgaaagcacaaaacatcaagccaacagttcaggactagtcattcaaatggactaaagacgccaagaacctggacaccctccaccggtaacatattttggcgagccagacaagagga

SEQ ID NO: 1002501 - DNA, 120 bp, Artificial Sequence
  ENSG00000287158_1 (sequence is synthesized)
cccttggtgggcagtgcctaaacagagacaactacaggtttctggctgtggccactctctggtgaaactaaggggtttctgtgtggaggtgcctaacagccaccgtccagtttggtagta

SEQ ID NO: 1002502 - DNA, 120 bp, Artificial Sequence
  ENSG00000287158_2 (sequence is synthesized)
tgatgcctctggcttccctctatcacacgtcttcttttcgagtaaaggtttttcataaatgtgagcgtggaagaagaaaccagttaaatatggaacttcacaccaggacacaaaagatgg

SEQ ID NO: 1002503 - DNA, 120 bp, Artificial Sequence
  ENSG00000287158_3 (sequence is synthesized)
tgtcagaagcggatccgaagtggaacttttagtgaccctcaggagcactgaatgaacatgcaaggaacctgcaggacccacttgtgtccattgatctctgggagcagctgggataagctc

SEQ ID NO: 1002504 - DNA, 120 bp, Artificial Sequence
  ENSG00000287158_4 (sequence is synthesized)
ttctgatccaaaatgggtttggcatcatggcagaaacaggactgggtccacgaatggatttgatccaggaatgaactggcttggatccagtcagaggtctcttacatctgactgggtcag

SEQ ID NO: 1002505 - DNA, 120 bp, Artificial Sequence
  ENSG00000287158_5 (sequence is synthesized)
aaaggaactggtagtaagcagtaatattgcagaggttataacatttggcttttaaaaaataacaggaatttttgtgttctacctcctatgttaaatttttcttgtatacttaggtagaaa

SEQ ID NO: 1002506 - DNA, 120 bp, Artificial Sequence
  ENSG00000287158_6 (sequence is synthesized)
aaagtcattggctaagttaatcaagagaacctgagagtaaagccaatattttaggtaaaaatgagatccttaatttctgggaaactgagttcattctggtttatactttaagcctgggag

SEQ ID NO: 1002507 - DNA, 120 bp, Artificial Sequence
  ENSG00000287158_7 (sequence is synthesized)
gcagcgaagtcttgcggcaaaatcttacaaaagataacttacaggggaacgctgcaaatgaacaacaatgcattgaagtaaatttaaaaatgatggttctcggtaaattcccattggcta

SEQ ID NO: 1002508 - DNA, 120 bp, Artificial Sequence
  ENSG00000287158_8 (sequence is synthesized)
agaatggatttggcacttcgggatgtcaactgctattctctttggaataatctgtcttgcactctttgatgacgactatgggtgacaggattagggatttacaggatcctgggacatggg

SEQ ID NO: 1002509 - DNA, 120 bp, Artificial Sequence
  ENSG00000287158_9 (sequence is synthesized)
acagtgaaagcacaaaacatcaagccaacagttcaggactagtcattcaaatggactaaaggtgggggagaaaaaataagagtggataaaagaaagaaagaaaacagagaaaggtgggaa

SEQ ID NO: 1002510 - DNA, 120 bp, Artificial Sequence
  ENSG00000287158_10 (sequence is synthesized)
aagaagcaaccacctgaacttctcagtgttgcttcaatgtgtgggtctttctctggcctccctgatcatttcgccttccccaacctcccacagactatgctttcctctctctcctttccc

SEQ ID NO: 1002511 - DNA, 120 bp, Artificial Sequence
  ENSG00000287158_11 (sequence is synthesized)
tttcttatcttttctcttactcagagggaccatcttgcccagagaccacgtgttgaaactcctactcagaggttggattaaagatgacaggacccatctgagggcaaatttaagccttgc

SEQ ID NO: 1002512 - DNA, 120 bp, Artificial Sequence
  ENSG00000287158_12 (sequence is synthesized)
caatttgatattgggtgctaagcagagtagctaatatctatgttttatcacacgtattttgctctggccagactgaaaaaagataatttttctttatgatgcatcttggtcccagcagga

SEQ ID NO: 1002513 - DNA, 120 bp, Artificial Sequence
  ENSG00000287158_13 (sequence is synthesized)
tggtgtggcaagctgagtcactaaggctgctcagggaaagggaacccagaatcttggcatgccggcaaaaggcccatggttcactgaggacaactcctttgcaatctagaacccaaagat

SEQ ID NO: 1002514 - DNA, 120 bp, Artificial Sequence
  ENSG00000287158_14 (sequence is synthesized)
tggatcttctgagaacatcagagaaagactgtccttgccatccacactacagcaaagctttggagccttgaaccttgggttcatgatcttacaactgagaagggcccctccacactcctg

SEQ ID NO: 1002515 - DNA, 87 bp, Artificial Sequence
  ENSG00000287158_15 (sequence is synthesized)
tacaactgagaagggcccctccacactcctgaactgtacaaccattgaaactcttaaggtaaaattaactaggaaagtttatctcct

SEQ ID NO: 1002516 - DNA, 120 bp, Artificial Sequence
  ENSG00000287158_16 (sequence is synthesized)
cttatatttgaatatattttccggtttatgcctttaggaacaattgaaatgaaagggggatctattatgtgcacttatagggtatacttttatttgtgaaggattttgcatccagcctta

SEQ ID NO: 1002517 - DNA, 120 bp, Artificial Sequence
  ENSG00000287158_17 (sequence is synthesized)
tatgaataaccttgtactttaatagataaaagatgaaggctcaatgtaggtgagaaaatgtagtggtacatatgttgcctcataatcagtcaaaactcttcttaacccacataatggatt

SEQ ID NO: 1002518 - DNA, 120 bp, Artificial Sequence
  ENSG00000287158_18 (sequence is synthesized)
aaagagaatattgccaggaggccttcgcttttctaaaatgacatcatttgttaggtcctttttccatagtttagtataaaagaggcaataattagaaatgtcaccctcataataggctct

SEQ ID NO: 1002519 - DNA, 120 bp, Artificial Sequence
  ENSG00000287158_19 (sequence is synthesized)
acagcaaattctactttaaaggctattgttacacaacagactttaaattatcttgtaaaagttatgctaaataatagaattggccaaacagaaaagtacctgtgcagttgctgacacctg

SEQ ID NO: 1002520 - DNA, 120 bp, Artificial Sequence
  ENSG00000287158_20 (sequence is synthesized)
tggcctatggagaaatacatcaaatgtagattatacaatttcagttgtaggggattaatgaaaagaccacctagtcaagcaagtaggctcttcatatagctcattctttaatctatttaa

SEQ ID NO: 1002521 - DNA, 120 bp, Artificial Sequence
  ENSG00000287158_21 (sequence is synthesized)
ttttacatggtttggtttatggggaccctgggtaaggagcacactccaaatttgttattattctcccagtactcataatgatagtctccctgatgtgctatattctcttaaaggttttaa

SEQ ID NO: 1002522 - DNA, 120 bp, Artificial Sequence
  ENSG00000287158_22 (sequence is synthesized)
atgtttgcatgcagccatctctagaacatcaaatggtctctattcaaccagaatgacaaaagctgaaagaaatgtgtgaccctgaggatatcgtaacctacgaatgatgtgctgagactg

SEQ ID NO: 1002523 - DNA, 120 bp, Artificial Sequence
  ENSG00000287158_23 (sequence is synthesized)
gaaaccctaaatgatgttactgagaatggcactaaggccttaagttttggtcacactgtcacctaagtgagaacctggctgaaaagggagaatttttaaacaacaaaattagaggaagcc

SEQ ID NO: 1002524 - DNA, 120 bp, Artificial Sequence
  ENSG00000287158_24 (sequence is synthesized)
actattttggactgagctcatgcactaggccccaacaaacgaaaccaagctaaaatggagtcactcatcctaaatgtgacataatcaaaccaaggctttaagaacacagatagatgctag

SEQ ID NO: 1002525 - DNA, 120 bp, Artificial Sequence
  ENSG00000287158_25 (sequence is synthesized)
aacagactacattttgtttttctcctgtaaacaggatgtctatcataaggaggtaccgtctactcagtccttattctctccttgcaaaacccacttttctactgtttcccagtgggtttc

SEQ ID NO: 1002526 - DNA, 87 bp, Artificial Sequence
  ENSG00000287158_26 (sequence is synthesized)
cttgcaaaacccacttttctactgtttcccagtgggtttcaaaccatataatacatttatgatagtgatattaacatcaatgactaa

SEQ ID NO: 1002527 - DNA, 120 bp, Artificial Sequence
  ENSG00000287158_27 (sequence is synthesized)
gcctgggaagaactccatagtcttatatttgagttcttgcagatgaactgtaacttagcttaatagtcagacaaaactgaaaacctaacttaatagtatgcgtctgtaacaatggctgag

SEQ ID NO: 1002528 - DNA, 120 bp, Artificial Sequence
  ENSG00000287158_28 (sequence is synthesized)
catacttcaaccactcatagactgctgaaagttcaaagtgcattcaaataaggcaaaaacggagcttaaccagcctcactgtttctgtatctcacttccgattcctgtatgtcactttac

SEQ ID NO: 1002529 - DNA, 120 bp, Artificial Sequence
  ENSG00000287158_29 (sequence is synthesized)
attcctgtatgtcactttaccttttttgtctataaatgtgttctgaccacgaggcaccccaggtctctgtgaatctgttgtaattctggaggtgcctgattcgccaatcattcattgctc

SEQ ID NO: 1002530 - DNA, 120 bp, Artificial Sequence
  ENSG00000254141_0 (sequence is synthesized)
tcagtggtgacattagcgaagaatgacagcatgtctctaacaaagatgtgaaaactgaggcttttcaaagtcacacagttagcaaaatgtggagccggaattcaaatacaggtttccgtg

SEQ ID NO: 1002531 - DNA, 120 bp, Artificial Sequence
  ENSG00000254141_1 (sequence is synthesized)
gcttgagatcccagcttttcaccattaaacagtgtcaccttcagaaatggcctttatgcctcctggtctcaacatagagcagaaaggaccatctggacaccacatatgaggaaatcagac

SEQ ID NO: 1002532 - DNA, 120 bp, Artificial Sequence
  ENSG00000254141_2 (sequence is synthesized)
tttatcctccggttttctctcttattccattggtaaccaccctgggagttctaataccatgtccatgtacaagtgcttaaatcaaccctcaggttgtgacagtcaagctacagtggctgt

SEQ ID NO: 1002533 - DNA, 120 bp, Artificial Sequence
  ENSG00000254141_3 (sequence is synthesized)
gaaataatctgcacagcagagtatgctatgtcattggctcaatcagcataatgcagcataatagaatagaagcacacaattatataatgccataatttgatttctctctaatttctggac

SEQ ID NO: 1002534 - DNA, 120 bp, Artificial Sequence
  ENSG00000254141_4 (sequence is synthesized)
acatcacaaaataatcaaggcagtgaaatgaagtgtaaagaataatggctgagtttggagtcacatcactgccacttgctagcctgtgtgaccttaaacaaataaaaaactctttcttga

SEQ ID NO: 1002535 - DNA, 120 bp, Artificial Sequence
  ENSG00000254143_0 (sequence is synthesized)
acagcaaatatcttccactgagatcgtgtggttttaatcatacaaggagagtggcagaagaacagaaagattgaaaccaaggacagagaacacctgaaattgcttcagggtcatatgtca

SEQ ID NO: 1002536 - DNA, 120 bp, Artificial Sequence
  ENSG00000254143_1 (sequence is synthesized)
cagcgctgggcatttcatttgggtatctatcatcattcccattctgcaatgaggaaatgctgtcagagtgattaagtaatttgcccatggtctcacatagaagcctgtcttctccaggga

SEQ ID NO: 1002537 - DNA, 120 bp, Artificial Sequence
  ENSG00000254143_2 (sequence is synthesized)
gctctggggacccatcctggtgcatcattcgttggctctgtgacaatgggcacatcgtttaacctctcttggcttcattctccttactggaatgatggagagagttttgcctatttcaga

SEQ ID NO: 1002538 - DNA, 120 bp, Artificial Sequence
  ENSG00000254143_3 (sequence is synthesized)
ggcttgctcttctatacgtgagcctataagtaacttgtcttaagaatttccactccttctgtactctgatttaaatttgaaggcatcaaaacaaaaacaatcaagatttcagattccaaa

SEQ ID NO: 1002539 - DNA, 120 bp, Artificial Sequence
  ENSG00000231236_0 (sequence is synthesized)
gcccactcacacacatagagtagcatgttatggcacttacactaataaagccactgctatcaaagttctggacttgatttccagcagtattagctctgttttaccctcaagcttctgggt

SEQ ID NO: 1002540 - DNA, 120 bp, Artificial Sequence
  ENSG00000231236_1 (sequence is synthesized)
tagtgggttattgctcaccaaagaagttctggttggaagaagaggtaagatatctccagagccgctgagaagaatgagtaaggtaaaactggtggcattcctgactgaatacccttcact

SEQ ID NO: 1002541 - DNA, 120 bp, Artificial Sequence
  ENSG00000231236_2 (sequence is synthesized)
cacaggaggcagtgtggaacagtgggaatgaggagtgctatgggactttgtatatctggtctggaagcctgtttctggtacgtacagctagggatttgtagaagacttcaggactccaga

SEQ ID NO: 1002542 - DNA, 120 bp, Artificial Sequence
  ENSG00000231236_3 (sequence is synthesized)
tgactctgaaatacttagcaacagtagaagataactacataagaggagcttggaactttggctcaccatggggaagagcaccactgaaggctgactatatctgcactgaacttgatggag

SEQ ID NO: 1002543 - DNA, 120 bp, Artificial Sequence
  ENSG00000231236_4 (sequence is synthesized)
caagaataaattttactctccactaacatctagggggttgtattttacagcaattgccaccatcatcaatatagctgatactgtgagacagaaggtaaagtctgaacaagtttatagcct

SEQ ID NO: 1002544 - DNA, 120 bp, Artificial Sequence
  ENSG00000231236_5 (sequence is synthesized)
cagtgcaagtagctgaagaacaaaaccactaactctgtgtgaagaaggatatcaaggttttttaaaaacaataaaaaatgatagtgttgtagacctagttacgcatcatataaaatcctc

SEQ ID NO: 1002545 - DNA, 120 bp, Artificial Sequence
  ENSG00000231236_6 (sequence is synthesized)
ccatacctaccagcttatgtattcatcctgtctttgatcctggcccttgcctattttctaagggacagacgtaacgataactcagggacttcccaggtccagactactccccctgctcta

SEQ ID NO: 1002546 - DNA, 120 bp, Artificial Sequence
  ENSG00000231236_7 (sequence is synthesized)
ccaccaacagaagtttggcaccctcatgcgatgcattggctgacaaggaaagacttaccttcacatggtcatgctggacccacgggtatctgcttctctctacccagaggggccaaatta

SEQ ID NO: 1002547 - DNA, 120 bp, Artificial Sequence
  ENSG00000231236_8 (sequence is synthesized)
cacatcctctatgtgaaatgtgaatgagtcaatgctccatggggcacacttataccaatgagaaaccaacgagaaacagaatatgagattttctctttctacaaaattttagaaataaaa

SEQ ID NO: 1002548 - DNA, 120 bp, Artificial Sequence
  ENSG00000231236_9 (sequence is synthesized)
taagaaaaaaatagttcacctaaattaagcaaatattttcctataaagcacccacattttcttgcaataaatacattaacctggagaaatgtcactaacatgtcaaattaacttctcaat

SEQ ID NO: 1002549 - DNA, 120 bp, Artificial Sequence
  ENSG00000231236_10 (sequence is synthesized)
ttagttttacagttttacagttctggtaaatatttggcttctgtgcttttaagttactgttgtaactctgaagccatattttgatttaatcctgaaaggtttcagaaagaaatcatggac

SEQ ID NO: 1002550 - DNA, 120 bp, Artificial Sequence
  ENSG00000231236_11 (sequence is synthesized)
tacaaaacttgtatagagtaactcttttgttttaagcaaataaatacaacgttaaaaaattctgcattggacaaaagtaaagcagtttagcttactcaaataaaacacagctgaatgatg

SEQ ID NO: 1002551 - DNA, 120 bp, Artificial Sequence
  ENSG00000231236_12 (sequence is synthesized)
atcagtgtattcttctatatgttattgtatcttcaacctcaccagacttttggctggtagtcccaacaatgtgtcctaaacttcatattacctgttttgatgttgattttcactgcaact

SEQ ID NO: 1002552 - DNA, 120 bp, Artificial Sequence
  ENSG00000231236_13 (sequence is synthesized)
gaccataaacacttcaagttagagactgttattgatattatttctctttttaattattaatgttatgtgaagtaacaagcatatagtagggaatcaataaggattagagaaattaactta

SEQ ID NO: 1002553 - DNA, 120 bp, Artificial Sequence
  ENSG00000231236_14 (sequence is synthesized)
agaggaaaaatacacatctgaagctgaaataaaatactcagaagggaagtattacgggagatattttaaggacttgacatttcattgattaagatttctttttttcctcattgtgtagta

SEQ ID NO: 1002554 - DNA, 120 bp, Artificial Sequence
  ENSG00000231236_15 (sequence is synthesized)
tcaaagatctttcaaaaattacagggatatcaacatagaagaacatatttagaaacatcacataatgattccaaaatattgtctttacttttaagattttttagaaatctctctaacata

SEQ ID NO: 1002555 - DNA, 120 bp, Artificial Sequence
  ENSG00000231236_16 (sequence is synthesized)
aacttccttgggaatgggatcacttaaggataaggaactttggattgctgcagagccataaattacaaattccaaccagctgacagattgaactttgaaaataaagaaaaatgcaaaccc

SEQ ID NO: 1002556 - DNA, 120 bp, Artificial Sequence
  ENSG00000231236_17 (sequence is synthesized)
acaagtttaaaatgtaaacatgttgcccaaaaccattaaaaagtcagtttgcatgatactctcaaggttgttttttaaaaagcctgtctgttaagtaaagacagtattgttcaccctttg

SEQ ID NO: 1002557 - DNA, 120 bp, Artificial Sequence
  ENSG00000231236_18 (sequence is synthesized)
aagctgattctcaagaaggggtgcccttctgctactctctatgaaaataaaaatgaaaataaaatataaggttttatttcctgcttagagttgtcctaggcctgtgctaatgctttctac

SEQ ID NO: 1002558 - DNA, 120 bp, Artificial Sequence
  ENSG00000231236_19 (sequence is synthesized)
tgctttatttctaaaattttgtatatgaagctattgctacaggaaatcttttttttcttaagactttaatacctggtaatcacactactgtagaattacttctctataaggaccttatca

SEQ ID NO: 1002559 - DNA, 120 bp, Artificial Sequence
  ENSG00000231236_20 (sequence is synthesized)
gtaggatttagtaggcaattcaagaagataacaagccatgaaaagatttggaatttttctggctatgagataatcaatgatgttctataaaattctgggaattatatcattttggaacta

SEQ ID NO: 1002560 - DNA, 120 bp, Artificial Sequence
  ENSG00000206573_0 (sequence is synthesized)
gtgggtaaaatgctatcatgctatcaaacagcatcacatgctacagagaagtcttgtgaaaggatgtcagtgtggcaaacttcattgtcttttaagaaattgccacagctatcgtaatct

SEQ ID NO: 1002561 - DNA, 120 bp, Artificial Sequence
  ENSG00000206573_1 (sequence is synthesized)
tcaaccaccaccaccctgatgagtcagtagccatcgttaacgttggcgtaagaccctccaccagcaaaaagattgttagcatttttttagcagtgatgtatttatcaattatacataatg

SEQ ID NO: 1002562 - DNA, 120 bp, Artificial Sequence
  ENSG00000206573_2 (sequence is synthesized)
ctattgtacacttcttaatagactatggtatagtgtaaccataatttatgcactgggaaaccaacaaattcatgagattcgctttattgtagtgctctggaattgagcctgccgtgtttc

SEQ ID NO: 1002563 - DNA, 120 bp, Artificial Sequence
  ENSG00000206573_3 (sequence is synthesized)
gagggcaggacagttcttatggctttatccgttgcgtaagcacagagaggtctgcgaggtcaaaactattgtcatgatagcaagatgcctgtctttttcatttattctcacggtgtgcag

SEQ ID NO: 1002564 - DNA, 120 bp, Artificial Sequence
  ENSG00000206573_4 (sequence is synthesized)
aggctacatgatgtgtgatgacatcctcattgatgttaatgaatggtgctatacttgaattttctaaggtgtcattaggtaggtttaggtatgcatacttgtttttagaaattatttttt

SEQ ID NO: 1002565 - DNA, 120 bp, Artificial Sequence
  ENSG00000206573_5 (sequence is synthesized)
tcctttttcccatttttagaaatcaactcattttttaggttatgccttcagtaatctttgcaacctcaatattgtgtaatggttactttaaaatactgtagttttctttgtgcctaagta

SEQ ID NO: 1002566 - DNA, 120 bp, Artificial Sequence
  ENSG00000206573_6 (sequence is synthesized)
tgtgcctaagtataaacataagtacattttgttgttttgtttgcaatagtggtttaaatattttcccaaaatatccaaatttaaaaattctacaactttagaatttaataaatttattct

SEQ ID NO: 1002567 - DNA, 120 bp, Artificial Sequence
  ENSG00000206573_7 (sequence is synthesized)
ttaaaaagactgcttctcatttacttactggctataccatctgtatactaataaaaaacaagatttgatttggaaggactgactcaaactaacgaaaatatgaaacctgtctttctgctt

SEQ ID NO: 1002568 - DNA, 120 bp, Artificial Sequence
  ENSG00000206573_8 (sequence is synthesized)
tggagatatttacctaatcatgttctgcagtagaataatttagttcttttgtctttttttggagatgaggtcttgctgtgttgcccaggctattcacagctgccatcatagtgaactaca

SEQ ID NO: 1002569 - DNA, 120 bp, Artificial Sequence
  ENSG00000206573_9 (sequence is synthesized)
aaaagaattttgagacaggatcttgccatgttgctcaggctagtcttcaactcctagccctgagtgatcttgctttgggcctctcaaaatgttgagttaataggcgtgagccaccatacc

SEQ ID NO: 1002570 - DNA, 120 bp, Artificial Sequence
  ENSG00000206573_10 (sequence is synthesized)
cagccaaaaatttttttagagatgggaatggaatgatcttgaatagtgttggtgccacctatgttgtggcatcattttgaaaccaatcattcagagtgctttttttggtaaggcattatt

SEQ ID NO: 1002571 - DNA, 120 bp, Artificial Sequence
  ENSG00000206573_11 (sequence is synthesized)
ttttaatgcaggtatgccactactgggaaaaaaaaaaaaacaggttttaaagctagaaatgaaaagctacttaagtatcttaaaggataagttactttattatacactagaaacatacac

SEQ ID NO: 1002572 - DNA, 120 bp, Artificial Sequence
  ENSG00000206573_12 (sequence is synthesized)
aatagctgaaaaacttaaaaaatctcacactgctgaatgtctctgctggctgaagtgtaagtaaaagatcatagtagtgccgctgttgagtgataaagcaacttgtcattaaagatgtgt

SEQ ID NO: 1002573 - DNA, 120 bp, Artificial Sequence
  ENSG00000206573_13 (sequence is synthesized)
gtgcagacatggattctgagttaatatctcatctgtagaagtatatatttgtcccttgctttgggattggtttctggacagcactcccccacccttgctggccatttgccaaggacacca

SEQ ID NO: 1002574 - DNA, 120 bp, Artificial Sequence
  ENSG00000206573_14 (sequence is synthesized)
aaacccaaggatgttgaattcccttttataaaatggcgctgtatctgcatacaacttacacacatcctcccatatactttaaatcatttccagatttcttatacttcatacaatgtgaat

SEQ ID NO: 1002575 - DNA, 120 bp, Artificial Sequence
  ENSG00000206573_15 (sequence is synthesized)
gctatataaatagttgttacattgtgtacttatatttgtactattgtattaaatattctcaaatattttcaagcacatttggttgaatctgcagatgcagaacctgaggatatggagggc

SEQ ID NO: 1002576 - DNA, 120 bp, Artificial Sequence
  ENSG00000206573_16 (sequence is synthesized)
cgggttcccaccgcctgaagggcgagacaagcccgacctgctacaggcactcgtgggggtgtggaaacaggaagagaactagaactggaagtaaagcattgaagatgtgactgaattgct

SEQ ID NO: 1002577 - DNA, 120 bp, Artificial Sequence
  ENSG00000206573_17 (sequence is synthesized)
gccaatcagcggaagccgccggggccgcctagagaagaggctgtgcttcggcgctccggctcctcagagagcctcggctaggtgtggaaacaggaagagaactagaactggaagtaaagc

SEQ ID NO: 1002578 - DNA, 120 bp, Artificial Sequence
  ENSG00000206573_18 (sequence is synthesized)
agagaagaggctgtgcttcggcgctccggctcctcagagagcctcggctagctgggattctgtccctgaccgtcttcacagtccaggtgatcttgactactgctttacagagaattggat

SEQ ID NO: 1002579 - DNA, 120 bp, Artificial Sequence
  ENSG00000206573_19 (sequence is synthesized)
gcgggctgccggccgagacttctggatggcggcggccgcggctccgccccgggttcccaccgcctgaagggcgagacaagcccgacctgctacaggcactcgtgggggtgggggaggagc

SEQ ID NO: 1002580 - DNA, 120 bp, Artificial Sequence
  ENSG00000206573_20 (sequence is synthesized)
gggggtcggtccggctggtttgtgggtgggaggcgcttgttctccaaaaaccggcgcgagctgcaatcctgagggagctgcggtggaggaggtggagagaaggccgcacccttctgggca

SEQ ID NO: 1002581 - DNA, 120 bp, Artificial Sequence
  ENSG00000206573_21 (sequence is synthesized)
gggggaggggagtgccgcaatacctttatgggagttctctgctgcctcccgtcttgtaaggaccgccctgggcctggaagaagccctccctcctttcctcctcgcgtgatctcgtcatcg

SEQ ID NO: 1002582 - DNA, 120 bp, Artificial Sequence
  ENSG00000206573_22 (sequence is synthesized)
cctccatgtcgagtcgcttctcgattatgggcgggattcttttgcctaggcttaaggggctaacttggtccctgggcgttgccctgcaggggagtgagcagctgtaagatttgaggggcg

SEQ ID NO: 1002583 - DNA, 120 bp, Artificial Sequence
  ENSG00000206573_23 (sequence is synthesized)
actccgattagtttatcttcccacggactagagttggtgtcgaggttattgtaataagggtggggtagggaaatggagcttagtcattcacctggggctgattttatgcaacgagactgc

SEQ ID NO: 1002584 - DNA, 120 bp, Artificial Sequence
  ENSG00000206573_24 (sequence is synthesized)
ggattatcactacttatcatttttggagcatttttctagagacagacataaagcatgatcacctgagttttataccatttgagacccttgctgcaccaccaaagtgtagcatcaggttaa

SEQ ID NO: 1002585 - DNA, 120 bp, Artificial Sequence
  ENSG00000206573_25 (sequence is synthesized)
atcttaatagaaaaattttagcttttgcttgagaaaccagtgcttccctccctcaccctctctccccaggctctctacccctttgcatccctaccaggcatcttagcaactctcactcat

SEQ ID NO: 1002586 - DNA, 120 bp, Artificial Sequence
  ENSG00000206573_26 (sequence is synthesized)
acttgatcccattttccatttgttgtacttgctcctctagtattcagacatagcactagctttctccctctcttgatcttgggtagcctggtgtctcgcgaaaccagacagattggttcc

SEQ ID NO: 1002587 - DNA, 120 bp, Artificial Sequence
  ENSG00000206573_27 (sequence is synthesized)
accacaaattaaggcttgagctggggcttgactcttacccagcagtgcttttattcctccctagttcacgttcttaaatgtttatcttgattttcattttatcctttttccttagctggg

SEQ ID NO: 1002588 - DNA, 120 bp, Artificial Sequence
  ENSG00000206573_28 (sequence is synthesized)
attctgtccctgaccgtcttcacagtccaggtgatcttgactactgctttacagagaattggatctgaggttaggcaacatctccctttttcttcctctaaatacctctcatttctgttc

SEQ ID NO: 1002589 - DNA, 120 bp, Artificial Sequence
  ENSG00000206573_29 (sequence is synthesized)
ttaccagttagtaactgatctcagatgcctgtgtgatagcttccaaattgctgtctctgtctttagtgttatcttttgatccatcttacatcttgttaggatgattgtcctaaaggaaga

SEQ ID NO: 1002590 - DNA, 120 bp, Artificial Sequence
  ENSG00000206573_30 (sequence is synthesized)
tagagcatgaaaatgacaggtgaaactccattactggcttgtactgtttacagcaagttgtctaacccgcgggccgcatgggacccaggacagctttgaatgcgacccaacacaaattcg

SEQ ID NO: 1002591 - DNA, 120 bp, Artificial Sequence
  ENSG00000206573_31 (sequence is synthesized)
taaactttcttaaagttttaggagttttttttgcggggtgttttttttgttgttgttgtctgttttttttttttgctcatcagctgtcctttatatgtggcccaagacagttcttgcagt

SEQ ID NO: 1002592 - DNA, 120 bp, Artificial Sequence
  ENSG00000206573_32 (sequence is synthesized)
gccgaaagattggacacccctggtttacaggatgaattctgttctcgtgaatgtgatgcataaggtccctggatagactttcctcaatttaacagctttttcatttttcactattttcca

SEQ ID NO: 1002593 - DNA, 120 bp, Artificial Sequence
  ENSG00000206573_33 (sequence is synthesized)
catactacacacacaaatatgacctctctcctgaagtcacatggaatgaattgcagttacccaaatcatagagacgtcatatatctttgtggggtggttctttttggaatgctacccttg

SEQ ID NO: 1002594 - DNA, 120 bp, Artificial Sequence
  ENSG00000206573_34 (sequence is synthesized)
ctgcttttaatcctgcagattcaaatgtcatctcccctttggtcatgccttccatggtctgttgttctatgacccaaactgcccttttaaaaaagcagttttcttctgactcctgagcag

SEQ ID NO: 1002595 - DNA, 120 bp, Artificial Sequence
  ENSG00000206573_35 (sequence is synthesized)
tttgtactgcgtgggtcatagtaattctggggttgttgtcattgctgatttaaattaccttaactattctgagctttttgaaggaatagtgtcttgtactcctgagctcctagtatactc

SEQ ID NO: 1002596 - DNA, 120 bp, Artificial Sequence
  ENSG00000206573_36 (sequence is synthesized)
tgatgtctagccaactttaagtaaatggagtgagcgacatgtaaatgtctttatggtttgacattttattaatcttgagcattggaaaagtggctggtatgactaaagaactgaattttt

SEQ ID NO: 1002597 - DNA, 120 bp, Artificial Sequence
  ENSG00000206573_37 (sequence is synthesized)
attttttatctaatttgaattgcaactgtggacagtatagctgtagccccggacttgttctgtggattacagaatacgtggacattgatggttttctctttttactgagcagtaaggaaa

SEQ ID NO: 1002598 - DNA, 120 bp, Artificial Sequence
  ENSG00000206573_38 (sequence is synthesized)
taaaagctgaagctctctggcccattacatttcatttaactgcttgttttgttttatttattatatatttagctgaaagctaagtccaacaaaccatttttaaagatgtgcctgccttgg

SEQ ID NO: 1002599 - DNA, 120 bp, Artificial Sequence
  ENSG00000206573_39 (sequence is synthesized)
acaacagtgaaagcaagcgttaatgagtttggatttcaaaaaaaaatgcataatgaattttagggaggtgagattccattaaactgttacaggagctacatagttaaatatatcagaact

SEQ ID NO: 1002600 - DNA, 120 bp, Artificial Sequence
  ENSG00000206573_40 (sequence is synthesized)
tgaatgaagaataggtctgtgtgatacaaatgaacccagcctaaatttctgtcctacaagttttcacttcctggaaacacttgattggaggagctctaagcatcatatcttgagttatag

SEQ ID NO: 1002601 - DNA, 120 bp, Artificial Sequence
  ENSG00000206573_41 (sequence is synthesized)
agatcaggaaaaaggatttagtactgctatgctcaaatgaacactgggcccatgtgtcagggccaagcaactagaacatgattcagaaatcagtcagagagagacacacttggacaagac

SEQ ID NO: 1002602 - DNA, 120 bp, Artificial Sequence
  ENSG00000206573_42 (sequence is synthesized)
caagaggcatttcattgtcacgaaacaaggtgggggagggattccaaaacacacagcaggaagtacttctaaccctcagaggtcaaggagcttattccatgttggtatgaggaatggctt

SEQ ID NO: 1002603 - DNA, 120 bp, Artificial Sequence
  ENSG00000206573_43 (sequence is synthesized)
attttctgatgaccacatgtgggactatttcaactgccacgagaaatcccagaaggattattgttttgtattatttatatatactatacctttttaaaaaaataaaataaatgtaacaca

SEQ ID NO: 1002604 - DNA, 120 bp, Artificial Sequence
  ENSG00000206573_44 (sequence is synthesized)
aggagttgctttttagggatgagcaaagaaagtggtttctcgagatggaatctactggtgaagttgctgtgaacattgttaaaatgccaataaaggatttaggaattacagaaacctggt

SEQ ID NO: 1002605 - DNA, 120 bp, Artificial Sequence
  ENSG00000206573_45 (sequence is synthesized)
tgccaataaaggatttaggaattacagaaacctggttgataaagcagtgccagggtgtgagagagttgacttcaattttgaaataagttccactggctgggtgtggtggctcacacctgc

SEQ ID NO: 1002606 - DNA, 65 bp, Artificial Sequence
  ENSG00000206573_46 (sequence is synthesized)
ttaggaggccgagactggtcctctaccaaattagccaggtgtggtgcacacctgtagtcccagct

SEQ ID NO: 1002607 - DNA, 79 bp, Artificial Sequence
  ENSG00000206573_47 (sequence is synthesized)
agctgaggcaggagaatctcttgaaccagggaggaggaggttgcagtaagccgagatgggtttaaaaaaaaaaaaaaag

SEQ ID NO: 1002608 - DNA, 120 bp, Artificial Sequence
  ENSG00000206573_48 (sequence is synthesized)
attttccacaaaactctcaagaaggacttgttgcaactggaaaagcaattaaatgtgaatcgtgatccaggagaaagtaacaactcacataactcccaaattaaaagttttccaaagata

SEQ ID NO: 1002609 - DNA, 120 bp, Artificial Sequence
  ENSG00000206573_49 (sequence is synthesized)
tttggttttgaaaacacacaccttagtgtactgaaagaaaaacaatttcttttaatttggtttgttggtcccacaccccatctatcaatgtatgtgctatttacaaataagttctataca

SEQ ID NO: 1002610 - DNA, 120 bp, Artificial Sequence
  ENSG00000206573_50 (sequence is synthesized)
gtggcaggaagcgcgcgctggaggcgggggcgggctgccggccgagacttctggatggcggcggccgcggctccgccccgggttcccaccgcctgaagggcgagacaagcccgacctgct

SEQ ID NO: 1002611 - DNA, 120 bp, Artificial Sequence
  ENSG00000206573_51 (sequence is synthesized)
ggacttgttacttggcttgtatttgccaggcatcagcaccaactagttaaagatactcttacgtgaaagcttggcaacaaacacatgtcctgaaataatgcaagtgtagaataacttttt

SEQ ID NO: 1002612 - DNA, 120 bp, Artificial Sequence
  ENSG00000206573_52 (sequence is synthesized)
aaaatctcatggtttatgctaaactatatgttgacataagagtggtgataaggcaacagtaggtaaaagtaaaatttcaggcaccttggcacaaactgtggcagtggcatcaaactctaa

SEQ ID NO: 1002613 - DNA, 120 bp, Artificial Sequence
  ENSG00000206573_53 (sequence is synthesized)
gttatttttcactgccatgcatttgtggtgtgaacccccacaaaagaaaaaaaccagtttcactcaagaatgtccttgtgaaagcagtgacattttgttaaatcttaaaccctacagtac

SEQ ID NO: 1002614 - DNA, 120 bp, Artificial Sequence
  ENSG00000206573_54 (sequence is synthesized)
ataactttttgaaatggttgtctcaagaaaaagcactcatgtaagctgaattatctgctatttccttggagcctaacaactgacagcaattgttttcaatgataaaatccaaacgttgag

SEQ ID NO: 1002615 - DNA, 120 bp, Artificial Sequence
  ENSG00000206573_55 (sequence is synthesized)
tcaaaatcagaatttcgggaaaacttgtgtctaatatcaggaacttgacagcttcccaatacttcatgagatagtgatattgaaaataatttttttttttttttgggacatctggctgac

SEQ ID NO: 1002616 - DNA, 67 bp, Artificial Sequence
  ENSG00000206573_56 (sequence is synthesized)
catctggctgataactgggactacaggtgtgtaccactgtacccggctaatttttgtatttttagta

SEQ ID NO: 1002617 - DNA, 83 bp, Artificial Sequence
  ENSG00000206573_57 (sequence is synthesized)
gtgttaagccactgtgcccggccaatgatattttaggtagtatacagtaaaatgggccaacatttgggagattgacataactc

SEQ ID NO: 1002618 - DNA, 120 bp, Artificial Sequence
  ENSG00000206573_58 (sequence is synthesized)
acagtaaaatgggccaacatttgggagattgacataactcagtgaagctatattttcctaatgactaatacgtgagattatagaaaactgctagtaacattgtaaccaattgaatgcaaa

SEQ ID NO: 1002619 - DNA, 120 bp, Artificial Sequence
  ENSG00000206573_59 (sequence is synthesized)
agaaacaattcagttgtcttctatttaagtcagacatttagggaaacaattgccaaaatgtaaaacaatgcacctatttttttaaaaatatgcatttgttgctataatatttaaatattt

SEQ ID NO: 1002620 - DNA, 120 bp, Artificial Sequence
  ENSG00000206573_60 (sequence is synthesized)
tactttctaatatggtaagatactagtaaagtgatttggggccctcaatctttaagaatgtgaagggattctctgaggccacaaagtttaagaaatggctactctagcacaaacgcacat

SEQ ID NO: 1002621 - DNA, 120 bp, Artificial Sequence
  ENSG00000206573_61 (sequence is synthesized)
agtaaatactcaagtacctgttgaatgacttcatggagttaaagtgactcctggtattaaatctgtatggctgggataatgggcatgctaggacaggaagcagatttccttaacttcacc

SEQ ID NO: 1002622 - DNA, 120 bp, Artificial Sequence
  ENSG00000206573_62 (sequence is synthesized)
ctataggtcttgtgagacttcgtcttataggctgaacaccattcacaaaatgtaataatgcttcattccttcaggttgaggtaaagaacttgagcaactggattagcaaagctgcaaaga

SEQ ID NO: 1002623 - DNA, 120 bp, Artificial Sequence
  ENSG00000206573_63 (sequence is synthesized)
atgaaatgtggcctaagatgtaattatgttctctgcccttcctttgggccagggtagttttgcacttgacacaatggaaaataggccataaagcctgaaaataaaatgttctaaacccca

SEQ ID NO: 1002624 - DNA, 120 bp, Artificial Sequence
  ENSG00000206573_64 (sequence is synthesized)
tcaaggaagccttgataccctcacccttactacactgtatcctccatttgaatgttgtcaagagctcttctcacaattgtaaataataattgtgtaattttgttttttttttcctacttt

SEQ ID NO: 1002625 - DNA, 120 bp, Artificial Sequence
  ENSG00000206573_65 (sequence is synthesized)
tataaaaccccattttatagggtaggaaactaaggcttagagtttgagcaattttcccatagataacaccaataaattgagggctgcagagaccacttaagtggttctcttaacagtagt

SEQ ID NO: 1002626 - DNA, 120 bp, Artificial Sequence
  ENSG00000206573_66 (sequence is synthesized)
gaatggtaaccaccatatcactggaaggattttgtaattataaataaaaaacctgtcagcagaacataaataccaagctgtcacatgtcatttgtggaatgaggtgacgtgaccctaggc

SEQ ID NO: 1002627 - DNA, 120 bp, Artificial Sequence
  ENSG00000206573_67 (sequence is synthesized)
ctgaacaatgttctatgcagattaacagaaggtttctgacacgaaagccgggaaaggtctgcctctgcttaggggaacttaagtggattacagagaagaaaattgccttcctccagttta

SEQ ID NO: 1002628 - DNA, 120 bp, Artificial Sequence
  ENSG00000206573_68 (sequence is synthesized)
tgcttatgccttcaattatcttttcccattcaagtctaccagcttgtctgttacacaaagaggactcatcggcagtttgtaattctcagcttcctctgtaatctagtgaatagatgtcac

SEQ ID NO: 1002629 - DNA, 120 bp, Artificial Sequence
  ENSG00000206573_69 (sequence is synthesized)
taacaatgtatctaggccagtggcacatggctctttgaaataagtagttacattctttacaaaaaagttccactttctattgttaattgttttaaaactcttgggtccactgatccaacc

SEQ ID NO: 1002630 - DNA, 120 bp, Artificial Sequence
  ENSG00000206573_70 (sequence is synthesized)
atggagatttcattatgtctaatttgcccattaggtctagaatattctggatgtatcactcttatctaaaagctaaagaaatatgattacctctattggtattgccccagttccacacat

SEQ ID NO: 1002631 - DNA, 120 bp, Artificial Sequence
  ENSG00000206573_71 (sequence is synthesized)
tggatcgactattatatcataaggtagaggatcacagagcctagagaaaagaaaacagcctatgtgaagactcactcaaaagctgaggcttctatactgatgattcctgaagctttaaga

SEQ ID NO: 1002632 - DNA, 120 bp, Artificial Sequence
  ENSG00000206573_72 (sequence is synthesized)
ctgatgattcctgaagctttaagattgaggacctaccacactagcccgaaggaacaccaatctacacatattttagaaatcaatttgtggccgcgcacggtgactcacgcctgtaatccc

SEQ ID NO: 1002633 - DNA, 120 bp, Artificial Sequence
  ENSG00000206573_73 (sequence is synthesized)
gcctgtaatcccagctagtacaaaggctgagactcgagaattgcttgaacccagaaggcggggattgcagtgagccaagatcatgtaagatgcagcctgggtgacagagcaagactccgt

SEQ ID NO: 1002634 - DNA, 120 bp, Artificial Sequence
  ENSG00000206573_74 (sequence is synthesized)
tactataggcaaaagctaatggaaacataggtagaagaaatgaagtaatagttattgaatgctttttgtgtactgcaggtgtggaaacaggaagagaactagaactggaagtaaagcatt

SEQ ID NO: 1002635 - DNA, 120 bp, Artificial Sequence
  ENSG00000206573_75 (sequence is synthesized)
gggagagaaaaaaagtatgcctgtgtatttcgagcggagggcagcaagaggcctctcctcaagggaaaggtgtggaaacaggaagagaactagaactggaagtaaagcattgaagatgtg

SEQ ID NO: 1002636 - DNA, 120 bp, Artificial Sequence
  ENSG00000233828_0 (sequence is synthesized)
ttttttaagttgagaatgacctgcctgattgtggagatgagttagttgaccattcattcattcattcattcagggaatgttttttgagtgactgttagtaacaatacactgggggttctc

SEQ ID NO: 1002637 - DNA, 120 bp, Artificial Sequence
  ENSG00000233828_1 (sequence is synthesized)
attatctataagatgctatcaatatgtatacagaaaagggactagttctttcagcatttgttaaacaaattaccttagaaggcaacccaatttaggagacagggtgtaggctttagaggc

SEQ ID NO: 1002638 - DNA, 120 bp, Artificial Sequence
  ENSG00000233828_2 (sequence is synthesized)
agactgatctgagtttgaatctaggttctgctacatactagctgtgttatttttgacaagttaattggtgttccaattttcagtattaaatgagatatttatagcattaaaacaatgtac

SEQ ID NO: 1002639 - DNA, 120 bp, Artificial Sequence
  ENSG00000233828_3 (sequence is synthesized)
ctaaaacaatgtctgatacaagtaggcatttaacaaatagtcaacatcatggccatgcaaataggcacaatcaacttaagtatcagctcagtttgctcctgttctaataatgataggtct

SEQ ID NO: 1002640 - DNA, 120 bp, Artificial Sequence
  ENSG00000233828_4 (sequence is synthesized)
cagcccacctggttatttccaagactattttggaaacattatagaatcttgattgataaacaatacaatagaatgatgatggttcataagtattcatatttaaacagtttgaataaatgt

SEQ ID NO: 1002641 - DNA, 120 bp, Artificial Sequence
  ENSG00000233828_5 (sequence is synthesized)
tcataattattttgcagtttaaaatggcagtttttctgggtacaaggaaagaagactgctttttgacattatggaaggaagctgtgaatagtattaaatcccatttacatttgtatgctt

SEQ ID NO: 1002642 - DNA, 120 bp, Artificial Sequence
  ENSG00000233828_6 (sequence is synthesized)
tttttttttttgagatggagtcttgttcttttcacccaggctggactgcagtagtgtgatcttggctcactgcaacccccgcctccacctccacctccgcctccgtggttcaagcgattc

SEQ ID NO: 1002643 - DNA, 120 bp, Artificial Sequence
  ENSG00000233828_7 (sequence is synthesized)
tgtaagaagtaaagaaatacaagtaagtataatagatttttaaactttctttcctgtttcccgaactttaaaacccatcactcaatttgaagacaatgcatttttatatgtgttaggaat

SEQ ID NO: 1002644 - DNA, 120 bp, Artificial Sequence
  ENSG00000233828_8 (sequence is synthesized)
tcacttcttcatacttttcagatgctcagagattgtggacattatgcctttcatcctttacctttggaaccaacttgtatgggagaacaacttatcaagtataattgtactatggtcaca

SEQ ID NO: 1002645 - DNA, 120 bp, Artificial Sequence
  ENSG00000233828_9 (sequence is synthesized)
catgtcctttactctccatgttgaaaatagaactatgacaaggaagcaattactagaccaatgtttttttggcccaaaggaggctagtgcagaatcagacgaggttttgaagtgatctaa

SEQ ID NO: 1002646 - DNA, 120 bp, Artificial Sequence
  ENSG00000233828_10 (sequence is synthesized)
agatcttggatcacctgggtcctggtcatttcaaggctatagaatcttaatgtaaattggagagatataattattgaaaataaatctgggtctactctaatattgacttagactcatttc

SEQ ID NO: 1002647 - DNA, 120 bp, Artificial Sequence
  ENSG00000233828_11 (sequence is synthesized)
aaagtcctaacatgatcttcagccttcctttcagagaaactaattctctaaatatgtattcctagacccactatcattgtctttgtactgaatgattattgacagttttttggatttcta

SEQ ID NO: 1002648 - DNA, 120 bp, Artificial Sequence
  ENSG00000233828_12 (sequence is synthesized)
gagacctctcctgacagagaaatatcctggtccctaggaagcattctctgtgattttggttgctattggtctgttactgggctttggtggaaaccgaatgtttgactatggatcatcaag

SEQ ID NO: 1002649 - DNA, 88 bp, Artificial Sequence
  ENSG00000233828_13 (sequence is synthesized)
gctttggtggaaaccgaatgtttgactatggatcatcaagtcaccatgcaacctgaactacctatcatgaactgggtgctttctgacc

SEQ ID NO: 1002650 - DNA, 81 bp, Artificial Sequence
  ENSG00000233828_14 (sequence is synthesized)
ctctcccctagcctgcaccagtggcttcatggggagttccctatgattagttgacagaggaagagaagactaaggcctggt

SEQ ID NO: 1002651 - DNA, 120 bp, Artificial Sequence
  ENSG00000233828_15 (sequence is synthesized)
tatgattagttgacagaggaagagaagactaaggcctggttcacagatgattctgcatgatatgcaggcactacctgaaagtagaccactgcattacaacccttttctaggacatccctg

SEQ ID NO: 1002652 - DNA, 120 bp, Artificial Sequence
  ENSG00000233828_16 (sequence is synthesized)
gaagggaaatcttcccagtgggcagaatttcgagcagtgcacctggttgtgtactttgcctggaaggagaaatgtccagatgtgcgattatatactgattcattggctgtagccagtggt

SEQ ID NO: 1002653 - DNA, 82 bp, Artificial Sequence
  ENSG00000233828_17 (sequence is synthesized)
gaaatgtccagatgtgcgattatatactgattcattggctgtagccagtggtttggctgtatggtcagggacttggaagaag

SEQ ID NO: 1002654 - DNA, 120 bp, Artificial Sequence
  ENSG00000233828_18 (sequence is synthesized)
gatatttgtatctcatgtgagtgctcaccaatgggtgaccttggcggaggaggatttcaataatcaagtggataggatgacctgttctgtggacatcactcagcctctttccccagccac

SEQ ID NO: 1002655 - DNA, 87 bp, Artificial Sequence
  ENSG00000233828_19 (sequence is synthesized)
cctgttctgtggacatcactcagcctctttccccagccacctctcttattccccagtggacccatgaactatgtggtcatggtggca

SEQ ID NO: 1002656 - DNA, 89 bp, Artificial Sequence
  ENSG00000233828_20 (sequence is synthesized)
ccaaggctgacctggctaccggataccaacactgaaccctcgatatggcgccattcctcagagtgatcagccagctacctggtggcagg

SEQ ID NO: 1002657 - DNA, 85 bp, Artificial Sequence
  ENSG00000233828_21 (sequence is synthesized)
ttctgccaagactccatccatggattcatggaatgcattatctgttgtgggaagtcagggaccctgaatagagggactgggtgaa

SEQ ID NO: 1002658 - DNA, 75 bp, Artificial Sequence
  ENSG00000233828_22 (sequence is synthesized)
ccaagactccatccatggattcatggaatgcattatctgttgtgggaagtcagggaccctgaatagagggactgg

SEQ ID NO: 1002659 - DNA, 86 bp, Artificial Sequence
  ENSG00000233828_23 (sequence is synthesized)
ctcttaatcccatcatctttgtaaagtaatgttatctgtataagttgtttgtaaaacatgcgtgtttgaacaatatgaaatctggg

SEQ ID NO: 1002660 - DNA, 120 bp, Artificial Sequence
  ENSG00000233828_24 (sequence is synthesized)
acaggataacagtgattttcagggaacaagggaaataaccataaagtctgactgcctgcggggcggggcggggcagaacagagtcatatttctcttcttgcaaaagcgaataagagaaat

SEQ ID NO: 1002661 - DNA, 62 bp, Artificial Sequence
  ENSG00000233828_25 (sequence is synthesized)
tcttcttgcaaaagcgaatactcccactgacaggcccctaaaatggccgctctgggagtgtc

SEQ ID NO: 1002662 - DNA, 120 bp, Artificial Sequence
  ENSG00000233828_26 (sequence is synthesized)
acattttcatctggatgaagattaaattgcagaggggcaaacttagaagaggagagacaagttagaggtttttgtggtagtgcaggtgtttgacaatggtggtgagattagcatggtagt

SEQ ID NO: 1002663 - DNA, 120 bp, Artificial Sequence
  ENSG00000233828_27 (sequence is synthesized)
actggaaatagtaattagattctggatacactctgggagtagggtctacatattgagggtttggatatagagaacaaggggaagagaggaatcaagcatctcccctaggattttgccttg

SEQ ID NO: 1002664 - DNA, 120 bp, Artificial Sequence
  ENSG00000233828_28 (sequence is synthesized)
agctgctcgtgaagtggaaatgcatttactgagagaagactgggggagaacaatttataagggaggaaattagaagttctactccagctattggtctgttactgggctttggtggaaacc

SEQ ID NO: 1002665 - DNA, 75 bp, Artificial Sequence
  ENSG00000233828_29 (sequence is synthesized)
ataagggatgaaatgtaccctggtctcctacagcacccccaggcttgttaggattgggaaattccagcctggcga

SEQ ID NO: 1002666 - DNA, 85 bp, Artificial Sequence
  ENSG00000233828_30 (sequence is synthesized)
taagatgtttatcaatgacaatgcatgcacagtgggacagggtaccttatcagtaattctaattttgccctggccttcgttgccc

SEQ ID NO: 1002667 - DNA, 120 bp, Artificial Sequence
  ENSG00000233828_31 (sequence is synthesized)
acaaccaaaacttacataggctttttatcattttactgggcctatgtaactgagttttagccagtggaatatgtccaagtgacatttgccacttctaggtctggcacattaacacttgat

SEQ ID NO: 1002668 - DNA, 120 bp, Artificial Sequence
  ENSG00000233828_32 (sequence is synthesized)
gtattacatttcagaccctcttatcattctgcagtgtgtttggcgatctgttgtttaagatctatatgcactggttactgttgcttgccttccattcctacccttactaatcagattcct

SEQ ID NO: 1002669 - DNA, 120 bp, Artificial Sequence
  ENSG00000233828_33 (sequence is synthesized)
attatagctacttctgtccttgattcattttgtatattagatgtgtgtgtgttcatgtgcatgcatgcaccctcacatgtaggtgtatatgggagtggtggtaaagacaggatatttctt

SEQ ID NO: 1002670 - DNA, 120 bp, Artificial Sequence
  ENSG00000233828_34 (sequence is synthesized)
cagttcatgggattttatttcaggagaattcaaacattcacgtattggagaagatgacacatttcttgaatgtcttgggctttgagctgaatgcactaactagaagggacttcagattgt

SEQ ID NO: 1002671 - DNA, 120 bp, Artificial Sequence
  ENSG00000233828_35 (sequence is synthesized)
cctccttcgggggaggtaagtatattcttcatatacaggtaagagtgaaatgatagaagaatgttcctcctctccttttcttcctggacaacagatcaaatatttctcagatcttttaca

SEQ ID NO: 1002672 - DNA, 120 bp, Artificial Sequence
  ENSG00000233828_36 (sequence is synthesized)
gctgaattggagtcacatggacaggtatgatcttaaaatataaaaaattattttaaaattacatgctaaaattttataaaaataaatgctaaaactaacttaaacggaagcatttgatta

SEQ ID NO: 1002673 - DNA, 70 bp, Artificial Sequence
  ENSG00000233828_37 (sequence is synthesized)
attgaggctaggagtttgagacctgttatttgaggcacatgggaaggaaagttttctttgagatattcca

SEQ ID NO: 1002674 - DNA, 120 bp, Artificial Sequence
  ENSG00000233828_38 (sequence is synthesized)
tgaggcacatgggaaggaaagttttctttgagatattccacattttataatattcttcaagagatttacagagttccttgagtgaattgttggtttgttcttaatactgaatttcctatt

SEQ ID NO: 1002675 - DNA, 120 bp, Artificial Sequence
  ENSG00000233828_39 (sequence is synthesized)
caaatttatttagaagttcatttcttacagtgatctcatctcctattaagatattcttcaaggtaggttcttggccagtttctcaatgacagatttttaaaaatattgttaatcttttta

SEQ ID NO: 1002676 - DNA, 120 bp, Artificial Sequence
  ENSG00000233828_40 (sequence is synthesized)
ttaatatgagaacataattgttccagatctggaggccatcctttaagcttcttgcaacagtctgggagcaaagagtttactcgccactgggtagtgggccatggacaccccagtctccac

SEQ ID NO: 1002677 - DNA, 120 bp, Artificial Sequence
  ENSG00000233828_41 (sequence is synthesized)
cccagtctccaccagaagttcgggattgcaaaatgggactctggcagcaaatttcaaactgtatgccagacctggccctttgcagagttaaaagaagccaggtgtggtggctcacacctg

SEQ ID NO: 1002678 - DNA, 120 bp, Artificial Sequence
  ENSG00000233828_42 (sequence is synthesized)
tttgggaggctgaggccagagaatcacctgaggtcaagggtttgaaaccagcgtggccaacatgacaaaaacccatctctactaaaatagaaaaattagccaggagtgatggcgggcacc

SEQ ID NO: 1002679 - DNA, 75 bp, Artificial Sequence
  ENSG00000233828_43 (sequence is synthesized)
tgtaatcccagctacttgggaggctgatgagattgcaccactgcactcctgtctgggcaacagagtgagactgtc

SEQ ID NO: 1002680 - DNA, 120 bp, Artificial Sequence
  ENSG00000233828_44 (sequence is synthesized)
acccttttgagcagatgagggctacgatgagctctggaattcttttgatttttatgtttgtcgttagtttttcaggccagctggctaagcagggactatttctagcctaaaggaagctct

SEQ ID NO: 1002681 - DNA, 120 bp, Artificial Sequence
  ENSG00000233828_45 (sequence is synthesized)
aaggaagaccttgtgatttagttgctaagtaccagtgtgatgcatgaactcacagatggaggaggtggccttgtcaggatgccaagaatgcagatacttgaagggaaattttagtggcgg

SEQ ID NO: 1002682 - DNA, 120 bp, Artificial Sequence
  ENSG00000233828_46 (sequence is synthesized)
aaacagagacgttaactggcagatgagccattggaacatttcccagacaatatagaacatctttctgaccttgaggtcaggaagtcctcctcgacaagacacaaaaaagaaaaatcacaa

SEQ ID NO: 1002683 - DNA, 120 bp, Artificial Sequence
  ENSG00000233828_47 (sequence is synthesized)
acctggccctttgcagtgatataaaatttttcttgaggtgtctggaaagatggctgaataggaacagctctgctctgcagctcccagcgagatcaacgcagaaggagataatttctgcat

SEQ ID NO: 1002684 - DNA, 69 bp, Artificial Sequence
  ENSG00000233828_48 (sequence is synthesized)
aggcaagcagaagcagggtggggtgttgcctcacccgggaagcgcaaggggtcagggaactccctcccc

SEQ ID NO: 1002685 - DNA, 77 bp, Artificial Sequence
  ENSG00000233828_49 (sequence is synthesized)
caagggaagctgtgagggactgtgccgtgaggaacggggcattccggcacagatactatgctttccccaccaccacc

SEQ ID NO: 1002686 - DNA, 77 bp, Artificial Sequence
  ENSG00000233828_50 (sequence is synthesized)
ctgggcagccatttgggcagacactgagctagcagcaggagtttttttcataccctagtagcccctaactgaagcca

SEQ ID NO: 1002687 - DNA, 120 bp, Artificial Sequence
  ENSG00000233828_51 (sequence is synthesized)
gagcccaacaagctaagacccactgggttgaaattctcgctgccagcacagcagtctgatgtccacctggaatgcttgagcttggtgcagggaggggcgtctgccattactgaggcttga

SEQ ID NO: 1002688 - DNA, 120 bp, Artificial Sequence
  ENSG00000233828_52 (sequence is synthesized)
ttaggcagtttccccctcacagtgtaaacaaagctgctgggaagtttgaactgggtggagcccactgcagctcggcaaagttgctgtagcaagagtgtctctctagattcctcctctctg

SEQ ID NO: 1002689 - DNA, 64 bp, Artificial Sequence
  ENSG00000233828_53 (sequence is synthesized)
tctcccagcacagtgctcaggagtgggagagaccttccagcaggggtcaacagacatctggtgg

SEQ ID NO: 1002690 - DNA, 85 bp, Artificial Sequence
  ENSG00000233828_54 (sequence is synthesized)
ggagtgggagagaccttccagcaggggtcaacagacatctggtgggtgcccgtctgagacgaagcttccagaggaaggaacaggc

SEQ ID NO: 1002691 - DNA, 79 bp, Artificial Sequence
  ENSG00000233828_55 (sequence is synthesized)
gctgaaaattccaaaaaccagaacaccttttctcctgcaaaggatcacaactccttaatttacagaaggaggcttcaga

SEQ ID NO: 1002692 - DNA, 65 bp, Artificial Sequence
  ENSG00000269752_0 (sequence is synthesized)
tcctgacttcagcgccaggcctcaacccctaatttttccattatggagtcaaaaagttcccttgt

SEQ ID NO: 1002693 - DNA, 120 bp, Artificial Sequence
  ENSG00000269752_1 (sequence is synthesized)
cccctaatttttccattatggagtcaaaaagttcccttgtctgcttgaatcatggtgtggtgggcttctgtttggggccaccagccgtgtcctccatggtgccaatggggatcactgatg

SEQ ID NO: 1002694 - DNA, 68 bp, Artificial Sequence
  ENSG00000277836_0 (sequence is synthesized)
ccactacacgagctgggttcgccaggctccagggaagggactggagtgggtttcatacattagtggta

SEQ ID NO: 1002695 - DNA, 120 bp, Artificial Sequence
  ENSG00000277836_1 (sequence is synthesized)
tacacaaactacgcagactctgtgaagggccgattcaccatctccagggacaacgccaagaactcactgtatctgcaaatgaacagcctgagagccgaggacacggctgtgtattactgt

SEQ ID NO: 1002696 - DNA, 89 bp, Artificial Sequence
  ENSG00000284642_0 (sequence is synthesized)
ttgccatcatgactcattgcagcctcaatgtcccagcctcaagcagtctttccacctaaccctctcgagtagctgggactacaggcatg

SEQ ID NO: 1002697 - DNA, 73 bp, Artificial Sequence
  ENSG00000284642_1 (sequence is synthesized)
acctaacgtcttatttttaatttttgtttttttaagtagagatgggggtctcactatgttgctcaggctggtc

SEQ ID NO: 1002698 - DNA, 90 bp, Artificial Sequence
  ENSG00000284642_2 (sequence is synthesized)
ccatgcccagcagaaaaattgtcattggaataaagtctggggttttgttaaaagttttatatcggccgggtgtggtggcccatgcctgta

SEQ ID NO: 1002699 - DNA, 90 bp, Artificial Sequence
  ENSG00000284642_3 (sequence is synthesized)
cgggtgtgagaagctgaggggggagattccctgagctcagggattcaagaccagcctggacaatgcagtgaaaccctgtctctactaaaa

SEQ ID NO: 1002700 - DNA, 120 bp, Artificial Sequence
  ENSG00000284642_4 (sequence is synthesized)
gagtgcaggcacaattatggctccctgcagccttgacctccccaggttcaggtgatcctcccacctcagtttttctatttttagtagagccctccacctcccgggttcaagctgaggcag

SEQ ID NO: 1002701 - DNA, 120 bp, Artificial Sequence
  ENSG00000284642_5 (sequence is synthesized)
gagaatcacttgagccccagaggcaaaggtttcagtaagccgagatcgtgccactgcactctagcttgggctacagagtgagactccatctcacacacacacacacaaaagaaatgaaaa

SEQ ID NO: 1002702 - DNA, 120 bp, Artificial Sequence
  ENSG00000284642_6 (sequence is synthesized)
caacaatttgtacatgagttcaaaacagaattatttatttcccaaactagaaacaatccaaatgtctatcaacagataaatggataagcaaatgatgacacaattgcattaatggaatac

SEQ ID NO: 1002703 - DNA, 120 bp, Artificial Sequence
  ENSG00000284642_7 (sequence is synthesized)
cactcagcaatgaaaaggaacaaaccactcatacctacaacacagatgagcctcagaaacgtgatgctaagtgaaagaagccagaccaaaaaaattatatgctattattccatttctatg

SEQ ID NO: 1002704 - DNA, 120 bp, Artificial Sequence
  ENSG00000284642_8 (sequence is synthesized)
aaatttctggaaaaggcaaaaaccatgcaaagtagatcagaggttggctgggggtgagagcagagactgactacaaataggcccaagggaacgttttggggtgatggaagttttctataa

SEQ ID NO: 1002705 - DNA, 120 bp, Artificial Sequence
  ENSG00000284642_9 (sequence is synthesized)
gtggattatggtgatggctacacaacagtataaattaaaggtcatccaaatgtgtacttacaatgtttgaattgtatgacatgtaaattatctcattaaatctgtattttaaaaaaagaa

SEQ ID NO: 1002706 - DNA, 120 bp, Artificial Sequence
  ENSG00000269758_0 (sequence is synthesized)
atgatcctggctgtggcaaccttcgcactgagcccaccgtcctagcagcaagatggagctggggagaaagtttctgtttcagtctgtagggaagggtgcctcccaggagccaggccgcct

SEQ ID NO: 1002707 - DNA, 88 bp, Artificial Sequence
  ENSG00000269758_1 (sequence is synthesized)
tgcccggccgccccgtctgagaagacagaaggtttgtgaataaagaagttgccgcacgtatgatctgcacagcagtgattcccacatg

SEQ ID NO: 1002708 - DNA, 120 bp, Artificial Sequence
  ENSG00000265625_0 (sequence is synthesized)
aaaacccctcccatttactcaacatttggcatgattttatctgaaccattctcttaggaggctgggaggatactgaagcgtcctgtgtttaaaataatttgtaggtctttggggccagat

SEQ ID NO: 1002709 - DNA, 120 bp, Artificial Sequence
  ENSG00000265625_1 (sequence is synthesized)
tttgatggcatttttagattagatcagaaggtaggatgtagcagttctttttggcacaagaaagaggcatctgagcattcagcaagaaataaatatatattcccagacacacatgacaga

SEQ ID NO: 1002710 - DNA, 120 bp, Artificial Sequence
  ENSG00000265625_2 (sequence is synthesized)
tgttgggcagtgtcctcacgtgacccactgagagaaaggatactacgtgtcctgccaattttagtatttattctggaatcccaggcttctgcaagctgttgggttgggtttttttaatgt

SEQ ID NO: 1002711 - DNA, 120 bp, Artificial Sequence
  ENSG00000265625_3 (sequence is synthesized)
gtgtggttttccttagttgttgaaggagtttcagaaaaatcttagatgaggataagaagggcagtataaacccaaaatcaccttttcttccctttcccttcctttttttgctccatctca

SEQ ID NO: 1002712 - DNA, 120 bp, Artificial Sequence
  ENSG00000265625_4 (sequence is synthesized)
tcaccctcttgctgcaaccctgagaagttacttcacatttctcatccttacctgaccccatctataaaatgaaaatcaagagatccatctcacagggttattgtgaataaaaatgtgttt

SEQ ID NO: 1002713 - DNA, 120 bp, Artificial Sequence
  ENSG00000265625_5 (sequence is synthesized)
gaatgtttattacgtattgttgagagttattcagatatgattctcatcttcctccaaggctacccagaagacacgtgtatgtgccatttatttcctcttccatgacatcactactgcctc

SEQ ID NO: 1002714 - DNA, 120 bp, Artificial Sequence
  ENSG00000265625_6 (sequence is synthesized)
ctgccacccacagacatattccattcaaaactgaaatgggaagtgttcctagaatttcctatattgtggtgttttctggattttaagtactatctagtgctagggatgtcacttaggctg

SEQ ID NO: 1002715 - DNA, 120 bp, Artificial Sequence
  ENSG00000265625_7 (sequence is synthesized)
tcacttaggctgcttttggctgcaagtaatcaattacctcaatcaggatctcagcaagaaacagcagactcagattaggattatttgaggagggttatttatttatttatttatttattt

SEQ ID NO: 1002716 - DNA, 120 bp, Artificial Sequence
  ENSG00000277901_0 (sequence is synthesized)
caccaggacttcataggaacagttaaaacacaaaggactttatctgaggaaaggtaacatcctacagaaagagctattttgcagagaaggatgggacctggtgccagggaaggtgctgct

SEQ ID NO: 1002717 - DNA, 120 bp, Artificial Sequence
  ENSG00000277901_1 (sequence is synthesized)
agaagcagacgagggaacgagcagaagaacagaagaacagcagaatggcatggcagagagaagaaagggaccatctgaacgccaagagaaattcagctgggggaggtcagagaggagata

SEQ ID NO: 1002718 - DNA, 63 bp, Artificial Sequence
  ENSG00000277901_2 (sequence is synthesized)
gccaagagaaattcagctgggggaggtcagagaggagatagactgcaggacagccaagctgag

SEQ ID NO: 1002719 - DNA, 120 bp, Artificial Sequence
  ENSG00000236936_0 (sequence is synthesized)
ctccacatcactcctcagggaggaaatgaacgcccaggcaggcagagctgtgggcatctacagcaggccctgtgctgctgtcacaacctcaccctggtcccctgaggcggatatcaccat

SEQ ID NO: 1002720 - DNA, 120 bp, Artificial Sequence
  ENSG00000236936_1 (sequence is synthesized)
cccatttcagagacaaggaaaatgaggcccaggtgcgtgaagaaactggcctatcaaggcagagctagcgggtagcatgctggacttctaagccttcctgagaaagtgaactgcttcctc

SEQ ID NO: 1002721 - DNA, 120 bp, Artificial Sequence
  ENSG00000236936_2 (sequence is synthesized)
tgagatgggcataggcatggctgtgtgtgcatcttgtcctgaccattccacagtggctgttatcacactccatttacaagttggctcagaaaaccggaggtgaagctgaagcagcccagc

SEQ ID NO: 1002722 - DNA, 120 bp, Artificial Sequence
  ENSG00000236936_3 (sequence is synthesized)
ccctaagaagccctggacgctccctcccatcctcacatcgttgagtcaatgctattatttgaatgtctgtgtcccctccaaaattcatgttggaacttaatccttaaggagcagttttaa

SEQ ID NO: 1002723 - DNA, 120 bp, Artificial Sequence
  ENSG00000236936_4 (sequence is synthesized)
gagatggggcctttaggtcatgagggctctgctctatgaatggattagtgtcttataaaagggcttgagggggccagttcccccctcttcagtcccatatgccatgtgaagacacagttc

SEQ ID NO: 1002724 - DNA, 120 bp, Artificial Sequence
  ENSG00000236936_5 (sequence is synthesized)
atggtgccatcttggaagcagagagcaacccttaacagacactgaacaagcccgtgccttgatcttggacttcacagcgtccagaacagtgagaaataaatttctgttgtttacaaatta

SEQ ID NO: 1002725 - DNA, 120 bp, Artificial Sequence
  ENSG00000240895_0 (sequence is synthesized)
ctgaaattgcaatctttctttctgctttacaaagcagagtaaaacctaaactattgttgttacaataccaaactcatggcacaacactgtgtaatttagagttttattatttaatgtaac

SEQ ID NO: 1002726 - DNA, 120 bp, Artificial Sequence
  ENSG00000240895_1 (sequence is synthesized)
tctttactccctctatttattatctcttatagtgtaacagatggcccacaatttggaagcttactacgacatgatcacagtgttggtggatcaggaatactggcccagcttagctgggtg

SEQ ID NO: 1002727 - DNA, 120 bp, Artificial Sequence
  ENSG00000240895_2 (sequence is synthesized)
cctctgactcaagatgaaatgtagaccttttcatcatgtactcctaacatggcagctgccttcctcaaaaaagaagagagagagaacaagagagagtgaccaagatggccatcacagact

SEQ ID NO: 1002728 - DNA, 120 bp, Artificial Sequence
  ENSG00000240895_3 (sequence is synthesized)
gaggcagaactattgaaatgtgatcagtgctataaaagctgtaggagttgtgggagcagaaaaactttttaagatgaagtgaagcttgggcttgtgttgaagaaaagaataggagagaaa

SEQ ID NO: 1002729 - DNA, 120 bp, Artificial Sequence
  ENSG00000240895_4 (sequence is synthesized)
gcatctgccgacatgtacctgtgagaaccttgcaagaattacagacacttttaatgacaaaaccaggcatctgcattgggaggagtggtaaggaagaaggaggctggataaaggagctag

SEQ ID NO: 1002730 - DNA, 120 bp, Artificial Sequence
  ENSG00000240895_5 (sequence is synthesized)
aagccatgctgggagggtcctattaggccacactcaggactttggaatctgcagtacgtggagtggaaacactgaaggatataatcagttatgtacagaataaagaatgttctgagccaa

SEQ ID NO: 1002731 - DNA, 120 bp, Artificial Sequence
  ENSG00000240893_0 (sequence is synthesized)
gtgaagtcatgatacagatggagaaatagtccccctgaggtcttgcgcacagattttaagatgattctcacttacaagaacactgagtggttaccaactgcccaacagatacgtcaactg

SEQ ID NO: 1002732 - DNA, 120 bp, Artificial Sequence
  ENSG00000240893_1 (sequence is synthesized)
caagatgttctatcaagcaattcactacttcctcccttctcaatcttcaggctctgcatatggaaatgaacatttcattatgaccctatgacctacaaagctccctctctgtcactcctt

SEQ ID NO: 1002733 - DNA, 120 bp, Artificial Sequence
  ENSG00000240893_2 (sequence is synthesized)
atcatctttcctagggaggcaatcaaaatgaaatgattttaagattctagcactcccaactctaagatgaaaatgatgcagcaatcatgaactcctgtgttatctgtcactatctcataa

SEQ ID NO: 1002734 - DNA, 120 bp, Artificial Sequence
  ENSG00000240893_3 (sequence is synthesized)
gtcacatgatttgaagagaagatcattcggagcagtggaaaaatgaaatcaaacatagctgctacctcagattgaagagatgtcctctccgattctttaaagtatttcctattctcctac

SEQ ID NO: 1002735 - DNA, 120 bp, Artificial Sequence
  ENSG00000240893_4 (sequence is synthesized)
ccacctcctctgttgtttgcaagactcaaaaagataaatttatagtgaaataagaatcctccaacttacatattagagcttctgcaattaaagaaaaacagaaatcaggctgggcgcagt

SEQ ID NO: 1002736 - DNA, 120 bp, Artificial Sequence
  ENSG00000240893_5 (sequence is synthesized)
gcctgagtgacagagtgatactctgtctcaaaaagaaaaaaagaaaaagagaaatctatgggtgaagacaaatggaatggcaataccttggagtagcatttactaattcaagccatataa

SEQ ID NO: 1002737 - DNA, 120 bp, Artificial Sequence
  ENSG00000240893_6 (sequence is synthesized)
ttggcactttaataagtgaattgcatgtcctgtcttctccatgaactcagcaaagctacaactaagctcctcatcttgagagttcaccatgtgcccactttgacctatggatgggcccct

SEQ ID NO: 1002738 - DNA, 120 bp, Artificial Sequence
  ENSG00000240893_7 (sequence is synthesized)
tggcactctaccttttcagtgtcctcaactgcacaaacttcctgggctgcactgactgctgtacccaggcaattttttgggagctccaatgtcttgtctagcacatgacatgaggctgta

SEQ ID NO: 1002739 - DNA, 120 bp, Artificial Sequence
  ENSG00000240893_8 (sequence is synthesized)
gcatgttctttcaagtattagtgctaaagaggtcccattctactttctctgactgatcaggtcactgttttcagctacctggcccttctaagtcagggtcactagagtattgggaggttt

SEQ ID NO: 1002740 - DNA, 120 bp, Artificial Sequence
  ENSG00000240893_9 (sequence is synthesized)
gtaacttcttcattggtgtcttgtgttttcctgtctttgaacttgaggaaagctggccctggatgttcacaacatcaaccaagcaatgaaaaccacagcaccctacaggaaattctgcat

SEQ ID NO: 1002741 - DNA, 120 bp, Artificial Sequence
  ENSG00000240893_10 (sequence is synthesized)
ttctctcaaaacatgcaaaacacaaaattgggtggaaccacagaaggttatggataactcactacagtttggactttcaaaggccctgggaaaactatcctacttttgtgagatactatt

SEQ ID NO: 1002742 - DNA, 120 bp, Artificial Sequence
  ENSG00000240893_11 (sequence is synthesized)
gttctacctgtaatgcaagtgaacagatcttaataaggacaaataacaattttttaaatgtttaccatattttctcatttgttcctttcatcaagcatccaacctgccagaccctgcact

SEQ ID NO: 1002743 - DNA, 120 bp, Artificial Sequence
  ENSG00000240893_12 (sequence is synthesized)
tgatggatcagctggcaccacccaaatcaataaaccggctcatctgatcttgtggcacccacccaagaactgactcagcacaaggagacagcttcgactccctgtgatttcatccctgtc

SEQ ID NO: 1002744 - DNA, 120 bp, Artificial Sequence
  ENSG00000240893_13 (sequence is synthesized)
aaccagcactcctggctcactggcttccccccacccaaccaagttatccttaaaaactctgctccctgaatgctcagggagtttgatttgaataataataaaactccagtctcctgcaca

SEQ ID NO: 1002745 - DNA, 120 bp, Artificial Sequence
  ENSG00000234034_0 (sequence is synthesized)
gctttgacctaaagcttggagttgagtttggaacaaaaatgtgtcgtgaggggggttgcatggactccttatcatacgccaaatctaagatgaagctgtggaattgagtcctcctccaac

SEQ ID NO: 1002746 - DNA, 87 bp, Artificial Sequence
  ENSG00000234034_1 (sequence is synthesized)
gcccgtgagttgacaagttgtttaaacgcagatgttacaataagtcagtttaagatttggtgaagaaagtagataagagtatacaca

SEQ ID NO: 1002747 - DNA, 120 bp, Artificial Sequence
  ENSG00000234034_2 (sequence is synthesized)
gtttaagatttggtgaagaaagtagataagagtatacacagaattgaagaccttagcatcactactattcgtctgcttaggaggagcgaacagaagagaatcagtgagtttaattctcat

SEQ ID NO: 1002748 - DNA, 120 bp, Artificial Sequence
  ENSG00000234034_3 (sequence is synthesized)
gcatacaaactggttgataattttttcatcagatcacatccagtatgattaatgtttctcttttttcatttggccaactatgaggtgggcgagtaataacagtatcacaaaatagaagaa

SEQ ID NO: 1002749 - DNA, 120 bp, Artificial Sequence
  ENSG00000234034_4 (sequence is synthesized)
acagttcatactttgtctccccccaacccctcacatgataaagcaaataatctcatggttcaatctctagagtactaagtttatggctggagaaagcagtagtgcatggcatatgggcaa

SEQ ID NO: 1002750 - DNA, 120 bp, Artificial Sequence
  ENSG00000234034_5 (sequence is synthesized)
aaagcatctctgggtagctaaggcaggggtgccttgttacaattattcagactgaagtccagcatattgtatgtaatatgctatttaaataagaacaattttggtacagttattatcata

SEQ ID NO: 1002751 - DNA, 120 bp, Artificial Sequence
  ENSG00000234034_6 (sequence is synthesized)
cacaatacacaatactacatgtaattatccttcaagtttcctgtgaatattctatattggaaatgttaaattctataattggaaggaacgtctgtaatttagttgaaataaaaagaaagt

SEQ ID NO: 1002752 - DNA, 120 bp, Artificial Sequence
  ENSG00000234034_7 (sequence is synthesized)
gtgttaactttattttaaattacctctacattgtcaaacaactagagagggagcatgtatgattaaacaaaattgtaatttaaatcatgtaaagtactaatcaattaaaataataaacat

SEQ ID NO: 1002753 - DNA, 120 bp, Artificial Sequence
  ENSG00000197934_0 (sequence is synthesized)
acctgagttctaaatttatttctcaaagaagccaagctcctgagagagaaatgatactgtaagagtatctgcctggaaaccctgttgcctggagaccactcttgaagaacatccactgct

SEQ ID NO: 1002754 - DNA, 120 bp, Artificial Sequence
  ENSG00000197934_1 (sequence is synthesized)
catttcagtgtcaaatcatgatgcaacagcagagtgaactcagtgtttttggtatgaagatctccatgtgtttccatcatcagcatctcctgtgctcttaatcttaccctggacacctga

SEQ ID NO: 1002755 - DNA, 120 bp, Artificial Sequence
  ENSG00000197934_2 (sequence is synthesized)
ctggacacctgacccaggtgcccattctgtgaattctttcattgtaggaaagagaaacagatgttgacaccatgctcttggacttcccagcttccagaatcatgagccaaataaacctct

SEQ ID NO: 1002756 - DNA, 120 bp, Artificial Sequence
  ENSG00000197934_3 (sequence is synthesized)
aggtgtcgaacccaagggctcttctcagcagagtgtctgcatgccacactctgctttagagtctgttccctggggaacacaaccagagactgaaataattggtgggcagtggggagcaca

SEQ ID NO: 1002757 - DNA, 120 bp, Artificial Sequence
  ENSG00000197934_4 (sequence is synthesized)
aagggctgtttttgtttcatgtgaagacgatgagcatgctatgaaccccgaagagctgttgtataaagtatctgcctggaaaccctgttgcctggagaccactcttgaagaacatccact

SEQ ID NO: 1002758 - DNA, 120 bp, Artificial Sequence
  ENSG00000197934_5 (sequence is synthesized)
ctacaatggcctctaagagttaaaatgaaaggaagtgtaaaatggtttctcacttgaaatcaaaagctagaaatgattaagcttcgtgaggaaggcaagttgaaagctgagacagccaaa

SEQ ID NO: 1002759 - DNA, 84 bp, Artificial Sequence
  ENSG00000197934_6 (sequence is synthesized)
gcttcgtgaggaaggcaagttgaaagctgagacagccaaaagctgactcccgcaccagggagccaagttgtgcaagctccagtg

SEQ ID NO: 1002760 - DNA, 120 bp, Artificial Sequence
  ENSG00000197934_7 (sequence is synthesized)
agatcaaaccagccacaacatgcccttaagccaaagcctaatccagagcaaggctttaactctcttcaagtttgtgaagactgagagaggtaaggaaagtgcagaaggaaagttaaatgc

SEQ ID NO: 1002761 - DNA, 120 bp, Artificial Sequence
  ENSG00000197934_8 (sequence is synthesized)
tagaagagtcggttcaggaggtttcaggaaaaagccatctccacaaataaacatacaacgcgaagcaacaaatgctgatgtagaagctgtggcaagttttccagaagagctagctcagat

SEQ ID NO: 1002762 - DNA, 120 bp, Artificial Sequence
  ENSG00000197934_9 (sequence is synthesized)
cattgataaacgtggctacattaaacaacatattttcagtgtggatgaaacagagtcctattggaagaagacaccatctaggactttcatagctacagggaaaagtcaatgactggcttc

SEQ ID NO: 1002763 - DNA, 120 bp, Artificial Sequence
  ENSG00000197934_10 (sequence is synthesized)
aaagcttcaaagaacagggtgactctcttgtcagacactaatacagctgctgacttgaagttgaagccagtgctcactgcacattctgaaaacttaaggatccttaagaactgtgctaaa

SEQ ID NO: 1002764 - DNA, 120 bp, Artificial Sequence
  ENSG00000197934_11 (sequence is synthesized)
tctactgtgcctatgtgcaacaaagcccttatggcagcatgtctgtttacagtatcatttactgaatatttgaagcctactactgagaactactgctcaggaaaaaagatacttttcaaa

SEQ ID NO: 1002765 - DNA, 120 bp, Artificial Sequence
  ENSG00000197934_12 (sequence is synthesized)
atagtactgctctttgacaatggacctggtcacccaagagctctgatggaggtgtgcaaggagatgaacgctgtgttcatgcctgctaacacaacacccgttctgtactccatggatcac

SEQ ID NO: 1002766 - DNA, 120 bp, Artificial Sequence
  ENSG00000197934_13 (sequence is synthesized)
agagtaattttgactttcaagtcttattatttgagaaataaattttgtaaggctatagctgccacacatagttattcctgtgatggatccgggcaaagtaaattgaaaacctagaaaaga

SEQ ID NO: 1002767 - DNA, 120 bp, Artificial Sequence
  ENSG00000197934_14 (sequence is synthesized)
gtcaccattctagatgtcactaagaacatttgtgattcatgggaggaggttaaattatcaacattaatagaagtttgaaagaaatttattccagccctcatggatgactttgatgggttc

SEQ ID NO: 1002768 - DNA, 120 bp, Artificial Sequence
  ENSG00000197934_15 (sequence is synthesized)
ttccagccctcatggatgactttgatgggttcaagactttggtagaggaagtaactgcaggtatagtgataatatcaaggaaattagaactaaaagtggagcctgaagatgtgactgaat

SEQ ID NO: 1002769 - DNA, 70 bp, Artificial Sequence
  ENSG00000197934_16 (sequence is synthesized)
cttacggattagcaaaaaagtggttttgtgagatggaatctattcctggtgaaaatgctgtgaacactgt

SEQ ID NO: 1002770 - DNA, 120 bp, Artificial Sequence
  ENSG00000197934_17 (sequence is synthesized)
aagttctacggtgggtcaaacgctaccgaagagcgttgcacgctatagagaaatctttcatgaaaggaggagtcaactgatgtagcagacttcactgttgtcttatttttaaaaatttcc

SEQ ID NO: 1002771 - DNA, 120 bp, Artificial Sequence
  ENSG00000197934_18 (sequence is synthesized)
acagccaccccaattttcagcaaccaccaccttgatcagtcagcagccatcagcatcaaagcaagaccctcttccagcaaaaaaattacaacaacttgctgaaggctcggatgattttta

SEQ ID NO: 1002772 - DNA, 120 bp, Artificial Sequence
  ENSG00000197934_19 (sequence is synthesized)
gcaacaaactattttaaaattaagattgtcaaacatgacccttgaggcttacctctggattgtggtatgaaggaatgaaagcgaaaaataattacctttgtgagattcagtaagtactta

SEQ ID NO: 1002773 - DNA, 120 bp, Artificial Sequence
  ENSG00000197934_20 (sequence is synthesized)
agtccacttttaaaatttgaaaacagaaacaaaatctaacgatttagacacaagggagaagccaatatattgacaatagatgctttttgcagagtacaacagacttttaaaggctattta

SEQ ID NO: 1002774 - DNA, 120 bp, Artificial Sequence
  ENSG00000197934_21 (sequence is synthesized)
ttttacagttttcttggtgaatttccatagctctcatttttagtgctgtttaatttattcaaatatttagactggtcagttatcccaagggcttagtggggatgttttgcttcatgttct

SEQ ID NO: 1002775 - DNA, 120 bp, Artificial Sequence
  ENSG00000197934_22 (sequence is synthesized)
taaaagccattcaatgtacgcctacagccatctgatctttgacaaagtcagcaaaaataagcaatggggaaaggactccctactcaataaatggtgttggataaccagttggccatacac

SEQ ID NO: 1002776 - DNA, 120 bp, Artificial Sequence
  ENSG00000197934_23 (sequence is synthesized)
agaagaatgaaactggactcctatcttttaccacatacaaaaattaactgaaaatggattaaagatttaaatgaaagacctcaaactataagactcctagaagaaaagctaggaagcacc

SEQ ID NO: 1002777 - DNA, 120 bp, Artificial Sequence
  ENSG00000197934_24 (sequence is synthesized)
ctaggaagcaccgttcctgacatcagccttgggaaggaatttataactaagtcctcaatagcaattgcaacaaaagcaattgacaagcgggatttaattaaactaaagagcttctgcaca

SEQ ID NO: 1002778 - DNA, 120 bp, Artificial Sequence
  ENSG00000197934_25 (sequence is synthesized)
atcaacagagtaaacaatctacagaatgggagaaaatatgtgtaagctatgcatctgacaaaagcctaatatccagaatctataaggaggttaaataattgaacaaacaaaaaccaaata

SEQ ID NO: 1002779 - DNA, 86 bp, Artificial Sequence
  ENSG00000197934_26 (sequence is synthesized)
caacaaaaaaatgttcaacaagtcaccaatcatcagagaaatgcaaatcaaaacagagggctattattgaaaagtcaaaaaagcaa

SEQ ID NO: 1002780 - DNA, 120 bp, Artificial Sequence
  ENSG00000197934_27 (sequence is synthesized)
atcaaaacagagggctattattgaaaagtcaaaaaagcaacagatgctggtgagcctgtggagaaaagggaatacttatacactgctattggaaatgtaaattagttcaaccactgtgga

SEQ ID NO: 1002781 - DNA, 120 bp, Artificial Sequence
  ENSG00000197934_28 (sequence is synthesized)
aagcagttgggagatttctcaaagaacttaaatcaaaactaccatttgcctcagtgatcccattgctggggtatctatctaaagggaaataaatcattctatcaaaaagacaaatgcagt

SEQ ID NO: 1002782 - DNA, 120 bp, Artificial Sequence
  ENSG00000197934_29 (sequence is synthesized)
tgtacattcgtcacagcactattcaaaatagtaaagagactgattcatcccaagtgttcattaatagtggactcagtaaagaaaatgtggtacatacacaccgtggaatactatgcagcc

SEQ ID NO: 1002783 - DNA, 120 bp, Artificial Sequence
  ENSG00000284710_0 (sequence is synthesized)
gtattaactggtgtctaggatgggtctctctcttatggaaaaaggagtaaagccccaccctttccttttgggaggaggtcttaggttgcagcttgtgggtgaggggcattgaagaggaaa

SEQ ID NO: 1002784 - DNA, 120 bp, Artificial Sequence
  ENSG00000284710_1 (sequence is synthesized)
gaaatgttgctggtatgatgagtaaaacctcagaacacatttcttatagcaacagaattataaacaagagttggttgtagttaaaatactactggtatctctccaagtagttagggatca

SEQ ID NO: 1002785 - DNA, 120 bp, Artificial Sequence
  ENSG00000284710_2 (sequence is synthesized)
aataagattttatggatcagtctggaaatccaaccagcatcttaggtgaaaggatcctgattctaaacttttagacactatctcacatgcactgagagctgtatctagtgttctcccatt

SEQ ID NO: 1002786 - DNA, 120 bp, Artificial Sequence
  ENSG00000284710_3 (sequence is synthesized)
tcctctctctgtgcttctcagggccacttagacttccttcatccccagaatcaaagggaccagaaacttagaagatgtcacaattttatctgctactgaccctgcaggcagggctgcctg

SEQ ID NO: 1002787 - DNA, 120 bp, Artificial Sequence
  ENSG00000284710_4 (sequence is synthesized)
gtggtgaaacaatatggtatgtaacagagtcgagacaggtttgtgtaggatggatgcaggctccaaccctgtgctgcactgcctggctgcccgatctccctcaacgagcctcagtttttc

SEQ ID NO: 1002788 - DNA, 120 bp, Artificial Sequence
  ENSG00000284710_5 (sequence is synthesized)
acctgtaaagtggggataatgcgtccacatctcaggatcattgtgaagagtgaggacatcacatataaaaaaactggcccacagaaagcatggagtaaatgccagctgttacagcagctt

SEQ ID NO: 1002789 - DNA, 120 bp, Artificial Sequence
  ENSG00000284710_6 (sequence is synthesized)
gacaatctgcctctagaacaacctcagcaagctgcctggcccaggggaaatccaaccgtggtgactttgcccagattctgcaagatgctttctaattgttggtgttcacgagggacaagc

SEQ ID NO: 1002790 - DNA, 120 bp, Artificial Sequence
  ENSG00000284710_7 (sequence is synthesized)
aacagctgagctcattcccttcctatcaatttgcaacatctgccccagcccttactgacagtagagaaaaataaggactttccgatcacacctttaggccaccaatcttcaatgagttac

SEQ ID NO: 1002791 - DNA, 120 bp, Artificial Sequence
  ENSG00000284710_8 (sequence is synthesized)
tgggcccttccagaaatcagattttctaactggtccctgcattggctccagcagctttggagtgtgagtgctgtctctttggagagattgtgggctccttgagggctctgcctttttgtt

SEQ ID NO: 1002792 - DNA, 120 bp, Artificial Sequence
  ENSG00000284710_9 (sequence is synthesized)
ctgtgtagccccagcacatagtaggggaagtcacacaggaaatccaaaagcatgggaagaccctgggccgagggagcagaggctgaaactctgggaaaagctgtgaggaccacaaaagtg

SEQ ID NO: 1002793 - DNA, 120 bp, Artificial Sequence
  ENSG00000284710_10 (sequence is synthesized)
gttgggcccctaatggcctcaagacccggggtacaacaaaccccacaggaggcccaatgacaccccctgtcctaactcagctcaggaagaggcagctgccatggtttaaagaatgtgggt

SEQ ID NO: 1002794 - DNA, 120 bp, Artificial Sequence
  ENSG00000284710_11 (sequence is synthesized)
ttttagggtagatagaccccacatctgctccataccttgctgcatgagttatttcccttctctgagccttagtttcctcattacaaaaatgtaaataaaaatatcttctttacatgatca

SEQ ID NO: 1002795 - DNA, 120 bp, Artificial Sequence
  ENSG00000284716_0 (sequence is synthesized)
gtacatagtaggtgtatatatttatgggatacatgaaatattttgatataggcatgcagtgcataataatcacatcacggagaaggttttttttttgagtcagagaagtttaagtaattt

SEQ ID NO: 1002796 - DNA, 120 bp, Artificial Sequence
  ENSG00000284716_1 (sequence is synthesized)
ttatgtataactaaaaaattaataataatagagaactaagatctgggattgcaaggagaagttcaaggatgcttaattcaaggagaagaagaatgaggactgaagtgagaacagactaag

SEQ ID NO: 1002797 - DNA, 120 bp, Artificial Sequence
  ENSG00000284716_2 (sequence is synthesized)
gtttttatctttttggaggaaaggatagaattgattaattctggtcattgaaaaatttaggggctgggtgtggtgagttgcgcctatatcccaaggtcaaggcaaggaggatggcttgag

SEQ ID NO: 1002798 - DNA, 74 bp, Artificial Sequence
  ENSG00000284716_3 (sequence is synthesized)
cgcctatatcccaaggtcaaggcgtagtaagaccttgtctctaaaaaaaaaaatacaaaaattagctggacatg

SEQ ID NO: 1002799 - DNA, 120 bp, Artificial Sequence
  ENSG00000284716_4 (sequence is synthesized)
aaaaaaaaaaaaaatagaaagaaagaaacttagttgccactgtaacagtactaagagatgtgacctttaagaggtgtttagatcatgagggtgccacccttgtgagtggactattgtcag

SEQ ID NO: 1002800 - DNA, 120 bp, Artificial Sequence
  ENSG00000284716_5 (sequence is synthesized)
tgtgagtggactattgtcagactgcaggaatgggttctcattatcacaggagtggcttcaacccctcttgctctctctcctacttttcttttcttttcttttcagacagagtctcactct

SEQ ID NO: 1002801 - DNA, 72 bp, Artificial Sequence
  ENSG00000284716_6 (sequence is synthesized)
tttcttttcttttcttttcctgactcattgcaacctccacctcccaggagaatctcttgaacctgggaggcg

SEQ ID NO: 1002802 - DNA, 120 bp, Artificial Sequence
  ENSG00000284716_7 (sequence is synthesized)
cagtctgggtgacagagtgagaccctatcccaaaaaaattaaaaaaaaaaaaaagaattatgaactagacagtggatctgaaaatattacacagaaaacaatattatacagaatacagta

SEQ ID NO: 1002803 - DNA, 73 bp, Artificial Sequence
  ENSG00000284719_0 (sequence is synthesized)
ttgtgcctggccaagatgattaatttgaatgtcatatttaattaatttgcttaattgtagtaatcttttttta

SEQ ID NO: 1002804 - DNA, 120 bp, Artificial Sequence
  ENSG00000284719_1 (sequence is synthesized)
atatttaattaatttgcttaattgtagtaatctttttttacctgaacccatagaattttgcaggcaccatctggccaagtttcaggagtcaataataccttggaaaaatttaaaagttca

SEQ ID NO: 1002805 - DNA, 120 bp, Artificial Sequence
  ENSG00000284719_2 (sequence is synthesized)
ttatatggtttacttttgttatcaaataactacattttttgtaaaatttattagacaatccaataatttttcttccagatttaatactactctagtgttctctgttttctcctccagatc

SEQ ID NO: 1002806 - DNA, 120 bp, Artificial Sequence
  ENSG00000284719_3 (sequence is synthesized)
cattatttattcttctccatcttgttctgtgttcctggaagccaacctttataagctgcaggaaatggatttcctactctccaccttctgattgggcttgaccaacggggagcactggca

SEQ ID NO: 1002807 - DNA, 77 bp, Artificial Sequence
  ENSG00000284719_4 (sequence is synthesized)
tctgggaggcccagcatccaattcagtcgccttcaaggagtctcttcagtctaatttattctagaacaattcttcag

SEQ ID NO: 1002808 - DNA, 120 bp, Artificial Sequence
  ENSG00000284719_5 (sequence is synthesized)
gagtctcttcagtctaatttattctagaacaattcttcaggcttcccttctctggccaagatttttgaaaaatacaggtcaatgactttgtaggttgtcttcagtttggatttgtctgct

SEQ ID NO: 1002809 - DNA, 120 bp, Artificial Sequence
  ENSG00000284719_6 (sequence is synthesized)
gtgtcctcatgatttatgcatctctggcaggaataccacagaaacgatgcgacattcttctcagtgtaccatattaggagtcacacaatgtcaacttgtcccattactgctgatgttaat

SEQ ID NO: 1002810 - DNA, 120 bp, Artificial Sequence
  ENSG00000284719_7 (sequence is synthesized)
gtttaccacttggctaagatgatgtctgccaggtttctccactggaaagttaacagtatttagtacgtgttaagtgatgagtaatgaataaatatttcatagggagatgttctgagagta

SEQ ID NO: 1002811 - DNA, 120 bp, Artificial Sequence
  ENSG00000284719_8 (sequence is synthesized)
gtttcaccagtgacttggtgacaaccagccttgctcacgaagcgtcagccgtatcctttctgtgtgcagtggggtgtgggttgtgtggagccgcggtgtctgtggaattcacaggctggg

SEQ ID NO: 1002812 - DNA, 120 bp, Artificial Sequence
  ENSG00000284719_9 (sequence is synthesized)
gtcatctcttatgtaggattctagcgacatcttctccccttgttcctttaggcttaggagtaataacacttttctgttcttgctagtcctgaggataagtgttttgtcacctcttgttga

SEQ ID NO: 1002813 - DNA, 120 bp, Artificial Sequence
  ENSG00000284719_10 (sequence is synthesized)
tttccctgacttcaaataccaaacactatttttttgctatttttgaactttatgtaagtagaatcatacagtatatattttggggggtaaggttttttttgttttgttttactcaataat

SEQ ID NO: 1002814 - DNA, 120 bp, Artificial Sequence
  ENSG00000284719_11 (sequence is synthesized)
aggtttgtgagcatcatccatgctattgcataaaacagtagtttgttttcattgctgcatagtatttttcacttatacattgtactattaataaatatttgagggttttttttcccaaaa

SEQ ID NO: 1002815 - DNA, 120 bp, Artificial Sequence
  ENSG00000263501_0 (sequence is synthesized)
ttatggggtgtgctaagggccaagaataaactatactgtcaacagttttctaaaaatgcagaattgatgtgacgtgctttaaaagaagatctactaattatattgatggtaaaaggaagt

SEQ ID NO: 1002816 - DNA, 120 bp, Artificial Sequence
  ENSG00000263501_1 (sequence is synthesized)
cctgcctgatggtccatatctgggttaaacggcttcctgaactgttcccagagcagctctaagacgtatcactttatctgtctgaaaccagattgcaaactcttagagaaaggataatgt

SEQ ID NO: 1002817 - DNA, 120 bp, Artificial Sequence
  ENSG00000263501_2 (sequence is synthesized)
agaagcagacgcgatcagaggctcccattgaaaagaaccataacactgtgtgaatcctgcaccggcaaccgaggtacccaggttccatcatcagaactgactatgtggctggtgtgaccc

SEQ ID NO: 1002818 - DNA, 120 bp, Artificial Sequence
  ENSG00000263501_3 (sequence is synthesized)
gcagagaggaaggaagagcagtgtggtaaggcggcccacctgagagccacacggggcagaggagtcacccccagccaaggtaggcagtgagtgagtacgctacccagcctgggaaaacat

SEQ ID NO: 1002819 - DNA, 120 bp, Artificial Sequence
  ENSG00000264080_0 (sequence is synthesized)
tttcagggactgagccttgccatcttctaagggttcaaatgtgcctttatagatatttcactgaactaataggaatgagaagatattatctcacatttggcaagttgctatgaagtcata

SEQ ID NO: 1002820 - DNA, 120 bp, Artificial Sequence
  ENSG00000264080_1 (sequence is synthesized)
acttaaattaagcacaaggctgatgttctcaccataagacatttttgtacaagactaagaactcggcatgcttttacattggaaatttggtaattaatatcagcatcctgattttccatt

SEQ ID NO: 1002821 - DNA, 120 bp, Artificial Sequence
  ENSG00000264080_2 (sequence is synthesized)
aatgggtatctgccttcagtccagtgaaaatcaaccaggtacttctgtacagcccgagggggaatatgtccttttctctgcctgaagttgcccatggtcatgtttgtgattatacggggt

SEQ ID NO: 1002822 - DNA, 120 bp, Artificial Sequence
  ENSG00000264080_3 (sequence is synthesized)
aaactgagaataaaataatcacatacaaaagaagaatcaaaaaaatgagatatgatcttgataacctaatttaaactctaagtaattctcataacaggatttagtgaacattctaaccct

SEQ ID NO: 1002823 - DNA, 120 bp, Artificial Sequence
  ENSG00000263508_0 (sequence is synthesized)
ttcagactagtgagaaagggaatggcaaggaacctgaggaaccagcgtgaggaaaacctggatgatctgacgtcttcctcactttatccctacctgtccacgcctccatccatccaccca

SEQ ID NO: 1002824 - DNA, 120 bp, Artificial Sequence
  ENSG00000263508_1 (sequence is synthesized)
acttgcatctttaagttgatacacggaaggcacagtccaagcacaggatactggaagctatggaggtacagtggcctctgagcaaactgaaaactctctatcactaaagggttgggcata

SEQ ID NO: 1002825 - DNA, 120 bp, Artificial Sequence
  ENSG00000263508_2 (sequence is synthesized)
cagggtatctcctctgctctgccacctaccttgaggatgctttacatgtggctaaaagtggaggcagagatatttggataaataaatgctagagaattggaaattcctaggacaagtcaa

SEQ ID NO: 1002826 - DNA, 120 bp, Artificial Sequence
  ENSG00000263508_3 (sequence is synthesized)
gtgtcacaaagtgaataatgcattttcttagcagctagttccagaatcccggtccaacaaggagattgcctctgtccaagaaaatatcttgataagctgctcagggcagaaggtgagaga

SEQ ID NO: 1002827 - DNA, 120 bp, Artificial Sequence
  ENSG00000263508_4 (sequence is synthesized)
ccctgaaggcatgggtgtccagtgaaatgaattgtttattttttcctcacaatgcaggaaagagacaaaggagatagaagaagtggaataaggggaaagataagaactggaaagctgaac

SEQ ID NO: 1002828 - DNA, 120 bp, Artificial Sequence
  ENSG00000263508_5 (sequence is synthesized)
ggagacgcaattctgtgagcctaagtctctgctggtctggtcctcttggctctcttgagagacccaagtacaggtgacttccctgactctggctgggctccgtaagctgtcttgaggcta

SEQ ID NO: 1002829 - DNA, 120 bp, Artificial Sequence
  ENSG00000263508_6 (sequence is synthesized)
cgcagcgtctaaggcgttatccttaacctccagctccctccggctttgcttttctctctcttcttgactcttctgaagtttttccttgttcctgtctctcttcctcctgtctgctgcagc

SEQ ID NO: 1002830 - DNA, 120 bp, Artificial Sequence
  ENSG00000263508_7 (sequence is synthesized)
ctcacacaccagacagttctcaagatgtccttcgggggagcctccaggaagacgaagaagaggcactaggtgcatgcctacacagaggaaagccatgtgaggacacagcgataagattgc

SEQ ID NO: 1002831 - DNA, 82 bp, Artificial Sequence
  ENSG00000263508_8 (sequence is synthesized)
cacagaggaaagccatgtgaggacacagcgataagattgctgactgcaagctcaggagaacttagaagaaaccaaccctacc

SEQ ID NO: 1002832 - DNA, 120 bp, Artificial Sequence
  ENSG00000285955_0 (sequence is synthesized)
tctgacccaggcaccggttatgaagaagacaagcagctctacagaggggcctcaagaaatccttcgaaacagaaatcaaagtcttgctggaagggttctgggcaccctggactgtccaca

SEQ ID NO: 1002833 - DNA, 120 bp, Artificial Sequence
  ENSG00000285955_1 (sequence is synthesized)
tgggaggctgttggtgcgtgtgcctacgtgtgtccatcagtggatgcacgaagaaggaaatgctgtcagctgtctgcactcccagacggggtgatggcctggcaccaacggagcattacc

SEQ ID NO: 1002834 - DNA, 120 bp, Artificial Sequence
  ENSG00000285955_2 (sequence is synthesized)
ttgtagcacttgtgtctctcccactggcctccacttcttgtgggcactttctggatgcccaggcctaatccagcgctggcactcagttaattctctcttcctttaaagggaacaattacc

SEQ ID NO: 1002835 - DNA, 120 bp, Artificial Sequence
  ENSG00000285955_3 (sequence is synthesized)
accttgaggaaggaggcctgaaagctaagtctttgctattgcatccgccttcttctcacgaagacctgcagcttgaaaggaggggagggagaaatagccctaagctccaggaagaccaag

SEQ ID NO: 1002836 - DNA, 120 bp, Artificial Sequence
  ENSG00000285955_4 (sequence is synthesized)
gctggcggggcgcgggcggggcagcgcacaggccggccctctcgcgggactcagtttccccgtctgcgcgccccacatattcgctttccgcaggttctctcgctgagattcgcgtccttc

SEQ ID NO: 1002837 - DNA, 120 bp, Artificial Sequence
  ENSG00000285955_5 (sequence is synthesized)
aaactaatggaactttgcaagggggccctgcggcggcttcgcgtgggagcgccggggaaagttcctgcaaatcgccggactgggggcccgcccgggaagctcggactgggccgggcaggg

SEQ ID NO: 1002838 - DNA, 120 bp, Artificial Sequence
  ENSG00000285955_6 (sequence is synthesized)
caggggcctctgcgcagacccggggcgttgcggcaccgcggaccccggtcacgcgctggttctgcccccggtaccccgcacgcgggaccctgaccgcggggcctctgcggccggacgaag

SEQ ID NO: 1002839 - DNA, 120 bp, Artificial Sequence
  ENSG00000285955_7 (sequence is synthesized)
gaaggcagcgtccgcggagctggcagaaagcccgcgcccagacccacagtgaagtgataaaagcagagagcagaaaggagaaaactgagggccagaaagggtgactcccctgagtgtcat

SEQ ID NO: 1002840 - DNA, 120 bp, Artificial Sequence
  ENSG00000285955_8 (sequence is synthesized)
gccacaagttgagtgctggagccaggacaccttccaaaccggctgtgcctgcctgcaagccccatcctcctccatccccctgagcagccagactgcagagggaatgagcggaccgaaaac

SEQ ID NO: 1002841 - DNA, 120 bp, Artificial Sequence
  ENSG00000285955_9 (sequence is synthesized)
agtgtggccgcaacttccccactgctttgcgggaggtggagggagtttctaggctctttccctgttggggaattaagtagctggggatcccactgagtctccaccaccctctcacccatt

SEQ ID NO: 1002842 - DNA, 120 bp, Artificial Sequence
  ENSG00000285955_10 (sequence is synthesized)
ttccacccctcccccaccacatatacattctgctcccccagtgccaaataacttgcattttctggaacacacctgtctgcttacggtctctgtgcctttctttgcccacatctcccctct

SEQ ID NO: 1002843 - DNA, 120 bp, Artificial Sequence
  ENSG00000285955_11 (sequence is synthesized)
tcttgaaacacccctcctcccctccagcgtgggctcatgtgacctagagaagcacgtgggagccctgtcatctgggggacttgggttcaaatcccacttctggtccttaagtctgtgact

SEQ ID NO: 1002844 - DNA, 120 bp, Artificial Sequence
  ENSG00000285955_12 (sequence is synthesized)
ctgggcctttgtttaataactggaggagtttcattaggaaaatggcagtgaccacatatgtccctggagtgactgatgtgccacccacaagcttctatttggtcagtgctgggtcccatc

SEQ ID NO: 1002845 - DNA, 120 bp, Artificial Sequence
  ENSG00000285955_13 (sequence is synthesized)
gtcccatctagcatgctcctcttccatcctcgtgcccccactcagtgccattgtctctgcctctcaccctctgtgctgctattcctgccctcatcacctcctccctagggcagaggcccc

SEQ ID NO: 1002846 - DNA, 120 bp, Artificial Sequence
  ENSG00000285955_14 (sequence is synthesized)
aagttattcagcactgggggagtagagtgtatgtgtggtgggggagggggtggagaatgggtaagagggtgatggagactcagggggacccccagctacttaatacccctgaggaagtgt

SEQ ID NO: 1002847 - DNA, 120 bp, Artificial Sequence
  ENSG00000285955_15 (sequence is synthesized)
cggccgaagtggacccactcctgtgacagttcacagcctagaagaggcgtctgtaaccacggtgaccagtaagtgccagccctggggccacgtggctgttctagagaaggaagacagcac

SEQ ID NO: 1002848 - DNA, 120 bp, Artificial Sequence
  ENSG00000285955_16 (sequence is synthesized)
taccctgagagccatgctggtggcttcatcaggaagggagtcagcagggggaggactgggggaccaagcggtccctaagaagcagaatttgcaatacccaaggttttagaaagagcaacc

SEQ ID NO: 1002849 - DNA, 120 bp, Artificial Sequence
  ENSG00000285955_17 (sequence is synthesized)
agaaggaaatgattcctcgtggacatctttgtcgtcttcttaggtctcctgtgtgctgcatgtcgtacactgaagacaccaattgacccaactccatcaggtcaaagcttctccacatgg

SEQ ID NO: 1002850 - DNA, 120 bp, Artificial Sequence
  ENSG00000285955_18 (sequence is synthesized)
aaaaaacctgttagcctataccaagtgattatctttataaccaggccctatagctgtttccaaagcaagaatccagcatcttaaagctatttcaatctgttacttactatttattctggt

SEQ ID NO: 1002851 - DNA, 120 bp, Artificial Sequence
  ENSG00000285955_19 (sequence is synthesized)
aaccttatttatcaaatgtcagggcttgaaatctttcagggaagttgtaatttgatacgtacctatgattgattctcaaatgttaaatttaaaggtatgtataaataatatgtcatttga

SEQ ID NO: 1002852 - DNA, 120 bp, Artificial Sequence
  ENSG00000285955_20 (sequence is synthesized)
aatagtatggttctagaaatgttgaaaacagactgaattcaactcatttagtaatctggaagtactattttaaaagagaagttttcaagacttctactgagacagtagaagtagtgtgtt

SEQ ID NO: 1002853 - DNA, 120 bp, Artificial Sequence
  ENSG00000285955_21 (sequence is synthesized)
aagagcccaaactttggtatcagaaagatacatttcaagcctaatctgactctggacaagtggctaagtctgcttccaaacctgcagaataggagatggatgtgactataaaaagaacaa

SEQ ID NO: 1002854 - DNA, 120 bp, Artificial Sequence
  ENSG00000285955_22 (sequence is synthesized)
caaagaggggcctttgtgatgatggaactgttctgcatcttgactgtatcagtgtcagtatcttggttataatattgtattagtttttcaagatgctgttggggggaaactgagtaaagg

SEQ ID NO: 1002855 - DNA, 120 bp, Artificial Sequence
  ENSG00000230352_0 (sequence is synthesized)
agactcacaaagtgtcactgctgagcgggctccacagcactgcctctcatgcattcatgcactcacgtgacctactccgtgccaggccaggggctcggtgtggagatgcagggctggaag

SEQ ID NO: 1002856 - DNA, 120 bp, Artificial Sequence
  ENSG00000230352_1 (sequence is synthesized)
agcacatcctggtgcagcaggcagttcgtaagcaggaattcaaatctcctctgtgcctttgcaaagcaacatccatcttgaacataaatgaggttctggcttgatttctgggcttgggca

SEQ ID NO: 1002857 - DNA, 120 bp, Artificial Sequence
  ENSG00000230352_2 (sequence is synthesized)
gacacctacagctctgttcttgaattttgtgattgcggataagcacccgctccttctttttaagtcctttggcagatagtcattcatgcttacaggatgacccaggcaaagctaaacaca

SEQ ID NO: 1002858 - DNA, 120 bp, Artificial Sequence
  ENSG00000230352_3 (sequence is synthesized)
gatctgggctccaatcccaccatggctgtgtgacctagtggaagttccttaacctctctgagcctcagctttcttttccacagattgctgattaaaacacttactttagtgttaacacaa

SEQ ID NO: 1002859 - DNA, 120 bp, Artificial Sequence
  ENSG00000230352_4 (sequence is synthesized)
gggaaagctgggcgtggaggtctatgagaattctctatactatttttgcaactcttttgtgaatatgaaataatctaaactagaagatttaaaaaaaaaaacaaacccaaacacgtgctt

SEQ ID NO: 1002860 - DNA, 120 bp, Artificial Sequence
  ENSG00000273107_0 (sequence is synthesized)
cacctttctccaccttcccccacctccctcatcccagggcctggagctggaaagattacacccgattgcttttagggtggcccggatctgcagtgatcagatctgggctttgaggatcca

SEQ ID NO: 1002861 - DNA, 120 bp, Artificial Sequence
  ENSG00000273107_1 (sequence is synthesized)
aggagggggagagatttttacacattctctgctttaccagttttgcaagaacatctggtcagattgtaattgttccaggttgcagctttactaaagcaatcgctcttttctgattagaaa

SEQ ID NO: 1002862 - DNA, 120 bp, Artificial Sequence
  ENSG00000273106_0 (sequence is synthesized)
ccctagtccttccccgcccctcagggtgccccgcctccagctgccacccactgggatgccgcgcgccctctcacggcccccggtttgctgggagtcttgtcaatcaccgctccccctccc

SEQ ID NO: 1002863 - DNA, 120 bp, Artificial Sequence
  ENSG00000273106_1 (sequence is synthesized)
cgtgctgctccctcggcacctccgtacttcgtttaccccgcccacccggccccgcctctgggtttctaatttcccattgggcatcagtggctactttcaataggcaaggtcagctgtcca

SEQ ID NO: 1002864 - DNA, 120 bp, Artificial Sequence
  ENSG00000273106_2 (sequence is synthesized)
tcaaacaccgcccactaagtgagacccaaccctttattaccatttactttattcggccccgcctccgctaggtcctacctcccgaacgtcagggaccagcccccgctaccagccataagt

SEQ ID NO: 1002865 - DNA, 120 bp, Artificial Sequence
  ENSG00000273106_3 (sequence is synthesized)
agagccctccgtcaatcaaataacgcccacctgcgctcctcctagcaaagccccggccccagcgattgtcttttcttattggtccaactcgtgatccgaacccccagtcactggctttct

SEQ ID NO: 1002866 - DNA, 120 bp, Artificial Sequence
  ENSG00000273106_4 (sequence is synthesized)
tgcgggtcagtcactgagccaatttccaagtccgtcacaccggcttttttcaaatgaacgcgcaaaaggcggggaagtatctggaaagcgattggttcgtcctagaaaacggtcaaaccc

SEQ ID NO: 1002867 - DNA, 120 bp, Artificial Sequence
  ENSG00000273106_5 (sequence is synthesized)
accgtgcccccttgtatttgacctctaagcctcgcgtaaaagaagcgccataagggaccaacgagcagtccagctataggtgtggacgcctggtcccacccggaattgcaggggcttggc

SEQ ID NO: 1002868 - DNA, 120 bp, Artificial Sequence
  ENSG00000273106_6 (sequence is synthesized)
tactgattggctaagaaagtcctcctaggccctcattggaggatctaaacgcctctcttcggcgtggagacgggaagggacgactcagacgaggacaagaagtgggcaggggagaggcgg

SEQ ID NO: 1002869 - DNA, 120 bp, Artificial Sequence
  ENSG00000273106_7 (sequence is synthesized)
ttgttttgcttcagccgcgggtggggcgcaggcgagagtgggaaactgggaaggccgggctctggggaggtgttgcggggaggggaaaggcccggatgttccctaacaatgaaatcatcg

SEQ ID NO: 1002870 - DNA, 120 bp, Artificial Sequence
  ENSG00000273106_8 (sequence is synthesized)
ccgacctatcagagccgccgagctgggatacctgcctgacctgtaccccggagggagaagagtgggcgggaaattggggtgtcggaagaacctggaaagcaacgtgagaaagtgggacag

SEQ ID NO: 1002871 - DNA, 120 bp, Artificial Sequence
  ENSG00000273106_9 (sequence is synthesized)
gtgttcccttcaggaggattttgtgctattagagattatttttataccagcccttgacatttccgtattttgtttctcagtcggcattgatattaaaactcccagcctagtctcttgaca

SEQ ID NO: 1002872 - DNA, 120 bp, Artificial Sequence
  ENSG00000273104_0 (sequence is synthesized)
gcaagcatggagcactaggcgcaggggatgggcaactggcaagcggggagatgcatgcagcgcacttagtgcctggtacataccaagtccttttagtctggatttcattatttttaaatg

SEQ ID NO: 1002873 - DNA, 120 bp, Artificial Sequence
  ENSG00000273104_1 (sequence is synthesized)
caaatatttattgtgtgttttgaaataagtgggtcaagatcaataagatattgttgatcaattgatcaataagatatcttttattcttaaaaatcatattcttctggttcagtggggaag

SEQ ID NO: 1002874 - DNA, 120 bp, Artificial Sequence
  ENSG00000273104_2 (sequence is synthesized)
tcagtggggaagagactgccgacctgtatttacagcattatgtgataagtgttctccttttcaggtatgtattagtctgttctcatgctgtcaataaagacatacctgagactgggtaat

SEQ ID NO: 1002875 - DNA, 120 bp, Artificial Sequence
  ENSG00000273102_0 (sequence is synthesized)
tatacttctgtagtataaattttagctggcaacatggctgcctggccaaagactacatttcccagtctcccttgcagtagccatggtcatgtgacgaggtaaagccagcagaagtgatga

SEQ ID NO: 1002876 - DNA, 120 bp, Artificial Sequence
  ENSG00000273102_1 (sequence is synthesized)
gggtcacatcctgatcttgccctcaaaaaattggtagtatcatcgaccccttgtgcccagtccctttccccctttccactgctggaaggagaggagaagaaccagggtatctccttagac

SEQ ID NO: 1002877 - DNA, 120 bp, Artificial Sequence
  ENSG00000273102_2 (sequence is synthesized)
tgacactggggacatcaaaacggataacacatggccctggatctcaaggaacctgccgcctgatggaaaataaaagagagagtcacacttaaatgaatgatttcagcataatgaatgtga

SEQ ID NO: 1002878 - DNA, 120 bp, Artificial Sequence
  ENSG00000273102_3 (sequence is synthesized)
caagtgataagataagggaatgcatccagtatcactgcttttccaaggcttctcgaggggtaaaaaattacccagtgggtatttgaaggagaaagtaaataaaagaaaatctaccaagaa

SEQ ID NO: 1002879 - DNA, 120 bp, Artificial Sequence
  ENSG00000273100_0 (sequence is synthesized)
gcgagctggagctggtgttcagtagctgatggcgtggggcttccctggctgggcccatgcaggtttgcttaggccggtacactcgcgtggggtccacactgcctgaggcaggcacccccg

SEQ ID NO: 1002880 - DNA, 120 bp, Artificial Sequence
  ENSG00000273100_1 (sequence is synthesized)
cgccccatccttgtaggtttgtaatatgagcgcctcctccaagcagcccggaagccggccaggccctgaatgggttctggagagtcttgcagccccatccagcacatgacccaggacagg

SEQ ID NO: 1002881 - DNA, 120 bp, Artificial Sequence
  ENSG00000273100_2 (sequence is synthesized)
gccacccagctgtcctccccagccccatccagcacccaaccccaccctgcatcagctgctctccttggaaccaagcttgcggggtggggcaaaggtgaccccagcacgcagcacggtgcc

SEQ ID NO: 1002882 - DNA, 120 bp, Artificial Sequence
  ENSG00000273100_3 (sequence is synthesized)
aggcatggaactgacacgtgatgcccgtctgtttaacgagtgaacaaaggcaccagaggctttcttcccttgaacaccaatcttccaacctagattagcagccgagcgagaggtggcgtc

SEQ ID NO: 1002883 - DNA, 120 bp, Artificial Sequence
  ENSG00000273100_4 (sequence is synthesized)
ccgagcgagaggcggcgtctgaacagcaccctgggatcaggcagcgcacgcttcccacatgtgtcttgctcgttcactaaacaaatatttgtgcttggcaccagttgatatgttggcatt

SEQ ID NO: 1002884 - DNA, 120 bp, Artificial Sequence
  ENSG00000273100_5 (sequence is synthesized)
gtgtttcatctgattgtgtgttatttaaaaaactcctattactaaatccattaagcaaccaaactgctagagtcactagattaaaatgcatgacacacaactacaggaaaatgtcaggaa

SEQ ID NO: 1002885 - DNA, 120 bp, Artificial Sequence
  ENSG00000273100_6 (sequence is synthesized)
atgcaaatctaggcaggcgtcctcagacatatcagctatgaggaaactctctctaggagatctgtgttttcctcccaaaagaagatcatctttccagaaaaagaggattttacagtcaat

SEQ ID NO: 1002886 - DNA, 120 bp, Artificial Sequence
  ENSG00000273100_7 (sequence is synthesized)
ttgctaacataatataaatttgtctccttccggggacttatatatgttagtacataattggtgtctttattgatggctgtaagaaccaatacctccaaaataaacagaatttgtacaata

SEQ ID NO: 1002887 - DNA, 120 bp, Artificial Sequence
  ENSG00000273108_0 (sequence is synthesized)
attacaggcataagccactgtgcccagcacaaaatgctcattattaatgcagtaatttctaatcttacatctctggaggtctagttttcagatgcctcaatagctgaatctcaaaatgaa

SEQ ID NO: 1002888 - DNA, 89 bp, Artificial Sequence
  ENSG00000273108_1 (sequence is synthesized)
ctagttttcagatgcctcaatagctgaatctcaaaatgaaaattaaaaagcagagaaatctcctgtaatcgtagtgctttgggaagccc

SEQ ID NO: 1002889 - DNA, 120 bp, Artificial Sequence
  ENSG00000273108_2 (sequence is synthesized)
tcagcctgggcaaatagtgagaccccatttctaccacacacacatacacacacacacacaaaaattaggtggacatggtgttatgcacctgtggtcccagctacttgggagtctgaggca

SEQ ID NO: 1002890 - DNA, 85 bp, Artificial Sequence
  ENSG00000273108_3 (sequence is synthesized)
ggaaaatagcgacagaccactgcactccagcccaactgacagagtgagactctgtctctgaaaaaaaaaaaaaaaaagaaagaaa

SEQ ID NO: 1002891 - DNA, 120 bp, Artificial Sequence
  ENSG00000273108_4 (sequence is synthesized)
tctggggtgtgtgtgtaagaaggcagtgcggttgagtgagcaaagtctttggctggtcatcatgacaaggccagataggcaggcaagcactaaataaactcgcaatattctgtgggcagg

SEQ ID NO: 1002892 - DNA, 120 bp, Artificial Sequence
  ENSG00000273108_5 (sequence is synthesized)
gtagaactcattggagatcctcaatgcttttcagaaactggcacagcagcatctaagcatgacattcaaggacatttagaagctggctttggcccatggtttgtgagcctcacccattca

SEQ ID NO: 1002893 - DNA, 120 bp, Artificial Sequence
  ENSG00000273108_6 (sequence is synthesized)
tttaacaactgtttgttgtgtgtctactgggtgccagacactggtctaaggcaccgagcgcccagtaggaaaccaaatggacaaccccctgcccttgtggattgtatatttttgcttcaa

SEQ ID NO: 1002894 - DNA, 120 bp, Artificial Sequence
  ENSG00000273108_7 (sequence is synthesized)
tggtcttgtctctactcagctaaaatggactttgtaccccgctatttatgtcctccctcatgcaaaggggttcaaataaagcaattgggaaaaaaaggtgggagggatgaggggacggga

SEQ ID NO: 1002895 - DNA, 120 bp, Artificial Sequence
  ENSG00000273108_8 (sequence is synthesized)
agaagcttggtgtagcaggaagacctggaaagacctcaaccttggggctggactccaatcatagcaatttaccagctgtgtggccctgggcaaagcccttgacgtctctgaacttcagtt

SEQ ID NO: 1002896 - DNA, 120 bp, Artificial Sequence
  ENSG00000273108_9 (sequence is synthesized)
ctctcatctgtaaaatggaactaataccagcatcctgaagaggatccctgagataacatacatcactttgggcccagcgaggggcatagggagagctcaataaatagaagctggaactca

SEQ ID NO: 1002897 - DNA, 120 bp, Artificial Sequence
  ENSG00000285448_0 (sequence is synthesized)
gacctggtggccagcacagagaatgtgctcaatgaatgtttgctggattgaatgacacaccctcaggtccaagtgggccatgcccctctgcctgcagcctggtggccgtcagggtcaggg

SEQ ID NO: 1002898 - DNA, 120 bp, Artificial Sequence
  ENSG00000285448_1 (sequence is synthesized)
ctcccatgctttctgatacccgggaggatgggtctctgaccatgggattttgaaatagcaatgagcctgaataacattttgagatactggcaacaacgaaagtgtggaatgaaacttccc

SEQ ID NO: 1002899 - DNA, 120 bp, Artificial Sequence
  ENSG00000285448_2 (sequence is synthesized)
gttatttctgctggctaacactaagtggttgccacctatgttcataatacaaggaactgctcagtttcaaccagagacaaggaggctctgtccaagctcctgtcctggctcgctcagccc

SEQ ID NO: 1002900 - DNA, 120 bp, Artificial Sequence
  ENSG00000285448_3 (sequence is synthesized)
agccttcaggttctcagcccaacacgagggtctccttgggtagtcagctcaatcatttcaagctattaatcaacggacttctcctgaatgcatccagacctctcctcaaggctcttgctc

SEQ ID NO: 1002901 - DNA, 120 bp, Artificial Sequence
  ENSG00000285448_4 (sequence is synthesized)
ctactggcacatgccaccacccctggctgaaaatcactcatttttaatgagaaaatgaagcgggaaaggaagctactcacaacagcaacaagatccgtactataaccaagaatgaaacca

SEQ ID NO: 1002902 - DNA, 120 bp, Artificial Sequence
  ENSG00000285448_5 (sequence is synthesized)
gaatatagagtttttgtgattagaacgggcaaataaaagaacaaagctgagtggagagtccagaattctcagccactccactcctaagaatctgccgtttttaaaaagtggacatgtgca

SEQ ID NO: 1002903 - DNA, 120 bp, Artificial Sequence
  ENSG00000285448_6 (sequence is synthesized)
caaaggtatacgtacaaagaggctcagaaataacatttgcaagggcaaaaacattgaggccaatgcgagtttttatcaacaggagaatggttaaatgaataatgttatatcacatttgca

SEQ ID NO: 1002904 - DNA, 120 bp, Artificial Sequence
  ENSG00000285448_7 (sequence is synthesized)
gtgttttatttagaaaggaagcattgctgtgagttctgacatggaatgatctcggtggtatattgaaaagcaagttctaatataattcctcaagcataaaaaaaactatatgttgatata

SEQ ID NO: 1002905 - DNA, 120 bp, Artificial Sequence
  ENSG00000285448_8 (sequence is synthesized)
tttatggatagaggtaattgcatagaaaaatgcctggaaagatacatgtcaaaccattattgtggttagttctgggggccatttcctttagaaattttctatgagaatggccgggtgcgg

SEQ ID NO: 1002906 - DNA, 120 bp, Artificial Sequence
  ENSG00000260577_0 (sequence is synthesized)
ggttcacaaagggggcccgagaggggcgaagggggctgcccggggcacggctcatccccacacctgcgcgcgggttgggggaagaatgtggccggcgcattcctctgctggggccagcgg

SEQ ID NO: 1002907 - DNA, 120 bp, Artificial Sequence
  ENSG00000260577_1 (sequence is synthesized)
gggagaacttcccacgtcgagactgggtgaggggctcagccatccggcatctcggaggagggggtcaagcgcctggccgggctcctgctccgcgcctcccgcctccaaggtcacttcagc

SEQ ID NO: 1002908 - DNA, 120 bp, Artificial Sequence
  ENSG00000260577_2 (sequence is synthesized)
ctccctgaagaccgcccggcacggctcggaggccgcgcactgcagccagcaaacctgcgcccgagggcagagagtgaaggaggctgggtccaggcgtgcccggccctgcactccccacac

SEQ ID NO: 1002909 - DNA, 120 bp, Artificial Sequence
  ENSG00000260577_3 (sequence is synthesized)
cactccccacaccgcagggtcctcacgggccttccgggactcccttggccccagggagcgcagccccgcgctctccccgacgccactgccccatgcggaccccgcccgccccccagggag

SEQ ID NO: 1002910 - DNA, 120 bp, Artificial Sequence
  ENSG00000260577_4 (sequence is synthesized)
gggccacggcgaggctgtggagtacctggagaaggaggagagacgcgagaggtccacgagggagccccatggctgcagagagaggggtgaagcagctgccgcgacggcgggccggtgttc

SEQ ID NO: 1002911 - DNA, 120 bp, Artificial Sequence
  ENSG00000260577_5 (sequence is synthesized)
cgctcagctcttgcccctttgagcaccgcagcccccgggagccagcgggaggaggccaggtgagcgcaggtgggtgctgattggtccagcgccacgaggtcccgccccctcgcaggtggg

SEQ ID NO: 1002912 - DNA, 120 bp, Artificial Sequence
  ENSG00000260577_6 (sequence is synthesized)
accgatgtgggtgcggttgaggccccagcgaacccctcctggcctcccggatgccctcctgcgctctcctggcttttctggagctgttctttacagggactcagcctctgtctcgcagtt

SEQ ID NO: 1002913 - DNA, 120 bp, Artificial Sequence
  ENSG00000260577_7 (sequence is synthesized)
gggttagaggagaaaagaacacccagtgcactcctcagcctcctcagtacgggaagagaaatgtttccttgccttgcggctacagcggaaaaaagtggagacacatctgaagtcgactga

SEQ ID NO: 1002914 - DNA, 120 bp, Artificial Sequence
  ENSG00000260577_8 (sequence is synthesized)
aaacggaggctccgcattcattatcccccggaggcgctgttatcccaaagctttgaagcaggcccgtgcgtcctcccacacgcggctacagcggggccgcccaagcctctttctccacct

SEQ ID NO: 1002915 - DNA, 120 bp, Artificial Sequence
  ENSG00000260577_9 (sequence is synthesized)
ctttctccacctcccgtgccagcccgccggggaggatcctccggggtataaaactagcaggtcccgaaggaccgcgtttctgaattggatacaacttcctcttttttctttttttttttt

SEQ ID NO: 1002916 - DNA, 120 bp, Artificial Sequence
  ENSG00000260577_10 (sequence is synthesized)
ggtctcgctctgtcgcccaggagtgcagtagcgcgatctcggctcactacagcctcgacctcccgggctgaagcgattctcctccctcagctcccgctgagactacaggcttgcgccacc

SEQ ID NO: 1002917 - DNA, 120 bp, Artificial Sequence
  ENSG00000260577_11 (sequence is synthesized)
acacccggctaatttttaaaaattttttgtagcgatgtggtggggcggggggagggtggagggtcaccctatgttgcccaagctggtcttgaacttctggactcaagcgatcctccgcct

SEQ ID NO: 1002918 - DNA, 120 bp, Artificial Sequence
  ENSG00000260577_12 (sequence is synthesized)
cccagagtgctcaggttacaggcatgagccgccacacccggaccgcttcttccatttcacagctaaacaaagggaagctagtcgagaaagtcccagagtttggaagctgtagtggtgcca

SEQ ID NO: 1002919 - DNA, 120 bp, Artificial Sequence
  ENSG00000260577_13 (sequence is synthesized)
aagggtgcgagctaagagggttgttattagtctcataatctccagcacccctaccccccatataaataacactttctcaactttctgtaaaatgtaaataaagacaatttttaaaacgca

SEQ ID NO: 1002920 - DNA, 120 bp, Artificial Sequence
  ENSG00000235806_0 (sequence is synthesized)
ggagccctgtggaggtgacactgggcgccttagaggagagagctgcgtgatgtatcaccactcaccagcccttgccggagacctgtttagagtgagattacagtctcagcagagcctctc

SEQ ID NO: 1002921 - DNA, 120 bp, Artificial Sequence
  ENSG00000235806_1 (sequence is synthesized)
atttctcctggtcacggggttacagagcactttacaacttgtgctacaggaaggcagggagggatttaaatgagagactggaagagaccctccataaacctcagccagagcagccctgac

SEQ ID NO: 1002922 - DNA, 120 bp, Artificial Sequence
  ENSG00000235806_2 (sequence is synthesized)
tcacagatgaggatatagcaagaagatggtcatctgcaaaccaggaggaggatcctcaccagaacccaaccctgctggtaccttgatcttgaacttctcagcctccataacagctatcaa

SEQ ID NO: 1002923 - DNA, 120 bp, Artificial Sequence
  ENSG00000235806_3 (sequence is synthesized)
cagggtaatggagtatggagtcacgccgatggagatttgtcttagatagtatgattagggaagacccttctgaattgagacctaaaggacaagaatgagctgcccacaaacaaaacaaga

SEQ ID NO: 1002924 - DNA, 120 bp, Artificial Sequence
  ENSG00000235806_4 (sequence is synthesized)
aaatcaacttgagaagtttctatgtggaagaaaactggctattagcttgggacttcagcaaggcacttagcaaggtctctcataatatcctgtggtcaagaagaaaaatataggctggat

SEQ ID NO: 1002925 - DNA, 120 bp, Artificial Sequence
  ENSG00000235806_5 (sequence is synthesized)
gactgtacaattaacatgattcatagctggctggaacaacttatgccaaaaagtgccaattaatggacggatatcaaactgaaggagctctccagatgttctacagcaatttgcctcttg

SEQ ID NO: 1002926 - DNA, 120 bp, Artificial Sequence
  ENSG00000235806_6 (sequence is synthesized)
cccagtggtgcctggtacctattatcaataacttggataaatatatagaatagttatcaaatatatgggtaagatccaagtgcattacagcacagaatcaggacccaaaataataaaaca

SEQ ID NO: 1002927 - DNA, 120 bp, Artificial Sequence
  ENSG00000235806_7 (sequence is synthesized)
ggctgaactaatgggccaaatccaatgagataaagtttaagtaggataatataaagttctgtactttggtccaaaaaatccccactactcaagtatagggtacacaaaattttgttatat

SEQ ID NO: 1002928 - DNA, 120 bp, Artificial Sequence
  ENSG00000235806_8 (sequence is synthesized)
agatggcagcatatagatgtagctgttaaaataagtccattaaatgttaggcagcattataagcagtagctatctattgagtagtagaaagaacattggatttggcattagaaaactggg

SEQ ID NO: 1002929 - DNA, 120 bp, Artificial Sequence
  ENSG00000235802_0 (sequence is synthesized)
caggggatcgctagagcccccaggagagaacggccgcggagcaagggggaggcagaagagcgggtggggtaaccccctggatccgcagaagcggggagacacacgactacgcaggccgct

SEQ ID NO: 1002930 - DNA, 120 bp, Artificial Sequence
  ENSG00000235802_1 (sequence is synthesized)
ccgccggcccgtcctaggggtccccaaggctccggcattacccgggtcggcggatgttaaactctgcgtcctaagagcgcttcccttccctccctttttcgagagacagagaacgaatct

SEQ ID NO: 1002931 - DNA, 120 bp, Artificial Sequence
  ENSG00000258039_0 (sequence is synthesized)
caggaagtatcagcatggcattaggttgttgtgagagattcagctcttctgcagtgccttgtcaaacgacctgactggtcaactgggaaaatgaagttctcagggccaacatcgtatttg

SEQ ID NO: 1002932 - DNA, 120 bp, Artificial Sequence
  ENSG00000258039_1 (sequence is synthesized)
ggtgtttttcttttaggtctgtatcaaagccagatttaagaaggagggtgtctacaaatgaacgaaagcagaggatgtctggggacaagctaaggacatttgtgtcccacactgcatgta

SEQ ID NO: 1002933 - DNA, 120 bp, Artificial Sequence
  ENSG00000258039_2 (sequence is synthesized)
ttctgaatccagagaaaagagacaaacttcttgggagaaaggatcatgcctgaagcatctttgcatctcccctaacatctgtttgctaagtgttgaataaaataaaagcttgaaagaatg

SEQ ID NO: 1002934 - DNA, 120 bp, Artificial Sequence
  ENSG00000258039_3 (sequence is synthesized)
aatctgactgtcagttgagacatctgataatctaaaagcattcagagaattaggatcccatatggctcgaaaatatttcctatccggcaggaaaaagagaacataccatgaaaataatac

SEQ ID NO: 1002935 - DNA, 120 bp, Artificial Sequence
  ENSG00000258039_4 (sequence is synthesized)
tttgatcatcctatgagcccatatatccttcagagcaagacaatgtgaataggcatcgttgcacttggtagagggttaggcaaatagtggatgccaaataaatccttgtggaattgaatg

SEQ ID NO: 1002936 - DNA, 120 bp, Artificial Sequence
  ENSG00000258039_5 (sequence is synthesized)
gtattacctggagttccctgaaggttgtacatcctcttactccttggcctttggaacgtccttctctatacctggaattcttcctctctctctttacctcctctgactactgtctcttta

SEQ ID NO: 1002937 - DNA, 120 bp, Artificial Sequence
  ENSG00000258039_6 (sequence is synthesized)
cctcactttgaccttcctagttctgtttatcacttcctctaagagttgttgcttgatgcccctgcactgggttagcagattttgctaagtggtccacagaatcacctacttatgtgtttc

SEQ ID NO: 1002938 - DNA, 120 bp, Artificial Sequence
  ENSG00000258039_7 (sequence is synthesized)
tctgccagctctataaagacagaccagactaccttgcggtaatttgttcagtattttatccccaggttgagcacagcacctggcatacagtagacattcagtaaatatttgttaaatgaa

SEQ ID NO: 1002939 - DNA, 120 bp, Artificial Sequence
  ENSG00000248408_0 (sequence is synthesized)
tgccatgaggactagaaacctggaaacctacgtttcccagctactccatctccccacaccgcaggctttctgttatgttctgatgatgaactactgcaggaacatatcaggaaagccaag

SEQ ID NO: 1002940 - DNA, 120 bp, Artificial Sequence
  ENSG00000248408_1 (sequence is synthesized)
agaatccacagaccctttgaaggaactgtaccacccctgcagactccctgagatgccaaaaactgtgaatctgcttgctttctcaactgggaggctcatggtctgggcttaactcccact

SEQ ID NO: 1002941 - DNA, 120 bp, Artificial Sequence
  ENSG00000248408_2 (sequence is synthesized)
cacttataagtgaaaatacgtaatggtctccaactccatccaggtgtctgtgaatgccattatttcattcctttatataggttccccagtgaggattgtcaggcctctgagcccaagcta

SEQ ID NO: 1002942 - DNA, 86 bp, Artificial Sequence
  ENSG00000248408_3 (sequence is synthesized)
attgactttgtgacaatacaccctccctacccttgcggtaatgtaatttgtgatattccctcacccttgtgaaggtactttgtact

SEQ ID NO: 1002943 - DNA, 120 bp, Artificial Sequence
  ENSG00000248408_4 (sequence is synthesized)
tgagaaggtactttgtaatattctcccctgcccttaggaatgtactttgtaagatccaccccctgcccacaaaaaattgctcctaactccaccgcctatcccaaacctgtaagaactaat

SEQ ID NO: 1002944 - DNA, 120 bp, Artificial Sequence
  ENSG00000225231_0 (sequence is synthesized)
gggccatctggcccaagtccacctgcgcggctgagtggaggatgctaggttgctgtgctgtttctcctactgtcttgctgccgcaccacccctcagaaaaaccgggtcgtcagtttcctg

SEQ ID NO: 1002945 - DNA, 120 bp, Artificial Sequence
  ENSG00000225231_1 (sequence is synthesized)
cggtttgcactcaccaaatatacttagcaatttgcaattcacccgcaggattattccagcctctgtgatcacacacagaaggatgagccttcctcgtgagggttggagatggagggagaa

SEQ ID NO: 1002946 - DNA, 120 bp, Artificial Sequence
  ENSG00000225231_2 (sequence is synthesized)
gggatggagagtaaggatgggacggaggttgtggagcagcagaccaacacgccagaaaggaaaataatgatcatctcaatttttatatgtggaggcattgcttttcttctttgggggatt

SEQ ID NO: 1002947 - DNA, 120 bp, Artificial Sequence
  ENSG00000225231_3 (sequence is synthesized)
ttaagatttcccagaaaatttggaattccaaggcaccttagaaacaagacatgcctagaaaatttgactatgtgtccacaaggctggaactgaatcaataataattgcttctttcaatct

SEQ ID NO: 1002948 - DNA, 120 bp, Artificial Sequence
  ENSG00000225231_4 (sequence is synthesized)
gaacatgaaacaacgtggatcaatggctgagaaaactgcagaagttatggatctctggccaggctcaactctcagaatgaaatggttagatttcttctttgcaatattaaactcatttaa

SEQ ID NO: 1002949 - DNA, 120 bp, Artificial Sequence
  ENSG00000225231_5 (sequence is synthesized)
tagctactaaaagacaggcacactcctagggtgtaatacattagcaaaccaaagaatcaaagatctttgcccttgtggagtttacatgctaggggaagagataagcaatgaaaaattatc

SEQ ID NO: 1002950 - DNA, 120 bp, Artificial Sequence
  ENSG00000225231_6 (sequence is synthesized)
ttattaaatatgtaatttatatattgtgttagaagttggaaagttttatgcaaaaaaatgaaaattaagggagtgggtttactgcaggtaaggttatatcccaataagatggtgacattt

SEQ ID NO: 1002951 - DNA, 120 bp, Artificial Sequence
  ENSG00000225231_7 (sequence is synthesized)
taggaaggatgtgaagcaggtaagggactatctagaagtgaactttccaggaaaggaaaatggctggagcgtgtgtcttaaggccagtgaatgtctggaatattcaaggaacagaaaaga

SEQ ID NO: 1002952 - DNA, 120 bp, Artificial Sequence
  ENSG00000225231_8 (sequence is synthesized)
agcagccagtcaatctatctaaaatgagggattgagtgaagaatgcggatcattagggtcttgcaggctattgtaaagagtttagtttttgctccaagcaaaatagggagatactgccaa

SEQ ID NO: 1002953 - DNA, 120 bp, Artificial Sequence
  ENSG00000225231_9 (sequence is synthesized)
attatgagggaaaatgtaataggatctgacttaagttttaaaagaatcataatctttgctgtgatgaggttggctactgagtctcaaatgtaaacggagggaatcatgttatacggcctt

SEQ ID NO: 1002954 - DNA, 120 bp, Artificial Sequence
  ENSG00000225231_10 (sequence is synthesized)
tgcagtaactgtgcaagataataatagacttaaagggcactggagggagtgagaatgagaaaactagaagaaatctatgacagcactctgtattttgtaaagggaatctttgatgcatta

SEQ ID NO: 1002955 - DNA, 120 bp, Artificial Sequence
  ENSG00000225231_11 (sequence is synthesized)
tctggggccgtctttatattggtttgaactgagcaagcacaatgcaaacaaaacgtggatgtgggcagatggagctacattcagcaattggtaagccttactaacatgtatttactatta

SEQ ID NO: 1002956 - DNA, 120 bp, Artificial Sequence
  ENSG00000225231_12 (sequence is synthesized)
aatgtgtaaagcgtggtaaagattctgagtctataactggcttcctccatagattcctccacatcatccccccaaaagaccctcaaaaaatagatgccaaagagaatatttagacaaagt

SEQ ID NO: 1002957 - DNA, 120 bp, Artificial Sequence
  ENSG00000225231_13 (sequence is synthesized)
tacggtttttagtgagggtttggcatcacatatcaatatttatgtatatatatggaattggtatataccacatgtgagtcacaagtgttccctttatcctgaactggatgcaagtctaag

SEQ ID NO: 1002958 - DNA, 120 bp, Artificial Sequence
  ENSG00000225231_14 (sequence is synthesized)
cagtttgatcctttcctctttggacctgggaccttgccttttgtttttgttttttttgttgttgttcctttggcctttcattgatgggagagcattagagagtgtactgaagcctacact

SEQ ID NO: 1002959 - DNA, 120 bp, Artificial Sequence
  ENSG00000225231_15 (sequence is synthesized)
cagtttacctttgtttaaaattcaagaacttctttatattccatagcttgaaaaaactcatcatacacttagaatctattttgttcttaaaacacttacaaatttctccaacgtcagggt

SEQ ID NO: 1002960 - DNA, 120 bp, Artificial Sequence
  ENSG00000225231_16 (sequence is synthesized)
ggagaaggtcatataaaggatattgagttctcagtattctttggtgaactaaaggtgaccactagctaccatttattgactgcccactttgtaatagatactggttctgtagcactccat

SEQ ID NO: 1002961 - DNA, 120 bp, Artificial Sequence
  ENSG00000225231_17 (sequence is synthesized)
gccagatattacatgttgtatataatataataaagttagtagcggaactttctaaagttgagaaaattctcttatgattattgtatttacattcaatttggggtgaaaatgcacaatgat

SEQ ID NO: 1002962 - DNA, 120 bp, Artificial Sequence
  ENSG00000225231_18 (sequence is synthesized)
gggtgaaaatgcacaatgatttgagagggataatatacccaatattatattttatctttgaaaaatgtaaaaaaaaaagacagattaaactttctgactataaaacataatattatattt

SEQ ID NO: 1002963 - DNA, 120 bp, Artificial Sequence
  ENSG00000225231_19 (sequence is synthesized)
agcttaatgtggcattacatattatatacaggcccatcaaaaaatgagacaggagttaacattggtgtattaatttgctaagtctgctgtaataaatgccactgaatgggtggctcaaag

SEQ ID NO: 1002964 - DNA, 120 bp, Artificial Sequence
  ENSG00000225231_20 (sequence is synthesized)
acagctctgggggccgttaagtccaggatcaaggtgttagtagggttggtttcttttaaggcccttctctttggcttgcagatggctgtcttctcactctgtgttcatgtggccttctgt

SEQ ID NO: 1002965 - DNA, 120 bp, Artificial Sequence
  ENSG00000225231_21 (sequence is synthesized)
acacactcaagtctgtgtctaacttatttcttcttatagggacatcagtcatattggattaaggtgcaccctaaagaccttttcttacctcaatcacttcttttttaaaaaaaacaaata

SEQ ID NO: 1002966 - DNA, 120 bp, Artificial Sequence
  ENSG00000225231_22 (sequence is synthesized)
ccttatctccaaatctgttacattctcaggtactgggagttaggcacttaatgtatgaaatttgggggcctataattcagcccataacggttgttattagttggcactatggattggata

SEQ ID NO: 1002967 - DNA, 120 bp, Artificial Sequence
  ENSG00000225231_23 (sequence is synthesized)
agcataaaaatacacatatattttgggaatgggcaggataaaaatttgaagttaccctagaagttaggaaagtgtacaccagtactgtgaagttcccccaaataattacagtataaccag

SEQ ID NO: 1002968 - DNA, 120 bp, Artificial Sequence
  ENSG00000225231_24 (sequence is synthesized)
aaatgtatcatgattaaccatcctgttttcctccgttttgaattttgaatttcacatgtttatatgtatggcataaaatataaatgtaggaaatcttttctttagattttatttgtttac

SEQ ID NO: 1002969 - DNA, 120 bp, Artificial Sequence
  ENSG00000225231_25 (sequence is synthesized)
ttatgtgtatcgtaatctattgagtaaagaatacctgtttcactacagtgatggtgataaagagtggccaaatgtgaacatttatttcagcattaatagaccaattttgtaatatatgaa

SEQ ID NO: 1002970 - DNA, 120 bp, Artificial Sequence
  ENSG00000225231_26 (sequence is synthesized)
aggtatgttcaatgaaatgtcagttacactccccttctttataatttctaaatggctaaacacattgatatatcaatgtttatgctacagtataaagggaagaatccaatccctcacaaa

SEQ ID NO: 1002971 - DNA, 120 bp, Artificial Sequence
  ENSG00000225231_27 (sequence is synthesized)
atgattacaatgtttgctatagtatcaacagcgtaaacttccaggactgtgttgttaggcactgaagtcacatagtgtccttttcttcctgccatcagggtcctgaggtaaaatttggag

SEQ ID NO: 1002972 - DNA, 120 bp, Artificial Sequence
  ENSG00000225231_28 (sequence is synthesized)
aaagataggaggagagcaacagcttgtttcacttcctctactccttccacactgcacgtgttttagaaaccgggctaatgaaatttacgttctattttcgaggctgtgctcagttatttc

SEQ ID NO: 1002973 - DNA, 120 bp, Artificial Sequence
  ENSG00000225231_29 (sequence is synthesized)
tcaggaggtccagtaaataaagaattaatctatttgttttgtctttagtcaagttatgaaactagcgaattatttacattaagtggatttgttgttgctgtcgttgctgaaactagtgaa

SEQ ID NO: 1002974 - DNA, 120 bp, Artificial Sequence
  ENSG00000225231_30 (sequence is synthesized)
ggattcccacaaacctatggggtttagattccagctaatacttacacgggtctcagaaggacagagggcaagggttaacatctggctgatattaaagtctctgcacctcttaatatttta

SEQ ID NO: 1002975 - DNA, 120 bp, Artificial Sequence
  ENSG00000225231_31 (sequence is synthesized)
ccagaaaatgtaagtaaacaatttctgctaaaattattaaattaaattgttaaaattattgtattattgattcagttggataccaataactagtctttccttccttaatatagaacaatt

SEQ ID NO: 1002976 - DNA, 120 bp, Artificial Sequence
  ENSG00000225231_32 (sequence is synthesized)
gataaaagcattttccaagacagtgcatctaattgctcttcaaacttagtcacctgcttcaccttctagaataatcagtctttcaataaatatgtatcaagctttaggcacagtgctgcc

SEQ ID NO: 1002977 - DNA, 120 bp, Artificial Sequence
  ENSG00000225231_33 (sequence is synthesized)
tttatctttaactgaatatggaagcatgtaagcaaacaactgtaacacaaaagaaataattactaaatagaactatgttgaatttgaagcaggagaggagattataagttagctgcttgt

SEQ ID NO: 1002978 - DNA, 120 bp, Artificial Sequence
  ENSG00000225231_34 (sequence is synthesized)
agtcaaggctttaatgaagggagaaatatttgtgctgaatcttaaactcaagtaggcgtttatcaaagatcatcttagaacacacatgtcagagaatcacaccaggtataattatgatgg

SEQ ID NO: 1002979 - DNA, 120 bp, Artificial Sequence
  ENSG00000225231_35 (sequence is synthesized)
agttacaaagaagtagggtgagggactggcaattgtattatagttccctagtgcattaactctttcactgccattcattagcaatttataccttgtccttcatctccattctcctcatgc

SEQ ID NO: 1002980 - DNA, 120 bp, Artificial Sequence
  ENSG00000225231_36 (sequence is synthesized)
tcattctcatgtctatacccttgcttccaacttgttctaattttaacaatttgtaggaaacttccaaatgctcccatcaccacaccagcttacttactccatctctgcccctacactctg

SEQ ID NO: 1002981 - DNA, 120 bp, Artificial Sequence
  ENSG00000225231_37 (sequence is synthesized)
cctagactcctggaactgtagatgcagtattcatgttctacaatagatcctatattctttcactggatcagtaatatcaccctagtaattctccactctcctacattatccttttttcat

SEQ ID NO: 1002982 - DNA, 120 bp, Artificial Sequence
  ENSG00000249610_0 (sequence is synthesized)
agatttgatagaaggatcacaggagcatctgtatcataagggacctgagccaatctattttggagaaacattctgagggaaagaccccacaggttatggaagaaaagcaacagacagaag

SEQ ID NO: 1002983 - DNA, 120 bp, Artificial Sequence
  ENSG00000249610_1 (sequence is synthesized)
cgttaggcaaagaaactagctgttttttcttcaatgttcatcggaaaacttgcccagcagctgtgagtgactcttcagctttcgaatcattgtcttggaatcttctaaaccagtaagacc

SEQ ID NO: 1002984 - DNA, 120 bp, Artificial Sequence
  ENSG00000249610_2 (sequence is synthesized)
atacttattttattttaaacatggaatttaggagcaaaggactagacagtcctcaaagtaataaaataaaaaagaaagaaaaatcatattagaaataaagaatgccgcctccccaaccaa

SEQ ID NO: 1002985 - DNA, 120 bp, Artificial Sequence
  ENSG00000215560_0 (sequence is synthesized)
aatgtgactgagaccactacaatggccatgcctaataattacttatttttataagtgctggatgcgttttacccaacataatagcagatacagacttttaagcttaaaacctaaatgtca

SEQ ID NO: 1002986 - DNA, 120 bp, Artificial Sequence
  ENSG00000215560_1 (sequence is synthesized)
tagctccaaacatttggttgtatgttgaaataactctcaagcaaaaattgattttgaaacgagagctgtaaataaataaaataaatgacataaactcataaatatctggaagaaatgctt

SEQ ID NO: 1002987 - DNA, 120 bp, Artificial Sequence
  ENSG00000215560_2 (sequence is synthesized)
ataaagaggtcagccttaaaaatgtcatgaggtctaatgtgccgctcttctatttctatggatagtacttggacaggacaaggactcaagggtctgctggtccatctctgcaccttgaaa

SEQ ID NO: 1002988 - DNA, 120 bp, Artificial Sequence
  ENSG00000215560_3 (sequence is synthesized)
cagtggctagggcaccaggagtaatgcttccagccaaaaccatgtggttagtgtgaggagtccctccgggttaaggagtgtgtcagcataatgtgacctgaagaagaggtatacctcata

SEQ ID NO: 1002989 - DNA, 120 bp, Artificial Sequence
  ENSG00000215560_4 (sequence is synthesized)
ggcgcccaggatcaaggtctccggcacacattgaaatcccccatgcccaggtgtggtgaagtgaatccctcagctggtgctgggcttccaggtgaggcatcctggagaggatgtgcgggg

SEQ ID NO: 1002990 - DNA, 120 bp, Artificial Sequence
  ENSG00000215560_5 (sequence is synthesized)
cgaaggtcatatgagcacctgcagcactggaatggggtgtcactggcctgttaggccgttgctcaccaggacctctcctgagctcctacgtggcttagtggtaagtgtcccatctacccg

SEQ ID NO: 1002991 - DNA, 120 bp, Artificial Sequence
  ENSG00000215560_6 (sequence is synthesized)
cccgcagcccgggtttctcctccacttacagacccgtgccctcttggggagaatgccagcctccctggagactcaggccctgcaggacccacatgctgtcgtctctcatgggctagacac

SEQ ID NO: 1002992 - DNA, 120 bp, Artificial Sequence
  ENSG00000215560_7 (sequence is synthesized)
tctctggtgcacagggattcccagacagtgaatcccaaagccctgcaggttctgttgcttcttccctgaatgcctgccttccccgaccgaacacacaggaagacacaggtagctactagg

SEQ ID NO: 1002993 - DNA, 120 bp, Artificial Sequence
  ENSG00000215560_8 (sequence is synthesized)
ttttatttccctccggatgtcatttcaggtccatgacatctcctttaggtagttcgcccagccactcttttcctcctacctctgccattcatgagaactgtgaggactcttcgtgtctcc

SEQ ID NO: 1002994 - DNA, 120 bp, Artificial Sequence
  ENSG00000215560_9 (sequence is synthesized)
ccagcgggcaggcttcacgggtcctgaagttggattgtcaaacccagtggtcccctgcttgccagctcaagagctgcgtttgaggcacacctgtgggtgggagtgtgggccccacctctg

SEQ ID NO: 1002995 - DNA, 120 bp, Artificial Sequence
  ENSG00000215560_10 (sequence is synthesized)
gccaaacaaaggtacacaaggggaaacaggtgcaggtgtgtacaggcgtgcaccagctcaaacatgcaggctggaacgtgcacacgctcacattggtaccagggaaactgggtgggtgtc

SEQ ID NO: 1002996 - DNA, 120 bp, Artificial Sequence
  ENSG00000215560_11 (sequence is synthesized)
tgggtgtctacaccaatactcagatgaaccttaatgctcagccacattcccttgctggacacacacagaaggtcccctgccatttaattgatcgtctacagtgggatttatttttacttt

SEQ ID NO: 1002997 - DNA, 120 bp, Artificial Sequence
  ENSG00000215560_12 (sequence is synthesized)
tatacttttttaacttaccaaagtatgttgcattctttcccccatcatgaaaaagactttgatataagtaaggaggaaaagcattttttataataaaatactttatctgcatctatacta

SEQ ID NO: 1002998 - DNA, 120 bp, Artificial Sequence
  ENSG00000258034_0 (sequence is synthesized)
tttgcagagtgtagcaggttccttggactgaggttgcagggagaaggaactgagccagagagaacaagtgcttttccaattaaagtatattcatgatggcattgtacaactgagtgagca

SEQ ID NO: 1002999 - DNA, 120 bp, Artificial Sequence
  ENSG00000258034_1 (sequence is synthesized)
ccacaaagtggacgggaaggcaggaagtacggtcctgggtggccggattgcacgtgagccaggacagagcgttgtactgctccaaaacaaacctgccaaagagaacacacagagcagggg

SEQ ID NO: 1003000 - DNA, 120 bp, Artificial Sequence
  ENSG00000258034_2 (sequence is synthesized)
ctggttctcagattctaatacattccagatcttagcaggaaggaggtctcaaaggcattccttaacttgccccaggctctttccctcatcctttgtctcatgttcctccttccttctaga

SEQ ID NO: 1003001 - DNA, 120 bp, Artificial Sequence
  ENSG00000258034_3 (sequence is synthesized)
tatggactatccagtacagcctgtatattttctcaaggtagatgaagaatgcctgtggcttgattaatacacacttctggaatgcacttctcaactatgtcatttatgttctagtccatt

SEQ ID NO: 1003002 - DNA, 120 bp, Artificial Sequence
  ENSG00000264990_0 (sequence is synthesized)
agatttatagttctcagcctgtgtacctacctgccccacctgatggccctcccatctctcctcaagcaattgttcaatgacacccatgcagcctcccagttgccatggaaatggcaagaa

SEQ ID NO: 1003003 - DNA, 120 bp, Artificial Sequence
  ENSG00000264990_1 (sequence is synthesized)
tgcctctaataggaagtaagaatggaagaagatgattgtacagattcctcaagcaattcctgagcaaattctccaattacccttcgcatccagagtcaaggatttctctgggttacagga

SEQ ID NO: 1003004 - DNA, 120 bp, Artificial Sequence
  ENSG00000264990_2 (sequence is synthesized)
acagcactgaggctttcaacatcctcaccctggcaagctggttgcctccttttgcccagcagtgccacagcactactatgcacagcaactcggctcccttctttcagctggattcctttt

SEQ ID NO: 1003005 - DNA, 120 bp, Artificial Sequence
  ENSG00000264990_3 (sequence is synthesized)
gtgagactgtaattctgaaacacccagtgaaactggaacaggaacaagaaaggggattcttctgtgattgccccaaaccatttgttgtctgcagaaaacttacattggtgcatccatggg

SEQ ID NO: 1003006 - DNA, 120 bp, Artificial Sequence
  ENSG00000264990_4 (sequence is synthesized)
cagggcatgaagagagagtccacagaggagcttgaccctctcatcttcccagagatctaaagagcaggtgtggtgaggaccatcactgaggtcaatcagaaatacctgcttgctcctgcc

SEQ ID NO: 1003007 - DNA, 120 bp, Artificial Sequence
  ENSG00000264990_5 (sequence is synthesized)
ttcatgagagatggctctatttagccacacagacacatcctttttctacctaggcctatcaacctaataggaaatggaggctctgaagactagttttacaagggggtaaaagaaagtcta

SEQ ID NO: 1003008 - DNA, 120 bp, Artificial Sequence
  ENSG00000264990_6 (sequence is synthesized)
ctagatgggagacagccaaggtcggggcgctggtggcggcagatgggagaagagggtacagagcaactgggcatctgaaggcctgtccagccctggggtgcccactcctgtgttgtcaag

SEQ ID NO: 1003009 - DNA, 120 bp, Artificial Sequence
  ENSG00000264990_7 (sequence is synthesized)
cagctcattcccttcctcagaccttggattttgcctccatggagatctcttccatctccgacatttaatgttctagagatagagtgaaaagacacaggaagttgaagcagtatcagaaag

SEQ ID NO: 1003010 - DNA, 120 bp, Artificial Sequence
  ENSG00000264990_8 (sequence is synthesized)
tttcagaaatgcccgcagagcagcagaggcttgggctccaaaaaacacactgcaaggacacttcttcccacgattttctaaggaccagatgtgcctcttcttatactgggtattaatccc

SEQ ID NO: 1003011 - DNA, 120 bp, Artificial Sequence
  ENSG00000264990_9 (sequence is synthesized)
aaactcccttatcatacatttaaactgtttgcctaactgtccagctcttaattaggcatgtaactggggaaacagggacaatatacaaatgagcaaacaatccccaaactttatttctgt

SEQ ID NO: 1003012 - DNA, 120 bp, Artificial Sequence
  ENSG00000264990_10 (sequence is synthesized)
tattgcctacaacttcctcccacaggcattaagtagccaagctgaattttttgccctacagtcatttccttttccacttcattttctaatccaaacgtttgagggtcaagtgtttggggc

SEQ ID NO: 1003013 - DNA, 120 bp, Artificial Sequence
  ENSG00000264990_11 (sequence is synthesized)
cttatttaaaccaccagctggaaaacagtcctcagcaaaatagaggcatgaataagaggcaaacatacatgtagacagacaaattattgttgtgtgagactcatctttgatttcaatttg

SEQ ID NO: 1003014 - DNA, 120 bp, Artificial Sequence
  ENSG00000264990_12 (sequence is synthesized)
ggaactgagttgagttcaatgctgtctcttcatctgtttctgttataactgcaggaagcagagggtttctgacttctcaacatggtaaaacaaacaaataaacaaacaaaaaccaaacaa

SEQ ID NO: 1003015 - DNA, 120 bp, Artificial Sequence
  ENSG00000179136_0 (sequence is synthesized)
tccttcgtggaggctggctacattttcacaacgtctggtcccaagctagatcttcgggaaaagggatcaaggaaatgactattcctccaaataaaatgctgcacatctttcatggattct

SEQ ID NO: 1003016 - DNA, 120 bp, Artificial Sequence
  ENSG00000179136_1 (sequence is synthesized)
ggtccacctcgtcctcacgcggggatgcagactgacaagcttccaccatgaagggttgtcatttgccatagcagggagaggaaaatggagcaaatcagtcaccagctcgtcatacagaag

SEQ ID NO: 1003017 - DNA, 120 bp, Artificial Sequence
  ENSG00000179136_2 (sequence is synthesized)
agtgtcccacgtcatatctgctgatatgttatggccaaagtacatgactatctccaaggagctgagaggtgaaattcggacatttgtctggacggagtagaaccaagagagtcgtaaaca

SEQ ID NO: 1003018 - DNA, 120 bp, Artificial Sequence
  ENSG00000179136_3 (sequence is synthesized)
tcctgtggactacacaccgtttaacaagatgcaacagtattctggctttgcctttcctggagcccttaaacaggctgaagtgaaaagcaccatgacctgtcactacaagacgagaagcct

SEQ ID NO: 1003019 - DNA, 120 bp, Artificial Sequence
  ENSG00000179136_4 (sequence is synthesized)
ccaaccgcttcctggtaagatctgtaatgcgtgaggtcttccttcttagttgtttgcaaacatcagtgattagggacaattagggactggtgtgcctgtcattcttctcctttcagctga

SEQ ID NO: 1003020 - DNA, 120 bp, Artificial Sequence
  ENSG00000179136_5 (sequence is synthesized)
ggaggaaatcctcatgcaccgttatcgggagtgagacttcatctgtcagctgcagtctcaggaatccacgggttcattcagtcgcaactctaatctcactaactttatctgtgttcctca

SEQ ID NO: 1003021 - DNA, 120 bp, Artificial Sequence
  ENSG00000179136_6 (sequence is synthesized)
aatgccttagactatttgcttcccactgatagggaaacctgacatctcattttctcagtgtccagacaaagattcgtacatagcaagaaactaagataggtgttacagaacatggaggga

SEQ ID NO: 1003022 - DNA, 120 bp, Artificial Sequence
  ENSG00000179136_7 (sequence is synthesized)
accaggaaaaccaaatagaggacccccttcatggggcttccaacacgacaataggcaaaagagaagaaacatacatgtaagagacaagcaaaacccagaaccatcacttatgaaggatgt

SEQ ID NO: 1003023 - DNA, 120 bp, Artificial Sequence
  ENSG00000179136_8 (sequence is synthesized)
cctcatcaccctcttttgctgcctgtcaaaaccggtgagggctcatatgacaccttaattatgaattaatcttcgttcctcctacaccagcacttcccctcaccccagtcgaagccatct

SEQ ID NO: 1003024 - DNA, 120 bp, Artificial Sequence
  ENSG00000179136_9 (sequence is synthesized)
acatgtaatttttttgcagcgacgacacagttgaaataactccttcgtggaggctggctacattttcacaacgtctggtcccaagctagatcttcgggaaaagggatcaaggaaatgact

SEQ ID NO: 1003025 - DNA, 120 bp, Artificial Sequence
  ENSG00000179136_10 (sequence is synthesized)
attcctccaaataaaatgcaacaagaagaatgaaaaaacgtagaagagaaagcctcgtgaaactgagaagcatctgcaaccacaaactacaaaatgtagctgctaaacaaaatgaaagtt

SEQ ID NO: 1003026 - DNA, 120 bp, Artificial Sequence
  ENSG00000179136_11 (sequence is synthesized)
ataatctcaccaaccgcttcctgtacaaacaccggaagtcaactctacaaattttagataagaaaaagccatgtcagagggagatgctctcagacgtgcagagactttcaaacttcacca

SEQ ID NO: 1003027 - DNA, 120 bp, Artificial Sequence
  ENSG00000179136_12 (sequence is synthesized)
gtacatcagttcctgcaaaatagaccagagaaggtgcttcccgcaaaataaacaggtaagcaaaatctaaaaaggtaatgcaagattgaagaaggcaaagtgtaaataagaacagtgata

SEQ ID NO: 1003028 - DNA, 120 bp, Artificial Sequence
  ENSG00000179136_13 (sequence is synthesized)
tttagactagagggaagtttcatgtttttttgttaaaatgcttttgaaacgaaatgcaaatgtaaggacaatccttgccaaaaatactgtataatggaaaaataaatttttaaaggctaa

SEQ ID NO: 1003029 - DNA, 120 bp, Artificial Sequence
  ENSG00000179136_14 (sequence is synthesized)
ttattttcatctggatttaatattcttggtcatttcaatacacttaagagacatcattaaccaattccttcaaaatttaactcatatctcacctctgttccccattcttatttctaacac

SEQ ID NO: 1003030 - DNA, 120 bp, Artificial Sequence
  ENSG00000179136_15 (sequence is synthesized)
atagttctctttagttttcccatgatttatcacaagcaagttcacagcaggttaaaataattgaatgcggtgatagcatacatactggcatgattttatgagccgtcattcataacatat

SEQ ID NO: 1003031 - DNA, 120 bp, Artificial Sequence
  ENSG00000179136_16 (sequence is synthesized)
tagatttggatactgcatccatattgttgtatattttttcctttctatcttttccacaatgttttttttttttaacttttaagtttaggggtccaagtgcaggtttgttacataggtaaa

SEQ ID NO: 1003032 - DNA, 120 bp, Artificial Sequence
  ENSG00000179136_17 (sequence is synthesized)
ttcatcaccaagatattaagcctagtacccattagttacgtctttcttctcccaccctccaccttccaaaaggccccagtatgtgttgtacctctctatgtgtccatgtgttctcatcat

SEQ ID NO: 1003033 - DNA, 86 bp, Artificial Sequence
  ENSG00000179136_18 (sequence is synthesized)
ttagctcccacttataagtgagaacgtgcggtatctggctttctgtccctacgttagtttgctaaggatgatgggctcttgtcctt

SEQ ID NO: 1003034 - DNA, 73 bp, Artificial Sequence
  ENSG00000179136_19 (sequence is synthesized)
atagtattccatggtgtatatgtaccaattttgctttattcagtctaccatcgatgggcatttaggttgattc

SEQ ID NO: 1003035 - DNA, 67 bp, Artificial Sequence
  ENSG00000179136_20 (sequence is synthesized)
ctgtaggtatttgaaggatcaccacactgtcttccgcagtggctgaactaatttacactcccaccgg

SEQ ID NO: 1003036 - DNA, 120 bp, Artificial Sequence
  ENSG00000179136_21 (sequence is synthesized)
ggatcaccacactgtcttccgcagtggctgaactaatttacactcccaccggcagggtcaaagcatttctttttctccacaacctcgccagtgcctgttgttttttgactttttaataat

SEQ ID NO: 1003037 - DNA, 120 bp, Artificial Sequence
  ENSG00000179136_22 (sequence is synthesized)
ctaatgaccagtgatgttgagctttttctcatgtgattttcagccacatacatgtcttcctttgaaaagtgttcatgtcctttgcccacttctttatgtggttgtttgtttttttcttgt

SEQ ID NO: 1003038 - DNA, 79 bp, Artificial Sequence
  ENSG00000179136_23 (sequence is synthesized)
cagccacatacatgtcttcctttgaaaagtgttcatgtcctttgcccacttctttattatagatgctggatgttagacc

SEQ ID NO: 1003039 - DNA, 120 bp, Artificial Sequence
  ENSG00000179136_24 (sequence is synthesized)
tttactctgttgatagtttcttttgctattccacaatgttttgtgcaagataagtgcttagcaaatgcttgtaaaggaatgcctgcaccaggaaagtccaatagctatgaataaagaaag

SEQ ID NO: 1003040 - DNA, 120 bp, Artificial Sequence
  ENSG00000179136_25 (sequence is synthesized)
gaataaagaaagaaaggacaagttccaggggaggtgatttttttttcattttcatttttttagacagcttttaaaggaatggagtagcatgttcttctggagcaggagttacaaattgga

SEQ ID NO: 1003041 - DNA, 120 bp, Artificial Sequence
  ENSG00000179136_26 (sequence is synthesized)
cctctaagggccacattcagcctatccacatggttgcagcactgacagagtgttttgaaattttaaactctgaatacttgtagataacatatgcatgccacaataaactgcatttccatc

SEQ ID NO: 1003042 - DNA, 120 bp, Artificial Sequence
  ENSG00000179136_27 (sequence is synthesized)
acagtattctgggtaagagatcatggagaggcatttatgaaagcatttttaaatcaaatacaattattacaatttgtcgattaattggatgtgagaatggagggagatggaagagtcagg

SEQ ID NO: 1003043 - DNA, 120 bp, Artificial Sequence
  ENSG00000179136_28 (sequence is synthesized)
gatcatttccctgtgatggaaaggacaactggataaatgctgtaaagtgtcctgagttagagaatgtagaagatattttggagtgggagggaacattcaaacagagatgtctagtacata

SEQ ID NO: 1003044 - DNA, 120 bp, Artificial Sequence
  ENSG00000179136_29 (sequence is synthesized)
gctggaaatgagatcagaagagaggtctgggccgaataaataaattttagagcgtttgacatccaaaaggtacttgaaatcaatggaacaaagatttgtatgggagggtaagcaaatcat

SEQ ID NO: 1003045 - DNA, 120 bp, Artificial Sequence
  ENSG00000179136_30 (sequence is synthesized)
tcttctttgagactttctcgattttggcactgaaagtcgtatgtcatgggaacattctcaggcttgaacaaactgcagtagttggtcaccctttgagagtgtgtgaataaaaagaacacc

SEQ ID NO: 1003046 - DNA, 120 bp, Artificial Sequence
  ENSG00000179136_31 (sequence is synthesized)
atctagcaccacttttcacaagttatttttgcttcaagctactttatgtggttctctattaatttcctatctccaccctcaacagtaaggagatactaaaaactgtccatttggttccgc

SEQ ID NO: 1003047 - DNA, 120 bp, Artificial Sequence
  ENSG00000179136_32 (sequence is synthesized)
ttgtgggattttactgatttttaattttgcaatactgtcttgcatattttaaatctgcgtatctctaagatgactctccagagctgatgaattttctcttccatgctgatgagccagcca

SEQ ID NO: 1003048 - DNA, 120 bp, Artificial Sequence
  ENSG00000179136_33 (sequence is synthesized)
tgggagagtggaggagtgggggaggaaagagttactgtctcgcgagctgtgagtctgcctgcccacagcggcgttttggatgagactcattatttgtggaaatggtgtgttccacaggca

SEQ ID NO: 1003049 - DNA, 120 bp, Artificial Sequence
  ENSG00000179136_34 (sequence is synthesized)
aaaataactttttaaaaaaagaacatctctgcactctcctgaagtcatctcaaaatgaattcaagatttctcatgaaatggagaaagctttctgatggcctgaatggttccttgtgtact

SEQ ID NO: 1003050 - DNA, 120 bp, Artificial Sequence
  ENSG00000179136_35 (sequence is synthesized)
tgaccatgccacgttaaatctaatctaggtaacattagggtccagaaaaagctaatagaggcttaatgatgaggtaatgagcacagaggtcaagggtaggaaacaggttttctatttgga

SEQ ID NO: 1003051 - DNA, 120 bp, Artificial Sequence
  ENSG00000179136_36 (sequence is synthesized)
gcctcatagccatgggaaaatctcagttgagaaccagaaagaagcagaaaggagcaattgaagtagaagaatatgctccctttcctttacctgattttaaattaaacatgaaggacacca

SEQ ID NO: 1003052 - DNA, 120 bp, Artificial Sequence
  ENSG00000249753_0 (sequence is synthesized)
tggtattatatttaatattgggttcaattattatacattttgaagacacagcctataaattcacctctcattaaggaaaggtgttataaacacagaaatagcccaacttttatattttaa

SEQ ID NO: 1003053 - DNA, 85 bp, Artificial Sequence
  ENSG00000249753_1 (sequence is synthesized)
gacagggtcttgctctgtcaccggccttgacctcgcaggctcaggtgatcctccctagtagctgaggcaggagaattgcttgaac

SEQ ID NO: 1003054 - DNA, 120 bp, Artificial Sequence
  ENSG00000249752_0 (sequence is synthesized)
ctaggtgaaattcaagagtggacagaatagaaccatggagtattcagtgccagggaaatggccatcaggagccaaggaacaagaaactacttctggaaagaagaggcacacaggtacgat

SEQ ID NO: 1003055 - DNA, 120 bp, Artificial Sequence
  ENSG00000249752_1 (sequence is synthesized)
atgaaaggcagcccagaaaatggctaaggattctcaaaaagacaatgcagagaccccttcactacaagacaagaggcgcccctctcaggatctgccactatgtactccccttggctccag

SEQ ID NO: 1003056 - DNA, 120 bp, Artificial Sequence
  ENSG00000249752_2 (sequence is synthesized)
ccaacacatagcgttaaggtgcagcataagacaactagagaagtgttgggcttgccaaggaaggaaagtgaatatgcacacatggagtcaatttgcaccagaaggaaactggggagtact

SEQ ID NO: 1003057 - DNA, 120 bp, Artificial Sequence
  ENSG00000249752_3 (sequence is synthesized)
acatgcctggattctaaagagtctacttccctggaaagatgacctgctgacctgcatgacctacaacatgcacctagcaatcatttatgtatttgatatattttttaatttgagcaacta

SEQ ID NO: 1003058 - DNA, 120 bp, Artificial Sequence
  ENSG00000233079_0 (sequence is synthesized)
tggacgctcaacagataggcagtatattgaaattgactgaacacttggatatttgtttgggcctcacagtttttaaaggattctgataaaacagaaagtccagaaaagagcaatcagtat

SEQ ID NO: 1003059 - DNA, 120 bp, Artificial Sequence
  ENSG00000233079_1 (sequence is synthesized)
atccatatttactccatcctgatgagcttcagctaccactctcgaagtgtgattcttaaatctctatctgcagttcagaactcttctgaataccagaaaccataggtccaattgattgtt

SEQ ID NO: 1003060 - DNA, 120 bp, Artificial Sequence
  ENSG00000233079_2 (sequence is synthesized)
gaccattgccatctggcattaaacaggacttcaagcataaatccaaaactgaactcatcagatttatcccaaagctctttttccccttgacaattagtcaaataaaaatataaaccacaa

SEQ ID NO: 1003061 - DNA, 120 bp, Artificial Sequence
  ENSG00000233079_3 (sequence is synthesized)
ttttttttttttgttttttttctaatggagtttgtgtgtccgttcagtaggaaatggaatggaattaaaccacgttctaaataaaagccagtgcttttactgtaggaatagtcattcttc

SEQ ID NO: 1003062 - DNA, 120 bp, Artificial Sequence
  ENSG00000233079_4 (sequence is synthesized)
actttaactcatgactcaagctttctttgaaaaaaagtttactcagataaacacgagtttcatagaagtcagttattctaccagtaaactcaaaccttgtgctcacatttaatcaacatt

SEQ ID NO: 1003063 - DNA, 120 bp, Artificial Sequence
  ENSG00000233079_5 (sequence is synthesized)
gtattacaggtatcatcatctctaccttttgtgagtgtttagcccctcatcggtcttggtttacttctgctagtgttaaaattttatgtctggtactgtacaatattgctgatactatac

SEQ ID NO: 1003064 - DNA, 120 bp, Artificial Sequence
  ENSG00000233079_6 (sequence is synthesized)
aagcttaacataaattagtggacaagctagtgtatagatgttttaactgcattgtcatagaaatccttggtgcattgttatatagatgtttatgggtactttagcaatatttgaagaaat

SEQ ID NO: 1003065 - DNA, 120 bp, Artificial Sequence
  ENSG00000233079_7 (sequence is synthesized)
tgaggttttagacaggctgtttttccccatttaggataagctaatccttctatccaagtgtgtcctatccaaaatgttttcaggaaaggattaatctttgataaaaattagatgaaatta

SEQ ID NO: 1003066 - DNA, 120 bp, Artificial Sequence
  ENSG00000233079_8 (sequence is synthesized)
aatatgcactttattgtatctcaggcaaaactaaataagagacataatgaaggagtcagatgcttgtccttgtgtggagagacaccaggtgatgactacagacacggaccaagccaggtg

SEQ ID NO: 1003067 - DNA, 120 bp, Artificial Sequence
  ENSG00000233079_9 (sequence is synthesized)
cactgaagtggccataaatacctagtggcattgtctttaatatgcctttacaaaataggtatactttgttttcagaactttatcaaaagtcagccttattctgaggtgatgcattcttgg

SEQ ID NO: 1003068 - DNA, 120 bp, Artificial Sequence
  ENSG00000233079_10 (sequence is synthesized)
aaactattaaccagtataaaagttccaagatcagatttaattattttttaatctgcacataagttattcactgtgttgggctgtcagagacttaacattccggagctttggagccctgcc

SEQ ID NO: 1003069 - DNA, 120 bp, Artificial Sequence
  ENSG00000233079_11 (sequence is synthesized)
cactggttgccagtggtgacagcctgcaatagttgtgacaactaaaactgccctcatgagtttttaaagcaacctgggtgggtggtgacactctgtcttaggagttgttgcattatactg

SEQ ID NO: 1003070 - DNA, 120 bp, Artificial Sequence
  ENSG00000233079_12 (sequence is synthesized)
tccatcaccattgagagctgatctcatggtccacaacttcagaggggattgaaataccagagtcagagttgacagacaacactagcaggttcctcactaccaccctgtggttgagataca

SEQ ID NO: 1003071 - DNA, 120 bp, Artificial Sequence
  ENSG00000233079_13 (sequence is synthesized)
taaggaataactacataactcatgagcttccagaggctgatatgcctctgacatgtagaatataggttagtcaagaagtggcttcagactcagatttcatgggcctaagtcgcagcaatg

SEQ ID NO: 1003072 - DNA, 120 bp, Artificial Sequence
  ENSG00000233079_14 (sequence is synthesized)
tgagaataggttatttgcttatcctgttcaaattactcatctgtcaagggggtatattttaatagcaagtatcatgggtttacaagataccgtataaagcacctaatagtgcttggcaca

SEQ ID NO: 1003073 - DNA, 120 bp, Artificial Sequence
  ENSG00000233079_15 (sequence is synthesized)
aagaacacaaatgttacatgctatgaagttattcttctctaagcttttgttaccaagttagggaacttgtatattaggaaaatataagtgttgtccaataactaataccacagggaactc

SEQ ID NO: 1003074 - DNA, 120 bp, Artificial Sequence
  ENSG00000233079_16 (sequence is synthesized)
caaaatctagatttgtagaccccttgacagagtccaaaactgcatttaggtaaagggagatccacaggtatatgctcattgctctaagcctattttcaaggttgtaagcttgcttggtta

SEQ ID NO: 1003075 - DNA, 120 bp, Artificial Sequence
  ENSG00000233079_17 (sequence is synthesized)
tttctaaaagtcctatgttgctaagaaacaattactgttatgactagacaatactttagctctttattttaaaaatcaagtcttggtattaatgaaggaaagcctgaacatttccatgtc

SEQ ID NO: 1003076 - DNA, 120 bp, Artificial Sequence
  ENSG00000233079_18 (sequence is synthesized)
tcttccactaagtttaagataagctcattattgatcaaaaccaagttaaacttctaaaggtaaaggcatctgttttacattatcttttatgacttggaatatttgactggtatttctatt

SEQ ID NO: 1003077 - DNA, 120 bp, Artificial Sequence
  ENSG00000233079_19 (sequence is synthesized)
gtggtataaatgtttgaagagcaaggtccctggttttctgcttcccagaactattaagaacaccaattgcaatcactgtcagtccttgggggacaatttgcatgtgaacaactgattagt

SEQ ID NO: 1003078 - DNA, 120 bp, Artificial Sequence
  ENSG00000233079_20 (sequence is synthesized)
cagcttgtctgttcatttttacatgaactgcatgtcagacaatgcctcatatcctatcagaggccttccatttccattttgggagtttaaagaatttggtatcccagattaatctgcctt

SEQ ID NO: 1003079 - DNA, 120 bp, Artificial Sequence
  ENSG00000233079_21 (sequence is synthesized)
ttgagcatgaaaacagtgggtaatattttccattcctttcattggtgagccaaaaactcaaggtgcaagtggaattcgatctttaagactctttctaccacacttcgtgcaagtcttccc

SEQ ID NO: 1003080 - DNA, 120 bp, Artificial Sequence
  ENSG00000233079_22 (sequence is synthesized)
tctcctggctccaagaggtgttgccaaaggagattaccatctgagtcagtggactgggagagacagacccaccctcagtctgggtgggtaccatctaatcagctacccacacggctagaa

SEQ ID NO: 1003081 - DNA, 77 bp, Artificial Sequence
  ENSG00000233079_23 (sequence is synthesized)
ctgaacgtcagactccaagttcttcagattatggacacttggacttacaccagtggttcaccaggggctctcgagcc

SEQ ID NO: 1003082 - DNA, 120 bp, Artificial Sequence
  ENSG00000233079_24 (sequence is synthesized)
cttggacttacaccagtggttcaccaggggctctcgagcctttggccacagactgagctccttggggaacacagcaaatgaagatgacccagggaaaaaggggtagtgatgccaagttct

SEQ ID NO: 1003083 - DNA, 120 bp, Artificial Sequence
  ENSG00000233079_25 (sequence is synthesized)
tagcagaacggctttccaaaagacgtgctatgcagagtcagggttctccaaggagactatgtatataaaataagaattggcttgcacattttggaggctgacaagacttaagatctgcaa

SEQ ID NO: 1003084 - DNA, 120 bp, Artificial Sequence
  ENSG00000233079_26 (sequence is synthesized)
tcagcaagctgcagacccgggagagaggatagtatcattcctgtccaagtccatgaactaggagagccagtgatgattccaggtctgcacctgcttctcctctgattcttctttaccagc

SEQ ID NO: 1003085 - DNA, 120 bp, Artificial Sequence
  ENSG00000233078_0 (sequence is synthesized)
atttattgggttactttatttattcagggtgggttccctccaccccaaaaataccagctccaggaaaaccatggtatctccccagcactttgcagggcctggcatgtggaagatgtacca

SEQ ID NO: 1003086 - DNA, 120 bp, Artificial Sequence
  ENSG00000233078_1 (sequence is synthesized)
tttccttggctcaagcacaaaagactcctgcttagctggggaagcagggccagctaatcggcctgcccacagacacaagaggagagggctttcagtgagtccttgactgttccccaagtt

SEQ ID NO: 1003087 - DNA, 120 bp, Artificial Sequence
  ENSG00000233078_2 (sequence is synthesized)
gaagacctcacaggcgcagccttcacgggtttccccttagcctcgggaacctcctgggggcagagcgggctgactgggaaggaagctgaggccacagaccctctgcagagcggcagggtg

SEQ ID NO: 1003088 - DNA, 120 bp, Artificial Sequence
  ENSG00000233077_0 (sequence is synthesized)
agggcagggctgcctcccacggcaggggcaggcagaggcctctgcgccaggtacagcctaggtaccgcctacccccatggctgaccctgggccccaaatccagcgggaggcctgggagca

SEQ ID NO: 1003089 - DNA, 120 bp, Artificial Sequence
  ENSG00000233077_1 (sequence is synthesized)
tcttctccgcctgagtcaccgggctgggcccaggaccccagccaagggctttgcctctgggaagaaaagagctttggagtccagcaaaacctgggaagcagggggaagcttccctagcag

SEQ ID NO: 1003090 - DNA, 120 bp, Artificial Sequence
  ENSG00000233077_2 (sequence is synthesized)
gtgctatttgagcagaggcctggaggagggagactagcaattatttggtcttcgaggcaagttagcaccacacagagactcttctggatataaaggaaagactgtaaagaatttgcagag

SEQ ID NO: 1003091 - DNA, 120 bp, Artificial Sequence
  ENSG00000233077_3 (sequence is synthesized)
agaataactctcgctatgtgacccgaggtgattttatgctttgcctgtgcagcctataaaataatcttgtgtggtccccatgatgcacatcaaccaggagatgctggagagtctgagaca

SEQ ID NO: 1003092 - DNA, 120 bp, Artificial Sequence
  ENSG00000233077_4 (sequence is synthesized)
gcgtgctggcagcactctgccgggggaaggacacggaggtgtccaggctcggctccaaaagcagacaagcctgcactgcgctggagcaggtgagaagtagctgggttccaccgtgccctt

SEQ ID NO: 1003093 - DNA, 120 bp, Artificial Sequence
  ENSG00000233077_5 (sequence is synthesized)
ttcgtctgtgtcccttgccacccaacacgagctcagcacacagttgatcttcactaactagtcacccctccaagcttttgcaatggttgttccctctgctaaagatacccccttctccca

SEQ ID NO: 1003094 - DNA, 120 bp, Artificial Sequence
  ENSG00000233077_6 (sequence is synthesized)
ccttgaccacccgactaactcttaagctcagctcccaggtgcctcctcctccttcttcttggtacatgagtgccccgcttggcattcgcttaggggtgtctatacacactatttcctctg

SEQ ID NO: 1003095 - DNA, 120 bp, Artificial Sequence
  ENSG00000233077_7 (sequence is synthesized)
cctggagtatcttcttccatggggcaggggtcagtcagcaccttctgtatgcaagggacagaaagccagtcccaactgttttcagccaaaaatgggaaagacagtggctcacataactag

SEQ ID NO: 1003096 - DNA, 120 bp, Artificial Sequence
  ENSG00000233077_8 (sequence is synthesized)
aaagttgaaggtgcctaatttcaggtacagtgggatccaggagttcaaagcctgtccagctctgtgctgcttcctgtcaggcaggcttttcccttgttttgtcctcttcttctctaagcg

SEQ ID NO: 1003097 - DNA, 120 bp, Artificial Sequence
  ENSG00000233077_9 (sequence is synthesized)
caggctcagtcatgtgcccatccctggaccaatcactagagcaagacccggtcacatgtccacccctggagacagaggcctctgggcacccccagcctcatggactgagaaaagggaaga

SEQ ID NO: 1003098 - DNA, 120 bp, Artificial Sequence
  ENSG00000233077_10 (sequence is synthesized)
gggggttcttcagtaggaagtcgaggtgctgttacctgaaaatgggagatagatgctgacttgtccacacacccgcaccttctcccagcaaactctagctcgtctctgcacattgtatga

SEQ ID NO: 1003099 - DNA, 120 bp, Artificial Sequence
  ENSG00000233077_11 (sequence is synthesized)
cctcaggccaaccccttcccctctctgggtcttatgttcctcctccggaaaatgggcaggaggccgtttgaattccaacattccagaattctgggacagcttccaggactggagtcagct

SEQ ID NO: 1003100 - DNA, 120 bp, Artificial Sequence
  ENSG00000233077_12 (sequence is synthesized)
ccctagatcccaggaacgttccagcacttctggggacggaagtggagcatcagccagagccctccccggcccccggcctgggaacatgtttagaagatgacaactgggctccctttggcc

SEQ ID NO: 1003101 - DNA, 120 bp, Artificial Sequence
  ENSG00000233077_13 (sequence is synthesized)
gaaattccactcccgtgggggccttgccaaggaaaataagcccaagaaccaggcattaaagagtactacagcctgggtaatttacaaagaacagagatgtatttctaacagtcctggagg

SEQ ID NO: 1003102 - DNA, 120 bp, Artificial Sequence
  ENSG00000233077_14 (sequence is synthesized)
ccggagagccgaagatggaggggctcactcaagcaagggccttcttgctgtcatcccatggcgagggcatcccatggcaagaggtggcacgtgagacagcaaggaatggccgaactcact

SEQ ID NO: 1003103 - DNA, 120 bp, Artificial Sequence
  ENSG00000233077_15 (sequence is synthesized)
ttcatgacaaatccactctctccatcatgaagccactcctgcaataatgatactaatccattcataagggcagagctctcaggacccaaccacctcttaaaggcccacatgacctttggg

SEQ ID NO: 1003104 - DNA, 120 bp, Artificial Sequence
  ENSG00000233077_16 (sequence is synthesized)
agacacgctgagaccctggcggtgcggggtgaggacgtggcccctccccagggcactgtggttgtttctcacacatatgccagatactgcgcctcgcagccacttcgtccccattgcctc

SEQ ID NO: 1003105 - DNA, 120 bp, Artificial Sequence
  ENSG00000233077_17 (sequence is synthesized)
agtttgaggccaaaagtgacacatcaggccacagccacctaccccgtcagccatctcagcctccgtgacctgaagggaaatgatgaaagacttttctagaaataaatgatttttaaaaca

SEQ ID NO: 1003106 - DNA, 120 bp, Artificial Sequence
  ENSG00000233073_0 (sequence is synthesized)
ggcttctgcaacagttctcggatcacgctgtcgtaggacttgcggatgttggagcggcccaccttctccgccgtagcgatgcagatgttgcgcaggcgggcttcctgctcgaaggcctcg

SEQ ID NO: 1003107 - DNA, 120 bp, Artificial Sequence
  ENSG00000233073_1 (sequence is synthesized)
atccctgtctccccgtaatcaccctcggaggctactgtggacacatggctacatttttctgttagttcttgagatgaataccagatgcttccttggatactgtattttggacactaggaa

SEQ ID NO: 1003108 - DNA, 120 bp, Artificial Sequence
  ENSG00000233073_2 (sequence is synthesized)
actgaaatggcaggtgtcaccaaacaggtactgtcattacttctagaatgagtgcctggcttccactggatttatgtaccactatggaaggcttggtgataggagccctgtctatgcata

SEQ ID NO: 1003109 - DNA, 120 bp, Artificial Sequence
  ENSG00000233073_3 (sequence is synthesized)
gcttgactttgttaagaggtttctggctagcactggagaggccatctcttcttgatacaatgattttctcatcttcaagttatattaatcaggacctgaacccctcagggagacagagaa

SEQ ID NO: 1003110 - DNA, 120 bp, Artificial Sequence
  ENSG00000233073_4 (sequence is synthesized)
tgaaaggacctaaaaaatatctggacattattttctggcagcgaagaatcacagtgaaacaatcctaaactgctgaaatttcctctcccataggggtaggagtaatgagaaactgctcaa

SEQ ID NO: 1003111 - DNA, 120 bp, Artificial Sequence
  ENSG00000233073_5 (sequence is synthesized)
acccttgcaacagaaaaaggcagaaaaggaatgtgacaaatttctctactgaaaagaaaggattcaaattgaggaaggattcataacagggaagcaggagcggaaaataatgtttatgag

SEQ ID NO: 1003112 - DNA, 120 bp, Artificial Sequence
  ENSG00000233073_6 (sequence is synthesized)
attcttttgctcaagtcacccacaaagaaggcttggaagttcatgttccctagagaggtgccaattctgctaaagaagattaagtgcccatatcacacatgccataatcctgcagccaac

SEQ ID NO: 1003113 - DNA, 120 bp, Artificial Sequence
  ENSG00000233073_7 (sequence is synthesized)
atcaacaaagagctcaaatctagcctggccctaatctagggagctaccacagtgggctgtcagccctgcctggggcccctttcattgccatgtcgtgtaccagccgagatgttcattcag

SEQ ID NO: 1003114 - DNA, 120 bp, Artificial Sequence
  ENSG00000233073_8 (sequence is synthesized)
aaatgagtaagaatgttagagaaccatcctattgcatcctggaatatttggttaacagtttgaaccctttttatggctttgaaataattatttctgaattgggcacagaggcatttgatt

SEQ ID NO: 1003115 - DNA, 120 bp, Artificial Sequence
  ENSG00000233073_9 (sequence is synthesized)
cctattttatttcacttgtttgcatctgagaagatgtttaaaggctcttggcttacccgtgaagttgattttcagcaagtaatccttgtacaacttcttcccatccaggatcttcatagc

SEQ ID NO: 1003116 - DNA, 120 bp, Artificial Sequence
  ENSG00000233073_10 (sequence is synthesized)
atcacaaagcttggtagtgttgggacagagggtgcgctgcattttgtgcaaagcgtgggccatggcatacaccgcgttcaccacaaacatgatcttggactcttgctcgtagttgctgct

SEQ ID NO: 1003117 - DNA, 120 bp, Artificial Sequence
  ENSG00000233073_11 (sequence is synthesized)
gtcgatggccaggtgcttgtcgcagacgcgcctgtggttgcgtttgttctggaggctgcactgaaacttttgctcccagaagtcccggaaccaggggttgcggtggttgttgtaggggtt

SEQ ID NO: 1003118 - DNA, 120 bp, Artificial Sequence
  ENSG00000233073_12 (sequence is synthesized)
gaggctctggaagtagcggtcgaactggcggacaggctgggaggccagctccagggtgatggcgccgtaggccacatgctcgctgcccttgatgatgctctcctgcgcgccccagccgtc

SEQ ID NO: 1003119 - DNA, 120 bp, Artificial Sequence
  ENSG00000233073_13 (sequence is synthesized)
accctcggaggctactgtggacacgtaggtccagttgaagaagcgcaagatctcagccatggctttggcctggtagaagtcggggggcacggtcctggcaaagtaatcatagcgcgactt

SEQ ID NO: 1003120 - DNA, 120 bp, Artificial Sequence
  ENSG00000233073_14 (sequence is synthesized)
atcactgagtttggcgctggtggatgcgtagctgatctgagggatctggaagagccgcagcaggactaggagactctggacaaaatggcctatactgacttatttaggcataggaatatt

SEQ ID NO: 1003121 - DNA, 120 bp, Artificial Sequence
  ENSG00000233073_15 (sequence is synthesized)
taatttacaatgaaggcaggctttgcaagagaacgaactagccatagaataacagcaatgtgggaaagattctctgcattggaaaggggcacaatgagctgtaactttggggaaggctgt

SEQ ID NO: 1003122 - DNA, 120 bp, Artificial Sequence
  ENSG00000233073_16 (sequence is synthesized)
gggctagaataaaacagcaactattgccaacattttaagaataattttatgttcctctgtgtgtgtgtgtttaatgaggagaccacaactgactctagaaaaaggaggcacatttggtga

SEQ ID NO: 1003123 - DNA, 120 bp, Artificial Sequence
  ENSG00000233073_17 (sequence is synthesized)
gttgaaacgtgaaattggaacatagtaagtattatctcaattgtatcacctatattgaatagcatggggtgataatatagtcaaacttacgatattcagagttacattagaaacacatgt

SEQ ID NO: 1003124 - DNA, 120 bp, Artificial Sequence
  ENSG00000233073_18 (sequence is synthesized)
aatacaaatgaatcatggagtgaagtattgaagtaattttatcacagtgagctgctccttttaaaattagtttctttagattaaaagggttaaaatgcttaaaagtaaacaccatgggag

SEQ ID NO: 1003125 - DNA, 120 bp, Artificial Sequence
  ENSG00000233073_19 (sequence is synthesized)
gcaatagattataagtctctctcctttctctttctcatccacctcagccttatttgtaaagaagaatgttagtttggtttattcatttaaaaaatgtgtttattctgttgtaaaaccaag

SEQ ID NO: 1003126 - DNA, 120 bp, Artificial Sequence
  ENSG00000233073_20 (sequence is synthesized)
taccaatgtactgggtatgtacatacacacacacacacacacaaacatattttgctcttttgatagtcacaataactttttatggtggatattattatctctattttagatatgcaaaaa

SEQ ID NO: 1003127 - DNA, 120 bp, Artificial Sequence
  ENSG00000233073_21 (sequence is synthesized)
cagttctgctaggtgaagaaacttgttcatagccatatggttagaatgtgtgggtgaaatcaaggtgtaaaaccaggtgttttgacttcaaggactatggctatcccctcacagcttcct

SEQ ID NO: 1003128 - DNA, 120 bp, Artificial Sequence
  ENSG00000233073_22 (sequence is synthesized)
ctctaccttctactgtgtgactataaacctgaggcttcaaacacagaaaggcatccaggtagaaagaacaagaggaacagaagcaatattatggtatacaccatagactgcctagttgct

SEQ ID NO: 1003129 - DNA, 120 bp, Artificial Sequence
  ENSG00000233073_23 (sequence is synthesized)
gttagcaggaactttccttttaacataaatttaaaactagggttggggaatatccaggtagttgttaactgggttcctgtctcatttgtctaaaagcttggttctggaatattcttgact

SEQ ID NO: 1003130 - DNA, 120 bp, Artificial Sequence
  ENSG00000233073_24 (sequence is synthesized)
tactttactggccatatggtttctctgagaaagcataaagaaataaaggaactcctacactggacatcattttgaatgataaaagaaaaattgttttagaatggagaagtaatgtaaaat

SEQ ID NO: 1003131 - DNA, 120 bp, Artificial Sequence
  ENSG00000233073_25 (sequence is synthesized)
tttggaagaaagttacccaattatgttattattagatagagtggaggaaggaaaaacaggatgtagttatatatgctttggaaaaaaatactttaaaagagatatgcttcacataaatta

SEQ ID NO: 1003132 - DNA, 120 bp, Artificial Sequence
  ENSG00000233073_26 (sequence is synthesized)
agactctaaaatggaatacaggaggactataaaaataattcatacaatacagaatagtctcaacaagaaagagaagatgaaaactctaaagaatccactgggtgctaggctgcatttggg

SEQ ID NO: 1003133 - DNA, 120 bp, Artificial Sequence
  ENSG00000233073_27 (sequence is synthesized)
ggattttggtgttagaagaaccagcaacacagaatgggtgctgtctgtatgtatgttgggggcgtccccatatacaacatagaagattgacataagcctgtaaaaataagggacgctaaa

SEQ ID NO: 1003134 - DNA, 120 bp, Artificial Sequence
  ENSG00000233073_28 (sequence is synthesized)
gcgcagaatgtgaaaatgcatcaaagtgatttttgtcattgctattgttttgatttgaaattatgtttcaggagaagatgtggcaggaagatacagaatcatcaaatgggaaagttggtt

SEQ ID NO: 1003135 - DNA, 120 bp, Artificial Sequence
  ENSG00000233073_29 (sequence is synthesized)
ctatatgaataaaagaaagatgctgctccatccctcttactttctcattctctccattgagaatggtttctaacatggaaatggcagtacaaataatataaaaaggttatcacactcaaa

SEQ ID NO: 1003136 - DNA, 120 bp, Artificial Sequence
  ENSG00000233070_0 (sequence is synthesized)
agaatttcaggaagacactgataagaacttgtttctcttgtccctgtttttggaacccatttcttcagggcccctacctggccttgcaggtaatgttatcacagctgtagctggactttg

SEQ ID NO: 1003137 - DNA, 120 bp, Artificial Sequence
  ENSG00000233070_1 (sequence is synthesized)
gagtgagtcagcctggtcagggaaggacttgtttttctttttacttgtttttcttatatttcctgcttcatgagcaagaaacaacaagctttaccttcacagtagaagagtccagcagaa

SEQ ID NO: 1003138 - DNA, 120 bp, Artificial Sequence
  ENSG00000233070_2 (sequence is synthesized)
gtgaatctaaacctatggacagattcatcttggaaaccctaagtgaggctaaagggagaaaacaaattggaaggagatttaaaggattctcaaatacaaactgaagttttcaagaacagg

SEQ ID NO: 1003139 - DNA, 120 bp, Artificial Sequence
  ENSG00000233070_3 (sequence is synthesized)
atcatgaaggacagtaaaaatcaggaattgccaaactttgtcacaatggctgtacaacatcagtgagccgaagtcataccactgcattacagcccgggcgacagagaaagactccatctc

SEQ ID NO: 1003140 - DNA, 120 bp, Artificial Sequence
  ENSG00000233070_4 (sequence is synthesized)
cccatttcttcagggcccctacctggccttgcagaagagtccagcagaacaaagttggaagcagagggagtgaatctaaacctatggacagattcatcttggaaaccctaagtgaggcta

SEQ ID NO: 1003141 - DNA, 120 bp, Artificial Sequence
  ENSG00000233070_5 (sequence is synthesized)
catatagacagaatcatgctgtatttgttcttttatgtctggcttattttacttaacactgtttttactgtaagtccagttgtagcatatgtcagaattgtattctattttaaggctgaa

SEQ ID NO: 1003142 - DNA, 120 bp, Artificial Sequence
  ENSG00000233070_6 (sequence is synthesized)
taacattccattttaagtatatttcatattttgtttatccgttcatctcttaatggaaatgtgaattgtttccaccttttgcagttgtgcatactcttgccataaatatttatgtccaaa

SEQ ID NO: 1003143 - DNA, 120 bp, Artificial Sequence
  ENSG00000234869_0 (sequence is synthesized)
atgtttgtattttgcacttgcccggaggtgtttcacgggaagtgagcattttttaaaacaaaaatagaatttagaaaaaaaaaaggcagacacgatggatttctagtgttgtacgtgctg

SEQ ID NO: 1003144 - DNA, 120 bp, Artificial Sequence
  ENSG00000234869_1 (sequence is synthesized)
tagaaagcacttgaaaatgcgttttgccaggggccgcaaccagaagctacatgacttctggaatctgttccttacacagtaaattcctgggccagttggtaaacagcaaggagccacaag

SEQ ID NO: 1003145 - DNA, 120 bp, Artificial Sequence
  ENSG00000234869_2 (sequence is synthesized)
aaatcactcataggcaaaagccgagtgagcccaggccaagctccactttgtccactttgccctatttttggaattcagggggaaacatcttgggagcaggcccattgcacccctctgcct

SEQ ID NO: 1003146 - DNA, 120 bp, Artificial Sequence
  ENSG00000234869_3 (sequence is synthesized)
cctctcgatgccttacagttggtggggtttgacacatggaaaattgtgaaagttagaacacggaacaaaaatgaagcctcaacatagagttaatagaggcaaggggctacagagaattta

SEQ ID NO: 1003147 - DNA, 120 bp, Artificial Sequence
  ENSG00000234869_4 (sequence is synthesized)
gatcctaatcaagcacgtcttatgtactagcgcttccctggaaggccaggataactttatgactacaaagaaaacatgttttcctgcttggaagttgccagaacttgtctaatataaaag

SEQ ID NO: 1003148 - DNA, 120 bp, Artificial Sequence
  ENSG00000234869_5 (sequence is synthesized)
ctgggatttcttgcccgtgggctgtcgcgtacggctacccaggccgcctcgtgaagcctcctcctgggagctcggcgccctcaggtgctccctgagatgccagcacctgaacgacctgct

SEQ ID NO: 1003149 - DNA, 120 bp, Artificial Sequence
  ENSG00000234869_6 (sequence is synthesized)
ccagggaggctttagccccaagaaggttctggaaagctccaggaagtttagccggcacgcacaaaagccagagacaaatctccagcctgcctggaaatgctgtgggctcagggcaatggg

SEQ ID NO: 1003150 - DNA, 120 bp, Artificial Sequence
  ENSG00000234869_7 (sequence is synthesized)
ctgaggtcttgtgtccaaaactgctcttgcatctccctggggagcccgggtgggcaggaacaacaaggtcctgtggccatgccctcgccccatgctcacccacactgcctgtgcctgctg

SEQ ID NO: 1003151 - DNA, 120 bp, Artificial Sequence
  ENSG00000234869_8 (sequence is synthesized)
ggcccatctcagggctgcactggcccctagtggccaagcatgggctctacccctctgcgcctgcctggctgcctgtgcaggtgcccaccacactgtccctgagcagagcagagaccagcc

SEQ ID NO: 1003152 - DNA, 120 bp, Artificial Sequence
  ENSG00000234869_9 (sequence is synthesized)
tgagccccgggctccgtggctaccatgctgagagtgagccctgtgcatgcacacacacttacgatgctgctggccccgagcagtggccggccacacgggctgctagtcatactgcccgct

SEQ ID NO: 1003153 - DNA, 120 bp, Artificial Sequence
  ENSG00000234869_10 (sequence is synthesized)
gctcctgggactcctgagcccctcactctctatagggtgaggatgcccagctctgcaagacacacagcaaacggagcctcagagtgcacagcgtggagatggggctccccccacaggctg

SEQ ID NO: 1003154 - DNA, 120 bp, Artificial Sequence
  ENSG00000234869_11 (sequence is synthesized)
cacccccatctagtcccggggaacgagaatgaagggcctacctgagcacacaagccccaggagggcatgggagctgcatttgggggcagtgactgggagggctgctgactccaggctcag

SEQ ID NO: 1003155 - DNA, 120 bp, Artificial Sequence
  ENSG00000234869_12 (sequence is synthesized)
tcatgaggttcccctgatccccaggacatcggcttccacatctgcacatctgggagacaaatgcaccatcagggagggcaaatcatacctgggaagggcctgactccagcagtttcagca

SEQ ID NO: 1003156 - DNA, 120 bp, Artificial Sequence
  ENSG00000234869_13 (sequence is synthesized)
gtggctgaaagatcatggctatttttgccatcattacaatggaatgtccactccctccagccacctccacagcaatcaacaccggtgtccagccactctacatggacgtgtggggaacag

SEQ ID NO: 1003157 - DNA, 120 bp, Artificial Sequence
  ENSG00000234869_14 (sequence is synthesized)
agcacaggcctcttggcttggctgtggtcaccgggagggagcagggagggacagctgccaagaggatgggggagggagcctgctactcaggaacgctggggcaagacatgagacaaaggg

SEQ ID NO: 1003158 - DNA, 120 bp, Artificial Sequence
  ENSG00000234869_15 (sequence is synthesized)
ctgccttcacccaccagtaggagcctgaccctgagcccaaagaaactgcccacctgtgtgctgaccccagggcctgaggacaggtccccaagtggacgtctcaaagagagtcccacattc

SEQ ID NO: 1003159 - DNA, 120 bp, Artificial Sequence
  ENSG00000234869_16 (sequence is synthesized)
cagggcacatgggaactatggccttctggcagctggagggcagcaggaagggcacagctgtctgagacccgtgtggcttcccagaaagaggtgccacccctgaggaggcaccggtgctca

SEQ ID NO: 1003160 - DNA, 120 bp, Artificial Sequence
  ENSG00000234869_17 (sequence is synthesized)
cggactcctggttgccagtcttgccagggcaaaaaggcaagcgaaggaaaccctctcttcgtggggcactctgccttgcagtgtcaggtgagatcccggggggaaagctggcttgagctc

SEQ ID NO: 1003161 - DNA, 120 bp, Artificial Sequence
  ENSG00000234869_18 (sequence is synthesized)
ctctggaatgtgcagggaggactccgtcaggcccggctctgcctccaagctgggcagcaggcgagccccagagctccaccagccccactggcagaggagggccctcacgaggcaggagcc

SEQ ID NO: 1003162 - DNA, 120 bp, Artificial Sequence
  ENSG00000234869_19 (sequence is synthesized)
catgattcatgccctgctggaatttgtcgagcatgccgagatttgcagctcctccgagattgggtcctgccctgatcaaaagaaaagaagatggatgaggacactataaataggccagag

SEQ ID NO: 1003163 - DNA, 120 bp, Artificial Sequence
  ENSG00000234869_20 (sequence is synthesized)
ccacccagctggcctcggggatgcaggcggtatgtgttctgggctctcacgaagctaagaaactctaaatccaaggtgacatcgtggcacaccgccacctgcttcagggggacacagggg

SEQ ID NO: 1003164 - DNA, 120 bp, Artificial Sequence
  ENSG00000234869_21 (sequence is synthesized)
acaaggaggagctattggcagagcgctcggttcctgcaagttccaacttctgctaaaattggttaattggttcctttgcatgattcagggcacacaggcttctctgtccacaaaatttgc

SEQ ID NO: 1003165 - DNA, 120 bp, Artificial Sequence
  ENSG00000234869_22 (sequence is synthesized)
tcgcctgcacacccagagaaatggacttggcttggtttttctgaacttttgcctctgcggaatcagcagtggacgtgtgagctggggcctctgtccctgtcatgtgaggaggtcaggcag

SEQ ID NO: 1003166 - DNA, 120 bp, Artificial Sequence
  ENSG00000234869_23 (sequence is synthesized)
gacaagcaggaagcactgggcaatgagtcaggaggcctggtggggagcttgggtgagtctgttttcctctctggacctcagtcttctcctctggttgatgtaataaaatcctacaaactg

SEQ ID NO: 1003167 - DNA, 120 bp, Artificial Sequence
  ENSG00000264339_0 (sequence is synthesized)
aaaaaacaaaaatggattgccaacctcccctaccatagagtgtctaactcagaagcatgaactggcgtggcatatgcctgttgcctatgtatagtttctcagtataaagcttttctgaat

SEQ ID NO: 1003168 - DNA, 120 bp, Artificial Sequence
  ENSG00000264339_1 (sequence is synthesized)
agagaaacttttaacagttttcactatatatttaaaacaaaaagtcagaagagtaaaaaagtcccattttaaactgtatatataccatcttaattcttgtgttggactatagtaaataac

SEQ ID NO: 1003169 - DNA, 88 bp, Artificial Sequence
  ENSG00000264339_2 (sequence is synthesized)
aaattcaggccagaggatcctttgagccaaggactttgagactagcctaagcaacacagagagatccctgtgtctacaaaaaaaataa

SEQ ID NO: 1003170 - DNA, 120 bp, Artificial Sequence
  ENSG00000264334_0 (sequence is synthesized)
gtagaaccttcttcaaacaaggaccactgagtataatttcctaagagacgatttttacgttgcatgtcaattacaagaatgcactggagatagaaaaatcagtaaagcatgagccccact

SEQ ID NO: 1003171 - DNA, 120 bp, Artificial Sequence
  ENSG00000264334_1 (sequence is synthesized)
ttcaaagcgcccacagttgagaggggacagctgagacatgaggggcaccccagaagcatagtgtacacgtggcctccacagtgacgagcaaacccagctcccagaggaaggggcacgggg

SEQ ID NO: 1003172 - DNA, 120 bp, Artificial Sequence
  ENSG00000264334_2 (sequence is synthesized)
agccttctgagggaaaccagggtctggagggcaccatcccagcatcccgagaagcggctgtcccacagagggtccttccacccacccgccaagctttcctgggtctgtgcacgctgtctc

SEQ ID NO: 1003173 - DNA, 120 bp, Artificial Sequence
  ENSG00000264334_3 (sequence is synthesized)
gagtcacagcggacagtcctgcatcctaacagagcatttggtggcacggacggtggcaactttgtgtttcaaacctaagtgaatgtctcagtgttggctcctgcaggcttctctaaggca

SEQ ID NO: 1003174 - DNA, 120 bp, Artificial Sequence
  ENSG00000264334_4 (sequence is synthesized)
tagcaccagatgttgtctgcaggggttcaaagttagcccacagggaggttgctgattctggcccacgtctcacctgcccctggctcttccagtgccagctttgggctgcagactcagcac

SEQ ID NO: 1003175 - DNA, 120 bp, Artificial Sequence
  ENSG00000264334_5 (sequence is synthesized)
acgcccataaccaactgtcctgcttggacaccactgcaagagggcggactctcctctatggtggcagcaccaggcaacagctgcggaaaagtcgctctaggaaggcatgggaatgccaag

SEQ ID NO: 1003176 - DNA, 120 bp, Artificial Sequence
  ENSG00000234864_0 (sequence is synthesized)
cttcctgccatgtggtgacagattaaaagctgctatacactttggaactggaaactgagctcccaatataaaggagataagccatcatgcttacaatatgttgtgcagagctcactggtg

SEQ ID NO: 1003177 - DNA, 120 bp, Artificial Sequence
  ENSG00000234864_1 (sequence is synthesized)
ggcagtttttcttaacaatgcatcaggacttttgctatttgtaaaggaagcttaaaggaagctgagagtgctgagggcacatctgaaaccactggaggttggcgacgtggaggtcaggta

SEQ ID NO: 1003178 - DNA, 120 bp, Artificial Sequence
  ENSG00000234864_2 (sequence is synthesized)
gtagtgctctcccaccaggagtccctctgcacccctggagagagcagtcattatgcaggacaacccatctgctcagaactttcagtggcgacttgtggtgtgactctgttcccattcatc

SEQ ID NO: 1003179 - DNA, 120 bp, Artificial Sequence
  ENSG00000234864_3 (sequence is synthesized)
tatgtgctgctgtaggcttagcttcccacagcctccccagctttgccatttgtcattatcatttactcttaatatttattctatctatgaccctgatgcacagagtgatagctgatagtc

SEQ ID NO: 1003180 - DNA, 120 bp, Artificial Sequence
  ENSG00000234864_4 (sequence is synthesized)
tcttaaaacaacgtttacaattattttgacagtttaccgtgttttgttctctcaacaatacttagaatttgtctgagttatagttgcatagacggcaattttcctgacctagttttctga

SEQ ID NO: 1003181 - DNA, 120 bp, Artificial Sequence
  ENSG00000234864_5 (sequence is synthesized)
ctatgatttatgggtcagtaaactccttaaatgatggaatataacatctcaggccacagggaacacttactatcacatgctcactgttgcaggacggatgcgtggccagcctcaggttgc

SEQ ID NO: 1003182 - DNA, 120 bp, Artificial Sequence
  ENSG00000234864_6 (sequence is synthesized)
taaatgttagggtgatctgccttccttctggggcggtgattctccacttgtagatccggccatgaggatttaggttcgggtagttgggagaagtagatgttccagcagagccctgaagat

SEQ ID NO: 1003183 - DNA, 120 bp, Artificial Sequence
  ENSG00000234864_7 (sequence is synthesized)
ccccaccacactctgatgtgggggaagaaagccaagaaaacttccaatcaaatcaaaatgtctccttccatcaggaaagctctcaaaattcaggtgtcctgcgtgtacaaagaaaataat

SEQ ID NO: 1003184 - DNA, 120 bp, Artificial Sequence
  ENSG00000234864_8 (sequence is synthesized)
aaaaaacaagaccttgcccatgaagaaatattaatctctctcaagaaaacaggaaaacatgaatgaaaattaacatattcaaatatatgaagaagtgaaaaaaatgcaaccagttagggg

SEQ ID NO: 1003185 - DNA, 120 bp, Artificial Sequence
  ENSG00000234864_9 (sequence is synthesized)
aaggatatctcaggataatgaggaaggccagttttttggttgaaaaagtggtttgagacaacagagtgacaaatatctgccttatgctactgccaggagacatgcatgaccctctttctg

SEQ ID NO: 1003186 - DNA, 120 bp, Artificial Sequence
  ENSG00000234864_10 (sequence is synthesized)
cctcaagctatagaacacccctcaaataacggcatctggcaatgggatgtctcagcagcaacaggttgccttcccactaccgttgctctccccaggtggcctccagggtaggctatatga

SEQ ID NO: 1003187 - DNA, 120 bp, Artificial Sequence
  ENSG00000234864_11 (sequence is synthesized)
cacctgggctctggacatccattgttaatggtagaattgaggtagagaatcactggtactgcccaaagcccattaatctgcacttctttgcagagtatagacatgctttgcctttcttgg

SEQ ID NO: 1003188 - DNA, 120 bp, Artificial Sequence
  ENSG00000234864_12 (sequence is synthesized)
aagtgaagaaacttcagaggctgaataagtacatgcgaaaataaacaccccaaagagagcagatatatttcactaaccagaagtatgatagtcccaggtctccacaaagtctttttcaca

SEQ ID NO: 1003189 - DNA, 120 bp, Artificial Sequence
  ENSG00000234864_13 (sequence is synthesized)
gccagaggaattctgaaggttaaaatcttcaaaagagatggtgagatagtgtctggagagcccctggagatgccaatcacagaataagttgtctctatatggaagcattagatggccaat

SEQ ID NO: 1003190 - DNA, 90 bp, Artificial Sequence
  ENSG00000234864_14 (sequence is synthesized)
agaataagttgtctctatatggaagcattagatggccaatgctttcaacaacaccactttgccctgttactcttcccccacactgagctg

SEQ ID NO: 1003191 - DNA, 120 bp, Artificial Sequence
  ENSG00000234864_15 (sequence is synthesized)
cagcacatgtgaaaacttttaggtgccaagtgactatgaattgaagtttttaaaattctgaaaatgcttagtgctttcctcattatttgaattctagggttgatgtaaacagaagtgata

SEQ ID NO: 1003192 - DNA, 120 bp, Artificial Sequence
  ENSG00000234864_16 (sequence is synthesized)
agtccaatccaataatgggaaacaagatgacgaccaaatggcacattctgtaatgtcacattaattcttttgggacactatgtaagagctatcagttgcaagcaagtttcatctcaagaa

SEQ ID NO: 1003193 - DNA, 120 bp, Artificial Sequence
  ENSG00000234864_17 (sequence is synthesized)
caaactggtagactcatctgacctgcctagaaccttgtgttgattctaaagactgaacccaagctcacctggaaggggggacacctgctatatctagttttactatcaactaaactttca

SEQ ID NO: 1003194 - DNA, 120 bp, Artificial Sequence
  ENSG00000234864_18 (sequence is synthesized)
ctactgtaactgatatctcagggccttgaaaattactattcaattatgtcttattagctggatgtggtagctaattgaattatatgcagcttgacccgggatataatatgatctatggtg

SEQ ID NO: 1003195 - DNA, 120 bp, Artificial Sequence
  ENSG00000234864_19 (sequence is synthesized)
tagttaaatactgttacaactagcctttctgaacttttgctatattaaatatttgtttggtttgtgtctagacctatcagatactaaattgtgtgctattgtgaccatactatagtgaat

SEQ ID NO: 1003196 - DNA, 120 bp, Artificial Sequence
  ENSG00000234864_20 (sequence is synthesized)
cttcaacaagcaaagttactgctcaatttttaagtaaggaaatcaaaatcctgaagagacatatttgctttttatccagtgactgatttggcactagagactcagagaaaaaaaaaaagc

SEQ ID NO: 1003197 - DNA, 120 bp, Artificial Sequence
  ENSG00000234864_21 (sequence is synthesized)
ttaatcattttatatatgatgaggaattcaaagacattgttctaaatatagttatctggttcttaaatagttgtattacttaaagtaataaacatactgtagttcttccttttccttggc

SEQ ID NO: 1003198 - DNA, 120 bp, Artificial Sequence
  ENSG00000234864_22 (sequence is synthesized)
ggatacattccaagtccccccagtgagtgcctaaaaccttggatagtaccaaaccctatatagacatatagacaatttttttctacatatatgtacctatgataaagcttgctttatcaa

SEQ ID NO: 1003199 - DNA, 120 bp, Artificial Sequence
  ENSG00000234864_23 (sequence is synthesized)
ttaaacgtagtaagagattaactaataataaaatagaacaatcataacaatatactgtaagaaaagttatgtaaatgtggtctctcaaaatatcttggtgtactgtactcacctattttt

SEQ ID NO: 1003200 - DNA, 120 bp, Artificial Sequence
  ENSG00000234864_24 (sequence is synthesized)
tgggcctctgtttaccaagtgcattgaaaccatggaacatgaaaccatggataagagagaactactgaatttcatagtaagcagaagaaacaggagtttgatttaactacacatatttct

SEQ ID NO: 1003201 - DNA, 120 bp, Artificial Sequence
  ENSG00000234864_25 (sequence is synthesized)
acactccttacttatttatagcattaaaatatttttaaaattatgcagatagaatgacttctttttaaaaagtcatggttttaaaaaaagttttaacatattcatcctgtaataactctt

SEQ ID NO: 1003202 - DNA, 120 bp, Artificial Sequence
  ENSG00000234864_26 (sequence is synthesized)
ttcatcctgtaataactcttttatttaatataaaaatgttttccagggtttttatagttttgtgttttacagttaagtcttcaatctatcttgaattgatttttgtatatggtataagga

SEQ ID NO: 1003203 - DNA, 120 bp, Artificial Sequence
  ENSG00000234864_27 (sequence is synthesized)
agccagttctcccagcatcatttattggatagggagtcttttccccattgcttgcttttgtcagctttgttgaagatcagatgcctgtaagtgtgaggccctatttctaagctctctatt

SEQ ID NO: 1003204 - DNA, 120 bp, Artificial Sequence
  ENSG00000234864_28 (sequence is synthesized)
ccagtaccatgctgttttggttactgtacccctgtagtatagtttcaagtcaggtattgtgatgcctccagctttgttcttttagtttaggattgccttggttatttgggttctttctgg

SEQ ID NO: 1003205 - DNA, 120 bp, Artificial Sequence
  ENSG00000234864_29 (sequence is synthesized)
aggattgccttggttatttgggttctttctggggtccatatgagttttaaaatagttttttctagtactgtgaagaatgtcatggtagtttgataggaatagcattgaatatgtaaattt

SEQ ID NO: 1003206 - DNA, 120 bp, Artificial Sequence
  ENSG00000234864_30 (sequence is synthesized)
ggggaagcagtatgaccactttaataatactgattcttcctatctatgagcatggaattttttttcatttgatagggtggagggtgggagaagggagaggggcagaaaaaatagctatta

SEQ ID NO: 1003207 - DNA, 120 bp, Artificial Sequence
  ENSG00000234864_31 (sequence is synthesized)
gatactaggcttagtacctgagtgatgaaataatctttataatgacccccatggcacgagtttacctatataacaaacctgcacatgtaaccctgaacctaaaataaaagttaaaaaata

SEQ ID NO: 1003208 - DNA, 120 bp, Artificial Sequence
  ENSG00000234860_0 (sequence is synthesized)
ctttacatgaagggtttttcaaaatctagccacaaacagatatgaccagatttcaaaaaattttgagaaactaggaggaatctattttgacaaagccaagccacacataggatagaggca

SEQ ID NO: 1003209 - DNA, 120 bp, Artificial Sequence
  ENSG00000234860_1 (sequence is synthesized)
aatggctgtgggctcctctaagaaactgaaacatggaagaaggaaggaccagccagccagaacagcagtgggtatcaaggaatgatataaaagcaagctcaagacagtcaagattcaagg

SEQ ID NO: 1003210 - DNA, 120 bp, Artificial Sequence
  ENSG00000234860_2 (sequence is synthesized)
agctatataccttgcttcctttccagagctgaaatttgagtcaagagtccatttcttccatctggccagatgatctccaggatactctcatgtatgtcaataataacttttcttttataa

SEQ ID NO: 1003211 - DNA, 120 bp, Artificial Sequence
  ENSG00000234860_3 (sequence is synthesized)
ataaacctccattagcagagcttaggccggcagcagtcagaaatgtctgctggagaagacactgcaaagtgtcagtgagggcgtttgagaattaattttaccctagagtagctgcgcagg

SEQ ID NO: 1003212 - DNA, 120 bp, Artificial Sequence
  ENSG00000234860_4 (sequence is synthesized)
ggtcagcaaagtcagcagacataggagacagccataaatctgggtgacatttaattcacaacccaaggaggcaaaagatattaccctaattttacagggaccagaagtgaaacttcagca

SEQ ID NO: 1003213 - DNA, 120 bp, Artificial Sequence
  ENSG00000234860_5 (sequence is synthesized)
ggaggagtgactgcacgtgagggaagagagcagcctctttgcacacatgggcacacactgccgaaaatgagatttgagttgttgctgccataatctccacaaacgcccaccacagaatga

SEQ ID NO: 1003214 - DNA, 120 bp, Artificial Sequence
  ENSG00000234860_6 (sequence is synthesized)
catcactgccaaagcccaattagttcagagaagaccctggcactggatgatattccttcaagatggcatgaaattccaaatataaattgggtccgcactgggcgatgattcaagaaatcg

SEQ ID NO: 1003215 - DNA, 120 bp, Artificial Sequence
  ENSG00000234860_7 (sequence is synthesized)
tattggccagttcacaggactagaaatcctttagacaggctttggaaattgtatcattccagatacagacagaggtatagttacaactcagacctctcaataaacatctagaaaaagaaa

SEQ ID NO: 1003216 - DNA, 120 bp, Artificial Sequence
  ENSG00000234862_0 (sequence is synthesized)
accaatctctgaaagcaactttgttcaattgcagcctgactaggaatttatacttttgaaaactcattgacttctggatttttaaaaaataatataaacatttaagaagctaccaaaata

SEQ ID NO: 1003217 - DNA, 120 bp, Artificial Sequence
  ENSG00000234862_1 (sequence is synthesized)
aataatttacaattcacggggaatttcctgtgtttcattttgtctgaagaactgtaactggacttgaatgaactaagtgtctaattgttgcattatttttcttgtagagattttagtgtt

SEQ ID NO: 1003218 - DNA, 120 bp, Artificial Sequence
  ENSG00000234862_2 (sequence is synthesized)
ttattactttctccagtttacttcaatagtgaattaggttccctctaccatctgaaatgttacagttcgataaaataggtaaattaataaagtctaaagtgcttccaagctgagcagaga

SEQ ID NO: 1003219 - DNA, 120 bp, Artificial Sequence
  ENSG00000258249_0 (sequence is synthesized)
ctgtcttctttttaaaagggctacttccatctctttcattttattgtttccacgtctttgattgttttggaacaagtccgatggtggagacggaacagggagatcacgaagacagcctct

SEQ ID NO: 1003220 - DNA, 120 bp, Artificial Sequence
  ENSG00000258249_1 (sequence is synthesized)
cctttaaaaaatgaccatgatctcacgcctcctcccaacccagtggaaactggagcaccgctcaaggagacgctgctgtcacaggatcctgcttacgggcacgaaagctgggaaatttca

SEQ ID NO: 1003221 - DNA, 120 bp, Artificial Sequence
  ENSG00000258249_2 (sequence is synthesized)
atctgggccaggggaggctggagctcgtgagctgggctggaaatgattcttccagactgcagagaagacagtggcctgcccgccggccggcctgcctgccctccccgaggccaacaggaa

SEQ ID NO: 1003222 - DNA, 120 bp, Artificial Sequence
  ENSG00000258249_3 (sequence is synthesized)
atcccagaatttatagatgaccccgttacaagatgaagaaactgaggccaagaaggagctcaagatgaactggtaacaaaagcaggatgccgagctccagttcccctcttaggccgggaa

SEQ ID NO: 1003223 - DNA, 120 bp, Artificial Sequence
  ENSG00000258240_0 (sequence is synthesized)
ggggagggacgggcactgttccccagagcagtgcaatcaatgctgggaaactgaagctgcgagtgtccgagggaccctgggatgtctctggggtctgcgtaggtacccatggaggagcag

SEQ ID NO: 1003224 - DNA, 120 bp, Artificial Sequence
  ENSG00000258240_1 (sequence is synthesized)
agatggtggatgaaggaggccgtggaggagaaaagaacacaggaatttaccagaaattggcaggctgtggaattgatggagtccacttactgtccaggcctaaggggtccaataatccca

SEQ ID NO: 1003225 - DNA, 120 bp, Artificial Sequence
  ENSG00000258240_2 (sequence is synthesized)
tcctttgccgaaagctttactgtgggactggcatcatttcaagcatttaatcctcgtcccaactctacgaggaaggtactgttgttcccacttcacaggggaggtgattgaggcacagaa

SEQ ID NO: 1003226 - DNA, 120 bp, Artificial Sequence
  ENSG00000258240_3 (sequence is synthesized)
gggtcaaccaattcactcaaggtcacgcagctcctacacagtgcagttgggattcgaacctgcaatgtggttcccagtgcagcccaccatgaccattccacgtggccaaagccagcgcgc

SEQ ID NO: 1003227 - DNA, 120 bp, Artificial Sequence
  ENSG00000258240_4 (sequence is synthesized)
ctggaatccgggaagggagttctttctattgcaggccagaagtggggtacatcccacttgccttgagggcccctagtgcttgtcaggaggcgacagaccgaggtgctatcctctctgggg

SEQ ID NO: 1003228 - DNA, 120 bp, Artificial Sequence
  ENSG00000258240_5 (sequence is synthesized)
caactgaactgccaccagaaaaatgacccataaactcgagatggagcccgctttccctctgtggattccaccctccattacgtctctccctcaattaattaataaagccccgcgcctctc

SEQ ID NO: 1003229 - DNA, 120 bp, Artificial Sequence
  ENSG00000258240_6 (sequence is synthesized)
tgcctggctgcttccttccctcactctacctccccatctccactgagatcccgggaaaaaaatccctccccatggcccagcctgctattgtctctcggtccctacagttgctcctcatag

SEQ ID NO: 1003230 - DNA, 120 bp, Artificial Sequence
  ENSG00000258240_7 (sequence is synthesized)
ggaggctgttggagagagagagaacacggaaggctccgggtggatttgtgcagcccttaaaacggggctctgcttcatcgaatctcagttttgtgaagctctcctgctgagcccggcctc

SEQ ID NO: 1003231 - DNA, 120 bp, Artificial Sequence
  ENSG00000258240_8 (sequence is synthesized)
atttgcaggcacaccttttatgaacagcttggttctgggctaaaaatgcgtgggaaagagctgaggccctaaattcaggcagacctggcttcaagtgctagcccaacaataactggcctg

SEQ ID NO: 1003232 - DNA, 120 bp, Artificial Sequence
  ENSG00000258240_9 (sequence is synthesized)
gtgacttgaacttctgtgggtctcattttcctgtcctgtaaaatggggatagtagcagaaattgtatatttggaagttaaatgacagaacatgcaaatctcttagcacagagcctgacac

SEQ ID NO: 1003233 - DNA, 69 bp, Artificial Sequence
  ENSG00000258240_10 (sequence is synthesized)
atgacagaacatgcaaatctcttagcacagagcctgacacaatgaaagtaattcatttttttaaaatag

SEQ ID NO: 1003234 - DNA, 89 bp, Artificial Sequence
  ENSG00000258240_11 (sequence is synthesized)
aggctcaagcaatcctcccacctcagcttcgtgagtagcagggactacaggggtgtgctatcatacctgtctaattttttgtatttccc

SEQ ID NO: 1003235 - DNA, 120 bp, Artificial Sequence
  ENSG00000258240_12 (sequence is synthesized)
atggctggtcttaaactactggtctcaagcagcccacccatctcagcaacccaaagtgctgaaattacaggcatgaaccactgcgcccagccaaaaattagctattttattgtcagtaga

SEQ ID NO: 1003236 - DNA, 120 bp, Artificial Sequence
  ENSG00000258240_13 (sequence is synthesized)
atcgttaaaattattttatgcctttccaagatagcacgttacccttggagaaacagcacagagcaggagctaagaacacagactctggattcagtcttcatgactttaaatcctggttct

SEQ ID NO: 1003237 - DNA, 120 bp, Artificial Sequence
  ENSG00000258240_14 (sequence is synthesized)
gtcatttttcagctctgtgaccttaggcaagttattctacccctctgtgtctcagtttcttgatcttgaaaatggtattaataatagtacccacctcgcaggctcttgtgaggattaaat

SEQ ID NO: 1003238 - DNA, 120 bp, Artificial Sequence
  ENSG00000258240_15 (sequence is synthesized)
gtgatgagacatgtagagggcttagaacagcacacaatgaatattagctattattattttccaacattcacgaacttctcagtaaatgaaaactgtcattctttcagtggtgggttttga

SEQ ID NO: 1003239 - DNA, 120 bp, Artificial Sequence
  ENSG00000258240_16 (sequence is synthesized)
aaaactgtcattctttcagtggtgggttttgatcagtggcaggctagtagcaaccagctgtcctaaaaaaattgtaggccaggcatagtgatacatgcctgtaaccccagcactttggga

SEQ ID NO: 1003240 - DNA, 120 bp, Artificial Sequence
  ENSG00000258240_17 (sequence is synthesized)
caagctcccatctcttaaaaaatgtatacatgtatgcatgtacatacatacttttttgtgtgatgaattttactgatttaaaggatgtgtggtgcaaattttgcaaataataataaagtt

SEQ ID NO: 1003241 - DNA, 120 bp, Artificial Sequence
  ENSG00000259774_0 (sequence is synthesized)
agttaatatccagctcaatagattgtcaccaaccatgtgcctagagctaactgtgttaagaagagcatgcttcaagtggctggagtgagcaattcaacttgtggaggaatgagaagtgac

SEQ ID NO: 1003242 - DNA, 88 bp, Artificial Sequence
  ENSG00000259774_1 (sequence is synthesized)
ctatgttaactgcagatgcggctgtaggagcactttgctaacttccagcgtgagttcagacccttcaggctatttggcacccagatct

SEQ ID NO: 1003243 - DNA, 120 bp, Artificial Sequence
  ENSG00000259774_2 (sequence is synthesized)
cgtgagttcagacccttcaggctatttggcacccagatctatggtgaggtgtgacatatgggatgtaaagtttgatgcctgctccgactccagtcttgctaacacacacgaaacctttgg

SEQ ID NO: 1003244 - DNA, 86 bp, Artificial Sequence
  ENSG00000259774_3 (sequence is synthesized)
cttggggaaaagggcagtctgggagagcttcttcaaggcagcctggcttcaatgcagtctggggcatgactgaggtaggcatacat

SEQ ID NO: 1003245 - DNA, 78 bp, Artificial Sequence
  ENSG00000259774_4 (sequence is synthesized)
gggtcacatcggaagagctctgtggggagggtggggcacagggtggagaaccttcaaagtccaaagagtatgacttgt

SEQ ID NO: 1003246 - DNA, 120 bp, Artificial Sequence
  ENSG00000259774_5 (sequence is synthesized)
gtggggcacagggtggagaaccttcaaagtccaaagagtatgacttgttgggattcaacgctgtaggcagtagggagccatggaaggctctgaggtggagaaatgacagccggacattag

SEQ ID NO: 1003247 - DNA, 120 bp, Artificial Sequence
  ENSG00000259774_6 (sequence is synthesized)
gcacgagtgtgcagggagctggtgcaaatgcctctgtgtgcgggtgagcatctgtgttgtgactctgcccacccatgtgcttcagtgtgccgtgtggctgcacgccccagatccatgtgg

SEQ ID NO: 1003248 - DNA, 120 bp, Artificial Sequence
  ENSG00000259774_7 (sequence is synthesized)
gccgtgtggctgcacgccccagatccatgtggcacgtgccggccggtgagggtgctgggcattgggaggtggcggggagggcgacgtatgcgtgttgtttgtgggcatgtgtgttagcgt

SEQ ID NO: 1003249 - DNA, 120 bp, Artificial Sequence
  ENSG00000259774_8 (sequence is synthesized)
gtgcatgtgggccgtggggcctcacagcatgtgtgtgcacactccggcatgtgcgtgtgtgtgtcccccacccccaggcctgccccacccatgcatgtgacctgccatgtgatttgaagc

SEQ ID NO: 1003250 - DNA, 120 bp, Artificial Sequence
  ENSG00000259774_9 (sequence is synthesized)
tgtctttcagaatcactatcagtggcccctgaggagcgtcagccatggtctggtggctgttggatggggctctccaagcaagaggtggccctgggccgtgagttggaagacagggtgacc

SEQ ID NO: 1003251 - DNA, 120 bp, Artificial Sequence
  ENSG00000236591_0 (sequence is synthesized)
gggacacaggcagctcatgcctggatcaggcagtgactggtgtgtgtgtgtgtgttatgaagagagagggatggaaattgtgaccagagagttggagttgggacccctgtcttgatcact

SEQ ID NO: 1003252 - DNA, 120 bp, Artificial Sequence
  ENSG00000278291_0 (sequence is synthesized)
gcgcgcgtgcacgtgtgcgtgtgcctgccgggttgctgcgccgcgggctgcgagtgcttgtgacccgccgcaccctcacccccgggcgcgccatccctgctccgccgccagcgagggagc

SEQ ID NO: 1003253 - DNA, 120 bp, Artificial Sequence
  ENSG00000278291_1 (sequence is synthesized)
gagggagccccggagcctaagacgcccggacccgccgcctcgcagacccacccttgcccctgcgcctcgtcatccgcccgccccagccagcccgcgcagggtccgcggcccgcttttccg

SEQ ID NO: 1003254 - DNA, 120 bp, Artificial Sequence
  ENSG00000278291_2 (sequence is synthesized)
tccgcgagaagccccctgtggtctttcctcgtacccggggactcggaccgagaagccgactgagcgaggtcgccgcccggcctcacggacacagagcgactctgcacctttcgcctccag

SEQ ID NO: 1003255 - DNA, 120 bp, Artificial Sequence
  ENSG00000278291_3 (sequence is synthesized)
gagctgaaaacattttgtcacttgtgcagtgtactcaccagtgcccccaacatcttctcccccgaaagcgctttcagattcgcgccgagatggggcgacgcggcggctcttgagcggaat

SEQ ID NO: 1003256 - DNA, 120 bp, Artificial Sequence
  ENSG00000278291_4 (sequence is synthesized)
aacccgaagggccacgcaaactggggcttccagccgcgagcatgcggcggggcgcccagggcctggggtcgcgcgctcagggcctgtgctgcgccacgcaggaggaggagagggctggcc

SEQ ID NO: 1003257 - DNA, 120 bp, Artificial Sequence
  ENSG00000278291_5 (sequence is synthesized)
ctgccgggcgcgggtgcgggcccgactggctgaaggaggagtggggactggcttggaagtctccgaagcagaaaagtggggccgacaggatggaattgggggaggccgattttggctcag

SEQ ID NO: 1003258 - DNA, 120 bp, Artificial Sequence
  ENSG00000278291_6 (sequence is synthesized)
agagatttctctattaaggaaagcagtccaagaataggccccctggaagaggaatgcgctcaaacccagagggattctccttagagctacctcttgagattctgtacttcgaggaaatta

SEQ ID NO: 1003259 - DNA, 120 bp, Artificial Sequence
  ENSG00000278291_7 (sequence is synthesized)
gaggtttttttaaatctctatttttaataaggtgggaggaggctgttgctcctttctcctcaacaacatgaaatgatcctgtgcctctatccaacaactctacaacaaagcactgaatac

SEQ ID NO: 1003260 - DNA, 120 bp, Artificial Sequence
  ENSG00000278291_8 (sequence is synthesized)
ttccctgactggcactttcatggctgttcatgggcatctcttggtctatgacgacgatgttggagagttcctactccgtgataactcagttctaagtgcaagcagtcacgtgaaatgagc

SEQ ID NO: 1003261 - DNA, 120 bp, Artificial Sequence
  ENSG00000278291_9 (sequence is synthesized)
ctgatagtctgcgaatgaagaaactaaaacgaactatattatatacttcataacacaagacaacgtgctcgtttgttcattctgcaagtaaatgcttaatgcttcctaggtggcaggcta

SEQ ID NO: 1003262 - DNA, 120 bp, Artificial Sequence
  ENSG00000278291_10 (sequence is synthesized)
aagaatatgatcattttaaagcagtcatgctttgaaaataaacaacccatcccagctgtaagctttttgaaagtgtacaaaatatgtaattgatgactccctaaatggtttgcagctttg

SEQ ID NO: 1003263 - DNA, 120 bp, Artificial Sequence
  ENSG00000278291_11 (sequence is synthesized)
gtatttgactgaattgtaaaccattagttaaactacatttcagttatgctttgtaggaaaaacactttcctatgcattgaatgttctataactaaggagcttagtaatctactgctaaaa

SEQ ID NO: 1003264 - DNA, 120 bp, Artificial Sequence
  ENSG00000278291_12 (sequence is synthesized)
atctcactgaaatctccagtttaagcgatttaagcaatttacagctcttggcaaatatttgttttgggttataaaacactttttttctgactagtaaattgttcatgttctttgtttcca

SEQ ID NO: 1003265 - DNA, 120 bp, Artificial Sequence
  ENSG00000278291_13 (sequence is synthesized)
gtaaaatgggaataaaggtttcagtactcaaatactgcttattttttattggaaaaaaggaagcgtgggaggcttttaagagagtatcattatgagggtttcatagaaatactcagtctg

SEQ ID NO: 1003266 - DNA, 120 bp, Artificial Sequence
  ENSG00000278291_14 (sequence is synthesized)
tctcatttcagcatccattcctatatgaggtgacatggtaccagacttagttctgtatgttattcaacaaagtattttccactgtctggtaacatggcagcttctctcttcctcaccacc

SEQ ID NO: 1003267 - DNA, 120 bp, Artificial Sequence
  ENSG00000278291_15 (sequence is synthesized)
cccccggattaccttggaagtgggaaggaaaatatttactttccagcagttttcattttgtgaaagatcacaaatgactgaaaatgctcacctatttggcagaacaaatttgatatttgt

SEQ ID NO: 1003268 - DNA, 120 bp, Artificial Sequence
  ENSG00000278291_16 (sequence is synthesized)
gagactaatcagttgagagtcataaataggtgcaaatgtttatgagttcccctcaaatttcaacatatttgtgaagatgcaaaataagcatgttagtaagttcaaacctaagacatacaa

SEQ ID NO: 1003269 - DNA, 120 bp, Artificial Sequence
  ENSG00000278291_17 (sequence is synthesized)
gtgaaaaaaagggaacaacatactcaaaagcaggctcatcgtgttcccttaaaaccaacatatctgtaatgtggccacgcaagcttcatttgaagcctctccagtccctcatcccctggt

SEQ ID NO: 1003270 - DNA, 120 bp, Artificial Sequence
  ENSG00000278291_18 (sequence is synthesized)
gtaactccaaaagccggtgtgtggttggctccttccatactaataatcttgggttactgatgttcgtatctacccaaacctctttctcttccttaaagagctgtccttgaggccgggcat

SEQ ID NO: 1003271 - DNA, 120 bp, Artificial Sequence
  ENSG00000278291_19 (sequence is synthesized)
cactttgggaggcttaggcgggcggataacgaggtcaggagttcgagatcagcccgcccaacatggtgaaaccgggtctctactaaaaaaaaatacaaaaagccgggtgtggtagcgcat

SEQ ID NO: 1003272 - DNA, 120 bp, Artificial Sequence
  ENSG00000278291_20 (sequence is synthesized)
tcgtctcaaaaaaaaaaaaaaaaaaaaactgtgcttggatgttcctactgatagcgctctcattgctgtcaccttgctggtcactcccttgattcactgattttagcacctgggtctacc

SEQ ID NO: 1003273 - DNA, 120 bp, Artificial Sequence
  ENSG00000278291_21 (sequence is synthesized)
ctgattttagcacctgggtctaccactattcctgctgatcattcctggcaccttaacctccacagagacaatttaacatgctgatttccaagtgactacgttagccccaattgtctttat

SEQ ID NO: 1003274 - DNA, 120 bp, Artificial Sequence
  ENSG00000278291_22 (sequence is synthesized)
ttcccatctcatctcaactgtcaagtcatagggtcatatccaaggtttcgtcatcaccaataactgcaatacagccaaacatctgatttcaaatatcctattccttgacataggtgcctt

SEQ ID NO: 1003275 - DNA, 120 bp, Artificial Sequence
  ENSG00000278291_23 (sequence is synthesized)
ctgttttcgcccactcctgcagttttctgccgtcatccagccttctcccacttctcactaaccgttccacccttgagtccttatgtcctttcttgtctagtttagattcacagttcgaca

SEQ ID NO: 1003276 - DNA, 120 bp, Artificial Sequence
  ENSG00000278291_24 (sequence is synthesized)
ctgtcgccacgcccttgcaaacacccttaatccctttctccttttttctctgttgtaattgcctagaatcccaactcttaaaaatcatacaactgagctgagtagactcagttctgagtt

SEQ ID NO: 1003277 - DNA, 120 bp, Artificial Sequence
  ENSG00000278291_25 (sequence is synthesized)
atgaccacaaatctcagattaacattcaacataagtatcgtattacacctctgcagttatggtcttcttccagtatcactaatctacatattctctttcctcaagtctctactgcccaat

SEQ ID NO: 1003278 - DNA, 120 bp, Artificial Sequence
  ENSG00000278291_26 (sequence is synthesized)
tcgttcctcacaccttccacagaccacagatgagagcttttacatttcttccaaccagcaaatgcactgacttactcccacccagtctgatgtctcccaccttctttcctgatgcatttg

SEQ ID NO: 1003279 - DNA, 120 bp, Artificial Sequence
  ENSG00000278291_27 (sequence is synthesized)
ataaaccctttcttgaccccaggtcccacttgactcccctttacagcaaaggttctgaatttttattttgttttatttttgaggtgaagtttaactcattgcccaggctggagtgcagtg

SEQ ID NO: 1003280 - DNA, 88 bp, Artificial Sequence
  ENSG00000278291_28 (sequence is synthesized)
tcggctcactgcaacccctgcctcccgggttaaagctaatatagacacgtgccaccatgctgggctaatttttgaatttttagtagag

SEQ ID NO: 1003281 - DNA, 120 bp, Artificial Sequence
  ENSG00000278291_29 (sequence is synthesized)
cggccttgatgagcattctttttctatcctttctttttcaacctatctgtgcctttagacagtcacatgtcttttaccaacagggatgcattctgagaaatgtaaggtgatttcgttgct

SEQ ID NO: 1003282 - DNA, 120 bp, Artificial Sequence
  ENSG00000278291_30 (sequence is synthesized)
gtgtgaacaccctaggttgtatttaaactgagtatagcctactatacaactcggctctgtggggtgtagtttaggctacaacacatctaggctacaaacttgtacagcatgttactgtac

SEQ ID NO: 1003283 - DNA, 120 bp, Artificial Sequence
  ENSG00000278291_31 (sequence is synthesized)
tgcataatgtaggcaattgtaacacaatagtaagtatttgtgtatctaaatatagaaaaggtacagtaaaaatttggtattataatcgtatggggccaccatcatatatgtggtctgttt

SEQ ID NO: 1003284 - DNA, 120 bp, Artificial Sequence
  ENSG00000278291_32 (sequence is synthesized)
ttgactgaaatgatgtcatgtggtgcaggactgcatttaaaatgtgtctcttgtaagtaacatatagttgagtcttgttttttaatagtctgataatctttgtcacttaactggaatatt

SEQ ID NO: 1003285 - DNA, 120 bp, Artificial Sequence
  ENSG00000278291_33 (sequence is synthesized)
tctttgtcacttaactggaatattctatttacatttgctgtatttttaaacataactagcatttactaattattaatgtaattgagtttgcatttttataattactaatgtaacgtaatt

SEQ ID NO: 1003286 - DNA, 120 bp, Artificial Sequence
  ENSG00000261266_0 (sequence is synthesized)
cctcctcctgccttttccagatgccccaagcaatcctgccccgcccagggccccgcagtacccaccttgcctgaccagcccacgctccgagggcttggaggcattgacactgtgcagctg

SEQ ID NO: 1003287 - DNA, 120 bp, Artificial Sequence
  ENSG00000261266_1 (sequence is synthesized)
ctgcagcatgtcactgaggtggcagtcgaccacctcacctgtctctcgaaccactggttcttctttttcccggggacgctcaggcagggggttctccaagcctaggaaggtgacaaaaac

SEQ ID NO: 1003288 - DNA, 120 bp, Artificial Sequence
  ENSG00000261266_2 (sequence is synthesized)
aaactcttccgaaagaaaaattctcttagctaccactgctttggggaaactgaatcagtgcctggttactagagcagcagctgccatgctcaggtgacaggcacatagtgctcactgtga

SEQ ID NO: 1003289 - DNA, 120 bp, Artificial Sequence
  ENSG00000261266_3 (sequence is synthesized)
ggcaacagatcttcagaagccgtggcctctgacccaacggtgtggccctgcaggatgacctgccactcaggcaaacagcttgaaggcaccagcagctcagagctgcccagctttgagcaa

SEQ ID NO: 1003290 - DNA, 120 bp, Artificial Sequence
  ENSG00000261266_4 (sequence is synthesized)
agaatggaaagcatcttcagcatccaggcagatggaagggctgagtagttcagttcatccacagaatggattcagtaggcatttaaataaaaacacaagaaatttttttccaccccaaaa

SEQ ID NO: 1003291 - DNA, 120 bp, Artificial Sequence
  ENSG00000224613_0 (sequence is synthesized)
gcgcacggcggcgagcgctatctggagctgaccgtgcggctcttaatccctggccttgggaaagtgaattggcctgaatagcaaggaggagaacttgggtgtggaaataccggaatctca

SEQ ID NO: 1003292 - DNA, 120 bp, Artificial Sequence
  ENSG00000224613_1 (sequence is synthesized)
ctctattgctcaggctggagtgcagtggccacaaagcgggagattggcacgagggataccaacaccggaatatgtgatgagatgtgtgaagagcatggcaatggatgcaaactccctttg

SEQ ID NO: 1003293 - DNA, 120 bp, Artificial Sequence
  ENSG00000224613_2 (sequence is synthesized)
tgtttctggctttaagcagctctatactctcatgctgtcctacactcagcagcaatttgtcacaagtttgggaaattcttcctactcttttgaactccagcccaatttcctttctatcac

SEQ ID NO: 1003294 - DNA, 120 bp, Artificial Sequence
  ENSG00000224613_3 (sequence is synthesized)
tgccctaggtcttactcttccagaagaaaaagggaaaacccaacctgaatgtcccctaaaagtgaagaaatgtccacacttctatgtgcagattgtagacctttggaatctacattcaac

SEQ ID NO: 1003295 - DNA, 120 bp, Artificial Sequence
  ENSG00000224613_4 (sequence is synthesized)
atttgatactgcgtgtgactcctgatgaacacgctgaagatacatgatgtccagtaatttttactggggataatacctgcaatatacataagatggtgtcattaaagtacatttaaaatt

SEQ ID NO: 1003296 - DNA, 120 bp, Artificial Sequence
  ENSG00000224613_5 (sequence is synthesized)
acacaagacattttaaaattacataagtgtatataaggagtttaacacaaatttcaattaccttggcttaagatgatttagctgtttcgtaagttaacaaagacctaccatttacttcct

SEQ ID NO: 1003297 - DNA, 120 bp, Artificial Sequence
  ENSG00000224613_6 (sequence is synthesized)
acttagtctatggctgaatttggcatttttgaaaatcttttgatagcctctgagaacttactattatttgtactcatttacttcctaatgaaagctattaacaagatttattttaggaag

SEQ ID NO: 1003298 - DNA, 120 bp, Artificial Sequence
  ENSG00000224613_7 (sequence is synthesized)
tttatctcagacaggtttatgtccttatggagctttcaatcttaatttcaaagacgaaaaggaaagttgtgtgtgaaacagcacagagtactttacagcttgttgcaagagctacaggga

SEQ ID NO: 1003299 - DNA, 120 bp, Artificial Sequence
  ENSG00000224613_8 (sequence is synthesized)
ctgaaaattgtaatcagttcctcttttcctacttaacatgaaaaataagtccaatggaatagtctgttgattaataaagttctatcatttcttcttcatgaaatgactaatttaacaaat

SEQ ID NO: 1003300 - DNA, 120 bp, Artificial Sequence
  ENSG00000224613_9 (sequence is synthesized)
taaatccttcatttattaaggtttgtttattacttatttttcctctattcctttctctgagctacaaatcacagagatttatatttacttaaaattttcttagcactaccaatttgccta

SEQ ID NO: 1003301 - DNA, 120 bp, Artificial Sequence
  ENSG00000224613_10 (sequence is synthesized)
tttaatgatcatttatggcccatctgttgtattacttgggatattttaaattgaattgatagaactttatattcaattaagtagaaataccaattccagagaaggactcactatctttat

SEQ ID NO: 1003302 - DNA, 120 bp, Artificial Sequence
  ENSG00000224613_11 (sequence is synthesized)
ttagactatgatttggctttgtgtcctcacccaaatctcatctcaaattgtaatctccacctgtcaggggagggatcaggttggagatgattggatcatgagggtggtttcccccacgct

SEQ ID NO: 1003303 - DNA, 120 bp, Artificial Sequence
  ENSG00000224613_12 (sequence is synthesized)
ggatcatgagggtggtttcccccacgctgttctcaggatattgagtaactcaggatagctgatggttttaaagtgtggcacttcctcatgcttgcacttctctctcctgccaccatgtga

SEQ ID NO: 1003304 - DNA, 78 bp, Artificial Sequence
  ENSG00000224613_13 (sequence is synthesized)
ggaacttgggtatttatttatttataacagtgtgaaaatggactaatatagaccatgtgcataatgcttaacaaatta

SEQ ID NO: 1003305 - DNA, 120 bp, Artificial Sequence
  ENSG00000224613_14 (sequence is synthesized)
tggactaatatagaccatgtgcataatgcttaacaaattattgccagaagaatttggcatgtaccatgatgagtctagactgggctgtttgcccagagaagaggtgctggagggagaagt

SEQ ID NO: 1003306 - DNA, 120 bp, Artificial Sequence
  ENSG00000224613_15 (sequence is synthesized)
tgaagatatgtgtatataagacaaaggagaaaactaaccaagtctgagatgtagtttccttaagaataaaactttatattttattaatttttttttactgttcttggaagataatctggt

SEQ ID NO: 1003307 - DNA, 120 bp, Artificial Sequence
  ENSG00000224613_16 (sequence is synthesized)
acggcggcgagcgctatctggagctgaccgtgcggctcttaatccctggccttgggaaagtgaattggcctgaatagcaaggaggagaacttgggtgtggaaataccggattggcacgag

SEQ ID NO: 1003308 - DNA, 120 bp, Artificial Sequence
  ENSG00000224613_17 (sequence is synthesized)
tcaaaactgatgctcaataaatcattgttgaataaacgaatgaatgggcaatactgcttcctaacatagtacattactcttctgagtaactctgctagtttctagcactgcaatgattgt

SEQ ID NO: 1003309 - DNA, 120 bp, Artificial Sequence
  ENSG00000224613_18 (sequence is synthesized)
ctatccttaggtcaacagtataataaaacattattaaatattgtgactcagatttgcataatactaattactataaaatgaatgaatccataattcttcagtgtatggtggtttttctaa

SEQ ID NO: 1003310 - DNA, 120 bp, Artificial Sequence
  ENSG00000224613_19 (sequence is synthesized)
ctgcattggaaatcctttgagaacaaagataatagcgtctactttttttggtgttccaatatagcaagtaaatgctcgccttgttaaattgtgtttgaatgaagagaggctgaaaaatga

SEQ ID NO: 1003311 - DNA, 120 bp, Artificial Sequence
  ENSG00000224613_20 (sequence is synthesized)
gagttactaaccaaatagaggattaatttggtagaatcagctgtagtcttggtacagctatattttttgtagaatctgatatatttagtcctgatagttaaattagctacttaattatat

SEQ ID NO: 1003312 - DNA, 120 bp, Artificial Sequence
  ENSG00000224613_21 (sequence is synthesized)
ttgtttactttgtgagttatgtcttctgtaaagtctgaaggcaagagagtgaattattttaacatacttccaaaaattacataacacttaaaacttctatttcataggtgattcatttat

SEQ ID NO: 1003313 - DNA, 120 bp, Artificial Sequence
  ENSG00000224613_22 (sequence is synthesized)
ttgtgattaaatatttagaagattgcagcatgtaatttaaagataaggaattcaaactttttaatccacatttgtgttctttgagaatgaacaactgtagactgtgagcatgagttcctt

SEQ ID NO: 1003314 - DNA, 120 bp, Artificial Sequence
  ENSG00000224612_0 (sequence is synthesized)
acagccaaatactatactacagtttacaatagagaaaatgtagcagctattcaaagaaaagaacaccttggtgaaaacccccagaactggaaataagcctgagacacctgcatgattcat

SEQ ID NO: 1003315 - DNA, 120 bp, Artificial Sequence
  ENSG00000224612_1 (sequence is synthesized)
aaaaggctcaacaaggacagagcatcccaggggtgaccattcctctgatctctgcctcacaactcacctcagggtaaccagtcttctgcccaagctaaagcacccaacacacccccatcg

SEQ ID NO: 1003316 - DNA, 120 bp, Artificial Sequence
  ENSG00000224612_2 (sequence is synthesized)
gacttcagtcaatccgaagtggttcacttctcatctctgcctctttcttcccaaatgtcctgcactagaatggtatgctccccactcctttcaacatgaaccccatcatgttataacctt

SEQ ID NO: 1003317 - DNA, 120 bp, Artificial Sequence
  ENSG00000224612_3 (sequence is synthesized)
ctgcactagaatgttccaactttgttgctagagaaaaaacagctggtaggaggagtgtaacaagaaaagaggcttaaagaaagctgtgatttctacagttattctaataaatgtgtgaaa

SEQ ID NO: 1003318 - DNA, 120 bp, Artificial Sequence
  ENSG00000224612_4 (sequence is synthesized)
gaaaaaaccaactgaaagtatatgaattgacatttgggcatatgaggtctcctcttcaacaatatggtaagaagtttgtctgttgtaaagcacatgtggcaattaataagagtacgttaa

SEQ ID NO: 1003319 - DNA, 120 bp, Artificial Sequence
  ENSG00000224612_5 (sequence is synthesized)
gtttattaatcaggcactttacatgtactagttaattctttaaaaatcatgggagataggtatattttatagatgaagaaactgaatcacagagttgaagacatttatccaagggcatac

SEQ ID NO: 1003320 - DNA, 120 bp, Artificial Sequence
  ENSG00000224612_6 (sequence is synthesized)
aatcaattaaatggcagagtaaacaacagtattattaacatatgtgtacttgaagtttgctgagagatcttaaatgttctcaccacacacacacccctccacacacggtaactaagtgga

SEQ ID NO: 1003321 - DNA, 120 bp, Artificial Sequence
  ENSG00000224612_7 (sequence is synthesized)
gagatgcgttaattagcttgatagtggcaataatttcataatgtatatatagcaaattataattttgtgtaccacaaatatataacttttttgtcaattatgactcaataaatctagagg

SEQ ID NO: 1003322 - DNA, 120 bp, Artificial Sequence
  ENSG00000224610_0 (sequence is synthesized)
accctggagaaagaatcttacaaagaatactaaagagcatccaagtgtgaagaatgaaacacacagatgagccccaagaggatgaggaagggagaggctggtgggggtctgattctcatc

SEQ ID NO: 1003323 - DNA, 120 bp, Artificial Sequence
  ENSG00000224610_1 (sequence is synthesized)
tccaccttaacagaatgcacatgaagtccagccatggtgtagccaaggagacccactaagaccaccaaaagcttggaaatgaggatgcaggggcaaaggacggcattataggcgccctga

SEQ ID NO: 1003324 - DNA, 120 bp, Artificial Sequence
  ENSG00000224610_2 (sequence is synthesized)
ctccagcttgggagtggggtgtccagggaccctccaggatcgatgacaacagactgaggggcagctgcaaaacaactggaacaaatcaaaccaaggccaaacgttaactgcctctggcaa

SEQ ID NO: 1003325 - DNA, 120 bp, Artificial Sequence
  ENSG00000224610_3 (sequence is synthesized)
cacccaaccctgccaaggtcttcaaggacacacattagtcatcggatcagccctgcccatcccacctccaaggccctttcatttccacactcctcagattgttccatgagtggtagccaa

SEQ ID NO: 1003326 - DNA, 120 bp, Artificial Sequence
  ENSG00000224610_4 (sequence is synthesized)
ataaaaagtccaggaggttctaagggagccctgggtcttacctggaattgtgtgttactggcaactaattcctgtggaccgacccaggggagctaaggttgtcttttagcccccccatgc

SEQ ID NO: 1003327 - DNA, 120 bp, Artificial Sequence
  ENSG00000224610_5 (sequence is synthesized)
agaggccagaagacctcacacttttaccagccacaagccagagatccctgctgtgagcagatggagcctgagccacgacctgcacacgtgtcctgaatgagatttgttctcccaggagaa

SEQ ID NO: 1003328 - DNA, 120 bp, Artificial Sequence
  ENSG00000224616_0 (sequence is synthesized)
tccgcagtcagtgcgcatgcgcgtagctcggcttaaaggagccgcgctgggaacactgcggtcggggcgaggaagctgccggggaagtgagatgacggtcgcgggggtgcccaggagccc

SEQ ID NO: 1003329 - DNA, 120 bp, Artificial Sequence
  ENSG00000224616_1 (sequence is synthesized)
tgaaaaacttgtgccctgggcacggcaaaatctgcaggttgcagaaagtctcaactgatcctggcataccccgaggtgccgacttttagagctgaagatgcaagaaagattgggatcctg

SEQ ID NO: 1003330 - DNA, 120 bp, Artificial Sequence
  ENSG00000224616_2 (sequence is synthesized)
cgatgcaccgaacctgtctctcgaagtgtgtgcgccctgcttcctgtgttaaacaatttgctacaaggtcacacaattttaactagaagactgagatgtgaacctgggtggtctgatgtg

SEQ ID NO: 1003331 - DNA, 120 bp, Artificial Sequence
  ENSG00000224616_3 (sequence is synthesized)
aacaccactgtctggcagggtcttgccctgttgtctaggctggagtgcagtgatgcaatcacaacttactgcagcctcgagctccagagctcaagtgatcctctcgcctcagtctgtagg

SEQ ID NO: 1003332 - DNA, 71 bp, Artificial Sequence
  ENSG00000224616_4 (sequence is synthesized)
gctccagagctcaagtgatcctctcgcctcagtctgtaggactacaggcacacgccactacccccacaaac

SEQ ID NO: 1003333 - DNA, 120 bp, Artificial Sequence
  ENSG00000224616_5 (sequence is synthesized)
tgctgggattacagagccgccgtacctgtcccacagtcattttcttaaggataaattgtttcatcttactttgtcccacatttatagaaagtaacatagacaaccatcttagaaatatca

SEQ ID NO: 1003334 - DNA, 120 bp, Artificial Sequence
  ENSG00000224616_6 (sequence is synthesized)
acaattgagcaagcactctaagaatggctaataaacatgtagaaacatgctcaactttattaataatcagggaaattcaaattaagattataacatcattttataattactaaattgggg

SEQ ID NO: 1003335 - DNA, 120 bp, Artificial Sequence
  ENSG00000224616_7 (sequence is synthesized)
gaaaattttaaatctgacaatatcaaatgagaaacaataaacatacagcagctaggcatgtagtttgtacaatcacattggaaaacaatctcgtattatctagagtaaacttgaagataa

SEQ ID NO: 1003336 - DNA, 120 bp, Artificial Sequence
  ENSG00000224616_8 (sequence is synthesized)
acataacccctgtttcaacaattcaacttttaggtatttatcctaagcctactaatcaaagtgtagttggctaaccaatagcatttgtatcacctggagcttgttagaaatgcagaatgg

SEQ ID NO: 1003337 - DNA, 120 bp, Artificial Sequence
  ENSG00000224616_9 (sequence is synthesized)
caggtttacccacatttactgaattagaatctgcttgttaacaagatccccggttgctatgaatgctcattaatgtctgagaagcgctgtgctaaagaaaccctagaacatgcaccagga

SEQ ID NO: 1003338 - DNA, 120 bp, Artificial Sequence
  ENSG00000224616_10 (sequence is synthesized)
gaaatgatcaagaatgttcataacagcactgacggtaatagcaaataactagaaatagcacaaatatccactcagtagagaatggataaataaatcatgtcagaaaaactagttgcagaa

SEQ ID NO: 1003339 - DNA, 120 bp, Artificial Sequence
  ENSG00000224616_11 (sequence is synthesized)
tgagactcaaaaacaagcaaaagtaaataatatgttactaggcatccatccatatatgtatatgtggtcaattctaaaataaacaaaggaatgaaaaacacaattcaagataacgcttat

SEQ ID NO: 1003340 - DNA, 120 bp, Artificial Sequence
  ENSG00000224616_12 (sequence is synthesized)
gaaggggagaggtaaaggaaggagcagacagtgatcttcactaacgggaaagattctatttcttttttttttagtttaaaatgtattttatttttagacaacctacataatgtgtttttc

SEQ ID NO: 1003341 - DNA, 120 bp, Artificial Sequence
  ENSG00000224616_13 (sequence is synthesized)
cataggttctatttcttaaagttgagtgataggttcaagggtttttgttatattatcatgtgacatatgtatttgttttgtattgttttgagatggaatcttgctctattgcccaggctg

SEQ ID NO: 1003342 - DNA, 120 bp, Artificial Sequence
  ENSG00000224616_14 (sequence is synthesized)
cgtccagacttatgtatttgtttttattcatatgttcattattgtctcatataacacagttttaacagctttattatggtgtactttacataccataaaattcacctgtcttaagtgtat

SEQ ID NO: 1003343 - DNA, 120 bp, Artificial Sequence
  ENSG00000224616_15 (sequence is synthesized)
aattcaaagatttttagtaaatgtacagaattatgcaatcattgccacaaagtggcaacagaaaattttcatcaccacaaaaaaaatctctcttgcctctgcaatcactgccccttccac

SEQ ID NO: 1003344 - DNA, 120 bp, Artificial Sequence
  ENSG00000224616_16 (sequence is synthesized)
ccacctctagccccaggcgaatttgttttctaatgctaaccttattaattaataatactaatataatcttattatataactaatataactaaaactaatctgtttttcatctctataaat

SEQ ID NO: 1003345 - DNA, 120 bp, Artificial Sequence
  ENSG00000224616_17 (sequence is synthesized)
attttctggacatttaatttaaatggaataatgtaatatgtgatcttttgtgcttgtattcttttacttagcataatatttttttgacattcatccatgtcatagcaattatcgctaatt

SEQ ID NO: 1003346 - DNA, 120 bp, Artificial Sequence
  ENSG00000224616_18 (sequence is synthesized)
cagtcatttttaaggatgaataatatttcagaatatggatgtaccacattttgtttattcacctgttaatggacatctgggctgtttctagattttggctgttatgctgttatgattatt

SEQ ID NO: 1003347 - DNA, 120 bp, Artificial Sequence
  ENSG00000224616_19 (sequence is synthesized)
cctattcaagtctttgtgtgaacactgttgtcatttctcttatgtagctatccaggagtggaattggtgggtcataactggccatttttaaatctaaaaaaagagaagaaatggggtctt

SEQ ID NO: 1003348 - DNA, 120 bp, Artificial Sequence
  ENSG00000224616_20 (sequence is synthesized)
caccactgtctggtaatcccaacgctctgctgctttgcgacagagaatgttttagggaacacacagactatgtacttaaccaaatctggaatttgccgtgcactgatttcatattgttca

SEQ ID NO: 1003349 - DNA, 120 bp, Artificial Sequence
  ENSG00000224616_21 (sequence is synthesized)
gctttggcagtaggagaagggtgaataagaggcttaagagcctgaagggagaaatgccaatgatacaattatccagcaagaaataatcagaagttgaagtaaggcaatgatggtagggat

SEQ ID NO: 1003350 - DNA, 83 bp, Artificial Sequence
  ENSG00000224616_22 (sequence is synthesized)
aaataatcagaagttgaagtaaggcaatgatggtagggatggaatataaaaaagctgtacccctatctgacatctttattggg

SEQ ID NO: 1003351 - DNA, 73 bp, Artificial Sequence
  ENSG00000224616_23 (sequence is synthesized)
gtacaaagatcacatgcttcaaaaggcaaaaagaccttactactagtaagggtctaacaaagatcacatgctt

SEQ ID NO: 1003352 - DNA, 86 bp, Artificial Sequence
  ENSG00000224616_24 (sequence is synthesized)
ggcgtatctcagtccttatctcaaccgcgtaagacagacattcccagagcggctgtttatagacctccccatatattccttgctag

SEQ ID NO: 1003353 - DNA, 64 bp, Artificial Sequence
  ENSG00000224616_25 (sequence is synthesized)
tgcaagaagaaaaatatggctgaaaattgctgttattctgttcttattcaaggtgcactgattt

SEQ ID NO: 1003354 - DNA, 85 bp, Artificial Sequence
  ENSG00000224616_26 (sequence is synthesized)
ttatggttgtcttcctttgttccctaaaaattgctgttattctgttcttagatgttttacaatcaacttgtacagttaacacaat

SEQ ID NO: 1003355 - DNA, 120 bp, Artificial Sequence
  ENSG00000224616_27 (sequence is synthesized)
cgttcggggtccctgacttcccgcaacacatcttagattcttattacagaaacttaacattcccagaagaagcctcgcctttttatttctaattttggctatgaattcctagctatgacc

SEQ ID NO: 1003356 - DNA, 120 bp, Artificial Sequence
  ENSG00000224616_28 (sequence is synthesized)
ctaactatttccagtggtagggggaaaagaacaagacagtaatataatgtagagatgagctaattgtggtaataataagcacttgtgtagtgctttcatatacatgatctctcttaatgt

SEQ ID NO: 1003357 - DNA, 120 bp, Artificial Sequence
  ENSG00000224616_29 (sequence is synthesized)
tcataacaaagctgtgaggttggtgctcttatctctctttggttaatgaaggactgaggcctagggaattggaagtgacctgccaagatgacagaacaataaagtggcagagttgggtta

SEQ ID NO: 1003358 - DNA, 120 bp, Artificial Sequence
  ENSG00000224616_30 (sequence is synthesized)
aatccttggttattttaatgacaaatgacagaccaataattgattcctcaataaaacagtggaagtcagaaagagtagaattgtacattcagaatgctggcagaaaataaccatcaacct

SEQ ID NO: 1003359 - DNA, 120 bp, Artificial Sequence
  ENSG00000224616_31 (sequence is synthesized)
agaattgggcactcagcaaaattatctttcaagaattaaagtatagaaataaaataatttccaggtacatggaaactgaatttaacatctacctacactttttaaaggaagttctaaaag

SEQ ID NO: 1003360 - DNA, 120 bp, Artificial Sequence
  ENSG00000224616_32 (sequence is synthesized)
atgtacttcagaaagaaaaattacttcagaaggagagtctgagatagaagtgatgggcaaagaaattgtaaacacatagttgaatctgagcaaacattacatgaaataacaccagacaac

SEQ ID NO: 1003361 - DNA, 120 bp, Artificial Sequence
  ENSG00000224616_33 (sequence is synthesized)
aaaagtatgtaagacgagaggtggatgacaaagttaaagaattctaaggtctctctttgtagttaagatatcaattaatagagttgacataattcaagtctttaagtacgcaaggtaaag

SEQ ID NO: 1003362 - DNA, 120 bp, Artificial Sequence
  ENSG00000224616_34 (sequence is synthesized)
tttcaaggataaccatgaaagtgtataacttctaatccagccaaaggaaaaaatggactaacaggaaaacacagattaaatgaacaaaaacctaatatcataatgagcattaaaaaaaaa

SEQ ID NO: 1003363 - DNA, 120 bp, Artificial Sequence
  ENSG00000224616_35 (sequence is synthesized)
gaggatgaaaagaaagcactaaagtaacaaaatagaaataaattcatatatatcaatagtaacaatgaaagtaaataaactttctgatgaaaagccagagattgttggatgacacatacc

SEQ ID NO: 1003364 - DNA, 120 bp, Artificial Sequence
  ENSG00000224616_36 (sequence is synthesized)
cacaagtttaaaaaataaaaaagccagagattggttgaaaaaaaaaagtgccatttacaagagatgcaccaaaaacattaaggatcgtgaggagttgaaaataaaaagatggaaaagaga

SEQ ID NO: 1003365 - DNA, 120 bp, Artificial Sequence
  ENSG00000224616_37 (sequence is synthesized)
tgccgtataaatgccaacaaaaagaaaggtggtatacctatattcgtggtatacctgtattttgtattaaattagactttaatacaaaaagcattatcattgaccaaaaagagtcactac

SEQ ID NO: 1003366 - DNA, 120 bp, Artificial Sequence
  ENSG00000224616_38 (sequence is synthesized)
aaaataataaaaaattgtgttccccaggaaaatagttattcaaacctttgtgtgtaataaatagcttcaaagtatgtaagtcagaaattgaagaaactggtgaatccactaccatattgt

SEQ ID NO: 1003367 - DNA, 120 bp, Artificial Sequence
  ENSG00000224616_39 (sequence is synthesized)
gaagttttagctcacttatttatagatcaagcaaatgaaaatttaggaaagacaagacaactaataaaacaactaataaacttgatctaagggcaattatatacatacataattggccat

SEQ ID NO: 1003368 - DNA, 120 bp, Artificial Sequence
  ENSG00000224616_40 (sequence is synthesized)
acagatatatatatacataagatatatatacagatatatatacacagatatatatatatataaaaccttcagttattatacatgtttccctccagaactcatgaaatagacctccccagt

SEQ ID NO: 1003369 - DNA, 120 bp, Artificial Sequence
  ENSG00000224616_41 (sequence is synthesized)
gacctccccagtacattttataaggctagtatgatcttgatgccaaaaccaaagacaacttggggaagaaaaattataggtcaactttatttataatttagatgcaccagtctcagtcaa

SEQ ID NO: 1003370 - DNA, 120 bp, Artificial Sequence
  ENSG00000224616_42 (sequence is synthesized)
aatatttacaatcaaattcaacaatgtttgtaaaatacaacacattataaccaagttgggattgaagatcaatttaaaattggaaaaatatgctgatgtatcaaaaacctaagatcacac

SEQ ID NO: 1003371 - DNA, 120 bp, Artificial Sequence
  ENSG00000224616_43 (sequence is synthesized)
gaaagaaaaaagacataagataggacaggcaaaaacaacaccttaattttgatatcatcttaatgatgagactgtctacatagaaaacccaaaaggaatctagaagaaatggataaattc

SEQ ID NO: 1003372 - DNA, 120 bp, Artificial Sequence
  ENSG00000224616_44 (sequence is synthesized)
tttggttccttgcggtgtgcgtgtttgtgtatgcggagtgtgttatctttctttctagggtgacacaccatttatttgagaggcgggaaaggcagaatcactagtttaatattctgaaaa

SEQ ID NO: 1003373 - DNA, 120 bp, Artificial Sequence
  ENSG00000224616_45 (sequence is synthesized)
gccaaagttatgccattttgcttgagagtgagtgcaagctcttgactcccaggaacagtgcagctaacaattcacctcaggcgagggcagaagcaatagccagcttcttggttctgcctg

SEQ ID NO: 1003374 - DNA, 120 bp, Artificial Sequence
  ENSG00000224616_46 (sequence is synthesized)
tggctcagttcctacataattgagtaccaaataatatgtaaacctctagggaagcaaaaaagagtaattcagcttctacccccgaagttattggaggtataatggagagactgagacgta

SEQ ID NO: 1003375 - DNA, 120 bp, Artificial Sequence
  ENSG00000224616_47 (sequence is synthesized)
atcaattacaatgtcatcctcaataataattaacatgtactgtatttagagtttattatggggacaattacaatatattaataatatactgtaacaataacaggcaacacttattgagca

SEQ ID NO: 1003376 - DNA, 120 bp, Artificial Sequence
  ENSG00000224616_48 (sequence is synthesized)
aaaaaagatccatttatgatgaaacaaaatcaagcaaagctagggataaaactctcttagtgttattaatggtatattagtccatttcacatggctataaagaactacctgaaactgggt

SEQ ID NO: 1003377 - DNA, 120 bp, Artificial Sequence
  ENSG00000224616_49 (sequence is synthesized)
catggctggggaggcctcagaaaacttataatcatagcagaaggcaaaggggaagcaaggcatgtacttacatggtggcaggagagaaagagagaggagatgggggcgaggtacacactt

SEQ ID NO: 1003378 - DNA, 120 bp, Artificial Sequence
  ENSG00000224616_50 (sequence is synthesized)
ggagagaaagagagaggagatgggggcgaggtacacacttttaagtgccacacacttttcaacaaccagatcttgtgagaacacactatcacaagaacagcaagggatttctccatgatc

SEQ ID NO: 1003379 - DNA, 86 bp, Artificial Sequence
  ENSG00000224616_51 (sequence is synthesized)
acacactatcacaagaacagcaagggatttctccatgatccaatcacctcctaccaggtccctcccctgacacttggggattacaa

SEQ ID NO: 1003380 - DNA, 120 bp, Artificial Sequence
  ENSG00000224616_52 (sequence is synthesized)
tcattttctttttcggccctactgggagtcaagcaaacatcatgtttagtagtaaaatattaggctccttccttttaatattattaacaagataagaatgcccactattatggctttttt

SEQ ID NO: 1003381 - DNA, 120 bp, Artificial Sequence
  ENSG00000224614_0 (sequence is synthesized)
ccctgcccccaccccagaaggagaaaacccagcgctcggattcccagcggcggggcagcctgcaggccctgttcccagcccacagacccatgtcccagcccaaacggaggcagccctggg

SEQ ID NO: 1003382 - DNA, 120 bp, Artificial Sequence
  ENSG00000224614_1 (sequence is synthesized)
acggtaatacacccagcacccagatcaagaaatggaacataaccagcaccccagaaccctaccctaaaaatgtaatttaaaaaaaaagattttaataaatatcttttagcgtgcccttta

SEQ ID NO: 1003383 - DNA, 120 bp, Artificial Sequence
  ENSG00000224614_2 (sequence is synthesized)
ctcttcccttctgtgggacgtgttttgaggacttgtgtgttgactgcaccatgcagagcatatagcatggaggcacccctactgccatcggggggcaggtggaggggggaccgtcctgca

SEQ ID NO: 1003384 - DNA, 120 bp, Artificial Sequence
  ENSG00000224614_3 (sequence is synthesized)
gctcctccctggggctacccctctcttccctctgcacagacctggcagccacccagacgtcccgcctgctgcctagactctaagaagatgccctatcactccaattaccatacacagtac

SEQ ID NO: 1003385 - DNA, 120 bp, Artificial Sequence
  ENSG00000224614_4 (sequence is synthesized)
tggcgggggagaggtcctgccttgccgctgaaaactgcactgcttcctccctccagggatgaaaggccaaaagaacgagggcagtgtggagtctacgctctcgccagggacctgcagcct

SEQ ID NO: 1003386 - DNA, 120 bp, Artificial Sequence
  ENSG00000224614_5 (sequence is synthesized)
ctcacttccaagcacaccaactccagctaacaggactgggcttccttacctgccgccttccgctgcctccccgcagacacagcttcagcgacgcccaggctgagacggcagaagaggttc

SEQ ID NO: 1003387 - DNA, 120 bp, Artificial Sequence
  ENSG00000224614_6 (sequence is synthesized)
ccgccggccgcggcctgccctcaggcagtggctcccagagctcagcggttccccgcactcttctgcgcccgactccccatgcccctacatcctgcgtccccttcagccccggaggtaccg

SEQ ID NO: 1003388 - DNA, 120 bp, Artificial Sequence
  ENSG00000224614_7 (sequence is synthesized)
tggggcccgggcctgccagtcaccacctcctcctccgccggcgcctccgggtcctgagcccctcgccgggtccctctccctcctggggctccttcccgttcagcctccggggccctaccc

SEQ ID NO: 1003389 - DNA, 120 bp, Artificial Sequence
  ENSG00000224614_8 (sequence is synthesized)
cgctctccccgactcccccgggcccggcctgcgccttcctgcggtgccgaggagcggtggcgccctgggtgaagaagtcccgccgagtcgaggggcgcaatggaggagcgccggaacagg

SEQ ID NO: 1003390 - DNA, 120 bp, Artificial Sequence
  ENSG00000224614_9 (sequence is synthesized)
tctctcattccgagtagctaccgttgcactgtgcgagtgtaaaagtcacttccacccggtctcagttgttccaacctcagttgaagtgaggaggttggactggaaggtttctggggtcac

SEQ ID NO: 1003391 - DNA, 120 bp, Artificial Sequence
  ENSG00000224614_10 (sequence is synthesized)
aacccggaccatcacctctctttccccggggccaacggagcactcctgaaggagggagggtttgtctcaggcctgacgattcctgatgaggacttgggcagaaacagccccaggcaagcg

SEQ ID NO: 1003392 - DNA, 120 bp, Artificial Sequence
  ENSG00000224614_11 (sequence is synthesized)
cacggtaggtggcaagatcagacacatcggaaactgtgtagggctggctctttctgcgctcacactgtccagcaatgggccccagggacttggccagagcgcagtagggcaatgagaaag

SEQ ID NO: 1003393 - DNA, 120 bp, Artificial Sequence
  ENSG00000224614_12 (sequence is synthesized)
gggtggcttctggaaacctacacgaggcccagtctgggtggatttgggtggcggtcccttgcctgcgaggtgggcagggcaactttctactaaattatctaacactgccagtaatggcag

SEQ ID NO: 1003394 - DNA, 120 bp, Artificial Sequence
  ENSG00000224614_13 (sequence is synthesized)
cccttccccagggagccaggaggctgggccaggaccacccccctgtcgcctggcttcaggaaagaaagtggggaagacaacagatttgggagaaggaaactgaggaggttttctcccagt

SEQ ID NO: 1003395 - DNA, 120 bp, Artificial Sequence
  ENSG00000224614_14 (sequence is synthesized)
ctccctcacgctgcctcagtcatggccattgctaagactcacagagcccaactgtgcaaggccctgcacttcgcattcttctcatccaaccccatgacaacccaaggagacacataatat

SEQ ID NO: 1003396 - DNA, 120 bp, Artificial Sequence
  ENSG00000224614_15 (sequence is synthesized)
ccccattttacacgtggcagaactgaggttctacatggccaagtgacttgttcagtgccatacagctggtagtagtgaagccaggattcaaatccagctttccgactctaaagtctaagg

SEQ ID NO: 1003397 - DNA, 120 bp, Artificial Sequence
  ENSG00000224614_16 (sequence is synthesized)
gtctaaggcacagaccgagtgtggtgactcatgcctgtaatcacagcactttggaggctgaggagggcaaatcatttgagctcccaagttcaggaccagcctgggcaacacggcaaaacc

SEQ ID NO: 1003398 - DNA, 120 bp, Artificial Sequence
  ENSG00000224614_17 (sequence is synthesized)
ccacagcagaatgactcggcaaggagaagggcttgtcgggtctagctgggagtggaggtgggccaggctgccagagggaggctttgggtggtgcccttaagagtctccttcatgagctgt

SEQ ID NO: 1003399 - DNA, 120 bp, Artificial Sequence
  ENSG00000224614_18 (sequence is synthesized)
tttgcactgtgaggtcacagtcaaaacacggagagccatggctacaacttgagcaagtcaaacacgctgtgattcaggccagggagatgagcgtgggtaaagaacactgtacgaactagc

SEQ ID NO: 1003400 - DNA, 120 bp, Artificial Sequence
  ENSG00000224614_19 (sequence is synthesized)
ctgaatcaccggggcatcttggtgaactgtaaattctgattcagcaaactgggaggagggcgctgagatccagcatttccatcaagcttcccatggaccacactctgactatcagggcct

SEQ ID NO: 1003401 - DNA, 120 bp, Artificial Sequence
  ENSG00000224614_20 (sequence is synthesized)
accacactctgactatcagggccttcgatgcagacagtctcgatacagctgcacacaagaatcacacagaaagttttaaaaatgccaatgccaggccaggcacagtggctcacgcttgta

SEQ ID NO: 1003402 - DNA, 120 bp, Artificial Sequence
  ENSG00000224614_21 (sequence is synthesized)
tgaggtaatacacccagcacccagatcaagaaatggaacataaccagcaccccagaaccctaccctaaaaatgtaatttaaaaaaaaagattttaataaatatcttttagcgtgcccttt

SEQ ID NO: 1003403 - DNA, 120 bp, Artificial Sequence
  ENSG00000181211_0 (sequence is synthesized)
agaactgatacttttcctgatttattggtctgaagcttgatgcatatggaggcctgaaaaataaggatgtggcatacagacaggctctcctggtgttatcaggcatctatgcatgtgata

SEQ ID NO: 1003404 - DNA, 120 bp, Artificial Sequence
  ENSG00000181211_1 (sequence is synthesized)
tgcagggagaatttggtggatggaacttaagccggtaccaggggggcgggggaagagttgggaaaggacgccatctgtgcccatgatgacaaatgccatcatggagacttcattcggggt

SEQ ID NO: 1003405 - DNA, 120 bp, Artificial Sequence
  ENSG00000181211_2 (sequence is synthesized)
cccttttatatatttagtgaagcagattttccatttcacactttctagatatatttgtattgcacagatgtcagggaaatatcatgtgtgtgaaagaaaaaaaaaagatcaaaattcaca

SEQ ID NO: 1003406 - DNA, 120 bp, Artificial Sequence
  ENSG00000181211_3 (sequence is synthesized)
tccatggccagggattgtaattcaatcattttgtcctgaaattgacatccatttaacgtgcatggatgttccctgcttttgcttttgctttgggggttcaagtcagagcagttggagaaa

SEQ ID NO: 1003407 - DNA, 120 bp, Artificial Sequence
  ENSG00000181211_4 (sequence is synthesized)
cataaatctcagccctacacattgttaaaattcagagatctaggttaaggggggaaaagatggggagaataaaattaaacatataagaccttgccatcagtgccgtcagtaccagagctg

SEQ ID NO: 1003408 - DNA, 120 bp, Artificial Sequence
  ENSG00000181211_5 (sequence is synthesized)
atgaaatcaatcagcaagtgattcctcatcctctttcctgtaacacacagatgagctgaagaaaccacaggacgcagtcaaatatgcttcaaaaaggttgtcccactggccttcttcact

SEQ ID NO: 1003409 - DNA, 120 bp, Artificial Sequence
  ENSG00000181211_6 (sequence is synthesized)
ccctccatctcagcctctaaagacatattttattgtgacatatttgattttgacaaacagcacattgaacatatatgaaatatatgaagcaaaatatgacacacacccaccatgcagcct

SEQ ID NO: 1003410 - DNA, 120 bp, Artificial Sequence
  ENSG00000181211_7 (sequence is synthesized)
tgtttctgccacctctcaccttttgcctgtcttgagagcacctcgatcagcctccctactaaatgctgagctcctctaggttaagggcttgtcacacttctcttagtattcctgaaacta

SEQ ID NO: 1003411 - DNA, 120 bp, Artificial Sequence
  ENSG00000181211_8 (sequence is synthesized)
cttgcctcagtatctgcctcagcaggtacttctttctccgaatgtgaaatgagctcaaggaacaacctaagagttgagaaggtctgcatttcgttgcttctagaatgctatacgccatgt

SEQ ID NO: 1003412 - DNA, 120 bp, Artificial Sequence
  ENSG00000181211_9 (sequence is synthesized)
tgtgtccacaaaatgcgtaccccaaagaacagatgaaatgaaaccatagataaacgtgtaagaggtacttttgaaagcagagctataaaactcagttccatattcatcatggcttggatg

SEQ ID NO: 1003413 - DNA, 120 bp, Artificial Sequence
  ENSG00000181211_10 (sequence is synthesized)
tccagaacttgcttacatctatttgtggacttttttgtatcaaagagaatggatcaatcaaataagaaaagaagagtgcattgggagtcaggagactgaggtgtggtctggctctgctgc

SEQ ID NO: 1003414 - DNA, 120 bp, Artificial Sequence
  ENSG00000181211_11 (sequence is synthesized)
taacttcaagtttacactcaattgatcaagtcccttgatgacatggaactaaagtgacttttgaagaacatgagtacctcaaggatcttgctaaaatacagattctgatctaataatgca

SEQ ID NO: 1003415 - DNA, 120 bp, Artificial Sequence
  ENSG00000181211_12 (sequence is synthesized)
gccttgtgagatagtgaactctccattcctggaagtattcaagctaaggttggagaggtgatgacggtttccattattttggagggtgaacttccaagatgaagaacatgagtcttagag

SEQ ID NO: 1003416 - DNA, 120 bp, Artificial Sequence
  ENSG00000181211_13 (sequence is synthesized)
aagtcaaagaagttgcctaaggtcacatgagcagtgagcagaggagttgcttacctttgttagactccaaatcctgtgtgactatgaaactcattaactgaaacaacccggcacctttgg

SEQ ID NO: 1003417 - DNA, 120 bp, Artificial Sequence
  ENSG00000181211_14 (sequence is synthesized)
acctgtgcaggcaaaggcaagggagttgaccaggagcacacagcacagacgagaacagtcccaaagccttttgctgtatcccatctgtgcaaaccactcccaataaacaaacaaacacac

SEQ ID NO: 1003418 - DNA, 120 bp, Artificial Sequence
  ENSG00000258869_0 (sequence is synthesized)
agaggactggagaccctcacacagcctacagcttctctgctcagggagggggctcaaggtgaaatctgatggcacactggagcgtgtccgtgagcggaggagggaagtgcaatgggtgtg

SEQ ID NO: 1003419 - DNA, 120 bp, Artificial Sequence
  ENSG00000258869_1 (sequence is synthesized)
gtgagtccaaggtaagtcatattttctatccaaaccaggatttgcatcaaatgaagaaagaaggcaccaggattctaacagacaccagggcaagggaccccctcacatccttccttactc

SEQ ID NO: 1003420 - DNA, 120 bp, Artificial Sequence
  ENSG00000258869_2 (sequence is synthesized)
gtgttgcttccctgcattggccaactatgcccattgaaattggtgtttaggaggaaaggggagggcagggcccagatttcccgttcctctcagtccccctcattccctgtgagaggaagg

SEQ ID NO: 1003421 - DNA, 120 bp, Artificial Sequence
  ENSG00000258869_3 (sequence is synthesized)
gactcaaaagagggcagagccctgcaaagaaggtcttatcagctgctgtttgtgggtctaagaagctgtgagaagtctggttctgggaatggagaaagaaggtagagatagagtcaattg

SEQ ID NO: 1003422 - DNA, 120 bp, Artificial Sequence
  ENSG00000258869_4 (sequence is synthesized)
ctgctgctgctggagcaacactgaaaaggaataagaaacaccaagaataaagttctttttactcctcctaacttcctgtctccttcctgtgacttccattggcacaacgcaacaggaagc

SEQ ID NO: 1003423 - DNA, 120 bp, Artificial Sequence
  ENSG00000258869_5 (sequence is synthesized)
caaggataccgcagcctgggaaatggatttcataaagggcaactccagcaacagataacagagcagagaagtgtttccttggggctgggaacccgtgaaatctgatggcacactggagcg

SEQ ID NO: 1003424 - DNA, 120 bp, Artificial Sequence
  ENSG00000258869_6 (sequence is synthesized)
aaattcatggacacataggaactgcaacatatgaactgtgaaatttgggtaattttatgtaagagttaattgctactatagccaaatttaaaattgtcatggcacaacataaacagtaaa

SEQ ID NO: 1003425 - DNA, 120 bp, Artificial Sequence
  ENSG00000258869_7 (sequence is synthesized)
atccacgctaataatttaaagcttattttttagttagaaaaacatgaaaaatacaaataaaaaacactacaaaatgagagaatctgctgaaaaaaatgaaaacggcttatgctttagtcc

SEQ ID NO: 1003426 - DNA, 120 bp, Artificial Sequence
  ENSG00000258869_8 (sequence is synthesized)
ctttaataatacttttttcctgcttttcaagtaaggggttcacagttttattttgcaccaggaactaaattatacagttggttctgccattgggtttacaaaggtagctacacaccttca

SEQ ID NO: 1003427 - DNA, 120 bp, Artificial Sequence
  ENSG00000258869_9 (sequence is synthesized)
agagctgcaaagataagaaatgtttgctattcatccctcaaacatcccttcgagaagtcaattctccatcatgacctcagccctcagccttctccagttcctgagatcagccttggagaa

SEQ ID NO: 1003428 - DNA, 120 bp, Artificial Sequence
  ENSG00000258869_10 (sequence is synthesized)
tgtagaattgggaccggcctgtcactgggattagcaagtcatcattcctaccaataagtagggaccagaattgtggtagcgtgaattccaaggaggatcatcatatacagttgtgcaggt

SEQ ID NO: 1003429 - DNA, 120 bp, Artificial Sequence
  ENSG00000258869_11 (sequence is synthesized)
gaattatgcactcacacagctgtacatactggccctggaagttggctttcctgaatggacccctaggactggcctgctcaccaaatcccttccctccttcatgccaccttatctgaagtt

SEQ ID NO: 1003430 - DNA, 120 bp, Artificial Sequence
  ENSG00000258869_12 (sequence is synthesized)
aggagactgggcctcagtttccctgcacaacacgctggttctatgctaggactatattccatccttttcccttaggttgatcagacaggtccaaaagagcagagtttctactatgaatga

SEQ ID NO: 1003431 - DNA, 120 bp, Artificial Sequence
  ENSG00000258869_13 (sequence is synthesized)
actacttagaaccagcgtctaaggtcagcagagactagaatgcactcttcatccagtagcctccataacctgggtctgtcaccaccacccccatcagtacataacctgggaagtggatct

SEQ ID NO: 1003432 - DNA, 120 bp, Artificial Sequence
  ENSG00000258869_14 (sequence is synthesized)
catctccatgagaccttgaaacctctgccttctgagcagtccctgtccccgggcttctccactgcagcttactcatcgtcacccacaggagctgttagctccagaatctttactaaaggc

SEQ ID NO: 1003433 - DNA, 120 bp, Artificial Sequence
  ENSG00000258869_15 (sequence is synthesized)
ccgcatcctgaacacagcctactacacgaggctgcggctgagcactcaggacaatcgctcaggacaaataaccctcccattgcccttaaacatccctggttccctttgttccaatcccat

SEQ ID NO: 1003434 - DNA, 120 bp, Artificial Sequence
  ENSG00000258869_16 (sequence is synthesized)
ccttgtgggattctgacctcttggctctctcatccaacgggttaccctccccttgactcctttgattttactttttgtgggctctcttctaactatgtgaactcagatccctctgtgaga

SEQ ID NO: 1003435 - DNA, 120 bp, Artificial Sequence
  ENSG00000258869_17 (sequence is synthesized)
gtgagttgcacatctgattcacctgtggggttgttaaaggtccatgtgcctggctctcaccctagactattctaactcagagtgccccccagggaaacaatgtaaggtagcaattaagga

SEQ ID NO: 1003436 - DNA, 120 bp, Artificial Sequence
  ENSG00000258869_18 (sequence is synthesized)
cattgactctggcatcacaagtttgagtctatcctgtctctgccactcgtaatctatgtgatctttggggatgctttccctttctctgaatcagtttctttgtctctaaaatgggaatga

SEQ ID NO: 1003437 - DNA, 120 bp, Artificial Sequence
  ENSG00000258869_19 (sequence is synthesized)
gagtgttagtacataccccccaggatgggcagaaaaattgaataagctaatgcatgcagaggattcaaatacggcctggcacatggcatgtgttcaataacaagttaactgcattgctat

SEQ ID NO: 1003438 - DNA, 120 bp, Artificial Sequence
  ENSG00000258869_20 (sequence is synthesized)
tattgttatccaaaaagtgacagattttactttgccctccgtgtttggttctcggtgcctggttttgcttacttaagagtccctttaccttggtctcggccaagcaagaccagccccgcc

SEQ ID NO: 1003439 - DNA, 120 bp, Artificial Sequence
  ENSG00000258869_21 (sequence is synthesized)
cctgactcatgggtttgaacatctagatcagatctagccactcatcaccaccctgggcacccatggctttagttttctactgcctcctctcctaccagtgccaggcaaacctttgcttgt

SEQ ID NO: 1003440 - DNA, 120 bp, Artificial Sequence
  ENSG00000258869_22 (sequence is synthesized)
gattcaaaacccaactggaatgcttggtcttttcctaagtcttcctcaatgttcctctgtattcatgtgctcctagaattctttattcagcacattttatcctaattactggttacttgt

SEQ ID NO: 1003441 - DNA, 120 bp, Artificial Sequence
  ENSG00000258869_23 (sequence is synthesized)
ctggctcttgcttaggcacaaaacctgcaatttaactttcctctaacatgggaccttaacatgatgcatataataggtgttcaataaatgatgtttcttccaataaatatctatttcatc

SEQ ID NO: 1003442 - DNA, 120 bp, Artificial Sequence
  ENSG00000258868_0 (sequence is synthesized)
ttcttttgtaggcccagcttccacaaaaggagcagttttttggtgcagaggtagagaagcctctccctgtggccactaccaccaccaacccacagcaggttttgccaggccaccaccaat

SEQ ID NO: 1003443 - DNA, 120 bp, Artificial Sequence
  ENSG00000258868_1 (sequence is synthesized)
gttcacttaaagccgaaaagctcttcggtcatctgaagaggtgcacagactcctcgcaatgcaaggccactgccagggaatgctggaggggtgatgctagcaattgaagattgtctctcc

SEQ ID NO: 1003444 - DNA, 120 bp, Artificial Sequence
  ENSG00000258868_2 (sequence is synthesized)
agattagtgttgggtctgaagttccaaatcctgctgcctctgtgaagtctttctgctcatgctagaagcaatatcacctcttctagaattgtaaagtgccattttccataccacttataa

SEQ ID NO: 1003445 - DNA, 120 bp, Artificial Sequence
  ENSG00000258868_3 (sequence is synthesized)
tatactgtcttgtagatgtttttctgtcgtctgtatttcatccctctaatagatgataaatttctagaggatgcctcccacagaaaaagtgctcaataaatatctgtcattggtgaaaac

SEQ ID NO: 1003446 - DNA, 120 bp, Artificial Sequence
  ENSG00000258867_0 (sequence is synthesized)
gctgggggtaaggggtgagtcctctcaggggcatgcttaggaaacaaagtagttcccaaaatctatgcatatgacagagaagaattagatggcctttgagagacccagaagaaaatgcaa

SEQ ID NO: 1003447 - DNA, 120 bp, Artificial Sequence
  ENSG00000258867_1 (sequence is synthesized)
aaaggaatagggaaaaaaagggcaaagcaacctgctgtgagcctcctaatcttccatggcctgaattcccagcgcttgagaacaagccctgtgaaaaacaagctgctgtccctgctagag

SEQ ID NO: 1003448 - DNA, 120 bp, Artificial Sequence
  ENSG00000258867_2 (sequence is synthesized)
gcatcctgcaatccatggatgtttatcaccaagccattgttaacatgaggatccagtatctgccggaggagccccaccttctgctactattatgttcttcagatgagtagaagagagtgg

SEQ ID NO: 1003449 - DNA, 120 bp, Artificial Sequence
  ENSG00000258867_3 (sequence is synthesized)
ggagggagagagcaggaagaagaaaggaagaataatgtcttgaaattgatgatgcatatcataaattattactcaccccatgttcccaccctcgagagacctccaaacaatcaccatgcc

SEQ ID NO: 1003450 - DNA, 120 bp, Artificial Sequence
  ENSG00000258867_4 (sequence is synthesized)
acagtgaacattcagtaacaaaaattcagccagggttttcaccagcatgaatggcagtgattccaatcaggaaaacagaaagaggagagttcagagccacctagaatggctcttgcaaga

SEQ ID NO: 1003451 - DNA, 120 bp, Artificial Sequence
  ENSG00000258867_5 (sequence is synthesized)
tacgaaatcaaggcagcagcaacagggctgaacattcctcatccctaactctcccttcaccagtaggaaacccaggataactgcaatcaccgcaggcccatctggcctgaagttctacta

SEQ ID NO: 1003452 - DNA, 120 bp, Artificial Sequence
  ENSG00000258867_6 (sequence is synthesized)
aaaaacaccagatgttcctgtgcactgctcctaagagatggttctgaagaccagttcggggagaggtcaaaatactggacagaatctcagcaacatggaacctcaaactaagtgacagtc

SEQ ID NO: 1003453 - DNA, 120 bp, Artificial Sequence
  ENSG00000258867_7 (sequence is synthesized)
acagacaactcttccccaaagaaaataagcacagacatggtttgtggtaagcagaattataaagatgaattcccatctccctgtcagattaccagtatggtaaattaccagattacctgg

SEQ ID NO: 1003454 - DNA, 120 bp, Artificial Sequence
  ENSG00000258867_8 (sequence is synthesized)
ttatttattcaaacactaatacagttattgccttgatggaaacatacagatacaattaaaatcccaagtaccaaataaattgaccttaagacaaagactaagtaaatcacatgagccctc

SEQ ID NO: 1003455 - DNA, 120 bp, Artificial Sequence
  ENSG00000258867_9 (sequence is synthesized)
tacaagcagagagtttttctccagctggtagcagaagccagagatttgaagcataggaagtattcaacacattattgctggcctgaaaatggaaggggccacataacgagggaaaccggt

SEQ ID NO: 1003456 - DNA, 120 bp, Artificial Sequence
  ENSG00000258867_10 (sequence is synthesized)
ggcctctagaagcagggagcagtcccctgctgacagacagcaagccaagacctcagttctacaattgcaagacactcaattctgctaaggacaaaaatgagcttggaagtgaactctgag

SEQ ID NO: 1003457 - DNA, 120 bp, Artificial Sequence
  ENSG00000258867_11 (sequence is synthesized)
cttcaggtgagaacacggccaaacaacaccttgatttcagcttaaacaaagaatgcagccactccatgccagaattctgacctgtagaaatttgagctaataaatagatgttttaatagc

SEQ ID NO: 1003458 - DNA, 120 bp, Artificial Sequence
  ENSG00000258867_12 (sequence is synthesized)
attgtgaccaaaagtccccctccagggtgttaaactcctggaggatactcataagccaggacttcccaagagtgtcccatggaacctgagttctaaggacggtacatgaaaaaaatcaac

SEQ ID NO: 1003459 - DNA, 120 bp, Artificial Sequence
  ENSG00000258867_13 (sequence is synthesized)
atgggttccatgatcaaagaagtttgggaaatgggctaaatgaaaggacttccaaggccttttatctgctaatgagaaagaacaagccctgtgaaaaacaagctgctgtccctgctagag

SEQ ID NO: 1003460 - DNA, 120 bp, Artificial Sequence
  ENSG00000258867_14 (sequence is synthesized)
gcatcctgcaatccatggatgtttatcaccaagccattgttaacatgaggtggtttccaaaaggaaaagctttgggagatagaagtcctcgttttgacctctgccctccttgtacaccag

SEQ ID NO: 1003461 - DNA, 120 bp, Artificial Sequence
  ENSG00000258867_15 (sequence is synthesized)
gagccagaaaaacttcatctcttttacaagaaacattgagattcctgtaaaattaagaaatcacacaatttgatggtctacattatctaaagcaaatgagacttctatttggaacaaaga

SEQ ID NO: 1003462 - DNA, 120 bp, Artificial Sequence
  ENSG00000258867_16 (sequence is synthesized)
atgagtctgcaagttaaagtgttttctgttttctaaggataatggtctccagcttcgtcaatgttcctgcaaaggacatgatgctgactttgaagatgcaagcttccacatctacagcct

SEQ ID NO: 1003463 - DNA, 120 bp, Artificial Sequence
  ENSG00000258867_17 (sequence is synthesized)
caaggaaacaaattcagccaaccaactgagggagctttccttgtcctgcctcaagatgagatcacagtctgcccaacaccatgatttaggccttgtgacacctgatgatgcatatcataa

SEQ ID NO: 1003464 - DNA, 90 bp, Artificial Sequence
  ENSG00000258867_18 (sequence is synthesized)
tcttgagtacccagggacacgatcaggaaagccaggatccagtatctgccggaggagccccaccttctgctactattatgttcttcagat

SEQ ID NO: 1003465 - DNA, 120 bp, Artificial Sequence
  ENSG00000258867_19 (sequence is synthesized)
caataaagaaaaggcaacacaaaggggttgtatagaattcgccacattatggacccatgtcatagagagaatccacggtgcatttgttagctgcatttaaatgacaacactttcagatcc

SEQ ID NO: 1003466 - DNA, 120 bp, Artificial Sequence
  ENSG00000258867_20 (sequence is synthesized)
tgttagctgcatttaaatgacaacactttcagatccaagatttatttgggataaaaatttacctggatgcaaggctattcagaatgaagattaatgatatggtttggctgtgtccccacc

SEQ ID NO: 1003467 - DNA, 120 bp, Artificial Sequence
  ENSG00000258867_21 (sequence is synthesized)
gacctggtgggagataattgaaccatgggggcaggtctttctcatgctgttctcatgagagtgaataagtctcatgaaacctgatggttttataagggggaatttccctgcacaagctct

SEQ ID NO: 1003468 - DNA, 120 bp, Artificial Sequence
  ENSG00000258867_22 (sequence is synthesized)
ctgatggttttataagggggaatttccctgcacaagctctctctctgccttttgccatccatgtaagacgtgacttggtcctccttgccttctaccatgattatgaggcctccccagcca

SEQ ID NO: 1003469 - DNA, 120 bp, Artificial Sequence
  ENSG00000258867_23 (sequence is synthesized)
gcttgcatgaaggaaatgatttcctatgattctgcttactgcttaaaaaaattaatcaagttttctgcctgacaagtggtttccaaaaggaaaagctttgggagatagaagtcctcgttt

SEQ ID NO: 1003470 - DNA, 120 bp, Artificial Sequence
  ENSG00000258867_24 (sequence is synthesized)
gccagcatccagagagagagtgagatacagcctcctcttcttgaagcacccacttctaaactctgtgacagttttcttggaactctgttatgtggatctggagatgacaatgtcacagca

SEQ ID NO: 1003471 - DNA, 120 bp, Artificial Sequence
  ENSG00000258867_25 (sequence is synthesized)
aatttgttatgcagcaataaaaaaaactaatgcaaggagatatcaattattgtaaaaagcttagcttttgttttaaaatatagttcaccagtagtaagttactaataagtaactaaacaa

SEQ ID NO: 1003472 - DNA, 120 bp, Artificial Sequence
  ENSG00000258867_26 (sequence is synthesized)
ataaaagcaagccatttacaaatcaataataagagtaagtcatgaactaaagattgtaattaatcaatttctgtacgcctgtaatgaaaataaaggaggaaaagaaaatgaaagaaaaga

SEQ ID NO: 1003473 - DNA, 120 bp, Artificial Sequence
  ENSG00000258867_27 (sequence is synthesized)
gaggctaacggacaaaaatattctccaggaggtcagagccaagagacagaggaaaatgaggaagaaagttccttgcagaggacagacccagggtctatcaaaacattttcttctagggtt

SEQ ID NO: 1003474 - DNA, 120 bp, Artificial Sequence
  ENSG00000258867_28 (sequence is synthesized)
tggggatctttgcaatacctaccctacaggattccattattgctctggaccagggaattctttaggcatttttagtgtggttagccagtccacttttgtgtattgaataggcagatggag

SEQ ID NO: 1003475 - DNA, 120 bp, Artificial Sequence
  ENSG00000258867_29 (sequence is synthesized)
agatcctcgactttgatatcaacaagtagacaattcaataagtggacaaaattttgggttttctccccagagtaatatgcacgtatgttttatgtaaaggatgatagcagcaaaaggggc

SEQ ID NO: 1003476 - DNA, 120 bp, Artificial Sequence
  ENSG00000258867_30 (sequence is synthesized)
taactgtgatagaggttgctagctacctactaaaaatccattctccccttcttactggcacagagctaaactgcattactcagcctccctcgcagtgaagtggccaagttttcttcagtg

SEQ ID NO: 1003477 - DNA, 120 bp, Artificial Sequence
  ENSG00000258867_31 (sequence is synthesized)
aaacatgattgcagtgacacatgtcacctctacgtttggcccatacaaacctcacacttatcccaatatgttctttctttctactggttgattggtgtggcaaagctttgtataacttct

SEQ ID NO: 1003478 - DNA, 120 bp, Artificial Sequence
  ENSG00000258867_32 (sequence is synthesized)
agatgccacatattgaggatggcagagctatccccaaatggctctatagggaccactaagtgactgtggaggagagctgacatcaatccaaatcctattataaaaactttttgtttttaa

SEQ ID NO: 1003479 - DNA, 120 bp, Artificial Sequence
  ENSG00000258867_33 (sequence is synthesized)
gagtctgcaagttaaagtgttttctgggatcactctaagctccagtgtcaaggagtcaagtccttcaggaattctctgcctccactccctgtggcagagctagagtggctgccatgcttc

SEQ ID NO: 1003480 - DNA, 120 bp, Artificial Sequence
  ENSG00000258867_34 (sequence is synthesized)
aagaagaagaagaaggaggaggaggagagatttgagggaagaggtagcagtccctgccatgatgatgcatatcataaattattactcaccccatgttcccaccctcgagagacctccaaa

SEQ ID NO: 1003481 - DNA, 120 bp, Artificial Sequence
  ENSG00000258867_35 (sequence is synthesized)
gctgaactcaatatctttgtagaaattattaaaagcaatatcacctttagccttgtcaagaacctctaacaagaccttttcagaccaaagtgccctcaatatcagagcatgtagtcaccc

SEQ ID NO: 1003482 - DNA, 120 bp, Artificial Sequence
  ENSG00000258867_36 (sequence is synthesized)
accccaggttgaccccggaagtatgagagagctaaggtgggagccagaggctgagagaagaaagggggtgacctagttcatgccaaatgaatctcacaagcaagactagattgtaaaatc

SEQ ID NO: 1003483 - DNA, 120 bp, Artificial Sequence
  ENSG00000258867_37 (sequence is synthesized)
agcaaagtcgctcacagctgcattatgtcctccctgagctctgggcacttttgcctttgtgacctccttcctccaacaattaacattaaaaattgtattttattataaagacaaacataa

SEQ ID NO: 1003484 - DNA, 120 bp, Artificial Sequence
  ENSG00000258867_38 (sequence is synthesized)
gcagaatctctgatcagacagaacatttgctccaaagccattgaatgggctgggatggagcatgcatggttttagcttcatctcccacaactgtggctttgttctgtgttggtggcaggt

SEQ ID NO: 1003485 - DNA, 120 bp, Artificial Sequence
  ENSG00000258867_39 (sequence is synthesized)
aaagtgtacaattcagtggttttcagtatatccacaaaatgcaaccatcaccactatctgatttcaggatttctttttcttttcttttttttttaatcccataaagaaaatccaaaccaa

SEQ ID NO: 1003486 - DNA, 120 bp, Artificial Sequence
  ENSG00000258867_40 (sequence is synthesized)
agacctaactgattccagagagcttgctctttttagaagaccacagtcttataatcacttcttgtatttctctagatgtgactgtatatttgtgtgatttaaacttttcagggtaatgaa

SEQ ID NO: 1003487 - DNA, 120 bp, Artificial Sequence
  ENSG00000258867_41 (sequence is synthesized)
acattgtccttcacaggagctaaaaagaaaactacaactcaacatagacaagcaaagttcacaggaaatctgaccctgtgacaataattttaaggaacaagaaggcatgagtcacaatcc

SEQ ID NO: 1003488 - DNA, 120 bp, Artificial Sequence
  ENSG00000258867_42 (sequence is synthesized)
aaaatagcaagaataaagcataggattctgcttatgccaaaatattcctctgtgatttaaacagaggcagggactttgtttcaaccatagtggatatgggagggagaacgtctactgtaa

SEQ ID NO: 1003489 - DNA, 120 bp, Artificial Sequence
  ENSG00000258867_43 (sequence is synthesized)
gttgggatgtctacagaagaaatggatatccaagacacaaataactatttttaaacaagtacataaaagacagggatgtgtctattaaataaattcttatcattttctacccttagaaaa

SEQ ID NO: 1003490 - DNA, 120 bp, Artificial Sequence
  ENSG00000258867_44 (sequence is synthesized)
catagtggctgcctgtgttcctcgacttatgaccccttccttcatcttcaaaactcctcactccaatatctgctgctgtcatcacattgcccattgccttttcctctgactctgactcct

SEQ ID NO: 1003491 - DNA, 120 bp, Artificial Sequence
  ENSG00000258867_45 (sequence is synthesized)
ctgtgtccctcctatttggattcttgtggttacacggggcccaccaggataatcctggataacatccgcatctcaagatccttcacttagtcacatctgcagaatccccttaccgggcaa

SEQ ID NO: 1003492 - DNA, 120 bp, Artificial Sequence
  ENSG00000258867_46 (sequence is synthesized)
agtaacatattcagaggttctggggattctaaaatgaacatatttaggggccattattcagcctaccacatccagtaagcaagtaagtctgcgcatcctgaagcccgtacatgggctcct

SEQ ID NO: 1003493 - DNA, 120 bp, Artificial Sequence
  ENSG00000258867_47 (sequence is synthesized)
ctatgacccctaaccagataccaagggcttgggtcttcatctcagcagttgacttatttcttctttatgtgccacacgcaggtttgccaaaatcaaaagtagtgatcccaattggtggtc

SEQ ID NO: 1003494 - DNA, 120 bp, Artificial Sequence
  ENSG00000258867_48 (sequence is synthesized)
tcttaaacacaaggggatgcaccattagggtaaaataccaaaggtaccagaagaagacacagctctgactgcaagtattatcagagcctttcccaccctccccaaggaaccccatcctgt

SEQ ID NO: 1003495 - DNA, 120 bp, Artificial Sequence
  ENSG00000258867_49 (sequence is synthesized)
ctagaatggtgaggccagtgtgtcacccaaggagagatattggggctgctgagtcaagtggatgtcagccagctgtgtcatgtgggacagctctgtactttctgcagacattagggccag

SEQ ID NO: 1003496 - DNA, 120 bp, Artificial Sequence
  ENSG00000258867_50 (sequence is synthesized)
tgctcagactgccctctatttatatcccttagtaattctgagcatgggatacaattgctcctctaagaactcttgagcaaataaagaggtagtaacatcaatgaccaactgggtagacct

SEQ ID NO: 1003497 - DNA, 120 bp, Artificial Sequence
  ENSG00000258867_51 (sequence is synthesized)
caagtgtcagcaaaactttgtaactggctgctacccatgccatattggtgtgtcccaggaaggctgagggaagacagcaaagatataactttctaggatctaattcctactgaaaactca

SEQ ID NO: 1003498 - DNA, 120 bp, Artificial Sequence
  ENSG00000258867_52 (sequence is synthesized)
gagtaaggattgcaaagttaggctaacaagagtccagtaacttaggtcctagtaatcttgagcaagtcacttaacttctgtggtccatagtgcctccatctgatagtcagtccttttcat

SEQ ID NO: 1003499 - DNA, 120 bp, Artificial Sequence
  ENSG00000258867_53 (sequence is synthesized)
ctcaaaaacccaccattgtactgcctctaagtttcaagatgggaaagccggtccagtctccaaggctggtgccatggccaaaaggtcaccccaagtctgagcaaggtggagttcctttcc

SEQ ID NO: 1003500 - DNA, 120 bp, Artificial Sequence
  ENSG00000258867_54 (sequence is synthesized)
tgcaggcttttgtttcgtctcctacccttagcctcttttaacagaatgttcaacggttgtggcatgaattgagtaaaagctcccagtaattcaggatctgtccactttggagaacatcga

SEQ ID NO: 1003501 - DNA, 120 bp, Artificial Sequence
  ENSG00000258867_55 (sequence is synthesized)
ctccaaagtccttgaccgtgagagatgctactttagaattgattgagtacatcagtgactgcctggcttccacaggaaaatgtctctgtattcaggatgtttccttcagattctttctca

SEQ ID NO: 1003502 - DNA, 120 bp, Artificial Sequence
  ENSG00000258867_56 (sequence is synthesized)
tgaactttgtgtgttttcctgaatgtactacacaacagtattactggaagtgtaatgatagaggatttggacagtctttgatgatgtattccaataaatgatgatgatacataataataa

SEQ ID NO: 1003503 - DNA, 120 bp, Artificial Sequence
  ENSG00000258867_57 (sequence is synthesized)
ggaagtaatcattgcccatgggccccttttaatttccccaagttagtttatctattgagtcatttatgatagtttcgaattgcctcatagaacaaagtcagcacttcttgtttacgcata

SEQ ID NO: 1003504 - DNA, 120 bp, Artificial Sequence
  ENSG00000258867_58 (sequence is synthesized)
ctgtgccacactggcagagttatctgggtcttctctctctcaacatttccagaaagatggtatctgtatcatctagactgtgtttgccctgaggagaaactaagacagacatgcccaaag

SEQ ID NO: 1003505 - DNA, 120 bp, Artificial Sequence
  ENSG00000258867_59 (sequence is synthesized)
gtgacacctggtatggaagacccaatgatgcatatcataaattattactcaccccatgttcccaccctcgagagacctccaaacaatcaccatgccacagtgaacattcagtaacaaaaa

SEQ ID NO: 1003506 - DNA, 120 bp, Artificial Sequence
  ENSG00000258867_60 (sequence is synthesized)
gaggtaatggctatgcagaatttgtttcactcaccccttggaactcagattccctgtggagagttggagtaatatatatgaggacaatagggagcctgaaagttaagaattcatcctgtt

SEQ ID NO: 1003507 - DNA, 120 bp, Artificial Sequence
  ENSG00000258867_61 (sequence is synthesized)
gtatttctccaatggcacattcacgatgtggctccatggtttaatgcagactgaaaagcagttggcatttcacagcaggaggttagacatggagtgtgctactgggtcagggtagcttga

SEQ ID NO: 1003508 - DNA, 120 bp, Artificial Sequence
  ENSG00000258867_62 (sequence is synthesized)
ctggatataagtgtgtgtgatggatgctgtaatgaggtgggaggcaggtgacctgaattttagtcccaaagataccacactaaactcttgctatgtgaccttagccaaattcttagtttt

SEQ ID NO: 1003509 - DNA, 120 bp, Artificial Sequence
  ENSG00000258867_63 (sequence is synthesized)
tgaggcaatgttggcagccaggagtagaaaatggcagactcactagaacatctgaatccctgaaaaacagtatcgctgttgctgctgattaaacctcccccttgagaaaggaaaacattt

SEQ ID NO: 1003510 - DNA, 120 bp, Artificial Sequence
  ENSG00000258867_64 (sequence is synthesized)
tttgtaagctactggatgttttgggtccctgtgtttgccatcttccttatttcatatgagaactagtaccgaaaagtaagcactataacaaacatctaaaatggaaggtattagcttagc

SEQ ID NO: 1003511 - DNA, 120 bp, Artificial Sequence
  ENSG00000258867_65 (sequence is synthesized)
attcagactgaaggcaggaataaaatggttatgagtggctagaaagtgaaagcctcatgttatccatggataactttaaaaattatcatctgtgattatttggaaggtagaccaagaacg

SEQ ID NO: 1003512 - DNA, 120 bp, Artificial Sequence
  ENSG00000258867_66 (sequence is synthesized)
tattgagtctgtggctttagggaaagcaggtgaaaagagtaggaatattagtgtatgtcaactgctatttgttgtttttaatcaagtgctacaagaaacagataaactcaagcaagaatt

SEQ ID NO: 1003513 - DNA, 120 bp, Artificial Sequence
  ENSG00000258867_67 (sequence is synthesized)
ggttagtttgccagccaaagtggaactggaaaaaaaaatacaaagcttcttggggctgaaaaaactcttgggttctatacctcaaatacgaaaagataagatttgcagatcaaaaaaaaa

SEQ ID NO: 1003514 - DNA, 120 bp, Artificial Sequence
  ENSG00000258867_68 (sequence is synthesized)
ttgttgggaaatgagtctgcaagttaaagtgttttctggcacctgtgcaattgtttcctactaccctgcgtgctgcttaagtctgatgaagacattcttctttggagtctgacattaggt

SEQ ID NO: 1003515 - DNA, 120 bp, Artificial Sequence
  ENSG00000258867_69 (sequence is synthesized)
gccttttgtatttggctgcttgcacttagcataatgttttcaaaatccatccatgttgtagcatttctcagtatttcattccttgtatagctgaataatataccacacaaatatatcaca

SEQ ID NO: 1003516 - DNA, 120 bp, Artificial Sequence
  ENSG00000258867_70 (sequence is synthesized)
gaaaggaagaataatgtcttgaaattggtaaaagcgtttttgtttgcacatcctgcattattaatatttcttgtttagcataattagctaccctctcaagcttacacacaacctgcagtg

SEQ ID NO: 1003517 - DNA, 120 bp, Artificial Sequence
  ENSG00000258867_71 (sequence is synthesized)
tttatgccttccgatgatagctaaaccatcagcaaagcagtccaggtccctgaaggctgaatgcaggtggttctgaaggctgcaggatgcattcaaaaagcaggatacataagctttaat

SEQ ID NO: 1003518 - DNA, 120 bp, Artificial Sequence
  ENSG00000258866_0 (sequence is synthesized)
cacgtggaggattgttaattctgcgatgtctgactcaggggtgtttgattacatggaggccaccaccaacagggtgacacatgatgtagtgtgagaccggggagcggggctgcagccagg

SEQ ID NO: 1003519 - DNA, 120 bp, Artificial Sequence
  ENSG00000258866_1 (sequence is synthesized)
cccctgtcctgatgaggtgcgtctgcagggatgggactcagcggcggggaaatgagacgctctgttttccaggcagcctgggctggtggcaggaagagctctggcgagagatgaatagga

SEQ ID NO: 1003520 - DNA, 120 bp, Artificial Sequence
  ENSG00000258866_2 (sequence is synthesized)
cttggcccagccatgcgctcggtgacgggcgtgagagttcatttgctgcttgaagatttagttcccaattaataagtggagagccagcctggtgcctcaggaggtgttccgggctgaact

SEQ ID NO: 1003521 - DNA, 120 bp, Artificial Sequence
  ENSG00000258866_3 (sequence is synthesized)
gtgtccgccacccccgccccagcccccaccttctccaaaaagtctatgttagggtcctaacctcggcacctccaaatgtgactgtgtttggggatggggccttcaaagaggtgattaaag

SEQ ID NO: 1003522 - DNA, 120 bp, Artificial Sequence
  ENSG00000258866_4 (sequence is synthesized)
acagctgtctgcaagtcaaagagagaggcctcagaggaaaccagccctgctgacaccttggtcttggacttctagctcctgtattaagcagcgctgtctgcgggaaggtgcctttcctgc

SEQ ID NO: 1003523 - DNA, 120 bp, Artificial Sequence
  ENSG00000258866_5 (sequence is synthesized)
ccagactactgaaggagactgccagtacaagaggctttcactccccttgagggtttgcaggcaggagaaaagagtgacaaagttttttcttcctcctctgttctatgctccccgctgata

SEQ ID NO: 1003524 - DNA, 120 bp, Artificial Sequence
  ENSG00000258866_6 (sequence is synthesized)
cctctggtagagcattcacctactgggctgtagcctgttgggtgcattttccccctaataccacaggctctcaatttccagcacaaagctcaggacaccaggaaacatctggtgatggaa

SEQ ID NO: 1003525 - DNA, 120 bp, Artificial Sequence
  ENSG00000258866_7 (sequence is synthesized)
ggctgaggtcataaaggacagcaatatcccagcccacagcagggtccccacacctgctgtactgcattcactcggtagtgactccatttcaaaaggggcctctcatggggtggccatgag

SEQ ID NO: 1003526 - DNA, 120 bp, Artificial Sequence
  ENSG00000258866_8 (sequence is synthesized)
gagctggagcttgtgagccccttaaaatgaaggcaaagtcatatacttcacgtctgcccattgcaagagttcatcaagaaagacagcactggtgtgtattaaaaaaccacaatgtattaa

SEQ ID NO: 1003527 - DNA, 120 bp, Artificial Sequence
  ENSG00000258861_0 (sequence is synthesized)
aggaaagcgaacgtccagctgaagagaggagaagccctagaagtgatacaggctctggccgggggacccgatgtgctcgtgtcgcggcgtggggcttggtgaggaaccaccggagtgctc

SEQ ID NO: 1003528 - DNA, 120 bp, Artificial Sequence
  ENSG00000258861_1 (sequence is synthesized)
ggtgtcccgccaccagagaggaggtctatgtcagcaccatcaccagcatccaggctacctacaagaggaggcagggggactcctctgacacacctggggaggtctcgtcaatggcaggtt

SEQ ID NO: 1003529 - DNA, 120 bp, Artificial Sequence
  ENSG00000258861_2 (sequence is synthesized)
ccctctacaatgctttctctgctgcaaatgcaactcagcatcacctctttcctggatataattccaaggaattattaaaggaggcattggtgtcagcacctcgtgaaatactcgtaagga

SEQ ID NO: 1003530 - DNA, 120 bp, Artificial Sequence
  ENSG00000235026_0 (sequence is synthesized)
agctccgccactgcgcgcgctccagcgccccagaaggcagggggcagcccggggaccggggtcccggagccccgtgggaggcgggcaacacctgtcgggacccgagggcgtgtctgagat

SEQ ID NO: 1003531 - DNA, 120 bp, Artificial Sequence
  ENSG00000235026_1 (sequence is synthesized)
tgtggcctgaggtgctgcgccttccgatccggggcagcgggcgtcctgtagctgcgccttccgaatccagcccagattctcctaccagctgcttgggtcacgtcggtggaactcctaaag

SEQ ID NO: 1003532 - DNA, 120 bp, Artificial Sequence
  ENSG00000235026_2 (sequence is synthesized)
ggatgccttcaaaatgtgtgaataagcttcaatcagactgcccttcccaaagaaaataactataaatgctggaaaaactacaaaacagccacctgaaggcactggcgagagacaaaagca

SEQ ID NO: 1003533 - DNA, 120 bp, Artificial Sequence
  ENSG00000235026_3 (sequence is synthesized)
ggagaagagtcaacacttggaagaagggagctgcactgggtacatggggaaggaacagtgtctctgcatgagaatggccaaagaacaagatacatttccccgtggagagcaatcctagag

SEQ ID NO: 1003534 - DNA, 120 bp, Artificial Sequence
  ENSG00000235026_4 (sequence is synthesized)
agagggaagcatgggtcagaataaggtgtactggccccagggtaatagcatgtatttctgttgcattggtgtttccaaaataatgcttcggttccaagtttcaggaattggttgggggag

SEQ ID NO: 1003535 - DNA, 120 bp, Artificial Sequence
  ENSG00000235026_5 (sequence is synthesized)
catggggatcatacagtgattcaggagcttccttgcaagtaagtgagtgagccaatcaaataatttatgtttaaatctttcactgtgttaaatgttgaaaaataaagcaagtgaattcca

SEQ ID NO: 1003536 - DNA, 120 bp, Artificial Sequence
  ENSG00000235026_6 (sequence is synthesized)
ccccgtggagagcaatcctagagagagggaagcatgggtcagaataaggtgtactggccccagggagcccttccttgcttttggtagacctgcaagaacaaacccattgagatggctaca

SEQ ID NO: 1003537 - DNA, 120 bp, Artificial Sequence
  ENSG00000235026_7 (sequence is synthesized)
gaatgagaagggaagctttttcatggtgtaagaagtaagaaaaattgattaggaagaactctgtgggtaaggagaaagaaaacctactaggagaccattattgcagtgaagagcatagaa

SEQ ID NO: 1003538 - DNA, 120 bp, Artificial Sequence
  ENSG00000235026_8 (sequence is synthesized)
caaggctctctggaaacttaagggaatcataatatgcctgagaaaacataaacaaaaattatcttaatgacaaataagtgcttcggaaataaacaaaggccaaaatctgttagagatggt

SEQ ID NO: 1003539 - DNA, 120 bp, Artificial Sequence
  ENSG00000235026_9 (sequence is synthesized)
aggtagacagctctcatatttccgtggattgcatcctcatgaaggattttcaacttgtctttcattttgaaattgaataaatattggaatgcattatcatccaccctccctacattcatc

SEQ ID NO: 1003540 - DNA, 120 bp, Artificial Sequence
  ENSG00000235026_10 (sequence is synthesized)
gaaaaatgaggctgcaccctgaattgaagtgatcctatctctttaagcctctttcacactggagagctacaggaagcctgagtttgaaatcatttggtccagacagaagaggagaagcaa

SEQ ID NO: 1003541 - DNA, 120 bp, Artificial Sequence
  ENSG00000235026_11 (sequence is synthesized)
ggaccgagtgtcatgaagagggaaacattgccagactgtcagaggttacctaatatcctttgatgggtttcctcctgtttccctgaatctgggatgactgtccccttgaactgctccggt

SEQ ID NO: 1003542 - DNA, 120 bp, Artificial Sequence
  ENSG00000235026_12 (sequence is synthesized)
atcttagccaatggacaatgtattgttactcccctccttatctattcgtggtttttgcacacataccatgaactcataagtgttgaaggatctcgacgtgtaaaaatatttgtaagaaca

SEQ ID NO: 1003543 - DNA, 120 bp, Artificial Sequence
  ENSG00000235026_13 (sequence is synthesized)
agttcagtgactagaaatttgctagctggtttgaaataaagagatacacataaaactatattatgaactgggatcacccaaattatcttctgcaggacattattctactagaaaatatgg

SEQ ID NO: 1003544 - DNA, 120 bp, Artificial Sequence
  ENSG00000235026_14 (sequence is synthesized)
acaaaatcataaggacaattgtcagtttgatgctgacaaaattttgtaaaattccttatattaaaaccactcttcactattagcaggagactacacatgttctaatggtctgagaaatac

SEQ ID NO: 1003545 - DNA, 120 bp, Artificial Sequence
  ENSG00000235026_15 (sequence is synthesized)
cctaagtgtctatccatggcatactcctcagaaaatcaagacatctcttttttcttccctgttccttccacttcttaaatataaataatttaaacaaattatctgcctctcacttcttta

SEQ ID NO: 1003546 - DNA, 120 bp, Artificial Sequence
  ENSG00000235026_16 (sequence is synthesized)
aaaaagaaaaaaactctcctggcagaagattctaaatgacaataggaggtcaaattagcaagcctgactgctcaagctcaaggcagatgtgagagaagctttgctactgcttatgacctt

SEQ ID NO: 1003547 - DNA, 120 bp, Artificial Sequence
  ENSG00000235026_17 (sequence is synthesized)
cctgcacatttacccttttggcatgagaatcacaaaccatgaggaaacttgcttttgatccttaagatggaagccaagaaaccttctgcaaaatggtctggaattatgtgtaaaacatgt

SEQ ID NO: 1003548 - DNA, 120 bp, Artificial Sequence
  ENSG00000235026_18 (sequence is synthesized)
aagattgaacagccagcctcagcgactcacaagaaattatctcctgggccaagttggtgatttgatatcaccatttatattcactacaagaaccaaaaaggcccgattttccatgttcag

SEQ ID NO: 1003549 - DNA, 120 bp, Artificial Sequence
  ENSG00000235026_19 (sequence is synthesized)
ttcaacctctccaggaggtaagagaatagaagttcattgtactggagagtagaaatgatttcactgagctttaaaatgttccatttaaaattatgaacagtgttttaacagatgggccat

SEQ ID NO: 1003550 - DNA, 120 bp, Artificial Sequence
  ENSG00000235026_20 (sequence is synthesized)
cactcataatgctgaggccttctctgtttttcgctgaccttgaaaatggaatgtaaaactgggtttctggataaaacagatgggtgaggtgctattataaggaaagtaataattaatata

SEQ ID NO: 1003551 - DNA, 120 bp, Artificial Sequence
  ENSG00000235026_21 (sequence is synthesized)
ttctctatattgggccagtatgcaagaaggtagatagggaattgaggcaggatgcacatattaggaaggaaggaaggttaaaaagcaatgcagaaggaagtagaaaagctattatgttct

SEQ ID NO: 1003552 - DNA, 120 bp, Artificial Sequence
  ENSG00000235026_22 (sequence is synthesized)
atttgctcatatatatatatatatatatctcaagggccccacttcagaggatctataaagaagtacaaccctaaagtatgctcctacaatatgctgtttttacgtacatgacggtgttca

SEQ ID NO: 1003553 - DNA, 120 bp, Artificial Sequence
  ENSG00000235026_23 (sequence is synthesized)
actctctatctccaacatctagcatgctgcctgctggatcagtttagtacctgcctgactgtttgagctaataggtggaagccttcttcagtgttctccagccatgactactcttcctaa

SEQ ID NO: 1003554 - DNA, 120 bp, Artificial Sequence
  ENSG00000235026_24 (sequence is synthesized)
cctgggtttgaaattaaagtgtaatttcacaaattagtgccatatgccattgcttgtgttctgttagagcagcagtgtggaacgttccctccctctgtccaggctgcacgatggcctctt

SEQ ID NO: 1003555 - DNA, 120 bp, Artificial Sequence
  ENSG00000235026_25 (sequence is synthesized)
gctgattctctcccagaaatcttctttaatctgatgtaaagccttgtcctaaaatacacttatcttgctttttcatgagcttaaaattttccattactaaaatagcaaaacgtaatataa

SEQ ID NO: 1003556 - DNA, 120 bp, Artificial Sequence
  ENSG00000235026_26 (sequence is synthesized)
tacaacgaaaccactgttttcattgtggtgtttccttccagtcatttttttttctacaaatgcacttacccctgaccctgttgatattgtaaatattttattatccattatgctattact

SEQ ID NO: 1003557 - DNA, 120 bp, Artificial Sequence
  ENSG00000235026_27 (sequence is synthesized)
ctgatctttttagatgaaggccctatttgcgtcactgtaccttcttcatactttgagctattggaggtagcatgggagaagcagagtggacaaagattttggaatcagacatacagattt

SEQ ID NO: 1003558 - DNA, 120 bp, Artificial Sequence
  ENSG00000235026_28 (sequence is synthesized)
aaattctggctttatcatgtactagacatgtaagccaggaaacatacctgacttcctcctcactcagttttcccatctaaatgtgattatagtaacacatatttcatatgattgttttga

SEQ ID NO: 1003559 - DNA, 120 bp, Artificial Sequence
  ENSG00000235026_29 (sequence is synthesized)
atatcaacattaggcagtctacgacgtgcaccatccagtcagccacttcatgcataataactatcacctccattcctcaaccccaaagaatgggtccaaatagttactcttatttgacgt

SEQ ID NO: 1003560 - DNA, 120 bp, Artificial Sequence
  ENSG00000235026_30 (sequence is synthesized)
aatgctactgacatgtaacatatagatgaaacctcctactaggaaatatttaataggtacttaaacttaggagtgaatcaattgtttcttcagaaggagttctgtgaatttgtacttaaa

SEQ ID NO: 1003561 - DNA, 120 bp, Artificial Sequence
  ENSG00000235026_31 (sequence is synthesized)
ctcaggtgatctgcccaccttggcttctcaaagtgctggtattacaaatgagcccttccttgcttttggtagacctgcaagaacaaacccattgagatggctacagaatgagaagggaag

SEQ ID NO: 1003562 - DNA, 120 bp, Artificial Sequence
  ENSG00000235026_32 (sequence is synthesized)
ttcttagatctaccttccaattgcaggctattcaactgcagcatccctaggtgtttcacaaaacctgcttttcacctctggcccacttagaaactcagttccctccctttcctgacaaag

SEQ ID NO: 1003563 - DNA, 120 bp, Artificial Sequence
  ENSG00000235026_33 (sequence is synthesized)
ttcaatttatgtaaccattgatactcagcccagaatgtccattttataactgatctttctggatggttatggttaaatttacaaccaggtgcttactatatatttctctgtctcagtagt

SEQ ID NO: 1003564 - DNA, 120 bp, Artificial Sequence
  ENSG00000235026_34 (sequence is synthesized)
atttgcctggccttttaaaatgtaaagtttttcgtatgtgtgtgtggtaggggtgggagggattatgtcttcctagagtccattgatgatttacgtgaaataacttaaaaattaaaaaaa

SEQ ID NO: 1003565 - DNA, 120 bp, Artificial Sequence
  ENSG00000235026_35 (sequence is synthesized)
tctatgaactttcctatgatttttgtctctgacaccatcttacaagaccaattctacaatagcaacatatttttcatttaggagattaaaacttttaaacatcatgtcacctgagttgct

SEQ ID NO: 1003566 - DNA, 120 bp, Artificial Sequence
  ENSG00000235026_36 (sequence is synthesized)
tttcaaagataatatgatataccataaataaaataagattattattttgcatatttccaagttccctattataattactggaaaagtaactattttaattactgtacaaatgtctttgca

SEQ ID NO: 1003567 - DNA, 120 bp, Artificial Sequence
  ENSG00000235026_37 (sequence is synthesized)
aacactttcttggaaaatagagttttctagcaagactataaatttcaatcatacttggaggaggaatgaagacttatttagttaataaatctgcatgcatcacatgtagcagtttgtttt

SEQ ID NO: 1003568 - DNA, 120 bp, Artificial Sequence
  ENSG00000235026_38 (sequence is synthesized)
cttttaccatcaacatgcaattcattttttttactgcctggaagttattgacaattttaaagacattttgcccaggtgtaagcaatcagaatttactacagactgtgaatcaaggaaata

SEQ ID NO: 1003569 - DNA, 120 bp, Artificial Sequence
  ENSG00000235026_39 (sequence is synthesized)
cacataaattaaatgtaatgcaactaagtcatggagcttaaatctgaataaacagatattgatcgagtattctgatggcatctacaagtacaattctagatgtaaaaattaataatatat

SEQ ID NO: 1003570 - DNA, 120 bp, Artificial Sequence
  ENSG00000235026_40 (sequence is synthesized)
aatgtttcaaaatgccttttaaaattgtccgttataaaattgaattaccttggtacatttactgaagtattgcctgtgtccttattaataaaaaaaattgtgttttattttcccaaatga

SEQ ID NO: 1003571 - DNA, 120 bp, Artificial Sequence
  ENSG00000235026_41 (sequence is synthesized)
aatacatagtaatcattctcactcataagagttattttctttatgagtaattatatccatgtttgtcttgtcttttaaaacaatgttgaataaaacattgagttaatataaataaatgca

SEQ ID NO: 1003572 - DNA, 120 bp, Artificial Sequence
  ENSG00000235026_42 (sequence is synthesized)
aactgtaaatgtgttctaaaagaaaaaagaactattcttatcaaatgcctgtgcaactgtttcaacacaaatgcaaatcagccctaattttattttcaaaatgccactctttaaccaata

SEQ ID NO: 1003573 - DNA, 120 bp, Artificial Sequence
  ENSG00000235026_43 (sequence is synthesized)
gaatgcacaatcaattttaaacaccaggaaggatgctttataatgctgctctagggaagagacaaaatttctcatttcttcatcagcacagttaagttgtatcaccaaataatctatgaa

SEQ ID NO: 1003574 - DNA, 120 bp, Artificial Sequence
  ENSG00000235026_44 (sequence is synthesized)
cccctgattaaccagatgccattttccaccatctgtcccagattaaaatgcagtgatgtgttcaatagggcactaaaaaaaaaattgataagcttttttcttttcttccagatagccacc

SEQ ID NO: 1003575 - DNA, 120 bp, Artificial Sequence
  ENSG00000235026_45 (sequence is synthesized)
cagacccccatgtagagaggaaatgaagcagtgcaagtatctgtgcatataacttttggaaatgcaaattagaatttaaaaactctttgtttcagctttgtaatattcatcttaatacag

SEQ ID NO: 1003576 - DNA, 120 bp, Artificial Sequence
  ENSG00000235026_46 (sequence is synthesized)
tgttatgcatccccgtgcctctttctgtcctcatatgatattgtctacttttcctccttaagctctgaacatctctgtctttatgctgatgaccttcatttctctgtgtaaagctgtctt

SEQ ID NO: 1003577 - DNA, 120 bp, Artificial Sequence
  ENSG00000235026_47 (sequence is synthesized)
agccaaatgtgacctggtgggaatactggcagcctaagtctcaaagttgaatagaactttgaattggctcttgttctaatagtctgacagcacaggtgtacctagaaggtacttggctgt

SEQ ID NO: 1003578 - DNA, 120 bp, Artificial Sequence
  ENSG00000235026_48 (sequence is synthesized)
ataacttctaaatcacaacattctctacgccctgccttctgtccgttgataggccttcatagttggagttcactcaatctcttaacaatttctcccattggggaatgatttctgccctct

SEQ ID NO: 1003579 - DNA, 120 bp, Artificial Sequence
  ENSG00000235026_49 (sequence is synthesized)
gtagcccgccagttatgaatggacagctctctccaaaccataattaatctcttcttaactagagcctggcctcctttcttgcctgctccacctgctgttagacattcctaggtatccagc

SEQ ID NO: 1003580 - DNA, 120 bp, Artificial Sequence
  ENSG00000235026_50 (sequence is synthesized)
ctaagtgcctttcatacctggcctggccaaacactcaggacaaagtgatgtgcaccacgcatttctctccctatgtcgctatcctctgcagggtggatagttgttcatcctcagtcttgc

SEQ ID NO: 1003581 - DNA, 120 bp, Artificial Sequence
  ENSG00000235026_51 (sequence is synthesized)
cacatcctgcacttttcccaccagtctgtttgtcaaggggcaacccttcctcaaggttacacccattgctgttctgataccactggttcactgccagatggctcagtcagatggatgtgc

SEQ ID NO: 1003582 - DNA, 120 bp, Artificial Sequence
  ENSG00000235026_52 (sequence is synthesized)
tctatttatttattatattagttgtaattctatcactgcctatcagaaaatgaaaaccccaaatagatgctcttcccatacaaaggtgatgctggatatgccctttgagtttattttcca

SEQ ID NO: 1003583 - DNA, 120 bp, Artificial Sequence
  ENSG00000235026_53 (sequence is synthesized)
ttagcacagatgacctcctcttcccaccaactcctctctccctcccacacacaccctcacacgtggctttcatgttaactactctgggactgccttgttaagagcaaagtcatctggact

SEQ ID NO: 1003584 - DNA, 120 bp, Artificial Sequence
  ENSG00000235026_54 (sequence is synthesized)
attcaagggaatagccacaaactctacctagtacaaaagagactgagctaactgaacttcagacctaaagggaaggagaactaatgtagtctacatcattggtaaaaggaatgtcatctt

SEQ ID NO: 1003585 - DNA, 120 bp, Artificial Sequence
  ENSG00000235026_55 (sequence is synthesized)
taggtgaaaatcctttaaaatatattttggatgggtgattttctaaaattatattgctctgtgcctccttacactagggattttaaatattatgacttgggtcaacctctgaaacatcca

SEQ ID NO: 1003586 - DNA, 120 bp, Artificial Sequence
  ENSG00000235026_56 (sequence is synthesized)
tttttgtactattcctccaaagattatttgtatacatgtaattattggctcctcaaatagataacctcagattgcttgcctctgtaaatcattatgtctgctttatggttttttttttat

SEQ ID NO: 1003587 - DNA, 120 bp, Artificial Sequence
  ENSG00000235026_57 (sequence is synthesized)
tccatccctttgcagtttttgcctttgctgattgttagaagcatttccccttttaatccctgggcaatgagacaaccatgtttgggagaacaggtcattacatagaaatacactggttct

SEQ ID NO: 1003588 - DNA, 120 bp, Artificial Sequence
  ENSG00000235026_58 (sequence is synthesized)
aactgcctgagtgtgtcttttgagaatacatatacatgagctttcaagaagaataatttttgaagtattatgactttactttgtagccacatctgaccagttgatgcgacctgtaaatac

SEQ ID NO: 1003589 - DNA, 120 bp, Artificial Sequence
  ENSG00000235026_59 (sequence is synthesized)
tatgagaataacatcaaggctagagaaacattgccatctgttactaatattttcataggacatccacatcatcacagaaacactgggacaggacacacacagcataaaccaggtagctgc

SEQ ID NO: 1003590 - DNA, 120 bp, Artificial Sequence
  ENSG00000235026_60 (sequence is synthesized)
tttttaagccatggaaatttttatatcacaaaaactatcaatatctcagggtcttagtgctcctcagaggaattatgaggaaatatttaacaaagattgagctgttcgctacagttggtt

SEQ ID NO: 1003591 - DNA, 120 bp, Artificial Sequence
  ENSG00000235026_61 (sequence is synthesized)
taagtgcaattgcaattagggagaacagcgatcacttccggcgtctaagggaagcattaataaggagtttgaactggacttgaatgatgtgagtattttgatgcatcaacaaaataagat

SEQ ID NO: 1003592 - DNA, 120 bp, Artificial Sequence
  ENSG00000235026_62 (sequence is synthesized)
attctgggctgggagggaagtcaagaggcttaacagaataaatacagacgtgaaggaggaaatggttccgagttcaggtgtgtttaagggacaatgaaaaaaatcaatatgtctggagag

SEQ ID NO: 1003593 - DNA, 120 bp, Artificial Sequence
  ENSG00000235026_63 (sequence is synthesized)
gagggttttgattgagtaaaaatcaatttgggaaggctgattataaagacccttgcattttggattaggttctatgaagattgaagtatgcattaattgcatccagaggggaacaaaaag

SEQ ID NO: 1003594 - DNA, 120 bp, Artificial Sequence
  ENSG00000235026_64 (sequence is synthesized)
ggaatatgtgtttagcattctgaacaaaccattttcttacttttttcattttattttattgtttttctgtttttaaatctaacacaagcacatggtcaaaactcataacatgaaaaagat

SEQ ID NO: 1003595 - DNA, 120 bp, Artificial Sequence
  ENSG00000235026_65 (sequence is synthesized)
aaacaaaagaaagttaaaataactgataaacgcatgaactaggtataatgagttgacatagggagtatatcctttgccactttttccgaagtgtacacatgttcacacacccatttaaaa

SEQ ID NO: 1003596 - DNA, 120 bp, Artificial Sequence
  ENSG00000235026_66 (sequence is synthesized)
aaatgtcagcttacaccatggctgaatatgacagtcacagtggctgtagactaagctactaaggggcaagtaaataaatataaatgtgtatagtaaagtagaatgcacagatgacaaaga

SEQ ID NO: 1003597 - DNA, 120 bp, Artificial Sequence
  ENSG00000235026_67 (sequence is synthesized)
tgtagtctttcacacagacaacattacaaattaaatatgtggaatgtcccttgtttccacaaagaaatattctttctttttggactacacctcttttatttgaatcatacagctattcgg

SEQ ID NO: 1003598 - DNA, 120 bp, Artificial Sequence
  ENSG00000235026_68 (sequence is synthesized)
gtccatttttaatcttacccatcttgatagaaacacagatatttacaaaatatattttcaactctaatattagggaaaaaatgataaatgccatctgactctaggtttcagtgtatggta

SEQ ID NO: 1003599 - DNA, 120 bp, Artificial Sequence
  ENSG00000235026_69 (sequence is synthesized)
ggcaaagacagaggtggggttggggctgaactggaaagccacctccctctgtgagtctaagcaccatactgcagcagtagctgctagatgaaattgggcccagagttggcagaacttcat

SEQ ID NO: 1003600 - DNA, 120 bp, Artificial Sequence
  ENSG00000235026_70 (sequence is synthesized)
gattttcaagagaatacaggaatccagaacttatataatattctctattttataacaaataagaattaatcattttaacacgaagagaatcagtattccataggtgaaacaaaacacaca

SEQ ID NO: 1003601 - DNA, 120 bp, Artificial Sequence
  ENSG00000235026_71 (sequence is synthesized)
caggactctacagtttttctctagttcttacagatgcccacaaaataaaacaaaatacaacagcaacaaactttctcattcttaacagttagggtatattactgtgcaacctctctggta

SEQ ID NO: 1003602 - DNA, 120 bp, Artificial Sequence
  ENSG00000235026_72 (sequence is synthesized)
gaaaatcttacagcccaagagtaatgggcattttcacttactagacttttccatcctttaggtgtgacctggtacaatatttacatttgtgttagcatattatgaatcttttattctaaa

SEQ ID NO: 1003603 - DNA, 120 bp, Artificial Sequence
  ENSG00000235026_73 (sequence is synthesized)
caaagttgtttggaaagtctatagaatttcaaaaaaatatgctattgaatgtatattttgtggttttaggtaggtatcttacccattggaggaatatctattccaaaatgccacttaggt

SEQ ID NO: 1003604 - DNA, 120 bp, Artificial Sequence
  ENSG00000235026_74 (sequence is synthesized)
tattttcaagaaccccctactcaatattgatgcagctctgtgcttctgtagcagtgggaacaaagctgtctgtgttgaactgtggaatcacagtaattagtacaaatgcctgtaatcagg

SEQ ID NO: 1003605 - DNA, 120 bp, Artificial Sequence
  ENSG00000235026_75 (sequence is synthesized)
gaaaggttaggttgagaaaagaggaatataaatgtctgtgacactcaaaaagaaacaagagagagagcatcggaacagcaagaacaaaaagaacagttgaacttcactgtaaaaaacaac

SEQ ID NO: 1003606 - DNA, 120 bp, Artificial Sequence
  ENSG00000235027_0 (sequence is synthesized)
gagagtaagagggtcctggagtttggggtcgcctgggcgcccgcttcccccaggattggagcctgggccaccgtcagccaccagattcctggcaccagcccagcccaatgtttctccaac

SEQ ID NO: 1003607 - DNA, 120 bp, Artificial Sequence
  ENSG00000235027_1 (sequence is synthesized)
cgcctggcttcacggagcagcagcagctgctgactcatggccccacagaagtgaccactggcagggggacactcagcaaatttccatgtgtgtgtgtgcatgtgtgcgcatgcgtgcatc

SEQ ID NO: 1003608 - DNA, 120 bp, Artificial Sequence
  ENSG00000235027_2 (sequence is synthesized)
tgcttgctcgcgcgctaggacaatcaggaactggccagtcgggaccaggcacacggcgcctggttccccccagggcccccctggcccagtcacatgcctgtgagtcttgggcttcctgtc

SEQ ID NO: 1003609 - DNA, 120 bp, Artificial Sequence
  ENSG00000235027_3 (sequence is synthesized)
acagccaggactcgggccaagcaggacagagggcaaggctcccccacagtgggccagagccccgaggctggacagtaggccctggcctcgaactgaccccatagagctgggaccaggctg

SEQ ID NO: 1003610 - DNA, 120 bp, Artificial Sequence
  ENSG00000235027_4 (sequence is synthesized)
accaagccccagcttgctaggtggcttccagagtgctccaccttggatcctgcttccccctgaaggagtagtgggcacaggaggggctgttgcgagaggaagaagatggggaggggctgg

SEQ ID NO: 1003611 - DNA, 120 bp, Artificial Sequence
  ENSG00000235027_5 (sequence is synthesized)
ggaggccacgagtcaccacaggcctcccagcaggacagcagtgaaaggctccaggtcagccggccacactcaggcaggcccaaggaccgccccctcaggcgagctggcaccaaggcccga

SEQ ID NO: 1003612 - DNA, 120 bp, Artificial Sequence
  ENSG00000235027_6 (sequence is synthesized)
ggccactcccaatcaccctcccaggccctagcaggaccaagaccctgcaatgacaggggccagtggcaggaggttccagaatggggaagaaaggagtgtggctgagccgggacgccaccg

SEQ ID NO: 1003613 - DNA, 120 bp, Artificial Sequence
  ENSG00000235027_7 (sequence is synthesized)
tggccagttcttgagcacctcgggaatgggcccctcggtcacggctggcaccgcctgggagtactttgagacggggcctttggcaatcaggtcctccacagagcccccaacctccgacat

SEQ ID NO: 1003614 - DNA, 120 bp, Artificial Sequence
  ENSG00000235027_8 (sequence is synthesized)
ccaatgctgcacatccacctggaggcccctggggaatctcagagtcgccacagccaaaaccaaactcctgcctgtcacctggaaactgctggcccagctcccccaagtcagtgaatggca

SEQ ID NO: 1003615 - DNA, 120 bp, Artificial Sequence
  ENSG00000235027_9 (sequence is synthesized)
acccattgccccccgccaggttgcacaggccacagtcctaagaagtggtcacccgccacccacctcagccccacacacccaacctgggggccagtgtgcccaaccctcctctcctcagcc

SEQ ID NO: 1003616 - DNA, 120 bp, Artificial Sequence
  ENSG00000235027_10 (sequence is synthesized)
attctggaggctccaaagcccccaagggtctcccgtcctccctctgcacctgcgctggtctcttccaggatggtggccagcatggctgctcagggtgctggcgggtacctgtcactcctg

SEQ ID NO: 1003617 - DNA, 120 bp, Artificial Sequence
  ENSG00000235027_11 (sequence is synthesized)
cccaaagtgctctgaggcagcccactgtacccagcccccatcacacctgctctccacccccagacacctgcacgaaggtggccccacctccaggctggcactggcagctctgcctggcct

SEQ ID NO: 1003618 - DNA, 120 bp, Artificial Sequence
  ENSG00000235027_12 (sequence is synthesized)
cctctggccatcagatgggccctccacaccacctccagaagccctccttgactacctgtcctcctccacatggaccctgtggctgcccagtgccctcatcccacatctgtttctgggcat

SEQ ID NO: 1003619 - DNA, 120 bp, Artificial Sequence
  ENSG00000235027_13 (sequence is synthesized)
ccgcacctctcctcactccatgcggctccacgaggtccaggactgcacctggggccttagaggcttctgtgctgccccccccaccgccctgcctcctccgacagctgcactcagggtacc

SEQ ID NO: 1003620 - DNA, 120 bp, Artificial Sequence
  ENSG00000235027_14 (sequence is synthesized)
cctccagagtcctgtcacccagcacaccgccagccagggtgcaggagggagctccagactgagatcggggtcctgagttctaaacccaggaagcgagtaagagagagaggggtccctgct

SEQ ID NO: 1003621 - DNA, 120 bp, Artificial Sequence
  ENSG00000235027_15 (sequence is synthesized)
cctcccccagggccactggccttccccttggtgtgaacccactccttgttccaaggaagctcccctgggcttttaatcacttaaataaaacctcttccctgccccagggacttgagagta

SEQ ID NO: 1003622 - DNA, 87 bp, Artificial Sequence
  ENSG00000235024_0 (sequence is synthesized)
aacaaaaaagctaaggataaggaagcgggatgtccctcctccaagtcttgctgaggctggaatgcagtggtgtgataatggctcact

SEQ ID NO: 1003623 - DNA, 120 bp, Artificial Sequence
  ENSG00000235024_1 (sequence is synthesized)
ggcatacaccaccatgcccagctaatttagagccactctcctgatgctcattagcaagccagcctctggcccctcctaggcttggtgatatcacccctcacctgtcgcagctcctgcctc

SEQ ID NO: 1003624 - DNA, 120 bp, Artificial Sequence
  ENSG00000235024_2 (sequence is synthesized)
gatcttagtttaggctttcacaaaagactggaagagcagtggcctggaagcaacatctgaaatatcaacttttttgtgaccagagacaccaagggggattggcaagaggaaaagatggag

SEQ ID NO: 1003625 - DNA, 120 bp, Artificial Sequence
  ENSG00000235024_3 (sequence is synthesized)
tcggaggctccaggctcagtccttggagctcttctctctgtatcctctttctaggtgaaattcacccatatgttgatgacattcaaatttacgtctccaacctggatctctcttttaaac

SEQ ID NO: 1003626 - DNA, 120 bp, Artificial Sequence
  ENSG00000235023_0 (sequence is synthesized)
aggtgacgggggcaaccccgcgtggtcacacgagtgacttgaggtcactcttcctccactgcatgccttgcaggaggcggtgcagagggccatggtctgacgtgggttttcacaggatcc

SEQ ID NO: 1003627 - DNA, 120 bp, Artificial Sequence
  ENSG00000235023_1 (sequence is synthesized)
tcttggatgctggaggagggtgcatggaaggggccaggcagggaggccagtgagcagcagctgcagtcagctttgcaaagtgtgatgggacttggaccacggtcaggtggacccatgagt

SEQ ID NO: 1003628 - DNA, 120 bp, Artificial Sequence
  ENSG00000235023_2 (sequence is synthesized)
tggggtccttcagagaagcagaccaatagtgaggagttggctcacatgaggacggaggctgagaagtcctgccagctaccgcctgcaagccggagccccgggaaagctggtggtgtggct

SEQ ID NO: 1003629 - DNA, 120 bp, Artificial Sequence
  ENSG00000235023_3 (sequence is synthesized)
ccagtgcaagcctgagggcagcacccgggagctgatggtggggacccagtcccagggcaggagaaggccagtgtcccagcccaagcaggcaggtgggaggaaagaggcaagttcctcctt

SEQ ID NO: 1003630 - DNA, 120 bp, Artificial Sequence
  ENSG00000235023_4 (sequence is synthesized)
cctctgccttcttgttctcttcagcccttcaaggggttgcatgatcccatgcacacagggaggcatctgctcgccacagtccaccactgcaaacgctggtctcagccagaggcacctcac

SEQ ID NO: 1003631 - DNA, 120 bp, Artificial Sequence
  ENSG00000235023_5 (sequence is synthesized)
agactcccccagaaacagcgcatccccagctattgggcatcccgggctggccaggtggacacacagacctcaccagtgcagtcatgctcgttggtcctgaacagccttggtggggaaggt

SEQ ID NO: 1003632 - DNA, 120 bp, Artificial Sequence
  ENSG00000235023_6 (sequence is synthesized)
tccagaagtggcgcctgctctgtgccccccacatcagccccagggtctcctggtatcctaaacctacatccctgctcctggcccggctgtcgggaatgcagccaatgttcgttcctcaga

SEQ ID NO: 1003633 - DNA, 120 bp, Artificial Sequence
  ENSG00000235023_7 (sequence is synthesized)
atcaagataaaaacgaagggaacctcctgcctctgccaggcaggccgcaggccaggctggggaccccgggtggggtcgaggctggggagcctgggtggggatgaggctggggaccctggg

SEQ ID NO: 1003634 - DNA, 120 bp, Artificial Sequence
  ENSG00000235023_8 (sequence is synthesized)
tagggtcgaggctggccaccctgggtggggtcgaggctggggaccctgggtggggacgaggctggagaccctggctggggtcgaggctggggaccctgggtggggttgaggctggggacc

SEQ ID NO: 1003635 - DNA, 120 bp, Artificial Sequence
  ENSG00000235023_9 (sequence is synthesized)
ttgggtggggatgaggctggggacccttggggggacgaggctggggacgctggctggggtcgaatgcctcctcagctcaggccttgggtctttggggaacgtggtgactgagttcatata

SEQ ID NO: 1003636 - DNA, 120 bp, Artificial Sequence
  ENSG00000235023_10 (sequence is synthesized)
tgcatgagcgacgtttccaactgtctggaaacttcagacagagtgtgagattctgcccgtgtgtcacagggaaggaggctggagatggaggagattctggaggtaccaagcccccgcgct

SEQ ID NO: 1003637 - DNA, 120 bp, Artificial Sequence
  ENSG00000235023_11 (sequence is synthesized)
gtatgcagagctccctctttaattcccaaaaagatcacaccaaaggagagtttcaaattagggcatcagagccaaattgaagattggaggagctgagtccggaagaagggccaagactgc

SEQ ID NO: 1003638 - DNA, 120 bp, Artificial Sequence
  ENSG00000235023_12 (sequence is synthesized)
ggagtgaggagctggttgctggttcccaggtccctggccagctcaccgtctccagcaagaaagggacaagcgaaggcacatgaggagaagagaagggtctggcctatccttgaagagtga

SEQ ID NO: 1003639 - DNA, 120 bp, Artificial Sequence
  ENSG00000235023_13 (sequence is synthesized)
tcaccttcccacgagattggaatactgggaaggaaagtccgagcaccccgggaaagtctaaagggggttcccaaaggcaaaagaaggtgtccaggcagcgtgtcctgccacggccagcag

SEQ ID NO: 1003640 - DNA, 120 bp, Artificial Sequence
  ENSG00000235023_14 (sequence is synthesized)
ctcccagcatgtgctctagccgtcctggcctggcgggtcagagccatggtcagtggcagctactgaaccattgcccgtgggcatcatctgcctgttctctcttgggtctaaccagcattt

SEQ ID NO: 1003641 - DNA, 120 bp, Artificial Sequence
  ENSG00000235023_15 (sequence is synthesized)
ctcgtgactattctgaaaagactccagtcacttcctccaccacctcttccgagctgggggtggtgcagggggttggggaaaaatcagttcatcaaacaagcaaaatgtattcagcgcctg

SEQ ID NO: 1003642 - DNA, 120 bp, Artificial Sequence
  ENSG00000235023_16 (sequence is synthesized)
cttgctgtagaccaggcactgggcagggcttgtgaaacggaattggagccctctggaccctggaaaccttatgggagagagttaaaataaatcagacaggcagaggtaaggcactttacc

SEQ ID NO: 1003643 - DNA, 120 bp, Artificial Sequence
  ENSG00000235023_17 (sequence is synthesized)
ttccgaaaggtgcaccattgaacaccaagaggaatcagcctgtcttgtacgtgtataatgaacctgccacgacgagctcttcaggataaccactgggcgggatgcaccaagaatcagaga

SEQ ID NO: 1003644 - DNA, 120 bp, Artificial Sequence
  ENSG00000235023_18 (sequence is synthesized)
aagggggtgccctttgacctgaagaggctggcattctctgggggagaccgacaagatgggatcaataaatagacgggcagatggtctgcccttgacttttgtgcaaaaggagaagacact

SEQ ID NO: 1003645 - DNA, 120 bp, Artificial Sequence
  ENSG00000235023_19 (sequence is synthesized)
ggcacaaagatctcacttccgtgtctgttgtagtagtatttgatttatataccctccacctgtttctttttatggtcttggtaattgcaaaattattactagttgtaaatatttcaaaca

SEQ ID NO: 1003646 - DNA, 81 bp, Artificial Sequence
  ENSG00000235023_20 (sequence is synthesized)
gtaattgcaaaattattactagttgtaaatatttcaaacaatgtggtagaaaaggcaaagtccctcttctagtagagaaaa

SEQ ID NO: 1003647 - DNA, 120 bp, Artificial Sequence
  ENSG00000235020_0 (sequence is synthesized)
ccatttcttcccaccttctactcccagcgaaaaatggagcccggcattaccctccccactttgcttgctaagctgcagtgcagaaggcaccactactgcgccccccagcatgctttttgg

SEQ ID NO: 1003648 - DNA, 120 bp, Artificial Sequence
  ENSG00000235020_1 (sequence is synthesized)
agaggactggagcacactgggacgttcatgtgagaatctgcatgtgcccctttctggaatttgagggaagtacatggacgcagcctgcgtcttgctcctacatttccttagacatgtctg

SEQ ID NO: 1003649 - DNA, 120 bp, Artificial Sequence
  ENSG00000235020_2 (sequence is synthesized)
cacaatgctgctgtttctgtggctccatgtgacacaatacacaggtgggaggatgaggtggacatagtagggatgcccaggcaatagcccgagcagtggatgccccatctggagagagga

SEQ ID NO: 1003650 - DNA, 120 bp, Artificial Sequence
  ENSG00000235020_3 (sequence is synthesized)
agtcagggaagaggactgccttcaggagacaaaggagatacagctatgtgtctctaagaatcctcatggatgatggccatgcgcagtggctcacgcctgtagtccccagcactttgggaa

SEQ ID NO: 1003651 - DNA, 120 bp, Artificial Sequence
  ENSG00000235020_4 (sequence is synthesized)
gtccatttcttcccaccttctactcccaggttcacattggatggaaaacatattaatcagaaatgatttggaaaatcattaatcatataatgagaaaaatgaaaagaatgaagtgtgttt

SEQ ID NO: 1003652 - DNA, 120 bp, Artificial Sequence
  ENSG00000235020_5 (sequence is synthesized)
aaaataagaattggaaaatggaaccaagatatcttaaataagaaaagtgacccagacacctccattcagcacaaagcacatcagagacgaagaccccagccatgttccccgacagcctcg

SEQ ID NO: 1003653 - DNA, 87 bp, Artificial Sequence
  ENSG00000235020_6 (sequence is synthesized)
agtgcagtggtgcagtctcagctcactatagcctcaacctcctaggctcaagttgggactacagggagaagttgaaagagggaggga

SEQ ID NO: 1003654 - DNA, 120 bp, Artificial Sequence
  ENSG00000235020_7 (sequence is synthesized)
ccatttcttcccaccttctactcccagtaatagagacagacatcggctgctgggctaagatgaatgtcccagcttctcctgcaacttggatggccacgggactagattctggtcaatggg

SEQ ID NO: 1003655 - DNA, 120 bp, Artificial Sequence
  ENSG00000235020_8 (sequence is synthesized)
cagatgtagaaatggtatgtgccaatacccaagtcatgtgtcactgctgagagctgggacagccatttataatgagaagaaagctgcacattcaggagaagagagcgacaagacagaccc

SEQ ID NO: 1003656 - DNA, 120 bp, Artificial Sequence
  ENSG00000235020_9 (sequence is synthesized)
aagtccctaggacaggggagctgccatattggcccaatagtgtttacgtttggactacaccaagaaagagacattaactcctatattggcacttttgctctgattccaattatagatgct

SEQ ID NO: 1003657 - DNA, 87 bp, Artificial Sequence
  ENSG00000235020_10 (sequence is synthesized)
tctcagctcactatagcctcaacctcctaggctcaagttgggactacaggtatgtgccaacatgcgcagctaatttttgtatttttt

SEQ ID NO: 1003658 - DNA, 120 bp, Artificial Sequence
  ENSG00000235020_11 (sequence is synthesized)
aaagtgctgggattagaggcctgagccaccatgcccggcctaaacatggattttaaaagcacctcaaagtgtttctggaatgaatgatgaattcacagatccaagcctgtggaggaggcg

SEQ ID NO: 1003659 - DNA, 120 bp, Artificial Sequence
  ENSG00000235020_12 (sequence is synthesized)
ccatttcttcccaccttctactcccaggtaagaggcatgagcaaatcacttagcttctgcctcctaggtagtttctaaaaaagccaccgttcctgcaggcatgccaaaactttgttctcc

SEQ ID NO: 1003660 - DNA, 120 bp, Artificial Sequence
  ENSG00000235020_13 (sequence is synthesized)
cctgtttgtctttttttgggggtggggggcgtaatttgagatcttcttcaagggggtttcctatttgcaaaaatctacaagaagtagcattaattttccggaagtaagtattgctaacac

SEQ ID NO: 1003661 - DNA, 120 bp, Artificial Sequence
  ENSG00000235020_14 (sequence is synthesized)
agagttaggactgtccagatcgtcagagtttcttggtgacgcttttacagtagccattctcaactcgggagattttcaaacatctgagtgtcttgcatttcgcgaccctgcagtactctg

SEQ ID NO: 1003662 - DNA, 120 bp, Artificial Sequence
  ENSG00000235020_15 (sequence is synthesized)
ccgcggctgctcgcctatgattgccttcttcacaatgcacaggctgacagcagcatcctggattcactgttacctctgtaacgttttgggcatatctgatttgctacttctccctcctcc

SEQ ID NO: 1003663 - DNA, 120 bp, Artificial Sequence
  ENSG00000235020_16 (sequence is synthesized)
cctgaccctgaaaaatgactgagtctagactcgaattcactgtggattcctaggactacagaaacatcctccaaaccgtcagatgctttgtcctgcagtaggtatttcacatgaattgta

SEQ ID NO: 1003664 - DNA, 120 bp, Artificial Sequence
  ENSG00000235020_17 (sequence is synthesized)
aggaggatcgccagagtggcctcaggacctgactcgctcaagcactgcggcgcacagttgtttggtgctcgctggcaaatgttcattttctgggttaaagcatgttaaataaacataact

SEQ ID NO: 1003665 - DNA, 120 bp, Artificial Sequence
  ENSG00000235020_18 (sequence is synthesized)
gggaaaaaataaatatctcagaatctcctatacctcagattccttgaaaactcatggtacgaaatgatcgactgtctggttggttcagcacagggaataaaaacagctgaaagaggcaac

SEQ ID NO: 1003666 - DNA, 120 bp, Artificial Sequence
  ENSG00000235020_19 (sequence is synthesized)
atgcaccagacagacacgaatagtattttcagctcccagctgcaattctacagcaatagaaacttacataggacacccgtactcgccggcgatgcaccagcccgcagcactgcatgaaga

SEQ ID NO: 1003667 - DNA, 120 bp, Artificial Sequence
  ENSG00000235020_20 (sequence is synthesized)
ctggcagtacatgcagaattactgaaacttttaaatgtgaaaatatctgttgttttattaagaagtagaaaaaaaattccagactgttgagtctaaaaataacctggtcaatagttcaac

SEQ ID NO: 1003668 - DNA, 120 bp, Artificial Sequence
  ENSG00000235020_21 (sequence is synthesized)
ttcagcaagaaattgaaagcttttgagcttgtatacttgtctgtgataactgttcatttactaaataatcaaataaagtcaacaaaaactagctgcttggctcatgtagctaaattacaa

SEQ ID NO: 1003669 - DNA, 120 bp, Artificial Sequence
  ENSG00000235020_22 (sequence is synthesized)
acctaatgaattgctaaattagctattttgttataatacgagatatcttaaaagcaaaatattgaaaagcgttaagaagaggctcaatgacaaaaatcaacaaattaaaagtaatcaaag

SEQ ID NO: 1003670 - DNA, 120 bp, Artificial Sequence
  ENSG00000235020_23 (sequence is synthesized)
gtaaatgtagataatatcgatggaagatatatgtttttaaatccaagggatttattcctggccagtcttttgaaagtatgaggattaatgtttctttactattcactttctatgttacta

SEQ ID NO: 1003671 - DNA, 120 bp, Artificial Sequence
  ENSG00000235020_24 (sequence is synthesized)
ttagttaggagtggcaagaacacagtcagagttaaacatcagatgaagtgcttccttcaagaagagaactctttcataataagaaatgaaagacctaaagaagccttctgtagcagaact

SEQ ID NO: 1003672 - DNA, 120 bp, Artificial Sequence
  ENSG00000235020_25 (sequence is synthesized)
gaaggttttttgtcagaattgactctgcttaagtgcttctggcttttctgtggctgcgattttaggaaagaagggtccgtcttctgacagacacctgcttaaatactcattagactctcc

SEQ ID NO: 1003673 - DNA, 120 bp, Artificial Sequence
  ENSG00000235020_26 (sequence is synthesized)
cttcacagtacgtctgcaactatgaagagcctagggtgcttaagttgaccaaaaactcttgctaatttcagtaaaaacaaaaaaaggaccaactgtctctatccatccattcagtcaaca

SEQ ID NO: 1003674 - DNA, 120 bp, Artificial Sequence
  ENSG00000235020_27 (sequence is synthesized)
cttcaaggagcttaaagtccagggggcaaggcaatttgaatcaaataatcacataagcatagaattacaagctaataagatctttgcatgaatgtacagaatactatgagaatgtagagg

SEQ ID NO: 1003675 - DNA, 120 bp, Artificial Sequence
  ENSG00000235020_28 (sequence is synthesized)
gggttgacatcttcgagaattagaagggtcagaaaaggtgtctctggggcactgctacctgagctgaggctcaagggtgggaaggagttcactaaaggcagggagagggaagctctacgt

SEQ ID NO: 1003676 - DNA, 120 bp, Artificial Sequence
  ENSG00000235020_29 (sequence is synthesized)
ggtagaagggagaaggcccagcttaagcagttggagaataaagtaagagagggaggagaagatgaggttagagaggcaggtgattatcaggcaagatcatgagggccacgctggggatct

SEQ ID NO: 1003677 - DNA, 120 bp, Artificial Sequence
  ENSG00000235020_30 (sequence is synthesized)
tttctctttctactaagagcagtgggatttctttcccacaagaggcatgatcagatttgtgccatttaaaatccactttggcaggacagttgaagacagattggaagacggctagagaga

SEQ ID NO: 1003678 - DNA, 120 bp, Artificial Sequence
  ENSG00000235020_31 (sequence is synthesized)
agccagggagatcagctaggaagtacttttacccaagcaaaagatgatgctctcatgctaaggagctgaagatgggagataaggaaaatgaatgaatctattagatattggggaattcaa

SEQ ID NO: 1003679 - DNA, 120 bp, Artificial Sequence
  ENSG00000235020_32 (sequence is synthesized)
gtaggtaagtgcaaggacagaaacagaaaatgaaacccaatgtaatacatacacgttcccgtgttctctcattcctgaacatttccatgcatttctgaagttcagtcttcagtaatccga

SEQ ID NO: 1003680 - DNA, 120 bp, Artificial Sequence
  ENSG00000235020_33 (sequence is synthesized)
tctgtgataaacctttgttttcatgtcagtgccagtgtacttctatttcttggtccagtcctcatttctctccttagggtcctgaacaaaatctctatctggctgcttgcagcttccact

SEQ ID NO: 1003681 - DNA, 120 bp, Artificial Sequence
  ENSG00000235020_34 (sequence is synthesized)
gaactccacttctttagccaccaaaatgcacactctatttcattccagcttctacagaactgaaaacctttctctaattttcctttatttctcaccaaagtgtctgggttgtcttttgat

SEQ ID NO: 1003682 - DNA, 120 bp, Artificial Sequence
  ENSG00000235020_35 (sequence is synthesized)
gtacgggattttttttggtttttgttttgtttttcagaccaacaatcaatcatttttttttctcagtaatgagagtggcaacatttgtttatttaccacctagacgcagatagcaggaga

SEQ ID NO: 1003683 - DNA, 120 bp, Artificial Sequence
  ENSG00000235020_36 (sequence is synthesized)
agtaaataagataactaaaagcaatgaaattagggaaaaagtcatacttttgaaattactaataatcatggaatgcacactaaacctcaatgataaatttaaaacatattttgtgttatt

SEQ ID NO: 1003684 - DNA, 120 bp, Artificial Sequence
  ENSG00000235020_37 (sequence is synthesized)
gaggtagactacacttgctacattcaagattgtgagaacaagattgtgtaaccctaataaatcccagttctctgatagcccagtcatacttaaaggaatacaatgtagcaacaaaaactt

SEQ ID NO: 1003685 - DNA, 120 bp, Artificial Sequence
  ENSG00000235020_38 (sequence is synthesized)
gaaaatcaaatgccaatttttaattgcgtagctcaaagaatgtaacacaggatcctataatccacacagcaacacttctcaaacatcctttttcctttcctccctgattctctcataacc

SEQ ID NO: 1003686 - DNA, 120 bp, Artificial Sequence
  ENSG00000235020_39 (sequence is synthesized)
aaagccatttgaggacctatgctttctagcacaaacaaaaacatcaaaaatggactctcccacgtacagagttcctgactctctcttcctcaacctatatccctcagcttcgtatgatgt

SEQ ID NO: 1003687 - DNA, 120 bp, Artificial Sequence
  ENSG00000235020_40 (sequence is synthesized)
aaatttgcttagtttctgggcttttaaaaattttctttacatttgccctattgtacccatcattcagattctaaacaagaagagccaggaaacaaaaacctgattccttttattttgtat

SEQ ID NO: 1003688 - DNA, 120 bp, Artificial Sequence
  ENSG00000235020_41 (sequence is synthesized)
cttcagccaattgtcttcgcgcccaaacttcagatttcatgctccagagtcgggggcaatgatagaacattattacatggggatggaaggagaagcactgagtagagaaaagtaaaattc

SEQ ID NO: 1003689 - DNA, 120 bp, Artificial Sequence
  ENSG00000235020_42 (sequence is synthesized)
tctttattacagggagtggaggaagtgagaaaggagaggggaaaaggcgaggcatattcatgtcttaaattttccacactctcagagaatccatttgaccagttcatttcattcattgta

SEQ ID NO: 1003690 - DNA, 120 bp, Artificial Sequence
  ENSG00000235020_43 (sequence is synthesized)
gatctaagaaaatgcaacatgtatataagaaagaaaatggtagctttttggtggcaaaagacaagaaaggctattcatagtgtaacatttcatgaacaaatctaggatgataacaggata

SEQ ID NO: 1003691 - DNA, 120 bp, Artificial Sequence
  ENSG00000235020_44 (sequence is synthesized)
aaatatttcccagcagcaattttgatttcctctttgtttggaaagaccacgaaagagaaacataccatttctctgaagttgccataaaatactcctgatagattttagaattctatgatg

SEQ ID NO: 1003692 - DNA, 120 bp, Artificial Sequence
  ENSG00000235021_0 (sequence is synthesized)
agccagcccctcatggctgtaatcccttgctctagtaaataattctttatattgaattttctctgttcaaattactacgtgatttctctctccggactggactcagactgatacaagtat

SEQ ID NO: 1003693 - DNA, 120 bp, Artificial Sequence
  ENSG00000235021_1 (sequence is synthesized)
ggaccccctagaaggaacaacaaatggagctgccgtctatatacacacgtcgatttaggtctctgtctctggcaactgaaaagagacccaacaaaacatcttacagagcaccagggccaa

SEQ ID NO: 1003694 - DNA, 120 bp, Artificial Sequence
  ENSG00000235021_2 (sequence is synthesized)
tgtgtagccagaaagcagaaacagaaacatatccaagccaggcggaggaaaaactttgaggcctgtttatccaggttcaagacaatttctatttaaaaaaaaaaaaaagaaaaaaagaga

SEQ ID NO: 1003695 - DNA, 120 bp, Artificial Sequence
  ENSG00000235021_3 (sequence is synthesized)
gaataagttcagcttctcctgagtgtcagagctaagatctaacgcctctgctggtttccatgacaaccaccagcagctacaatcatgccgaaccaagaaccagaggattcagtaacttta

SEQ ID NO: 1003696 - DNA, 120 bp, Artificial Sequence
  ENSG00000235029_0 (sequence is synthesized)
acccgaagctactgaatcggcgctctgggcaccttagatgaacccgtgcgcccgccgtctgaaccgtcgaggcgcagcgctagatgcctcagaccgcccgtgggtcacaagtgcaaagga

SEQ ID NO: 1003697 - DNA, 120 bp, Artificial Sequence
  ENSG00000235029_1 (sequence is synthesized)
cctgttaaacagggcccatcgcaggaggcttcctctccacaggagccggctttggtagcagtggattgacccagaggcaagaggagaactgaggccagtcgggggccaggaagggaggtt

SEQ ID NO: 1003698 - DNA, 120 bp, Artificial Sequence
  ENSG00000235029_2 (sequence is synthesized)
ccgggaagcccaggagttgaaggctgcagtgagcgagactgcacccctgcactgtaccctgggtgacacagcaagaccccatctctcaataaataaaaaataataaaataataaaataaa

SEQ ID NO: 1003699 - DNA, 120 bp, Artificial Sequence
  ENSG00000261469_0 (sequence is synthesized)
gcgcctgattcgcttaccgcttccgggggaggagacgcatgggccagtgcccgggtgggcggtccggagatggacagccgcgcaccaaggcccgcctccacctgtagggaaagtaaagtg

SEQ ID NO: 1003700 - DNA, 120 bp, Artificial Sequence
  ENSG00000261469_1 (sequence is synthesized)
ctactcgctcgaacccgccgggcgaaggaagcacttcccatgctctccctgtcgccgtgtccgggcgcgagtcatttccgtcccgggcgcctgtttctttagctgccaagtggagctacg

SEQ ID NO: 1003701 - DNA, 120 bp, Artificial Sequence
  ENSG00000261469_2 (sequence is synthesized)
tgcgcccgggtgccccgctctctccattgtccaggggccgggccgcagcaccctccttgtccgaaagcgcgtggtgcggctcccgtctcagtctcgagtcgggctaggcaaccgcgtgac

SEQ ID NO: 1003702 - DNA, 120 bp, Artificial Sequence
  ENSG00000261469_3 (sequence is synthesized)
tcagttcccgccacgctggagccccctccttcctgctggattattcagtttctcagtcacttattcagtttctcagtcacctccctgggagagtttgggaaacctcgtctagggtgcagc

SEQ ID NO: 1003703 - DNA, 120 bp, Artificial Sequence
  ENSG00000261468_0 (sequence is synthesized)
aagagttaaatgaaatactggttttttaaatggttagaacagagactgatgcacataagtattcattattataattcagtttttgcattctttaaagtgaagctgtgttgttgcagtatt

SEQ ID NO: 1003704 - DNA, 120 bp, Artificial Sequence
  ENSG00000261468_1 (sequence is synthesized)
ttaaggatatattgttccccaaatttttgggtaaaattgactgttaaggaagatgagtcatgtttaaactgtaattgtgagtagaccaccctttatccttgaagggctttctcaaccagg

SEQ ID NO: 1003705 - DNA, 120 bp, Artificial Sequence
  ENSG00000261468_2 (sequence is synthesized)
tgaatggcatggctgtggtgggaaatacagggccctgtgagacaggaaatctagggggttgtctagctccattaccatcctcttcttttatggattcagtgtcttgttcttttgttccat

SEQ ID NO: 1003706 - DNA, 120 bp, Artificial Sequence
  ENSG00000261468_3 (sequence is synthesized)
gtgagaatcatccctgccctgcctacgttataaagctggagaaaaatgaaataagtaaaaacacatggaaaacgtactaaaatattaatgcaaggatgcaaggtataatctttgctggaa

SEQ ID NO: 1003707 - DNA, 120 bp, Artificial Sequence
  ENSG00000261468_4 (sequence is synthesized)
cattagttcctcatttattagtaacattacaggcatttgaaattatgtactttatatgggacctatattttaaatatatgctaatcatcctagaagccctacaaggtaggtgttactttt

SEQ ID NO: 1003708 - DNA, 120 bp, Artificial Sequence
  ENSG00000261468_5 (sequence is synthesized)
ttccattttaccattaaggaaattatccaggtttacacaacttgaacccaggtctctgtcagtaaaaaactgtctactcttccaaaccattttatctatccatatttatttcctccatca

SEQ ID NO: 1003709 - DNA, 120 bp, Artificial Sequence
  ENSG00000261468_6 (sequence is synthesized)
aacattagttgaatgcaatgtggtgtatcacccaaggtcggctggcatcttgaaaacaataactatgtgttactcagcatcttagcacctagcaaagagtggagaatataacagtctttc

SEQ ID NO: 1003710 - DNA, 120 bp, Artificial Sequence
  ENSG00000261468_7 (sequence is synthesized)
tgtctctggaataaaacagctggcagcaaaaaatgtctgacttttgcagagaaactcctaatatgagtttgactgctgtcccacatctacctatgtggtcgtagtgctgtagtcactgtt

SEQ ID NO: 1003711 - DNA, 120 bp, Artificial Sequence
  ENSG00000261468_8 (sequence is synthesized)
gttaccctaagaggacagccttgttcctccaggtctcttacaactctcttttaaggagctcgtattagatccctagagctgctgtaatgcattgcccaaatcttgtgacttaaaccaaca

SEQ ID NO: 1003712 - DNA, 120 bp, Artificial Sequence
  ENSG00000261468_9 (sequence is synthesized)
gaaatttattatctcatagttctggaggctagaagcctgaaatgaaggtgtctgcaggcttcactctctctgaaatttttatgagaacatttttcatgtgatttagagcccacctgggta

SEQ ID NO: 1003713 - DNA, 120 bp, Artificial Sequence
  ENSG00000261468_10 (sequence is synthesized)
atccaggatgatatcatctcaagattcctaacttaattacacctgtaaaatccatttttccaaataaggtcatattcacaagttctgaagactaaggcatggacagatctcattggaaac

SEQ ID NO: 1003714 - DNA, 120 bp, Artificial Sequence
  ENSG00000261468_11 (sequence is synthesized)
catcattcaacccactgcaaagctttagccaattcccagctatgaattcttccaagatgaaaggataccaagctcaagactctcccttgttcatttgaggccttcccaaagatgactgac

SEQ ID NO: 1003715 - DNA, 120 bp, Artificial Sequence
  ENSG00000261468_12 (sequence is synthesized)
attttcacaaattttatttggtttcatttcctatcttaacgaaaacaatgataatttcctatcttaatgaaaaaaatgataatgtttatactgtatgataattaaaacatcatgtaaaga

SEQ ID NO: 1003716 - DNA, 120 bp, Artificial Sequence
  ENSG00000261468_13 (sequence is synthesized)
ttactctttatctaaatgtttgcacatactctttgaacatccatcatttttccagcagttatgattttttcttcccaggaatatgggaatgaagtgaaattgacaacttttcccccacgc

SEQ ID NO: 1003717 - DNA, 120 bp, Artificial Sequence
  ENSG00000261468_14 (sequence is synthesized)
attgtatcctcttttaatgccaccccctgtgtttaacagcctctgacacaatgtaggagcaatccatggtactcaaagaatattatggaatttaacaacaagtatatatatttgtcttga

SEQ ID NO: 1003718 - DNA, 120 bp, Artificial Sequence
  ENSG00000261467_0 (sequence is synthesized)
ttgcaggggcagggagctggcaccggggttggagaggccttgggcagacgcagcccctccaccatggcagggagctggcctcaggcagcaaggcactgcgggtgccccagagacacagac

SEQ ID NO: 1003719 - DNA, 120 bp, Artificial Sequence
  ENSG00000261467_1 (sequence is synthesized)
aggctgcgtcaggctgaaccccagaccagctgagccagggtggcaaatcccatgtccgctccagacagccctggggctctgaatctgcacttgggagcgtgcaattgtctcctccaagac

SEQ ID NO: 1003720 - DNA, 120 bp, Artificial Sequence
  ENSG00000261467_2 (sequence is synthesized)
tctggtggaggggatttgaaataatcccagctcagggagggtggggcttagggacagggcccagggagggtccaagggcaccacggggggtttgccacctgagcccagggatcaggcagg

SEQ ID NO: 1003721 - DNA, 120 bp, Artificial Sequence
  ENSG00000261467_3 (sequence is synthesized)
gcttggccagcgctgagcaccctaagtgcctggcacgggctgagactcaggggccggctgtgcctctcctgaagccgtccctgttggcgggcaggcgggtggggcaggctgggggctggg

SEQ ID NO: 1003722 - DNA, 120 bp, Artificial Sequence
  ENSG00000261467_4 (sequence is synthesized)
cgcggcctctcatatcttccccgttacttcatccattttgttcccactgatcccttgtttatctcactgggaaggcagccgcggtggaagacggggccaagggaaaggccagagcctggg

SEQ ID NO: 1003723 - DNA, 120 bp, Artificial Sequence
  ENSG00000261467_5 (sequence is synthesized)
tcgtctccagcctcactcgccctcctccctcacctggtccctgagctgagaaccagggcccggcctgagaacctccaaggcagcacccagaggccgggtctgcaccgtgccctgacactg

SEQ ID NO: 1003724 - DNA, 120 bp, Artificial Sequence
  ENSG00000261467_6 (sequence is synthesized)
acaggctgtgtaacaacggctgagaactaaccctctctggttttactttctgtaagtgacttgggaggttgttctgaatgacctttgagaaggatgaataattggtattaataagcctgt

SEQ ID NO: 1003725 - DNA, 120 bp, Artificial Sequence
  ENSG00000261467_7 (sequence is synthesized)
catttcataagcatctactctgtgtccagccctgtgcaggtatctggagtctcctctctcacccaatgctcccaagtccccaagaattaccattatcccattttacttatttattattta

SEQ ID NO: 1003726 - DNA, 75 bp, Artificial Sequence
  ENSG00000261467_8 (sequence is synthesized)
tgggattgaagacggtgttttgccatgttgggcaggctggtgttgaacttctgacctcaggtgatctacccgcct

SEQ ID NO: 1003727 - DNA, 90 bp, Artificial Sequence
  ENSG00000261467_9 (sequence is synthesized)
attacaggcatgagccaccgcagccggccccattttacttatttatttttagaggcagggtcttgctctatcacccaagctggagtatga

SEQ ID NO: 1003728 - DNA, 89 bp, Artificial Sequence
  ENSG00000261467_10 (sequence is synthesized)
aagtaatcaatacaccaccatgcccggctaatttttaatttttttttttagagatggggtctggctatgttgcccaggctgatctcaaa

SEQ ID NO: 1003729 - DNA, 86 bp, Artificial Sequence
  ENSG00000261467_11 (sequence is synthesized)
tggcctccagccaacctccgtgagccaccatgcccagtcccactatcccatcttagagatgagactgagagaatggctgggagtcc

SEQ ID NO: 1003730 - DNA, 120 bp, Artificial Sequence
  ENSG00000261467_12 (sequence is synthesized)
cccatcttagagatgagactgagagaatggctgggagtccctccagctggcatcttgcaacttgaattgttgaggtttcaggtgcaggcgtgtccccagatggttgtggagatggagatc

SEQ ID NO: 1003731 - DNA, 120 bp, Artificial Sequence
  ENSG00000261467_13 (sequence is synthesized)
aggttggagaagaccctctggggagtggggattggcataggaagtgagggctgctgtgggcaggggatgaaagcccagtagggccagtgtgggagaacgtcacttaggaagctaccagaa

SEQ ID NO: 1003732 - DNA, 120 bp, Artificial Sequence
  ENSG00000261467_14 (sequence is synthesized)
agatatgccagactcctaccaggccttgtcactgcagagcccctggcaagagagggacgtttgtggaccccggaggcttgcgtgggatggaccttaatctccactgtcttccctggaaga

SEQ ID NO: 1003733 - DNA, 120 bp, Artificial Sequence
  ENSG00000261467_15 (sequence is synthesized)
tcacccctttaaaggcagggcagtgggagcaggtgccgtggcttaaagcaggcctgtctgaatccttagcagcgatctccaagggcaccataaccttgcaagaaagaggctgccaggcct

SEQ ID NO: 1003734 - DNA, 120 bp, Artificial Sequence
  ENSG00000261467_16 (sequence is synthesized)
acatcagatgcagaaaccagggcgcagagtaggtgagtaatctgcttagagccacacagctatgagtagcagatccaagcgcaacctgcctgtcccgggagcttgcgggctagctagacc

SEQ ID NO: 1003735 - DNA, 120 bp, Artificial Sequence
  ENSG00000261467_17 (sequence is synthesized)
tttgctgcctagaagaccctcttgtgagtcccctccctgggctcagcaacccaggaggccatgacttctgcctgggtcctagggctggagcctcggtgtccccttgtcttctttcctttt

SEQ ID NO: 1003736 - DNA, 120 bp, Artificial Sequence
  ENSG00000261467_18 (sequence is synthesized)
gcgacttggttttccagtctgtgaaatggggtgggtgcgtccaactccaagccgcctgtctctgccctgggtcctggagcctggaggaggaatgaggtcatgtttgtctaggggctagag

SEQ ID NO: 1003737 - DNA, 120 bp, Artificial Sequence
  ENSG00000261467_19 (sequence is synthesized)
catcttggacggagaaacctcggcaaagacaaaggcccattgtcccccttccccggccttctgccagctccctccccagtcaccagacaaggccagccctgcccacagcccccagaggct

SEQ ID NO: 1003738 - DNA, 120 bp, Artificial Sequence
  ENSG00000261467_20 (sequence is synthesized)
gccacgcaccagtatggggtgactcagtgccccctcccttcccattggttgacgatgcctggaatcccaccatcagagctttgtaaggttgctgtgggatgggggagtgggggaggcaga

SEQ ID NO: 1003739 - DNA, 120 bp, Artificial Sequence
  ENSG00000261467_21 (sequence is synthesized)
aaaagacaagaaggtggtgagggcctctggcttgcggatttcaaaattagacctttatgatgggcttgggtgggagatcaggcaataataaataataaaaacaacaaatttcacacttgc

SEQ ID NO: 1003740 - DNA, 120 bp, Artificial Sequence
  ENSG00000261466_0 (sequence is synthesized)
agtaggcggcacccgcggggagacagatgtccgcacagcccgggaggctcaggtgctacctttccctggtggggtttgtgaggagtgagctcttcgttcccggaggcgagcaagtctgtc

SEQ ID NO: 1003741 - DNA, 120 bp, Artificial Sequence
  ENSG00000261466_1 (sequence is synthesized)
aggagtgagctcttcgttcccggaggcgagcaagtctgtcggtggctcatcacagagcgctgttttggaaagcgttccacccacctcagcttcctgctgtgtttgggccactagtcaggg

SEQ ID NO: 1003742 - DNA, 84 bp, Artificial Sequence
  ENSG00000261466_2 (sequence is synthesized)
tggtggcggtgacagagactgcagcacgaccagagtggcttttctggctttgcccacccagctgctccatgccaggaggaggag

SEQ ID NO: 1003743 - DNA, 78 bp, Artificial Sequence
  ENSG00000261466_3 (sequence is synthesized)
gacttgcctcactgcgggtgggtggcagcgacagagactgcagtgcgccagagcggtaggagagcggccgcgctagga

SEQ ID NO: 1003744 - DNA, 120 bp, Artificial Sequence
  ENSG00000261465_0 (sequence is synthesized)
ggttgccagggagatgaaaatgctaaattgctgtttagaaagatcaggacaaggttatgatttctcacccaagttcctggggaaaaggatcatgagggaattacttattaacaaggcacg

SEQ ID NO: 1003745 - DNA, 120 bp, Artificial Sequence
  ENSG00000261465_1 (sequence is synthesized)
gtatttcctgctttacctacgtggaaggagatttttttttttatttgtatcctacatctactttaaaatagaaaaagcaaagaggaactttacaaactattacagttttccatcatcact

SEQ ID NO: 1003746 - DNA, 120 bp, Artificial Sequence
  ENSG00000261465_2 (sequence is synthesized)
tgactgctgacaagaagcctctttgaattccagtatacacgatcacattttaaaaccttcaagacgccgtttaatcaggagttgtaaggcacatttgttagagagagctgcactttaaaa

SEQ ID NO: 1003747 - DNA, 120 bp, Artificial Sequence
  ENSG00000261465_3 (sequence is synthesized)
gttatacagacatcacctgaagttattaaagttatcaaaacatattaaaaaccttcaagtaagaggctactccccaggaaacgtgtggagccagtgaacggaagaaaaacaatggaagga

SEQ ID NO: 1003748 - DNA, 120 bp, Artificial Sequence
  ENSG00000261465_4 (sequence is synthesized)
tgttcttctgttaaaaggttgacatctatcaattttgggtaagcttacaatgaggtatttattgcatatggtttttaccataacggaaatcttaagagatattctacattttttttttag

SEQ ID NO: 1003749 - DNA, 120 bp, Artificial Sequence
  ENSG00000261465_5 (sequence is synthesized)
agtgttgggataacaggcgtgagccgctgcgcccagccacatgttttgtgaaataaaggcacatgcattaaaaattgtaagcacaggaaaacaaccctaaaaaatgtggacgtgtgtgtt

SEQ ID NO: 1003750 - DNA, 120 bp, Artificial Sequence
  ENSG00000261465_6 (sequence is synthesized)
taagaaaccagcctccaattctgtttgttatacactcatgggctggtctgattaacaggctgagcttcagtccacaacccaaaacacttgtgcacataaactcgtggctcaaatactaaa

SEQ ID NO: 1003751 - DNA, 120 bp, Artificial Sequence
  ENSG00000261465_7 (sequence is synthesized)
gggagatgaaaatgctaaattgctgtttagaaagatcaggacaaggttatgatttctcacccaagttcctggggaaaaggatcatgagggaattacttattaacaaggaaaaagcaaaga

SEQ ID NO: 1003752 - DNA, 120 bp, Artificial Sequence
  ENSG00000261465_8 (sequence is synthesized)
agccgccgccgccccggcgcaactcattgccggaactaaaaaaagcaaccacttcgttgaacggaactggccaatagtgcccttggctcggactgatgacgcacagcagacgaaaaagca

SEQ ID NO: 1003753 - DNA, 120 bp, Artificial Sequence
  ENSG00000261465_9 (sequence is synthesized)
acttcgttgaacggaactggccaatagtgcccttggctcggactgatgacgcacagcagacgtaaggaaggctcagctcgcccgcgcaccggaaaaagcaaagaggaactttacaaacta

SEQ ID NO: 1003754 - DNA, 120 bp, Artificial Sequence
  ENSG00000261462_0 (sequence is synthesized)
ctaaaattcttattttaattattatatttaagtcttttaactgaaattgacttttgaatatgtgagatgtaggaattcaattctttttcttataaagggacagtcagttgtgtcaacacc

SEQ ID NO: 1003755 - DNA, 120 bp, Artificial Sequence
  ENSG00000261462_1 (sequence is synthesized)
aattattaaataaacatttttttccctaaattgaaataataatgtcaacatcttaaattttcatctttcctgttgtggatggactatttgtctactcctatgccagttccacatgctgga

SEQ ID NO: 1003756 - DNA, 120 bp, Artificial Sequence
  ENSG00000261462_2 (sequence is synthesized)
ttatggtggttttatgttctgatatctgagaaatcctcctcattattctgcttctagatacatgtatttttcttggctatttgtgagtatatttttcttccagctgaactttaaagtcat

SEQ ID NO: 1003757 - DNA, 120 bp, Artificial Sequence
  ENSG00000261462_3 (sequence is synthesized)
tgtatatagttctaataaacaaatccaagttagtattctaattggaattgcaagaaatatattaattgagttgagataattagcttttttttttagacagcgtctcactctgttacctag

SEQ ID NO: 1003758 - DNA, 73 bp, Artificial Sequence
  ENSG00000261462_4 (sequence is synthesized)
tagcttttttttttagacagcgtctcactctgttacctaggctcactgcaacctcagcctcctgggctgtgtg

SEQ ID NO: 1003759 - DNA, 120 bp, Artificial Sequence
  ENSG00000261462_5 (sequence is synthesized)
gttggccaggctggtcttgaactcccaggcataagcattctgcctgtctcagcctcccaaaaagctgggattactagcatgagccaccatgcctggcctataattagctttttcataatt

SEQ ID NO: 1003760 - DNA, 120 bp, Artificial Sequence
  ENSG00000261462_6 (sequence is synthesized)
tttttcataattaaatcttatccaagaatttggtgtgcctttcaatttgttcacaccttgatttttatattgaaaatgttatagttttgttcatgtcgatcctttatttattttgttaaa

SEQ ID NO: 1003761 - DNA, 120 bp, Artificial Sequence
  ENSG00000261462_7 (sequence is synthesized)
cttgctttggtcaaaagaatgcagaagtgacagtatgctatttctactcctaggctttaatatgccttgtatgtttctgcttgttctattttacctttcccatagccatgaaaatagctt

SEQ ID NO: 1003762 - DNA, 120 bp, Artificial Sequence
  ENSG00000261462_8 (sequence is synthesized)
ctcccatagttgctgcccctttaacctggatacaggccctgaaacacagtcatctacccaagcccagccaagaattatgggtgaaaatacctcatatgatgatccatgcaaaggtaccat

SEQ ID NO: 1003763 - DNA, 120 bp, Artificial Sequence
  ENSG00000261462_9 (sequence is synthesized)
ttgccgttcccaccgtgctcttatgaggaaagcagctccctgttttatctgcatgaagttgttgtgacttacgccatatacataaactataacaaaccctgccattttgatcacagcaga

SEQ ID NO: 1003764 - DNA, 120 bp, Artificial Sequence
  ENSG00000261462_10 (sequence is synthesized)
ttggaacagatgttgtagtatattataaaggcagacaatgtaagttgatcattaggaagaactaatccttcaagaaacttggagtaaaactgcccaagagggatgctctgtatcagatgc

SEQ ID NO: 1003765 - DNA, 120 bp, Artificial Sequence
  ENSG00000261462_11 (sequence is synthesized)
taacatcaacacaatccattcttcttgttaaggatgaagtcatatgtacacagaagtgagtcaccacagcacgataagcaattgcacgataagcaattgctccatttctccatgtaactt

SEQ ID NO: 1003766 - DNA, 120 bp, Artificial Sequence
  ENSG00000261462_12 (sequence is synthesized)
gctcacatgcctatcttggaagtgctgaatattctctttgggtctgacctatgaatgtcaacaaatctctactttctccacatgtcacttgactactgtttagccttttattcttcaaca

SEQ ID NO: 1003767 - DNA, 120 bp, Artificial Sequence
  ENSG00000261462_13 (sequence is synthesized)
acagtaactaatctttaaaaacatttaccatataataacaaaaatagtactgaagagttccagtattttatgtttacatgtcttattttgtttaatcctaataaactaatctataaggtg

SEQ ID NO: 1003768 - DNA, 120 bp, Artificial Sequence
  ENSG00000261460_0 (sequence is synthesized)
ggttaatgtgctaagaggatatgagattgaagctgctggcacccagctctccctgccacagggcagagaatggggccaaggcataaagagaagcagagctctgagaaatggaatgagaga

SEQ ID NO: 1003769 - DNA, 120 bp, Artificial Sequence
  ENSG00000261460_1 (sequence is synthesized)
gacctgatgacattgtttgagcccctgagatgagccttgcctgaggggttccccagccctggatctggcctgctccgccttgcgaaggccccacagcttgcttacctcagcaattcacag

SEQ ID NO: 1003770 - DNA, 120 bp, Artificial Sequence
  ENSG00000261460_2 (sequence is synthesized)
cggaagtgtgacaaacgttcataggcaaatgtcaggtcagatgtcaacttgttgctccacagcctttcggcaacagcccctgctctgggcctggaggaaaaggggcatgtgccagattgg

SEQ ID NO: 1003771 - DNA, 120 bp, Artificial Sequence
  ENSG00000261460_3 (sequence is synthesized)
gccctgtattccctgcaaaggtgctggacatccacaggctgctacctcttgtctaggcaccctggactcactcaggccaaaggaagtgatcaataccttgttatgagccacagccaggtt

SEQ ID NO: 1003772 - DNA, 120 bp, Artificial Sequence
  ENSG00000261460_4 (sequence is synthesized)
ggatggctcccagagagttctacggctcagctccaccttcattaaaatgtgggtagcaatcccactctcttcctctctcaaagatatgggaataagaataaaccttaaagccatcattaa

SEQ ID NO: 1003773 - DNA, 120 bp, Artificial Sequence
  ENSG00000261460_5 (sequence is synthesized)
ccacaatgacagtggcagcagcagaggtccttaaaatgtaaactttgcacacccaaccatacttggtaaggctgcagtgaaaacagcagagggaagccttattacaggaatcatggatgc

SEQ ID NO: 1003774 - DNA, 120 bp, Artificial Sequence
  ENSG00000261460_6 (sequence is synthesized)
ttgtgctgggtcttgagcaactcacctatgttctccaggcctcattatctctctgggaagtaaggttaacaatccctatcccacataccaaagggcagctggagggatatagacggaagt

SEQ ID NO: 1003775 - DNA, 120 bp, Artificial Sequence
  ENSG00000261460_7 (sequence is synthesized)
catgtggagagtgaatattgcacacaaatcttcagaaggctcgttgcacggcctgctctctctcaggcctgaaagaagggtactagtccagaggtggctagatgggattgggtctctaag

SEQ ID NO: 1003776 - DNA, 120 bp, Artificial Sequence
  ENSG00000261460_8 (sequence is synthesized)
ggagaactcctgctctcaggcccaaccctccacctcccccccgaaaacccttaccagagcctggggaccaggtttgtgttgtccacatattctccccacatacaagcctctccaccaatc

SEQ ID NO: 1003777 - DNA, 120 bp, Artificial Sequence
  ENSG00000261460_9 (sequence is synthesized)
accagagccttctgctcaggggtacctgagggaaaacaagcaacaacagtctggtgatggtggggtaactccagggtccctctcaaccaccttcccaatgtggccctcaccccagctaag

SEQ ID NO: 1003778 - DNA, 120 bp, Artificial Sequence
  ENSG00000261460_10 (sequence is synthesized)
ttgtttcatttactaactggaaatgtctggcccagaccttcctgcctcccatcctgtgccccaacccagcctcctttggttagcaaggagagctctctgctttcaccttcaaatgccagg

SEQ ID NO: 1003779 - DNA, 120 bp, Artificial Sequence
  ENSG00000261460_11 (sequence is synthesized)
ggttccactatgtagaaatccttccagtcagggccataggatatacggttcaggtaccagggggcagagagaagggcccggaagccggccttggtgaccagttccagctccttcatatag

SEQ ID NO: 1003780 - DNA, 120 bp, Artificial Sequence
  ENSG00000261460_12 (sequence is synthesized)
ttcactggaatatcctctcgccacacctgtatgattgtgtctggctgaatctgttataaaaggtcaaatggcagtaaggacacaaagctgaggagattcctgggccttattcatacacag

SEQ ID NO: 1003781 - DNA, 120 bp, Artificial Sequence
  ENSG00000261460_13 (sequence is synthesized)
gtggtcagattcctcagcatccactctaggcacaactacctgcaacggcatctgagaaaaatgtgcccttacatagtctaacagtacatattttaatagtaagaagcagcctccattgtc

SEQ ID NO: 1003782 - DNA, 120 bp, Artificial Sequence
  ENSG00000261460_14 (sequence is synthesized)
caaagtgagttcttcctatctaaattcccaggtggaagaagtcgatggaaaacattcttctaaggaccaaggctgggatatgccacttccatgagccagtgccctgaagcttcactctga

SEQ ID NO: 1003783 - DNA, 120 bp, Artificial Sequence
  ENSG00000261460_15 (sequence is synthesized)
gcataacaagcagagtccctctggtcccagacatcattcttacctggtccccaggacaaagtgtggccaggagtgtcaaactctgcaagcacacggataccccggagccgtgcgtattca

SEQ ID NO: 1003784 - DNA, 120 bp, Artificial Sequence
  ENSG00000261460_16 (sequence is synthesized)
atgacctccttcacatcctgtgctgtgtagatgtgggtgacagggttgtaggacccctgaaaggcacaagacacccttcaggttcacacttcctgaaagctagcagagtagaagatactc

SEQ ID NO: 1003785 - DNA, 120 bp, Artificial Sequence
  ENSG00000261460_17 (sequence is synthesized)
aaaatgcccacaagactccccagatatcagaaaacctgcccatagccctttggtgtcagggactatcttcaaaaaacttgatcataatttcccagaagttatcacatctgttttatctga

SEQ ID NO: 1003786 - DNA, 120 bp, Artificial Sequence
  ENSG00000261460_18 (sequence is synthesized)
gtatcataatgccagtgagataatcatggtaggtattaatactatgtccatttaacagaatataaatacataaaaagggaataaggccagaagagattctctcctgaaggtcacaaggca

SEQ ID NO: 1003787 - DNA, 120 bp, Artificial Sequence
  ENSG00000261460_19 (sequence is synthesized)
aattatcggcaaagttttggacttgaactcaagtctcctgactccaaatccagtgtccttcccctatattggtctaaaactggctggttaggatgagagaccctgttcttgccagcaggg

SEQ ID NO: 1003788 - DNA, 120 bp, Artificial Sequence
  ENSG00000261460_20 (sequence is synthesized)
ccacagccagattcagacattgacccataaacttggtctgagtgaaacgggaacatacctttctcatgagctctggaaaagtgaagctctcatatgggaaggaaggatcatctaccagat

SEQ ID NO: 1003789 - DNA, 120 bp, Artificial Sequence
  ENSG00000261460_21 (sequence is synthesized)
gccagtggaacacgttcaatttattgtacgccatgacatcctgtaggttaaagtgcacactgtgaacccatcacagtctctccggtttcagcctcaaacttgcgatgttgggcgagctct

SEQ ID NO: 1003790 - DNA, 120 bp, Artificial Sequence
  ENSG00000261460_22 (sequence is synthesized)
caggccgctccacacacccctacaggcttgacctgcctcagctctcaattaagtatttatggggtctatcaaaccttcccatcagggagggatggcatggagggaaggcccagcacactt

SEQ ID NO: 1003791 - DNA, 120 bp, Artificial Sequence
  ENSG00000261460_23 (sequence is synthesized)
ctacttttcccagaacacatccaaagatggatgatagaagtggtctttcctcttcttgaaataaattctggccacattaagaggagggctgcagctactgtggtagcctggaatcttcca

SEQ ID NO: 1003792 - DNA, 120 bp, Artificial Sequence
  ENSG00000261460_24 (sequence is synthesized)
aaagcctgaagatcaatacttcctcttgccatttgtgttcggttgtctgactgatgttaagcccaactgtgagacctcctgggaacttagtagcctcttaactcataatctcagaagcaa

SEQ ID NO: 1003793 - DNA, 120 bp, Artificial Sequence
  ENSG00000261460_25 (sequence is synthesized)
aggctggcagatgtgtggcctcctttggttccgtcacaggagcaaaggaaaaggcagacacaggaactggattgggaactgtcagataagactgcacattaaactcaagagagttaggaa

SEQ ID NO: 1003794 - DNA, 89 bp, Artificial Sequence
  ENSG00000251381_0 (sequence is synthesized)
ggcttaaaagtgtggcacttcctacctcactctctctctctctcctgctgcattgtgaagaaactgcttgcttccctctcaccctctgc

SEQ ID NO: 1003795 - DNA, 120 bp, Artificial Sequence
  ENSG00000251381_1 (sequence is synthesized)
atcccagcactttgggaggctgagggaggattgcttgagcctgcttccatatcgtaaactgccttggaaccaattaccactaccagggagacaaactattgcttagaggatgctgacagg

SEQ ID NO: 1003796 - DNA, 120 bp, Artificial Sequence
  ENSG00000251381_2 (sequence is synthesized)
aaactattgcttagaggatgctgacaggagcagcatgccaaaattggaagaatgttgtctctcagctggtgccacgaataggtcttcagcaggctgttccattccaccattctgtctggc

SEQ ID NO: 1003797 - DNA, 120 bp, Artificial Sequence
  ENSG00000251381_3 (sequence is synthesized)
ccactgcttcttacaagattaagatagcagatcccatgggtgtagtggactggagccgggagtgaatggctggctgcatagttactgtggaaaccaaagatctgaaggggccctgtcacc

SEQ ID NO: 1003798 - DNA, 120 bp, Artificial Sequence
  ENSG00000251381_4 (sequence is synthesized)
ctttggacaaacaccggcagactggcgtgcatgtctcccagggaccagggacattactgcgagtgatgtgccaatctgcagtagggtgatcacattctagggataaaactaaatttaaaa

SEQ ID NO: 1003799 - DNA, 120 bp, Artificial Sequence
  ENSG00000251381_5 (sequence is synthesized)
aatatttacattggcaacttgtcattttggaaagggctcaagatccagagtcagaaacctctgtaataaatgaggagccttctgtttccaagatggagaagggatggggagaacggtaat

SEQ ID NO: 1003800 - DNA, 120 bp, Artificial Sequence
  ENSG00000251381_6 (sequence is synthesized)
acccactttgcaggaatggcagagggatgacatgaacatactctgacatgaagctagtgctcaagaattggtggttgttagtaataaaactgcatttcaagcaagattgagaagaaagac

SEQ ID NO: 1003801 - DNA, 120 bp, Artificial Sequence
  ENSG00000251381_7 (sequence is synthesized)
atccagagaaaatagaaaaatgatgatatgaaacaacactaaggttctaaagggctatgttcctgtcttctttatcttggcaaccctggcaccgagcctaggccctaacaaggagcaacc

SEQ ID NO: 1003802 - DNA, 120 bp, Artificial Sequence
  ENSG00000251381_8 (sequence is synthesized)
taacaaacaagctaaacttggagttttaatttaaggatgcaaatacaatctcattcacatctttgggatctgaaggaatgggattgaagcttaatattgttagagaagcctgagattgtg

SEQ ID NO: 1003803 - DNA, 120 bp, Artificial Sequence
  ENSG00000251381_9 (sequence is synthesized)
caaagaaaaacagttcatgaaagacatggacatagaggccctatatttgaaggtctaaacacttctgaatctaagagtaagtacccaggtggagagtaatgtaagataagagcattacag

SEQ ID NO: 1003804 - DNA, 120 bp, Artificial Sequence
  ENSG00000251381_10 (sequence is synthesized)
gactgtataggagtacccctggggctactggcccagggagtctgtgaactgttatcaacataataattgctaacatttattaaatgctcactacatgccaagtgcttaaggtaaatcacc

SEQ ID NO: 1003805 - DNA, 120 bp, Artificial Sequence
  ENSG00000251381_11 (sequence is synthesized)
tttttaggttcaacgtcaaccctgtcaggtcaatcctatcattcagattttacagatgtggaaatcagggctcagagaggttaaataacttacctatggtcagccagcaaataagtggtg

SEQ ID NO: 1003806 - DNA, 120 bp, Artificial Sequence
  ENSG00000251381_12 (sequence is synthesized)
gaaccaaaatttaagcctgggtcttatgaattttgagtgatgatcctggcctcctggtattcacactgtgtggtctcctaccccattgtttgttggaccaatcgaatatggtaaaagtga

SEQ ID NO: 1003807 - DNA, 120 bp, Artificial Sequence
  ENSG00000251381_13 (sequence is synthesized)
cgacatggcacttccaaatctaggtcctgaaagacatggtggttcctgcctctctctcttgggtcactctctctggggaagatgactgccctgtcatgagaaaagtcccaattggtaggg

SEQ ID NO: 1003808 - DNA, 120 bp, Artificial Sequence
  ENSG00000251381_14 (sequence is synthesized)
aactgaggcttccagtcaacagccaagcaaggaactgaggtctcttgctaagccacattagtgagcttggaagtggatcctctagtaccagtcaagcctttggatgactgcagttcctgc

SEQ ID NO: 1003809 - DNA, 120 bp, Artificial Sequence
  ENSG00000251381_15 (sequence is synthesized)
tgttattccacttacaacctcatgggatactgtaagccagaaccaccagctaaaccactcccagattcctgactacagaaactgtgagctaataaatgtttgttgttttaagccactaaa

SEQ ID NO: 1003810 - DNA, 120 bp, Artificial Sequence
  ENSG00000251381_16 (sequence is synthesized)
gcagtgacacaatgctggctcaacctcctgggctcaagagatccttccacctcggcctcctgagtagctgggatcacagaaccttccactggccactcagcgaaaggcagctgattcagc

SEQ ID NO: 1003811 - DNA, 120 bp, Artificial Sequence
  ENSG00000251381_17 (sequence is synthesized)
acctggagaagaccggcaacagggctgagtttccttgcactgcagaggaggggagaggcaaggagtggacatgagcacggaggatccagggcactcccttgatggtgatgccctcgaagg

SEQ ID NO: 1003812 - DNA, 120 bp, Artificial Sequence
  ENSG00000251381_18 (sequence is synthesized)
gctgccccgtgcccattgtacagaatgtggattccaccccacgccatgagagctctcgcgcaggcccagaccactttataagccatatttcccaccaattcctgtttctggatctgtcag

SEQ ID NO: 1003813 - DNA, 120 bp, Artificial Sequence
  ENSG00000251381_19 (sequence is synthesized)
cctgaacgccctttgcccacatcatcccagctctccttctcctcctgccttctgtcttctcttcctctcatttcttgtcacccaggctggagtccagtggcgtgatcacggctcactaca

SEQ ID NO: 1003814 - DNA, 80 bp, Artificial Sequence
  ENSG00000251381_20 (sequence is synthesized)
accttgccagctaatttttaaaactgtttttagggatggggtcatcttcctgtgttgcccaggcttgtctcaaactcctg

SEQ ID NO: 1003815 - DNA, 72 bp, Artificial Sequence
  ENSG00000251381_21 (sequence is synthesized)
tgatcctctccagccccttttctcttttcttacccttctttcctattttcttttccattttctttccctccc

SEQ ID NO: 1003816 - DNA, 120 bp, Artificial Sequence
  ENSG00000251381_22 (sequence is synthesized)
cccttctttcctattttcttttccattttctttccctcccttcttctttctttcctaactattaaggagtagattgaattcaaggtctttatgtgtgtcagtttttgttttccaacaaat

SEQ ID NO: 1003817 - DNA, 120 bp, Artificial Sequence
  ENSG00000251381_23 (sequence is synthesized)
atttcttaaaaaccaaccattgaaacgtaatggtaaccactggcccctgtctccacctccacacctaagaagccccaaatccagatgtgtccattaaaatcagtccagatcttctttacc

SEQ ID NO: 1003818 - DNA, 120 bp, Artificial Sequence
  ENSG00000251381_24 (sequence is synthesized)
gagaaagtttaagctctcctcactatgagttttcaagtataaaagactttttcttccacgattttgagaacaactgaggactcttgtgaccaggacaacagggaagcttgcagcaagata

SEQ ID NO: 1003819 - DNA, 120 bp, Artificial Sequence
  ENSG00000251381_25 (sequence is synthesized)
gctccaggttggattcatgcttcgcaccccaagggctgccagccagagaggaggagaagcaatcactcctgcagtttctgaacactacacagacgccaggtagcttcttcaggagaacag

SEQ ID NO: 1003820 - DNA, 120 bp, Artificial Sequence
  ENSG00000251381_26 (sequence is synthesized)
ccctctgaggaggcaggaagaggaggcttatctttcagcagccggagctgctgagatctctgggcagattaagctctctctaatggatgggctccagcctggcacattcagtggagaggg

SEQ ID NO: 1003821 - DNA, 120 bp, Artificial Sequence
  ENSG00000251381_27 (sequence is synthesized)
atccactcatccatcatcaacataatatggtcctccctgcacttcacagtgtcctcttgctattgaaaaggcttttttgccttctcaagtttctttgtcaacagtctacaggaagaagct

SEQ ID NO: 1003822 - DNA, 120 bp, Artificial Sequence
  ENSG00000251381_28 (sequence is synthesized)
ctctgcctttgtttccaaaggttacctgtgggaaaacttctttttctatgctgaaattaatagggaggcaaagatgagtccactgataagcagagccttaaaactcacatagagaaacaa

SEQ ID NO: 1003823 - DNA, 120 bp, Artificial Sequence
  ENSG00000251381_29 (sequence is synthesized)
ctttgctggagtgtgtgtgagtgaaccactaaggaatcagatagtgtgatggcagttatcattgcaggttaagacatttctacaaatatttcgacatctccatatactcactcctttccc

SEQ ID NO: 1003824 - DNA, 120 bp, Artificial Sequence
  ENSG00000251381_30 (sequence is synthesized)
ccctgagtggagagactcagctaccaagagaggaagctcaaaaaaaacagaagcttcaaacaaacaaccaaccaaaaaaaaaaaaaaactgtgggttcatcagaggtggtagggaagaca

SEQ ID NO: 1003825 - DNA, 120 bp, Artificial Sequence
  ENSG00000251381_31 (sequence is synthesized)
aagagcgaaactccatctaaaaaaaacaaacaagcaaacaaacaaaaaacacgggaggagcaataaaaaggaatccatgctttgatttttttttttagtgagaggaagggaaggctgctg

SEQ ID NO: 1003826 - DNA, 120 bp, Artificial Sequence
  ENSG00000251381_32 (sequence is synthesized)
gaagggaaggctgctgcctctcacttctccctgttttgttgttcttttaagtagcatgtgtcactctgtatatatcctgtccatgtgttttcttttattattatttgtccacttgcctag

SEQ ID NO: 1003827 - DNA, 120 bp, Artificial Sequence
  ENSG00000251381_33 (sequence is synthesized)
aatgaaaactccatgggagcatggctatagtgtcttgttcactcctgcctctccagggcctgaaacagaagtaggtagacagagcctgaaacaaaagtaggcagtccataaactttgctg

SEQ ID NO: 1003828 - DNA, 120 bp, Artificial Sequence
  ENSG00000251381_34 (sequence is synthesized)
aaggaatgagtgaatgaatgaagaccccaaggatggacctcaggaaggtgagcctgggcaaaggttttcagtcctagtccatcatgaccacatagctggaatacacttatttcactttgt

SEQ ID NO: 1003829 - DNA, 120 bp, Artificial Sequence
  ENSG00000251381_35 (sequence is synthesized)
ccattccaccattctgtctggcccactgcttcttacaagattaagatagcagatcccatgggtgtagctgtagaccaagacctggaattaacacatcagaagattctatgaggaaaccca

SEQ ID NO: 1003830 - DNA, 120 bp, Artificial Sequence
  ENSG00000251381_36 (sequence is synthesized)
acctgcaacaacaaaaaagcatctaaatactgcaaaaaaaaaaaaaaaaaagagggagagaggcatcttaatatttgtccttaacacatcataccagacttctgcttccaggaatgactg

SEQ ID NO: 1003831 - DNA, 120 bp, Artificial Sequence
  ENSG00000251381_37 (sequence is synthesized)
gatgtggtttttctaggtggacataatacaaaatgcagctacctgaaaacaatggaaagtggacagagcaggcagattctggtgggaagtccacgcaataaagaaaagatgttacaggaa

SEQ ID NO: 1003832 - DNA, 120 bp, Artificial Sequence
  ENSG00000251381_38 (sequence is synthesized)
accaattaccactaccagggagacaaactattgcttagaggatgctgacaggagcagcatgccaaaattggaagaactggtgccacgaataggtcttcagcaggctgttccattccacca

SEQ ID NO: 1003833 - DNA, 88 bp, Artificial Sequence
  ENSG00000251381_39 (sequence is synthesized)
tgaggtaaggagttcgagaccagcctgggcaatacagtgaaacctcatctctataaaaacttttttggtcccagctacatgggaggct

SEQ ID NO: 1003834 - DNA, 120 bp, Artificial Sequence
  ENSG00000251381_40 (sequence is synthesized)
gtggtcccagctacatgggaggctgagccaagaggatctcttgaggccaggaggttgaggctgtagtgaactatgttcataccactgcactctagcctgggtaacagagtgacaccatct

SEQ ID NO: 1003835 - DNA, 85 bp, Artificial Sequence
  ENSG00000251381_41 (sequence is synthesized)
gttagttatgatacatatggagagagagggggagagagataattgattattggattctctttgttttagaattttatttatttat

SEQ ID NO: 1003836 - DNA, 68 bp, Artificial Sequence
  ENSG00000251381_42 (sequence is synthesized)
ggtcttgaactcctgatctctagtgatctcgaccagttttagaattttaaatgtagttataaataaaa

SEQ ID NO: 1003837 - DNA, 120 bp, Artificial Sequence
  ENSG00000266208_0 (sequence is synthesized)
catttgtttccttttacttttttaatgtggctaatgaaaaacttgaaactacatacatggctcatatgctatttccatcggatgatgctgatcttgaacatcttctgacacacagtaggt

SEQ ID NO: 1003838 - DNA, 120 bp, Artificial Sequence
  ENSG00000266208_1 (sequence is synthesized)
accctacaaatatttgttgaatgaatacatctggaaaacagcggcacagccccatctgggtttgtgtggaggggtctgggttgtggacacagaactgtcatcagagagatggtgcccacc

SEQ ID NO: 1003839 - DNA, 120 bp, Artificial Sequence
  ENSG00000266208_2 (sequence is synthesized)
atagcatggatagtgttcgggcatggcagtggtgtaggcctggggacaccttcagtttctcatccaacacatatttactgagcacatactacgtgccatggaaggggagagagcaatgcc

SEQ ID NO: 1003840 - DNA, 120 bp, Artificial Sequence
  ENSG00000266208_3 (sequence is synthesized)
atcctgcaggagaagtgctttccctacggaagcgaggggcatccagctctgtcttggggtgggggctaccaggggagccctctccttgaaggtgtctgttttcttcccaagtgacaacaa

SEQ ID NO: 1003841 - DNA, 120 bp, Artificial Sequence
  ENSG00000266208_4 (sequence is synthesized)
taggtggcggcggcggcggcgggagcagcttctgcgcctcttcgtgtgcacggttgcagcggttgtcacgctccccggcgcgcgggcggcccttccagagcaggtggcccagctcggcta

SEQ ID NO: 1003842 - DNA, 120 bp, Artificial Sequence
  ENSG00000266208_5 (sequence is synthesized)
cgctgagcagcgccgacagcagccccaccgcgaaatagaagagcacgaagacggtcttctcggtgggccggctcacgaagcagtcgaccgtgtgcgggcagggcggaccggcgcacgcga

SEQ ID NO: 1003843 - DNA, 120 bp, Artificial Sequence
  ENSG00000266208_6 (sequence is synthesized)
gcgaagtgcggggccacgcggaagccgtagagcagcgcctggccgcccaggaaggtcagctcggccagcaggcgcagcgccacgctcagcaggtagcagcggcgcgcgcggcgggcgcgc

SEQ ID NO: 1003844 - DNA, 120 bp, Artificial Sequence
  ENSG00000266208_7 (sequence is synthesized)
cggcgcgcactgggcctcgggcagtccgggggcgcactgcgccgccgcctcagcgccgcccgcctccttgcctgcccggtgcatggagtagacgacgaacagcaccgggggcgccgagag

SEQ ID NO: 1003845 - DNA, 120 bp, Artificial Sequence
  ENSG00000266208_8 (sequence is synthesized)
ggtcgtagcaggtctggcgacagcccggctgcagcgtgttgcacacgaactcctcttgctcgtcctcgaacacggcgccgcccaccgtggccagcaccaggatgcggaagatcagcatga

SEQ ID NO: 1003846 - DNA, 120 bp, Artificial Sequence
  ENSG00000266208_9 (sequence is synthesized)
ccaccagccagaggcggcccacgagcggcgactgcagctgcacggcgtccagcagcgagcccaggaacgcccactcccccatggcgctggggacgcggggcggggagtcaggggatgggg

SEQ ID NO: 1003847 - DNA, 120 bp, Artificial Sequence
  ENSG00000266208_10 (sequence is synthesized)
caagtcagggacccctgccccttccaagcctatcggggtggggtccgttggaccttctctgacttcagggtgagtcgtgaggtaggagaggcccgggtttagcgatgagaccagtatgaa

SEQ ID NO: 1003848 - DNA, 120 bp, Artificial Sequence
  ENSG00000266208_11 (sequence is synthesized)
acggagggccacgggagggcccgaggggagcaggcgacgctcagctatgggttaccttctctttgggaccgatgggtgctggggaggatcccccatttgcattttagccgcaccccctga

SEQ ID NO: 1003849 - DNA, 120 bp, Artificial Sequence
  ENSG00000266208_12 (sequence is synthesized)
gccgtctccgttcgaccctgggatcctccagatcccagattcttaggaaggaccttggagatcagctggaccagcccctgacttgcctggtttcggaagcggaaacccagcggtgccctt

SEQ ID NO: 1003850 - DNA, 120 bp, Artificial Sequence
  ENSG00000266208_13 (sequence is synthesized)
agctgtcaaggatgctgtgggaagagtggagcctcgaacccgagacgctagacccaatttggtgcccatgggaggagtgggagtggcagaggcagcgagaccactcctttcttggcccac

SEQ ID NO: 1003851 - DNA, 120 bp, Artificial Sequence
  ENSG00000266208_14 (sequence is synthesized)
catttctctcaccatttttactgcagtgaactcctctcagggtggggggctggtacagaggcaactccgctttcataactctcacagggtcctttgtcggaggtgtccctgccctcctac

SEQ ID NO: 1003852 - DNA, 120 bp, Artificial Sequence
  ENSG00000266208_15 (sequence is synthesized)
cccagcgtggtgggagtgcgacgccaggcttctccctcctccctggcctcctgtgcctccagcctccacatctcctgagatcctccccaccccacacttacacaggtccccacacgcccc

SEQ ID NO: 1003853 - DNA, 120 bp, Artificial Sequence
  ENSG00000266208_16 (sequence is synthesized)
tggtgcccctaaaccgccacccaaccccactcaccctggggccgggactggggtgtcagagctgagccagggaccttgggaggtggctgggaccggcgcctcctgctccctctttcattt

SEQ ID NO: 1003854 - DNA, 120 bp, Artificial Sequence
  ENSG00000251387_0 (sequence is synthesized)
aaaccgagagtgccgcagatgggcgcccctgaccttcccgctgctccaagctccccactcggcctcgcgcgccctccctcctctcatagctcggcgtcctcgcccgcccccgcgcggccc

SEQ ID NO: 1003855 - DNA, 120 bp, Artificial Sequence
  ENSG00000251387_1 (sequence is synthesized)
tcccagaacagtacctgtatctgcctggtgcacctactgtgtgttgctagtcactgaagacttggggaccaagacagacaaggtgcccactcacctggagctcacagcctgcggggaggg

SEQ ID NO: 1003856 - DNA, 120 bp, Artificial Sequence
  ENSG00000251387_2 (sequence is synthesized)
gaaatgtaacagagtggctgcatgaggaggagtttcaactggagcagtcaggcataccatcccagaggaggtgacatttgtgcaaagacccaaggaatgatcaagagtcagtcatcaagc

SEQ ID NO: 1003857 - DNA, 120 bp, Artificial Sequence
  ENSG00000251387_3 (sequence is synthesized)
atccaggagacctgagctgcagacagaagaaacagcaagtgcaaaggccctgtgctgggcatgagtgtggcatgctagaggaacagcagagagaaaaggaggggacgaggaggagagatg

SEQ ID NO: 1003858 - DNA, 120 bp, Artificial Sequence
  ENSG00000251388_0 (sequence is synthesized)
gctatcattgccaactgtattcagcggatccaatgaagaattctgcatccagccctagagatgttggagacacaagctgcagatgtccagtaatttcctggatagaaattttattatctg

SEQ ID NO: 1003859 - DNA, 120 bp, Artificial Sequence
  ENSG00000251388_1 (sequence is synthesized)
caaagaatgatatcacatcacaaggatgtccaggtaatccagttccctgtgcactatattactacacatgccaaaagagttaacactacccttgagcaagaaggtgtagcactaggagcc

SEQ ID NO: 1003860 - DNA, 120 bp, Artificial Sequence
  ENSG00000251388_2 (sequence is synthesized)
tgaaggcctggccagaatgtgaccaaaggctctattcctagcttcggtaacacatgaaaaaggacattgagttcttccttcactgcagtcctgcctcaagtgagctgtgcctgtaccctg

SEQ ID NO: 1003861 - DNA, 120 bp, Artificial Sequence
  ENSG00000251388_3 (sequence is synthesized)
gaaatggaaacattagctcttcctttcctcaacacctacttcctcagcattctgcaaagccttcagctggagtgaagtcttccatgacacaagatttttctaaatcacttcctgattgaa

SEQ ID NO: 1003862 - DNA, 120 bp, Artificial Sequence
  ENSG00000251388_4 (sequence is synthesized)
aacattgcttacattgccccaggatacccattcttgaccatgaggtattatatttgaatatacactgatggatttagtttgataacatttttattacagattttacattcttgtttgtaa

SEQ ID NO: 1003863 - DNA, 120 bp, Artificial Sequence
  ENSG00000269256_0 (sequence is synthesized)
acattccaagatactctagaagaattagcatgtgcttatatgataatatgcacaaataacacaatttatgacctatcccaaccacaaagtgacaaattaacacttagcattataattacc

SEQ ID NO: 1003864 - DNA, 120 bp, Artificial Sequence
  ENSG00000269256_1 (sequence is synthesized)
caaaggatgggaactcccaatgctgggaaatttcaggtagacttgtaggaagacaatattttgaacagtggttgtggctttcaatgttctttgggtcatttgaggggttgctgatgcatt

SEQ ID NO: 1003865 - DNA, 120 bp, Artificial Sequence
  ENSG00000269256_2 (sequence is synthesized)
taaatggaagaagcagaaaaataaacactatcgtgtcaagaacaatcaatcaaccttttgaacatcttctagagtgatttgactggtgcaccagcaagttagataaactttgagtcaccc

SEQ ID NO: 1003866 - DNA, 120 bp, Artificial Sequence
  ENSG00000269256_3 (sequence is synthesized)
aactagcaatgatcacacttatgttccttgtgacattagtgctagtgcacagccaagcatacaggaagacagagcactgtctcacaacctgtggatttgatttctgagaggtcatgacaa

SEQ ID NO: 1003867 - DNA, 120 bp, Artificial Sequence
  ENSG00000228613_0 (sequence is synthesized)
cagttttcacaggcctgtgtgccgagagtgttccttaccattttttcattattattctgctaaggaggatttttagacattatgttcctagtcaagccctcacctctgcaatgaaattat

SEQ ID NO: 1003868 - DNA, 120 bp, Artificial Sequence
  ENSG00000228613_1 (sequence is synthesized)
aataccactgttgacccaaagatgagcagcaagcgctagaactgagggaaatcatggtgagatttattctgagccaagctggaggacttaggcccaggaacacagaatctgtgtccactg

SEQ ID NO: 1003869 - DNA, 120 bp, Artificial Sequence
  ENSG00000228613_2 (sequence is synthesized)
agaatgtatctcaaagcaggctccatgaggcaccgtgcacttacattttctaacaggcggacgtatgtggcccagaaggtgggagaggcaagcggtgagcagccgtgacgttcctgagat

SEQ ID NO: 1003870 - DNA, 120 bp, Artificial Sequence
  ENSG00000228613_3 (sequence is synthesized)
aggatgaacattggttcggtctggaaaggcgggacaactcgaagcaaaggcaggaagactcgaagcagacgggggcttccaggtcataggaagtcatgagcgaagagaccgtgagcctct

SEQ ID NO: 1003871 - DNA, 120 bp, Artificial Sequence
  ENSG00000228613_4 (sequence is synthesized)
cccaaaccccgcatgtgctgacatctccacgtgtgctgtgtcctgggtaggctttcttcatagaccgtgcttccgtctgtctggagtttccgcttcatccatctgtccacagggaggacg

SEQ ID NO: 1003872 - DNA, 120 bp, Artificial Sequence
  ENSG00000228613_5 (sequence is synthesized)
cacacccctgagtccgaggccacaccacgcattctgtagaaactctcactgcccagggagcacactttattaggaaagctccaggttcacagaggctctgggctctctctgggcccgacg

SEQ ID NO: 1003873 - DNA, 120 bp, Artificial Sequence
  ENSG00000228618_0 (sequence is synthesized)
tatcctgacatacagctgcagagacagacactgtattgcctcggggagaactccagccccaaaggtttctccctgcaggaagtcggagcttcagaggagtgcaaggtcacggtgtttgtt

SEQ ID NO: 1003874 - DNA, 120 bp, Artificial Sequence
  ENSG00000228618_1 (sequence is synthesized)
gattggctttgttcctctaccaaaggccacagcccctgccagggaacctcttgtccagcctgccatctgggtctattctttcctccctgtatgtttccagacctagggctggcagcagct

SEQ ID NO: 1003875 - DNA, 120 bp, Artificial Sequence
  ENSG00000228618_2 (sequence is synthesized)
cccttctattggtaccctcgaggtactgtgcctgccatgtcttcttgcttcatctaaaccctgcacattcctttgtaaaaagtggttttaattaaactcacctcaaattttccagtgtaa

SEQ ID NO: 1003876 - DNA, 120 bp, Artificial Sequence
  ENSG00000281731_0 (sequence is synthesized)
ggaagggacccagtaagggatctgttgcgccacaggggtctccagggccctcgcaggttggggtggtctgagctagtctgaaggaggacagtcagctgacttctcctttatctctctttc

SEQ ID NO: 1003877 - DNA, 120 bp, Artificial Sequence
  ENSG00000281731_1 (sequence is synthesized)
ccaggatagcaggttcccttggtgtattacagtttctgaagtgttgattcccttttcaattgattccacagatgacagtcctgacgtttaaaaaattgccagataacctttaattttttt

SEQ ID NO: 1003878 - DNA, 120 bp, Artificial Sequence
  ENSG00000281731_2 (sequence is synthesized)
ttttttaacagaacacaaacttaagccagattgcctaggattgaaccttggcctctcacttcctagacgagtggccttggctagttaaccaccttcgtgagcctcagttttgtcatctgt

SEQ ID NO: 1003879 - DNA, 120 bp, Artificial Sequence
  ENSG00000281731_3 (sequence is synthesized)
aaaatgggagtcataagtgtctacctcacagagctgtgattgaaaggataaatagcaccttgcacatagcggtgtagaagtgcttgttattgttaatattttatttaccttcacgcagtg

SEQ ID NO: 1003880 - DNA, 120 bp, Artificial Sequence
  ENSG00000281731_4 (sequence is synthesized)
gcggaagtggagtaagacatcatgttgcctcaagtttaattggaaatcgcgtgccttgtgaagaatggacactcagtagatgcttattgatgaacctgttggttgaggataactcgctaa

SEQ ID NO: 1003881 - DNA, 120 bp, Artificial Sequence
  ENSG00000281731_5 (sequence is synthesized)
ctaacttttctgagctttgttggaaaaactagacaggggtctcactatgtgatgcaggatgatctcaaactccctggcctcaagcgatcctcctgccttggtctcctaaagtgctgggat

SEQ ID NO: 1003882 - DNA, 120 bp, Artificial Sequence
  ENSG00000281731_6 (sequence is synthesized)
gcaggtcactgtatctctatgcattacagaaaatggctagttaaaaacttgtcaaggccagttgcaggcatgataccagcagtctgggaggtagagacaagaggacacatctctgctgct

SEQ ID NO: 1003883 - DNA, 120 bp, Artificial Sequence
  ENSG00000281731_7 (sequence is synthesized)
cccttctttccccatggttatgcgccaactttggtttcaccaggcctacagtgcttcccaggtttggagtgtggggaaggagaagatttaatggaagcagcttaagggaaatgctcaaac

SEQ ID NO: 1003884 - DNA, 120 bp, Artificial Sequence
  ENSG00000281731_8 (sequence is synthesized)
taaactgatactttcttcatgatctagcattgaaactttctggacttgacagatatttaaaattaactctttttctcattaacattttcatgggttcttccaagatccacattacccaac

SEQ ID NO: 1003885 - DNA, 120 bp, Artificial Sequence
  ENSG00000281731_9 (sequence is synthesized)
cttttgagcataacctaacaagattcatgctggctttaagtgagtggtccacatttggttcatgggaaaaccacatagtttgtccccagcaaacctggaagtaatatttattttactgct

SEQ ID NO: 1003886 - DNA, 120 bp, Artificial Sequence
  ENSG00000281731_10 (sequence is synthesized)
ggaattaaggaaaaccaaaaatcctattacaaaatggctcctctaaacattcacattacccctttttgtctctaccccctgaggaactaaccaactctagctctttggattttccaaatg

SEQ ID NO: 1003887 - DNA, 120 bp, Artificial Sequence
  ENSG00000281731_11 (sequence is synthesized)
agaggtcaacacatcgatgtctccaagaccttaagttcttctagtggtctctttaagcttcctcccttgaattatggtgaaaagggactgcctgctaccccctcctcttgaggagagggg

SEQ ID NO: 1003888 - DNA, 120 bp, Artificial Sequence
  ENSG00000281731_12 (sequence is synthesized)
tggtatcacagcctaacaataatttccaaaaattttctcctccagctctaatgcttaaccagtttagactttcaaagtggataatgtaatttaaagccttacagctagttatgctctact

SEQ ID NO: 1003889 - DNA, 120 bp, Artificial Sequence
  ENSG00000281731_13 (sequence is synthesized)
tcttctataagtcctgcaaccaggtggtctcaatcctcacttgcgaatactgcatttactcaccttgtgccctagccaaaacttccacaacaaattctgtggtgcatttaagtgaaagat

SEQ ID NO: 1003890 - DNA, 120 bp, Artificial Sequence
  ENSG00000281731_14 (sequence is synthesized)
ggtgcatttaagtgaaagatgttatttgattgatagagagatagatagatagatacagatatagatatagatatgtattagaaccatgtcaaatggttaacttttttaaaaaggtaaatt

SEQ ID NO: 1003891 - DNA, 120 bp, Artificial Sequence
  ENSG00000281731_15 (sequence is synthesized)
agattctcatacactcgtaagaaataacacagaaagatcccatgtagcctttatccagtttccccagtgataatatcttgcaaaactatagtccaatatcacaaccaagatactggcatt

SEQ ID NO: 1003892 - DNA, 120 bp, Artificial Sequence
  ENSG00000281731_16 (sequence is synthesized)
gatagatcacttccatcaccacaaacatccctcatgttgcccttttatagccacactcatttccctcctgctgccaccctctcctttacccataaccacttatctgttctctatttttgt

SEQ ID NO: 1003893 - DNA, 120 bp, Artificial Sequence
  ENSG00000281731_17 (sequence is synthesized)
aattttatcatttcaagaatactgtagaaatggaataatacagtatgtattttagggcttatcttttctacactcggcatgattctctggagattcatccaggttgttgcatgtatcaat

SEQ ID NO: 1003894 - DNA, 120 bp, Artificial Sequence
  ENSG00000281731_18 (sequence is synthesized)
agttcattccttttttactgctgaacagtattccattgtatgtatgtaccatagtttaactatttgctcaatgaaagacatatattaatagtttccagtttttgctgttatgaataaagc

SEQ ID NO: 1003895 - DNA, 120 bp, Artificial Sequence
  ENSG00000281731_19 (sequence is synthesized)
ttgtcaagattatgaatgagtgcatccaaaagtaatcactggaattgctgttcattgtgggcttcccagcattctcctctgggcatttatatcaaataacttatgagtgatgcagaatta

SEQ ID NO: 1003896 - DNA, 120 bp, Artificial Sequence
  ENSG00000281731_20 (sequence is synthesized)
gtattcaccggtcagacattgattatttagaattccctctgatttgaattacatctactgtttttttctcccatccatttatgggtcaaatgtacaataagccaaaacatgttgattctg

SEQ ID NO: 1003897 - DNA, 120 bp, Artificial Sequence
  ENSG00000281731_21 (sequence is synthesized)
gtgaaatttagcagagaaaaacagcttcacctagtggccacagaaactcgaaaagctttactgaaaagaaataaattggatatcttctcatcctggatatgaactggattccaacttaac

SEQ ID NO: 1003898 - DNA, 120 bp, Artificial Sequence
  ENSG00000281731_22 (sequence is synthesized)
cttccaactgttttgctgtttctctgaagtctgaaccttgtgtatggcaatacttatctcaagcaaaaatatagtttcacattggtagtactgtattcaggaaaactggaaattgtacta

SEQ ID NO: 1003899 - DNA, 120 bp, Artificial Sequence
  ENSG00000281731_23 (sequence is synthesized)
tgaaggagcacttctaccacatccgtatctaagtctacattcacagctgctggaaacagatattgtattcatactatggtgggaaacacataatgtatgtatgtatacacatgtgtgcac

SEQ ID NO: 1003900 - DNA, 120 bp, Artificial Sequence
  ENSG00000281731_24 (sequence is synthesized)
acatatatatgctagcgtataatctggaaaaattttgctaagatatataggaagagaacctttttattcagaatattgaacaagtaggactcatagtgtaaaattaagaaaaattatttt

SEQ ID NO: 1003901 - DNA, 120 bp, Artificial Sequence
  ENSG00000281731_25 (sequence is synthesized)
tcttctactgccctttctatggatttggttcttcctcttcccctgaatgtaaacttaagcagtcttctatgcattttgtgttcattcctaaatattagaaatagttatttgattatttag

SEQ ID NO: 1003902 - DNA, 120 bp, Artificial Sequence
  ENSG00000281731_26 (sequence is synthesized)
cctttagtctcagtttaataaccaaaatatgaggttaaaatttaattctggctacagaattaaggcttctctctcctgccgcacttccaggccagttgcaggcatgataccagcagtctg

SEQ ID NO: 1003903 - DNA, 120 bp, Artificial Sequence
  ENSG00000281731_27 (sequence is synthesized)
ctgcccactcttccccacaccttactgtcccttgaaatgtttcccattttactatagtatgcattttttggcttcttccctttagggaaatgagtatgtgatagtaaagcgtgtcttggt

SEQ ID NO: 1003904 - DNA, 120 bp, Artificial Sequence
  ENSG00000281731_28 (sequence is synthesized)
ttatgtcctaggagtcagaagctaagagactcctttttgtgcttgtacatttgtcttaactgaaaataacccaaggataaggaaacaaatagcttcctgaaattactcggattgcggggg

SEQ ID NO: 1003905 - DNA, 120 bp, Artificial Sequence
  ENSG00000281731_29 (sequence is synthesized)
tgaggggtgagggctggggggtggtgattctgtcttcataggatggcagcaaaggccaaagtcttatttgagttattaccattattattcaccacacttgccatcttatttcaagcctac

SEQ ID NO: 1003906 - DNA, 120 bp, Artificial Sequence
  ENSG00000281731_30 (sequence is synthesized)
gactccccagttcatgaatttattgtgctcaacaggacaactgctgaggtctagtgcatgtgtggcacaagaaaatgtttatcaagcctcatatgtcaaattaacgaactacataagaaa

SEQ ID NO: 1003907 - DNA, 120 bp, Artificial Sequence
  ENSG00000281731_31 (sequence is synthesized)
caaattaacgaactacataagaaacagaaatgaagattgttttctcatcacttgtcaatacatttttaaaggatactgcgattacatagaaataattttattttatttatttatttattt

SEQ ID NO: 1003908 - DNA, 120 bp, Artificial Sequence
  ENSG00000281731_32 (sequence is synthesized)
gtgagccaccgcacccagccatgtaaaaataattttaaaggcttgattttctggaacgtaaagtaagaagaggtatatttcacagcctgtatatcaatgtcaaatggaaatgtggagaat

SEQ ID NO: 1003909 - DNA, 120 bp, Artificial Sequence
  ENSG00000281731_33 (sequence is synthesized)
tgaattggattgaattattttgggaatttgcaccaaacatccctgttggtttcttcaaaatgacaaaaactgtaaggaaagtgagaaatgacaaggtaaatagaataagataatacaaaa

SEQ ID NO: 1003910 - DNA, 120 bp, Artificial Sequence
  ENSG00000281731_34 (sequence is synthesized)
atgttacaagtaatgtcaatacatttaactgcatacatgagaaaatatttaaaggttgattagtgtaacatgagtttgctctattaattgagaaagttcagttctgtagtagagcacaga

SEQ ID NO: 1003911 - DNA, 120 bp, Artificial Sequence
  ENSG00000281731_35 (sequence is synthesized)
atgaggtggattaatcccataggatgtgctaagcacagataatgagtaagcgagtagcttgtgagacataggtagaattcataatatactaaatatagactgatatatgtactatattat

SEQ ID NO: 1003912 - DNA, 120 bp, Artificial Sequence
  ENSG00000281731_36 (sequence is synthesized)
attactgtattattgtatttattatatttactatattaaatatatttactatattactatattatttatagatggaaagggatggaaagaaccagccacttataccagccacttatggtc

SEQ ID NO: 1003913 - DNA, 120 bp, Artificial Sequence
  ENSG00000281731_37 (sequence is synthesized)
ccacttatggtcctactctgggcccacatgtgctctacctaagaaatccttatagtacccatagctttttgcaggctgattgacaagttatggctgtggccaggcgtacttgtcactgtc

SEQ ID NO: 1003914 - DNA, 120 bp, Artificial Sequence
  ENSG00000281731_38 (sequence is synthesized)
tctctttaatagagcaagtgtgtatcattggccccaagcaccttctgtctgttgacctggctcaaacttcaatctgaccatcagtgaagaaggctgatgccgcagatggagagagacaca

SEQ ID NO: 1003915 - DNA, 120 bp, Artificial Sequence
  ENSG00000281731_39 (sequence is synthesized)
gtggtccttcccacttgaaccctatcctaagtgtgaaagttaccccatcgctttcctcttgcttcagattatgtgctttaaagtgatttaataaactatgcgattcaaacatcttaattt

SEQ ID NO: 1003916 - DNA, 120 bp, Artificial Sequence
  ENSG00000281731_40 (sequence is synthesized)
gatctttgagcctgttttgtgacttccgggatagcttgccttgtagtgtacttgtaggtcaccattgcatcaaggtaatttctcatgacaactacaaaaaacttagaaaataagaacata

SEQ ID NO: 1003917 - DNA, 120 bp, Artificial Sequence
  ENSG00000281731_41 (sequence is synthesized)
gcattgtatagcataaaggaaagcaatctgaagaggagaaagacaggtagtcacaaattgtgtcattaatagactgaaagaccaaaaaagtaaaggacaaaccaaaagacagtgtggaga

SEQ ID NO: 1003918 - DNA, 120 bp, Artificial Sequence
  ENSG00000281731_42 (sequence is synthesized)
agatttttttctaaattgatttatagaaaaaggaatgagacaagaaagaaagacatggtttgggcaatgtataaatgtcattgatcccaattctactttatttctgagaccaaaataaca

SEQ ID NO: 1003919 - DNA, 120 bp, Artificial Sequence
  ENSG00000281731_43 (sequence is synthesized)
gtttcagaggtgactaccacaaggtccaacaagtggactcatccctgaatttcttcctcctcctccttctttcttcttcctcctcctcctcttctttctttccttctttcctttcctctt

SEQ ID NO: 1003920 - DNA, 120 bp, Artificial Sequence
  ENSG00000281731_44 (sequence is synthesized)
tctctctctttctttttctttctttcttcctttctttctctctctctttctctctatttctttctttctgtgtctctctctttctttttctttttttctttccttttctttcttcttttt

SEQ ID NO: 1003921 - DNA, 90 bp, Artificial Sequence
  ENSG00000281731_45 (sequence is synthesized)
ataatctcaaactcctgggctcaagtaatcctctcacttcagcctcccaagtagctaggacaacaggtgcacatcaccacacccagctaa

SEQ ID NO: 1003922 - DNA, 74 bp, Artificial Sequence
  ENSG00000281731_46 (sequence is synthesized)
gacgttccatgcggcagacgttagacacatacaagagagttgttgaaaagtggaatttatcttcatataaacaa

SEQ ID NO: 1003923 - DNA, 120 bp, Artificial Sequence
  ENSG00000281731_47 (sequence is synthesized)
gagagttgttgaaaagtggaatttatcttcatataaacaacactgagctaaatctcaatatttcagatctctagaactatccatcaatgaaatggattgcaaatagaaagagtaatacca

SEQ ID NO: 1003924 - DNA, 120 bp, Artificial Sequence
  ENSG00000281731_48 (sequence is synthesized)
acactggactggagagcacctcactttccttacagctctaagtttctgactcagtgacctgattcagtaccatatacacaaagacccacttacacaaatgactgttcttcacactaggcc

SEQ ID NO: 1003925 - DNA, 120 bp, Artificial Sequence
  ENSG00000281731_49 (sequence is synthesized)
catggagacagggataaaattctgaatttgctcagataccttctctgctattgacatctaggcattacacaattcatctcttcatacttaacctttgaagtttgctacttctcagagaga

SEQ ID NO: 1003926 - DNA, 120 bp, Artificial Sequence
  ENSG00000281731_50 (sequence is synthesized)
ctaatgagtagtgagcaaatatcctgaagctgagaatgcttctacctcctctcaaaacaacagaatattcatcaaaacacagcagttctgcacttaactttaggccttttctaacacctc

SEQ ID NO: 1003927 - DNA, 120 bp, Artificial Sequence
  ENSG00000281731_51 (sequence is synthesized)
atttcttggcagtaactgtggccagaatagctctttccacagagaaaggaccttttgaaaggatagggtctctagatagaaaagcaaatgcctcattccagaaggtcttcaagaagaaaa

SEQ ID NO: 1003928 - DNA, 120 bp, Artificial Sequence
  ENSG00000281731_52 (sequence is synthesized)
tgttgtggtgataacaaacataactgattataatctattctgtgaaaaaagcttatgaaacagtagatgtgtgtatctagtacataagagctgaatgtcaatatatatatatatatagat

SEQ ID NO: 1003929 - DNA, 120 bp, Artificial Sequence
  ENSG00000281731_53 (sequence is synthesized)
atatacacacactcaaataaataatagttatctctaactagagaaattctagttgccttatattttcttctttttccttactatattttctacaataaacatgtgtttttaacaagaaaa

SEQ ID NO: 1003930 - DNA, 87 bp, Artificial Sequence
  ENSG00000281731_54 (sequence is synthesized)
atctctatgcattacagaaaatggctagttaaaaacttgtcaagagatggggttttactatgttggagaacccgcctcagcctccca

SEQ ID NO: 1003931 - DNA, 120 bp, Artificial Sequence
  ENSG00000281731_55 (sequence is synthesized)
tggtggccatatacgcagaggtcagggagagaaagggacctgtgggccagcacccttattgggtccagagagctatccaaacaagtttccagcagggaatttaattggtggatttaaagc

SEQ ID NO: 1003932 - DNA, 120 bp, Artificial Sequence
  ENSG00000281731_56 (sequence is synthesized)
aagcaggcatgagttccagggggccacactgactgaggtatgtatgtatgtaccatagtttaactatttgctcaatgaaagacatatattaatagtttccagtttttgctgttatgaata

SEQ ID NO: 1003933 - DNA, 120 bp, Artificial Sequence
  ENSG00000225050_0 (sequence is synthesized)
caggtccctggactttgggactcattctgctcgacttgatccctgctctgcccattgatcacatacacacgtttacacctggcagaagaggaagaggaggcatgaaggaatggcctcttc

SEQ ID NO: 1003934 - DNA, 120 bp, Artificial Sequence
  ENSG00000225050_1 (sequence is synthesized)
gaacatgcctaagacagactgctgaagaaggcggcaaatggaacagcgctgaatcagcctggtcatcccagtcaagcctccagacatgtaagcaccctcctctgatctgcagagctgcct

SEQ ID NO: 1003935 - DNA, 120 bp, Artificial Sequence
  ENSG00000225050_2 (sequence is synthesized)
ggcccaaatactgttgaccactcttgagtaagccccaccaagatcagctgagaacagtagaactgaccagatgactctaacctcatgaataaatccaagtgtttttttatttgcctctga

SEQ ID NO: 1003936 - DNA, 120 bp, Artificial Sequence
  ENSG00000281732_0 (sequence is synthesized)
ggatcccaagaggcccctgaagccccaagagctcccctgattgttccaaagcaacattcccctccatgaacaactcagggaccccctcgatccacggcgtgaggcccaccagcagaggaa

SEQ ID NO: 1003937 - DNA, 120 bp, Artificial Sequence
  ENSG00000281732_1 (sequence is synthesized)
gaggagcttccagtcctgactcccactaggcgcaggggagccgaggtgagctcccaggcccgccgcatcttcccctcctctttgggtggattaaaacagacttggacagagtctggaaaa

SEQ ID NO: 1003938 - DNA, 120 bp, Artificial Sequence
  ENSG00000281732_2 (sequence is synthesized)
acaaactcttttaaaacaagacaaagattgagtctggccaactggctattttcaatccttgctgaacggagtcaagacagtcggtagtaacagcttgtggccatccgcaatcgtcctccc

SEQ ID NO: 1003939 - DNA, 120 bp, Artificial Sequence
  ENSG00000281732_3 (sequence is synthesized)
cgcacgagagggtggagcctcctggaagtgaccagagccggtgacttcgggaatcaaccctcctgaaacagcggatggcctagtgagcctttccagaactgcagaggggcatttgagtgt

SEQ ID NO: 1003940 - DNA, 120 bp, Artificial Sequence
  ENSG00000281732_4 (sequence is synthesized)
ggaacatgagtgctgggcacctggaggaatggaggattccccaaagctcgctggatgcacatcccttgctcagcagtccacatcatccgtatctctcatcccacagccgcgggctgccca

SEQ ID NO: 1003941 - DNA, 120 bp, Artificial Sequence
  ENSG00000281732_5 (sequence is synthesized)
cagaggcagcgtgggaccccaggccacaccttgtttgcaggcctcgcctagatcgtggtaacagccagaactcaacaatttctccaagtcagcctccccgcagcccggagtggggactga

SEQ ID NO: 1003942 - DNA, 120 bp, Artificial Sequence
  ENSG00000281732_6 (sequence is synthesized)
gaccaacatgcaccctcatctgcgggcacgcagggacacagcaagtccagaatgccaagagggaaatcaaaacagcttttcctgcctgggaaacagtaacaaccacttcagagtgatcac

SEQ ID NO: 1003943 - DNA, 120 bp, Artificial Sequence
  ENSG00000281732_7 (sequence is synthesized)
cgcccggccacgcacagcctggaggagcccatgtcctattagggtatcggctttgcctccgattatctggcaaataaaccaatttaggagtccgccagggtctttctggccacctctcca

SEQ ID NO: 1003944 - DNA, 120 bp, Artificial Sequence
  ENSG00000281732_8 (sequence is synthesized)
gggccctggctgggccagtcctgtcttcatttccatacagccagcatcctcagtgagatggagaaatgtcattatttaccaagaaaccaagatctgaaaatggcaattactcggcaggtc

SEQ ID NO: 1003945 - DNA, 120 bp, Artificial Sequence
  ENSG00000281732_9 (sequence is synthesized)
agcagaaagccccaggatacttctctccccgggattcagccagcagctcggagctggaagaccgagccagtgcccaccccacaggctcccaccccctgtgaactcacatcccattggttt

SEQ ID NO: 1003946 - DNA, 120 bp, Artificial Sequence
  ENSG00000281732_10 (sequence is synthesized)
acaaaaacgactatgtatccccccgacaaatacgtattcatgcctccaaatgttaagtctattgcacactttataaaacacaaactgaaaagtcacagtaaaatgcagatataaacatga

SEQ ID NO: 1003947 - DNA, 120 bp, Artificial Sequence
  ENSG00000281732_11 (sequence is synthesized)
gaagtaggaggaggactcgccaggccatgccctcacgcactcttgatccttttaggattccccaaagctcgctggatgcacatcccttgctcagcagtccacatcatccgtatctctcat

SEQ ID NO: 1003948 - DNA, 120 bp, Artificial Sequence
  ENSG00000281732_12 (sequence is synthesized)
cccacagccgcgggctgcccagccagggacctgcccagctgtctccacaccctagagcccacctggtactgctcctggatgatttctgggtgtcggccctgtctgcccaggaatagcagg

SEQ ID NO: 1003949 - DNA, 120 bp, Artificial Sequence
  ENSG00000281732_13 (sequence is synthesized)
ggtcctgaaaacagcggcagccccagagcctccacctctcccagcaccaacacaggatgctccataacacccaacctagttccaaagagattgtgagtggcagctgggttcagagtaatc

SEQ ID NO: 1003950 - DNA, 120 bp, Artificial Sequence
  ENSG00000281732_14 (sequence is synthesized)
actgcataacccagaaacattcattaagcacctactgtgtgctgcgctatccactaggcattaggagatacaagacatagggttgctgccctcatgggtgtctcactcaggtcagggagc

SEQ ID NO: 1003951 - DNA, 120 bp, Artificial Sequence
  ENSG00000281732_15 (sequence is synthesized)
agccaaataattgcaatcacaacagtgtcctatgagtgctgtgacccggggcagatccagccccctctgaggcaggggccaccaggaacactgtgccagggaattccgagaccagaggcc

SEQ ID NO: 1003952 - DNA, 120 bp, Artificial Sequence
  ENSG00000281732_16 (sequence is synthesized)
ttacgccaaatggcagcatggcacggtctggatggcaggcttcagtgagtggcggaaagactgaggggagggcagagcaagagggagagagaatagtgtctcccacaaatacagtccact

SEQ ID NO: 1003953 - DNA, 120 bp, Artificial Sequence
  ENSG00000281732_17 (sequence is synthesized)
ttctccaaacctgaagactcgcttagaacctcatgatccgggaatccatctggagatggtgaaagtcatggttcccctgagagtccttccgcctgttgactgagccactgggggctggct

SEQ ID NO: 1003954 - DNA, 120 bp, Artificial Sequence
  ENSG00000281732_18 (sequence is synthesized)
ggactgctcccaccacgcagcaaaggagaggcggctgctgcccactgaaaagcaggtgcgctcagcatccttccttcacacccgtagggccttgcggcaggaggtgggacagatgcagac

SEQ ID NO: 1003955 - DNA, 120 bp, Artificial Sequence
  ENSG00000281732_19 (sequence is synthesized)
aggggggtggaaatgcaaggcacctagccagctgtgccgctctgtgcagctctgggaggaagctggcatgtgctgatgcagttagcgccgttgcaccctcctggtgctgcagctcatttg

SEQ ID NO: 1003956 - DNA, 120 bp, Artificial Sequence
  ENSG00000281732_20 (sequence is synthesized)
aaaaaagcccagattagcatgtggtgcagaggtctgcatatttcaacaaacggctgccttgtcagatgtcacctcgagggacgggctgacggagtccctggcaaacccaagactggccgt

SEQ ID NO: 1003957 - DNA, 120 bp, Artificial Sequence
  ENSG00000281732_21 (sequence is synthesized)
ggagtggggacagagcctgaactgcccccaagccagtggcattggcttgccctgtgcagcctcctcccatagagggggcagacaacgcagggggaggatgccccccaggtccacagctct

SEQ ID NO: 1003958 - DNA, 120 bp, Artificial Sequence
  ENSG00000281732_22 (sequence is synthesized)
gcagaggtcctggaccccactctgccagtgtggcgggtatcagagctgggtggggctctgtgaagttagggtcatggagatggtatgtaaaccatgggacctgaagggaagaccccaccc

SEQ ID NO: 1003959 - DNA, 120 bp, Artificial Sequence
  ENSG00000281732_23 (sequence is synthesized)
cagggtgcacaccccagacaccatgacacaccctggctgacagctctggccaacggagcacttgggagcaggtggtctctgcagcccaccctgctgtcctgctgagcacccaggtaccca

SEQ ID NO: 1003960 - DNA, 120 bp, Artificial Sequence
  ENSG00000281732_24 (sequence is synthesized)
tggcactggcacatgaccaaggacagacatccatggtgtgggctgcctggagccccccaggcccctgggagctcctcggcttatcagagaccaactccagccctgaaagccatcattttc

SEQ ID NO: 1003961 - DNA, 120 bp, Artificial Sequence
  ENSG00000281732_25 (sequence is synthesized)
tggggtcttctggagccccacaaggggatcacccatgcctctccaggtggagaatgagggtcaaatggagagttatcttggaagcccggatgccccgcctggagggaagctgcctgctgg

SEQ ID NO: 1003962 - DNA, 120 bp, Artificial Sequence
  ENSG00000281732_26 (sequence is synthesized)
ggcagacacctggcctgtccagagcctaactgaatgccacaggtcccagagatactcagcctggagcagcctctgcactgagcaggcctggagtcagtgggctctgcccgagcagggaca

SEQ ID NO: 1003963 - DNA, 120 bp, Artificial Sequence
  ENSG00000281732_27 (sequence is synthesized)
cagtcccccaggaagttgagaacacagcaagccagagcggggaggcctccagtgaggtgcagccatctccactgcagcaaggataatatctcctctccagactgcggtcagcagcgggcc

SEQ ID NO: 1003964 - DNA, 120 bp, Artificial Sequence
  ENSG00000281732_28 (sequence is synthesized)
tgaggtgtcctgctctgtcatggcgggagggttccatgagcagcagcgagggtccccccgtaggaggttgcccctaccccgccaaggccagaccagcagggaggctctccttggaggcaa

SEQ ID NO: 1003965 - DNA, 120 bp, Artificial Sequence
  ENSG00000281732_29 (sequence is synthesized)
ggcccccaccacctgctgttcctgggtgacatttcctccagagagtggccggaaaggtcacctcccctccactcgggcctgcttcattgccgtgattacactttacgatccttttatgaa

SEQ ID NO: 1003966 - DNA, 120 bp, Artificial Sequence
  ENSG00000225056_0 (sequence is synthesized)
agcccggggttagggcatttcgttgtcacctggcgacggtgaagcctggtttcctccagagagattatgctgctctccatccaagtgaagtggcaatggtgccagcctgagatttctgcc

SEQ ID NO: 1003967 - DNA, 120 bp, Artificial Sequence
  ENSG00000225056_1 (sequence is synthesized)
tttaaattctggaagagatgaagcttgcatttacccaggcctgttaatgaagaatgttggactaaattttgagaattcagactgcttaagaaatttgcttcagaatccccaaaggattct

SEQ ID NO: 1003968 - DNA, 120 bp, Artificial Sequence
  ENSG00000225056_2 (sequence is synthesized)
gcaaggagctagaaagaacattttctaacatcagttacttgttttaataaactccttcggggtaagattttgattcccaccactgatcatatcattaaaaagtgtattctctgcactaac

SEQ ID NO: 1003969 - DNA, 120 bp, Artificial Sequence
  ENSG00000225057_0 (sequence is synthesized)
tcctccgagcgcctcccagctcacggcgccccccgaacccggctccaagggactcggtattccccagcgccggctccgggcagtcccggaagggctcaagggctgggcgactggctgatc

SEQ ID NO: 1003970 - DNA, 120 bp, Artificial Sequence
  ENSG00000225057_1 (sequence is synthesized)
gagaccgtccgggtcctggctctcgggtcacttgcagaggcctgagcagagcgttaatgagaatgatccagaagggaggagaagctaatggtgcagtggagagcagagtccctgagcagg

SEQ ID NO: 1003971 - DNA, 120 bp, Artificial Sequence
  ENSG00000225057_2 (sequence is synthesized)
tgagcagggatgggggcccatgcccatgtcggaagcgggcgccacactgcttcatgatggaaggcagaacgcctgggccagggtgcaggcaggtgtcacagagaatgtccttcatgacca

SEQ ID NO: 1003972 - DNA, 120 bp, Artificial Sequence
  ENSG00000225057_3 (sequence is synthesized)
catcctagttcccagaacctgcgaatatgctactttacatggcaaaagggagtttgcaaatgtgattaagaattaagctaaagaccttcatacagggagattatcctggattctccaggg

SEQ ID NO: 1003973 - DNA, 120 bp, Artificial Sequence
  ENSG00000225057_4 (sequence is synthesized)
ggctggtgtcatcacaaggatctttaaaagtagaagtaaggaggagacgtgaccaaggaagaagggtcagagagacgcaatgcttccgaggaactctgaggatggaggaagggaccatcc

SEQ ID NO: 1003974 - DNA, 120 bp, Artificial Sequence
  ENSG00000225057_5 (sequence is synthesized)
tccaaggaatgtgggtggcccctgaatgaagaggcaggagaaggcacacagccctgcctgccaacaccttgatcttagcccagtgaatcctgacagacttctaacccgtggaactgcaag

SEQ ID NO: 1003975 - DNA, 120 bp, Artificial Sequence
  ENSG00000225057_6 (sequence is synthesized)
cgtgtgtttgaagccaccaagagtgtggtcgttggttttggcagccatagaaaagtaatacagtgggtcagggatccgggtgggaaggagacagccctcagagaagggatccgggtggga

SEQ ID NO: 1003976 - DNA, 120 bp, Artificial Sequence
  ENSG00000225057_7 (sequence is synthesized)
aggagacagcccttagagaagggatccgggtgggaaggagacagccctcagagaagggcttgtggggagcctgggggtgctgggagaggagctggtgtgaaacaaccagctggctgggaa

SEQ ID NO: 1003977 - DNA, 120 bp, Artificial Sequence
  ENSG00000225057_8 (sequence is synthesized)
gctggtggccccaggctgcaccgcaggcaagagcagctctcagccccaggaggccaacagtggtcactggtgtgggagccagttacatttccaaaagaagctgcacttgaggattactgt

SEQ ID NO: 1003978 - DNA, 120 bp, Artificial Sequence
  ENSG00000225057_9 (sequence is synthesized)
gaagctgactttagggctggaggggcacagggccagagttctgggttagtggcttctgactctggtcctagcaacgcttttactccaggtcagcctcctgcaccttgcctcctgggcttc

SEQ ID NO: 1003979 - DNA, 120 bp, Artificial Sequence
  ENSG00000225057_10 (sequence is synthesized)
cccttgaccccctcctagggcatctgggaaggtgtgatgagtggacttgagaggtgaaagttgttcctttgaagcagtccatggctgatgctccctgaatggcatgagagctcattggca

SEQ ID NO: 1003980 - DNA, 120 bp, Artificial Sequence
  ENSG00000225057_11 (sequence is synthesized)
tggcctctgggtgctactggaaaccagggctttcaggatggcccgttatccatccgtgtcctggtgggtacatcctacatcagcctgtctgaggacattaaaataatcccaggaatgata

SEQ ID NO: 1003981 - DNA, 90 bp, Artificial Sequence
  ENSG00000225057_12 (sequence is synthesized)
gggctcagagctcgccgccaaggggcgtggcctccgggccgcggcggcctctgggagttgtagtcccgcctcaacttgtggtggcctctt

SEQ ID NO: 1003982 - DNA, 120 bp, Artificial Sequence
  ENSG00000225057_13 (sequence is synthesized)
acactggcgcttgggtccgtcgctgcctcggtgtccctgtcgggcttcccagcagcggcctagtggaaaagtaaaagatgtctgaatatattcgggtaaccgaagatgagaacgatgagc

SEQ ID NO: 1003983 - DNA, 120 bp, Artificial Sequence
  ENSG00000225057_14 (sequence is synthesized)
ccattgaaataccatcggaagacgatgggacggtgctgctgtccacggttacagcccagtttccaggggcgtgtgggcttcgctgcaggaatccggtgtctcaatgtatgagaggtgtcc

SEQ ID NO: 1003984 - DNA, 120 bp, Artificial Sequence
  ENSG00000225057_15 (sequence is synthesized)
ggctggtagaaggaattctgcatgcccccgatgctggctggagaaatccggtgtatgttgtcaactatccgaaagataacaaaagaaaaatgggtgagacagaagcttcatcagcagtga

SEQ ID NO: 1003985 - DNA, 120 bp, Artificial Sequence
  ENSG00000225057_16 (sequence is synthesized)
aagtgaaaagaccagtccgatttaatagtgttgggtctcccatggaaaacaactgaacaggacctgaaagagtactgtagtacctttggagacgttcttatggtgcggcaaagccaagat

SEQ ID NO: 1003986 - DNA, 120 bp, Artificial Sequence
  ENSG00000225057_17 (sequence is synthesized)
gagcctttgagaagcagaaaagtgtttgtggggcgccgtacggaggacatgactgaggatgagctgtgggagttcttctctcagtatggggatgtgatggatgtcttcgtccccaagccg

SEQ ID NO: 1003987 - DNA, 120 bp, Artificial Sequence
  ENSG00000225057_18 (sequence is synthesized)
ttcagggcctttgcctttgttccatttgcagatgatcagattgcgcggtctctttgtggagaggactcgatgaaaggaatcagcgttcacatatccaatgccgaacccaagcgcaatagc

SEQ ID NO: 1003988 - DNA, 120 bp, Artificial Sequence
  ENSG00000225057_19 (sequence is synthesized)
aatagacagcaagaagtggaagatttggtggtaatccaggtggctttgggaatcagggtggatttggaacacttctgtctacatgccttctcattcaagaattcgtcatcacgcatcaca

SEQ ID NO: 1003989 - DNA, 120 bp, Artificial Sequence
  ENSG00000225057_20 (sequence is synthesized)
ggccgcgtctttgacggttaatgagaatgatccagaagggaggagaagctaatggtgcagtggagagcagagtccctgagcagtggaaacagccatgaagatctttcatctcttccaagc

SEQ ID NO: 1003990 - DNA, 120 bp, Artificial Sequence
  ENSG00000225057_21 (sequence is synthesized)
accacctggtgtacctcgctggctgccgggctgaggtggggcaggggttacgtctgctcttcgatcctgtgattcaagggggatccattttcgtcttctttggtgtccgacacttcgctg

SEQ ID NO: 1003991 - DNA, 120 bp, Artificial Sequence
  ENSG00000225057_22 (sequence is synthesized)
ctacggagaggtccccatggcaaggagctgaggcctctgccaagagccagcagtgtgtgagaggcctgcaagtgaggctcctggaagccggtcctccagctggcaggtgacagaagcccc

SEQ ID NO: 1003992 - DNA, 120 bp, Artificial Sequence
  ENSG00000225057_23 (sequence is synthesized)
caccagtatcttaccgtcaacatcaggaacgaccctgagctagaagtacccagctaagccgctctcaaattcctgacccaaagagaccgtgcaagcctgagcaagatcagaggggagcat

SEQ ID NO: 1003993 - DNA, 120 bp, Artificial Sequence
  ENSG00000225057_24 (sequence is synthesized)
tgccttgcaaccaaattcttcctctgcaataacgagtgctgctgagtaaggcattcttcaggaagatggagggactcaattggtaaaggagggactctggaggttctctatgggctggca

SEQ ID NO: 1003994 - DNA, 120 bp, Artificial Sequence
  ENSG00000225057_25 (sequence is synthesized)
gtaactcttgaatctggggaagaaggagagaaaggaaagagtggagaagacataatcctcaaggaagctgtgggcttaatttcttacaaatttcccttggtgcgtctgcccagagacccg

SEQ ID NO: 1003995 - DNA, 120 bp, Artificial Sequence
  ENSG00000225057_26 (sequence is synthesized)
ggggagctgggtccttgtggtgagtggcttcctgggctcactggctctgatccctgtgccagcgtcccagggggaagggaagaggccccatctctaacaagtgtctgggggtatgggaag

SEQ ID NO: 1003996 - DNA, 120 bp, Artificial Sequence
  ENSG00000225057_27 (sequence is synthesized)
gaactgggggatcaggagccagacttctgggccaggaaaggggtgaagaagctcatctattttacttcatcccttgaccttcaaccccccaagtggcacctggcctacacagcagcttcc

SEQ ID NO: 1003997 - DNA, 120 bp, Artificial Sequence
  ENSG00000225057_28 (sequence is synthesized)
cacaccatgaccatggactctgcctgactctggagtccaaagcccagccctgaggctggcccagtcaggagggtgcatctcctggggagaagggcaccagaaatggtacatccctccttc

SEQ ID NO: 1003998 - DNA, 120 bp, Artificial Sequence
  ENSG00000225057_29 (sequence is synthesized)
ctcatgtgcccagcactacatgcccactatcttgaggttgaattcgctgattctctggaggtcccgtccaggtggggcccctgcccacatggttactcaggcaagaaatgtggacatggc

SEQ ID NO: 1003999 - DNA, 120 bp, Artificial Sequence
  ENSG00000225057_30 (sequence is synthesized)
agcactgccctgccatggttcttcccacctcgggcactagcctgggactattccccagggaatgcaagctgacatcccgagagcacccccccggtgggaagttctacagaaacagatggc

SEQ ID NO: 1004000 - DNA, 120 bp, Artificial Sequence
  ENSG00000225057_31 (sequence is synthesized)
gttgccagggaagttccaacagctgtcttatatgttaatgcttctgaaactggacacatttcacattttgaaaccagcactggactcagtaccaacaggaataaagttttttaaaacgca

SEQ ID NO: 1004001 - DNA, 120 bp, Artificial Sequence
  ENSG00000225058_0 (sequence is synthesized)
aggacagtaatgcttccaagctagaggcattcaaggagtggcccagagaacatgtcattcagggcctggaagatttccatcagcattcaggttctgcaggggatggggatgctgagtaag

SEQ ID NO: 1004002 - DNA, 120 bp, Artificial Sequence
  ENSG00000225058_1 (sequence is synthesized)
cttactgttctcaagtgcttatcacactgggaggatggcaactgggcaaagcagacacagaaggacatcatgctgctgactcgtggcttcagactctcagtctcctgtattccttcctcc

SEQ ID NO: 1004003 - DNA, 120 bp, Artificial Sequence
  ENSG00000225058_2 (sequence is synthesized)
tgcaattgcagggggtgcacaaaacatttgcaggcatgaacgcagtgaagcaaatagttgttcttaggaacaatttcccttggagtctttcacagacacctggagcaaactggtgctcag

SEQ ID NO: 1004004 - DNA, 120 bp, Artificial Sequence
  ENSG00000230185_0 (sequence is synthesized)
gcggtccccgatgccccccggagctctgtgcacctccactgaaacgcaaggagcagacagaacctacaccatccgtgaggtctttttcagaggaaggagactattgctggcttcagtaat

SEQ ID NO: 1004005 - DNA, 120 bp, Artificial Sequence
  ENSG00000230185_1 (sequence is synthesized)
cctaaatagtcctatgaaaggactgtgtcctatgaaagacagagtatacattcagggaccccgaacggagggaccagctggagccgcggaagaggaacataaattgtgaaaatttcatgg

SEQ ID NO: 1004006 - DNA, 66 bp, Artificial Sequence
  ENSG00000230185_2 (sequence is synthesized)
cttcttgcagagagcctataaacggatgtccaagtaggcgagatattgctaaattcttttcctagc

SEQ ID NO: 1004007 - DNA, 88 bp, Artificial Sequence
  ENSG00000230185_3 (sequence is synthesized)
gggaggtctataaacggccactctgggaacgtctgtcttatgcagttgagataaggagtgagatacgctctggtctcctgcagtgacc

SEQ ID NO: 1004008 - DNA, 120 bp, Artificial Sequence
  ENSG00000230185_4 (sequence is synthesized)
cggccgccccccacacaaaggggctccccgcctgggtcgcggcgtcggcgcactcgtccccgccccgcgcgcgggctctcacccacctgcaggtgtctgtgcgtctgtccataggaacgc

SEQ ID NO: 1004009 - DNA, 120 bp, Artificial Sequence
  ENSG00000230185_5 (sequence is synthesized)
ggggcctgcgagagccgggcagcccgggctggacgggacgggccgaaggggcgcgagggcgggaggagagcggccagagggccgggcaccaaaggtgtggaacccgccgtccccgctatg

SEQ ID NO: 1004010 - DNA, 120 bp, Artificial Sequence
  ENSG00000230185_6 (sequence is synthesized)
gctctgtgcacctccactgaaacgcaaggagcagacagaacctacaccatccgtgaggcatccaaccatgatgaggtaccttgttgaacaaactaactctgccactgagaacgatgaaag

SEQ ID NO: 1004011 - DNA, 120 bp, Artificial Sequence
  ENSG00000230185_7 (sequence is synthesized)
ctgtttaaaaaaataaataagtctgtttaaaacaattggagagcaaccctgtcatccaaggcttgagagtccacgagccccccaggaagaagagaaatactctgaagtgagtcctgcatt

SEQ ID NO: 1004012 - DNA, 120 bp, Artificial Sequence
  ENSG00000230185_8 (sequence is synthesized)
gtgtacagcactgctccctactacacgtcctgggcccgcggtccccgatgccccccggagctctgtgcacctccactgaaacgcaaggagcagacagaacctacaccatccgtgagcact

SEQ ID NO: 1004013 - DNA, 120 bp, Artificial Sequence
  ENSG00000230185_9 (sequence is synthesized)
attattcagccttaaaaaggaaggaaatcttatcacaggctacaacatagatgaaccttgaggatgttgtgccaagtgcaataaaccagtcacaaaaggacaaatactgttatgatttga

SEQ ID NO: 1004014 - DNA, 120 bp, Artificial Sequence
  ENSG00000230185_10 (sequence is synthesized)
ttgacctatatgaactatgtagaggcatccaaccatgatgaggtaccttgttgaacaaactaactctgccactgagaacgatgaaagctgtttaaaaaaataaataagtctgtttaaaac

SEQ ID NO: 1004015 - DNA, 120 bp, Artificial Sequence
  ENSG00000230185_11 (sequence is synthesized)
agttggaagcctgaaattccatgttgtgaaacaactagaggccggccctctgatcctttctctggatgtgctgaattcagcagggtggaagtgctaaaaccaggaggagcaatgaagtca

SEQ ID NO: 1004016 - DNA, 120 bp, Artificial Sequence
  ENSG00000230185_12 (sequence is synthesized)
gtgttgagaagaacatgcagctgagaagccaagtgggagaccgggacactgctctgattgaggataatgtatgttacactgtacccactccgttaagcacaataaatctcctttttcttg

SEQ ID NO: 1004017 - DNA, 120 bp, Artificial Sequence
  ENSG00000230185_13 (sequence is synthesized)
cgagcctcctgccgcacacacgttcgcacgcggcggccggcgcgctggaccgagaggttggagcaatccatcctccgcgcgcacgagctcagtccctactgccccgacaggtgtggaacc

SEQ ID NO: 1004018 - DNA, 120 bp, Artificial Sequence
  ENSG00000230185_14 (sequence is synthesized)
cagaacctacaccatccgtgaggtagcttctgccaacccctctccatctctagagctgattccggttgatgttcttaacaccttcctctatcaacactcttccaggtctaggctgaaatt

SEQ ID NO: 1004019 - DNA, 120 bp, Artificial Sequence
  ENSG00000230185_15 (sequence is synthesized)
caataatgtttgtacaaacaaaaaagaccaaaaatgaaaaccccctagttaattgctgcatattctaaagatgggatcttgtggagaaattggaactcttatgcaatgctgataggaatg

SEQ ID NO: 1004020 - DNA, 120 bp, Artificial Sequence
  ENSG00000230185_16 (sequence is synthesized)
agaaattggaactcttatgcaatgctgataggaatgtagatggtaccaccactatgcaaaacagtggggaagttcctcaaaaaactaaaactagagctaccatatgatccagcaatccca

SEQ ID NO: 1004021 - DNA, 120 bp, Artificial Sequence
  ENSG00000230185_17 (sequence is synthesized)
tatcgaagagatatttgcacattcatgttcattgcagcactattcacaatagccaagaggttgaagcagcccaaatgttcatcaacagatgaagagatgaatgaaaatgtgatatataca

SEQ ID NO: 1004022 - DNA, 120 bp, Artificial Sequence
  ENSG00000226506_0 (sequence is synthesized)
tggttaatatcaggaattattgcctcaaacgctgcaggttcaacctggatcagaagccaagaccaatgccgcacttggaagggacgaccaatagttctgtgttcctgacctgtcttacag

SEQ ID NO: 1004023 - DNA, 120 bp, Artificial Sequence
  ENSG00000226506_1 (sequence is synthesized)
tctttcgcttctatccgcagtggaccatttggctgatcacgtcactctacagctgttctgccacatttgagcacccacattaaagacaaaagttggggagataatgaagaggcaagacag

SEQ ID NO: 1004024 - DNA, 120 bp, Artificial Sequence
  ENSG00000226506_2 (sequence is synthesized)
atgcacatcaaataaattccaaacgcagccatctattcccaagattggttggcctacagtatctaagcggtctgtaacatatttgtaaccctaatgacctgctgctgaaggataatcaaa

SEQ ID NO: 1004025 - DNA, 120 bp, Artificial Sequence
  ENSG00000226506_3 (sequence is synthesized)
ccacagtgactaggaaatcatttcatcattccataaagatctgctgagcccctctaagtgctgaggactatggaaagaggccacagtcagggcagatagtctttgcccttaattgctcaa

SEQ ID NO: 1004026 - DNA, 120 bp, Artificial Sequence
  ENSG00000226506_4 (sequence is synthesized)
gaatgaagtggatgcaatcctggaactcacagttgggcaggggcagttttcagatatgacaggcctgctttcctgagatatgactcagcccagaataaatatttgtgcttcatcgaaggg

SEQ ID NO: 1004027 - DNA, 120 bp, Artificial Sequence
  ENSG00000226506_5 (sequence is synthesized)
aacagaagtttcaaagacctctacggaaagataaagttctcggaggtatcaacctcatatgaaagggtcttttaaaaggtcattttattaaagctatggagaagaaataaccttcggaaa

SEQ ID NO: 1004028 - DNA, 120 bp, Artificial Sequence
  ENSG00000226508_0 (sequence is synthesized)
tcgggccgccgggcgcgcggggcccagcgcaggcaggccacgcggggacggaggaggcagagaggacgggctgtgatggagaaacgggagaggagccggccaggcgccaccgtcaccacc

SEQ ID NO: 1004029 - DNA, 120 bp, Artificial Sequence
  ENSG00000226508_1 (sequence is synthesized)
tgcctcacctcccatctcatatccctgtgcagtgccaactttatcagatcatctctttttcactgggccccagggacggctgaccattcagaacaaacacagggacagagccccagggct

SEQ ID NO: 1004030 - DNA, 120 bp, Artificial Sequence
  ENSG00000226508_2 (sequence is synthesized)
gttgggaagcccagcaccagagggcatgaaccttcttaggagaagtaaaacttacaaaaaacaagctcttaaaccctccgccttttcccctattggttagaaagtgaatcttaaactgtg

SEQ ID NO: 1004031 - DNA, 120 bp, Artificial Sequence
  ENSG00000226508_3 (sequence is synthesized)
cggccgcgcagcctttgtctcgggccgccgggcgcgcggggcccagcgcaggcacgtgcggcttgggtgcaaatcctgtttctctgggcagaggccacgcggggacggaggaggcagaga

SEQ ID NO: 1004032 - DNA, 120 bp, Artificial Sequence
  ENSG00000226508_4 (sequence is synthesized)
tcagatcatctctttttcactgggtactactttggaaaagcgacagagtgcgccaagtcaggaataagtacatccgctgtgggacatttatcttcccctttctatttagctacctcaatt

SEQ ID NO: 1004033 - DNA, 120 bp, Artificial Sequence
  ENSG00000226508_5 (sequence is synthesized)
ttctcatcaggaaagggggcacaatggcatttcattcctctaaatcacactgagatggctgggttgcttccagtttttccagtcctggcactggacggttatacatgcttggtgatgatg

SEQ ID NO: 1004034 - DNA, 120 bp, Artificial Sequence
  ENSG00000226508_6 (sequence is synthesized)
gtgtcagtataccagtagcaaatagaaacataaggaaagtgaaactttggctaacataataccaagaatagatgcaaaacaggcacttttgtagggacatcacccaagagacctgcaggc

SEQ ID NO: 1004035 - DNA, 120 bp, Artificial Sequence
  ENSG00000226508_7 (sequence is synthesized)
aatggtattcatctgcagtgtagaaagcaccccatcagtgccaagtggctgtgggagctcctcaatctggatgcacagtttcccgtggggttttcaccctacctaaagaatgctttaatt

SEQ ID NO: 1004036 - DNA, 120 bp, Artificial Sequence
  ENSG00000267159_0 (sequence is synthesized)
tacgggccctgggctaaccctccccccatcacacaactcaacagcaacgcccaagccacaacttctctggacctcaggttccctacctgcaaaacagtggcaacaggggtctggagtttc

SEQ ID NO: 1004037 - DNA, 120 bp, Artificial Sequence
  ENSG00000267159_1 (sequence is synthesized)
taatggcctgggtgaagaacagagactcctggggcctgggtcccacccgagccaccccctagcccaggccacacctccacccgcccaggccgccaataaaacaggccgggcagaacccaa

SEQ ID NO: 1004038 - DNA, 120 bp, Artificial Sequence
  ENSG00000239828_0 (sequence is synthesized)
gttccttacggacatctctggtgaataatctgagaaggcctcacttataatttggcttgaagaaaacacgagagcaagtcatgcaatgttcaagtaagagtgcagcagtcagaagaaaaa

SEQ ID NO: 1004039 - DNA, 120 bp, Artificial Sequence
  ENSG00000239828_1 (sequence is synthesized)
gctatgcaagggccctaaggttgaaagtgttcttagtgtctttgagaaacatcaaggaatgtgcaaaaggcagaatgatagaagatgagatcagagaggggaagtaaattcaacaacaga

SEQ ID NO: 1004040 - DNA, 120 bp, Artificial Sequence
  ENSG00000239828_2 (sequence is synthesized)
ttccagccaaaatggactctagtcacaaacaaatagtaataacaatccaaacttgtggctgaatagagttctgaagttttgagaaagaggtaaagatatgaaatagttgtctaggagcag

SEQ ID NO: 1004041 - DNA, 120 bp, Artificial Sequence
  ENSG00000239828_3 (sequence is synthesized)
gcaaaaaaatggcttagagaaattacaattgctacttagcactaaggggccacttgagattagaggtgatacatgaagagtgagatttgaactgagttttaaagaatgttaagaacttgg

SEQ ID NO: 1004042 - DNA, 120 bp, Artificial Sequence
  ENSG00000239828_4 (sequence is synthesized)
agagctctcggagatcaacaaaggtgccgcttttgaatgtgaaagttttttcaagacttttctatttcttggtttgaatcgtgtgcctgtagggacacatgctacctgcttactggacag

SEQ ID NO: 1004043 - DNA, 120 bp, Artificial Sequence
  ENSG00000239828_5 (sequence is synthesized)
tgactacttaggataaggactcagacacacaagtggagaagataaatagtaatttggaaccaaaactcaggacgtcccaggagaggctagattaggaattctttgatttgggatcacgaa

SEQ ID NO: 1004044 - DNA, 120 bp, Artificial Sequence
  ENSG00000239828_6 (sequence is synthesized)
aatgaagtatccatattttaacagaatgattagtggcagaggaatcatctaagaaaactgagaagactctgccagagtgatgggaagaaaactagatgagaaagcaccattctggaagac

SEQ ID NO: 1004045 - DNA, 120 bp, Artificial Sequence
  ENSG00000239828_7 (sequence is synthesized)
atgctcccatgaaccatggagagaagaggagagggaagaagttatttgtgatgtcatttgcctgtgtcatggcctgccttccctagatattgtcctaatgtgagcatcacacctaaggta

SEQ ID NO: 1004046 - DNA, 120 bp, Artificial Sequence
  ENSG00000239828_8 (sequence is synthesized)
agaactttagacaaagatgatctgtagacccaaggcctgacattctcatcattattgtttgccttagtctgtgtatcctctaaaagcccaaggcgagcatttatttggaaggggatttca

SEQ ID NO: 1004047 - DNA, 120 bp, Artificial Sequence
  ENSG00000239828_9 (sequence is synthesized)
gggaacacaagtgaggaagtgagtgaaagagaggtggggtaatgaagaaagccagtaaaggctttgttaagctggccaccactgtgttcaaatggagctcattctcactggggattctct

SEQ ID NO: 1004048 - DNA, 120 bp, Artificial Sequence
  ENSG00000239828_10 (sequence is synthesized)
tcccataccccttccatgggttgaggggtgtatccccaatattttagtttgttcatgcttgtggccagcagctcttgaggcacaagagaaagcctgcagaaagaaagcttcagcatggga

SEQ ID NO: 1004049 - DNA, 120 bp, Artificial Sequence
  ENSG00000239828_11 (sequence is synthesized)
aaaactgtcttgattgctctgtcacttcaccaaagcaatttctccctcaatcttccccagttcagtaaatggcaccacaatgtagtcagtagcaggagccaaaacttagcagtcatttat

SEQ ID NO: 1004050 - DNA, 120 bp, Artificial Sequence
  ENSG00000239828_12 (sequence is synthesized)
tcaacctttacatttattgagtacttataccatgcctagcactcattcaggtgctgggtgctagcgagccctatatgctgaactcctagaactcctagaactcctataacatcccaaatc

SEQ ID NO: 1004051 - DNA, 120 bp, Artificial Sequence
  ENSG00000239828_13 (sequence is synthesized)
agtcctcttctctccaaatcctcttttatatctataatttgcaacgaggatggccatttaaaattgttgctaaaatgagacgaaggggctgagtctttgtaacccttgttgagccactac

SEQ ID NO: 1004052 - DNA, 120 bp, Artificial Sequence
  ENSG00000239828_14 (sequence is synthesized)
catgctccattcacatgtcttttccccgtatgtttttgtctctgatcttccagacccctgtccaactagtcaaatcattcaccttgcatatgagtttctgtatattcctggcttaagcca

SEQ ID NO: 1004053 - DNA, 120 bp, Artificial Sequence
  ENSG00000239828_15 (sequence is synthesized)
cttctccttctacaccctatgtagatgaccaagtgcactgtttaaagctatccccagtgggaggatttttctctcacttctgtctttcaaggcactgtgggttgaaatatgtcccctcaa

SEQ ID NO: 1004054 - DNA, 120 bp, Artificial Sequence
  ENSG00000239828_16 (sequence is synthesized)
tgacatgttgaaatccttacccttggtacctaagaatgtgatcttatttggaaatagggcctttgcagatataattattaatatgagttcatactggataacagtagccgtaattccagt

SEQ ID NO: 1004055 - DNA, 120 bp, Artificial Sequence
  ENSG00000239828_17 (sequence is synthesized)
gtcaaagcttcttataaatagaaattttagagacacagacaaagggaaataaggccatgtggtggaggcagagattggagttatgcagccacaagccaaagaaggccaagaattgccaac

SEQ ID NO: 1004056 - DNA, 120 bp, Artificial Sequence
  ENSG00000239828_18 (sequence is synthesized)
aactaccggaagctagaagtgacaaggaagcattcttccctagagcccttggagagatcgtggccctgcaacatcttaaagttaggacttccagcttccagaaatgtgagagaataaatt

SEQ ID NO: 1004057 - DNA, 120 bp, Artificial Sequence
  ENSG00000239828_19 (sequence is synthesized)
agtgacacaatagaaggaacctgaatcactgaatcatcacttggaagaaagcagcccagactagttacccaactcccatcagacagtgaccagagtgagaaataagccttgtgtatggtg

SEQ ID NO: 1004058 - DNA, 120 bp, Artificial Sequence
  ENSG00000239828_20 (sequence is synthesized)
aagaggtgattcagctcaaaagttttgtttagaatctacttcctagtacccaccagcttaggctgagtttcccagaatcagatctgtgttggagatttgtgtgtatgatgtttattgggg

SEQ ID NO: 1004059 - DNA, 120 bp, Artificial Sequence
  ENSG00000239828_21 (sequence is synthesized)
agcttccccagaaacaacacctttaagtacaggaaacaattgaacagggacaaaaatcctacagtgataaaattataacagaagtcgtaggtaatcctttggggctctctggagctaaaa

SEQ ID NO: 1004060 - DNA, 120 bp, Artificial Sequence
  ENSG00000239828_22 (sequence is synthesized)
gatgcaagaggaacacatcttcatacttcacgttaaacagtcactgggcacaggctaccctaggagaaagcttgtaaacttggatgaagtaggttcctttgacagaaagcaattccagaa

SEQ ID NO: 1004061 - DNA, 120 bp, Artificial Sequence
  ENSG00000239828_23 (sequence is synthesized)
gagagatgtacctatgagataacagtagccagcactcccagaagctcacaagtgactgcctttgtcctgacagaggtatctgaacagtgcactatgccatccactacaacccatttctac

SEQ ID NO: 1004062 - DNA, 120 bp, Artificial Sequence
  ENSG00000239828_24 (sequence is synthesized)
gtttatctgtttattttaagacaataattagaataagctccaagagaacagagaccttgtctatctcatacattgatatccccagaatttacaacagctcagtatttactcaataagtat

SEQ ID NO: 1004063 - DNA, 120 bp, Artificial Sequence
  ENSG00000239828_25 (sequence is synthesized)
ttgttgactaagtgattgaactgaatgagtaattaaagtatatttataggtgccacattttgtaaactatcacttggcatatcacagagaatactaataaatgaaaacacagattgggaa

SEQ ID NO: 1004064 - DNA, 120 bp, Artificial Sequence
  ENSG00000239828_26 (sequence is synthesized)
gctgttccttacggacatctctggtgccaagagaaaattcagtgtgaagatgatggagtgacacaatagaaggaacctgaatcactgaatcatcacttggaagaaagcagcccagactag

SEQ ID NO: 1004065 - DNA, 120 bp, Artificial Sequence
  ENSG00000239828_27 (sequence is synthesized)
ggtatgatacacaacacaagtataaggatatagtcaataataactctgggagtaagaacacattatgaacagtgaagacattgacaaacctccgggacctttgatttgtgctataaagta

SEQ ID NO: 1004066 - DNA, 120 bp, Artificial Sequence
  ENSG00000239828_28 (sequence is synthesized)
tactatgatcagccctgattaacacacaagagaaaactagaagataggtaaccaagatcaataaaactatttttatgagcatatatgttattttacttaaataaattttaagatggcaaa

SEQ ID NO: 1004067 - DNA, 120 bp, Artificial Sequence
  ENSG00000239828_29 (sequence is synthesized)
ggaacatggtgttgcagttcaaaccagttccagccaaaatggactctagtcacaaacaaatagtaataacaatccaaacttgtggctgaatagagttctgaagttttgagaaagagatac

SEQ ID NO: 1004068 - DNA, 120 bp, Artificial Sequence
  ENSG00000239828_30 (sequence is synthesized)
ctttagtaacctagactctgctggatcatatggcccaagacgccagtctgattgcacagcagtcgacctgctgcagatgctttcccactttgggatccagagaaccttccccttctgagc

SEQ ID NO: 1004069 - DNA, 120 bp, Artificial Sequence
  ENSG00000239828_31 (sequence is synthesized)
agcaaaaccaaataaagcagttctcaggatacaaagacaagactgaggaagatcctaataaggtgttgcaaggtgacacaggacaaactttgtccaaaggaaattgatctgacaagaact

SEQ ID NO: 1004070 - DNA, 120 bp, Artificial Sequence
  ENSG00000239828_32 (sequence is synthesized)
gcaagtttccaagaacaaggtttacatcaggaagagccaatcaaagatcatatctggaggactgctgcaaagttgtgataaatgaccaaatagtatttttatagaaggtggaatgaatga

SEQ ID NO: 1004071 - DNA, 120 bp, Artificial Sequence
  ENSG00000239828_33 (sequence is synthesized)
cagactaaagatttcagctgattaaagaaattatggagtgcatcattctcagtttatattgaactggggttcctgagaaattcctccttataaatttacatggaaattataatttttact

SEQ ID NO: 1004072 - DNA, 120 bp, Artificial Sequence
  ENSG00000239828_34 (sequence is synthesized)
agttgatttcagttaattagcctactgaataatttgattcttgcactcactaaaagatcatagagcacaagaataccatttacaaaatactttaaaagtggggatataaacacaaataag

SEQ ID NO: 1004073 - DNA, 120 bp, Artificial Sequence
  ENSG00000267151_0 (sequence is synthesized)
aaaccatgctttgtagaatggatcctgcttcagaattgctgatctcatcaaccacatgtttatagagagagcagtggcccttaaggaactggagagaatgctctgatttacttctgtccg

SEQ ID NO: 1004074 - DNA, 120 bp, Artificial Sequence
  ENSG00000267151_1 (sequence is synthesized)
tacttctgtccggcatggtgaacagcaggattggctgtagctgttctctttgccaaggacagatctgatctgattgccttgaggtgaaagtgaggaagtgaggagcgtctctgcccggcc

SEQ ID NO: 1004075 - DNA, 120 bp, Artificial Sequence
  ENSG00000267151_2 (sequence is synthesized)
cccatctgagaacggcattccagatttttctgcagtccagaatagagcaccaccaccatagcatttcaagctcattctaagttcatcttatcaatgacaagaggagacacgttgttcatt

SEQ ID NO: 1004076 - DNA, 120 bp, Artificial Sequence
  ENSG00000267150_0 (sequence is synthesized)
accgggcagagccgtgatggctgcggtgcaatggagggactgcaatcctctgtagagctgaggcctgggctgaccccttgggaagctggacgaggtgactgtggagatgctcggtccacg

SEQ ID NO: 1004077 - DNA, 120 bp, Artificial Sequence
  ENSG00000267150_1 (sequence is synthesized)
actcaccttccatagcctccaggggtagacaccggtgtgtccaccgctcactggctcatgggttggtcccttatttttattgagacctgttcaatctgttagaaactgactttacataag

SEQ ID NO: 1004078 - DNA, 120 bp, Artificial Sequence
  ENSG00000267150_2 (sequence is synthesized)
gcatgaaaagcagcctgcggaatcactagctacacagattgaggataaataccaactcactgacaaacggcacttgtgttcagagtgttcagagacggagtcatttttagaaatgccagg

SEQ ID NO: 1004079 - DNA, 120 bp, Artificial Sequence
  ENSG00000267150_3 (sequence is synthesized)
ctagagagtgtttcagtatagccacccttgccgaggcttacagaagggcaaagaccaccatctcaagattgatggaagaatcagttttcttggttcaagaaatgaagacggagaaataca

SEQ ID NO: 1004080 - DNA, 120 bp, Artificial Sequence
  ENSG00000267150_4 (sequence is synthesized)
tctaaacaagaagaggtgacagacgagaggctaaaaatgctagagttcctagaagagctcataggaatcaccccatcacaagcaatctttccaaacctcccaggaggccaagagccaagc

SEQ ID NO: 1004081 - DNA, 120 bp, Artificial Sequence
  ENSG00000267150_5 (sequence is synthesized)
aagccctgctggtcccttccccaggagtgggcctgggtcttaaagagtgctgcccctcccctccactcaggcctcccaagctgccaggtgcattcactcacttcgactccatctgagggt

SEQ ID NO: 1004082 - DNA, 120 bp, Artificial Sequence
  ENSG00000267150_6 (sequence is synthesized)
ccaggggagccccttcctgggctggagttcctcccccatcacatgctggacacagcagtcggctccttcatgggcaatttctccaaatttaaagaagactggagatcccggaacacagca

SEQ ID NO: 1004083 - DNA, 120 bp, Artificial Sequence
  ENSG00000267150_7 (sequence is synthesized)
agaaatgtgaaagtttctcagaaagtttgattcgctctcattggcagtgaaagaaatgctatacttgagacactaatctcttcctcaaattgaaacatcatcaaagtacatttctcaaga

SEQ ID NO: 1004084 - DNA, 120 bp, Artificial Sequence
  ENSG00000267150_8 (sequence is synthesized)
agtacatttctcaagataaagctctgcaaatgttaactatataagtaaataatttacattttattctccaattattgtattatactttgaaaatatatgcagtttgttaataaagacttt

SEQ ID NO: 1004085 - DNA, 120 bp, Artificial Sequence
  ENSG00000267152_0 (sequence is synthesized)
acaagattgacgtgcactgtggtgtagaaagtttgtttgcctttccataacccagtgtatctaagaattacctcggaacttccatttctattaatattacctactaacacttaagtctga

SEQ ID NO: 1004086 - DNA, 120 bp, Artificial Sequence
  ENSG00000267152_1 (sequence is synthesized)
acgcctggcctaaatgtttttaaactctcatcctgatcagtatttaggttatagataattttttaaaactctacttagaatattgtttcagaggagtctgtaaataacaaaactctataa

SEQ ID NO: 1004087 - DNA, 120 bp, Artificial Sequence
  ENSG00000267152_2 (sequence is synthesized)
ttgcagtcatagctgatgtatctatacttggatcttttccaaatgctcttctactcttgtaatttctagtctggtcagctggaaataaaagtatccagtaactccacttgtccatctaaa

SEQ ID NO: 1004088 - DNA, 120 bp, Artificial Sequence
  ENSG00000267152_3 (sequence is synthesized)
aatataattatttttttaactaacccattaagtattttttatatgtatttattagccaatcatgttatttactgtgactttcctgtttgtttcttttgctcattttctcaacctgctgat

SEQ ID NO: 1004089 - DNA, 120 bp, Artificial Sequence
  ENSG00000267152_4 (sequence is synthesized)
ttattttatatataatatccttttcctggagagtagctgtttaaagtgcattcatgatttttctgatactgatagttttcccacatactatcatattatatttggatgttgccattatca

SEQ ID NO: 1004090 - DNA, 120 bp, Artificial Sequence
  ENSG00000267152_5 (sequence is synthesized)
atcactctaaccataaactggtaatctatttatatttttaatagtatgtgagatttctgtgtattcagtcagattatctatgaatggaaatgaattttcttttaaaatcattattatttc

SEQ ID NO: 1004091 - DNA, 120 bp, Artificial Sequence
  ENSG00000267152_6 (sequence is synthesized)
cttttattaaaataaatacgattatgtcaagtattggggtaatagccagtgtcttagttgtttaaacagtttaatggaaatcagtacaatattttaccattcaactaatatttactttgt

SEQ ID NO: 1004092 - DNA, 120 bp, Artificial Sequence
  ENSG00000267152_7 (sequence is synthesized)
tgtatgcaagtatgctctataattagggctaacttcttatattttttcaaatcctatcacttcttttgctttgttcatatatcattctcctctgctattttaatgttataattcattctg

SEQ ID NO: 1004093 - DNA, 120 bp, Artificial Sequence
  ENSG00000267152_8 (sequence is synthesized)
atttcttgttttaaaccatttctgaaatataatatgcttagctgtggtatattattgttttgataagctgcttaatttatcttatgaatattttgtttgggatttttgtccaaatattca

SEQ ID NO: 1004094 - DNA, 120 bp, Artificial Sequence; identical to SEQ ID NO: 800769
  ENSG00000259383_0 (sequence is synthesized)

SEQ ID NO: 1004095 - DNA, 120 bp, Artificial Sequence; identical to SEQ ID NO: 800770
  ENSG00000259383_1 (sequence is synthesized)

SEQ ID NO: 1004096 - DNA, 120 bp, Artificial Sequence; identical to SEQ ID NO: 800771
  ENSG00000259383_2 (sequence is synthesized)

SEQ ID NO: 1004097 - DNA, 120 bp, Artificial Sequence
  ENSG00000259383_3 (sequence is synthesized)
ggtttggaactttactccatcaaaacatccaaataaaaatatgtagactccccaccctatcccatctgctatagggttctaattcccccacagacatcccatcacagtgctttcccccat

SEQ ID NO: 1004098 - DNA, 120 bp, Artificial Sequence
  ENSG00000259383_4 (sequence is synthesized)
gacgggggactcctgagctggactccatccctcccctaccagaaaagcacaggtgctgtggcatgagttcaaccgcctgaaattccctgatcttcagagtaataattctaaaatagggca

SEQ ID NO: 1004099 - DNA, 120 bp, Artificial Sequence
  ENSG00000259383_5 (sequence is synthesized)
ataatacccctgtcagtgttcttggaagaacttctcattacttgaggccccagaaatgcaaacactcctccggttttccagcgtgctgtcaaccctggcatcagagctcttcctgccgtg

SEQ ID NO: 1004100 - DNA, 120 bp, Artificial Sequence
  ENSG00000259385_0 (sequence is synthesized)
tggtgaagaaattagtcacagatgtttattgaattcactgaacaaaatgagcctctctcccacaccctcaaggtagttacaattgtatccagaatgtgtcccgatggcacaaccataaaa

SEQ ID NO: 1004101 - DNA, 120 bp, Artificial Sequence
  ENSG00000259385_1 (sequence is synthesized)
accatatagctggaactctcacgcgagtgcatattcaaatgtccctttatcaaactcttcaacttcatcttcccatgtagaggaaggcatgctactatatgggtctagcaggattttgaa

SEQ ID NO: 1004102 - DNA, 120 bp, Artificial Sequence
  ENSG00000259385_2 (sequence is synthesized)
cgttgacactcatcttagctgaagagttgccacagtaggtactactcattattcactggcacattgttgtggctcttcacagttccttctggaatcaactctttgcctagatgtcttcat

SEQ ID NO: 1004103 - DNA, 120 bp, Artificial Sequence
  ENSG00000259385_3 (sequence is synthesized)
catggtgaaatgcataaatttcagggctttccagagatcccagaccttaggatctgccagaatccacccctaaaccctcagatttcaaccttaagagaatttctctcttaagagaatctt

SEQ ID NO: 1004104 - DNA, 120 bp, Artificial Sequence
  ENSG00000259385_4 (sequence is synthesized)
tggatggctcaaggactctgacactcaatccttccaacgcactgggaaacctggtctgaaaattctccagatatctcattaaagaaacctagaccatcatcatcattctgcgttgtttgt

SEQ ID NO: 1004105 - DNA, 120 bp, Artificial Sequence
  ENSG00000259652_0 (sequence is synthesized)
attacctgatccagaccagatccagcaccgcagagggaaaggtgctatagaggacacgatgcggccaatgggaatatgagtggtgaggtattctatcagtgttagatggacggaatttga

SEQ ID NO: 1004106 - DNA, 120 bp, Artificial Sequence
  ENSG00000259652_1 (sequence is synthesized)
gtatcttcttcttggtgggacagatctgcatgatatttgggcatctcaaaactgacgagcccaaaactgaccatgagtcacacccccagatgtgttctctaactactccctagctctgtg

SEQ ID NO: 1004107 - DNA, 120 bp, Artificial Sequence
  ENSG00000259650_0 (sequence is synthesized)
ggaggcacagacgggggcccgtgggggcaggacagcagcctccccgaggcacatggctgagtgctgagctgggaaggcaccatcgtaatgccctggagggccagacttgaaatgagaact

SEQ ID NO: 1004108 - DNA, 120 bp, Artificial Sequence
  ENSG00000259650_1 (sequence is synthesized)
tcctgcgaacagccacttgtaactaagtatggggaaccaaggaaatgttactaagacaacttggtggggagggagccagtgttcacagcccctaggatccctttacagtttctgagcaca

SEQ ID NO: 1004109 - DNA, 120 bp, Artificial Sequence
  ENSG00000259650_2 (sequence is synthesized)
cccacagccaagccacatccatgccactcctgcgaacagccacttccagtgttcacagcccctaggatccctttacagtttctgagcacaagactccaacttgcccgcgtgatttcactc

SEQ ID NO: 1004110 - DNA, 120 bp, Artificial Sequence
  ENSG00000259656_0 (sequence is synthesized)
ttattgtaagatattgtttattgtaaaactcttgtgttccttccgtacatactaaaacaaaaggtcactttaaaggcacattatgttgtagtcaagaataaaagaatacaatgttgtgaa

SEQ ID NO: 1004111 - DNA, 120 bp, Artificial Sequence
  ENSG00000259656_1 (sequence is synthesized)
atgtcatactgtatgatgggccctgtcttgctgtgccttctttatatcaatttaaaatatacacattagatacaaagcaagtggcagaacatttagttggaccctacttatgcaaaaatt

SEQ ID NO: 1004112 - DNA, 120 bp, Artificial Sequence
  ENSG00000259656_2 (sequence is synthesized)
gtatttttttatatgcacagagagtttctggaaggacagaaaataatctactgataatgattctatctaaggtcaagattcttttactttttcttgttttttgagacagagtttcactgt

SEQ ID NO: 1004113 - DNA, 84 bp, Artificial Sequence
  ENSG00000259656_3 (sequence is synthesized)
agacagagtttcactgttgttgccctggctggagttcgatggcgcaatctcggctcaccgcaaactccgcttcccaaacaaaaa

SEQ ID NO: 1004114 - DNA, 120 bp, Artificial Sequence
  ENSG00000259656_4 (sequence is synthesized)
ttcatgtagagaaccaggatctcttcacgggtaataccatgaagaattacctccaagtattcccagggttattccataaatgtgggggtttgagctacagcatttttactaaaatgaggt

SEQ ID NO: 1004115 - DNA, 120 bp, Artificial Sequence
  ENSG00000259656_5 (sequence is synthesized)
aactcagtggagctcaatccagaagaaacttctgactcagaggttctagccacatttagtatctggatgtatctacgctgctacacccaactctgctcagtgtttttccttcactgagtc

SEQ ID NO: 1004116 - DNA, 120 bp, Artificial Sequence
  ENSG00000278214_0 (sequence is synthesized)
gggaggagcagcccatttccaagccgggatgcagttccagggcaggcagtagaggcccaggtgcaacccccagcccaggaggagacttgactcgcctgaggtcagctggagccaggaaca

SEQ ID NO: 1004117 - DNA, 120 bp, Artificial Sequence
  ENSG00000278214_1 (sequence is synthesized)
cctttgtgcaacagctgccgtggcccatctgtgagagacacgtggaccccgtgcctcgaaacaggcagtgttgtaagcacggggacagagacgtacgtgagcagatggaacccccgaaga

SEQ ID NO: 1004118 - DNA, 120 bp, Artificial Sequence
  ENSG00000278214_2 (sequence is synthesized)
cctgcagctgtcatcctgggactgtgtgcccggcactgtgctaaatgctccctggggcatctcgtgtaacctttgcaggaaccctaaaaacgacgatcagattagcctcctcctcttgaa

SEQ ID NO: 1004119 - DNA, 120 bp, Artificial Sequence
  ENSG00000278214_3 (sequence is synthesized)
aacgacgatcagattagcctcctcctcttgaaaatggagacaaaattcaaataacataaacttcaccactttaaccattttattttatttacatattttttttgagacagagtctcgctc

SEQ ID NO: 1004120 - DNA, 90 bp, Artificial Sequence
  ENSG00000278214_4 (sequence is synthesized)
gccaggctggagtgcagtggtgcgatgtaggctctctgcaacctgggcctccccgcagctgggactgcaggggtgttccaccacacccag

SEQ ID NO: 1004121 - DNA, 120 bp, Artificial Sequence
  ENSG00000278214_5 (sequence is synthesized)
ttaaagggtacaattcagtggcgttcagtgcagtcatgaggttgtgcagccaccacctgtatctcatttcagaatatgcccatcactccaaaaggaaaaccctatccccacgatccgtgg

SEQ ID NO: 1004122 - DNA, 120 bp, Artificial Sequence
  ENSG00000278214_6 (sequence is synthesized)
ttccccagccccctggcccccagccctaagcagccactaagctgccttctgtctctacggattgccggttttgggtatttcatgtcgatgggatcagtgtgtggccttgtgtctggcttc

SEQ ID NO: 1004123 - DNA, 120 bp, Artificial Sequence
  ENSG00000278214_7 (sequence is synthesized)
tggacacatcgtattttgtttatccgttcacctgctgatgcatgccagatggttgtttccaactttttaattcccattataaagataaggaaactggccaggtgcggtggctcaagcctg

SEQ ID NO: 1004124 - DNA, 77 bp, Artificial Sequence
  ENSG00000278214_8 (sequence is synthesized)
gcttcagcctgggagacagagactctgtctctaaataaataaataaacaaacaaataaataaatgtaaactgaggct

SEQ ID NO: 1004125 - DNA, 120 bp, Artificial Sequence
  ENSG00000278214_9 (sequence is synthesized)
aataaataaacaaacaaataaataaatgtaaactgaggctaaaccgctccactcagggtcaacacctgccctgtgacccagcagttccacttttcggtatttatctaggagaaatgagaa

SEQ ID NO: 1004126 - DNA, 120 bp, Artificial Sequence
  ENSG00000278214_10 (sequence is synthesized)
cacatgtccacacaaagacctgtgcacaaatgttcacagcatctttctctgtaataacttcgagctggcaacgatccaaatatccatccacaggagctgggtaaacaaaccgtggtgtca

SEQ ID NO: 1004127 - DNA, 120 bp, Artificial Sequence
  ENSG00000278214_11 (sequence is synthesized)
tcctggagtgggacgctcctcatcaggaaagaggaaagaatgacccatgcacgcagcagcttggaagagtctcaaaaacaagatgccaatgaaggaagccaggcacgggactgcaactgt

SEQ ID NO: 1004128 - DNA, 120 bp, Artificial Sequence
  ENSG00000278214_12 (sequence is synthesized)
aagctgtgactctgtgtgactccagcggtacgaacttccaggaaaagcaaaaatatgggacagagtatccacaagtggcattcagggactggagtgggaactggcagggaaaggggaaat

SEQ ID NO: 1004129 - DNA, 120 bp, Artificial Sequence
  ENSG00000278214_13 (sequence is synthesized)
gtattgattatttcgattgcagtggtggggaggagggtggacacctgtgccaaactcacttaaaacggatgtattttattgtataaattatgcctcaatgaaatccattcataaaaagaa

SEQ ID NO: 1004130 - DNA, 120 bp, Artificial Sequence
  ENSG00000259654_0 (sequence is synthesized)
cagcctgggtaacagagggaaactgtctcaaaaaacaaacaaaaaaagaaccgaaatcatgcctactctttcacttctcgtctgtgtgtcatacaggatgcctcccttttctttcatttc

SEQ ID NO: 1004131 - DNA, 90 bp, Artificial Sequence
  ENSG00000259654_1 (sequence is synthesized)
ggagtgcagtggcacaaacacgcacaatcctcccacctcagtcctccaattagctgggactacaggcacatgccactacgcccagctaat

SEQ ID NO: 1004132 - DNA, 83 bp, Artificial Sequence
  ENSG00000259654_2 (sequence is synthesized)
ctcctgggctcacacaatcctcccacctcagtcctccaattagctgggactacaggcacatgccactacgcccagctaaggct

SEQ ID NO: 1004133 - DNA, 120 bp, Artificial Sequence
  ENSG00000259659_0 (sequence is synthesized)
tttttgtttgtttgtaggggtaagaggacttcttgttttacaatggcttccctaagagatacctgggcttgtcagcaaagcagctaataaaacactggcctattctttttatctgattat

SEQ ID NO: 1004134 - DNA, 120 bp, Artificial Sequence
  ENSG00000259659_1 (sequence is synthesized)
cacttgagaggggctgggaagtatcttttgagggaaaaggtctctggcactgtaggatttgggtgtgagccaccacgcccagcctatttgcagtttttaagatggagaaaaaggaatcct

SEQ ID NO: 1004135 - DNA, 120 bp, Artificial Sequence
  ENSG00000259659_2 (sequence is synthesized)
atttgattggtaatgtgcccagagttgatattttattctgcatgtactaatttttttctggtttttggaggtgttctctaaccaaaactgaacactttctggtagctaaaaactggtgtc

SEQ ID NO: 1004136 - DNA, 120 bp, Artificial Sequence
  ENSG00000259659_3 (sequence is synthesized)
tctttccagcttcatatttttataaggctgataatgctgtccactgaacaggactatttcttggtaggacatagagatggtcactgttctcattgtagttcccgtgcaagaaaatggaga

SEQ ID NO: 1004137 - DNA, 84 bp, Artificial Sequence
  ENSG00000259659_4 (sequence is synthesized)
tcactgttctcattgtagttcccgtgcaagaaaatggagacatcatgggatagggtgttgtcattgtaggtttaagaattgtca

SEQ ID NO: 1004138 - DNA, 120 bp, Artificial Sequence
  ENSG00000286179_0 (sequence is synthesized)
cctcgttgcagttcgcttttccatgggatcgtggaccctcaagtcctggcagcctgggttgctttctgatgccttcaaacaactcctaaatgcctaccagcaccaagcaggaaatgataa

SEQ ID NO: 1004139 - DNA, 120 bp, Artificial Sequence
  ENSG00000286179_1 (sequence is synthesized)
aaagaggctgatgagtttcgggtgtggttcagcctgggaagcctccttattcacaggaagccagtcctcggcttacacagcatcaggggatcaaccaccacaccgtgatctaaactgagg

SEQ ID NO: 1004140 - DNA, 120 bp, Artificial Sequence
  ENSG00000286179_2 (sequence is synthesized)
cccgcagaagttggaacaatgttaaaatgaaagcttaaatcagccccaattaaaagatgatatgtcatttaaatcacaaggatgttctctatgaggccttagagctgaagtccttgcaca

SEQ ID NO: 1004141 - DNA, 120 bp, Artificial Sequence
  ENSG00000286179_3 (sequence is synthesized)
gccgactctggcacccatcagcacatctcagaccttttctaggtttggtccctgcattcatcaggactttagattacaggtggcagaaatcaaatcaaatggctcaaataaaatggacaa

SEQ ID NO: 1004142 - DNA, 120 bp, Artificial Sequence
  ENSG00000286179_4 (sequence is synthesized)
ttgctagttcatcatatctttttaaaactccaaatatagactttcaggtatggttaacttcaggttctaggtctaggcagccttcttccccatctttaggtctgccttcccctctgtggg

SEQ ID NO: 1004143 - DNA, 120 bp, Artificial Sequence
  ENSG00000286179_5 (sequence is synthesized)
ctccattcttgggcagcctctctttgtggcgtggcgtggcttctggcagatccagcaactcccatagagatgtgagtttcatatccctcagtttccatgggagagctaagtctcattggc

SEQ ID NO: 1004144 - DNA, 120 bp, Artificial Sequence
  ENSG00000286179_6 (sequence is synthesized)
gccagtctctgtggccaaaagggctggaacactctgacagttcagtcccaagttaactcatgccactgtagaaaagcccccagtctcagatttcgaagaaagatgtgactctttgtaaga

SEQ ID NO: 1004145 - DNA, 120 bp, Artificial Sequence
  ENSG00000286179_7 (sequence is synthesized)
gctgtgtcataggaagggggaaagcactcaccagtttcctaatagagcaaaacgtcacttgtaatctagggtcctgattaatgcagagaccaaacctaggaaagatctggatgctggagt

SEQ ID NO: 1004146 - DNA, 120 bp, Artificial Sequence
  ENSG00000286179_8 (sequence is synthesized)
ctactgtttgaggacttcacctctaagacctcatataaacatcctttcaagctttcttctatacccaaggcccctccaacctttgcctggagaggagagacggtgactctggtgaggaac

SEQ ID NO: 1004147 - DNA, 120 bp, Artificial Sequence
  ENSG00000286179_9 (sequence is synthesized)
aggctgagcggcagaggggcgagcagacctcttcattgtggatccacgtcttcgtagaggcttttgagaggatcctgaccacatgcatttggaagaggtgtgctttacaaaagcattttc

SEQ ID NO: 1004148 - DNA, 120 bp, Artificial Sequence
  ENSG00000286179_10 (sequence is synthesized)
ctacctccttcaactctgggtgacggctgttgattccgattgtggctgaaaccatgatgatgaagataataatgatgctgctgatggcagaggtggtgatggtgatgatgaagttgatgc

SEQ ID NO: 1004149 - DNA, 120 bp, Artificial Sequence
  ENSG00000286179_11 (sequence is synthesized)
tgctgctgatggtggagttaattttaaatctgagatggatgacttctttggtgctgagtcactggaacagaaatggcctaattttctattgcatcaatgtgagaacagactaatacaacc

SEQ ID NO: 1004150 - DNA, 120 bp, Artificial Sequence
  ENSG00000286179_12 (sequence is synthesized)
agcatctcaaagaagagaggacacagacacgtgcagaggatgtagggagcagatgaccatctccaagccaaggagaaaggcttcggaagaaatcaacccttctaccctccagaatgccga

SEQ ID NO: 1004151 - DNA, 120 bp, Artificial Sequence
  ENSG00000229255_0 (sequence is synthesized)
atgataaagaaaaaatgaggaaatgctgtgaagaactaatagaacgtttcagaagcagaacaagtcgagagcagtgatgacccttttcttcctgctagtacctcctgtctgtctggctga

SEQ ID NO: 1004152 - DNA, 120 bp, Artificial Sequence
  ENSG00000229255_1 (sequence is synthesized)
actcaccatcagatgatgtcttgaacctcacctagatgggctggtggtgtgtggccaggttaagagcaccaacaggagtaagaaagtgacctgcctggttttaccgtgtgcactagggga

SEQ ID NO: 1004153 - DNA, 120 bp, Artificial Sequence
  ENSG00000229255_2 (sequence is synthesized)
ggggttgaaagctttcggttgatacatcacctctgggagttgaagaagaatgcaattaagagagctaaagaagtcagtatagaatctgaaactcagaggtcaactgatgtgtcaaagata

SEQ ID NO: 1004154 - DNA, 120 bp, Artificial Sequence
  ENSG00000229255_3 (sequence is synthesized)
cctccacaaatcagtaccttgattaaaactaaaattggagtcatcttcatatcttcatctttctccctcttcattaggaccgattgtagtctgtttccctctcactcacttgcaatcttt

SEQ ID NO: 1004155 - DNA, 120 bp, Artificial Sequence
  ENSG00000229255_4 (sequence is synthesized)
tagtgttgcatttgatttttatctttgtttttgttttaaatactgtcattaaagtcatagaaaaatctaaagtaaaactggttgaataaaaattttaaaatcgactctaatgtaataaac

SEQ ID NO: 1004156 - DNA, 120 bp, Artificial Sequence
  ENSG00000229255_5 (sequence is synthesized)
cagacaaaaatgatactttacatgttatatcttccctttaaactacaaatattcattgagtgtataccctgtattaggctgttggaataaaacagggaagaagacagaagaaactgcacc

SEQ ID NO: 1004157 - DNA, 120 bp, Artificial Sequence
  ENSG00000229255_6 (sequence is synthesized)
gccatcttagatcttgcagccaaattcctctgaacttttctctaaagacgtgctctggaaaaatgttgatcattttcctacatcatggaggtcttttcatgaccacctttgtctagacaa

SEQ ID NO: 1004158 - DNA, 120 bp, Artificial Sequence
  ENSG00000229255_7 (sequence is synthesized)
tgtcctgtttttaggtgcacgtttgagggctggagtctctgacccacagtgctgcagcctgcacgtggtttgtcctgacttctttgctacttcacttttcgtaaggctctgagagtgcag

SEQ ID NO: 1004159 - DNA, 120 bp, Artificial Sequence
  ENSG00000229257_0 (sequence is synthesized)
gacaggtgtgagccaccgcgcccggcctctccgtctgcgtcggcctcccacagtgctggggtgacaggtgtgagccgctgcgccggccgcatgtgtgctcttgagagcacttctctgggg

SEQ ID NO: 1004160 - DNA, 120 bp, Artificial Sequence
  ENSG00000229257_1 (sequence is synthesized)
actgcgttgcccaggctgctctggaactcctggcctcaagtgctgggattccaggcgtgaaccaccacgcccggctgagatgttccttttccttggaacttgatcaacacaaaatcctga

SEQ ID NO: 1004161 - DNA, 120 bp, Artificial Sequence
  ENSG00000229258_0 (sequence is synthesized)
ggacttagaaaaatagatccactcgcttcagacaacctcaggatctccaaactgaagacacaagtgacatgaccgaaacagggtcccctcaataagatttcccagatactgaggacctca

SEQ ID NO: 1004162 - DNA, 120 bp, Artificial Sequence
  ENSG00000229258_1 (sequence is synthesized)
gtctcctcaccaccacgattcctgcacaccgatgcattcctttaaaagtcttgtttcaggaaagcagctggaacattaatggcaattccactttcccattcatcgcccccgcccccacca

SEQ ID NO: 1004163 - DNA, 120 bp, Artificial Sequence
  ENSG00000229258_2 (sequence is synthesized)
agtgcctggcattaagaggattttttttttaagctcagcctatggacaacaaaagcatggactgtatttctcagcatcttttgcaggatgaggaaactggagcccaggtagccattttgg

SEQ ID NO: 1004164 - DNA, 120 bp, Artificial Sequence
  ENSG00000229258_3 (sequence is synthesized)
acctgaaggtggaagtcaagctagggagagcaaacaacacgtgtgtggatccctgatgatcaggtcatcctaatcctgaactgctttcctctggtctctttaacaggagagaccagagga

SEQ ID NO: 1004165 - DNA, 120 bp, Artificial Sequence
  ENSG00000229258_4 (sequence is synthesized)
aaaccatgagagagaggtaattttctatcccacttaagccactattgtactttggactttcttgtcatgtacagccaagcctaattataactaataaaacatgcaattgaaagacaaaaa

SEQ ID NO: 1004166 - DNA, 120 bp, Artificial Sequence
  ENSG00000229258_5 (sequence is synthesized)
cagagaactgcacctcagaagaatggagtttaaaactgtgatgacattctacctcattgaagaaatcctccagtgccaagggtggatctctaaagaaggattcaatccaggatcacatct

SEQ ID NO: 1004167 - DNA, 120 bp, Artificial Sequence
  ENSG00000229258_6 (sequence is synthesized)
tatatttacaataacatgccttttttctccttcagtctggaaccgtgtctcagtctatctttgttctttatgacattgacatattttaaagaataaaagccaattcttttatgcaccatc

SEQ ID NO: 1004168 - DNA, 120 bp, Artificial Sequence
  ENSG00000229258_7 (sequence is synthesized)
aacatactgagggaaagggccgctcggaaagatctaggaatgaacacccatcctcacaccccaggagtgccttggtttcagaaagcagctggaacattaatggcaattccactttcccat

SEQ ID NO: 1004169 - DNA, 120 bp, Artificial Sequence
  ENSG00000229258_8 (sequence is synthesized)
tggatggtctgccactgtgggctttatcttcaacatcgtctcacccttcttattaataacacaagttatccacttgtaaactgctgtttttttggggctatccacttgtaaactgctgtt

SEQ ID NO: 1004170 - DNA, 120 bp, Artificial Sequence
  ENSG00000229258_9 (sequence is synthesized)
tttttgggggcactgtcaccataaacttttgataaggcatcagtgatttcaacattcttcacccaagcttcaccataaatttgatgtttctttttgcttcattttagcagaatttgttcc

SEQ ID NO: 1004171 - DNA, 120 bp, Artificial Sequence
  ENSG00000229258_10 (sequence is synthesized)
aataggggctcttttcgaactgattttttttttcatttttttccactgggattttgagaaaatcaaactgatagccttcttagtgcctcaaactagatcctgttcagacacaaacaagtt

SEQ ID NO: 1004172 - DNA, 120 bp, Artificial Sequence
  ENSG00000254383_0 (sequence is synthesized)
aacagctatcagctagaacagaaagctatgaaaatgttcttccaagtttctctacttaggagactgtgctgggagaagttttctgaacaacctttcattcttccaatgctaggttcaaga

SEQ ID NO: 1004173 - DNA, 120 bp, Artificial Sequence
  ENSG00000254383_1 (sequence is synthesized)
aatcctgctaatattatgttttcattgaaatggtattgtagggctgaagtcaataagcaaagatgtagtgttgaaagtcaccccctttgttttcctcttgttttcacacattttcctctt

SEQ ID NO: 1004174 - DNA, 120 bp, Artificial Sequence
  ENSG00000254383_2 (sequence is synthesized)
agatttattctcctcttctcccttttagaaacagaatttggcataaataaatgataactgagaaaatggcatacacggacaagtaaatgcaagatttctccagcctcccacgggcttgaa

SEQ ID NO: 1004175 - DNA, 120 bp, Artificial Sequence
  ENSG00000254383_3 (sequence is synthesized)
atgtatttagggaagccaggcatgtatgcatgaaatagaaagtcaccatacaaggcagtggggcacctgccatttgctgcagaggacgcagctgaagataaggactacagccattcaagg

SEQ ID NO: 1004176 - DNA, 120 bp, Artificial Sequence
  ENSG00000254380_0 (sequence is synthesized)
tgtctctgtgctcatgacaaggacatatcacctaactctgggctctggctcacttagtagcttctttgccgttggactctcacaccgagatgtcaccgagcagcagcctttcccaggaag

SEQ ID NO: 1004177 - DNA, 120 bp, Artificial Sequence
  ENSG00000254380_1 (sequence is synthesized)
ttgttaaggagatgggaatcctcatgcctgctgctttttcccaaatcagaggaagcccgggagccagttgcagtaaagtcttgccagtaacgtttctcttaagaacgagaaagctactca

SEQ ID NO: 1004178 - DNA, 120 bp, Artificial Sequence
  ENSG00000254380_2 (sequence is synthesized)
gggagttccatctaaagacaaagtcaaaacccagcagaggacacagctgaaggaacacgagaaagtggcatggaaacgctgaagccccagcaccggcagacctcagttattggggccaat

SEQ ID NO: 1004179 - DNA, 120 bp, Artificial Sequence
  ENSG00000254380_3 (sequence is synthesized)
caacctcttgttactgttcaagcgagtttggaaacgttgtcagagacccacaacagaaaacaactcaaacagcaagggagatgtgcccctactggccagtgaaggaggaaatggctgtga

SEQ ID NO: 1004180 - DNA, 120 bp, Artificial Sequence
  ENSG00000254380_4 (sequence is synthesized)
atgtggaatcagaaatctggattggaacctgagctcagccttttactggccatgggatcttgaacaagttactcaactgaactgaatgtcaatttcctaatcaacaagacagtaaaatca

SEQ ID NO: 1004181 - DNA, 120 bp, Artificial Sequence
  ENSG00000254380_5 (sequence is synthesized)
aggtatagaagactctctatgctgccctcttgaataatgccccaagaatgcatgcctttcctgatcattctgtgaaatattgctgagtaaaggaacgagtgaattgtagatggataaata

SEQ ID NO: 1004182 - DNA, 120 bp, Artificial Sequence
  ENSG00000254380_6 (sequence is synthesized)
tctaaacaaactttggtcatgctgcaagcctagtggaaagcctgattcttctgggtattggtcaaggaacacccaccccagaatggaagtcatttagcaggaaagcagtggtctgctatt

SEQ ID NO: 1004183 - DNA, 120 bp, Artificial Sequence
  ENSG00000254380_7 (sequence is synthesized)
ctctgagcaccattgaccacttattggattgtggaagagacctaactcaaatttggaccaagaagtgacttgaaatcaagatctctccccagaagagacaacaatgaatagtgctgttca

SEQ ID NO: 1004184 - DNA, 120 bp, Artificial Sequence
  ENSG00000254380_8 (sequence is synthesized)
ctaaagactcctacatggctttgatgacataaagagtttgtagagtgaagacagaaatggtgaatgaataaacaatttgggcttgaatgtaatgaccaaaagaagtccaggagagtttca

SEQ ID NO: 1004185 - DNA, 120 bp, Artificial Sequence
  ENSG00000254380_9 (sequence is synthesized)
gggaaccaacttgcagctacatccacaattcctcaacactggaacaacatgcttatgacctttccttttcacagcaacagtgacgtgtttggtttgtaacagtttctgaaccactgaagt

SEQ ID NO: 1004186 - DNA, 120 bp, Artificial Sequence
  ENSG00000254380_10 (sequence is synthesized)
acttttcaactttctcccttggaaaagctggcatcttgcctgaaatccttggtgtggtctagcattgcttttgttttaatcacattccagtgagaaacagccacttagccaaatttacat

SEQ ID NO: 1004187 - DNA, 120 bp, Artificial Sequence
  ENSG00000254380_11 (sequence is synthesized)
cagcacttcctatggtagctattggaaacagcacgggcaaaaatgttgctatctactgcattcattggactctggtagcttgtaacaaataaatagatgtattttggctcctcttctcca

SEQ ID NO: 1004188 - DNA, 120 bp, Artificial Sequence
  ENSG00000286171_0 (sequence is synthesized)
gttgatttaacattgtctccccccacaaccgcgcttgactagcttgctgttttgcactaataacagtagtagacaacgtttacataaatcaataaaaacgcatataaaagtaacctttag

SEQ ID NO: 1004189 - DNA, 120 bp, Artificial Sequence
  ENSG00000286176_0 (sequence is synthesized)
gcgtttatgagctgtgacactcgccgtgaaggtctgcagcttcactcctgaaccagcgagaggaggaacccaccagaaggaggaaaacgcggaacacatctgaatatcagaaggaacaaa

SEQ ID NO: 1004190 - DNA, 120 bp, Artificial Sequence
  ENSG00000286176_1 (sequence is synthesized)
agacacgccgcctttaagaactgtaacagtcaccgcgagggtccgtggtttcattcttgaagtaagtgagaccaagaacctgccaatttcagacacaatggagagcgccagtcctgctgc

SEQ ID NO: 1004191 - DNA, 120 bp, Artificial Sequence
  ENSG00000286176_2 (sequence is synthesized)
ctgcggggccatacatctatttaatttcctctcatcttccccccggttccgagaggaaggtgctttcacctgcactgttcccatgaggaaacgaggcttcaggaatctgataaagcttcc

SEQ ID NO: 1004192 - DNA, 120 bp, Artificial Sequence
  ENSG00000286176_3 (sequence is synthesized)
aaactcccgtggctggcaggaaccaaggtttcgatggccggacttctcagccccccaggtggaaaagcaggaggcatgacagatgagggtgagagtgcatgccaggtcaggctgagaagg

SEQ ID NO: 1004193 - DNA, 120 bp, Artificial Sequence
  ENSG00000286176_4 (sequence is synthesized)
cgacaatgccatatggttttttccacttagcttagctccaggatgactttgaacagtgttacagccccatgggcagaaaattgcacttgcctcaagcttcattaaagcaaatcgagtcag

SEQ ID NO: 1004194 - DNA, 120 bp, Artificial Sequence
  ENSG00000286176_5 (sequence is synthesized)
aagggattgaaacacctggaagaaatgcaatggattcaaacagggaaaaggtgtgggtccgtcccttttcctggtaaatccagcagcctaggagatgtcagaaaaacattccaaggttcc

SEQ ID NO: 1004195 - DNA, 120 bp, Artificial Sequence
  ENSG00000286176_6 (sequence is synthesized)
gtacaggatggcccatgcaggtggagatgcagccacaggatacctgggattcattgcagcctcgtcacttaccagtgttggcactgtatcggttatcccgaatttaacagcctaaagcca

SEQ ID NO: 1004196 - DNA, 120 bp, Artificial Sequence
  ENSG00000286176_7 (sequence is synthesized)
cattcgtcatcttatactctgtgggggtagggaatccaggagtggattcaccaggaggttctggctgggtgtctccccggagccgcaggcgagtgtgggccgtggcagccatccctgttt

SEQ ID NO: 1004197 - DNA, 120 bp, Artificial Sequence
  ENSG00000286176_8 (sequence is synthesized)
ccaagtgcaccatgtggcagttggcttgaggctccaggtccttgaggtgcaggcttccccacggggctgctcgcggcatggcttcctcacccagagtgatggatccgagagagagcagcc

SEQ ID NO: 1004198 - DNA, 120 bp, Artificial Sequence
  ENSG00000286176_9 (sequence is synthesized)
aaactgaaagccacagccttttgtaagcaaacctcagaagtgacatctcgtcacatctgccatattctactggtcgcacagacctatcctgctacatggaaggagcagcaggaaggtggt

SEQ ID NO: 1004199 - DNA, 120 bp, Artificial Sequence
  ENSG00000286176_10 (sequence is synthesized)
ggggattgctgggaccatcttggaggctgccacagacatccaagcccctccaggcaggacaaaccaggatgagaggacagtgtcgggtgtagctgccaccacccagtgtcgtccaaggaa

SEQ ID NO: 1004200 - DNA, 120 bp, Artificial Sequence
  ENSG00000286176_11 (sequence is synthesized)
aatggagcaaccacatcctgcatggcaacaccaggtggccaagccagatcgtgtgaccactcgacgcttcccacccacagcaaagaggtgaggcctggtgcccagcagagagcagcccag

SEQ ID NO: 1004201 - DNA, 120 bp, Artificial Sequence
  ENSG00000286176_12 (sequence is synthesized)
cctacgggggacaggagcaggacaggagctcccagtgcctcagactgcagagtctaccccacgtggatggaagacagtgaggctggccagctgcacgtggaggatgtgacgtctcttctc

SEQ ID NO: 1004202 - DNA, 120 bp, Artificial Sequence
  ENSG00000286176_13 (sequence is synthesized)
agacagtgaggctggccagctgcacgtggaggatgtgacgtctcttctcagtctttgaccacaaacatcccagaggcacccccagctcagtgtgccccagagactctatcccccaaccta

SEQ ID NO: 1004203 - DNA, 120 bp, Artificial Sequence
  ENSG00000286176_14 (sequence is synthesized)
ggctctgcccactctgttccctgcctacctacaaagggcctacgctggggcagagccccttccacaccctgctgggtctcctgggcctttgctcatgctgttccctctgcccggagcccc

SEQ ID NO: 1004204 - DNA, 120 bp, Artificial Sequence
  ENSG00000286176_15 (sequence is synthesized)
tcgacgcttcccacccacagcaaagaggagtgcaggctctgctgattctcacgcacgtacaagaaagacttcttttcggtaaagaaaggaaggaaagcgctgcaggttccaccagaggct

SEQ ID NO: 1004205 - DNA, 120 bp, Artificial Sequence
  ENSG00000286176_16 (sequence is synthesized)
tttatttcagccactcaggaccctggctttctgctccaaggcactgaacacagtcaggctcttctaaacactggcagggacctcccccacagccgcccccacagggttctctgtttccca

SEQ ID NO: 1004206 - DNA, 120 bp, Artificial Sequence
  ENSG00000286176_17 (sequence is synthesized)
agtcctgatggattcaggcaagaccttcacacattcacccactacctgctggacaggagggtcatgaggcagcctgtggtgcccagctcagtgtgacacactgccaatgtgccgcctccc

SEQ ID NO: 1004207 - DNA, 120 bp, Artificial Sequence
  ENSG00000286176_18 (sequence is synthesized)
ccagcctctgatggggccgggccttgaccacgtgacaggctcaagctgccgtgcacatcccccaggaaaggggaagagctgctaaggtgtagcagtgaccaaacaaataagaaatgctac

SEQ ID NO: 1004208 - DNA, 120 bp, Artificial Sequence
  ENSG00000286177_0 (sequence is synthesized)
tcctagagacaccgcaaccgcacccacccgccgcctgcgcgtgaccaagatctcacccttatcgggttccttcgccgccgtcgccgtcgccacggcctccatcctgattctctcggactt

SEQ ID NO: 1004209 - DNA, 120 bp, Artificial Sequence
  ENSG00000286177_1 (sequence is synthesized)
ttcaaccgcccggcgggccccgcacactaacctccggcccacgcacgcaagagacactttcgcctgagaatgttccgggtccgggtgcaccgctgcgcccaggcaccgaagttccgggcc

SEQ ID NO: 1004210 - DNA, 120 bp, Artificial Sequence
  ENSG00000286177_2 (sequence is synthesized)
taaggcagacgttgcattgcgcatgcgtgcctctctcgggctccgccctccgcagccaggaaggaaaggggctccccggagagtgagagacccttaaacctctcctgtcagtcagtagga

SEQ ID NO: 1004211 - DNA, 120 bp, Artificial Sequence
  ENSG00000286177_3 (sequence is synthesized)
accagaatcattgttcgttttatcactgctgtgactccagctcccagcgtgcttaattttgggatggatggctaaaggactttcccccggagcctggagccgtcatacgctgaggggtct

SEQ ID NO: 1004212 - DNA, 120 bp, Artificial Sequence
  ENSG00000286177_4 (sequence is synthesized)
ccccggagcctggagccgtcatacgctgaggggtctcgctttgtcgcctagacgaatgcagtggcgcgatcacagttcaagtaacctcacattcctgtgctcaagtgatcctcctgcctc

SEQ ID NO: 1004213 - DNA, 120 bp, Artificial Sequence
  ENSG00000286177_5 (sequence is synthesized)
ccgcgcccggctaatttttaaaatttttttgtagagccaggggtcccactttgttgcccaggctagtccccaactcctggcctcaagcaatcctcccgcttcagcctctcaaaatgctgg

SEQ ID NO: 1004214 - DNA, 120 bp, Artificial Sequence
  ENSG00000286177_6 (sequence is synthesized)
gattacgcgcgtgagccaccagcctggcttacttccgtcatcataccctgtctctggctggcatgagatggatagtgagatagaacttcccattttgtgttcccaggacctggaggaaat

SEQ ID NO: 1004215 - DNA, 120 bp, Artificial Sequence
  ENSG00000286177_7 (sequence is synthesized)
ctacaggtgtgaaacaagacaactctggtccttatttccctatgggatgggtggggctctatttaggtgttaccagcagagtagacagacatgtcactcagtggccagggctttgatgga

SEQ ID NO: 1004216 - DNA, 120 bp, Artificial Sequence
  ENSG00000286177_8 (sequence is synthesized)
tccagagggctgagggagctgtccaccccaggctggagggtcaaggaagccttctttctgggagggtaccctcaagctaagacctgaagaacgagtaggagctgggttaagaggaaggta

SEQ ID NO: 1004217 - DNA, 120 bp, Artificial Sequence
  ENSG00000286177_9 (sequence is synthesized)
gggaagagtcttgaggaggatggcacgtacggacggttctggttgctgcaagcacttcactacggtcagggcataggaaaggagctctaacttgaaagccatgattgggctgtggaggtt

SEQ ID NO: 1004218 - DNA, 120 bp, Artificial Sequence
  ENSG00000286177_10 (sequence is synthesized)
ttgagaacctcatgaatttttatgcaaaattccatgtacctctgtattctccaatgcagtggttcatggcatcatttgtgggttccaaaaaggacttatggctcctcagaacaaaataaa

SEQ ID NO: 1004219 - DNA, 120 bp, Artificial Sequence
  ENSG00000286177_11 (sequence is synthesized)
cactgatttgatattcaaagggggagcagaaagagagggcgccagcgatgttaccaggtgctaggccatgcagggcctcataagccatagtaagtggcttgacctcctttattctgaagg

SEQ ID NO: 1004220 - DNA, 120 bp, Artificial Sequence
  ENSG00000286177_12 (sequence is synthesized)
tgagacgtgtgagaaaaactggctgagaacagaggaagagcttccccatttgcattcccttgaggtctggagttgtggaagaaagccaaggaggtccctatttaccaacccagattccta

SEQ ID NO: 1004221 - DNA, 120 bp, Artificial Sequence
  ENSG00000286177_13 (sequence is synthesized)
ggcattaccaggagaggccagcagagggcgctgtagcccagcatatggacatgaagggaaggggactttccagactaaaggccctgccacctcctctctggcgcattctagggtcccttt

SEQ ID NO: 1004222 - DNA, 120 bp, Artificial Sequence
  ENSG00000286177_14 (sequence is synthesized)
tagccaccaaccttggttccttctcacgttctgatgccctacccgagattctgagactagtcagtttccctcccttgtttttgttgcccatctccccttcacaaggctctgagctcccac

SEQ ID NO: 1004223 - DNA, 120 bp, Artificial Sequence
  ENSG00000286177_15 (sequence is synthesized)
cagggaagattggggctgaattggcttctcctgtggcccagcattgtctctcacaaggagccaggaacacagcatgtatgagggaacgaagacataaggttgctaaggaaggggaagatg

SEQ ID NO: 1004224 - DNA, 120 bp, Artificial Sequence
  ENSG00000286177_16 (sequence is synthesized)
ggccatggggatgcaatctggagtcttttaccctggctcactcctccaggaagccctccctgcacaccaccccaggctctcacagctgaccacttggtgctggcaggtctttgttctctc

SEQ ID NO: 1004225 - DNA, 120 bp, Artificial Sequence
  ENSG00000286177_17 (sequence is synthesized)
tggagtgggagctctgtgagaacggggtccaggactgccgtggccatactatgtccccagcactgtccaggacagctgaagaacacagcaggtggctcacacacactggctgaaacatga

SEQ ID NO: 1004226 - DNA, 120 bp, Artificial Sequence
  ENSG00000286177_18 (sequence is synthesized)
agctcctggaatccccatgagccccaaacacagaacaggcaggaactgtcctccgtgctgcacacaggccaggcctgaggcaggtggtctgtggatgcccagtgatgatgccaaacaaac

SEQ ID NO: 1004227 - DNA, 120 bp, Artificial Sequence
  ENSG00000286177_19 (sequence is synthesized)
cagccctggtctctgccccatcagtcccacccatccctccacctagaggcctgttccatgtcctttactcaaaaactcctggagggattttagactgtgagaggtagagaacaagagaag

SEQ ID NO: 1004228 - DNA, 120 bp, Artificial Sequence
  ENSG00000286177_20 (sequence is synthesized)
cactttaaaaatgaactagtggattttaaaccagggacccttgtttaagcgtgcatttttagcaccaaaatcggggccaggcacatgaatccctcagttaagttgtttaatgaatgagta

SEQ ID NO: 1004229 - DNA, 120 bp, Artificial Sequence
  ENSG00000286177_21 (sequence is synthesized)
aataatttccctttaaagaggcccccaccccaattaacggccaactgcagtaacacttcagggtttcaaccctgcttccttcctgctaggaggtgccatgtcatttattcaaagaaaaca

SEQ ID NO: 1004230 - DNA, 120 bp, Artificial Sequence
  ENSG00000286177_22 (sequence is synthesized)
aaacgaaaccaaacaaaacagggcaaacacatttcttaataagtgcagtttgttaaaatcatgttaaaacatatgagtcaaggggaagtaaaaataaagggtatcactgtaggaaaagct

SEQ ID NO: 1004231 - DNA, 120 bp, Artificial Sequence
  ENSG00000286177_23 (sequence is synthesized)
tttgggtctggcacctgggagaccactggagaggaggcagtgggagaaacttcaagttctgaagggaaggagccccccaacctccccttcttccctctcacccactgaatcccaccagaa

SEQ ID NO: 1004232 - DNA, 120 bp, Artificial Sequence
  ENSG00000286174_0 (sequence is synthesized)
acccagttgatcatcagagagccagaatgaaacaaccacataataaggcagatattggaaattcttaaaatgatgagcgtcttcccaaactggaaataattgatgaggaatattttaaac

SEQ ID NO: 1004233 - DNA, 120 bp, Artificial Sequence
  ENSG00000286174_1 (sequence is synthesized)
cctggaagcaaagagatttcaaaaggagatgcaattttaaagacactcatctatggagtgccccaaatgcactaggactgcacaggctgtgtggggaactcaaggttgaaaaagatatat

SEQ ID NO: 1004234 - DNA, 120 bp, Artificial Sequence
  ENSG00000286174_2 (sequence is synthesized)
ccttggccctcaggaagactacagccaggagagaaggggctgtgtctccactcctctttgatgacctgagactcatggaggtcctgctctgtaggtgatgcagcctgctcacaccaggca

SEQ ID NO: 1004235 - DNA, 120 bp, Artificial Sequence
  ENSG00000286174_3 (sequence is synthesized)
ggacacacaccgtccttccacctgccaccctgcaccttactacctgcagtgtgcactggtgtggtccatgcccctacctcctgaacagtagttcatgttctcactccaccaaaggcgcac

SEQ ID NO: 1004236 - DNA, 120 bp, Artificial Sequence
  ENSG00000286174_4 (sequence is synthesized)
ctctgagagatgtattacagaatccaatccaatgaaactctggcctcattcatcgcatgattggtgcaccgttgctccctttgagttggaatacgtcgtaggctgaggtgggaggcctgc

SEQ ID NO: 1004237 - DNA, 120 bp, Artificial Sequence
  ENSG00000286174_5 (sequence is synthesized)
aggtgctcatcttgttctgcctaaatacctgctgcgggctgaatgagctggcagtgggtgatggggctaacagagtcaacagaatcctgcagaaccaggaaatgttcacatgtataaaaa

SEQ ID NO: 1004238 - DNA, 120 bp, Artificial Sequence
  ENSG00000286174_6 (sequence is synthesized)
tactaggaatatttttgcctcatgaaaaaagatgaacttctatcttttaggaaacaaattgctttggaaactctattcttagctcaagaactgggtagggaggcttgaaagaggcaacca

SEQ ID NO: 1004239 - DNA, 120 bp, Artificial Sequence
  ENSG00000286174_7 (sequence is synthesized)
ggcaggtaaaggcagcaatgctaataggaaagcagtagctccccatcagcacagccaggctgatgaaactcagcgccctaaccatgataactaacactgcaaaatgctccctagggcact

SEQ ID NO: 1004240 - DNA, 120 bp, Artificial Sequence
  ENSG00000286174_8 (sequence is synthesized)
gatttttccaacttagctgcacagtggagtcacttggggagctttgtaaaatactgatgctgagtctcaccccagagattatgacttaattggtttgggatgaattctgggcatcaggat

SEQ ID NO: 1004241 - DNA, 120 bp, Artificial Sequence
  ENSG00000286174_9 (sequence is synthesized)
ttttaaaatttcccccaggtgattctaatgtgcggcaaagtttgagcccctctgctaagcaggcttcatgttcattaacacattcaagctgcccatcgtggctcagctggtccggtggtc

SEQ ID NO: 1004242 - DNA, 120 bp, Artificial Sequence
  ENSG00000227360_0 (sequence is synthesized)
ggagacactcaggaggaagcagaggggagaggaaacgctgcttttggagccaacaactatggatgtgttgtccagaggaaacctgtggatcaagcaaggatgcctacaaaaagactaatt

SEQ ID NO: 1004243 - DNA, 120 bp, Artificial Sequence
  ENSG00000227360_1 (sequence is synthesized)
tcccagtaatccaacttattccaaacactccacccacaaggcagcaagtgagggaaaaaatagaattctgcttgaagatgcttttcagtcaactctctctagctcataaatcagcgcttc

SEQ ID NO: 1004244 - DNA, 120 bp, Artificial Sequence
  ENSG00000227360_2 (sequence is synthesized)
tccaagagtgttatgaaccctgcaccctccttgtcagtgctgatttctgcacccatctcccagttaccatctggaatagaatccaatagtgatccaccaatggacaatttttgctatgaa

SEQ ID NO: 1004245 - DNA, 120 bp, Artificial Sequence
  ENSG00000227360_3 (sequence is synthesized)
atcttgaacttctacacccatccttggctggctttttccatgtgaggccatatagagttgctgcaggtgataagcatcctgatggaactgagcttcactaacaggaggacaacactgatt

SEQ ID NO: 1004246 - DNA, 120 bp, Artificial Sequence
  ENSG00000227360_4 (sequence is synthesized)
gcagtatcagggatgatatagtttgagccggattatagagctcatcaactgatccacatcttaaatgctccatctttggcataaggtgtttgtaaataatatgcagggcatttataaata

SEQ ID NO: 1004247 - DNA, 120 bp, Artificial Sequence
  ENSG00000227360_5 (sequence is synthesized)
tgatgggatacttaataccaaaattaactataagtgaattgctgggatagaataaaatacagaaaacgaatacataagatcaatatgttaccataaaattaaaatatttaatagcttcaa

SEQ ID NO: 1004248 - DNA, 120 bp, Artificial Sequence
  ENSG00000227360_6 (sequence is synthesized)
agaaagctgaggctcagagtgatcaagaatacccagccagaacgtggcatctgggacttctgtctccactctgttatccaccagcacccttgggccctattgcttggctagatgggcact

SEQ ID NO: 1004249 - DNA, 120 bp, Artificial Sequence
  ENSG00000227360_7 (sequence is synthesized)
ctgcatgtatcaggcattgtctgtcacctgagtcactacatgtatgacatcatatgtctattaccagtctcagatatacactaagaaaataagatttcattaaagtattttctaaattca

SEQ ID NO: 1004250 - DNA, 120 bp, Artificial Sequence
  ENSG00000227364_0 (sequence is synthesized)
ggaggtctgggtgcctcctgtccagggtatgagcccttgaaggagctttggaagggaaaagagcagatgtcgcctcttgccccaggtcttcgcagggcaggagtgtgcctggtggtgcgg

SEQ ID NO: 1004251 - DNA, 120 bp, Artificial Sequence
  ENSG00000227364_1 (sequence is synthesized)
cctccctagggaagagggtcggggatcagcagccagaggaggaagagctatgagtctggaatgaagagatgagaagctggagcttcttatgtgaaaaataaccctccagccatggctgcg

SEQ ID NO: 1004252 - DNA, 120 bp, Artificial Sequence
  ENSG00000227364_2 (sequence is synthesized)
tcaccaggcacaggactgcatcctgtggtttcgcctagaattcttgaccaaggcatccctccccgtgttctctcctggcctccctgccttctgctactcaatctccagtagcccagctac

SEQ ID NO: 1004253 - DNA, 120 bp, Artificial Sequence
  ENSG00000282418_0 (sequence is synthesized)
ttctgaggccacttgcactgcagactccaggagccagggctgggctttgactggcagagtccgagcagaggaagcttgccggacaccaggagagctgccacccggacagagctggccaga

SEQ ID NO: 1004254 - DNA, 120 bp, Artificial Sequence
  ENSG00000282418_1 (sequence is synthesized)
ggcctgtgcatgggccacaaggaaagaaggcacagcctaacgtaacctggcaagcacctgtgtagcctctgtaagtgcttacccagagaagcaggagcacggcgatctgggtgtttggtg

SEQ ID NO: 1004255 - DNA, 72 bp, Artificial Sequence
  ENSG00000282418_2 (sequence is synthesized)
gcttttatgagctgtaacactcaccgggaagatctgcagcttcactcctcgcgctgccttaagagctgtaac

SEQ ID NO: 1004256 - DNA, 65 bp, Artificial Sequence
  ENSG00000282418_3 (sequence is synthesized)
cagaaggaagaaactccgaacgcatcttaacatcagaaaggacagactccagacgcaccacctta

SEQ ID NO: 1004257 - DNA, 120 bp, Artificial Sequence
  ENSG00000251405_0 (sequence is synthesized)
caggtacctgggtttctgtactaatattgcaccctgaattttgagaaatatttataagcacctactaacttcatgaggaaaatacctttgtccaagtgatcaactgttaaatttatatcc

SEQ ID NO: 1004258 - DNA, 120 bp, Artificial Sequence
  ENSG00000251405_1 (sequence is synthesized)
ctctacctatcaatgatatattaatctgttttttaaaaaaaggcagaaaaagacaaaaaatggaaaagtaaaatgggcaagagatttcttactttttccttcgcactttctggtatttcc

SEQ ID NO: 1004259 - DNA, 120 bp, Artificial Sequence
  ENSG00000251405_2 (sequence is synthesized)
cagtttttctaaaactagcatatactattttaaaattataggtcaataataatacatgaatgtgctttccttgtaagaaattaagacattccagataaggctaaaaagtccctgttgacc

SEQ ID NO: 1004260 - DNA, 120 bp, Artificial Sequence
  ENSG00000251405_3 (sequence is synthesized)
tctaatcctggattcctccctcatacctagagaaaatgtctgttaaatattggtatgcttttttttttctagatctttttcaatgcagagttatttgtggtttatatctatggcatcatg

SEQ ID NO: 1004261 - DNA, 120 bp, Artificial Sequence
  ENSG00000251405_4 (sequence is synthesized)
tgtgtcttgtcctaaaactttttaaagctcaatattgtatctttcactattttttatcttggtatgtgcaaaactactttatcagcttattctttttacctgcttcagagttttccatga

SEQ ID NO: 1004262 - DNA, 120 bp, Artificial Sequence
  ENSG00000251405_5 (sequence is synthesized)
gaatggacattccacagtttatacagcctttcctctatgatggccattaggcatctttcctttttttttttggcaattagtagtcttctttcattgagaagaattggtatgtcatttaaa

SEQ ID NO: 1004263 - DNA, 120 bp, Artificial Sequence
  ENSG00000251405_6 (sequence is synthesized)
aatttaattctagcttcctaaactaaaaaaactccagaaagctcatgcctcattctaatctcagaaagcactgtctaggcttggagatctccccagctgtctaagtagaaagcagaatga

SEQ ID NO: 1004264 - DNA, 120 bp, Artificial Sequence
  ENSG00000251405_7 (sequence is synthesized)
ggacttcagtgagcctaatccctgctctgtgttccccatccttccccgacccctagcccccaaggactgggatcaatattggaaacctgtgctttagttcttccacctctgctgctgcta

SEQ ID NO: 1004265 - DNA, 120 bp, Artificial Sequence
  ENSG00000251405_8 (sequence is synthesized)
gcccccatcaatagtctgcctctggattctgaacaggggaagctgaattgatggtctctgagtcacagttcctcatgaaaagaggtgcttaacaggagacactcggggactgaggcttca

SEQ ID NO: 1004266 - DNA, 120 bp, Artificial Sequence
  ENSG00000251405_9 (sequence is synthesized)
gggacccacccccccccgccaccccgccccacctccactgttctggtgcccctgaggccttcagaagttgttcctatttatccctacgacttctgagggctacgttgctatagcaacctg

SEQ ID NO: 1004267 - DNA, 120 bp, Artificial Sequence
  ENSG00000251405_10 (sequence is synthesized)
ggtctgctgatctgtgtaaaaaacttatcaattagctgtctggagagtccatttaaggggtaacagagaagcaattactccttatagaggaagcgcaaacagtccccatttcagagcctc

SEQ ID NO: 1004268 - DNA, 120 bp, Artificial Sequence
  ENSG00000251405_11 (sequence is synthesized)
tcagggagagtctgagaatggcaggtccaagtcactcattttagggacgggggcactgagggatgaaatgaactggttcatcccaagtcacaaagacaattagaggcaaggcatcctttc

SEQ ID NO: 1004269 - DNA, 120 bp, Artificial Sequence
  ENSG00000251405_12 (sequence is synthesized)
tggctctgattcagaagctccattatctctctacctttgttccaggcttctcctttcccctcccgtctattctccaagcacctattgcctccaagatgggctctagactgtaagagcctt

SEQ ID NO: 1004270 - DNA, 120 bp, Artificial Sequence
  ENSG00000251405_13 (sequence is synthesized)
gtccttcactctcccagtagcccccaggcctttgaaaacagccaggcagaccccctcacctgctgctcacatggcatcctgtggtggcccacgaagccccagtgacctgctgcctggctg

SEQ ID NO: 1004271 - DNA, 120 bp, Artificial Sequence
  ENSG00000251405_14 (sequence is synthesized)
cctccctccacggctctaacctctgtccccttggcaccagctcactatgaggtcctccctattccttaagaccaagctccagcctcttcaaaaacagcacatctctctctgacacagcca

SEQ ID NO: 1004272 - DNA, 120 bp, Artificial Sequence
  ENSG00000251405_15 (sequence is synthesized)
ctctccctttatcctgtgtattccttcacagctcccctccccatctgcaaccacactctgattgttacgactttgctcgttcccctctctggaataaaaatggtaaaactctgtctctta

SEQ ID NO: 1004273 - DNA, 120 bp, Artificial Sequence
  ENSG00000266783_0 (sequence is synthesized)
tgtatgcagcccctgccccccttttttttaatcatagccattttgacggatataaagtggtatcttattgtggttttcgtaaacacattgggttttaaatgttctgaagacagctgaata

SEQ ID NO: 1004274 - DNA, 120 bp, Artificial Sequence
  ENSG00000266783_1 (sequence is synthesized)
cacaaatgttaaatccctcaatgtgagcagtttatctgttaattttggaaatacacttattttctggaaatgacacttgcaaggttaactgcagaaataccaggaaaatccagggtattt

SEQ ID NO: 1004275 - DNA, 120 bp, Artificial Sequence
  ENSG00000266783_2 (sequence is synthesized)
aagatttactttcactttaaagtttacatgaaattagagaatagaatttcttgaattcatgtatattctaattgctaaatacttgtattaatcataaatacaaattatgaaatgtgctgc

SEQ ID NO: 1004276 - DNA, 120 bp, Artificial Sequence
  ENSG00000266783_3 (sequence is synthesized)
atccggtagtgccagtcctgcccatccccatccttttctcatcactcctctttttaataaatttgttttctttccccatataaattttaggatcaatgataacatctagttagaaaacct

SEQ ID NO: 1004277 - DNA, 120 bp, Artificial Sequence
  ENSG00000266783_4 (sequence is synthesized)
gttgccatttttatggcatcaagttaaatttctaaattaaattagggcagtgttgacatctttaagatgttggtgattccgccccaaaacatgaatgtatttttccatttgctcacgttt

SEQ ID NO: 1004278 - DNA, 120 bp, Artificial Sequence
  ENSG00000266783_5 (sequence is synthesized)
tgttttgtcgttgtgtaaaattttctttataaaggccttgcaggtttcttgttaagttgtagtaattttttgttgttgtatctcttggattttccagatatagaactctttcaaatagta

SEQ ID NO: 1004279 - DNA, 120 bp, Artificial Sequence
  ENSG00000266783_6 (sequence is synthesized)
gtaattttacttatacctttccaattatcatgtttctgatttcttctctaattctgtagggtggaaattataatacaatattaaagaatatttgtgtgcataataaacataagtaatata

SEQ ID NO: 1004280 - DNA, 120 bp, Artificial Sequence
  ENSG00000251408_0 (sequence is synthesized)
acaatggagtaggttggattcctaatccagtctgccttctatccttataaaagggggaaattggatacagagacacaagcaacgggagcatgccgtgtgaacatgaaggtagagatcagg

SEQ ID NO: 1004281 - DNA, 120 bp, Artificial Sequence
  ENSG00000251408_1 (sequence is synthesized)
tcgaggcatcagctagccaaggaaatgccaaagatgggagcaaacccccggaagccatgagagcggcctgggacagatccttccccagggcttcatagggagcgtggaccagctgacacc

SEQ ID NO: 1004282 - DNA, 120 bp, Artificial Sequence
  ENSG00000251408_2 (sequence is synthesized)
tgatttcagacttctagcttacagaagatgtaattttctttttcaaaatgtcttctacgtggcaagttggctgcctcttcccagacatctcatcactattccagtcaagaaggggaagaa

SEQ ID NO: 1004283 - DNA, 120 bp, Artificial Sequence
  ENSG00000251408_3 (sequence is synthesized)
caaaaggcatacccacactaggtcagctccacttcaccgctttcctgaaaactctccccagagagctctgttttatctcattggctgggacggtgtctcatggccagccctggcttcaga

SEQ ID NO: 1004284 - DNA, 120 bp, Artificial Sequence
  ENSG00000251408_4 (sequence is synthesized)
ctgggacggtgtctcatggccagccctggcttcagaggaggctgggagtattgttattattttttaagatggtgtcttgctctgttgtccagtttggagtgcaatggcgtgatcttggct

SEQ ID NO: 1004285 - DNA, 86 bp, Artificial Sequence
  ENSG00000251408_5 (sequence is synthesized)
gatgtttttttttaattgaaggtacattgctgcctgaaacaaagtcagggttccattagtgaggaaaagaagaagaatgacttttg

SEQ ID NO: 1004286 - DNA, 120 bp, Artificial Sequence
  ENSG00000251408_6 (sequence is synthesized)
agggttccattagtgaggaaaagaagaagaatgacttttgaacaggcaactattggttagtagatccaggttttgtaaaacctggagccgctacagtcccccttaggaagaagaatttaa

SEQ ID NO: 1004287 - DNA, 120 bp, Artificial Sequence
  ENSG00000251408_7 (sequence is synthesized)
aaaccccagtacaagacttggtacaaaaatgaaaacttatttagaataataacaaatcacaacaaattttaaaatattttaagttgacaaatatcaaaaacgttgcgaaaacattataaa

SEQ ID NO: 1004288 - DNA, 120 bp, Artificial Sequence
  ENSG00000251408_8 (sequence is synthesized)
actaatataaaattgtattaattggatacctgatatccacctttataatatcttcttttttttacattttttgcttcttcgtcatttttgattacctctttggaagccaatgattttata

SEQ ID NO: 1004289 - DNA, 120 bp, Artificial Sequence
  ENSG00000251408_9 (sequence is synthesized)
atatttttcctgtggagaaaatagataattcagagtactcctataatgatgggaacaaattttaatgttggttggaaaactttgtcagcctcataactcattattggtaatctcaggtag

SEQ ID NO: 1004290 - DNA, 120 bp, Artificial Sequence
  ENSG00000251408_10 (sequence is synthesized)
ttttttgagattgttttcaaatttggagaaaggtctatcattctttcataaatgaatgctaacacttggaagaattctatttcttccaggcttcttactgggattttattaattttcatg

SEQ ID NO: 1004291 - DNA, 120 bp, Artificial Sequence
  ENSG00000251408_11 (sequence is synthesized)
atgaaaagcaactgaacaattgcaaaccagaacatgactcgactaacacctcctaaacctcagtgctggcgcccatcacctggagaggcataggagaaatgcagatgcccaggctcctcc

SEQ ID NO: 1004292 - DNA, 120 bp, Artificial Sequence
  ENSG00000251408_12 (sequence is synthesized)
acatcccactgaattgaagcctcagagtagcagggtctaggaatcagcattttactaaatgccccaggtgactcctgctgagcagtcctgggctatgcgacacccccagttgccttgtga

SEQ ID NO: 1004293 - DNA, 120 bp, Artificial Sequence
  ENSG00000251408_13 (sequence is synthesized)
ctctgagggtctgcaaatccagacctctcctattggaagaatgacattttcaacccttatgtctcttcctctgcccatagactcctggtgccaggcaccatagcacacattgccagtgcc

SEQ ID NO: 1004294 - DNA, 120 bp, Artificial Sequence
  ENSG00000251408_14 (sequence is synthesized)
atggcaaggagggcactcctgggagccattagcctgttcagggagcaacaactcgacccacacagactggctcagacctacataaacacaccccactaaacccaaaccaaggcatcccca

SEQ ID NO: 1004295 - DNA, 120 bp, Artificial Sequence
  ENSG00000251408_15 (sequence is synthesized)
actcaatcccccttcagctacatccccaaaatgcccttggcctccgcagcagctccgaagtgggaggaagcatgatgagggcggcatagggaaagagacagagggtattatgggttggat

SEQ ID NO: 1004296 - DNA, 120 bp, Artificial Sequence
  ENSG00000251408_16 (sequence is synthesized)
gagctcagaatgtgactgtatttggtgataggacctttaaagaggtcactgagcttaaatgaggtctttagggtgggacctaatgcaatatgcctggtgtccttataagaagagattaag

SEQ ID NO: 1004297 - DNA, 120 bp, Artificial Sequence
  ENSG00000251408_17 (sequence is synthesized)
acacagaaggaagcccctgtggagacacagtgagaagatggccatctgcaagccaaggagaggggacttggaggaaaccaacaccttggtctcagacttgaagcctcctgaactgtgaaa

SEQ ID NO: 1004298 - DNA, 120 bp, Artificial Sequence
  ENSG00000251408_18 (sequence is synthesized)
aataagtttctgttgttaaagctcttcagtctgtggaaccctgtcttggaaaccctggcagccagcttagccagttacagctaaaatatcttgcttttggaaagtatttccaaacacaag

SEQ ID NO: 1004299 - DNA, 120 bp, Artificial Sequence
  ENSG00000251408_19 (sequence is synthesized)
gccacatgaacccagagctctggctctcccaggccttggaagggtctgtacttagcttcacaaggaattcacccccgctgccaccacgtggtcactacataaccctcaggacgacctatg

SEQ ID NO: 1004300 - DNA, 120 bp, Artificial Sequence
  ENSG00000251408_20 (sequence is synthesized)
gggcagggggtcaggtaccaccaagatctccctattagggacgagaggttggggcccaggggctcactcacagcaagcagcatggaagccacgagtcttccgaagccaaagctgctttcc

SEQ ID NO: 1004301 - DNA, 120 bp, Artificial Sequence
  ENSG00000251408_21 (sequence is synthesized)
ccgccccgtgtgccctgagcccacaagtggtagggaggaagtgccctgagccctggaagtggtagagaggcaggtttcagctccctataaagacaaacattctcatcagaggggctcctc

SEQ ID NO: 1004302 - DNA, 120 bp, Artificial Sequence
  ENSG00000251408_22 (sequence is synthesized)
tctgggaagctgtgagcacccaacacctgtgatgggctggtcacttgcaaagatggtggaaagaaacttcagttcctgctgctcttgcagagtagagtgtggtcaccaccaccactgcag

SEQ ID NO: 1004303 - DNA, 120 bp, Artificial Sequence
  ENSG00000251408_23 (sequence is synthesized)
ggctgggctgctgggattaaattccagctgtgtcaggtacccatggtgaccttaggcaagtaagtgaacctttagtttccttatctgtaagattaatcttttaatcataataactgcata

SEQ ID NO: 1004304 - DNA, 120 bp, Artificial Sequence
  ENSG00000251408_24 (sequence is synthesized)
ggtttgggtggggattcagtgagtgaatatatgtgactctgggtttgtttcctgggctgccctaatacagtatcacagactgggaggcctgaaacaacagacatttattttctcacagtt

SEQ ID NO: 1004305 - DNA, 120 bp, Artificial Sequence
  ENSG00000251408_25 (sequence is synthesized)
atgcctggccagagtccacagtcagggtgttggcagggctgtgcttcccctagaggctctaggagaggatccttcttggcctcttccagctcccggtggctccaggacttccttggcttg

SEQ ID NO: 1004306 - DNA, 120 bp, Artificial Sequence
  ENSG00000251408_26 (sequence is synthesized)
cggccgcatcactccagtctctgcctctgtattacacggcttcctcctctttgtgtgagtgtcttttataaggatgtcattggatggaggactcacccagataacccaggaggatctctt

SEQ ID NO: 1004307 - DNA, 120 bp, Artificial Sequence
  ENSG00000251408_27 (sequence is synthesized)
ctcaagctccctaacttaatcatacctgcaaagactctttttccaaatgagttcccatatcacagtttccaggatgtggacatacctttagttattatgaattatatggttatttatcta

SEQ ID NO: 1004308 - DNA, 120 bp, Artificial Sequence
  ENSG00000251408_28 (sequence is synthesized)
cagctgtgataattctaaaggaggaagagaagttggtaggagaccatgtaacatggagattggcttggtctgaggggcagagtcttccttgaggtggttagcttgagtattagctagcta

SEQ ID NO: 1004309 - DNA, 120 bp, Artificial Sequence
  ENSG00000251408_29 (sequence is synthesized)
gaagaagaggaacagaaacaatgtcccagggccagtgaacagcagcatgaaggcccagagttaggatttgaccttccacttgaaagggagccactgggggctcttggggcagggcgagag

SEQ ID NO: 1004310 - DNA, 120 bp, Artificial Sequence
  ENSG00000251408_30 (sequence is synthesized)
tggcaggattaaaggaggcctgtgagcacgtgtggaagagcagcctgacctcaccagccccgtggaagatcccaccaagaccggtgcacatctactgtgctggcactctgcctaggcacc

SEQ ID NO: 1004311 - DNA, 120 bp, Artificial Sequence
  ENSG00000251408_31 (sequence is synthesized)
aggaacacagcagggaaacagctgtttgtgcccccaagggctcatgggccagtgggagagacagaagagtacctggatcattctgatggggtagccctgggctataaaagtgcagaggaa

SEQ ID NO: 1004312 - DNA, 120 bp, Artificial Sequence
  ENSG00000251408_32 (sequence is synthesized)
ggggccaggtgcagtgtcgcatgtctataatcctagtgctttgggaggctgaggcagaaggatcccttcaaaccaggagttcaagccagcctgggcagcatagcaagaccttgtctctac

SEQ ID NO: 1004313 - DNA, 69 bp, Artificial Sequence
  ENSG00000251409_0 (sequence is synthesized)
aacttacatgtgaagcagagctgggtgccagcttgtcatggcctggactgttggctctctctgtgatcc

SEQ ID NO: 1004314 - DNA, 120 bp, Artificial Sequence
  ENSG00000251409_1 (sequence is synthesized)
agagcctgaatttcctgtcactgggcataacgttttaaaaatattattgtttttttaaaccctggcactgaaccagtttttattcttcatcttgacttaatgcctctccattctcttctc

SEQ ID NO: 1004315 - DNA, 120 bp, Artificial Sequence
  ENSG00000251409_2 (sequence is synthesized)
tcatcttcttctcctggctccactcacctcctctgtagccaggagcccacagttggctatttcggccgtgtgtccagagtctggaatccctcgtccccttgggcttgcactgtggccagt

SEQ ID NO: 1004316 - DNA, 120 bp, Artificial Sequence
  ENSG00000257120_0 (sequence is synthesized)
acttttgctgcattgaaaaatatcctggcaaatgttcatctgggcatgttgaataaaagacctcacattgagaaaaatcctactatctgtttgttttgaatcctcagtcctcatttgcaa

SEQ ID NO: 1004317 - DNA, 120 bp, Artificial Sequence
  ENSG00000257120_1 (sequence is synthesized)
tctgcagctaacccatcttgtcagaaactttggaaagtcatgagcatttggactgaggttctaccaagactgattggttatccagtattacctgctacaggccgggcgcagtggctcacg

SEQ ID NO: 1004318 - DNA, 120 bp, Artificial Sequence
  ENSG00000257127_0 (sequence is synthesized)
atttgaattggtgaacttagtaaagcagacggctctcaccaataagggcaggcatcatccaatctgtcgaaagcttgaataaaacaaaaagaggaagggaaaatttgcttcttttcttct

SEQ ID NO: 1004319 - DNA, 120 bp, Artificial Sequence
  ENSG00000257127_1 (sequence is synthesized)
tgatctagtatatcatcttctcctgcccttggatgtgagtgggccttcagacttaaaccaggagttacacctttggcttccctggttctcagttctttggacttggactgaattacactg

SEQ ID NO: 1004320 - DNA, 120 bp, Artificial Sequence
  ENSG00000257127_2 (sequence is synthesized)
ccaggtttcctggttctccagcttgcagatggcagatcatgggacttcttggcctccataattgtgggcaaaaaggaaagagacaaaacagcatgaaatgatgagaccaagtgatgaaaa

SEQ ID NO: 1004321 - DNA, 120 bp, Artificial Sequence
  ENSG00000257127_3 (sequence is synthesized)
ttcattcacaatgattgctttcaagagtaatttctcttgggtaattcagcagcctgttactatggctctctggagtgatagctaatgtaaatgaagcctctaaaagtggattatcctgac

SEQ ID NO: 1004322 - DNA, 120 bp, Artificial Sequence
  ENSG00000257127_4 (sequence is synthesized)
aagaatatactcagccaataatgcaacagaaatccattcaaagcattcgggaaaaattcaaaagaataaatattctttttttttttttaaagttaatgacctacgatccatttcttccct

SEQ ID NO: 1004323 - DNA, 120 bp, Artificial Sequence
  ENSG00000257127_5 (sequence is synthesized)
gactaacaagcagcaagcacttaaaaatatccagccaggatgaaatagaaacccacctgacttgttaatatttttgtttggtcccagggactcagattctaagccaaattctttgaatga

SEQ ID NO: 1004324 - DNA, 120 bp, Artificial Sequence
  ENSG00000257127_6 (sequence is synthesized)
tcttggcaaatgtctcgaattatttttgccaacttttctttatcttggaaaaaaagtttcatgaatgggtgtcaaaattgattagttttaaaaacctttcttgcagatacgtatggcacc

SEQ ID NO: 1004325 - DNA, 120 bp, Artificial Sequence
  ENSG00000257127_7 (sequence is synthesized)
ctaaaactgtattagaaaaaaatttcatatctccaggcctttcattgggtcaggttggcatttcgctgccctttatgtgtgtgacaagtgaaaataaggaaagaaaaaaactcaagtgaa

SEQ ID NO: 1004326 - DNA, 120 bp, Artificial Sequence
  ENSG00000257127_8 (sequence is synthesized)
gaaaatcagaatctgcgcagcagttcctgggcgtttcagctgcttcccacatcacctgcctcatcaagccccagcatccatctccttgctcatcttacaccctgtgtgcatgacaggccc

SEQ ID NO: 1004327 - DNA, 120 bp, Artificial Sequence
  ENSG00000257127_9 (sequence is synthesized)
accattcatttatcagagcaaaggctctcccactattctggttcacccccctacttagccagatatacaagaatatctgcacggatgacctgcctcacctgggagctcagaggagctcag

SEQ ID NO: 1004328 - DNA, 120 bp, Artificial Sequence
  ENSG00000257127_10 (sequence is synthesized)
attccattactatcgcaccaaggacagatctcccagcaagaatgacagaaaagactaactgcccccaaaatctcccttccaaaacacagttctcttaattctcccaagaaaccagaatgt

SEQ ID NO: 1004329 - DNA, 120 bp, Artificial Sequence
  ENSG00000257127_11 (sequence is synthesized)
actttaaaaaatccaaccgccaaaatattaaaccattttggttggaatgataacataactaacctgctgacagctgcttctgctaggtgcaaaaatggaaaaaaaaatacttctaatcag

SEQ ID NO: 1004330 - DNA, 120 bp, Artificial Sequence
  ENSG00000257127_12 (sequence is synthesized)
gtcaaatcactctacctttgggattctaaatttactcatattctcaaagaaatatattcagtcatagtggggaaaataggattattcctttagctcgataagcaaccagaagttcttcct

SEQ ID NO: 1004331 - DNA, 120 bp, Artificial Sequence
  ENSG00000257127_13 (sequence is synthesized)
tcaaatcttgacatttaatcaatcagaaattgatttttggaaaactgtttcctatgaagctatctctgcctgaaggatttttcttttacaatccagactatagaaggaaattcacaacct

SEQ ID NO: 1004332 - DNA, 120 bp, Artificial Sequence
  ENSG00000257127_14 (sequence is synthesized)
ggactttcacctccattggtcagagttttactgaccaattcccacctctgccttacacctaacggaagtttatgcctgttttctcttcacataccccaacagttacaaatggttgttatt

SEQ ID NO: 1004333 - DNA, 120 bp, Artificial Sequence
  ENSG00000257127_15 (sequence is synthesized)
attaagcatcttttattttgtggcctctgattacatggtcccctaaattttgacctaatcacaaaagattggtaaaatttcttaacatattaataatattttgtttatgtgtcaatatct

SEQ ID NO: 1004334 - DNA, 120 bp, Artificial Sequence
  ENSG00000257127_16 (sequence is synthesized)
tagcatgtatcaattaagacagaggtcttaacgttctctttttgaaagagaatattaggattcagagatattaagagattctcccaggatcacagttaggtaacagagctggattttagt

SEQ ID NO: 1004335 - DNA, 120 bp, Artificial Sequence
  ENSG00000257127_17 (sequence is synthesized)
ccaggtctgtctacagctctaacgtatatacaccctttgtataacatgtcacgaattcagcataaagggatcttcagtgatctaagtcaggggtcagcaaccttttctaaaaaggaccaa

SEQ ID NO: 1004336 - DNA, 120 bp, Artificial Sequence
  ENSG00000257127_18 (sequence is synthesized)
atagtaatatttcaggctttgtggaccctatggtctctatcataactgttcaaatcaccatgtagtgtaaaaggagccataagcaaaatataaactaacgaatgtggctgttttatggga

SEQ ID NO: 1004337 - DNA, 120 bp, Artificial Sequence
  ENSG00000257127_19 (sequence is synthesized)
tttttttttaactctttatttacaaaagcaggtggcagatcagaactcacttatgggccatagttctctgacccctgacctgagaaaatcttatatttatggacaacatttagactgtga

SEQ ID NO: 1004338 - DNA, 120 bp, Artificial Sequence
  ENSG00000257127_20 (sequence is synthesized)
cttgccaagtaagaacaagaagctctgtcaactgaaggtcaaggctggagttctgaaagcaaagagctgtctggtgttaatgataagtgaaatagttaaagttagaagatcccagttata

SEQ ID NO: 1004339 - DNA, 120 bp, Artificial Sequence
  ENSG00000257127_21 (sequence is synthesized)
agaagcacaaagaataatgaccatagactcctgaacaagaatgtctggacttctggcttaggcactcttgttgtatggtccaggccaagttacctaatctctccaggcctccattttctt

SEQ ID NO: 1004340 - DNA, 120 bp, Artificial Sequence
  ENSG00000257127_22 (sequence is synthesized)
atcattaaatgaagataataaaagtattttcctcagagagctgtaagaataaactgagctaacccatgtcaagcacatagaatagggcccagcctatattaatttatcaataaatgccag

SEQ ID NO: 1004341 - DNA, 120 bp, Artificial Sequence
  ENSG00000257127_23 (sequence is synthesized)
gaaggtaaaaaaaagagggaggtctgagaaatagaaatatcagaggaaggaaataaaggagggtgagagtaaattctcttttagcattcagattccacagattccacaaatcacatttct

SEQ ID NO: 1004342 - DNA, 120 bp, Artificial Sequence
  ENSG00000257127_24 (sequence is synthesized)
ttttttaccaactaaggaaaaataacacttgacctaacatttcattgcagttagctaaaggatgctagaaaaactatgttgcagtggtttgctctaatttcttcaggaatagagaaaagt

SEQ ID NO: 1004343 - DNA, 120 bp, Artificial Sequence
  ENSG00000257127_25 (sequence is synthesized)
gacaaaaagatcagagaagagaagaaaggaaactatcagaaaaatacagaattggagtaggatataacatatttgggttgaaggtaaaattttatattgtaatcttaagtatcttgctac

SEQ ID NO: 1004344 - DNA, 120 bp, Artificial Sequence
  ENSG00000257127_26 (sequence is synthesized)
ttcagtttggtccctggaacagcagcatcagaatctgccgagggcttgttaaaaaggcagaatctcaggtcccatcccagactcactgaatcagaatataaatactgacaagatgccccg

SEQ ID NO: 1004345 - DNA, 120 bp, Artificial Sequence
  ENSG00000257127_27 (sequence is synthesized)
ggattcatatgcacagtagagctggcgaagttccattgtagcctgtgattgttttctgcaacttagtatttctgagttttcccaaggaagaaaacccaggccttagcttctggcagactt

SEQ ID NO: 1004346 - DNA, 120 bp, Artificial Sequence
  ENSG00000257127_28 (sequence is synthesized)
gtgtttctcctttacttactagctgcatgactcatgagcaaggaaatcaaactttatgtgcctgagtttcctcatctataaaatggagactataataatcatctcctaggcttgttttga

SEQ ID NO: 1004347 - DNA, 120 bp, Artificial Sequence
  ENSG00000257127_29 (sequence is synthesized)
ggatgttcaacaaatgctcctttcattcctctatttacagacctgccgcagacaattctgctagcagcctttgtgctattatctgttttctaaacttagtaattgagtgtgatctggaga

SEQ ID NO: 1004348 - DNA, 120 bp, Artificial Sequence
  ENSG00000257127_30 (sequence is synthesized)
ctaactctgaaataaataagctgattatttatttattttctcaaaacaacagaatacgatttagcaaattacttcttaagatattattttacatttctatattctcctaccctgagttga

SEQ ID NO: 1004349 - DNA, 120 bp, Artificial Sequence
  ENSG00000257127_31 (sequence is synthesized)
tgtgtgagcaatatgtcactttcataaagccaggtatacattatggacaggtaagtaaaaaacatattatttattctacgtttttgtccaaaaattttaaatttcaactgttgcgcgtgt

SEQ ID NO: 1004350 - DNA, 120 bp, Artificial Sequence
  ENSG00000257127_32 (sequence is synthesized)
gttggtaatgtaaaacaaactcagtacagtagtattcagtacagtatttaagcccctgtacttaaacatattcctcgtaccaatgaagttacatgaaaagcaaatttgtgtgagatatcg

SEQ ID NO: 1004351 - DNA, 120 bp, Artificial Sequence
  ENSG00000257127_33 (sequence is synthesized)
tatgttccccacaaattgaaatgcatttcaaaaactctgtgtgtgtatgtgtgtgtgtgacagagtgtgtgtgagagagagacagagagatacgctttggttgcctccataagctggctg

SEQ ID NO: 1004352 - DNA, 120 bp, Artificial Sequence
  ENSG00000257127_34 (sequence is synthesized)
ctatgattaataagaccaagttttctaaagaaaatgagatcataacaaaagccctctttatgactatcttttatcaggggcaaaaaggaaagagacaaaacagcatgaaatgatgagacc

SEQ ID NO: 1004353 - DNA, 120 bp, Artificial Sequence
  ENSG00000257127_35 (sequence is synthesized)
acaaaaacagcctttggaatacccacatgaagtagctgttgttattgctttctatatacctacatcttgtctattataaaaagactggtttttggcaggtgtggtggctcacacctgtaa

SEQ ID NO: 1004354 - DNA, 85 bp, Artificial Sequence
  ENSG00000257127_36 (sequence is synthesized)
cgggcggatcacctgagatcaggagttcaggaccagcctgatcaatatggtgaaacccagtctttactgaaaatacaaaaatcac

SEQ ID NO: 1004355 - DNA, 120 bp, Artificial Sequence
  ENSG00000257127_37 (sequence is synthesized)
gacaggttctgagaaatgcattgttaagtgatttcatcattgtgcaaacatcatagagtgtaactacacaaacctggacagcatagactactacacatctaggctacatggtgtagcttg

SEQ ID NO: 1004356 - DNA, 120 bp, Artificial Sequence
  ENSG00000257127_38 (sequence is synthesized)
taacctcatgataagtatgtataacatcatgataagtatgtatgtatctaccatatctaaatgtagaaaaggtacagtaaaaatatggtataatcttatgggatcaccatcatatatgca

SEQ ID NO: 1004357 - DNA, 120 bp, Artificial Sequence
  ENSG00000257127_39 (sequence is synthesized)
atcctttgtagactgaaatgtcattgtgtagtgcatgactgtatacgcacacatacacaaacacacacaaatatactattggttctttttctctgaagagccctaatacaatatgttata

SEQ ID NO: 1004358 - DNA, 120 bp, Artificial Sequence
  ENSG00000257127_40 (sequence is synthesized)
catttatattgactctatttcaaaatttatggttttggtgaaacatatgtggagatggggcataggtgtgtgaactgggatagtgtcctgctgatgaatgggtgggaggcatcatttggg

SEQ ID NO: 1004359 - DNA, 120 bp, Artificial Sequence
  ENSG00000257127_41 (sequence is synthesized)
acaagcccagggcatcagcttatagatatcaagagctcaacaagagcactttatggcaaaacctcccacaagacctctcagaagttgagaaactgctaaaagtttctttatgacagatga

SEQ ID NO: 1004360 - DNA, 120 bp, Artificial Sequence
  ENSG00000257127_42 (sequence is synthesized)
catttatggataaaatagggattagcaggattctttaaatactttcgaacactaaccttcatttctaccaggcagtggggccccaagtgcagggccataggaagtacaagtctgggagat

SEQ ID NO: 1004361 - DNA, 120 bp, Artificial Sequence
  ENSG00000257127_43 (sequence is synthesized)
actaggctgcactgtctgtagagaatctgaaaaaataatagagtcactgaaatgcagtttggtataattattgccatgcatcataattctaaatcatactagtggtcaaatactcttccc

SEQ ID NO: 1004362 - DNA, 120 bp, Artificial Sequence
  ENSG00000257127_44 (sequence is synthesized)
tttgaattctaaataattgttgtggtcaccactgagcttttaaatatataaatactttcaagtttgcatatttttattacctgttccttaacaaacattgaattcaacatgaaaatgatt

SEQ ID NO: 1004363 - DNA, 120 bp, Artificial Sequence
  ENSG00000257127_45 (sequence is synthesized)
atgggaaacattcgggtatacagtccctgactcttaaggactcaggtaaatacttagggtatttcatggccctagtctttggggtaccacatgtttcttcttcaaatcacagattcaaaa

SEQ ID NO: 1004364 - DNA, 120 bp, Artificial Sequence
  ENSG00000257127_46 (sequence is synthesized)
tcaagaatgataacacagtgattgtgtagacaaaataagtgaaccaaaattgcttgcttctgtcattctatggaaccactgagagtttttacttgtgcttaaaattttgaatagtaaaac

SEQ ID NO: 1004365 - DNA, 120 bp, Artificial Sequence
  ENSG00000257127_47 (sequence is synthesized)
agagtgtcaacttcatgctggaatatttttggctttttagacacaattttaagtacatgaagtatttttacaagactaagtaacatcactgaaattacagctttcttctttttaaaactg

SEQ ID NO: 1004366 - DNA, 120 bp, Artificial Sequence
  ENSG00000257127_48 (sequence is synthesized)
gtatttgttataaaactaaagagcgaatcaagaaaagcataattattactgattattacaggattattactgaaaaagaaatgtacggaatagaggaggaaggagttaacaaatgatcca

SEQ ID NO: 1004367 - DNA, 120 bp, Artificial Sequence
  ENSG00000257127_49 (sequence is synthesized)
ctctgggtgttgaaaacaccaataagcctgcttccaggaagtgcctaagacagagctggctcagcttgctgggtcacagcatgtaaggaaactgctgggctacatgccaccatcctcagt

SEQ ID NO: 1004368 - DNA, 120 bp, Artificial Sequence
  ENSG00000257127_50 (sequence is synthesized)
tgtccagatagataatcccatagccccatggggaaataatctttaattatgatatagctgacaccattcaaagcactatgctaagtcctttatgtgaattaacttttgtcaaatttattt

SEQ ID NO: 1004369 - DNA, 120 bp, Artificial Sequence
  ENSG00000257127_51 (sequence is synthesized)
ttcataaataacccaaatatgtataccactattatcctaccttaaagaggagaaactgagctcctaaagtttaaatatctaacccaagttaagactgctagtcaccctaggctattaact

SEQ ID NO: 1004370 - DNA, 120 bp, Artificial Sequence
  ENSG00000257127_52 (sequence is synthesized)
caggcagtctaactcaggtataataacattatgctactgtttgcagctttgactatgcctgaattataacgtcatgctatctaactaaaaagctaagggaaataaaatgagccatagggc

SEQ ID NO: 1004371 - DNA, 120 bp, Artificial Sequence
  ENSG00000257127_53 (sequence is synthesized)
tcaatttcataaaaggagagaaaatactggggaaaagtgataatgcagagtttaaaatatttttgtaaaagtgccagagattgagtataacaagtgtgaccaaaaaaaaaaaaaaaaaaa

SEQ ID NO: 1004372 - DNA, 120 bp, Artificial Sequence
  ENSG00000257126_0 (sequence is synthesized)
aaaggctgtttcatcccacatgggcacgaaacataccacattttacggaggatgtagccccagagaagagggaggtggagaagcataaatgaaaggcaccttttccttcctctagaagat

SEQ ID NO: 1004373 - DNA, 120 bp, Artificial Sequence
  ENSG00000257126_1 (sequence is synthesized)
gcacagagaatttctgaccttgtgacgtttgggagtgaggagatcccatacagaggcatccaggtatttccagagatcctgtggcaggtgaggtctgccctcgctggagccaactcgtct

SEQ ID NO: 1004374 - DNA, 88 bp, Artificial Sequence
  ENSG00000257126_2 (sequence is synthesized)
aacagcagaacctgggtctcactctgtcccctaggctggaatgcagtggtgtgatcatggcccactgcagccttgaactcctggaccg

SEQ ID NO: 1004375 - DNA, 120 bp, Artificial Sequence
  ENSG00000257126_3 (sequence is synthesized)
aatatcctggattattgtcagtttaacaaaataatttcggctatcaaagatcaagtgggataaatttcagaggaagaaactgagctccttgcgatacaggctaaacaagagtcaaaggta

SEQ ID NO: 1004376 - DNA, 120 bp, Artificial Sequence
  ENSG00000257126_4 (sequence is synthesized)
gaggaagttaagaagtggttaatcccttatagcccaaaggggcttaattattgataactagtaactgccaccagcataggtaggctctccaaataatcattatagcctagaataaagtaa

SEQ ID NO: 1004377 - DNA, 120 bp, Artificial Sequence
  ENSG00000257126_5 (sequence is synthesized)
caaaaactatttttaaactaccagcattttaacaatttattttctgaattcagtctatcaagcaattagcttagatggctataaaactgtgtgagcttgtgaacctataagtttagagac

SEQ ID NO: 1004378 - DNA, 120 bp, Artificial Sequence
  ENSG00000257126_6 (sequence is synthesized)
acttatgattcacgattagtcttgaaaattttttatataaaaatagtcccagtaaatcactaagtcaaaatggacgaactggttcgatgtgtgtgtatgtgtatgtctaggtacacagct

SEQ ID NO: 1004379 - DNA, 120 bp, Artificial Sequence
  ENSG00000257126_7 (sequence is synthesized)
gtgtgtgtgtctaggtgtgtagctgtgtgtgtgtccacacacattttgaaaatcaacaggttagcagaaacaggatgacgaaggaagaatgagaaaaagagatagttataaagagtcact

SEQ ID NO: 1004380 - DNA, 120 bp, Artificial Sequence
  ENSG00000257126_8 (sequence is synthesized)
gataataagcaaaacattcttaggatatgtgggtgtatgtaatcagtggcctttttgtacaaatacatcttttttgacatattagcttccatcgacatcaaccgaagctgatttcagaat

SEQ ID NO: 1004381 - DNA, 120 bp, Artificial Sequence
  ENSG00000257126_9 (sequence is synthesized)
gtcaaggagaactagtgagaagtaaaagtgactgtaaaagtagtggaagtagaagcagtgaagatgtagagaagtttgtgaaagaagtaaaatagacgtagatggtcatcacatttaaat

SEQ ID NO: 1004382 - DNA, 120 bp, Artificial Sequence
  ENSG00000257126_10 (sequence is synthesized)
aaaggttagtcatgcactttgaacagacactggttaaagatatttaggaaaatagaatggattttaaattttaattggggaagctgattgtaaagaagaaggagtaaaagcaaataccag

SEQ ID NO: 1004383 - DNA, 120 bp, Artificial Sequence
  ENSG00000257126_11 (sequence is synthesized)
aataaaaacactagagagggaaactatttcgttattagtttcagctatctccgaatgtgtgtttaggtttcaacttcagcaggagacatcaaatttattcagaagaagagctaaattgat

SEQ ID NO: 1004384 - DNA, 120 bp, Artificial Sequence
  ENSG00000257126_12 (sequence is synthesized)
gatggcatatcaattcaaaagctatgctttttgaagctttttgggaaagacattctcctgtgtgctgtcttttcactcccactgggccacataagaatgggcatggaacccttccttacc

SEQ ID NO: 1004385 - DNA, 120 bp, Artificial Sequence
  ENSG00000257126_13 (sequence is synthesized)
agtaggtaagggggcccacacaggaagtactgggcttatggccttatgtgggaatatcttttgctgtttcagaatcaacgtgtagttctttgttctgcttaagtgggtgtttcaatagtc

SEQ ID NO: 1004386 - DNA, 120 bp, Artificial Sequence
  ENSG00000257126_14 (sequence is synthesized)
ctcagacatgtcctctccccacaattttttttcagataccatagaggagaggtcgaggtccttccactgaagcaccaagtggggtatataaagccacactgcccatgagggctgtggtgt

SEQ ID NO: 1004387 - DNA, 120 bp, Artificial Sequence
  ENSG00000257126_15 (sequence is synthesized)
gagtctgctagccgtgagagacagatgcattacaaagggatggatttagtgcactctttcctctcttactcacagcctgaacagccagtgaacaatgaaacaaaacttcttcccaagcct

SEQ ID NO: 1004388 - DNA, 120 bp, Artificial Sequence
  ENSG00000257126_16 (sequence is synthesized)
caatgaggattgtgccatagtttgaaggccaaagaacaatggtcaatccagcaatcaactcattttggctgatttgtgcctttagtccaggcttctcagttgtaccacacagccgttctt

SEQ ID NO: 1004389 - DNA, 120 bp, Artificial Sequence
  ENSG00000257126_17 (sequence is synthesized)
ctcttcaatttcagggtcattccttcaggaattctgtcaggaataagcagcaagtttcctactgctctgggtcctccttagacccttcttatttcatgttcagaggaatgaactccacat

SEQ ID NO: 1004390 - DNA, 120 bp, Artificial Sequence
  ENSG00000257126_18 (sequence is synthesized)
cctgtcctaaactccaccttccttctattattttttcatatttgacattgatactcattgaaactagaatctgaattattaccaccaaagatattacctttttttttgcaccggagagct

SEQ ID NO: 1004391 - DNA, 120 bp, Artificial Sequence
  ENSG00000257126_19 (sequence is synthesized)
taatctttaaaatgttctgtgagagatgggaatggtgtactatctttctagtgtggcaaaagaagagagagtaacaaaataattgtgttcatattaagattatttgaatataaatatttt

SEQ ID NO: 1004392 - DNA, 120 bp, Artificial Sequence
  ENSG00000257126_20 (sequence is synthesized)
gttatttttaataattggattgatataagtagatcttaagaaatatcaaaaaaaaccgttttgtcaaattggagtcaaggaggcatggaaattctcttcatttgcagtactcctaaattc

SEQ ID NO: 1004393 - DNA, 120 bp, Artificial Sequence
  ENSG00000257126_21 (sequence is synthesized)
ctgcttattctgtggttgaatttatatcaacaaagagaattggagattaaggcaattaatcagaaattttaattaaaaaaggaatggaaaaaataagtaaaatttcctatagaattctag

SEQ ID NO: 1004394 - DNA, 120 bp, Artificial Sequence
  ENSG00000257126_22 (sequence is synthesized)
ggtttgacatctacacagatatattcattaggtagaataataagtcttttctttgctcttatgaaaatattgttctctaattgtcaatgagcataaagtaaaatgaagatagattataca

SEQ ID NO: 1004395 - DNA, 120 bp, Artificial Sequence
  ENSG00000257126_23 (sequence is synthesized)
aatatccttattgattaaaagtttaaaattgccagtgcccaagaaatatgcctgaattcaaggatatcttattgcaaagaatatcttactgcagtttgttttttttccttactgtaaata

SEQ ID NO: 1004396 - DNA, 120 bp, Artificial Sequence
  ENSG00000257126_24 (sequence is synthesized)
aagggtcaaccaacagctaataactcacaactgcatcttttcttgttagaacatgtcgcccagcactttttgattagatgttctcagataatagctggggcagattgaccaaaggagagc

SEQ ID NO: 1004397 - DNA, 120 bp, Artificial Sequence
  ENSG00000257126_25 (sequence is synthesized)
aattttttttttaatcaggataacataatgattccatcacaaactttagaaagggctatggatatcaccaattttctttttttgtctattattagtgctgtatctttagtggaattgaag

SEQ ID NO: 1004398 - DNA, 120 bp, Artificial Sequence
  ENSG00000257126_26 (sequence is synthesized)
acatgaccttctgcaggtttcaatacaactttataaaaggctgtaacaatgcctttaaaatcaaatctattaactgttctacagagaagccagttttctagtaacttggccataacttaa

SEQ ID NO: 1004399 - DNA, 120 bp, Artificial Sequence
  ENSG00000257126_27 (sequence is synthesized)
agacagggaccctgaaaacaccaagcatctgcctgcaatctgaattatctccctgactagattcagtaatcttggctcttccctgcatttaagtcattttgtgtacatcaattttctcac

SEQ ID NO: 1004400 - DNA, 120 bp, Artificial Sequence
  ENSG00000257126_28 (sequence is synthesized)
ctatgaaagaagagagttgtccaacatgttctgatgttctttcagttctgagttctttggataatttgattggagcccaagagatgtcctaaatctgactggcatgcagtaaatgtttgt

SEQ ID NO: 1004401 - DNA, 120 bp, Artificial Sequence
  ENSG00000257126_29 (sequence is synthesized)
tgattgtgaaaaaatatttgacttccaaatgggttgtaaaatatctcgtgtggacatactgcagcaagttaacacttataattttgggagcagaataaatgtaattaagtcacaaatgca

SEQ ID NO: 1004402 - DNA, 120 bp, Artificial Sequence
  ENSG00000257126_30 (sequence is synthesized)
aatgaattctctgcttatttaattcaaagagaaatagttgtctaaaaacaatctgacccatatactggttgaaaatagtaagcattatttttttatgaagggccaagtaagtggcttaca

SEQ ID NO: 1004403 - DNA, 120 bp, Artificial Sequence
  ENSG00000257126_31 (sequence is synthesized)
tatattaaatgtaataaatgtattcaaaaagattttcacctagttgaactgcatttatacttcatgaatatcactagtgtaatcattactttaaaaacatatagctggagaaataagcat

SEQ ID NO: 1004404 - DNA, 120 bp, Artificial Sequence
  ENSG00000257126_32 (sequence is synthesized)
ttagacaggtaagaaaacagactgaagttttaaattttatttttaacagtcattctaaaagaattatttatcattatatatttgtatgactgttaaaagttgaaacagaaaacatggaag

SEQ ID NO: 1004405 - DNA, 120 bp, Artificial Sequence
  ENSG00000257126_33 (sequence is synthesized)
catggaagtatgcttttaattgatcattgttatatatagagagtgaattaaaaaatttatgcatataaagttactaataattttttgagcacatatagtttcctacatacttacctatat

SEQ ID NO: 1004406 - DNA, 120 bp, Artificial Sequence
  ENSG00000257126_34 (sequence is synthesized)
taatccttgtaacagccccatgaactatctactattattatcatcattccatcttgcaggtgaggaagctgaggtctagagaagttcattaatttgactaaaggcacacagtcaataaat

SEQ ID NO: 1004407 - DNA, 120 bp, Artificial Sequence
  ENSG00000257126_35 (sequence is synthesized)
ggtagagccaaggtttgaaccctggcattctggttttatgcttttaaccagctgcttattattggtatcttattgtgatgattttggaaaacactactaatttatttgaaatgtattaat

SEQ ID NO: 1004408 - DNA, 120 bp, Artificial Sequence
  ENSG00000257126_36 (sequence is synthesized)
aaaggctgtttcatcccacatgggcacgaaacataccacattttacggaggatgtagccccagagaagagggaggtggagaagcataaatgaaaggcaccttttccttcctctagaaggt

SEQ ID NO: 1004409 - DNA, 120 bp, Artificial Sequence
  ENSG00000256837_0 (sequence is synthesized)
ttaccgtggtgtgctctttccaccacgcggatagcataggctgacatgtatgataagcaaccttgagagcaaagggaatgcattgcaccatgaatatggagagtgagctttaaaatagta

SEQ ID NO: 1004410 - DNA, 120 bp, Artificial Sequence
  ENSG00000256837_1 (sequence is synthesized)
tgaaagacaaatgtttaaaggtatacatttctttcagagaactttttctctctctttctctctctgacagtgtgtgtgtatctcctgtgtctctctttccctctctcacatgcacacata

SEQ ID NO: 1004411 - DNA, 120 bp, Artificial Sequence
  ENSG00000256837_2 (sequence is synthesized)
caactgctaactttcactgaggactacttatgtgccagataccatgtgaagcgctttgcttgtattagatcatcgaaacctcagaaaaactctataaagtgggtgctaatattttctaga

SEQ ID NO: 1004412 - DNA, 120 bp, Artificial Sequence
  ENSG00000256837_3 (sequence is synthesized)
tttttcagatacaatactgaggatcagggagattgaataagttgtccagtgtcacccctggtagctgagagagctggtttggatgcctagggctgtttgtctccaaacctgtgccttgca

SEQ ID NO: 1004413 - DNA, 120 bp, Artificial Sequence
  ENSG00000256837_4 (sequence is synthesized)
cccttagctctggttcctcccctctcatgtcatgtaatcagcacaaatttcctgaagtaaggctgcatgcatataacaagaataaaggaataaaaatagaggatgccgtggaatgggaga

SEQ ID NO: 1004414 - DNA, 120 bp, Artificial Sequence
  ENSG00000266279_0 (sequence is synthesized)
tagacagagactccttctggcctgagtgatgaaggaagactgtctcaataaataaatacataaataaataaaattataacaatctcagaaggcatgacacctctaggacccattctcatc

SEQ ID NO: 1004415 - DNA, 120 bp, Artificial Sequence
  ENSG00000266279_1 (sequence is synthesized)
ctacatcctcctctttctggtgctgagaaaaaaaagaaaggaaaaagaaaagtcaaaagaagagggaaggaactggtggtgattgactagcagactggctgaaatcagtgggaacccgta

SEQ ID NO: 1004416 - DNA, 120 bp, Artificial Sequence
  ENSG00000266279_2 (sequence is synthesized)
tactaacgccaccaaatttgcacatgcaacccacgaagaaccttggagataaccagacatgattaaggactttctagacttctcctttctttccaccaatcacccgctaatcccagaatc

SEQ ID NO: 1004417 - DNA, 120 bp, Artificial Sequence
  ENSG00000266279_3 (sequence is synthesized)
ctccccctaaaccttttctaataaaagtactgccttaagaccagcaaagagagacagatttgagctggattcccgtatcctcgtgggtcagctcacaataaagctttccttttctcaaaa

SEQ ID NO: 1004418 - DNA, 120 bp, Artificial Sequence
  ENSG00000277299_0 (sequence is synthesized)
attttagagactgtcacttggaggccctgaatgctccttccattcctcacatgcaggctgctccatggtgctggatggattagagttaaggggtcagcagggaatcgtgttactctttgg

SEQ ID NO: 1004419 - DNA, 120 bp, Artificial Sequence
  ENSG00000277299_1 (sequence is synthesized)
catctggcattttaaacaccattcaccacgtccattctgcgcagggtccttcccttctggtgcgccttcatcttccatggacattctataagctgggtgtggtgtgagttcagctgtcta

SEQ ID NO: 1004420 - DNA, 120 bp, Artificial Sequence
  ENSG00000277299_2 (sequence is synthesized)
agtgccaaggtttaagtccacaagcaactgtttgcaccagaagatcattactttttcagtagcaaacccattcaatgttaggagttactttcaatttttatttagaaagcaccaatctgt

SEQ ID NO: 1004421 - DNA, 120 bp, Artificial Sequence
  ENSG00000277299_3 (sequence is synthesized)
gaaaaatacaccaatagtagttgctcctcttcattaattagcatcttttccaagcaactgttaaatgtgaaagatcagatacaaatcatgctactttgtcaactttatgtatattaaaaa

SEQ ID NO: 1004422 - DNA, 120 bp, Artificial Sequence
  ENSG00000277299_4 (sequence is synthesized)
ctttacccaactttgaaatataatcaatacatctttgctaaataaacaaattccatatactttatattaatcatgccaaactgctgtgaaagtgtgacttactgcctcttccacaaaaag

SEQ ID NO: 1004423 - DNA, 120 bp, Artificial Sequence
  ENSG00000231248_0 (sequence is synthesized)
gggtaccggagggagggaggtgggcagaggaggggagatgggcacccccagtctttccatcctcctcattcgactaggggcacccgaatcccctattccttatttcccctatcactcagg

SEQ ID NO: 1004424 - DNA, 89 bp, Artificial Sequence
  ENSG00000231248_1 (sequence is synthesized)
cacccgaatcccctattccttatttcccctatcactcaggcactggcagggtcctttgcccactcctgttggccgctgcggctccaaag

SEQ ID NO: 1004425 - DNA, 120 bp, Artificial Sequence
  ENSG00000231248_2 (sequence is synthesized)
caaaggtatgaaaggaacacacatccctgactgactaggaggaacagagctgcctgctgtctggaaccgcttcctccaagactaaggtttcccagaggaagagagagaatttggacaaat

SEQ ID NO: 1004426 - DNA, 120 bp, Artificial Sequence
  ENSG00000231248_3 (sequence is synthesized)
gcgagaatcactgccgctagctcctttgaaagcagaattaagaggcagtgcaggaaggcacagcaggaaggctcatggttagactacagagaaggaagcagccactgctggggacctacc

SEQ ID NO: 1004427 - DNA, 120 bp, Artificial Sequence
  ENSG00000231248_4 (sequence is synthesized)
ctgtgctggtcactgacaagctgtctcattaaacctttccggaccctcaacccctcctagtatcttatcctcattttatagatgagaagactgtggcccagagaggtccaacgccagtgg

SEQ ID NO: 1004428 - DNA, 120 bp, Artificial Sequence
  ENSG00000231248_5 (sequence is synthesized)
gatcagcttcgatgggatgcacacagactgacctcttctccccagccccttcaatttcccagagctgcagggggcctgggagttcttggtaacagcacattaaacctctgtttgtgggaa

SEQ ID NO: 1004429 - DNA, 120 bp, Artificial Sequence
  ENSG00000231249_0 (sequence is synthesized)
ctttcaggctgctgagcctgttccttggctggggtcggtagggcttggagccagccgttcaaagtcacccctgggaagcgcccgcaacccttggggacgcctctcctccggctgcccccc

SEQ ID NO: 1004430 - DNA, 120 bp, Artificial Sequence
  ENSG00000231249_1 (sequence is synthesized)
ttccctggaatccaggtgtcactggggccggggaggggctaggagctcggatttctgctttgggaagtttttacaagcccaccctccccctgccttggttccccgagccaagaatttcag

SEQ ID NO: 1004431 - DNA, 120 bp, Artificial Sequence
  ENSG00000231249_2 (sequence is synthesized)
aaatccggggcacaaaaacgccagtgtttgcggtcaaggattaaaggcgcgaggtgtctttatttaatctgctccgccctgctcgggtttgcacgagaaaccaagcctgggagcgacggt

SEQ ID NO: 1004432 - DNA, 120 bp, Artificial Sequence
  ENSG00000231249_3 (sequence is synthesized)
agcattatcccctggtcactggacgctggggtctagtgcctaatacgttaagctgcttctccccatcatcaagaaactgccgcatctgccatataaaggagatgtttctcattcgccccc

SEQ ID NO: 1004433 - DNA, 120 bp, Artificial Sequence
  ENSG00000231249_4 (sequence is synthesized)
actcatctcttcccccatgaaaacctcttccattttcaaaggatcttcggctctacttttcaagcaaattcaacaaatcagtgtatgcctgtgtaactggtaaatagtgaagggtaatta

SEQ ID NO: 1004434 - DNA, 120 bp, Artificial Sequence
  ENSG00000231249_5 (sequence is synthesized)
tttcatgtgcttctaactcagaaacaatggaatattaacagcggttttctgaagatccagttggacaattttcattttcatcatataatggacatttatctcctacctgcattatccact

SEQ ID NO: 1004435 - DNA, 120 bp, Artificial Sequence
  ENSG00000231249_6 (sequence is synthesized)
gtcttccctcggagaccacaaatttcactgaaggcagcatctatgtcttattcatgcttgtgctctctacctcccctgacccagaaggacttattcttctttctgcacattttagtagat

SEQ ID NO: 1004436 - DNA, 120 bp, Artificial Sequence
  ENSG00000231246_0 (sequence is synthesized)
tttctcagcctggagactgaaagctctctttggctgttggccctcccaggcagagtccactggctgttagggtgaaatggggctgatgcttcctggaatccaccagaagtatgcaaattg

SEQ ID NO: 1004437 - DNA, 120 bp, Artificial Sequence
  ENSG00000231246_1 (sequence is synthesized)
caccatctctttcagctgcctgcgcctgcattccatcgaggattccggctcgtcccccagtggcaacaactagagaggaggtgaggatccccggcgctgccatctgataggctgtctccc

SEQ ID NO: 1004438 - DNA, 120 bp, Artificial Sequence
  ENSG00000231246_2 (sequence is synthesized)
cagtcgtttctcacctctaggaggccaaaaagctgtagtcattgctgtggtatcaggaactcgagttcctctcagaggtgttgtgaagagcttcccttccaacagtacatggcctaaata

SEQ ID NO: 1004439 - DNA, 120 bp, Artificial Sequence
  ENSG00000231246_3 (sequence is synthesized)
ccagggaggaagtttctgactttttccatcttcagtaaaacagaacctctgttgtggatgcagtggctttgcaaggagagtggcattgtctcttggtgaatgtagttgttcaagtcatgg

SEQ ID NO: 1004440 - DNA, 120 bp, Artificial Sequence
  ENSG00000231246_4 (sequence is synthesized)
acacagagagacacacagagaaggtgatgacaatgatgagaagacggaggcggagattggagtgatgatgcatctacaagccagggaacatcaaggactgccagcaaccaccagaagcca

SEQ ID NO: 1004441 - DNA, 120 bp, Artificial Sequence
  ENSG00000231246_5 (sequence is synthesized)
ggagagaggcatgagacagttcttcctcctatccttcagaagaaatcaactctactgacaccatgattttggattttggcctcctaaaatgtgagaaaataaatttctgttgtcttaagc

SEQ ID NO: 1004442 - DNA, 120 bp, Artificial Sequence
  ENSG00000231246_6 (sequence is synthesized)
tccatcgaggattccggaggctgagtgacttgggcaatgattcagcaataccaactgtgaactctcaatgacttgggctaatgagaagaatgacatggataatctaaaaataatggacaa

SEQ ID NO: 1004443 - DNA, 120 bp, Artificial Sequence
  ENSG00000231246_7 (sequence is synthesized)
ctggaaaaaacatcagcctgcttgtggagcacaccaggtcatgatttctgcagtgggggaggagctgatttgcttcattcattctagaacctctattctagctgatgttaaatctggttg

SEQ ID NO: 1004444 - DNA, 120 bp, Artificial Sequence
  ENSG00000231246_8 (sequence is synthesized)
tttttgagagcactcatagccatcatgcccatctctgtatcacaggggtttgggaaaagaaactcttctggccaaggatggaagaataaaaacataactgagttccagatatgctaatgt

SEQ ID NO: 1004445 - DNA, 120 bp, Artificial Sequence
  ENSG00000231246_9 (sequence is synthesized)
tttccactattgcatctctaagatatcagtaggacctggaaaggtggcaatgacctcatggctcccaggtgctggggttgctgcaatggctggagctgagaaaaacttgaaggttttaga

SEQ ID NO: 1004446 - DNA, 120 bp, Artificial Sequence
  ENSG00000231246_10 (sequence is synthesized)
ggtgcagagtaattaatgccccaagctacatggagtggccaattgaagaagctataaaagttggagcagtgcaggaagcaacatgcctgggaaaggggatttttttgcactttttattgc

SEQ ID NO: 1004447 - DNA, 120 bp, Artificial Sequence
  ENSG00000231246_11 (sequence is synthesized)
aataatgcaggaacattctatgaatagaatccaggggagccatcaagtccatgttcgggtgactgtaaggggagggattttgatcctcttccgagacagctgtcttcaggctcaggcaca

SEQ ID NO: 1004448 - DNA, 120 bp, Artificial Sequence
  ENSG00000231246_12 (sequence is synthesized)
gatcacattattttattagagccttcagtagttaagagaaagttcttggttgaattgggaaagggacctaaaaataactgtaaaattttgagctagctctgcccctttctgtactagata

SEQ ID NO: 1004449 - DNA, 120 bp, Artificial Sequence
  ENSG00000231246_13 (sequence is synthesized)
caatcctggatgtagagaatcagagacttgaggttaagacctagctctggcaccaacttggacaagtcacatcacctatctccacctatctccttcactgtgaaatgagaggattggaat

SEQ ID NO: 1004450 - DNA, 120 bp, Artificial Sequence
  ENSG00000231246_14 (sequence is synthesized)
aaatgatatctaaatctcccctggcctccattgtttctgctttgtggatgccgttttatggattgagaaatcaaagtctattgatgaaaatgattgcaatgtgcagattcacttggaaca

SEQ ID NO: 1004451 - DNA, 120 bp, Artificial Sequence
  ENSG00000231246_15 (sequence is synthesized)
cagaaagactcagagagctggtcagtaccaaaggaggttggagtgctttgccttgaatgcaagaaataacgatgtgcaatgtcatggagaattttaaaacaataatagatacaagaaaaa

SEQ ID NO: 1004452 - DNA, 120 bp, Artificial Sequence
  ENSG00000231246_16 (sequence is synthesized)
gcctgcattccatcgaggattccgatccaaatgttaatgtcattgagaaacaccttgactgacacacccagaataatgtttgagcaaacatccgggctctccatggctcagtcaaactgg

SEQ ID NO: 1004453 - DNA, 120 bp, Artificial Sequence
  ENSG00000231246_17 (sequence is synthesized)
actctccccatcctccatccttggtataccactgtttatctgtacaattctctttttattcaatgctctttcaattcctctcactacacaggaagaaaatctctttaaggagctcttttt

SEQ ID NO: 1004454 - DNA, 120 bp, Artificial Sequence
  ENSG00000231246_18 (sequence is synthesized)
tttctttttctttctttctttttttttaaccacttcttagcattgatttatccctagtaaagaagaatgatgaattactttgagttacttctttagtaagaaaggtatgctataggagag

SEQ ID NO: 1004455 - DNA, 120 bp, Artificial Sequence
  ENSG00000231246_19 (sequence is synthesized)
ttctttagtaagaaaggtatgctataggagagaactggaaagggaccaaggaagcagggacaataaacatggagagaccagaatatggaatgaggtgtggaatgggtacagaaggctggg

SEQ ID NO: 1004456 - DNA, 120 bp, Artificial Sequence
  ENSG00000231246_20 (sequence is synthesized)
tggcttgtgggtcaagtcctgaacacatggcttgtggacagggtgtggacagctccctgaaggcccaggttaggttgggcatgtggtgcatgaaaacagaccctgcctgcctctcagctc

SEQ ID NO: 1004457 - DNA, 120 bp, Artificial Sequence
  ENSG00000231246_21 (sequence is synthesized)
agatttctcagatttccagcaccccggccctttcctggggcttccccttgcctcccctcaggtggatttcctaagagtgaaccctctgtactacacctgcagtcacaccactcgccatcc

SEQ ID NO: 1004458 - DNA, 120 bp, Artificial Sequence
  ENSG00000231246_22 (sequence is synthesized)
ttctctgagttggatttcctctccaccctgccctggtgtctagaatatgaaaaggctttgccaccctggggacttgcatatcctgcattggtgcctcccttttgcaggcctggccccctt

SEQ ID NO: 1004459 - DNA, 120 bp, Artificial Sequence
  ENSG00000231246_23 (sequence is synthesized)
ggtgttcaaccttctgcgagctagcacctgctgcagggtgcatttgcgtgctccaaggagccattcctgtgacaaaataatctatgcacattctttgggggctgaatgggctgctctgga

SEQ ID NO: 1004460 - DNA, 120 bp, Artificial Sequence
  ENSG00000231246_24 (sequence is synthesized)
gaacaacagaggggacccccagaaaaatatgagtgtggtggaggaagaggctgaaggcagggtgttaaccctaaagatagagatctttgtcctctcaaattaaataagaagttttgggtt

SEQ ID NO: 1004461 - DNA, 120 bp, Artificial Sequence
  ENSG00000231246_25 (sequence is synthesized)
tttgtttgtttgtttgcaaagtgagaacccagttagtagcaattaaattgacaacccaattcaaaccagtccaaactgaagccatgagggccaagttctagtttcttacagatttacaat

SEQ ID NO: 1004462 - DNA, 120 bp, Artificial Sequence
  ENSG00000231246_26 (sequence is synthesized)
ttatttattcttacaggaagagaaaagaaaggggcagcttttaccgaagtttgtcttatttctttcactctttcttttctgattataaaagccacacatgtttaccatagaaagcttagc

SEQ ID NO: 1004463 - DNA, 120 bp, Artificial Sequence
  ENSG00000231246_27 (sequence is synthesized)
acatgaatattctaaacagagataaatacttcctatcaaccccatcattcagagatgaccactctccatttgcagctgtggttgacatggaatcgtctggggagttttattggcaagaac

SEQ ID NO: 1004464 - DNA, 120 bp, Artificial Sequence
  ENSG00000231246_28 (sequence is synthesized)
ttgctctattcagctgagcttttccttaagaagacccctgaggtaccagccctctctgagcctagtggagggggactttctgttcatgctgaggccccttcccagcctgacagaagcttc

SEQ ID NO: 1004465 - DNA, 120 bp, Artificial Sequence
  ENSG00000231246_29 (sequence is synthesized)
tagctcttccttagtcagttccctgcaggtctgggaaccttgtgctagttctgttctctggcctctgtgctgtcacctgtgaagctgtgtcctttgatttcctcttgcaatcctcttgtt

SEQ ID NO: 1004466 - DNA, 120 bp, Artificial Sequence
  ENSG00000231246_30 (sequence is synthesized)
gctcacagctggcaaccttcatagtcattcacactcacacacagcatttcttcatttattcacattaagtcatttcacactcattttaatagttattattcacagtactgttagtttata

SEQ ID NO: 1004467 - DNA, 120 bp, Artificial Sequence
  ENSG00000231246_31 (sequence is synthesized)
gcaccgcacaacattataatgttgtagtgaacagtcgtcatttctttgtgctgctcagccagctacgcaccattctgggtttgggacctccccacccacctgcctgctgggtgtgcaggc

SEQ ID NO: 1004468 - DNA, 120 bp, Artificial Sequence
  ENSG00000231246_32 (sequence is synthesized)
tgctcttctttcacgatggaaaccaaaggggggagttcctctctcccagcccaaaggccatgcaggagccagcctgtgatcttggttcagccaaacaggcagtaccatctcacactttga

SEQ ID NO: 1004469 - DNA, 120 bp, Artificial Sequence
  ENSG00000231246_33 (sequence is synthesized)
ctcttaagagaactttgctaagaatctggaacaggtcagactttccttatggtggcggcagagcctttgagatttggcagtcagccctgttggttttgagcacccctaggctgtggtggc

SEQ ID NO: 1004470 - DNA, 120 bp, Artificial Sequence
  ENSG00000231246_34 (sequence is synthesized)
ctagggcagcacagacactgccctacccatatgggtcctgaggccctggctagtccccactggccatcctgggtttccatcgtgtttctgggccttgttctccagctttctgttgattct

SEQ ID NO: 1004471 - DNA, 120 bp, Artificial Sequence
  ENSG00000231246_35 (sequence is synthesized)
gtgagttatctgatattcttcaaaaatattccttttcatttaatgctagccagaactgcttaaagaaccctatactgtttgacttttgtcttaaagtttgaaacgttacttagtaagtca

SEQ ID NO: 1004472 - DNA, 120 bp, Artificial Sequence
  ENSG00000231246_36 (sequence is synthesized)
caacatactaatttgaatttcatttgtaacataacttctctttccctaggccacataagtcagggagatggagagagaaacagaggggacaaaaatatagtcacaacagtatttacctgg

SEQ ID NO: 1004473 - DNA, 120 bp, Artificial Sequence
  ENSG00000231246_37 (sequence is synthesized)
cttcatttcacccttagctgcaattgtccggaactcaggtcctgcctcctaagatcctccacaatagcatttctgcgcttctcactgccttgtagccctgtagccttctgcttgtctatc

SEQ ID NO: 1004474 - DNA, 120 bp, Artificial Sequence
  ENSG00000231246_38 (sequence is synthesized)
tcagagactgctggtagtgctgcttttgtaagggttttcttcttccatggcccatttgtctgtgggctatctggcttgcttgagtcatatccactaatcaactattaaggctgattcttc

SEQ ID NO: 1004475 - DNA, 120 bp, Artificial Sequence
  ENSG00000231246_39 (sequence is synthesized)
tctttggaagacccagagatttcagctatgattctgggctacactttgagcctcagaaatgaccatgtgtttagtggtgacctcacgggcaaatgccgcaatacttttctggtgcctgtc

SEQ ID NO: 1004476 - DNA, 120 bp, Artificial Sequence
  ENSG00000231246_40 (sequence is synthesized)
tgcctaagtcttttcttctctgtcactccagttctgcttgtccccagggatatgattttcaagtctcatgatcttatgtcaagtcacatccaatatgatctgacgggttggggagcaggg

SEQ ID NO: 1004477 - DNA, 120 bp, Artificial Sequence
  ENSG00000231246_41 (sequence is synthesized)
cagggtcggatgatctggaatgactgcctcctgtgctggaataagcgataagcagacaggcccctccgcaagtgctgggaggaacgccagtgccgcaggtagaacacagcatgaaagggg

SEQ ID NO: 1004478 - DNA, 120 bp, Artificial Sequence
  ENSG00000231246_42 (sequence is synthesized)
tatgtggaggacgacaggcccggagaaatcctgtctcaggccagagtggaaggccagaatgtggacttttccaagcaagcaggttttgcaacatctctaggaacctaggagccagcagtg

SEQ ID NO: 1004479 - DNA, 120 bp, Artificial Sequence
  ENSG00000231246_43 (sequence is synthesized)
aacaggagtctaggtaggcagatgggaagcagcgtcctagacactcagctagggtttgggaccaagaatgcagaaatgaatagctccgggttgggggtgggaggtgtggcacagaactag

SEQ ID NO: 1004480 - DNA, 120 bp, Artificial Sequence
  ENSG00000231246_44 (sequence is synthesized)
gacacatctgtagaaaagtatttttctcgaaccatatctgtattttaggtattccaagtctaaatattccatggttaaaaaagtttggaaattatggaattttaagttcttctcttggag

SEQ ID NO: 1004481 - DNA, 120 bp, Artificial Sequence
  ENSG00000231246_45 (sequence is synthesized)
attcatgattcacaagactatacaagacgctgaatcctatgattacaaacaaaaaaacaaaaccaaacctgtttagtaggtaaacagggttatgtaggcagaagacattttcttttttta

SEQ ID NO: 1004482 - DNA, 120 bp, Artificial Sequence
  ENSG00000231246_46 (sequence is synthesized)
aattacttttttcaaattcatgagcatttgaagtggcagccagctgagtcacaaaattgcttttaaaaaattatgattattttgtaattataaaactgcatatataatacatataagtgg

SEQ ID NO: 1004483 - DNA, 120 bp, Artificial Sequence
  ENSG00000231246_47 (sequence is synthesized)
tttcaaaaatattagagaaacaatacgttaagaaatagattattaccagtccctatgaagttcccctgtgtgtccctcctcattcaaatttctctcctctctctaaaggtaactccaact

SEQ ID NO: 1004484 - DNA, 120 bp, Artificial Sequence
  ENSG00000231246_48 (sequence is synthesized)
tgaattttaccacttttctatgtatccccaaacaatattgtttaacttcacctttttcaaatattataccatttgaaatcattgtttgcaaccttctgtgaattgcattttttcattaaa

SEQ ID NO: 1004485 - DNA, 75 bp, Artificial Sequence
  ENSG00000266278_0 (sequence is synthesized)
gcttgatgaatcagctctgtctaggcagcgggcaagagaaatcctgaggctcaaagacactgaatgacctgctgc

SEQ ID NO: 1004486 - DNA, 120 bp, Artificial Sequence
  ENSG00000266278_1 (sequence is synthesized)
gagaaatcctgaggctcaaagacactgaatgacctgctgcttcacacacaggtggtcagtgttgccaaagaccaggacgagcagtccaggcagctgtcacatttccaacatgtggaaagc

SEQ ID NO: 1004487 - DNA, 120 bp, Artificial Sequence
  ENSG00000266278_2 (sequence is synthesized)
ctcgccaaagcatgagctctgctgtctcccttccatgcagcgaggccacacgaggcggacgcagatttgttccagcagcttcaccagggaataaacagcaggcatagattacacactctt

SEQ ID NO: 1004488 - DNA, 120 bp, Artificial Sequence
  ENSG00000266278_3 (sequence is synthesized)
tctatattactatgaagcttcaagatattttatgcggcttttgtaagaaacataatcctactaacattgactgagtaccaggccctctgctaggaggcagggaaactgcatacagcaact

SEQ ID NO: 1004489 - DNA, 120 bp, Artificial Sequence
  ENSG00000266278_4 (sequence is synthesized)
ccagcaccatccagcctcgagggcgaggcagactcgtaagtgggtgatcataacagcgagtgctaaatgatatattgggaaaatcacagaatactgtcgcaacacccagggtgtgctctc

SEQ ID NO: 1004490 - DNA, 120 bp, Artificial Sequence
  ENSG00000266278_5 (sequence is synthesized)
acccatcttgagaatgaggaagagttaacccagaacaaagaaagggtagttgatgtttagtgtttgggcagatgtattccaagcaaagggaacattattggtaaaagaagaaaggggatt

SEQ ID NO: 1004491 - DNA, 120 bp, Artificial Sequence
  ENSG00000266278_6 (sequence is synthesized)
gagagcccagagtcttcggagagctgtaaatattctgtcaaggcacagaagcgaagtttggagtttatgctaccgacaatgggaatctctaaaaggagttcagaaagatctgaaaataga

SEQ ID NO: 1004492 - DNA, 120 bp, Artificial Sequence
  ENSG00000266278_7 (sequence is synthesized)
ctcaaagatttcttcaacaaaaggagatgggtgtctgaaaatgatgaagatgtggtccctgactccaaagagctcatcacctactgggagagacagatatgtaaacaaatcattacagaa

SEQ ID NO: 1004493 - DNA, 120 bp, Artificial Sequence
  ENSG00000266278_8 (sequence is synthesized)
caatttgtttcattctaaatgtagcacacaaaaagagctggggacagtgaagaggaagccgtcagcgctgcctgcggagaagaaaggaaggctttgtgtaggtgacaactgagcaagatg

SEQ ID NO: 1004494 - DNA, 120 bp, Artificial Sequence
  ENSG00000266278_9 (sequence is synthesized)
acagatgagtgggcggaaaccagtcctagcagaaggggtggacccttggggcgggaccaggaagggcacctccaattcattacccaagattaaatgaatggaacattcgccgtactcttt

SEQ ID NO: 1004495 - DNA, 80 bp, Artificial Sequence
  ENSG00000266278_10 (sequence is synthesized)
acctaaatttcaagaatttctattgcaactcctttgcctcaggaatttgtccccttcctagtggagatagtgaatgttaa

SEQ ID NO: 1004496 - DNA, 120 bp, Artificial Sequence
  ENSG00000266278_11 (sequence is synthesized)
aggaatttgtccccttcctagtggagatagtgaatgttaaactgtaacctacatatctcttctcaaggattttgaatgtttgtttgtacagagaacactccatctggtatatcccagaaa

SEQ ID NO: 1004497 - DNA, 120 bp, Artificial Sequence
  ENSG00000266278_12 (sequence is synthesized)
caaaaggagcttttcagtaagattttcagtgcacggaagccgtgttcatttctagagactgcattctcagaagcttttcgccctaagcacaaaatcagaggcaagtaggaggagtggggc

SEQ ID NO: 1004498 - DNA, 120 bp, Artificial Sequence
  ENSG00000266278_13 (sequence is synthesized)
tgcacctgagtgcagcattgctgtacccatcctgtttcccagacaagcagattcaaaaatcaagtgtcttattcactggggttagaaagaatctatttttttcctttggcagcatcaaac

SEQ ID NO: 1004499 - DNA, 120 bp, Artificial Sequence
  ENSG00000266278_14 (sequence is synthesized)
atcagaaataattccactgaaaagaatattatacctaatgtattctacttaaagtccaacaaatacattaagagcagaaaattgtaggatacaagattctcaaattttcagtaatacagc

SEQ ID NO: 1004500 - DNA, 120 bp, Artificial Sequence
  ENSG00000266278_15 (sequence is synthesized)
tcaatatcagtacacaaggtgaggccttatggactgaagggttgtgtccacccaaaattcatatgttgaagccctaaccccccactgcgatggtatgaggaggtgaagcccctggaagat

SEQ ID NO: 1004501 - DNA, 120 bp, Artificial Sequence
  ENSG00000266278_16 (sequence is synthesized)
gattaggtcatgagagagaagcccttgtcaatgggactagtgaccttgccaaagggaccctaaagagctcttatgccctccttcctcttgtgagtgcacaactagccggcaagccagaag

SEQ ID NO: 1004502 - DNA, 120 bp, Artificial Sequence
  ENSG00000266278_17 (sequence is synthesized)
aggacccttatcagaacctgacattgctgcaccccaatctcagaattccagcctccaaaatcggagaaatatatttctattgtttataaaccacgctggggtactttgttgtagcagcca

SEQ ID NO: 1004503 - DNA, 120 bp, Artificial Sequence
  ENSG00000266278_18 (sequence is synthesized)
aaactgactaagatgagaggccaaaaaaggtgctttccctattaacagcacgactctgcccgtgcttacaaagaactgtggttgaaatggattcagctttacaacatctgcagaaggcta

SEQ ID NO: 1004504 - DNA, 120 bp, Artificial Sequence
  ENSG00000266278_19 (sequence is synthesized)
agttacgtgcggcagtagtggtggaaatgttgaactaggaactgtattaaggggttgaaagtaaagggatgagccataatttattcaggaaaacgcaaataaaagtagtggaaatagcaa

SEQ ID NO: 1004505 - DNA, 120 bp, Artificial Sequence
  ENSG00000229582_0 (sequence is synthesized)
cccggggcccggcccgttccctctggcctctgatactccgcgctccggagtgtgccgccggatcctcgctccaacctcgtcgcgtcctagccccccgggatagaccgggccggcccacaa

SEQ ID NO: 1004506 - DNA, 120 bp, Artificial Sequence
  ENSG00000229582_1 (sequence is synthesized)
acggtgtgcccgcaccccgactcctgctccatgcttttggcagtcatgggagcggggggttgtgtatgggacagtgggcaactcgctgcaaagccaaccgtgtgctcccccgccgcgccc

SEQ ID NO: 1004507 - DNA, 120 bp, Artificial Sequence
  ENSG00000229582_2 (sequence is synthesized)
gtgagcttcacgcctcggacagctcctggtgcactttcccgctcttcctgtcaggaggtggtgccctctgggtaccaggccgctcgtcccgggccaatcgcaaagcgcttagagccgaat

SEQ ID NO: 1004508 - DNA, 120 bp, Artificial Sequence
  ENSG00000229582_3 (sequence is synthesized)
ggggcgggacagaggcaagaaagggtcgtcccaattggagcgttcgaaaggttctgggcagaggcggggaagcggcgagtgggggcctcgccccgcctgcggtcgccatggtaaccgaga

SEQ ID NO: 1004509 - DNA, 120 bp, Artificial Sequence
  ENSG00000229582_4 (sequence is synthesized)
gggcgcagctcagcgttggcgccagcaccggggtcttgtgctgtccctcaatgggtgaccagttaaggtgggaacctgtggtctcacatacttgaagtctgagctgagtggacctgactg

SEQ ID NO: 1004510 - DNA, 120 bp, Artificial Sequence
  ENSG00000229582_5 (sequence is synthesized)
ccatagactttccattgaaaggggaaatgtgtcagagagaagcgagtctgggaggagggaaagtgccttcagtccaggactaatttcaaggtttacaacactttacacactctgcaactc

SEQ ID NO: 1004511 - DNA, 120 bp, Artificial Sequence
  ENSG00000229582_6 (sequence is synthesized)
ctgataatccagggactactcctttggcagcgtttgctattcgatgcctccagatgtactgaagctgcaaaaacgagctcttcattacaaagatacgtttgtttaggaagagactggatt

SEQ ID NO: 1004512 - DNA, 120 bp, Artificial Sequence
  ENSG00000229582_7 (sequence is synthesized)
tcacttgtcaacttaccccatcaccacgagtcatttaatgttggtaacgccagccacgatttttcgtatctataacaccccttcttccattgaattctacctacaaataactgaaggctc

SEQ ID NO: 1004513 - DNA, 120 bp, Artificial Sequence
  ENSG00000229582_8 (sequence is synthesized)
acattattttggaatatggacctccgcctcttgtggagacttgagattgctcttaagctgatttcccaaacaggggctgcaatgtgtgttcccgattttagattcattgagctcacccta

SEQ ID NO: 1004514 - DNA, 120 bp, Artificial Sequence
  ENSG00000229582_9 (sequence is synthesized)
cggtggttcggaaaagtctctttgttccttctccaaactcagtaagctgtcttacctgaaaccaaaaataggggtatgaggatatgaaaaatggctcttactctgcagggtttaatgtag

SEQ ID NO: 1004515 - DNA, 120 bp, Artificial Sequence
  ENSG00000229582_10 (sequence is synthesized)
gacaagcagttctttaaatgccagatggattcttggaatgaagcaggctactcggttccaggttctttccttcatatgttgtgtgtacttttaaatactccccactgcaaagctaatagc

SEQ ID NO: 1004516 - DNA, 120 bp, Artificial Sequence
  ENSG00000229582_11 (sequence is synthesized)
taagcttacagttaggcaagctaaaatccttacaaactgcacagctgctgaggagggagttccaaaaaatccactctgcttacttacctccaaagaagaacccccttcatgttcattaat

SEQ ID NO: 1004517 - DNA, 120 bp, Artificial Sequence
  ENSG00000229582_12 (sequence is synthesized)
attctctgctcttctataccccattgatatgtcaagtttccaattcttctttgaagcccccattatgggttacttataatcgtcattgattgggttttttctttattcttaatttgtttt

SEQ ID NO: 1004518 - DNA, 120 bp, Artificial Sequence
  ENSG00000229582_13 (sequence is synthesized)
ttaaagctgtcaccaaattcttaagcatttttgccaaaaggcgcaggagcaagcggtcaacctttcataattctccaacgctgaggatgcaaaaccacagaattctaactgaaagatgcc

SEQ ID NO: 1004519 - DNA, 120 bp, Artificial Sequence
  ENSG00000229582_14 (sequence is synthesized)
ttaaattctaagattccttccagctgtaaaattcaataatcctgtgactcactattaggactcctctctgccctccttctagactcataatcttgactaatcagtcatgaggatgaggct

SEQ ID NO: 1004520 - DNA, 120 bp, Artificial Sequence
  ENSG00000229582_15 (sequence is synthesized)
ggctaattagcaatggggatttatggttatttctagcccactccgaacaatgagttatgtaagcaaagcaacatatataaaaatgtaaataggccggtggctcatgcctgtaatctcaga

SEQ ID NO: 1004521 - DNA, 84 bp, Artificial Sequence
  ENSG00000229582_16 (sequence is synthesized)
ggtgaactgagattgtgccactcccctccagcctgggcgacagagtgagacttcttttcaaaaaaaaaaaaaaaaagtaaataa

SEQ ID NO: 1004522 - DNA, 120 bp, Artificial Sequence
  ENSG00000229582_17 (sequence is synthesized)
atgagtcctttggttcggtggttcggaaaagtctctttgttccttctccaaactcaatgttccaggatctcttggtgctcgtgccagtgtctcatgtagaatgttgcgtgatctctgctc

SEQ ID NO: 1004523 - DNA, 120 bp, Artificial Sequence
  ENSG00000229582_18 (sequence is synthesized)
aagaatctgagtcacaaggttgatgccttcacagatgacagaacagaagttccctgagtacccgagtctgtctttgctgtttctaaggtagtgattattaaaatgtcaagggaaatgaaa

SEQ ID NO: 1004524 - DNA, 120 bp, Artificial Sequence
  ENSG00000184029_0 (sequence is synthesized)
cagtcacgggccagcctttcccttaaggatgtctgagagctggtctcctcactcttttcttccgcctattaaactttccgcttcttaactcacccatgtgtgtccatgtcgttaatcatc

SEQ ID NO: 1004525 - DNA, 120 bp, Artificial Sequence
  ENSG00000184029_1 (sequence is synthesized)
ttgacgagagatgatgaaccccggatatttaccccagacagtgatgccgcttcaccagcattgcactctacttccccgcttcctgatcctgcctcagcttctcctctccacagagaagaa

SEQ ID NO: 1004526 - DNA, 120 bp, Artificial Sequence
  ENSG00000184029_2 (sequence is synthesized)
aaaattctgcctaaagtctgcaacatcgtttcctgcctgagtttcagcctgccagcttctcctacggattctggacttgccagccccacaatcataaccagagaggggcagcaattttgg

SEQ ID NO: 1004527 - DNA, 120 bp, Artificial Sequence
  ENSG00000184029_3 (sequence is synthesized)
gcaaaatgtctgatttggaaataccaactttacctccatgggctccacaagaaatcagatgggagaagggacaagcagataagcgcaagcccatcaacctgaaggcataaaccacatcca

SEQ ID NO: 1004528 - DNA, 120 bp, Artificial Sequence
  ENSG00000184029_4 (sequence is synthesized)
gcagcaaagctgacgttttgatctccatctgtctgattcttgtgtctacttctcagtttacaactccagtgggaaagaaagagctttatttacagacccataaaaatcccatcagtgtcg

SEQ ID NO: 1004529 - DNA, 120 bp, Artificial Sequence
  ENSG00000184029_5 (sequence is synthesized)
tcccctgctgagaggccatgtgagaccatatggaaaaacaacagccataatggcagcatggcagtggaagggtttgtcttgtgcccaggccttgcggtcatgcaagtttcttgtggatcc

SEQ ID NO: 1004530 - DNA, 120 bp, Artificial Sequence
  ENSG00000184029_6 (sequence is synthesized)
tgttgggaccagccactcaccaaggctgagtaggtccacaaataatggggactttctaccagactcacagagaactgctgggtttttgggaagggtgtgcgtgtctttggggcatgcaag

SEQ ID NO: 1004531 - DNA, 120 bp, Artificial Sequence
  ENSG00000184029_7 (sequence is synthesized)
ttggggttatagtggagacccagaggatgagaaaacttctctgcctcagcagaagagtggcagctgagagagaggcaagaaactcgcacccactgtggactggggcagagagattttgag

SEQ ID NO: 1004532 - DNA, 120 bp, Artificial Sequence
  ENSG00000184029_8 (sequence is synthesized)
gagaatgaaatccagaaactctgtgtggtattagtttgtatccagagggtgaccctcttctcaaggaaatgggtgtcatcaattttctacactattaaagatataaagttcttggcatta

SEQ ID NO: 1004533 - DNA, 120 bp, Artificial Sequence
  ENSG00000184029_9 (sequence is synthesized)
ccccaaccccaagtggattttctacctgcagagaatacctgctctgggtgaccacagctgctgagaaatcttcccagaagaggcaggatgggatggaatgctgggattacagatgaactt

SEQ ID NO: 1004534 - DNA, 120 bp, Artificial Sequence
  ENSG00000184029_10 (sequence is synthesized)
tcctggccaccctggataagcagaacctgaataaagtaaatcatgatcacaccccaaggcaagacagaggcctctggcatgtaagaaggctccccagtggtcaagacagaagcaggcttc

SEQ ID NO: 1004535 - DNA, 120 bp, Artificial Sequence
  ENSG00000184029_11 (sequence is synthesized)
aagaaatggaaagtattggtgggcagagtggggtcagtgagggatgagggtgcaggagcactcagagaagcacacaaggtgtccttctgagctggatgcttgtgataactggagagggaa

SEQ ID NO: 1004536 - DNA, 120 bp, Artificial Sequence
  ENSG00000184029_12 (sequence is synthesized)
gagttacaatgattaacgaattgcatccttgtcacccctccaagcacattgagataagctttctcaacaaggagaatcttgagatgtagtttgaatcacaaggcattacctaatggatat

SEQ ID NO: 1004537 - DNA, 120 bp, Artificial Sequence
  ENSG00000184029_13 (sequence is synthesized)
aaaattggatagtgtttttggcttagatgggagcagatctgacgtttccaaggaaatgtatacacatgcaccttccattttacataaatttcaggaaattcaagacctccagaagctcag

SEQ ID NO: 1004538 - DNA, 120 bp, Artificial Sequence
  ENSG00000184029_14 (sequence is synthesized)
tcatcactctctgaggagatcaacttcatgagccttctctacctgagagaggactacaaatactgttttattccatgatcaatcagctgagtgtagaaagaaatatattacctcttcctc

SEQ ID NO: 1004539 - DNA, 120 bp, Artificial Sequence
  ENSG00000255418_0 (sequence is synthesized)
cagaataccacagtctggaggctatgaagtccatgattaagaagccagcacgtttgctttctggttccaagatggcatacctttttgctgcttcctccagagaggaggaacactgtgttc

SEQ ID NO: 1004540 - DNA, 120 bp, Artificial Sequence
  ENSG00000255418_1 (sequence is synthesized)
tcacatagtagaagatggaaggagcagatgcagatgagcatggcaatgtgagaatatgtcagaggccccaggatgaaatgagctcaagtccctgaaatccctgttagaagagtctttcca

SEQ ID NO: 1004541 - DNA, 120 bp, Artificial Sequence
  ENSG00000255418_2 (sequence is synthesized)
atacattctattatagaggagaagaaatgcttactgccaataccatgacagataacaaattatcaggcatgtatcttagcatgcagagaagggactgaatgaatatgcccaaagatgtgt

SEQ ID NO: 1004542 - DNA, 120 bp, Artificial Sequence
  ENSG00000255418_3 (sequence is synthesized)
aacactcattgtctctggggagatgaagaagaagtatggaagaagtaagatgaagaagaagtatggaagaagtaagttgtctgtgtaacctcattcttcctggacatgggacaagaactt

SEQ ID NO: 1004543 - DNA, 120 bp, Artificial Sequence
  ENSG00000255418_4 (sequence is synthesized)
gggacccgctgaatgatgggagcaaaaggagctgtatcatgttcctggccagctggctaaactgcagatggtgacatgctcccagactgtgggagtgaagagtggcaacccttctggcgg

SEQ ID NO: 1004544 - DNA, 120 bp, Artificial Sequence
  ENSG00000255418_5 (sequence is synthesized)
gaaaagttgaccacagaagcatgtttatattgtattaaaacaaactatttttctggaaagttttcccattaagcgtctaacctccaagcatcgaatcccaggccaatttgtttcaaagta

SEQ ID NO: 1004545 - DNA, 120 bp, Artificial Sequence
  ENSG00000255418_6 (sequence is synthesized)
ccaacctggagaaaatgccctggatttggaagcaaagtattgaatgttggaagtctgaataaaggaatcatacactgtatgtgcacctgaatgtactttacaagcatcagtagaacactt

SEQ ID NO: 1004546 - DNA, 120 bp, Artificial Sequence
  ENSG00000255418_7 (sequence is synthesized)
ctgattgaagcttggtcttatgaagataaaaattttatgtggaccacagattctctaaaaatcaatgcttcctgtcctcaaacatcggactccaaattcttcagctttgggacggactgg

SEQ ID NO: 1004547 - DNA, 120 bp, Artificial Sequence
  ENSG00000255418_8 (sequence is synthesized)
tttgatttatgcctactcacatatacttggtacatgcacgttccttagaggaggggagataggaagacacacatgtaaatttccacctcagtttggaaacagatactgcaatcccagaaa

SEQ ID NO: 1004548 - DNA, 120 bp, Artificial Sequence
  ENSG00000279998_0 (sequence is synthesized)
gtcatttgattattaagacccattgacatgagattacatcctctgcctataaaaatcctggaagaaaacctaggaaatattcatctggacattgcacttggcaatgaatttatggataga

SEQ ID NO: 1004549 - DNA, 120 bp, Artificial Sequence
  ENSG00000279998_1 (sequence is synthesized)
aaatgcagttgaaagatatttcataaaggaagaaaagaagtatgaatacagctttaaccatttattttggtggagtctttaagattttctctatcttgagtgcgcgaggcgcggggagcc

SEQ ID NO: 1004550 - DNA, 120 bp, Artificial Sequence
  ENSG00000279998_2 (sequence is synthesized)
taggacctggagcgagagccgcctacctgcagccgccgcccacggcacggcagccaccatggcgttcctgctgcgcttcgtgctcctgtgcggagtcgcggatttcaccagaagtttgag

SEQ ID NO: 1004551 - DNA, 120 bp, Artificial Sequence
  ENSG00000279998_3 (sequence is synthesized)
tatcactactcctgagcagatgattgaaaaagccaaaggggaaactacctatctgccatgcaaattatacttagtcctgaagaccagggaccactggacattgagtggctgatatcacca

SEQ ID NO: 1004552 - DNA, 120 bp, Artificial Sequence
  ENSG00000279998_4 (sequence is synthesized)
gctgataatcagaagatggatcaagtgatgattttatattctggaaacaaaatttatgatgattactatccagaactgaaaggccgagtacattttaagagaaatgatctcaaatctggt

SEQ ID NO: 1004553 - DNA, 120 bp, Artificial Sequence
  ENSG00000279998_5 (sequence is synthesized)
gatgcttcaataaatgtaacgaatttacagctgtcagatattggcacagatcagtgcaaagtgaaaaaagctcctggtgttgcaaataagaagattcagctggtagttcttgttaagcct

SEQ ID NO: 1004554 - DNA, 120 bp, Artificial Sequence
  ENSG00000279998_6 (sequence is synthesized)
aactaaaatgtgaaccaaaagaaggttcacttccattacagtatgagtggcaaaaattgtctgactcacagaaaatgcccacttcatggttagcagaaatgacttcatctgttatatctg

SEQ ID NO: 1004555 - DNA, 120 bp, Artificial Sequence
  ENSG00000279998_7 (sequence is synthesized)
taaaaaaaatgcttcttctgagtactctgggacatacagctgtacatcagaaacggagtgggctctgatcagtgcctgttgcgtgtaaacgttgtccctccttcaaataaagctggacta

SEQ ID NO: 1004556 - DNA, 120 bp, Artificial Sequence
  ENSG00000279998_8 (sequence is synthesized)
attgcaggagccattataggaactttgcttgctctagtgctcattggtcttatcatcttttgctgtcgtaaaaagcgcagagaagaaaaatacgaaaagtaagttcatcacgatatcagg

SEQ ID NO: 1004557 - DNA, 120 bp, Artificial Sequence
  ENSG00000279998_9 (sequence is synthesized)
gaagatgtgccgcctccaaagagccgtacgtccgctgccagaagctgcataggcagtaatcattcatccctgggatccatgtctccttccaacatggaaggatattccaagactcagtat

SEQ ID NO: 1004558 - DNA, 120 bp, Artificial Sequence
  ENSG00000279998_10 (sequence is synthesized)
aaacaagtaccgagtgaagactttgaacgcactcctcagagtccgactctcccacctgctaaggtagctgcccctaatctaagtcgaatgggcgtgattcctgtgatgattcccgcacag

SEQ ID NO: 1004559 - DNA, 120 bp, Artificial Sequence
  ENSG00000279998_11 (sequence is synthesized)
agcaaggatgggtctatagtatagagcctccatacgtctcatctgtgctctccgtgttcctttccttttttgatatatgaaaacctattctggtctaaattttgttactagcctcaaaat

SEQ ID NO: 1004560 - DNA, 120 bp, Artificial Sequence
  ENSG00000279998_12 (sequence is synthesized)
gtatccaaaaataagttaatcaggagctgtaaggaatatatttttttaaatttttctttggttatatcgaaatagttacaggcattaaagttagtaaagacaagtttaccatcggaaaaa

SEQ ID NO: 1004561 - DNA, 120 bp, Artificial Sequence
  ENSG00000255411_0 (sequence is synthesized)
agcataggagtttttagggcatggagaggcacaaacatccagacaagcatttaccttctgctgaaattgtctcagtgtttgcctctcctaatggaatatgggccacatgtacagcaaggg

SEQ ID NO: 1004562 - DNA, 120 bp, Artificial Sequence
  ENSG00000255411_1 (sequence is synthesized)
ctcagcaaatgcttgctgaacaaacaagtttgaggcaggtttctaactcaggtagatcgtttcatcctcttcatctcccagcaaccaagaaaaccagcctattgccatgggggggtcctc

SEQ ID NO: 1004563 - DNA, 120 bp, Artificial Sequence
  ENSG00000255411_2 (sequence is synthesized)
caaccctggctattctccaatgctaaagactgacagataatctcaattagcaaattgacccttgtggattttctgcactcatagcaaatgtcttcaggaaaactgaatttctctccatac

SEQ ID NO: 1004564 - DNA, 120 bp, Artificial Sequence
  ENSG00000255411_3 (sequence is synthesized)
ctggattaattttcagtaatggaatgactgggtcaaaggagatcaacattgctgtggctctttcaggttctcttaaattccatggattttaactttggcccatgacctccttgacctctg

SEQ ID NO: 1004565 - DNA, 120 bp, Artificial Sequence
  ENSG00000255411_4 (sequence is synthesized)
ggtcttgcctacacttgtgtctacacaggatcactttgatgcttgtgttggaaatagaaagaccaagagcagaaacatatggaggcagaactagtctatggaatattctgctaatcatca

SEQ ID NO: 1004566 - DNA, 120 bp, Artificial Sequence
  ENSG00000255411_5 (sequence is synthesized)
gatatataaaattgattgaagatcaaagtttgaagttgacttctaggccccatcctggtacattctggatgaattttggggttggaagatggaggacctatacattttgagggaaataag

SEQ ID NO: 1004567 - DNA, 120 bp, Artificial Sequence
  ENSG00000255411_6 (sequence is synthesized)
aaggataataggagtcagtgaagaagtggtcagcaccaaaggaggagagcgtttaaaggaaaagagcttgataaaccagagggatagtctgagagagaaactgaaggtcaaaatcaacgc

SEQ ID NO: 1004568 - DNA, 120 bp, Artificial Sequence
  ENSG00000255411_7 (sequence is synthesized)
agtggtgccgaacagaagggcccgaggtgcgatgagtataatatgaacacgaaggaaaacagcgagttcagaagcctggagaatcagaagcaggtcaagcgctggggttcagggcaaaga

SEQ ID NO: 1004569 - DNA, 120 bp, Artificial Sequence
  ENSG00000255411_8 (sequence is synthesized)
ccctgaacactgtgaaggtgttggagacctgttttgaggtggcactgcggctcaatgtgagtgcagacctgagagattaaagtgcctacgaagggccaaatacctgtcccttcatgacat

SEQ ID NO: 1004570 - DNA, 120 bp, Artificial Sequence
  ENSG00000255411_9 (sequence is synthesized)
aatgtgacatcctgcacctgctgcatcagggctcttccctggtcttgcctacacttgtgtctacacagcttgataaaccagagggatagtctgagagagaaactgaaggtcaaaatcaac

SEQ ID NO: 1004571 - DNA, 70 bp, Artificial Sequence
  ENSG00000255411_10 (sequence is synthesized)
gactggaagatacttagtcacattggtgaggatctttactcagtttactgattcaaatgctagtgtcttc

SEQ ID NO: 1004572 - DNA, 120 bp, Artificial Sequence
  ENSG00000255411_11 (sequence is synthesized)
tccatatcacttgcttctgcataaagtgggtgcagaagataatgagacggatttgaccgcggtgaacaggcaggcacacaagatggagcaggccctggtgataaaccccaattcaagtga

SEQ ID NO: 1004573 - DNA, 120 bp, Artificial Sequence
  ENSG00000255411_12 (sequence is synthesized)
ccagattggaagatggagtccagtgcccagagatcatggtccagataatacatcgtgaagagattaatgcatggctagaggggtgggaggtagatctatgaaacatgcatatcccccagt

SEQ ID NO: 1004574 - DNA, 120 bp, Artificial Sequence
  ENSG00000255411_13 (sequence is synthesized)
agagaggcaaaggagcaggaaaagaagcctgttcacaaaatttctgcatccctctcctgggcacatgcttgataaaccagagggatagtctgagagagaaactgaaggtcaaaatcaacg

SEQ ID NO: 1004575 - DNA, 120 bp, Artificial Sequence
  ENSG00000255410_0 (sequence is synthesized)
attctcgtcctgcacttgcacctgcactcgcagcagccgcgcgcccgcgcctcccggcccctcagcgcgtaccgtaagcgcgcgccacggcgggccagcttcgaagtccaggggccgcgc

SEQ ID NO: 1004576 - DNA, 120 bp, Artificial Sequence
  ENSG00000255410_1 (sequence is synthesized)
caggtacaagcgccctgaggccgcatccagcgcgaaggtgccctcgggatcggcaccgcccaccagtgtgtagttagcgtgtacaagatggtcccattctccccctcatctggatccttc

SEQ ID NO: 1004577 - DNA, 120 bp, Artificial Sequence
  ENSG00000255410_2 (sequence is synthesized)
gcctgcagagtcgtcaccagtgttcccggaggcacgcggtctggtacctgtgggaacacaactcacctagactgcgagtagactgtgagaaaaacaggttttctggacttgagatgtgta

SEQ ID NO: 1004578 - DNA, 120 bp, Artificial Sequence
  ENSG00000255410_3 (sequence is synthesized)
caaatggcacaaagaaatcaggaacttctgtggagaaggaacacagtttcagctgaagaagaagggagtgtgattttggaagaggagtgagggagagactggggtccttgatcatatcca

SEQ ID NO: 1004579 - DNA, 120 bp, Artificial Sequence
  ENSG00000255410_4 (sequence is synthesized)
cggcgcttgggcagctgggtggatggatggtggtgaggctggctgtgctccacaaaaggagcagcaggaggctgcagggggttcgtatgaggagatgatgactgtgacttggggctgctg

SEQ ID NO: 1004580 - DNA, 120 bp, Artificial Sequence
  ENSG00000255410_5 (sequence is synthesized)
actttgaagtgctggttgggtaggtaggtctgcaacttagaggagcggtctgggatggacataaatatttgggagtcatctgcaaatgccgtataagcttgaatatagggtgaagttttt

SEQ ID NO: 1004581 - DNA, 120 bp, Artificial Sequence
  ENSG00000255410_6 (sequence is synthesized)
gcttttttgtttttccaaaatcatccctcaggaaagagggagtaaccttatatttgagtccttacaaggtctctcatattacagggtttgctctcatttactttattttgaacaacaaac

SEQ ID NO: 1004582 - DNA, 120 bp, Artificial Sequence
  ENSG00000255410_7 (sequence is synthesized)
ttgtctctgcctcagttttctcatctataaagtgggcctaaggattaaattatgtaatatatataaagcactatatacctggcactatatggtaagtgtccaataaatgctaactatttt

SEQ ID NO: 1004583 - DNA, 120 bp, Artificial Sequence
  ENSG00000255410_8 (sequence is synthesized)
tactgtttggctaagacccattgacctgaaatgtcctcaacaatgctattttggatgtattgtagtcaaagaaatttaacacagctttggtaactattcctggtagtatgacctcataat

SEQ ID NO: 1004584 - DNA, 120 bp, Artificial Sequence
  ENSG00000255410_9 (sequence is synthesized)
cgcatgtgttggatgtctcaaaatatgctttttaaagattgctttaaaaagcaatacagtagtacttggaagaggtttctgggctgccgaaaatgttctatttcttgacctgagtggtta

SEQ ID NO: 1004585 - DNA, 120 bp, Artificial Sequence
  ENSG00000255410_10 (sequence is synthesized)
tatggacctgagggatgtttcactctgacagttcattgagctgaatatttatgatggcttgtggccttttccatatagatgttatatttcagtaaaaaaagttaacagaaatataatttt

SEQ ID NO: 1004586 - DNA, 120 bp, Artificial Sequence
  ENSG00000255410_11 (sequence is synthesized)
taaaaagtattacattaagtgatgttttgaagtcatgaatatactcaggcagggtgcatgcaaaaaaccaactgttctagtgtgatgcaaaggaaacttgtgacttaggataaagtttcc

SEQ ID NO: 1004587 - DNA, 120 bp, Artificial Sequence
  ENSG00000255410_12 (sequence is synthesized)
aaggactgcatcatctgtgaattcaaactgtgctgtgtcctctcccaagcccttcgcttaaactgaagagaaggacatctgttctgggaaaacatgtaagatggctgaaaaagtgatcct

SEQ ID NO: 1004588 - DNA, 120 bp, Artificial Sequence
  ENSG00000255410_13 (sequence is synthesized)
aatgatgagaaagacactgcttgtgttgagtatgcataaaattgcttcataatttatgagaatggaaaagacaatatttatcagttatatatttttatatgatatatgaatttaaatata

SEQ ID NO: 1004589 - DNA, 120 bp, Artificial Sequence
  ENSG00000255410_14 (sequence is synthesized)
tcgagattaagtgaattcacaaataatgaggaccaactgtacttagaaagaagaaagggctgtgacctcaaattccaggtgggtccaggaagttaataccctcaccaagtctcataatca

SEQ ID NO: 1004590 - DNA, 120 bp, Artificial Sequence
  ENSG00000255410_15 (sequence is synthesized)
ccccaaaccaagaactcaccgacagtggaattattgagactgatttataggtttgatctttattgagtttgattattacagagtgggatctgattaatactgggatctgatcactatagg

SEQ ID NO: 1004591 - DNA, 120 bp, Artificial Sequence
  ENSG00000246316_0 (sequence is synthesized)
aatggattgtgtatgggcgtgagagtaaaactttacaaggtcgagagtcatacaaaagccaaagccgcattaaagccagtcccagccaggcttaaggagagctggaatggagaggattct

SEQ ID NO: 1004592 - DNA, 120 bp, Artificial Sequence
  ENSG00000246316_1 (sequence is synthesized)
catctaacatctgggttgcagttgtatgttaacatggacttcctaggaagtaacatatcaaacaaaagggaaagtgatcaaccagcagcaggtaccagccacagttaactgcacctgcta

SEQ ID NO: 1004593 - DNA, 120 bp, Artificial Sequence
  ENSG00000246316_2 (sequence is synthesized)
agggaagcagcacagcatctatgcacagacatagcaaataagagcaagtgaaccacgccacacttacgactatgtcaacaaaggaatagaagcaaaggaaaagactgacatagcttagac

SEQ ID NO: 1004594 - DNA, 120 bp, Artificial Sequence
  ENSG00000246316_3 (sequence is synthesized)
tgggaatccttctagaaagtaagaaagaattcagagagattcctctctctagtcttgaagaaatgaaggtcttcaaaatgaagattgaagaaatatagaatatctaaaaaaaaagaaaga

SEQ ID NO: 1004595 - DNA, 120 bp, Artificial Sequence
  ENSG00000246316_4 (sequence is synthesized)
gaccgccgcctcctggacgaggaccgggaccgctcagcattgtctgactgacaggaaaggacccagataagatcctggaggcaatgggatgtgtggctgctcaacacagaccgaccacac

SEQ ID NO: 1004596 - DNA, 120 bp, Artificial Sequence
  ENSG00000246316_5 (sequence is synthesized)
ttgctcactgccgtgtcatctcatacccttccaccctggacatacataccttctcacatgcaccaagactctgtgcatggagagaatcctcaaaccaacagaaaaatgattgacacagaa

SEQ ID NO: 1004597 - DNA, 120 bp, Artificial Sequence
  ENSG00000246316_6 (sequence is synthesized)
gccaagtgccagcactgcgtataagtaacactaccaccatccacagtgaagttaaaaggagttcgagtaaattcttagatccatcttcatacttccacttcctcagacagccgggagagc

SEQ ID NO: 1004598 - DNA, 120 bp, Artificial Sequence
  ENSG00000246316_7 (sequence is synthesized)
cacctttcagaagcttttttcatctgatcctcatgtcctttcaaaggtgattttgtctcttgagggatttctggttgtcacaagttgggggtagtgctactggcatctagtgtgtagaag

SEQ ID NO: 1004599 - DNA, 120 bp, Artificial Sequence
  ENSG00000276529_0 (sequence is synthesized)
ggggcgcgtgttgggaacagcgtccgggatgcacagagcacagcgcggtggggaggcggcaggggcggcttccacttcctccagcatcccaatcccaccgtctgggtttcttgtgaaaaa

SEQ ID NO: 1004600 - DNA, 78 bp, Artificial Sequence
  ENSG00000276529_1 (sequence is synthesized)
ttgaggccaggagttcaagaccagccaacatagtgagaccccatcttgacaagtcagctactggggaggctgaggtgg

SEQ ID NO: 1004601 - DNA, 120 bp, Artificial Sequence
  ENSG00000276529_2 (sequence is synthesized)
taggaggccgtggctatagtgagccaagattgcgccacagcactcccacctgggtgacagggtgatcctctctctaaaaaataaaaacgtaaaaatgttttttgcttcctggttttgaaa

SEQ ID NO: 1004602 - DNA, 120 bp, Artificial Sequence
  ENSG00000276523_0 (sequence is synthesized)
ctaaagccctctccccaacccctccactgaatgacacagatccaggtaaaaccacttctccagtggagaaactgtgcaataaaaaaaggaaagttgcagcaagacctacatccaggaatg

SEQ ID NO: 1004603 - DNA, 120 bp, Artificial Sequence
  ENSG00000276523_1 (sequence is synthesized)
gccatgtgactcaagacagacatcagtttatgctaccaacagcgctatgcattgggagaggctgacctagaactgtatggatgcccaatccctagagaacctacgttcgccccaaccaag

SEQ ID NO: 1004604 - DNA, 120 bp, Artificial Sequence
  ENSG00000276523_2 (sequence is synthesized)
ggtctacaccgactcatgaattggctgggctgatgagcacacctggccacccatctgctttggagtccacgcgcttccactggaccttggattatctcttctccagcagggcaggatggg

SEQ ID NO: 1004605 - DNA, 120 bp, Artificial Sequence
  ENSG00000276523_3 (sequence is synthesized)
tggtgggaggtggaagggcagtgaccactactgtcaatcctggagaggcactggcttcacagtgaaagttaataaggccctgaggctccccaagattctaaaataaaaagattaaccact

SEQ ID NO: 1004606 - DNA, 120 bp, Artificial Sequence; identical to SEQ ID NO: 836828
  ENSG00000230197_0 (sequence is synthesized)

SEQ ID NO: 1004607 - DNA, 120 bp, Artificial Sequence; identical to SEQ ID NO: 836829
  ENSG00000230197_1 (sequence is synthesized)

SEQ ID NO: 1004608 - DNA, 120 bp, Artificial Sequence
  ENSG00000230197_2 (sequence is synthesized)
aaacgccaagcgcattacagaggacgtcagccctgccatcactgggctggggaaacaatgccagccatggctggtctccgggttcacagtgataagggaaataaacccttatttgtctaa

SEQ ID NO: 1004609 - DNA, 120 bp, Artificial Sequence; identical to SEQ ID NO: 821320
  ENSG00000230197_3 (sequence is synthesized)

SEQ ID NO: 1004610 - DNA, 120 bp, Artificial Sequence; identical to SEQ ID NO: 821321
  ENSG00000230197_4 (sequence is synthesized)

SEQ ID NO: 1004611 - DNA, 120 bp, Artificial Sequence
  ENSG00000276527_0 (sequence is synthesized)
ggtgatggggaaggagggagatttttactatatgctctgttataacttttaaatttcagtgaaaccatgtgcaagagtttcctattgcaaaaaatcccagtctcttcagtggcactcaac

SEQ ID NO: 1004612 - DNA, 120 bp, Artificial Sequence
  ENSG00000276527_1 (sequence is synthesized)
tgattccatgccaccgcaaactcgggcaggcacttcaaagcagagagtctcattttccacttctgaaaaacacatggtctagatgagctctaagtcctttgcactcaataatttcacagt

SEQ ID NO: 1004613 - DNA, 120 bp, Artificial Sequence
  ENSG00000276527_2 (sequence is synthesized)
ctttgcactcaataatttcacagtcttttttattattaatattattttcaattgaaaaatcataattgtatatttatggggtacaatgtgatgttttgatatatgtattcaataaggaat

SEQ ID NO: 1004614 - DNA, 120 bp, Artificial Sequence
  ENSG00000276524_0 (sequence is synthesized)
agcgggccggaagggcagcgtcgcggtgctggaggctgttgctgggaggcgtggattctggaaagccgcatcgggaagctgggtatagagaaggattaacagagattgcaccctggtgac

SEQ ID NO: 1004615 - DNA, 120 bp, Artificial Sequence
  ENSG00000276524_1 (sequence is synthesized)
ctttcccctcaggcacgtgactcttgccccttccaagttgtcatcctcattgtgaaattcacctggtagctgatactcaggagaggaatactttggaagcctgagtcttctagccatcac

SEQ ID NO: 1004616 - DNA, 120 bp, Artificial Sequence
  ENSG00000276524_2 (sequence is synthesized)
taccactatcatccaggaaagtatcccaagtcccttccttggcagtagcaaacttcccttaattcccttccccttgaggagatgcagccagaatgagagccttaagcagagtttttgggt

SEQ ID NO: 1004617 - DNA, 120 bp, Artificial Sequence
  ENSG00000276524_3 (sequence is synthesized)
gaaatgataggcatgttctaggaattgtgacttaaacttggacctcttgtgattttttttcttttcatcttaattactgcatttcactcattcatcatgaaataaactcttactgaaggc

SEQ ID NO: 1004618 - DNA, 120 bp, Artificial Sequence
  ENSG00000253714_0 (sequence is synthesized)
ggcctggtgaagccctcacagaccctctccctcacctgtgctgtctctggattccccatcacaaccagtgcttcctgctgtagctgcattcataaaccccccaggaagggactggagtga

SEQ ID NO: 1004619 - DNA, 120 bp, Artificial Sequence
  ENSG00000253714_1 (sequence is synthesized)
catgagggagtgcacattccaacccactcctcaagagtccagtcaccatctccagatccatgtccaaaaagcagttcttcctacagccgagctaagtgagccgcaagcacacagccatgt

SEQ ID NO: 1004620 - DNA, 120 bp, Artificial Sequence
  ENSG00000253715_0 (sequence is synthesized)
gctgacctggccttgcagggtgtagctgggtgtgcacgactccgcacagtccttcttcaccagattccccctcagaggctccactgggcacagccccagggacacctggacagatgctac

SEQ ID NO: 1004621 - DNA, 120 bp, Artificial Sequence
  ENSG00000253715_1 (sequence is synthesized)
ccacctgtgttcgtggtcttgcagaagcgagagctggccgggcagaccacagaatgcttgcagttgctggagctggtgcacacgtggcagcgcagggaatgagcactacttggagaaagg

SEQ ID NO: 1004622 - DNA, 120 bp, Artificial Sequence
  ENSG00000253715_2 (sequence is synthesized)
gcactacttggagaaagggctgattctagggatggaatgcgggaacacaagatgagcctgaagtagtttttttttgttttttttttgagacggagtcatgctctgtcacccaggctggag

SEQ ID NO: 1004623 - DNA, 120 bp, Artificial Sequence
  ENSG00000253716_0 (sequence is synthesized)
ggtgccctggtcgcgtgtcttccgaactctgctgcttcgccccggcaagagcacttccttccgcggctgctaaaactggtgcgcgggttcccaacttcgcagaagagcttcatcggcccc

SEQ ID NO: 1004624 - DNA, 120 bp, Artificial Sequence
  ENSG00000253716_1 (sequence is synthesized)
ccgctagagacctcagaccgcagccatcgacgcctcgcctcggggatctgtccccaccctcggggccagctcaccatgagtcaggccctgtgctaggtgctgggatgaagcagtgactga

SEQ ID NO: 1004625 - DNA, 120 bp, Artificial Sequence
  ENSG00000253716_2 (sequence is synthesized)
gcaaaacttgaatggagacatcagctctttgtgggtctcaagtctactggctttcaatcagctcttctgcttgacagctgcaggtcttgggactgcccagcccccataaccctgtgagtg

SEQ ID NO: 1004626 - DNA, 120 bp, Artificial Sequence
  ENSG00000253716_3 (sequence is synthesized)
cattcctgataataaccctctttctcttgtcctcccccaccccacatcattggttctgtttctctggagaaccataatacatcatttactaatcaggaaatagattcagagacattaata

SEQ ID NO: 1004627 - DNA, 120 bp, Artificial Sequence
  ENSG00000253716_4 (sequence is synthesized)
actcatccaacctcacagttaactgtagagttgggcttgaaattccaaggtcgattttcttagccaatacaccatgctacatatatgtatgtaaaaataaaaacgcttgtgaactgaaaa

SEQ ID NO: 1004628 - DNA, 120 bp, Artificial Sequence
  ENSG00000253716_5 (sequence is synthesized)
tgtcttctgactggaccctgacttccatgccctttccactctcactccagtacatgcccaaaccccaatctttgttgctccaggcattgcctctgtggcgctgtgtcccctcctttgaac

SEQ ID NO: 1004629 - DNA, 120 bp, Artificial Sequence
  ENSG00000253716_6 (sequence is synthesized)
cattaaagtaatatcacaagtctgttaaggttggagaatcaagtgaacatgctgaaaagttatggggaatgtagtctcatagctgggggagctgggggccttgtcaattggttcccccag

SEQ ID NO: 1004630 - DNA, 120 bp, Artificial Sequence
  ENSG00000253716_7 (sequence is synthesized)
tctggagagcaatctgagagtaagtagtgacactgtgtgtgctgagtgtgtctgtgggggtgtttttggataaaattaacatttgaatttgtgaactgagtgaagcagagtgcccttcat

SEQ ID NO: 1004631 - DNA, 120 bp, Artificial Sequence
  ENSG00000253716_8 (sequence is synthesized)
aggggtttagttcccaggctttctgaccccagtaattccaaacgcttccctttgtttccacagccctagcgtagcaggtgctccctgcagtttttgcttctgagatagagttctcttttc

SEQ ID NO: 1004632 - DNA, 120 bp, Artificial Sequence
  ENSG00000253716_9 (sequence is synthesized)
gagtgaaaaaatgtgaattgttctactcatctggaaaagagaaccctgaggcaggaacaagtcgttaattgcatgtgcgtttgtccacagctcaccatgagtcaggccctgtgctaggtg

SEQ ID NO: 1004633 - DNA, 120 bp, Artificial Sequence
  ENSG00000253717_0 (sequence is synthesized)
gaagatgtgaagatggaggtagagattggattgattcatcttctacacgccaagaataccttttatcatgagattcagctttcccaccggttgcgagcctacattggataattagaacat

SEQ ID NO: 1004634 - DNA, 120 bp, Artificial Sequence
  ENSG00000253717_1 (sequence is synthesized)
atgacctaaataagttttctgaacaatccttcctttttagtttgttattgaaattgatgtctgcaacattcaatataatttgagcttttaggtcattgttacggattgaattgtgcccct

SEQ ID NO: 1004635 - DNA, 120 bp, Artificial Sequence
  ENSG00000253717_2 (sequence is synthesized)
cctccttcctgttcatatgttgaagcactaagctgcactatcacagtatatgactgtatttggagataaagcgtttatagaggtaatgaagattaaatgaggtcatagggtgggccctaa

SEQ ID NO: 1004636 - DNA, 120 bp, Artificial Sequence
  ENSG00000253711_0 (sequence is synthesized)
caacaatgaaagaagaaatgatgagaacctaaactaaggcaatactaatagaagcaaagagaagggaagagatttcacaagtttataagaagaaagtggtaggacttgaaagttaattgg

SEQ ID NO: 1004637 - DNA, 120 bp, Artificial Sequence
  ENSG00000253711_1 (sequence is synthesized)
gctcctggatttctggcttgagagactaggtggatgaaagagcagatgagaacaccaaagacagaatatatggttcttctagaagatccactttcaattttactaaagtgaatgacccac

SEQ ID NO: 1004638 - DNA, 120 bp, Artificial Sequence
  ENSG00000253711_2 (sequence is synthesized)
gactcagaagagataagactagaggcagagatactagctaagaagctgttgcaacaatgaaagaagaaatgatgagaacctaaactaaggcaatactaatagaagcaaagagaagggaag

SEQ ID NO: 1004639 - DNA, 120 bp, Artificial Sequence
  ENSG00000253711_3 (sequence is synthesized)
agatttcacaagtttataagaagaaagtgatgagaacaccaaagacagaatatatggttcttctagaagatccactttcaattttactaaagtgaatgacccactttgatgaaaagaata

SEQ ID NO: 1004640 - DNA, 120 bp, Artificial Sequence
  ENSG00000253711_4 (sequence is synthesized)
ggtgaacatgtgaaatattttttaatgaaagcccattacatataaagccatacaaccccaaacatgcagtgataatgcttatagcaaagaaaaaccaagtaaagacactatctacattta

SEQ ID NO: 1004641 - DNA, 120 bp, Artificial Sequence
  ENSG00000253711_5 (sequence is synthesized)
cctactctgatcccaattggctgcaaacagcaaaagaatcttcctgccgtaatggtctcggttttccagcaccccggggaacccatcgatcagagccctcttaatgccgggatcatctgc

SEQ ID NO: 1004642 - DNA, 120 bp, Artificial Sequence
  ENSG00000253712_0 (sequence is synthesized)
tcccaaagtgctgggattacaagcgtgaaaaaatgaaataatttttaaaataaagttgcattcttagtgatgcttcatctttgcatgtagaatttaaaaaaaaaaaaattttgaaagtta

SEQ ID NO: 1004643 - DNA, 120 bp, Artificial Sequence
  ENSG00000253712_1 (sequence is synthesized)
gttagtataatgcccactttttaagcatagacaaaagatgtatgcaagaatctgtttcccaaaggcttttgtttggggctgtttggggacatttttattcatcctgaatgtgtagtgggt

SEQ ID NO: 1004644 - DNA, 120 bp, Artificial Sequence
  ENSG00000253713_0 (sequence is synthesized)
ttggcccttccatcttccaccaagtggagcactcctcccctgcagaggatgcagccctcaccaaacaactgaacctcctggcactttgatcctagacttttccgcctccagaactgactg

SEQ ID NO: 1004645 - DNA, 120 bp, Artificial Sequence
  ENSG00000253713_1 (sequence is synthesized)
aaacaagtatctactgctcattattttacccacttcataagtgaagaaattgagattcggagacaggatatcccgagccaggctacccaaaggttggagtgagggactactttaatgatt

SEQ ID NO: 1004646 - DNA, 120 bp, Artificial Sequence
  ENSG00000253713_2 (sequence is synthesized)
gatttataactattgtaccaaagcaccagctcaacggatggcctgtgacagtcactgaaatgtaccactcaagtcttccactgcagggtgcaacattccaagctgctgtctctctgggcc

SEQ ID NO: 1004647 - DNA, 120 bp, Artificial Sequence
  ENSG00000253713_3 (sequence is synthesized)
cactaccacattcacacagaattcttgcttcttctggaatgttcccagccaatgactgtgcaggccccttcctgtgggacatgggtttcctccaacagataactttggctgggggactct

SEQ ID NO: 1004648 - DNA, 120 bp, Artificial Sequence
  ENSG00000248647_0 (sequence is synthesized)
caaaaagcaacatcagagttggagtagcttgtggaagaagcaagtgaagttctgtaaagcagtcttattaatgaataaagaaaaagatggctgaattggtccagcggtttcacttaacag

SEQ ID NO: 1004649 - DNA, 120 bp, Artificial Sequence
  ENSG00000248647_1 (sequence is synthesized)
tgcttgcttgcctcagggcatggagagggtgttccatcaaggcctccttctgcccagtgtatcctgaaggaaagaggagggactgcctcgaccccagcagggagaatggggttgccttgc

SEQ ID NO: 1004650 - DNA, 120 bp, Artificial Sequence
  ENSG00000248647_2 (sequence is synthesized)
actggaggcctgcggtgccctttccagcatctctccagcttatctgaaaaatactatttgggtttcgtttggggacctggaaactatgttggaaatagaggaactttagaaagccagcaa

SEQ ID NO: 1004651 - DNA, 120 bp, Artificial Sequence
  ENSG00000248647_3 (sequence is synthesized)
acagagcagggactcaaaaagcaacatcagagttggagtagcttgtggaagaagcaagtgaagttctgtaaagcagtcttattaatggtattcttgagcccgcaaggaaggcaaatgcaa

SEQ ID NO: 1004652 - DNA, 120 bp, Artificial Sequence
  ENSG00000248647_4 (sequence is synthesized)
acaggagatttctgtggctaaacaacgctgtaatggaaatcacaacacagtcaggcccaccattctggtggaagaacaaaacccaaatgaaacccgtcaaatggttatgcaacttttact

SEQ ID NO: 1004653 - DNA, 120 bp, Artificial Sequence
  ENSG00000248647_5 (sequence is synthesized)
acatataacatggttaccatgctttaggggggtgggcaataaaaaataatagaaatattaaagactatctaaataccctttataggaaatccaataaaaaagtatgttggaaatacaaaa

SEQ ID NO: 1004654 - DNA, 120 bp, Artificial Sequence
  ENSG00000204446_0 (sequence is synthesized)
gcggcagccagcgagaggggagaaacagattcacacccaggggcctccgggcagggcccacgggactcaggccgtgtcccgcttggaatgtggagcaggcgcggcctcggcgtcagcaga

SEQ ID NO: 1004655 - DNA, 120 bp, Artificial Sequence
  ENSG00000204446_1 (sequence is synthesized)
gctcccctgcatctcctcctgggggtgtgggggccgagtgggagaactggcggacagaggaaaggggcctcgctcgcaaggcccgggcggggaggcctggcctcctgctcagtcggtgca

SEQ ID NO: 1004656 - DNA, 120 bp, Artificial Sequence
  ENSG00000204446_2 (sequence is synthesized)
aatggaaaaagagacgttctgtttctccggaaaaccctgactaatacagtagaggatatccagattgacaacttcaggagaaagtctgatttaggagtcggaagcccagattggaaaaac

SEQ ID NO: 1004657 - DNA, 120 bp, Artificial Sequence
  ENSG00000204446_3 (sequence is synthesized)
ctcttgatagatgtcactcgggaagaccatgaaaacagccaaaataattcaaagagaagatgcaaagtgaactgtgaaacagaccaaagatgaatctctttggtaaatcccctgcctaaa

SEQ ID NO: 1004658 - DNA, 120 bp, Artificial Sequence
  ENSG00000204446_4 (sequence is synthesized)
tcccctgccatggaatagctgcctaaacttgggcaaataacttgacatttctcagtttccacattccaaaaatggatttttatgagaattaaatgttatgatgcattccagctacctgtc

SEQ ID NO: 1004659 - DNA, 120 bp, Artificial Sequence
  ENSG00000204446_5 (sequence is synthesized)
ctagaacctggcataagagctcagtacatgctggggagggttatcatcatcgtcatcatcatcttattaacattcatgttgaagggatgatgggctgctgagaagttcatgaagaaggtg

SEQ ID NO: 1004660 - DNA, 120 bp, Artificial Sequence
  ENSG00000204446_6 (sequence is synthesized)
aaaaactattacagaggtgggaggaaaaagagaggactatcacagaagcagaagagctgagagtattgagaaagggtgacgggttagggggactagcaagtaccctctggcgttggcaat

SEQ ID NO: 1004661 - DNA, 120 bp, Artificial Sequence
  ENSG00000204446_7 (sequence is synthesized)
attcagtttgttgaaggccttgatgaactttaatgaagtggtgagagttaaacaaagctgagataggatatgaatctcagggaggatatgaggactcattgattaccattccaagaaact

SEQ ID NO: 1004662 - DNA, 120 bp, Artificial Sequence
  ENSG00000204446_8 (sequence is synthesized)
tgtctgaaaaggaaagaagagatggtggtaatcagagcagagtggcaggatgcagggagtttttatttatttatttgttcttgttgctgacattgttttcatactattttttgtttgtta

SEQ ID NO: 1004663 - DNA, 120 bp, Artificial Sequence
  ENSG00000204446_9 (sequence is synthesized)
aagagggagagttgtgagtataaaataacctataaatagggaaaaccaggaacagattcatgtgaaagcccttgactgagaacagaattaattacccgtgcagaggtagtcttcaagcct

SEQ ID NO: 1004664 - DNA, 120 bp, Artificial Sequence
  ENSG00000204446_10 (sequence is synthesized)
tggcaggtaagcaactgtctgagacacagctggctcgggaacagggcctttctttggctggcaggcttgaggcagcataatttggaagcggatatgagaaagggcataataatgtgaaat

SEQ ID NO: 1004665 - DNA, 120 bp, Artificial Sequence
  ENSG00000204446_11 (sequence is synthesized)
ttgactgcctagtgggggagaaactttgaatattatgaggcggttatgaaagtatttccttcttatggcttcaatggcactgcctctgagcattagtgtttgtcctcaggaggtaagtgt

SEQ ID NO: 1004666 - DNA, 120 bp, Artificial Sequence
  ENSG00000204446_12 (sequence is synthesized)
ggggactgtatcagcagttactacctagataagcacggtgtataggggtaacatggtttatagagcatgcaagccttcacctctttgctagatgagatatggaacctaaattcggagacc

SEQ ID NO: 1004667 - DNA, 120 bp, Artificial Sequence
  ENSG00000204446_13 (sequence is synthesized)
agagtatattctgggggacagtttcataaaaagtgagtagatctccacaacttagtttctagactaaatggactaagcatgttccgccctattcttcctactaacaataacaaaaagctc

SEQ ID NO: 1004668 - DNA, 120 bp, Artificial Sequence
  ENSG00000204446_14 (sequence is synthesized)
tggacaaaatttataaagcaacccacagaagactccgaagttggaaaaagaaataaaaactggcgatttcctccatactcaaggcatcatgtagcagggagtgccttgggtgttgtttat

SEQ ID NO: 1004669 - DNA, 120 bp, Artificial Sequence
  ENSG00000204446_15 (sequence is synthesized)
gtgtttgttttcttttgttcattaatttttttctcccgtgtatggcagtgtgggctctagcaatgcctaccacccggaaacacagatgggtacaaatttaaaaaccccaagaaaactctt

SEQ ID NO: 1004670 - DNA, 120 bp, Artificial Sequence
  ENSG00000204446_16 (sequence is synthesized)
tttagccaaatgaccagtgtttccagcagagcaaaaacattttgaccacatctgcccttttgtgctggctaaccccttcccctgccaccatgtgctgctggggggacattgtggatgaag

SEQ ID NO: 1004671 - DNA, 120 bp, Artificial Sequence
  ENSG00000204446_17 (sequence is synthesized)
cccactcatttattcctcctcctgcagtaatgtgaccatacccttcccactcctaactagaggctgggggaggactatgtgggggagagaactggagaaagcaattttctaaatttgtgt

SEQ ID NO: 1004672 - DNA, 120 bp, Artificial Sequence
  ENSG00000204446_18 (sequence is synthesized)
atgaaatcctggttagaactctgagtgccccatgcacaaaacagacaagaaacaacacagcaaaaagattcaagggtcagaaaaactgaacactggtctgaaacactgcccgggtttcag

SEQ ID NO: 1004673 - DNA, 120 bp, Artificial Sequence
  ENSG00000204446_19 (sequence is synthesized)
attggcatcagggtagcacccaagtggggcagattgaaatagcactgtaaaggctttgaaaatgaaatgacttttgagccacagctcacaaagtgaaccggaacaagcattctgaactta

SEQ ID NO: 1004674 - DNA, 120 bp, Artificial Sequence
  ENSG00000204446_20 (sequence is synthesized)
aacaggtcaagtgcctgctaaaatcaaagactgaaatgggaaccagaataatataacatactactgaaaatgtctaggatgcaatccaaaatctcatcacactgaaaaccataaaaatct

SEQ ID NO: 1004675 - DNA, 120 bp, Artificial Sequence
  ENSG00000204446_21 (sequence is synthesized)
caacttgaaagagaaaaggcaattgtaagcattgagattacacagatgttgaaactatccagcaagaatcataaagcagctattatacaaatgccctgattttaaagcaagtatgaatgc

SEQ ID NO: 1004676 - DNA, 120 bp, Artificial Sequence
  ENSG00000204446_22 (sequence is synthesized)
tcgaaacaaatgacaaagtggaaagtcacagcagagaaatagaaaatgtaaggaagaaccaaatggaaattttaaaactgaaaaatacaataaccagtttttaaaaattactagattcag

SEQ ID NO: 1004677 - DNA, 120 bp, Artificial Sequence
  ENSG00000204446_23 (sequence is synthesized)
agggaaagaccaacaactcagaaaaaatgggcaaaggatatgaagagtttacggaaaaggaaatgtagataactcttacccatataaaaatatgttcagcctcactcatataagaaaaat

SEQ ID NO: 1004678 - DNA, 120 bp, Artificial Sequence
  ENSG00000204446_24 (sequence is synthesized)
caaaattgaaattacactgagacactgcttttcacctgtcagaatggcaaaactcaaagtgtgaatatacgctatgagaatgtggaaaattctcatagattgcttgtgggcatctagaac

SEQ ID NO: 1004679 - DNA, 120 bp, Artificial Sequence
  ENSG00000204446_25 (sequence is synthesized)
aatttggttgaatcactaaaatccacatgccatttggccctgcaattctacttttagaaatttatcatataggaaacctgcatatgagtgaaatgacatacgtggagtgttactcctggc

SEQ ID NO: 1004680 - DNA, 120 bp, Artificial Sequence
  ENSG00000280109_0 (sequence is synthesized)
aaaacctgctgcacatatattaactctggacaggttgaggttaacattcaaaagatctatgagcaagctacctagttacatagatataaccagggcactgcccccaactatatctggtca

SEQ ID NO: 1004681 - DNA, 120 bp, Artificial Sequence
  ENSG00000280109_1 (sequence is synthesized)
accatcaaaagtgccttcccaagtctcacctgtttttcacctcttctaggacctttgacaactgtcttgttacaaatgtttggtccttgcttctttaacctcttagtaaagtttgtgtat

SEQ ID NO: 1004682 - DNA, 120 bp, Artificial Sequence
  ENSG00000280109_2 (sequence is synthesized)
tctagattaccacagttccagagacaatgctggcacaaggcttccagcccatcctgtccactgacacggagaatgaaatcgtcctgcctctgggctccttagatcaggtatccagagatt

SEQ ID NO: 1004683 - DNA, 120 bp, Artificial Sequence
  ENSG00000280109_3 (sequence is synthesized)
tttactcctccagtgccaggcagggcctacgtccataaactcagcaggaagtagttacggaaaacagatctccgcccttctgcagcccccttaagattaaggaggagtatctaatctctg

SEQ ID NO: 1004684 - DNA, 120 bp, Artificial Sequence
  ENSG00000280109_4 (sequence is synthesized)
aagggggaatgaggtaggaggtgggactcaactctggaagtggggctcaggcactcagaccaaactgagcactagctaaaataggtccagggcagatgctagtttccataggacacaccg

SEQ ID NO: 1004685 - DNA, 120 bp, Artificial Sequence
  ENSG00000280109_5 (sequence is synthesized)
acctgtgtcaagtcagttcaccatggctctggcagcacccagaagttaccaccctcaccctggaaatgtctgcataaactgccccttcatttgcatataattaaaagtggatacaaatac

SEQ ID NO: 1004686 - DNA, 120 bp, Artificial Sequence
  ENSG00000280109_6 (sequence is synthesized)
cactgcagaactgcctctgagctgctactgtgggcgcacagcctgtagggcagccctgctttgcaaggagcagcgcctctgctgctgctgtgcacagccggccgcttcaataaaagttgc

SEQ ID NO: 1004687 - DNA, 120 bp, Artificial Sequence
  ENSG00000280109_7 (sequence is synthesized)
taacaccactggcttgcccttgagttccttcctgggcaaagctaagaaccctcccgggctatgcttcaatcttagggctcgcctgtcctgcatcactgggatcatctcccagtaaactag

SEQ ID NO: 1004688 - DNA, 120 bp, Artificial Sequence
  ENSG00000280109_8 (sequence is synthesized)
ccacacttacatccatgtgtcagggacatttctggagaaagcagcccaggacactgttgaataaaacacacaatagtctctgtggtcttctccaccccaccccacaccaggcaccctcag

SEQ ID NO: 1004689 - DNA, 120 bp, Artificial Sequence
  ENSG00000280109_9 (sequence is synthesized)
cttgattctcctttttaattgcctgtaagcagggaagcacaatgttttcacattctttgtaaggcctttgttctactaaaatctaacctcagagcacaattttaaactagatgaaagagt

SEQ ID NO: 1004690 - DNA, 120 bp, Artificial Sequence
  ENSG00000280109_10 (sequence is synthesized)
tgctgcgcctgaagcactgcaaacacctcctcaccacacatgtgcactcaccctggacaccctcactcaccctgacaccctcactcctcaccctggacaccctcactcaccccagacacc

SEQ ID NO: 1004691 - DNA, 120 bp, Artificial Sequence
  ENSG00000280109_11 (sequence is synthesized)
gtcactcctcaccctggacacctcactctgcaccctggacaccctcactcaccctggacacgttcactcaccctgacaccctcactcaccctggacaccctcactcaccctggataccct

SEQ ID NO: 1004692 - DNA, 120 bp, Artificial Sequence
  ENSG00000280109_12 (sequence is synthesized)
cactcctcaccctggacaccctcactcaccctggataccctcactcctcaccctggacactctcactcaccctgacaccctcaatcctcaccctggactccctcactcctcaccctggac

SEQ ID NO: 1004693 - DNA, 120 bp, Artificial Sequence
  ENSG00000280109_13 (sequence is synthesized)
tccctcactcctcaccctggacaccctcactcctcatcctggacaccctcactcaacctggacaccctcactcctcaccctgacaccctcactcctcaccctggacaccctcactcctca

SEQ ID NO: 1004694 - DNA, 120 bp, Artificial Sequence
  ENSG00000280109_14 (sequence is synthesized)
ccctgacaccctcactcctcaccctggcaccctcagtcaccctgacaccctcactcctcaccctgacaccctcaagtcttcacctccctggctgcagcctgggacacgctttccctaact

SEQ ID NO: 1004695 - DNA, 120 bp, Artificial Sequence
  ENSG00000280109_15 (sequence is synthesized)
tctgaaggctcagtcctcctcaagccaatctcatctcaaattgcacctcctcagagaggtcttccataaccgcccttataaagcaggattctttcaccaataccccttcccacatggcac

SEQ ID NO: 1004696 - DNA, 120 bp, Artificial Sequence
  ENSG00000280109_16 (sequence is synthesized)
tgtctcacagcactcctctaaaagtctgtttacttccttgacaatctgtcttccttataaggggaggttctgtaaaagccaagactctctctgtctagttgactgttgcataccagggct

SEQ ID NO: 1004697 - DNA, 120 bp, Artificial Sequence
  ENSG00000280109_17 (sequence is synthesized)
tagaccaaggccctgacatgcagtaggtgcttaatatgttttgaggcaaggtcttgctctgttgcacatgctggagtgcagtggcacaatcgtaattcattgcagccttgaactcctgag

SEQ ID NO: 1004698 - DNA, 120 bp, Artificial Sequence
  ENSG00000280109_18 (sequence is synthesized)
tgggactacaggcatgcaccaccaagcttggctaatttaaaaaaaaaattatatagatagggacttgctatgttgcctaggctgatcttgaactcctaacctcaagcaatcctcccacct

SEQ ID NO: 1004699 - DNA, 120 bp, Artificial Sequence
  ENSG00000280109_19 (sequence is synthesized)
atcttgaactcctaacctcaagcaatcctcccacctcggccttccaaagtgctgggataataggcatggagccgccacacccagccaatgtgccgaagaaagaaagaaaaacatgctcat

SEQ ID NO: 1004700 - DNA, 120 bp, Artificial Sequence
  ENSG00000280109_20 (sequence is synthesized)
cctttgagtcaggttcaaattttttctcctctttaacccccagtcactccagttataagtgatttttaactcttctcacactttaatgcatctggcaagaagatccacgtggtgttagga

SEQ ID NO: 1004701 - DNA, 120 bp, Artificial Sequence
  ENSG00000280109_21 (sequence is synthesized)
acaatacaggaccttaaggatgggggaatcagcaggtgtcagcgtgccctgtatgctcagggcagctgtttccactggacattctccctttgcctctctgggcagcaactcctaggccag

SEQ ID NO: 1004702 - DNA, 120 bp, Artificial Sequence
  ENSG00000280109_22 (sequence is synthesized)
ccgacctgctgtgtcgagtaaccaggatttctcaatcttggcatggttgccattttggaccagatcgttctttgttgtgggggctgccctgtacggcaaagaatgccgagcagcacttcc

SEQ ID NO: 1004703 - DNA, 120 bp, Artificial Sequence
  ENSG00000280109_23 (sequence is synthesized)
ccagatgtcccctggggtggggacacaatcaccccaggttgagatccatggagccaggtctgtttgccaccaaggggtaaagctccattcccaccttaggagggctaggaggcagcatcg

SEQ ID NO: 1004704 - DNA, 120 bp, Artificial Sequence
  ENSG00000280109_24 (sequence is synthesized)
tggggccacagaaggcctgggtttgcagtcagaggacaggatgcacattccttcaagatacagacccagattgttgggcatctagttcttgggttttctgttgttgctgttccgttttgt

SEQ ID NO: 1004705 - DNA, 120 bp, Artificial Sequence
  ENSG00000280109_25 (sequence is synthesized)
ctgtcttccctcctttgtttactagcagcctggaatttgccactttttctaaacgaagatttatggaacacttaccacacggctgacgctgcgcgaggctaaggttctaatacaccgcag

SEQ ID NO: 1004706 - DNA, 120 bp, Artificial Sequence
  ENSG00000280109_26 (sequence is synthesized)
ctcacttaactctcgcaataccataaacgcacactgtttcatcttgaccctttcttgggaaggtgacagagaggtaggagggcaaacatcttgtgtgccccgtcccaagggtattactgg

SEQ ID NO: 1004707 - DNA, 120 bp, Artificial Sequence
  ENSG00000280109_27 (sequence is synthesized)
tggaataatatccgccccccaccccagtttctaatttgctgtaggctgtgacgctgtggggcaagactaggagtcctgttgaaattaggaataagtgtgctgtgagggaagggctgcctt

SEQ ID NO: 1004708 - DNA, 120 bp, Artificial Sequence
  ENSG00000280109_28 (sequence is synthesized)
attttagagcacagattttctgaatatctattttgacaggttcgatcctctccccttcctgccttccttctgtcgattttcaatgtcttgatggtgtcccacctgagtggcctttagaga

SEQ ID NO: 1004709 - DNA, 120 bp, Artificial Sequence
  ENSG00000280109_29 (sequence is synthesized)
tgtgagttgtgaggcactggggaggcaggcacacgtcctccagcccaagactgcctaatttaacagggatttctgcattctggaacaagcctccattttccccaagcaggattactccag

SEQ ID NO: 1004710 - DNA, 120 bp, Artificial Sequence
  ENSG00000280109_30 (sequence is synthesized)
agggcaaaacacagcccaatagtatcacatttcctttctgctttagcaaaaataaccactgtctcattcatgggaaaaggccgccaaacaaatttgttactggaaccatttgtaacaact

SEQ ID NO: 1004711 - DNA, 120 bp, Artificial Sequence
  ENSG00000280109_31 (sequence is synthesized)
tctagtttgcactgccttggagcaagcacactttgtagaggagggatttgcagttacttgggcaacaaggtaaccactgatcattacaggaagcttcagaaaccgtgggaccagtgtaga

SEQ ID NO: 1004712 - DNA, 120 bp, Artificial Sequence
  ENSG00000280109_32 (sequence is synthesized)
agaatggactatctgtccaaactaagaataaaaagaatgacacttgtattttgtatgtctttttcactttgcctttctagtaattcatttttcttgatatttacaccttgtggccctgtg

SEQ ID NO: 1004713 - DNA, 120 bp, Artificial Sequence
  ENSG00000280109_33 (sequence is synthesized)
atagactggaaatctcaaaaacacacgttcagcaccaagattttcagcagcaccgcctcagaatgagacccctagaaaaaactgcgtgttttccacttgcccaacacgaggagtttttgg

SEQ ID NO: 1004714 - DNA, 120 bp, Artificial Sequence
  ENSG00000280109_34 (sequence is synthesized)
aacacgacctgcttgaggtggagattttctagatgggcaaagagaaggaaacacttaacctaggaagagtatttaggaagaagaaagaacacagcctttctgcacaggaaaccgccgagc

SEQ ID NO: 1004715 - DNA, 120 bp, Artificial Sequence
  ENSG00000280109_35 (sequence is synthesized)
agaggggcatctggcctctgcagtggcctccaaatagagtccaatggctggggccagcgtggctgcttaaaggggactcaagggatataataaaatgcagattctcaggtcctagtgcag

SEQ ID NO: 1004716 - DNA, 120 bp, Artificial Sequence
  ENSG00000280109_36 (sequence is synthesized)
acaggctcacccaataagtctggactgcatatgggaatctctatttctaggcccttctgcaaggtattcctgctctttccaggaaccatcggcagctggtttggggaaagaagcaacgac

SEQ ID NO: 1004717 - DNA, 120 bp, Artificial Sequence
  ENSG00000280109_37 (sequence is synthesized)
tccaagtgtgacctgtgagctggcagcagccaccctcagctctgctctcggtcactgaatccgattctgcattttaacaggaccccaggtgttgcacccacacaaagctgaagcagattg

SEQ ID NO: 1004718 - DNA, 120 bp, Artificial Sequence
  ENSG00000280109_38 (sequence is synthesized)
gtctgggggcaaaaaattagagctatggagattctctcaaatgaaatagatgatatcattgactgttagagcttctagaaggaatctgaggtcacttgttcaaattccctgatttacaga

SEQ ID NO: 1004719 - DNA, 120 bp, Artificial Sequence
  ENSG00000280109_39 (sequence is synthesized)
tgaggaaacagaggctcagacagctcaaatgacttctctccaatacccaacattcgacaagtagcagctctgggactagtacccaaagcacctagctctccaatcactgcgcaagccaca

SEQ ID NO: 1004720 - DNA, 120 bp, Artificial Sequence
  ENSG00000280109_40 (sequence is synthesized)
caattctgtctgcttgtcagtggcttttctgattcaaaaaaagcttaggaatttccccaggaggcagcacgatgtagtgggaagggctctggatgtctctccaaggcttctggaattcat

SEQ ID NO: 1004721 - DNA, 120 bp, Artificial Sequence
  ENSG00000280109_41 (sequence is synthesized)
gcccacctccaccaagaagccactttcctgccagctacaggtgctcacctgaaaagcaagccagaccatattaaccctggcattgctggtacctggaagactttctgattcaatgctttc

SEQ ID NO: 1004722 - DNA, 120 bp, Artificial Sequence
  ENSG00000280109_42 (sequence is synthesized)
cacctcctcctacccctcaccacccccgtggcatgaaatcctgggggctgctttagaaattgttttctttggctgctggtgggggtgctgctggtgggggtttgcacagctggcacactg

SEQ ID NO: 1004723 - DNA, 120 bp, Artificial Sequence
  ENSG00000280109_43 (sequence is synthesized)
caccagtctggtgggggtttgcacagctggcacactgcaccagtctcctgcctgctgccaacaaggccatttcccaagcactggctttggagaagttggggctctgaagtgggaacacaa

SEQ ID NO: 1004724 - DNA, 120 bp, Artificial Sequence
  ENSG00000280109_44 (sequence is synthesized)
ggctgccttttgcaggccaggtgtaaattctccccctgccactttcagcctagcgtgaaacagatggagtgtgcattcccacttccctttatggtaccctggaatgatggagctgcccag

SEQ ID NO: 1004725 - DNA, 120 bp, Artificial Sequence
  ENSG00000280109_45 (sequence is synthesized)
ggcatcgccacgttactctctagacagtctctttgtcttcctgcaatggcagcgccgaggttgtatatttctaggtgcaggtatatgattgccatataataaaaatctgaaaacatccca

SEQ ID NO: 1004726 - DNA, 120 bp, Artificial Sequence
  ENSG00000280109_46 (sequence is synthesized)
cgtagctcataatccatttttataacaccttgctatctatatttacacctttaaagaacacgggaatttaagagggaagagtaactaggcttttgctaaacttgggctaataaaaccctc

SEQ ID NO: 1004727 - DNA, 120 bp, Artificial Sequence
  ENSG00000280109_47 (sequence is synthesized)
tgtagagagatccttaatataggcatggggacaacaaggagtatcccaagggactcgccgctagggtgtcttttaagctattggagcaaattcaaatttggcttaaagaaaaagaaactc

SEQ ID NO: 1004728 - DNA, 120 bp, Artificial Sequence
  ENSG00000280109_48 (sequence is synthesized)
attttgtattgcaacaccatttgggttaaatacaagttagatgacgaatatatctggcctaaacatggttctatatactatagtgatattttacgattaggcttattttgtaaaagagaa

SEQ ID NO: 1004729 - DNA, 120 bp, Artificial Sequence
  ENSG00000280109_49 (sequence is synthesized)
ggaaaatgggaagagatcccttatgtacaggcttttatggctctatactggatcacgttacttccaggcattagaatgccatgcataagggatccccacctagctgctccccatagaaag

SEQ ID NO: 1004730 - DNA, 120 bp, Artificial Sequence
  ENSG00000280109_50 (sequence is synthesized)
ttcataagcctccccagagtctcttcagtcccccagtcctgagtgggggttctcgccaattccctaatgagattccaccccaatatcatcaggcacctttcccccttatccaactagccc

SEQ ID NO: 1004731 - DNA, 120 bp, Artificial Sequence
  ENSG00000280109_51 (sequence is synthesized)
tagcctataccctctgctgcccaagaaaatgagcccaaccagtacaccaggagtggggctccatatcagcccctaaggtcaagcctgtgtccactgtggaaagtagttgatggaaatgag

SEQ ID NO: 1004732 - DNA, 120 bp, Artificial Sequence
  ENSG00000280109_52 (sequence is synthesized)
ggaacactcaaagagtacatatgccactttccatgtctaattagaccttataaaaggaaagaattggccagttttcagataaaccagaaaagcttatacaagagtttgttacgttgacta

SEQ ID NO: 1004733 - DNA, 120 bp, Artificial Sequence
  ENSG00000280109_53 (sequence is synthesized)
tgttcttcaaattgccacgatttacaaatattgtcatccgcttgctgtgctgtggggaaaaaaaagtagaggaaaaagtgtgtggttaagccagtcaattatgacaaggttaaagaagta

SEQ ID NO: 1004734 - DNA, 120 bp, Artificial Sequence
  ENSG00000280109_54 (sequence is synthesized)
actcggggaaaagatgaaaatcccgctctgtttcagggtcttttagttgaagcactcaggaaatatactaatgcaggcccagacaccccagaagggcaagctctcctgggtatacatttt

SEQ ID NO: 1004735 - DNA, 120 bp, Artificial Sequence
  ENSG00000280109_55 (sequence is synthesized)
ctcattcaatcttctcctgacattaggaggaatctacaaaaagcagcaatgggaccttcaagtcctatgaaacgacgcttaaacatagcctttaaagtttacaacaacagggacagggca

SEQ ID NO: 1004736 - DNA, 120 bp, Artificial Sequence
  ENSG00000280109_56 (sequence is synthesized)
aaagaggggagtaaaaagaaatagccaaaaagtacaattgttaacagtgactttaagcctccttgcccctcaggattactcatcttgagaaaatgttacaaaattagcatctgggatgcc

SEQ ID NO: 1004737 - DNA, 120 bp, Artificial Sequence
  ENSG00000280109_57 (sequence is synthesized)
tagacaagacttgatgcctgacttgctgacccctgggccagaatcactgcgcctactatacgcaaaagggcccctggcaatgcaaatgtcctaactgctctggtgagagagaacaataac

SEQ ID NO: 1004738 - DNA, 120 bp, Artificial Sequence
  ENSG00000280109_58 (sequence is synthesized)
aacaaaaagcttccatcaatactagagctaaccttctcctactagccccagtgagctgcttagctcaagtaagtttactgtcccagaggacagctttccacagtggcagataagcagccg

SEQ ID NO: 1004739 - DNA, 120 bp, Artificial Sequence
  ENSG00000280109_59 (sequence is synthesized)
cctgaacatttttctttggtatttccaccactgagtgtgctctccagtggcgtggggactccagaatctccttttgagcaatgcagtttgcttcctcccctttttagttgatgctatggg

SEQ ID NO: 1004740 - DNA, 120 bp, Artificial Sequence
  ENSG00000280109_60 (sequence is synthesized)
attccctgtcctgccttttcctgttttccatacctatcggggcaaacaaaatttggccaggtagatgggtcccagttctgtaaataacttgaatccagttgtcttgtataggtcatttta

SEQ ID NO: 1004741 - DNA, 120 bp, Artificial Sequence
  ENSG00000280109_61 (sequence is synthesized)
tttaatatgtttttgggtatatgtacatgtattgtgatgtgtgttacatctagcgtgctgtcaaactggcttatagataaaagaacactcatacattcaacaaataagactactgaaagc

SEQ ID NO: 1004742 - DNA, 120 bp, Artificial Sequence
  ENSG00000280109_62 (sequence is synthesized)
ttattagtttgaagagaatcttgtatcttctaaaatttaactttaggatttttacctaggtaagtcactgatgttcataggctttaaaatggttaaaatggctttaaatggtgaccagct

SEQ ID NO: 1004743 - DNA, 120 bp, Artificial Sequence
  ENSG00000280109_63 (sequence is synthesized)
ttgcatggtaccttggttctcggtgatctagataaagttaaaagtgaaataattaaatacacgtaaatgggatatgcttaatgtgtggtttaaaatcataaaatggtagaatggttctca

SEQ ID NO: 1004744 - DNA, 120 bp, Artificial Sequence
  ENSG00000280109_64 (sequence is synthesized)
gttatagaatgacaatgtctagtgtgaagttcatgacttcttccttcctaggtttccataaaatgtgctaaagaaatgtattctttattgagaaaaaattttttgtctaatccggaagtt

SEQ ID NO: 1004745 - DNA, 120 bp, Artificial Sequence
  ENSG00000280109_65 (sequence is synthesized)
actaaatgggaggttcaaaacatgagtgaaccagtgagtagaaaagagagatgtaaagaatattatgaatagaaaatgtattttttgtttgttttgcaaggaaggatataaagaaagagt

SEQ ID NO: 1004746 - DNA, 120 bp, Artificial Sequence
  ENSG00000280109_66 (sequence is synthesized)
aattttatatgtggaggaatcctgtatagtaaattccctatcctagagtaaaataactttaagaaagaggtagtatagaacatgtcaggaaattcagctatgttgtagatggtctgtgta

SEQ ID NO: 1004747 - DNA, 120 bp, Artificial Sequence
  ENSG00000280109_67 (sequence is synthesized)
agtcatctgcacagtgcatgagtgtggaggtgggcgggcactcattggcccttgaactccttttgagcagtatggaagccaagaactagaagccaggaaatggggttgtaaaactgattt

SEQ ID NO: 1004748 - DNA, 120 bp, Artificial Sequence
  ENSG00000280109_68 (sequence is synthesized)
gtctatggattttatgtgttgagctgctgtggtcttggcttgtagtaattacctatatgaaccttcccccctcccctttagaatttaggacaggttcaaaaggccctccaatataaaaat

SEQ ID NO: 1004749 - DNA, 120 bp, Artificial Sequence
  ENSG00000280109_69 (sequence is synthesized)
aaaatactgtccttccccacaaaggaaaaaatagctccccggttcaaccaggagacttagtcttgctaaaaccttaaagacagggtaaagacagggataccccaagaatcaattacaatg

SEQ ID NO: 1004750 - DNA, 120 bp, Artificial Sequence
  ENSG00000280109_70 (sequence is synthesized)
aaatggaaggggccttatcaggtattgttaagtacccccactgctgttaaacttcagggaacacctacttgggcacacagatccaggactaaacctgtttcttatgagtcacaggcacaa

SEQ ID NO: 1004751 - DNA, 120 bp, Artificial Sequence
  ENSG00000280109_71 (sequence is synthesized)
aggaagggcactacaaccacaaccaatatcagtaaagctttggaagacctctgctacctatttaaaataatcaacactcagccagaagaggtaatgtaatgctgtagatgggaataggag

SEQ ID NO: 1004752 - DNA, 120 bp, Artificial Sequence
  ENSG00000280109_72 (sequence is synthesized)
cattgatcttgctcttcttcctgactgtagtacttcctttctatggctttaaccagccacctcctcctgggaaacatctcctgtgggcttgttgggtatagaagctactctaagacccaa

SEQ ID NO: 1004753 - DNA, 120 bp, Artificial Sequence
  ENSG00000280109_73 (sequence is synthesized)
ccagataccatgatgccactgttaattctgtttgctcttctaattaacctaagctagtgtgtatgtggacagggagggtggacaaaattctacagtaaatatttcaaaaattatagcatc

SEQ ID NO: 1004754 - DNA, 120 bp, Artificial Sequence
  ENSG00000280109_74 (sequence is synthesized)
atagaatcatctttatggctgccagatttgtcatcaacacccccaggatagacagtttcatcttccgacctatctggaaaatctcaggaccatgtccccagacctcctaactaaccatag

SEQ ID NO: 1004755 - DNA, 120 bp, Artificial Sequence
  ENSG00000280109_75 (sequence is synthesized)
caccccaaaatacccaaacccctattgtgaagtggaactcttccccacttagtggatcccccctggaccctgctgtccccctgccctgaccactattatcggaatctgggaagttgggca

SEQ ID NO: 1004756 - DNA, 120 bp, Artificial Sequence
  ENSG00000280109_76 (sequence is synthesized)
tctatatctccagtgcactcataactctaacatttgcatccactcttgcattaatgacacaaaagtggaagcttccctgcgatgctctggtccaactctagttgccaagtttccaagacc

SEQ ID NO: 1004757 - DNA, 120 bp, Artificial Sequence
  ENSG00000280109_77 (sequence is synthesized)
acggggaggtaaatgagattccatttgtgagtgaaaagaccatatatggtaccttctcccggatgggaacatacaaaggaaaaacaactgcctgatctgggaaggtgacagtactacctt

SEQ ID NO: 1004758 - DNA, 120 bp, Artificial Sequence
  ENSG00000280109_78 (sequence is synthesized)
cttctagaaaacaaagattgttcaaccaccaccatgagaacaggtggaaaatatctctatagacccaacctggcaatgaagtataaacatcgcaccccgcagggcttctcttggtgccct

SEQ ID NO: 1004759 - DNA, 120 bp, Artificial Sequence
  ENSG00000280109_79 (sequence is synthesized)
agttgggttcatttttgtttgtgactatgaatgggaagaagtcacaccctgtaaccactccaactccctaaggagtcacctcttctttaaggaatagctttcccttgtatctaaaaaact

SEQ ID NO: 1004760 - DNA, 120 bp, Artificial Sequence
  ENSG00000280109_80 (sequence is synthesized)
tggaactgacatgaatgaacgttggccactcttacccctccaggggtcacaatctataacgcctaggacccaagaatatcagaaataagtaagcaataaaactaattctggcaggaatca

SEQ ID NO: 1004761 - DNA, 120 bp, Artificial Sequence
  ENSG00000280109_81 (sequence is synthesized)
gggtggcaataggactagcagcaccctggggtggctttgcctaccatgagttaacgctaaagaacttggctcaaatcctagaatccttagccaccaacggagatcaggcattaaagagaa

SEQ ID NO: 1004762 - DNA, 120 bp, Artificial Sequence
  ENSG00000280109_82 (sequence is synthesized)
cagcctatggagcagccctgatctgcaaggagcggcatctctggcgctgctgtgcacagctgcttccatgaaagctgctgcctaacaccaccagctcacccttgaatctttgggcaaatc

SEQ ID NO: 1004763 - DNA, 120 bp, Artificial Sequence
  ENSG00000280109_83 (sequence is synthesized)
caagaactctcccaggctaagccccagtcttggggcttgcctgtcctgcatcatctggcaaccagcaaagggacaaggacagcggagatggtggcaattggcagagaggcaagacagcag

SEQ ID NO: 1004764 - DNA, 120 bp, Artificial Sequence
  ENSG00000280109_84 (sequence is synthesized)
agacagagaggcagcaattggtgagagacaagagacagcagttggcaagacagcaagagacggtgaagcagtctgtgattgaggatgtggtgaaactgagtggacagccaagtgtccata

SEQ ID NO: 1004765 - DNA, 120 bp, Artificial Sequence
  ENSG00000280109_85 (sequence is synthesized)
gtacagctgcctcgtgtgggacccactgctctaacgagccagcccccgacacagaagctgagcacccccaagctggggaacctagagagacctgcacccgggtcccacgtggaagactgg

SEQ ID NO: 1004766 - DNA, 120 bp, Artificial Sequence
  ENSG00000280109_86 (sequence is synthesized)
acaaccacaaccaatatcagtaaagctttggaagacctctgctacctatttaaaataatcaacactcagccagaagagattaccacagttccagagacaatgctggcacaaggcttccag

SEQ ID NO: 1004767 - DNA, 120 bp, Artificial Sequence
  ENSG00000280109_87 (sequence is synthesized)
tgagagtcccctttgcaccctcccccagtaatatcagattaccacagttccagagacaatgctggcacaaggcttccagcccatcctgtccactgacacggagaatgaaatcgtcctgcc

SEQ ID NO: 1004768 - DNA, 120 bp, Artificial Sequence
  ENSG00000280108_0 (sequence is synthesized)
cagacaggtatctcattatcttctgcaaagatctatttgtttagccatgttcaaatattgccctaaaatgttcacaggttccaggataaccagatgactgaggaatgttgaagattgcag

SEQ ID NO: 1004769 - DNA, 120 bp, Artificial Sequence
  ENSG00000280108_1 (sequence is synthesized)
tgatggaagtgcctcagtcagcctggaagactgtatggatggaggttgcctggtcacactgtcatgtccctctctccctgaaaaagagacacatttgcctttgtgcaaggcaatacatac

SEQ ID NO: 1004770 - DNA, 120 bp, Artificial Sequence
  ENSG00000280108_2 (sequence is synthesized)
ctatgtatacactttggtctatgcattctgttatttaacattctaataatgttgatgaccttaaaatatgcttgacaatgatccttgtaaatcattattattctgccttctgcaagataa

SEQ ID NO: 1004771 - DNA, 88 bp, Artificial Sequence
  ENSG00000280108_3 (sequence is synthesized)
atccttgtaaatcattattattctgccttctgcaagataagaattatgggccaggtatggcacttaacgcctataatacaaacatctc

SEQ ID NO: 1004772 - DNA, 120 bp, Artificial Sequence
  ENSG00000237976_0 (sequence is synthesized)
cccggtttctgcaaagtggagcgggggtggggcggggtagcggaactcatgcgctgggcgtcagaaacccggcaggggaatggggtcccagattccgggcacgtgcacatgggtgaagaa

SEQ ID NO: 1004773 - DNA, 120 bp, Artificial Sequence
  ENSG00000237976_1 (sequence is synthesized)
gctgttgaaaatacagctacaatctttttctgctctcctcccaactcatcttgcccctccctacctctgaacagtcgccttccaacacaagcaacaataaagtttagtctacggtcctca

SEQ ID NO: 1004774 - DNA, 120 bp, Artificial Sequence
  ENSG00000237976_2 (sequence is synthesized)
aatcaatggatgataaaataactagacaatgatgggtaggagtgatggaagttcactgtaagctcctataaccccccatcaccatcaccacatgcctaatacaacctgcagacacactta

SEQ ID NO: 1004775 - DNA, 120 bp, Artificial Sequence
  ENSG00000237976_3 (sequence is synthesized)
ctcgcaacagacctgcaatctgggctctcttttccttcttgatggaggcctcaaaacctcagcagttgtacccattaaactaaaatgctttttccctcttagtatttcttggtttcccgt

SEQ ID NO: 1004776 - DNA, 120 bp, Artificial Sequence
  ENSG00000237976_4 (sequence is synthesized)
gtgtactttacttccaaagagttgcaaatgcatttgcatccccatagttctgcagtcggtgaaccctggaattttgatggactcccacgggggtgctggatgccacaggaactttttaca

SEQ ID NO: 1004777 - DNA, 120 bp, Artificial Sequence
  ENSG00000237978_0 (sequence is synthesized)
tgcttctccttcattttctgccatgactgtaagttccctgaggccttcccatccatgtggaactgcattctaatatatgcattcttcataacaactgtgtgaaacatattaatatcctca

SEQ ID NO: 1004778 - DNA, 120 bp, Artificial Sequence
  ENSG00000237978_1 (sequence is synthesized)
ggaagaaaaactaagtgaagacaaaagaaggatttgaactgagattattctgggagattctgggagtcttttctccaacactccagtggcatctgactatgtgagctgataagatctata

SEQ ID NO: 1004779 - DNA, 120 bp, Artificial Sequence
  ENSG00000237978_2 (sequence is synthesized)
gatctgtgagttggcagagctgtgaaaagtttctcccttcttaggacataagcaggaaatcttgatacaggaatcaataaggggaaagagaaaatgtttattagaacaaatttattatat

SEQ ID NO: 1004780 - DNA, 120 bp, Artificial Sequence
  ENSG00000237978_3 (sequence is synthesized)
aaaattaaaaaaaaaaaaaagaatgcccactctcacgacttcttttgaacatggtactgaaagtcttagctggaacaattaggcatgagaagaaataaaaggcatcctactcataggtgg

SEQ ID NO: 1004781 - DNA, 120 bp, Artificial Sequence
  ENSG00000237978_4 (sequence is synthesized)
atgaaaagaagtgaaattgcctgtgtttgctgacaacatgattttatgtatagaaaaactcttaagactccaccaaaaaactgttagagctggtaaacaaagtcagtaaagttgcagggt

SEQ ID NO: 1004782 - DNA, 120 bp, Artificial Sequence
  ENSG00000237978_5 (sequence is synthesized)
aatcaatgtataaaaattagcactttcaatatgataataaaaccatctgaagataaaattaaaaaataatccaatttacaatagcaacaaaaattaatttgttgtaaatttaaccaagga

SEQ ID NO: 1004783 - DNA, 120 bp, Artificial Sequence
  ENSG00000237978_6 (sequence is synthesized)
aggaagtgaaagatctgtatactaaaatctacaaaacatcattgaaaaaaattgaagaaaacacacaaaaatggaaagctagcctgtgtttatagattttaagaattaatattgtgaaaa

SEQ ID NO: 1004784 - DNA, 120 bp, Artificial Sequence
  ENSG00000237978_7 (sequence is synthesized)
tgtctgtattgcctaaggcaatcaacatatttaatttaatccctaccaaaattccaatgtcattcatcacaataatacaaaaacaatccttaaaccagtatggaaccacaaaagacccca

SEQ ID NO: 1004785 - DNA, 120 bp, Artificial Sequence
  ENSG00000237978_8 (sequence is synthesized)
aagagccaaaataatcttgagaaaaatgaacaaagctggaggcatcaccttccccaatttcaaagcatgttacaaagcaattgtagtcaaaacatcagggtactggcataaaaatggaca

SEQ ID NO: 1004786 - DNA, 120 bp, Artificial Sequence
  ENSG00000237978_9 (sequence is synthesized)
cattgacaaatgaaacgggttagaaagcccagagataaacctgcacatttacagtcaattgatttgtgacaaagttgtcaggaacacacagtgggtgaaagaacaggctctgtgacaaat

SEQ ID NO: 1004787 - DNA, 120 bp, Artificial Sequence
  ENSG00000237978_10 (sequence is synthesized)
gattcacgtttatcacatataaatgataaattggatatccacgtgcagaagaatgaagattgacctttgtctcataccatatacaaaaataatctcaaaatggattaaagacttatatat

SEQ ID NO: 1004788 - DNA, 120 bp, Artificial Sequence
  ENSG00000237978_11 (sequence is synthesized)
tgcccccaaaacactggcaaagaaacaaagttagacaagtgggaagacatcaaactaaaaagcttctgcgcagcaaaggaaacaacaaaatggagagacagtttgtagaatgggagaaaa

SEQ ID NO: 1004789 - DNA, 120 bp, Artificial Sequence
  ENSG00000237978_12 (sequence is synthesized)
tatttgcaaaccatatatctgataagaagttaatatccaaaatatataaagaactcaaacaactcaatagcaagaagacaaacaacctgatttaaaaatgggcaaagaaattgagcagac

SEQ ID NO: 1004790 - DNA, 120 bp, Artificial Sequence
  ENSG00000237978_13 (sequence is synthesized)
atttctgaaaagaagacatataagtgaccaacacatacatggaaaaaaatgctcagcatccctaatcttagggaattgcaaattaaaaccacaatgaggtatcacctcacatctgttaga

SEQ ID NO: 1004791 - DNA, 120 bp, Artificial Sequence
  ENSG00000237978_14 (sequence is synthesized)
atgacttttataaaatagatgaaagataagtatcggtgaagatgcagacaaaaggggactcttgtacaattgttggtaggaatgtaaagtaatgcagccattatagaaaatggtatggat

SEQ ID NO: 1004792 - DNA, 120 bp, Artificial Sequence
  ENSG00000237978_15 (sequence is synthesized)
gttcctcaagaaactaaaaatagaactaccttatgatctggtaatcccacttgtgggtatatatccaaaggaaccgaaatcaatatgttgaagggttatatgtactcctatgttcgttgt

SEQ ID NO: 1004793 - DNA, 87 bp, Artificial Sequence
  ENSG00000237978_16 (sequence is synthesized)
caatatgttgaagggttatatgtactcctatgttcgttgtaggaatagtgactgatatggtttgcctgtgtccccactcaaatctct

SEQ ID NO: 1004794 - DNA, 82 bp, Artificial Sequence
  ENSG00000237978_17 (sequence is synthesized)
tatggttttacaaggggcaacccctttcacttaattctcatcctcttttgtcttctgcctttcgccttccaccatgattgtg

SEQ ID NO: 1004795 - DNA, 120 bp, Artificial Sequence
  ENSG00000237978_18 (sequence is synthesized)
tgtgaggcctccccagccacgtggaacttaaccctcttccacatggtgtctcatggattcaggctctgtatttgaagactgtaccatctcaactcatggctttgagagttactgctttta

SEQ ID NO: 1004796 - DNA, 120 bp, Artificial Sequence
  ENSG00000237978_19 (sequence is synthesized)
tgcttttaaatgcctcagctcagaaaaggcacacacatcattgtaatttgctccttgttttgctctcacctactgggcacatgacctcagtctaagtgcatggaggctggaagatgcagg

SEQ ID NO: 1004797 - DNA, 120 bp, Artificial Sequence
  ENSG00000237978_20 (sequence is synthesized)
gtagcacacagaatatttgaggcatggtttgcatatccatcatagttcatgactgacaatctagaggttggagctaacattgaaaaacatattgattattatgggaccaagtgtttccca

SEQ ID NO: 1004798 - DNA, 120 bp, Artificial Sequence
  ENSG00000237978_21 (sequence is synthesized)
ggatttgaactgaggtttgtcagactctcgggaccatgctgttgaaaccactaaaccacgctgcctctgggtcacttgattattctgggagattctgggagtcttttctccaacactcca

SEQ ID NO: 1004799 - DNA, 120 bp, Artificial Sequence
  ENSG00000237978_22 (sequence is synthesized)
gtggcatctgactatgtgagctgataagatctatagatctttgctgaacctgattctggaaggtacaacaatttcggccatcttcctaatcaatactgtgagatgggaccaaattgattg

SEQ ID NO: 1004800 - DNA, 120 bp, Artificial Sequence
  ENSG00000237978_23 (sequence is synthesized)
tgtggtacatgaagcacagcccaggaaaagctgatgagacctagacaccattatatattttgcctgacttattaacttactctgtgtcaaaattgagtccgtttttgataaaaatacagt

SEQ ID NO: 1004801 - DNA, 120 bp, Artificial Sequence
  ENSG00000237978_24 (sequence is synthesized)
ccgtgggcgtaggaccctccgagccagagatgggatcttactacattgcccaggctgaagtgcagtggctattaacagctgtaatcataatgcattgcagctttgaattcctgggcttga

SEQ ID NO: 1004802 - DNA, 120 bp, Artificial Sequence
  ENSG00000237978_25 (sequence is synthesized)
aatgcattgcagctttgaattcctgggcttgagcgacctccccaccttagcctcctgagtagctgagactacaggaaataaacttaaggagaaagaagaaacaaagatggggcggaaatg

SEQ ID NO: 1004803 - DNA, 120 bp, Artificial Sequence
  ENSG00000237978_26 (sequence is synthesized)
gcatctgactatgtgagctgataagatctatagatctccccagcagttgttgaaaagcaagagcaggaaccgagagaaagccccttcttttagtcgaaaactcttactctgcttaggaaa

SEQ ID NO: 1004804 - DNA, 120 bp, Artificial Sequence
  ENSG00000237978_27 (sequence is synthesized)
accatgaacccaaacagtgtgggtcagcctttcaatatgcaaaacggacgaaggctgaagcaatcacatgccatgcacaactgtcaaacggcaagaatgaatgatggatggaaagaatgg

SEQ ID NO: 1004805 - DNA, 120 bp, Artificial Sequence
  ENSG00000237978_28 (sequence is synthesized)
gaatgtgtacgttatcttgctccactttggacagtcatgatcatggaagatagaagagggatttcttaacattggtcagagaagagggtatcagttagctggaagtgctactctgaaaaa

SEQ ID NO: 1004806 - DNA, 120 bp, Artificial Sequence
  ENSG00000237978_29 (sequence is synthesized)
ctgatggccctttgcaggtgtgaccctgagctctgctggatttcttgtgaagaaaactccaaggaatggatgaatgcctggaaacttactgctggaagtcataaggcaatgacaagaaaa

SEQ ID NO: 1004807 - DNA, 120 bp, Artificial Sequence
  ENSG00000237978_30 (sequence is synthesized)
ggccttcccatccatgtggaactgcactgtcctaggtactgtggggaccaaaacattcagacctgcttctaaggagtgcagtccatggaagagtcagaataacaaatcaacatttgtact

SEQ ID NO: 1004808 - DNA, 120 bp, Artificial Sequence
  ENSG00000237978_31 (sequence is synthesized)
ttcatcagcagcatgaaaatagactaatacagtaaattggtatcagtagaatggggtgctgtggaaaagatacctgaaaatgtggaagcaacattggaactgggtaacaggcagaggttg

SEQ ID NO: 1004809 - DNA, 120 bp, Artificial Sequence
  ENSG00000227734_0 (sequence is synthesized)
acctcaatttcctgggctcaagtgatccaaccacctttcccctctcaatgggattacagttgagagcaatatttccatataccttgattacaaccctagaaaaatcacaccaggtaacct

SEQ ID NO: 1004810 - DNA, 120 bp, Artificial Sequence
  ENSG00000227734_1 (sequence is synthesized)
cctccatctacaagaagagatgcgtttttctaattcatgtaaaaattaataaactagctgtatggaatggtgttactctcccacaaacatataaaaaataaagatgcaatcttaaattta

SEQ ID NO: 1004811 - DNA, 120 bp, Artificial Sequence
  ENSG00000247193_0 (sequence is synthesized)
agggtcctcccacccccgcgtgggccatcccggcccagccttcccgaggccccgggtactcgccttgcgctcgggtcgcggagttcgaaaagcgagacagggtctcactttgtcacccag

SEQ ID NO: 1004812 - DNA, 88 bp, Artificial Sequence
  ENSG00000247193_1 (sequence is synthesized)
tttgtcacccaggctggagtgtagtgaggcaatctcagctcattgcgcctccgcctctgggtccaagctatcctcccacggcaccatc

SEQ ID NO: 1004813 - DNA, 120 bp, Artificial Sequence
  ENSG00000247193_2 (sequence is synthesized)
gattacaggcgcgcaccatcagccaagacatagtctcatcactctgtcacccaggctggaatgtagtagtgcaatctcggctctctgcaaccttcacctcctggattcaagtgattctcc

SEQ ID NO: 1004814 - DNA, 120 bp, Artificial Sequence
  ENSG00000247193_3 (sequence is synthesized)
tgcgagggatatttctgctgacaattcaacattcaaagggatgagtgtatgacgtctctaagagatgtcatggagtgcatgtagaagggactttttatggagaactacttctcaaatcac

SEQ ID NO: 1004815 - DNA, 120 bp, Artificial Sequence
  ENSG00000247193_4 (sequence is synthesized)
tattcacatcctggtagaagtcaagcaatgaagatggcacagaaacacatcccaaatactatgataccataaagtatactgtagcaatgcattggcacaccctcatttgaacatttgtct

SEQ ID NO: 1004816 - DNA, 120 bp, Artificial Sequence
  ENSG00000247193_5 (sequence is synthesized)
cagaagattttgacagaagataaaattgtctggtttttatttcattggtttcatgaaaatttatttcactggtttcatgtcacaggcccatgactgtataaagagtcataatctttacaa

SEQ ID NO: 1004817 - DNA, 120 bp, Artificial Sequence
  ENSG00000247193_6 (sequence is synthesized)
atgactcacagcgacatgttgcaaagctgtaatcgaaaacactgatgttgatttcagaggccattaatggtgttaagaaggcgcttttgttaaccaaataattgaatactcgtaattact

SEQ ID NO: 1004818 - DNA, 120 bp, Artificial Sequence
  ENSG00000247193_7 (sequence is synthesized)
tttcagttctagttcagttcttgacaccaaaacaagccattttctttacatagtgaatgcagaacttgccagtaagaactttcatactaaacttctatgtaaaacaaaacatgtcaaaat

SEQ ID NO: 1004819 - DNA, 120 bp, Artificial Sequence
  ENSG00000247193_8 (sequence is synthesized)
cagtaactactttaatggaatggtaaagaatttacttaaacacaaaggaatgaaaatatctctgcaaatatgtctattgacttttcaaatttggtgacttctttcgaattaattccctta

SEQ ID NO: 1004820 - DNA, 120 bp, Artificial Sequence
  ENSG00000247193_9 (sequence is synthesized)
cgtctgttcctcatccacataaaaatgacaaaaatgaaagataattttccagcctataattaaatttctccattgttggtatatgttttttcaaatacatttttcagttttcataattca

SEQ ID NO: 1004821 - DNA, 120 bp, Artificial Sequence
  ENSG00000247193_10 (sequence is synthesized)
tatgagaattattaaaagggagttagttgcctttaggaccttatttggagcctaattcttaaaaattgtgtaaaaataattgtgacttttaagagacaattggaaatttgaacctgacca

SEQ ID NO: 1004822 - DNA, 120 bp, Artificial Sequence
  ENSG00000247193_11 (sequence is synthesized)
catttttgtgatattaaggaattttattaattattttctaggtgggggaatgatatgatgatattcttaaaataatgtgtggattgtttattacatttcaacattttcttaatcatcaaa

SEQ ID NO: 1004823 - DNA, 120 bp, Artificial Sequence
  ENSG00000247193_12 (sequence is synthesized)
tctgccagtaactgcaataacatctttaaacagtagcacaatcttggatagactctgtctaacaaaaatgacttctccactaggatagaaattaattcaccattgctctcatttttatca

SEQ ID NO: 1004824 - DNA, 120 bp, Artificial Sequence
  ENSG00000247193_13 (sequence is synthesized)
caaggaggtaaaataaatttttaaaaatcaaatgcagcttccttggaatgttacagctaattctgaattaagaaatgaactagttagtagttatgtatttctgacaatgctgaaaacaac

SEQ ID NO: 1004825 - DNA, 120 bp, Artificial Sequence
  ENSG00000247193_14 (sequence is synthesized)
atgcttctaatgatatcatttcacatacagacctaacacataggctgagatgcacctggaaaggcatcccatagaagcttcagattttattattacaggttcattctttaaaaattcaaa

SEQ ID NO: 1004826 - DNA, 120 bp, Artificial Sequence
  ENSG00000247193_15 (sequence is synthesized)
attattacaggttcattctttaaaaattcaaatagggcctggcacggtggctcttggcattttgggatgccgaggtgggtggataatttgagtccaggagtttgagactggcctggccaa

SEQ ID NO: 1004827 - DNA, 120 bp, Artificial Sequence
  ENSG00000247193_16 (sequence is synthesized)
actaaaattacaaaattagccatgggtggtgttgtgtccctgtagtcccagctactctggtggctgaggcatgagaatcgcttgaaccccagaagaagaggttgcagtgagccaagattg

SEQ ID NO: 1004828 - DNA, 120 bp, Artificial Sequence
  ENSG00000247193_17 (sequence is synthesized)
ccaacctgggtgacacagcgagactgtgtcaaaaaaaaaaatcaaataatgctgctgaggagaatcaacacctgccaagactctaatgcaagtgggtttatttgggtgatttttgacaga

SEQ ID NO: 1004829 - DNA, 120 bp, Artificial Sequence
  ENSG00000247193_18 (sequence is synthesized)
tacgctgaaaggggtagatggatgggaaacatggccagaaaggagatgtcggtgataatttcataataaacatgctagcctagggccggccatggctgttcctcccacctattgccactt

SEQ ID NO: 1004830 - DNA, 120 bp, Artificial Sequence
  ENSG00000247193_19 (sequence is synthesized)
gctgaggttctagaatgtccctgaacctggtgataagaacagtgatgaggggaagtaaagtaaaaaagaagattgataacattttctcttctgatattggacatggttaatgcctatagt

SEQ ID NO: 1004831 - DNA, 120 bp, Artificial Sequence
  ENSG00000247193_20 (sequence is synthesized)
ggatataaataatgtaagatagttgatagcataaggtcaaatgtgtcaagatagcaacagtctaagaggggaaatagttatactcctaaatagcttaatgttgtccatttataatatata

SEQ ID NO: 1004832 - DNA, 120 bp, Artificial Sequence
  ENSG00000247193_21 (sequence is synthesized)
tatattcatttttctgagaaacaaatattcttggaggctcattgtatacaatgtcatccttttagtaatgatgaacactatggggtcctgaggtattctcagctcatagaaatttagctg

SEQ ID NO: 1004833 - DNA, 120 bp, Artificial Sequence
  ENSG00000247193_22 (sequence is synthesized)
gaagagctcaaatatttctaaaaagcaacaaattaggcattcttttgcatcatttccctacttcaagatagagttttcttgatgttgagggttgagtttatgctgaataatttgattctt

SEQ ID NO: 1004834 - DNA, 120 bp, Artificial Sequence
  ENSG00000247193_23 (sequence is synthesized)
ggtgtggtgagtgaaatggagaaggctaaactttttcttcccacatgctcacttccttgcttgttcgctagctgctgcatctggcccctcaagggtaaagtcaaggggaaaaggagattg

SEQ ID NO: 1004835 - DNA, 120 bp, Artificial Sequence
  ENSG00000247193_24 (sequence is synthesized)
agaggaaggacagtctgtgaattgggtctcaccgtgtttcccaggctgaagtacagtgttgtgatatcagttcattgcaacttctgtcttctgagctcaagcaatcctcttgcctcagcc

SEQ ID NO: 1004836 - DNA, 120 bp, Artificial Sequence
  ENSG00000247199_0 (sequence is synthesized)
gggcgcagttaaagatgttaatgttaagtcatcccttctgtgatttcgggacattatctttgcacgccatgtgaagatgtgcttgcttccttgtcaccttccgccatgattgtaagtttc

SEQ ID NO: 1004837 - DNA, 84 bp, Artificial Sequence
  ENSG00000247199_1 (sequence is synthesized)
aaccatgacctgatgcttgctatgcttgtcattgtgtaagcagcaaacttgcagtgaccagttggattccacccccctgatgtt

SEQ ID NO: 1004838 - DNA, 120 bp, Artificial Sequence
  ENSG00000247199_2 (sequence is synthesized)
aaacttgcagtgaccagttggattccacccccctgatgttggtggtgtgctcttggggagatgtcttccagacaggcaaagaagagtgacatcatcagagcatggacgacctcaaagata

SEQ ID NO: 1004839 - DNA, 120 bp, Artificial Sequence
  ENSG00000247199_3 (sequence is synthesized)
ttccagctatgctccagagagagccatcctgatggaacctactgaccagggggacacaaaagaaaagagggaggagatgaaagaaggtgagggtctctattgccagcagaactggactgt

SEQ ID NO: 1004840 - DNA, 120 bp, Artificial Sequence
  ENSG00000247199_4 (sequence is synthesized)
gtgtttaactggaaagctgatggagaatgtagttaggcacagctctctggacccttctagtgaaataaagaactagttaaataaggcaagacagaagaatgaggctgccatctagatgta

SEQ ID NO: 1004841 - DNA, 120 bp, Artificial Sequence
  ENSG00000247199_5 (sequence is synthesized)
gtaacaggtaatgttccagggcacaagggagccaaaggaagagagtttcttcactttttattctctgcagtcttcatacataataatgatctcattcctctatattagtcaagatcttcc

SEQ ID NO: 1004842 - DNA, 120 bp, Artificial Sequence
  ENSG00000247199_6 (sequence is synthesized)
atctcattcctctatattagtcaagatcttcccattataagtgacgaattataaccagattaaaccaaaaagtaaaataatttattgactgattgatatggtttggatttgtgtccccgc

SEQ ID NO: 1004843 - DNA, 120 bp, Artificial Sequence
  ENSG00000247199_7 (sequence is synthesized)
ccagttggaggtgggtcctggtgggaggtgatgggatcatgtgggtggtttctcatggtgtaacgcaatccaccttggtgctgtcgtcacgatggtgagtcctcatgagatctggttgtt

SEQ ID NO: 1004844 - DNA, 120 bp, Artificial Sequence
  ENSG00000247199_8 (sequence is synthesized)
tcaaggtgtgtggcacctcacctctctctctctcttctcctgctcccaccacgtgaggcacctctctccccctttgccttttgccatgattggaaacttcctgaggcctccccagaagca

SEQ ID NO: 1004845 - DNA, 120 bp, Artificial Sequence
  ENSG00000247199_9 (sequence is synthesized)
gcccctatgcttcctgcacagcctgcagaaccgacatttcaattatcctctgaaatggaataatcctcattgaaagcatgatactagaagctcatgaggattattttcaaagaaagctgt

SEQ ID NO: 1004846 - DNA, 120 bp, Artificial Sequence
  ENSG00000247199_10 (sequence is synthesized)
gcagaagagttggctcagcaggcttggcatgctcaaaccagctcctgggagataacctacgagcccttggaatagtctgtgcaataggggtcctggagcactccatatcagtttgatctc

SEQ ID NO: 1004847 - DNA, 120 bp, Artificial Sequence
  ENSG00000247199_11 (sequence is synthesized)
tggctggggaggagctggagattaagtatttaagatcagccatgtaggtattctgtgcctacctgactgacccccattaaagagtctgaacaccaagtcttgggtgagcttccctggtaa

SEQ ID NO: 1004848 - DNA, 120 bp, Artificial Sequence
  ENSG00000247199_12 (sequence is synthesized)
gcaatacttcatgtgtgttgtcatggtagcagggagaattaagtatcgcttctgtgagtccactgggagaagacagctggaaacttgtgcctgctctctcggggactccacctcatgcat

SEQ ID NO: 1004849 - DNA, 120 bp, Artificial Sequence
  ENSG00000247199_13 (sequence is synthesized)
ctttggtctttgctgattttaatttgtatcctttcattataataaactgttaccatgaatataacagcttttctgagttttatgagtcctcctgaatcctcaagcctgaagatagtcttg

SEQ ID NO: 1004850 - DNA, 120 bp, Artificial Sequence
  ENSG00000247199_14 (sequence is synthesized)
gggaacctcaacagagaagatctcacaggtcatgaagaagttaactgacaagacacagggctgatttgtgaaaacaattttgaatggagctaaatatacattgtaaggaatattattaat

SEQ ID NO: 1004851 - DNA, 120 bp, Artificial Sequence
  ENSG00000247199_15 (sequence is synthesized)
tctttagtctaaatttcctactgaatttatttgaaaggcaaaaacaatatgaaaagttgactgtcaatttttatgcatgtaagaccaccctttgctactcgtgtgtgtatctatacctgc

SEQ ID NO: 1004852 - DNA, 120 bp, Artificial Sequence
  ENSG00000247199_16 (sequence is synthesized)
atctatgtttatacgtttgtctatggctatagctgcatctgcatctttttctacatctcttaatagctaccaaacactgataggtgctattcataggtttgtcaatgtgacatataaaaa

SEQ ID NO: 1004853 - DNA, 120 bp, Artificial Sequence
  ENSG00000247199_17 (sequence is synthesized)
aagttcagtgttttttttaaataactagatttccatttattgcttgaatataatctacagattacctacaaatataatctctgtacagttctcccagaacattatgtaagccttttttct

SEQ ID NO: 1004854 - DNA, 120 bp, Artificial Sequence
  ENSG00000247199_18 (sequence is synthesized)
tttttaaatgattcaactttgaatactaactaaattctaggagactttcttcactctctctgtagtctgtccccagtttttgtaaataatgaggctatttttttaaaaaaagtatgcatc

SEQ ID NO: 1004855 - DNA, 120 bp, Artificial Sequence
  ENSG00000247199_19 (sequence is synthesized)
tgtgtgtgtgaagaagcatcgaagcgcggcagccatgttcagcgtggcatttcggaaggcttgtcaggggtggagaagcggggcgggttgctgttctttcacctgacactaaagcgccat

SEQ ID NO: 1004856 - DNA, 120 bp, Artificial Sequence
  ENSG00000247199_20 (sequence is synthesized)
gccggaagcactgagtctgatacgtcggaaccagtctccaccgtgtggtttggtcttgatttccactggtactctggggtcttggataagtctctggacctcgcctttgtcatttgcgaa

SEQ ID NO: 1004857 - DNA, 120 bp, Artificial Sequence
  ENSG00000247199_21 (sequence is synthesized)
aagagggaaacccactgacagagaggaaggctgaagagatcccaccgctgacttggactaaggagagagaagtcaaagagtggttacctggatgaggtggctgaatatgggcctgctctt

SEQ ID NO: 1004858 - DNA, 120 bp, Artificial Sequence
  ENSG00000247199_22 (sequence is synthesized)
gtcactttggatgtcacaactagccttgagaagagctgctgttccaggagtctgtcacaactagccttgagaagagctgctgttccaggagtctgtagccaaggacgtacagcagtggag

SEQ ID NO: 1004859 - DNA, 120 bp, Artificial Sequence
  ENSG00000247199_23 (sequence is synthesized)
gctgactcatcgcatagctgagtgaccaattgcttggcatgagtttactttaatggctgtttctgagtttgatccctctccggaaccaacccctctgatgtgtcctgttccagcaggaag

SEQ ID NO: 1004860 - DNA, 120 bp, Artificial Sequence
  ENSG00000247199_24 (sequence is synthesized)
acctaccacattccagatcatttggtgattttgtgtgtgcgtgtgggtgtgtgtgtgtgtgtgccaaattcaaggtggtcccagcctttctagtcttctctaacctttcttctcagaagt

SEQ ID NO: 1004861 - DNA, 120 bp, Artificial Sequence
  ENSG00000247199_25 (sequence is synthesized)
cgcacctgttctgtctttctaggatataattttttttctattagcctgggtaacaccccaaccaataaagtttgcaatatccaagcctcctaatttctctacttattagcttatattaag

SEQ ID NO: 1004862 - DNA, 120 bp, Artificial Sequence
  ENSG00000247199_26 (sequence is synthesized)
cttcagcatgagcaagcctaaaaactcgccattatctggaaaagttctatttcacaggctttaatctctcctagagtagttagcactcttttgtggctttgtgttcctgtactagcttga

SEQ ID NO: 1004863 - DNA, 120 bp, Artificial Sequence
  ENSG00000247199_27 (sequence is synthesized)
attccacagtctgacgttaataattagctccttaacacgtccatcctctcttgatgtcctgctctctatttttccttctttcttccaagttgggataaattcagcttcttattttcctgc

SEQ ID NO: 1004864 - DNA, 120 bp, Artificial Sequence
  ENSG00000247199_28 (sequence is synthesized)
tccagaccttggttgtggagaaagatagaaaaagttccatacaggggactctgtgatcctgctaacatcattatttacctaagctctttagactccagtgaaagcttctgatttaatgtc

SEQ ID NO: 1004865 - DNA, 120 bp, Artificial Sequence
  ENSG00000247199_29 (sequence is synthesized)
atgtccctactttatgccacatgtcccataccattttctttgttttatgcaatttatttccactatctgatcccattccacccacatgactttgagtggaaaacttcatctcttcattgc

SEQ ID NO: 1004866 - DNA, 120 bp, Artificial Sequence
  ENSG00000247199_30 (sequence is synthesized)
tgagtaaacaaacttcaggatgaacaagccctgtccactattttcccttttactttaaaattctggaatttttatgatctacgtttttttcctctgtttttattcttcactccatatcaa

SEQ ID NO: 1004867 - DNA, 120 bp, Artificial Sequence
  ENSG00000247199_31 (sequence is synthesized)
cttacttggggatctacaccttcattcattcttttcattctgtcggcacctggctatggagtttacatttctcatcatatttactcctcataataatcctgtgaggtatataccactctg

SEQ ID NO: 1004868 - DNA, 120 bp, Artificial Sequence
  ENSG00000247199_32 (sequence is synthesized)
agtcttgtataagagaaaaagaaactgagatagggataactcaaagggataattcatttgctggagctaccaactagctactaaccatgctagaatggacagagatgacattcatgccaa

SEQ ID NO: 1004869 - DNA, 120 bp, Artificial Sequence
  ENSG00000247199_33 (sequence is synthesized)
agaccatgttgacttgctatctctacatttgctctaagtttagaaaaaaaaaatcccttcaatttatcctccaacagtcttcttagaaccttaccatggatgccttgtataacacatttc

SEQ ID NO: 1004870 - DNA, 120 bp, Artificial Sequence
  ENSG00000247199_34 (sequence is synthesized)
tggcaaatacatacaacatattaatgaggattactaagaaacagtaattatattgtcaactacttggcacttgtatctgttatgtggtaggtttattaaaagataaaaaacagcctcgga

SEQ ID NO: 1004871 - DNA, 120 bp, Artificial Sequence
  ENSG00000247199_35 (sequence is synthesized)
aaaaataaggctgaccaagagttttcttggattaaaactaggtatttctttttaactttcagatcaataggggtcaggggatatctttcatgaggttccagcacaaacacaacaaaatgc

SEQ ID NO: 1004872 - DNA, 120 bp, Artificial Sequence
  ENSG00000247199_36 (sequence is synthesized)
agcagccaaatcacaaaaaaaaaaagaaaaaaaagttgtgagaagatgagatgtctaaaagtgacttaatatggatcaagtcaagaataatccagctaagtttaaacttcaatcaatgat

SEQ ID NO: 1004873 - DNA, 120 bp, Artificial Sequence
  ENSG00000247199_37 (sequence is synthesized)
aagaagaaaaagaaaagaagcctttctgtgagaaaggctatttcacagtgtaaagacaaagaattgcatgcttcatgaaaaggattttatctctctgctgagtgattctcgggacagcaa

SEQ ID NO: 1004874 - DNA, 120 bp, Artificial Sequence
  ENSG00000247199_38 (sequence is synthesized)
ccaagtgcatcatcatcaagtccacctggggatgatgctacttacaacagctcagcacacattgcacacttattgccatgcgtcttcccatcaggaccaagaacaggatcattttccctt

SEQ ID NO: 1004875 - DNA, 120 bp, Artificial Sequence
  ENSG00000247199_39 (sequence is synthesized)
gtgcatccaagtcttccatctctaacaaagggccgaaaagcactgcatacatcctgaagaacagggaaaagaacttgaaacttaccaagattgtaatgctgacaacactgttttcagaaa

SEQ ID NO: 1004876 - DNA, 120 bp, Artificial Sequence
  ENSG00000247199_40 (sequence is synthesized)
ttttattgaactcagtccctctgacattgctatgggccacttagagcagtaccagctgtgtagatgtagctcagtaagtactctataattcatgtggttaaatataaaacttttttactt

SEQ ID NO: 1004877 - DNA, 120 bp, Artificial Sequence
  ENSG00000247199_41 (sequence is synthesized)
gtttattcatttatttagtaaacagataacctactatgtgccagaactcagacagagcacagtccttgccatcaacttgctcccaatctcctaggtgataaaaagagacatttaaaattg

SEQ ID NO: 1004878 - DNA, 120 bp, Artificial Sequence
  ENSG00000247199_42 (sequence is synthesized)
gacaagtgtgacatgtatgagatcctttcttccttccccttcccctaccatcacaggctcacaaaactgtatcatagaaaaaaaatctatttagttcaaatctcattttaggttaagtaa

SEQ ID NO: 1004879 - DNA, 120 bp, Artificial Sequence
  ENSG00000247199_43 (sequence is synthesized)
tttgtccaaggtctccaaacagcaagtgacactgctggggttttaacgcaggctaagtgactgaagtgttgtgccctttctactacacatgtagtttcctttttatttcttcttcttctt

SEQ ID NO: 1004880 - DNA, 120 bp, Artificial Sequence
  ENSG00000247199_44 (sequence is synthesized)
tttttttttatacaaagcagcaatagattgaaagatctaaccaccaaagtaatctgatccagtttcagagactataattagctttttcatattagtgggcagtactgggtattccatttc

SEQ ID NO: 1004881 - DNA, 120 bp, Artificial Sequence
  ENSG00000247199_45 (sequence is synthesized)
acataaagcaagaattaattccttccaaggctcccacctaagaaggaagaggagagcacctacttactatttgaagttagcctcccagtatttcccatcaggctgacaattgacctcacc

SEQ ID NO: 1004882 - DNA, 120 bp, Artificial Sequence
  ENSG00000247199_46 (sequence is synthesized)
tgctctggattactgctcttacattccccttcactttttacaccaatttgggacccggttttcctagaatcaaaagttagtagacacagcagtttaatatcacagaacttcccaccattc

SEQ ID NO: 1004883 - DNA, 120 bp, Artificial Sequence
  ENSG00000247199_47 (sequence is synthesized)
aaacctaactgctctacattgcattgtcattctcctttactcccgaaaacagctgccacatagtattattttattactttttctaataaaagtcactgtttataacttcaagtcaaagaa

SEQ ID NO: 1004884 - DNA, 120 bp, Artificial Sequence
  ENSG00000247199_48 (sequence is synthesized)
atgtagttaacatggaagagatggtaaagattcagacttgtaaatgttatttatagaaatctttttttaacctttgtttagaggagggatccacatcagaagatggggaaaagtaaagct

SEQ ID NO: 1004885 - DNA, 120 bp, Artificial Sequence
  ENSG00000247199_49 (sequence is synthesized)
tgtaactggataatagataacactcagcacccaaggaactttgttgttttaaataaacaaagtcaaatttgtattatctaacatcccactatactactctttatttgggttatgaagact

SEQ ID NO: 1004886 - DNA, 120 bp, Artificial Sequence
  ENSG00000247199_50 (sequence is synthesized)
acttaattattctatatagtctggtatctcgttcatcttttaatgagaacagtagagccaacagtagagacctggttaacttacatttttacatttacattctttttctttaaaggacat

SEQ ID NO: 1004887 - DNA, 120 bp, Artificial Sequence
  ENSG00000247199_51 (sequence is synthesized)
atctcagttggttaagaagtgagcatctgatcagccaaatccaccgctcccatattcttgttataatccacaatggcacatggctccttagttttctttccatttctgctgtctacttca

SEQ ID NO: 1004888 - DNA, 87 bp, Artificial Sequence
  ENSG00000247199_52 (sequence is synthesized)
gctctgtgtccccacccaaatttcatctcgaattgtaatttccatgtgttggaggaggggcctggtattgctgttctcatgatagtg

SEQ ID NO: 1004889 - DNA, 87 bp, Artificial Sequence
  ENSG00000247199_53 (sequence is synthesized)
atttccatgagatctgatggtttaaaagtgtatggcacttcccccctccccctctctctggccaccattagaagaaggtacttgctt

SEQ ID NO: 1004890 - DNA, 120 bp, Artificial Sequence
  ENSG00000247199_54 (sequence is synthesized)
gtctaatgcaatcgtgttgagaggtggaacttttaaaagatgattaggtcgtgagagccctccctcatgtatagatcaatgctgttaccagaggagtaggttcctgataaaagaaggagt

SEQ ID NO: 1004891 - DNA, 120 bp, Artificial Sequence
  ENSG00000247199_55 (sequence is synthesized)
ttctcatgctctctctcacgtgcacactctctctctctttcttgctctcttgcccatctaccttctgctgtgggatgacacaacaagaaggcagtctctagatgcaggtcccttgaactt

SEQ ID NO: 1004892 - DNA, 85 bp, Artificial Sequence
  ENSG00000247199_56 (sequence is synthesized)
ttagcagcagaaaacagactaagactaatctaatcatattttctctgtcactacttctagttcagatgttttagtttgattacca

SEQ ID NO: 1004893 - DNA, 120 bp, Artificial Sequence
  ENSG00000247199_57 (sequence is synthesized)
tgtcactacttctagttcagatgttttagtttgattaccagaggaaagacagcaaagatgttaggaaagaaagtacactgaaatgccaaaaattctgaattccatcatttcttcaggcag

SEQ ID NO: 1004894 - DNA, 120 bp, Artificial Sequence
  ENSG00000247199_58 (sequence is synthesized)
ccaacatttattaaacgtctgtttgagacctgggaatatgttaggcaccagggctgcagagatgactaggaaacagtctctactctcaagttagtggggagacacgatctataaggaaca

SEQ ID NO: 1004895 - DNA, 120 bp, Artificial Sequence
  ENSG00000247199_59 (sequence is synthesized)
tttcagcaaaatttaggaaattctgtcacagtggaataccaggatgcctaagtagcacagaggagaggcataatataatgaaattcgtagagtaaggtagtgcaatggtatttgccagag

SEQ ID NO: 1004896 - DNA, 120 bp, Artificial Sequence
  ENSG00000247199_60 (sequence is synthesized)
actggagggaaggggaaatggggaggtattagtcacaaggtacaaacttggttatacaagattagagatcaaacaacactgtagagtgtatttacaaaatttgttaagaggatacatctt

SEQ ID NO: 1004897 - DNA, 120 bp, Artificial Sequence
  ENSG00000247199_61 (sequence is synthesized)
atgtattctactcacacataacataatgaaaagacaggaagaaacttttggaggtgatgaataggttcatggcatagattgtggtaatagtttcacaggtatatatcttcagacgcatca

SEQ ID NO: 1004898 - DNA, 80 bp, Artificial Sequence
  ENSG00000247199_62 (sequence is synthesized)
aatcgggtcactcccaccctaatactacgcttttccatcgggcttagcaaacagcacagcccatggagaaactctataag

SEQ ID NO: 1004899 - DNA, 60 bp, Artificial Sequence
  ENSG00000247199_63 (sequence is synthesized)
aactaagatcagagcggaactgaaggagataaagacacaaaaaccccttcaaaaaatcag

SEQ ID NO: 1004900 - DNA, 66 bp, Artificial Sequence
  ENSG00000247199_64 (sequence is synthesized)
gaaaatgagggaatcctccctaactaatttttatgaggccagcatcatcctgacaccaaagcctgg

SEQ ID NO: 1004901 - DNA, 73 bp, Artificial Sequence
  ENSG00000247199_65 (sequence is synthesized)
ttctggccagggcaatcaggcaggataaggaaataaagggcattccttgtatatctagaaaatcccatcatct

SEQ ID NO: 1004902 - DNA, 120 bp, Artificial Sequence
  ENSG00000247199_66 (sequence is synthesized)
cagcttgttttgtctgagaggtctaggcatgatattttattaattgtggactatctctacttgaatagcttggaatatactcaaacttaaagttgaattcttccttccctccagatgtgc

SEQ ID NO: 1004903 - DNA, 120 bp, Artificial Sequence
  ENSG00000247199_67 (sequence is synthesized)
ttcattaattaattcattcattcattcatcagcttccatacacctcctgttatcgggctaaggttagtggagctgatgcaaagataggtatgcatggcataatggcaggaggaccttaga

SEQ ID NO: 1004904 - DNA, 120 bp, Artificial Sequence
  ENSG00000247199_68 (sequence is synthesized)
ggctagtgcagcagaatagaaacagcagtgcctgatgataagtatatgccagcgtgatttcacttcctcttcttgcctgctcaaatcccagggagacagagtttatgtgatactcaacaa

SEQ ID NO: 1004905 - DNA, 120 bp, Artificial Sequence
  ENSG00000247199_69 (sequence is synthesized)
tgtgatgggaaactaccaagctcgtaactttcagtaatcctttacatcctctcacagctactaaatcatgaaggatggcttgaactcaggcccatctgactccaaaatttatatccttaa

SEQ ID NO: 1004906 - DNA, 120 bp, Artificial Sequence
  ENSG00000247199_70 (sequence is synthesized)
ccctattattttctttaataggtaaaacagaagcctcaaagacataaaataaatttcccaggccccagtgtcacacagttaataagcaacagagtttagagtggaactcaaattgagtac

SEQ ID NO: 1004907 - DNA, 120 bp, Artificial Sequence
  ENSG00000247199_71 (sequence is synthesized)
ttctaagacagagaacaaagatatgtgtgacccatttaaaaattataagaatcatgacttgcccttattgagtttcactctatgccaggcactgtgctaagctcttttcaaatactatgg

SEQ ID NO: 1004908 - DNA, 120 bp, Artificial Sequence
  ENSG00000247199_72 (sequence is synthesized)
cttcaagtcttggaataatgttataagtatgttgcccatggccacgtgatcaaaaacgtggaattaaagaccaggcctttctaaatttgttgctagtgtctcaccaccttgttctactct

SEQ ID NO: 1004909 - DNA, 120 bp, Artificial Sequence
  ENSG00000247199_73 (sequence is synthesized)
ctccattttagaaagatctgcctacaatttttgaaataaaaccagttttcatacacataaagtaaatattcaaacatatagaaatttaattactgtgtagtatcaaatatttccttactg

SEQ ID NO: 1004910 - DNA, 120 bp, Artificial Sequence
  ENSG00000247199_74 (sequence is synthesized)
atattgactttaaaattacataaaagtaggatgggtgtactgaccatctgtttcgtctgtttggcacattctatacctggaagaaaaacaaagacaaggcaatattaaactctggaagaa

SEQ ID NO: 1004911 - DNA, 120 bp, Artificial Sequence
  ENSG00000247199_75 (sequence is synthesized)
cctaatcttactagaaaaagaatctttgatttatgctttagctttcagcctgtcataaaaatgtaagtctctcttcacaactgtgtatcagcattgtatcaaaggttgaagctcttcaca

SEQ ID NO: 1004912 - DNA, 120 bp, Artificial Sequence
  ENSG00000247199_76 (sequence is synthesized)
cgtatctttaaattttttttcttttttggagtgggagtggaatctagtcaaagaaatggaaaagatgccacgatgaatgagaattttgtcttaatcttttttacttcataaccagagctc

SEQ ID NO: 1004913 - DNA, 120 bp, Artificial Sequence
  ENSG00000247199_77 (sequence is synthesized)
agtagagacagaagaaataagtgagtcatatttagggagatgtgctattgtggacaggtgtagatgacagatgttggaacagtggttgaaaattctagggaggccaattttaactcaata

SEQ ID NO: 1004914 - DNA, 120 bp, Artificial Sequence
  ENSG00000247199_78 (sequence is synthesized)
tttcaccattgagtaaatgttagctgaaaacataatcatcactaaaaaaagttgttagcataattactcactttgattaaaatcagatttataagttttataatattcaacacctatcaa

SEQ ID NO: 1004915 - DNA, 120 bp, Artificial Sequence
  ENSG00000247199_79 (sequence is synthesized)
atataatattagcttatttggatagtaaacccaagtagaataaaatgtatgtctccattatacttcatgctgacaactcagtcacatatctgattttatttagccaatactatcaaatgt

SEQ ID NO: 1004916 - DNA, 120 bp, Artificial Sequence
  ENSG00000247199_80 (sequence is synthesized)
cttacttatcaaagatttatacaaattacatacccttgaaaaacatttggattagttactaaatttctgggagttttaaggaagtgcttatttttttctaagcctattagaatagaattc

SEQ ID NO: 1004917 - DNA, 120 bp, Artificial Sequence
  ENSG00000247199_81 (sequence is synthesized)
tttttaagagattgatatagtttggctgtgttcccacccaaatctcatctcgaattgtagctcccataatttcctcatgttgtgggagggaccagtgggagataattgaatcgtggggtt

SEQ ID NO: 1004918 - DNA, 120 bp, Artificial Sequence
  ENSG00000247199_82 (sequence is synthesized)
ggtttccccaaaactgttttcgtggtagtgaataagtctcatgatatctgacggttttataaggggaaatccctttcacttggctctcactctttctctttgcctgctgccatccatgtg

SEQ ID NO: 1004919 - DNA, 120 bp, Artificial Sequence
  ENSG00000268836_0 (sequence is synthesized)
cagggtacttgttcagcacatgtgctttcctcttcgtcttctaggagggagtggttgggtctgggctccctgttcccaagcccacgttgtgttcatggctgtggctgcctgggtgatgag

SEQ ID NO: 1004920 - DNA, 120 bp, Artificial Sequence
  ENSG00000268836_1 (sequence is synthesized)
tgtgagtttgcacctgggtttccctgggccttaagcagacagcgtcaccctcagagccatcaccactgtgaatcatttggatctttttccatctgggcataaaattgtatgtgtagacaa

SEQ ID NO: 1004921 - DNA, 120 bp, Artificial Sequence
  ENSG00000268833_0 (sequence is synthesized)
aaaaagtagacacctgcacaggtgtaggatgactgagcagcagcagaagcaggaaaagtcagcgtccccagatcagctgatacggggttcagcttctacataggggtgaggtgccaggac

SEQ ID NO: 1004922 - DNA, 120 bp, Artificial Sequence
  ENSG00000268833_1 (sequence is synthesized)
ggtgacgggggtcctgtggctctgctgctctggggaacacccctaggatttggagcatctgctatggttgctgcacttcactcgtccgtgggaaagggaccggaaggtgtgggacttcac

SEQ ID NO: 1004923 - DNA, 120 bp, Artificial Sequence
  ENSG00000268833_2 (sequence is synthesized)
tgtacaaagaagtattagacttatttcagcctatggaggacacaggacaaggattgaccagaatctccacttctgagctgcggatgcacaagacaaaaggaagtgaacccatgactggcc

SEQ ID NO: 1004924 - DNA, 120 bp, Artificial Sequence
  ENSG00000268833_3 (sequence is synthesized)
tcagatgcagatgcctaacaacaaacagccccatcacccccggttgaggagaggagggggctgtggctgcagacagacctcatatgtctctaatctgccacctatggcctgtgtgaccct

SEQ ID NO: 1004925 - DNA, 120 bp, Artificial Sequence
  ENSG00000265800_0 (sequence is synthesized)
tatattctgtgtggctgactgctgcaactttagttcatctgtcttaaaatgaaaaggggcacaataatatttttttctttactgagacaggttctcactgttgcctgaaccacgagtgca

SEQ ID NO: 1004926 - DNA, 89 bp, Artificial Sequence
  ENSG00000265800_1 (sequence is synthesized)
gtggcacaatcaccactcactgcagccttgacttccgggttcaagccatcctctcacctcagcttcctgagtagttgggactacagtgt

SEQ ID NO: 1004927 - DNA, 75 bp, Artificial Sequence
  ENSG00000265800_2 (sequence is synthesized)
tgcctggtgggccaggatcacgctactttactccagtctgggcgatggaatgagacacagtctcaaaaaaaaaaa

SEQ ID NO: 1004928 - DNA, 120 bp, Artificial Sequence
  ENSG00000237356_0 (sequence is synthesized)
aggtcatataccagttaaactgccccattttgcctcttagtgtacattgtgagcccactcaaccagttcctgagatactactgggaagctgctgatcaccagtttcaggttttttccatc

SEQ ID NO: 1004929 - DNA, 120 bp, Artificial Sequence
  ENSG00000237356_1 (sequence is synthesized)
tgttgggaaactgcctatcccttgtgctcgctgcaaccaattattattttagggagacagttaaccgcctgaccatcacccgatgatcgcctgatgttcatgcatccatgactacataaa

SEQ ID NO: 1004930 - DNA, 72 bp, Artificial Sequence
  ENSG00000237356_2 (sequence is synthesized)
cataaactttttggccgtttgaccaaatggggacatctggcatactgctatcaaccaatataaaactactgg

SEQ ID NO: 1004931 - DNA, 120 bp, Artificial Sequence
  ENSG00000237356_3 (sequence is synthesized)
ccaactcagttcacagatcttcaactccagagaactgagtttaaggagctgtacctgggaaattgtgcctgaagctgttcctgaggaatctgcacctggatctaatgtacatgctgagat

SEQ ID NO: 1004932 - DNA, 120 bp, Artificial Sequence
  ENSG00000237356_4 (sequence is synthesized)
ccaaatggggacatctggcatactgctatcaaccaatatgccctgtgttagatgctgcacaaagatgaataagtgtgaacagctgtcaactattccaaagttgtagctgctacagctgct

SEQ ID NO: 1004933 - DNA, 120 bp, Artificial Sequence
  ENSG00000237356_5 (sequence is synthesized)
ataaaaggcagcgagtctgaggctgccccaggaatcaggaggtgttgtataagaggagaacttagctctgaatggactagtatacctgatcaccagcagcagttaaaagaagtgactttc

SEQ ID NO: 1004934 - DNA, 120 bp, Artificial Sequence
  ENSG00000237356_6 (sequence is synthesized)
tttgagctgatgccatagtgggatgagactttgccgtcttgggtgtgggatgaatatattttgcactgggaaggatgtgaagtattgtggttaaaaggtggactgtagttcattgcattt

SEQ ID NO: 1004935 - DNA, 120 bp, Artificial Sequence
  ENSG00000237356_7 (sequence is synthesized)
ttcaacaatggccacaacagcatctcttatcctatgtgctcttcttccaatgtgactgtgtcctctctcattaagatgcggagtctatttctccactctctcaaatctggtggaccctgg

SEQ ID NO: 1004936 - DNA, 120 bp, Artificial Sequence
  ENSG00000237356_8 (sequence is synthesized)
gacttctaccaacagagtacagtggaaatgatgctgggccacttcccggtttggtctttaactagtctggcagcttctcctttctgcttcttggaagccagtaagaagtacaactatcct

SEQ ID NO: 1004937 - DNA, 120 bp, Artificial Sequence
  ENSG00000237356_9 (sequence is synthesized)
gaggcttctgctgtgagaagcccaagccatgggagaggctctggagaatgagacttcactgggagagtgaagagaggagcgaagagaaagagagaggcaccaaggatcactgagttgcca

SEQ ID NO: 1004938 - DNA, 120 bp, Artificial Sequence
  ENSG00000237356_10 (sequence is synthesized)
gaacatgaatgctaaggccatattggaaatggattctcctgcttcagctgccccagctgatgccaccaggatcagagatgatctggccagctgagcccttccttaattctaacccataaa

SEQ ID NO: 1004939 - DNA, 120 bp, Artificial Sequence
  ENSG00000237356_11 (sequence is synthesized)
attgtgtgcgaaacaaaatggttgttttcaaccactaagttttggggtaggttttatgcagcagcagataatggaaatactgcttggttttgactttcaaaaaaatccatttgttttcag

SEQ ID NO: 1004940 - DNA, 120 bp, Artificial Sequence
  ENSG00000237356_12 (sequence is synthesized)
gggctgaagggctccttgagcatggccagagtggacgccaaggctgaggaggcgccgagagccagtgagggctgctagcatgttgtcacctctcaatacatgcggagtttcgctcttgtt

SEQ ID NO: 1004941 - DNA, 120 bp, Artificial Sequence
  ENSG00000237356_13 (sequence is synthesized)
ctctgtggcagcttggacttgaagtagggtgcacccggaattgaccaatacaaacagtggactgcactggattcttcttgtgccctgtctcatatcctcttgtcccaccttttcataaca

SEQ ID NO: 1004942 - DNA, 120 bp, Artificial Sequence
  ENSG00000237356_14 (sequence is synthesized)
gccattgccatgggaaccagctgcatccaggctagagcaaaaggaggtacaaaaccaaatgctaagaagctgctgcatttactgagataaccgtcttcagctaatgtgaagcacctacaa

SEQ ID NO: 1004943 - DNA, 120 bp, Artificial Sequence
  ENSG00000237356_15 (sequence is synthesized)
gaaaatctcagttgtttctaaaccaagaactttgcaaggattccaaagccactcagggcttgttcattaaattcacccaagctcgttcaccaggagaccatagggtgcccgtgaggtaca

SEQ ID NO: 1004944 - DNA, 120 bp, Artificial Sequence
  ENSG00000237356_16 (sequence is synthesized)
gttatttgatctgaatcacctaacagacagaagattggcaaaagactctacttatctagaacctactccagatgctacacctaaatgagccatgtgattgtagtctgcattcttgtggag

SEQ ID NO: 1004945 - DNA, 120 bp, Artificial Sequence
  ENSG00000237356_17 (sequence is synthesized)
caaaagaacagatgtgcaagggttatgagaacagagaataacgagaaattgattttacatcagaagaatcaaggcggcttgatgaagacaggagctgaggcttgatgtgtgcatgccatt

SEQ ID NO: 1004946 - DNA, 120 bp, Artificial Sequence
  ENSG00000237356_18 (sequence is synthesized)
tgatggattagtcttactgtgtatatcacaatcaacaatcaaaaaataatcccagaagcttggtactcaactccagaaacctgaagacttatgtgaaggtattatctttactgtaggttt

SEQ ID NO: 1004947 - DNA, 120 bp, Artificial Sequence
  ENSG00000237356_19 (sequence is synthesized)
tcttaaattgctggagctgaaggtttcacataattcttcaagcataactttctggaactcctgtttagacacataaatttctcttctaaatcttccattcacagtaactacaaaaaaaaa

SEQ ID NO: 1004948 - DNA, 120 bp, Artificial Sequence
  ENSG00000237356_20 (sequence is synthesized)
tggtagggggtggggagggtgctgcctcctgccctgctcatatctgcctgactacctagtgtaacaaactgagctaaaagtcatttttagctacagccttttttttttgagacagagttg

SEQ ID NO: 1004949 - DNA, 120 bp, Artificial Sequence
  ENSG00000237356_21 (sequence is synthesized)
ttacaagcatgagccaccgcgcccagcctatagccttttataattgtttttccaacccccaaatcagcatccatgactacataaactttttggccgtttgaccaaatggggacatctggc

SEQ ID NO: 1004950 - DNA, 120 bp, Artificial Sequence
  ENSG00000237356_22 (sequence is synthesized)
ggacttagttctttgtccagataaatgtgtttttcccactgctagcttaggttttatttttttcacgtctgctaagtcagtagtccatttgcttttcagcttccaaaacttaattattct

SEQ ID NO: 1004951 - DNA, 120 bp, Artificial Sequence
  ENSG00000237356_23 (sequence is synthesized)
aattttccttattgttctcttccttgtggatttatgcattttatttgctcctttctgtaatttttgtggtatttggcaaacagtgaaggtaaatatacacattcaatctgccacatttaa

SEQ ID NO: 1004952 - DNA, 120 bp, Artificial Sequence
  ENSG00000237356_24 (sequence is synthesized)
ccacaagcagagggagctggcttcagcctcagccagcacagagaggggcccccatagcgcagtggcgggctgaagggctccttgagcatggccagagtggacgccaaggctgaggaggcg

SEQ ID NO: 1004953 - DNA, 120 bp, Artificial Sequence
  ENSG00000237356_25 (sequence is synthesized)
atgggaaccagctgcatccaggtacgacctgacagcaccctgcttcactgtcatggtgctcctgcagcattctggttagccatcatgttgcacacacagacctggaagggtcagggagtt

SEQ ID NO: 1004954 - DNA, 120 bp, Artificial Sequence
  ENSG00000237356_26 (sequence is synthesized)
gcccatggcaactcttggccaccaagggaaaggactagctcgatagcacactcttgccttgcgtttccctatttttcttctcttagttgttcataccttgtttcacatccccatataagc

SEQ ID NO: 1004955 - DNA, 120 bp, Artificial Sequence
  ENSG00000237356_27 (sequence is synthesized)
catctgtacccaagtccttgtttcatcttccatttcaggaaataccaggttaatacagaaacgcaaactacaacaaataaacattcacattttaaagtcaggcaacaaaactttatgcct

SEQ ID NO: 1004956 - DNA, 120 bp, Artificial Sequence
  ENSG00000237356_28 (sequence is synthesized)
ttcagagcataatgctttctgacttcaaaatataagacttcatgcttggcccttctttattaagaacttacttaaatcagcatatctttgcatgggacttcaaatcctttcatttaaggc

SEQ ID NO: 1004957 - DNA, 120 bp, Artificial Sequence
  ENSG00000237356_29 (sequence is synthesized)
aagttttacagccaatattaacgttggtgtaccagtaccctgttcttaaactggctaaagcagcctcaaaattcccaaagggaataatgaaaattcctaacatccttggcaggaaaacag

SEQ ID NO: 1004958 - DNA, 120 bp, Artificial Sequence
  ENSG00000237356_30 (sequence is synthesized)
gaagtttaaatcaagctaattgttttggctaatatgtttttaataaaataaatattaaattaataataaaaaagatttcaagctatttacaaagagaaaggaagggaggggttgcagaat

SEQ ID NO: 1004959 - DNA, 120 bp, Artificial Sequence
  ENSG00000237356_31 (sequence is synthesized)
gcccaactataagaaatgttgcttggaaactactcaagaagatgcatttttgagagccaggaactctgctctccttcattctgcaagaaagggataatgcttctattcaagacttctctg

SEQ ID NO: 1004960 - DNA, 120 bp, Artificial Sequence
  ENSG00000237356_32 (sequence is synthesized)
aaaagcctccaaccgtcagggggctgtggacaaaatatatttttagttttagcttgcatactgaaatagtttttaattttttcaaattttgaagtgatttttaaatagcttaagagcttg

SEQ ID NO: 1004961 - DNA, 120 bp, Artificial Sequence
  ENSG00000237356_33 (sequence is synthesized)
cagttattgttaacatttaaaggtgctatattccaggtattgggctatgagctttataagtattatttaatttagtttgcttttcacagcaactctaagaggtaggcattgttattatct

SEQ ID NO: 1004962 - DNA, 120 bp, Artificial Sequence
  ENSG00000237356_34 (sequence is synthesized)
ctggctcatagatggagacactggacttcacagagttaaacataagttgccctgacccatacagctgttaagtagagaggctgaagatggaatgaaagccaggtctggcaactacaaagc

SEQ ID NO: 1004963 - DNA, 120 bp, Artificial Sequence
  ENSG00000237356_35 (sequence is synthesized)
tcaggcccttgaattctaaccttaaccacttgcaatttaaaatgtctgaaagaagaaatataaactaattttaaaatacgtgatgagaaaattttcctgttgctgaaggaaaacctggta

SEQ ID NO: 1004964 - DNA, 120 bp, Artificial Sequence
  ENSG00000237356_36 (sequence is synthesized)
tgtggattgaagtagttcacattctataagaagcaacataaggaacaggcaccaacacctaggcataacctggagatgtaagacgtgtaaggacaaaggtgggacacccagattgcttaa

SEQ ID NO: 1004965 - DNA, 120 bp, Artificial Sequence
  ENSG00000237356_37 (sequence is synthesized)
aaggaaaagcactcgggctaggtctaatatctgtcagttcctgtgggccttagttcctgctattttctcttcctgtaactctccctcctgtcacatgccacctgattctcttggcttgat

SEQ ID NO: 1004966 - DNA, 120 bp, Artificial Sequence
  ENSG00000237356_38 (sequence is synthesized)
gaactcttgttcattttcccaaaattccaaggggatcttcctgattccatataccagttaagtgtcttctgtgcatttttctgtatcaccctctactaaccctctgctggcactcaccac

SEQ ID NO: 1004967 - DNA, 120 bp, Artificial Sequence
  ENSG00000237356_39 (sequence is synthesized)
cagggactgcagtaaataccttaaaaacacaacctcattccaaccacaagaatccaatcagagagagggaccgcagagaaagcccagggaagagccaaggcccttgagagaaggagctgg

SEQ ID NO: 1004968 - DNA, 120 bp, Artificial Sequence
  ENSG00000237356_40 (sequence is synthesized)
atcccagaatctatggaattgaaggagagtcccacagaagttaccttctgagcacgcaatggactttgtgtaagcagaagaataaacttttaccatgaatcggagaatgccatttgctga

SEQ ID NO: 1004969 - DNA, 120 bp, Artificial Sequence
  ENSG00000237356_41 (sequence is synthesized)
ataatggaactcatctcatgttttaaaatcctatgtgcatataaggttgtgtgcggatacaaggttatttttttcattgaagtacctccaacctaaagctcagaaacaggtgtgatatag

SEQ ID NO: 1004970 - DNA, 120 bp, Artificial Sequence
  ENSG00000237356_42 (sequence is synthesized)
tttgctctattgggttaatactaatggaagtctttacaaaatgttaaatacaattttttaagataaatacaaaaatgacatatgcttatgtcaaaatgacaagtacttaaatttcaaatt

SEQ ID NO: 1004971 - DNA, 120 bp, Artificial Sequence
  ENSG00000237356_43 (sequence is synthesized)
ttcacaggaaataaaatatagataaatatgctttgggaaggtatttcaaatactgtattatgtcaactgatttaatggcttactgaatgagtcacttgaacacagttctaaagcatgtta

SEQ ID NO: 1004972 - DNA, 120 bp, Artificial Sequence
  ENSG00000237356_44 (sequence is synthesized)
attctgttctagaagttcaaaatatgtttttagaatgtataattttgattattttactgtatacccaaatattaaaatattctgagctgcatgtgaacaataaaaagtcatttcacaaaa

SEQ ID NO: 1004973 - DNA, 120 bp, Artificial Sequence
  ENSG00000237356_45 (sequence is synthesized)
gattcagaaagactctgaaacctccattctctcccttctactgggcatctatttcctggatgaccttaagacaaagatggcagaaccttcaaagtcttggaccctgaatgactgcctgga

SEQ ID NO: 1004974 - DNA, 120 bp, Artificial Sequence
  ENSG00000237356_46 (sequence is synthesized)
gtagaagctccactctactctcatgttaggaattgacatgagcaagtaacacattttattatggtaagccaggtatttagggagttatcttacagctgttgttactacaactaatataga

SEQ ID NO: 1004975 - DNA, 120 bp, Artificial Sequence
  ENSG00000237356_47 (sequence is synthesized)
aattggtgctttgaaatggtaactactacaatgagtaaggcattaaactacttttatacatataatcttttaaactaaaagaacaaaaaagaatttatttaaatagaagcattaacatag

SEQ ID NO: 1004976 - DNA, 120 bp, Artificial Sequence
  ENSG00000237356_48 (sequence is synthesized)
ctgagatagaaaattaatatgtacacaggaagaaaacaaacctacaaatgcaaattgcctgaaatgattcataatttatgttaatagaaagcaattaataaaaattatttatcacaataa

SEQ ID NO: 1004977 - DNA, 120 bp, Artificial Sequence
  ENSG00000237356_49 (sequence is synthesized)
actttagagggatcaagaatagcttgctggatggaaggaggtcatctttaggagctggcatgaattgctgtgtttcagaacagtccacgcagaggaatgaggagaagaggattcatccat

SEQ ID NO: 1004978 - DNA, 120 bp, Artificial Sequence
  ENSG00000237356_50 (sequence is synthesized)
tagcttccatctcccattggtgaaagcttgccctgcaactcctccacacttctgggttgtatgacctgtcctgctacagccactatggaaatctgaacccatgttagtagccacctcctc

SEQ ID NO: 1004979 - DNA, 120 bp, Artificial Sequence
  ENSG00000237356_51 (sequence is synthesized)
agcatgacctgcagcttatggggcatgcagtaagtaggagcaagccaagcgccctgcgggctagacctctggcacactgcagaaccagcatgaaccagggcaggtagtgaacaccgagag

SEQ ID NO: 1004980 - DNA, 120 bp, Artificial Sequence
  ENSG00000237356_52 (sequence is synthesized)
cagagcctttggcaagaggcaggaggctctaggcatgaggtgttttcggtcatagccacacattacctcagattccaggagcagctgctgcagcagacccagctagcccagcctgcagat

SEQ ID NO: 1004981 - DNA, 120 bp, Artificial Sequence
  ENSG00000237356_53 (sequence is synthesized)
tgtcaccatgaagacagagatgatccttcctccagtgaagagcaaaacttctttgtggcctatatgactgcttggtgctgggcaagcttcctgaagagtcatcagcagctggagaccatg

SEQ ID NO: 1004982 - DNA, 120 bp, Artificial Sequence
  ENSG00000237356_54 (sequence is synthesized)
gctgagtaaatccagggtgggggcagggcataagctgggtccagtgcattatccatcctttctagatcttggcttctttttgaataatgagcagtagcaattgctatttcctcttcttcg

SEQ ID NO: 1004983 - DNA, 120 bp, Artificial Sequence
  ENSG00000237356_55 (sequence is synthesized)
ccattccaagcttccctctacaacatcctctctttccagctgtgtagcaggcgcagctctaagcccatgtgcttggggtctcttacccttggaattgcctcctttgccgggctttctaag

SEQ ID NO: 1004984 - DNA, 120 bp, Artificial Sequence
  ENSG00000237356_56 (sequence is synthesized)
ttgtcttactgctagttttcaaggatcttaaaaatccatcctcttgtatgaaggcttctctggctgaatgggcattattctggcgtattcctcaccttccaaataaaatctatgagcatg

SEQ ID NO: 1004985 - DNA, 120 bp, Artificial Sequence
  ENSG00000237356_57 (sequence is synthesized)
gagagctgactttagagggatcaagaatagcttgctggatggaaggaggggaagaacctagagcaccttgtgaaactgacattgaggaaatggcatggtaaaacagtaaaaaaaaatttc

SEQ ID NO: 1004986 - DNA, 120 bp, Artificial Sequence
  ENSG00000237356_58 (sequence is synthesized)
ttgttacatggagtgagctgcttcatcaagcttctgttgaaggcaatcctactggaacttttagtcaaatggaattttttaaaaatctcattttaaggtttcctggcacttgtaactgaa

SEQ ID NO: 1004987 - DNA, 120 bp, Artificial Sequence
  ENSG00000237356_59 (sequence is synthesized)
tatctcatacaaggattgcattgatgcatgtagtgttcagtagcatgactgaccagagtggaagttcctggaaattgtagctatcatcatgatgatgatggtgattatgattgttaaaga

SEQ ID NO: 1004988 - DNA, 120 bp, Artificial Sequence
  ENSG00000237356_60 (sequence is synthesized)
ctgggttaggaaatgattttgtaaatacaatgagaagaagagctttaaaatttgcctaaatttccccacttaatattaaaaaggaggtgtgctattaaattttaggtttttctcaaactc

SEQ ID NO: 1004989 - DNA, 120 bp, Artificial Sequence
  ENSG00000237356_61 (sequence is synthesized)
tcacagctatttttgtgggtttttagtgtatttcgagcccccttttccttcatctctattactttatgataatgtgaaggctcattgttatgtgaacgcactgttatgaaacaatactct

SEQ ID NO: 1004990 - DNA, 120 bp, Artificial Sequence
  ENSG00000237356_62 (sequence is synthesized)
cagacataagcagctttccttaaaccaaatcaaaaatactatttctattgcccatgattttcagaggacttcagaggaccctgaagcatggggtgctgtgaatgccactaactaacttca

SEQ ID NO: 1004991 - DNA, 120 bp, Artificial Sequence
  ENSG00000237356_63 (sequence is synthesized)
taacttcattaatcacacttataatgtaaagggagaattttctactttctataaataatctaaaatttaaaagtttgtcaactaaaacatttgtaaaatttgtattgataaagtcctaca

SEQ ID NO: 1004992 - DNA, 120 bp, Artificial Sequence
  ENSG00000237356_64 (sequence is synthesized)
cgtttgaccaaatggggacatctggcatactgctatcaaccaatatgtagttgaaaattaagctcagggtctgagttctgggatgttcaccagtaccaaggagtcagaatggaggtgttg

SEQ ID NO: 1004993 - DNA, 70 bp, Artificial Sequence
  ENSG00000237356_65 (sequence is synthesized)
acacggggaggcggctgaggcccagcaagaattcaagctccgcgggggcaggccagcacccctcactgcc

SEQ ID NO: 1004994 - DNA, 120 bp, Artificial Sequence
  ENSG00000237356_66 (sequence is synthesized)
accagctgcatccagatcacatccaggggccaaaaccagttctgtgagccactggatgaagacattgaccaactagaaagcatctgcagaggtcaagtaggaccatgggagatccagatt

SEQ ID NO: 1004995 - DNA, 120 bp, Artificial Sequence
  ENSG00000237356_67 (sequence is synthesized)
ccatttaaacaagaatgccttaaagaagtgggaatatttagcctgagtgagagaaaatgctcttactctgtgtgtgatcagaggaggagaaaggaggacaaagttacatcaatgtgatca

SEQ ID NO: 1004996 - DNA, 120 bp, Artificial Sequence
  ENSG00000237356_68 (sequence is synthesized)
gcaaccatttgatagagctactgtgctcaagaggggacagtttgatttatacgtttgacaaggtggagccaggatcaatgagtgaacattaaaggaaagaatatttgggctcaatatttg

SEQ ID NO: 1004997 - DNA, 120 bp, Artificial Sequence
  ENSG00000237356_69 (sequence is synthesized)
ggctcaatattttgggctcaataatttgggctcaataaggaggactttcccaataattacaacgttccaaacttgaaatggggtgtctcaaaaaggagtgagtgccctgttactgaaaac

SEQ ID NO: 1004998 - DNA, 120 bp, Artificial Sequence
  ENSG00000237356_70 (sequence is synthesized)
tgcaccagtcatgtagattctaagagacactgagagcaaagagaaacacttcctccctcaaagagctcagggtttcaagagactgacatgtaaacaaactgataataatggcaatttggt

SEQ ID NO: 1004999 - DNA, 120 bp, Artificial Sequence
  ENSG00000237356_71 (sequence is synthesized)
ataacatatgcaatttggagtaacgtgtgcaaaggaacatgggccaaattttaactactagagagagaaaagctgatgctctgctaggggtaggaggaggctgagaatgaaactagagag

SEQ ID NO: 1005000 - DNA, 120 bp, Artificial Sequence
  ENSG00000237356_72 (sequence is synthesized)
gattttagggagaaggtaatgttgagcagatttgaaggatatgtaggagttttttgtggacactattgttcaattaatgctggtcaataaggagaacactcaggataagtggggcagggg

SEQ ID NO: 1005001 - DNA, 120 bp, Artificial Sequence
  ENSG00000237356_73 (sequence is synthesized)
ttgggggttgcaaaagacatggaggtagaaacagcatggcttatcaaggacccaactggtttgaaagatcttcagcataaggtggtgggaaagggaagagaggggaagtggcaggagatc

SEQ ID NO: 1005002 - DNA, 120 bp, Artificial Sequence
  ENSG00000237356_74 (sequence is synthesized)
aagaagatgggagagcaagaaagagaatgcctttgatcttgaacagaagggcttccctcatggagatgagaggaaatgcatagcaatgtggagagagtaagggctggtcagtaagattaa

SEQ ID NO: 1005003 - DNA, 120 bp, Artificial Sequence
  ENSG00000237356_75 (sequence is synthesized)
catggctggtgacaacatatttctcagtgaataactgatcaacataagacgaatgaagttgtgtaggggtctcatggagactgtcctaaagacttagcataattgtgggcaatgtgaagg

SEQ ID NO: 1005004 - DNA, 120 bp, Artificial Sequence
  ENSG00000237356_76 (sequence is synthesized)
aaaggcaaaataattgatagatagcatcaagtaccgaaagggaaaatattaaaatttgtagcgtcagtccacacaggcctctgattttctttaagagcactcagatgtgtagggggtcag

SEQ ID NO: 1005005 - DNA, 120 bp, Artificial Sequence
  ENSG00000237356_77 (sequence is synthesized)
aggagatgggctctaaggtcttttctaagttcaagattcccaaactccatgccttgccattattccctcttgggcatatgggatattttgtaatggcttttaaaaaatatataccatata

SEQ ID NO: 1005006 - DNA, 120 bp, Artificial Sequence
  ENSG00000237356_78 (sequence is synthesized)
attgccaaggaaaattgtctaattaaatgatttttagtatattcacagaattgtgttagtatcatcctaatcaattttggaaaattactcccaaaaaaaatcctgtacaggcatacctca

SEQ ID NO: 1005007 - DNA, 120 bp, Artificial Sequence
  ENSG00000237356_79 (sequence is synthesized)
atttattgtgcttcactttaccgtgtttcacagatactgcgtttttttccaaattgaaggtttgtggcaacccagtgttgagcaagtctattggtgccattttgctaatagtatgtgctc

SEQ ID NO: 1005008 - DNA, 120 bp, Artificial Sequence
  ENSG00000237356_80 (sequence is synthesized)
acttcgtgtctctgtcacgttttggtaattcttgcaatatttctaacattttcattattgttatgttatggtgttgtgatcagtgatctttgatattgttattgtgattgttttgggaca

SEQ ID NO: 1005009 - DNA, 120 bp, Artificial Sequence
  ENSG00000237356_81 (sequence is synthesized)
gctgacaaatttctgaaggataactaagctttcagaaagaaagattctagctataaatgaagcatgtgtgctctctcagtcacaaaagacagatttttccaggataaagtaatttggggt

SEQ ID NO: 1005010 - DNA, 120 bp, Artificial Sequence
  ENSG00000237356_82 (sequence is synthesized)
aaatttctcctgtattttattagcagtgatgatttcaagggagtattcttttaaagcaaggcagtatttaaatctttcttttaaatcacaagtcccttgagttgatagttataaaactgg

SEQ ID NO: 1005011 - DNA, 120 bp, Artificial Sequence
  ENSG00000237356_83 (sequence is synthesized)
gttccactgggagttatttgtacatcttcaaggttggcacccttagttgtttgatgtagatgttctagataaaattcctaaagtccagctgttatgatttagcttaatatgtttgtacag

SEQ ID NO: 1005012 - DNA, 120 bp, Artificial Sequence
  ENSG00000237356_84 (sequence is synthesized)
aggggtttcctttgtcattgaagagatagagtcaaaacagaattagtcattcttgcatcttctatttatagcccactattattctgatgcattgtcaaagaatgaagtggacaagaattt

SEQ ID NO: 1005013 - DNA, 120 bp, Artificial Sequence
  ENSG00000237356_85 (sequence is synthesized)
ttcttcctttctttcttttttttgtgtaaacaaaactctttttatactctgtggatttaactttggttgctaacttagtcagacaaggcacttaacaaaaatattacttcttaaatgaaa

SEQ ID NO: 1005014 - DNA, 120 bp, Artificial Sequence
  ENSG00000237356_86 (sequence is synthesized)
tgacttacactgaagtggcaagggtagaaaaggtcagtttgaaaatttatttgtatgggttgctcatgactaatagtccaaatctggagagtttataaacaaaattctattctgtttatt

SEQ ID NO: 1005015 - DNA, 120 bp, Artificial Sequence
  ENSG00000237356_87 (sequence is synthesized)
tagtttatgccagcattaaagctagcctgaaaatttagtgaaagtcatttaaggaatttttatttggaggaaactttaatttttatttttgaggtcactgaataaatgtagaggtctctg

SEQ ID NO: 1005016 - DNA, 120 bp, Artificial Sequence
  ENSG00000237356_88 (sequence is synthesized)
aagaatagcttgctggatggaaggaggtgtaccgttcaatgagtcttggccagtgaataccatcatgtaaccaccatcacgatcaagatggcagggtgcttccatccccccaggaagttc

SEQ ID NO: 1005017 - DNA, 120 bp, Artificial Sequence
  ENSG00000237356_89 (sequence is synthesized)
tctcctgcccccttgtagctagtgtcctccttctaccctcagcccatggcaaccactaatttgttatccttccctatagttcttccttttccaaaataaatcttacgtaaataaaaccat

SEQ ID NO: 1005018 - DNA, 120 bp, Artificial Sequence
  ENSG00000237356_90 (sequence is synthesized)
agctctccctcccatactccaattgaagagaccacatgttgacatggtggaaccacctgatagaagcacctgaatcaccactggaagaatagctgttctggagagcccttcaaaacctaa

SEQ ID NO: 1005019 - DNA, 120 bp, Artificial Sequence
  ENSG00000237356_91 (sequence is synthesized)
attggactctgcataagcaagaaatcaattttcaaatgtgcataggaggcaaagaaggagcagaggaagatgagtacttccaatttgagtcaatgtccaggcagatagttataatcattt

SEQ ID NO: 1005020 - DNA, 120 bp, Artificial Sequence
  ENSG00000237356_92 (sequence is synthesized)
tagagatctcttggcttctagaagaacaagtttctggggcctcaggaccactcagaaaagaaaacagatctcctgaatgtcaagaacttgcatttattccaggcataagggtgtcacaga

SEQ ID NO: 1005021 - DNA, 120 bp, Artificial Sequence
  ENSG00000237356_93 (sequence is synthesized)
agtttttttctaatggactgtcgctgacctggccacaagtggccaggaagaaggtcttaaaattcagctacacatgaagaatggatggattccccaggtctggacagaacagtccacgca

SEQ ID NO: 1005022 - DNA, 120 bp, Artificial Sequence
  ENSG00000237356_94 (sequence is synthesized)
ggcattacatcctgctggcctagaggtcttagtttcagagagaagaacacagccaccgggagacacaatgattccattaaactggaactgaagattgccacctggacactttgggcttct

SEQ ID NO: 1005023 - DNA, 120 bp, Artificial Sequence
  ENSG00000237356_95 (sequence is synthesized)
gagaaacctcaggaggcccaaagtttctatctgttcgaagaagaatctggaaatggctctggatgccccatccatatcaattttgcagacccgtctggagctctgttgcagtggaagaag

SEQ ID NO: 1005024 - DNA, 120 bp, Artificial Sequence
  ENSG00000237356_96 (sequence is synthesized)
ctgcataggagaaaggatgaatgagagggctgaacacaagaacacagaagggactgaagcctccacttttccccacctctgcctattgccacagtatctggattaaaactctatgcattg

SEQ ID NO: 1005025 - DNA, 120 bp, Artificial Sequence
  ENSG00000237356_97 (sequence is synthesized)
atgcaggtatagaggtcacatattcagatcaaatacctgactgaggagttagtgaaggcaacactgaggaagaggccatgaagaagaaaagtgatggccgggcgtggtggctcatgcctg

SEQ ID NO: 1005026 - DNA, 120 bp, Artificial Sequence
  ENSG00000237356_98 (sequence is synthesized)
aaaacaaacaaacaaacaaacaacaacaaaaaaagttggggggggggggtggccactgttcctagacttcttctgtggtgaagtggaatattaaaacattttaatatttggtatttaaaa

SEQ ID NO: 1005027 - DNA, 120 bp, Artificial Sequence
  ENSG00000237356_99 (sequence is synthesized)
gagagccagtgagggctgctagcatgttgtcacctctcaatacatctggggcctcttcttcatgaatggcagatgcagcagcagtgtcacagatgcctcccaaaggcaccctctctctgt

SEQ ID NO: 1005028 - DNA, 120 bp, Artificial Sequence
  ENSG00000237356_100 (sequence is synthesized)
gagctgactttagagggatcaagaatagcttgctggatggaaggagcctcacactggaaaattctgcagccattgaaaagttgcacctgtgttgataaagatcattcctggctgtcaaga

SEQ ID NO: 1005029 - DNA, 120 bp, Artificial Sequence
  ENSG00000237356_101 (sequence is synthesized)
agggctaagaagtggtgaagacacttgtatctattccctccctggtgagctggtttacaggggcagagaatggagggcccctttaccaaggctggagcaaaggaggttggagaaaccaca

SEQ ID NO: 1005030 - DNA, 120 bp, Artificial Sequence
  ENSG00000237356_102 (sequence is synthesized)
gctcacttggagttgagtcatggaatgaccattctcgttatgtcatctgacattgttgataaatgttgtcattttctttttatgtgtgttgtcctgtttatgcagcatagcagggatgac

SEQ ID NO: 1005031 - DNA, 120 bp, Artificial Sequence
  ENSG00000237356_103 (sequence is synthesized)
cactgcagagctaaaagactggcatgcaggaaccatgagccttcccctggcatccccaggataggttgacggactcaggggtctggtaggctggccagggcaaatccagggagatgacgt

SEQ ID NO: 1005032 - DNA, 120 bp, Artificial Sequence
  ENSG00000237356_104 (sequence is synthesized)
tttggtgcgtttattgtgataatgtttcctcctgcctatcacctcctcgtttgtctggcaaactgctgttcatccttcaatactgaatgcttggtgggaatataaattagtacaacctct

SEQ ID NO: 1005033 - DNA, 120 bp, Artificial Sequence
  ENSG00000237356_105 (sequence is synthesized)
acggaaaacagtatagagatttcttaaagagctaaaagtagatctactacttgacacagcaatcccactactgagtatctacccaaagtaaaaggagtcattacataaaaaaaaaaaaaa

SEQ ID NO: 1005034 - DNA, 120 bp, Artificial Sequence
  ENSG00000237356_106 (sequence is synthesized)
gagctggagactggagtgcctataagactcttcccgctgctgcttctacttttatatttcacactaaatccatttcagctccagaaaactactggagggtggttccaagatggccaaata

SEQ ID NO: 1005035 - DNA, 120 bp, Artificial Sequence
  ENSG00000237356_107 (sequence is synthesized)
ccttataagtattttttaaaatcttcatttgcacctggaaaatagagctcagagaagttatcagagaagatataattaactccccaagcatgaaacaacttaagaagtggaagaggcaag

SEQ ID NO: 1005036 - DNA, 120 bp, Artificial Sequence
  ENSG00000237357_0 (sequence is synthesized)
atgtaattacaagtgtgctcctggtggtctttaactgaagggcactgactgggtactggtgaagttccccgcaggaactgagtcagaccccatctcagggccctgcagaagataggtgcc

SEQ ID NO: 1005037 - DNA, 120 bp, Artificial Sequence
  ENSG00000237357_1 (sequence is synthesized)
tgctctaaggcgtggaccctcgcgacagccctggcccgtcttgacgggcgagggttactgtacttgtcccaaccgtacagatgagaaagctcagactcagggccagcaaccccggtccca

SEQ ID NO: 1005038 - DNA, 120 bp, Artificial Sequence
  ENSG00000237357_2 (sequence is synthesized)
gcggagcgcccggcacgcgccgacacttcagcaccagtcgcggtggccaccactgtgcgcggagatggctgcgacgcgtgcgcagtctagtgcttttttccagatctcgatcccaaactc

SEQ ID NO: 1005039 - DNA, 120 bp, Artificial Sequence
  ENSG00000237357_3 (sequence is synthesized)
cctcctgccagaatctggacccgaatccacccattgcccattttccgctgccgctggagagaatctctgaggtccccaggacagcctgcctgcacggaagagatgcctcctcagtatggc

SEQ ID NO: 1005040 - DNA, 120 bp, Artificial Sequence
  ENSG00000237357_4 (sequence is synthesized)
cgcccccggagaggagcgattaagtgcagacctccatgttgctcttgagcctgagtggcttcagggagccatgtttgttactggcgggcgccggcctcactgagcatgtgcagccctggc

SEQ ID NO: 1005041 - DNA, 120 bp, Artificial Sequence
  ENSG00000237357_5 (sequence is synthesized)
cgggcggcctcaaagttctgacatcacagggcggttcctgaagtggacgtagttgtaagagctagttattttagacaatgcctctgggatcagggactctaatctggaaataggtagtgg

SEQ ID NO: 1005042 - DNA, 120 bp, Artificial Sequence
  ENSG00000237357_6 (sequence is synthesized)
gagaggtcggtgatgctgtctcggggtcagagacctgagctatatggggttagagaggggccctgggcaggcgagtctctggggagtgtggtgagaatccttgtgtaagatgctgggagg

SEQ ID NO: 1005043 - DNA, 120 bp, Artificial Sequence
  ENSG00000237357_7 (sequence is synthesized)
aggtggggtcagggctggggtccgtgggccgatgggttgggggatggccagcgtcagggatcagtagtagagattctatgtgccctgatcgccagtagaggttttaaatacagagtattc

SEQ ID NO: 1005044 - DNA, 120 bp, Artificial Sequence
  ENSG00000237357_8 (sequence is synthesized)
atgagtttagcaatgttattcgcctctcataatttaaataatttgaagttttcccccagtaactagtgtcttagaagtcatgaaaatttcagaaaatgacaggtcttctgagttcgtgat

SEQ ID NO: 1005045 - DNA, 120 bp, Artificial Sequence
  ENSG00000237357_9 (sequence is synthesized)
gggagttgggcagcagtcgcatacgagcacctggagagtccttgccagttctttggggatggggagctcttaagactgccctgagaccgccctttgacctcattgtggtcctttctagat

SEQ ID NO: 1005046 - DNA, 120 bp, Artificial Sequence
  ENSG00000237357_10 (sequence is synthesized)
atctccaagaatagaggattaggagagactccaccacctatgtcctcacagttaattatcgatttgtgtcacttgcccattttctcacttcctgtttgtgtgtcaaggagtattaataaa

SEQ ID NO: 1005047 - DNA, 120 bp, Artificial Sequence
  ENSG00000237357_11 (sequence is synthesized)
tctttgcctatttaaagatactagccttggattttcaaatattgcatattttgacatgtaaaaatgtgttagttttattttttcaaccgatctgacctgtatagttgggcttgaggaagc

SEQ ID NO: 1005048 - DNA, 120 bp, Artificial Sequence
  ENSG00000237357_12 (sequence is synthesized)
ttcctcattgtacatgttactatggattttttaatattaacacagagttgtattttttccatataaatttctattgaatttctttttccatatgataggtggtgaaggtttagcccagta

SEQ ID NO: 1005049 - DNA, 120 bp, Artificial Sequence
  ENSG00000237357_13 (sequence is synthesized)
aagcagagaggttaagaggttagactgggggctctggagccagacctatgtagatctgagtcctggctctggcacttgaaagccgtgtgaccttggttaagatacttagcccctctctgc

SEQ ID NO: 1005050 - DNA, 120 bp, Artificial Sequence
  ENSG00000237357_14 (sequence is synthesized)
caaatggagaaataagggcacctaccccgtagggtagttgtgtgagtacacaagttaatacacttcaatcactagcaagaaagtgaatgtcaagctgtatttgttcaggcagccatatgg

SEQ ID NO: 1005051 - DNA, 120 bp, Artificial Sequence
  ENSG00000237357_15 (sequence is synthesized)
tagccccacctcattagtaaactgaggtattgaagtatcttctttttctttcagaaaatatttgtcaagcaccttctgtgttctaagaactgttctagagctttgcatgctatggaggtc

SEQ ID NO: 1005052 - DNA, 120 bp, Artificial Sequence
  ENSG00000237357_16 (sequence is synthesized)
tagaaattcacattatggtggcaggtgacagacaatacaaagagataaagcaatttcatatagtgataacctagggaggcgtgctaaaaggagccaaggtgtagtggtgactggaaggtg

SEQ ID NO: 1005053 - DNA, 120 bp, Artificial Sequence
  ENSG00000237357_17 (sequence is synthesized)
accagggaaaccactgtagggtttctaactgatgagatctgtgacaaatccctgtggtcagcagcaggcattggatatgtaactttattctgtcccattgatcttgtagtcaaccctggt

SEQ ID NO: 1005054 - DNA, 120 bp, Artificial Sequence
  ENSG00000237357_18 (sequence is synthesized)
ctgttctgtattgttttaattacataatctttgtaataatctttaatacctggtggagtgctctgtttacttatttctgcataattaaccacccctaagcttaacttactcatggttctg

SEQ ID NO: 1005055 - DNA, 120 bp, Artificial Sequence
  ENSG00000237357_19 (sequence is synthesized)
caggatgactgctctccatggttataggggtttctgcatggggcctctcacatgtgctacagtcaaacattagccggggccacagtcatctgaaactcacttacacggctgacaattgat

SEQ ID NO: 1005056 - DNA, 120 bp, Artificial Sequence
  ENSG00000237357_20 (sequence is synthesized)
gttggctgttgcctggagaagacatatgtggcctggtggaatggaatggtgactagattcaagaaagagcttcccaggagcaaggctaccaagagaccgaagtagaggcttcagtttctt

SEQ ID NO: 1005057 - DNA, 120 bp, Artificial Sequence
  ENSG00000237352_0 (sequence is synthesized)
ggcgggtgatgaatggaaacttcctgacatttcaagcgacaacatctgaaaggaaatggaattttcctgaagcacaggcaggaggtccccgtcacaagctattgatttgcatgtgatctt

SEQ ID NO: 1005058 - DNA, 120 bp, Artificial Sequence
  ENSG00000237352_1 (sequence is synthesized)
tctttttttcactccacctttcccccatcaaatgaggaaggaaagctcaagcagtttactattttgggaaaattgtgccatcgtgcttagtacatagtgtgtatcagacttaagaaaagg

SEQ ID NO: 1005059 - DNA, 120 bp, Artificial Sequence
  ENSG00000237352_2 (sequence is synthesized)
acaagaatgaaactattaaaaaaatttctccaactggcaattaaaagacaatgggaaaactgcttctatgtttaagaaaaaataatttaactcttaattttattgccacttatctacttt

SEQ ID NO: 1005060 - DNA, 120 bp, Artificial Sequence
  ENSG00000237352_3 (sequence is synthesized)
agtggaactggggaataaaacaacaaagattgaagatgtaatggagaaaagagtggaaacaacccaagacagtgatgaaggggaatctcatgaaatcatctgtgttgcaaatctagagag

SEQ ID NO: 1005061 - DNA, 120 bp, Artificial Sequence
  ENSG00000237352_4 (sequence is synthesized)
aaatcatctgtgttgcaaatctagagaggtatgatgtaccacagtggagtaactggatggatggaattcacctaaaaggagatattcagggaaaaacaaaacaaacaaaaaacaaaaaca

SEQ ID NO: 1005062 - DNA, 120 bp, Artificial Sequence
  ENSG00000237352_5 (sequence is synthesized)
aaacgctcaaactattacactaggttatatatatacatatatattttttttctttttctcttcctattttccttttccattttacgtgtttcaaatttacaaataaaaattgtagatatt

SEQ ID NO: 1005063 - DNA, 120 bp, Artificial Sequence
  ENSG00000237352_6 (sequence is synthesized)
gaacaatgcgggagttgcagagagaggtgtcctgtgtttgttcccagtcttccttcactcacctgcacctgctcctgccctgcttcggccaacatgttctatgcagggtggttttgctga

SEQ ID NO: 1005064 - DNA, 120 bp, Artificial Sequence
  ENSG00000237352_7 (sequence is synthesized)
tgagacagctgcagtttggggagtgtgatatcaaggaaagcagtgtcttgagtctgtcactttctctctctgtcccattgggtctactctgtgaaaaggaaatgatcatacataattcat

SEQ ID NO: 1005065 - DNA, 120 bp, Artificial Sequence
  ENSG00000237352_8 (sequence is synthesized)
gcatttgctgtacggatttaattaaatgatagacaaaaagtagagtggcacaagtcaaactcaaaaaatagtaacaacaaaatcaatttcaaaataagcaacagcaataaatgttaccta

SEQ ID NO: 1005066 - DNA, 120 bp, Artificial Sequence
  ENSG00000237352_9 (sequence is synthesized)
ctattttacgaatgaaaatactgagaccaataaaggcattatagtatacatagccttggaatcagaagaccaagaacatacaagagaacatagccttggaatcagaagaccaagaaacaa

SEQ ID NO: 1005067 - DNA, 120 bp, Artificial Sequence
  ENSG00000237352_10 (sequence is synthesized)
tttaactctgcccctctagagctctgagaacttgggcaagccttttaccctctgtgagtttcagtttcctcatttatttaattgaaataataatacagatcacctgaaatgtaatgaaaa

SEQ ID NO: 1005068 - DNA, 120 bp, Artificial Sequence
  ENSG00000237352_11 (sequence is synthesized)
gcatgcctggaatatagtgagtgctcattcggtctcttgtattttctttctataccctacttctgttcccttggattcatatacctgaattggaaacacccaaagtcaaaaagaataaga

SEQ ID NO: 1005069 - DNA, 120 bp, Artificial Sequence
  ENSG00000237352_12 (sequence is synthesized)
aaaatctttagaaatgtagcatattaccaagatctgcaaatttctgcccagagcagatggttctaataaagaaagtcggatcttatgttgagttcttttctgtccaagaatagaagacct

SEQ ID NO: 1005070 - DNA, 120 bp, Artificial Sequence
  ENSG00000237352_13 (sequence is synthesized)
tccctcttctccagtagtgaagaataggattcatcagccttgggggcaaagttaaaaacttgctctagaaagtggcctggatagtcagaaactgcttagactcactccatctgttctata

SEQ ID NO: 1005071 - DNA, 120 bp, Artificial Sequence
  ENSG00000237352_14 (sequence is synthesized)
cacatacacacacctttgtttgtcagtaaaatattcaatgagacttgatagtccaatcctttgaaaccagaataatatttgaaattttgatgattttatctaactgctaatatcacttgc

SEQ ID NO: 1005072 - DNA, 120 bp, Artificial Sequence
  ENSG00000237352_15 (sequence is synthesized)
aggtcatcagtgttttacatccaacaaactaatggtcatttgctgctttataaagagccgatataattttgtcttccttgttattaaaggatcaagcaagggtgtttctgtaccagttca

SEQ ID NO: 1005073 - DNA, 120 bp, Artificial Sequence
  ENSG00000237352_16 (sequence is synthesized)
actttccttatttgcttattagtcagtaatattcaagaaaatcctagttttaaaaaatgtcattacatgttaaactgtggaaagagtcaccatcatttgaataaatcttgagtaagccca

SEQ ID NO: 1005074 - DNA, 120 bp, Artificial Sequence
  ENSG00000237352_17 (sequence is synthesized)
ggcgggtgatgaatggaaacttcctgacatttcaagcgacaacatctgaaaggaaatggaattttcctgaagcacaggcaggaggtccccgtcacaagctattgatttggctggaaatgg

SEQ ID NO: 1005075 - DNA, 120 bp, Artificial Sequence
  ENSG00000237352_18 (sequence is synthesized)
aataagacagtaacccagcctcaaccagagatgaagccaacactgtaggaatggtgcaaaaacaagttggaagtcacatggggtgccctgtggagcagagccaccccactcacctgacta

SEQ ID NO: 1005076 - DNA, 120 bp, Artificial Sequence
  ENSG00000237352_19 (sequence is synthesized)
cattcctctggactattagatgggaaaactggagcccaaaggatggaaatactgaacccatgggctctgtcactagactgcatcccagggcctcaacataatatattcttaatcatactg

SEQ ID NO: 1005077 - DNA, 120 bp, Artificial Sequence
  ENSG00000237352_20 (sequence is synthesized)
cctggaaaagaggccctgctaggagctgaccttggacaaatcactcccttctctgaacctcactgttcagggggctgagaacagagggtccctaaggaagagtgttgtatgagaacagtc

SEQ ID NO: 1005078 - DNA, 120 bp, Artificial Sequence
  ENSG00000237352_21 (sequence is synthesized)
tccgctcttgacccaagcaaacctggcttcaaatctcaactcctgtggctgactagctgtatgaccttgacctttctcagtttcctcatctataaagcaggattaataaaaggagctgtt

SEQ ID NO: 1005079 - DNA, 120 bp, Artificial Sequence
  ENSG00000237352_22 (sequence is synthesized)
ctattcagaggtgggaagaggcagcaccaaagccaggatgccctcattcaattgggaaaggaaggaaccaggagcagaaggaggtaatcactttgaatcaagttaatcagagaaggttaa

SEQ ID NO: 1005080 - DNA, 120 bp, Artificial Sequence
  ENSG00000237352_23 (sequence is synthesized)
ataccataaagaggcgtgagcaactgcaaagctgcttttgctcatgtggtaaaagtacaggggctgaaaatgggcccactgagaacagctcttttctgacagtgcctctggagaaggaat

SEQ ID NO: 1005081 - DNA, 120 bp, Artificial Sequence
  ENSG00000237352_24 (sequence is synthesized)
gggaggggaagtaaaacactaaatctaaggaccactctattcaccctacagtgactgctctttttccctcctgccacagtccagggtaggagatacttctccaggctctcacttatgggg

SEQ ID NO: 1005082 - DNA, 120 bp, Artificial Sequence
  ENSG00000237352_25 (sequence is synthesized)
gctttcctgctggctacatcactgaaatggaatctcctagtggcccttctccctctacagctctggtgttacactgaaaaactagaagtttcaaaacagacaagggaaaaagagaaacat

SEQ ID NO: 1005083 - DNA, 120 bp, Artificial Sequence
  ENSG00000237352_26 (sequence is synthesized)
cagaaagtctgattaaagtagaagcatcatatttctatcaacgtatccactgtgcttgctgctcactgatgtcacttagaggaaggcaggggcacaagatgggaggacccagagctccgg

SEQ ID NO: 1005084 - DNA, 120 bp, Artificial Sequence
  ENSG00000237352_27 (sequence is synthesized)
gttcttaagcagcagagttcatatcaagggcccatgttttaactgaatataatgaattttttttttcaccttggaagagtcttagaggcaagattagaatgttcatctaaaaggagtgca

SEQ ID NO: 1005085 - DNA, 120 bp, Artificial Sequence
  ENSG00000237352_28 (sequence is synthesized)
ttttgccaccttcaatgagaaagactgaaacaaaaaactcagaagaaagaaagagactgagatagcaaatatgacaaactgttaaaaattcatgaatctgttatggaatactatgcagcc

SEQ ID NO: 1005086 - DNA, 71 bp, Artificial Sequence
  ENSG00000237352_29 (sequence is synthesized)
agttgaacaatgagaacacatggacacggcggggtggtgggaacatcacacaccggggcctgtcagagggg

SEQ ID NO: 1005087 - DNA, 120 bp, Artificial Sequence
  ENSG00000237352_30 (sequence is synthesized)
ggtgaatctgggcaaaatgtacacaggatttttctgtactgttcttgcaacttttctacagatttgaaatgttacaaaataaaaggtatttttagaaaaagagtatacagttggaagtga

SEQ ID NO: 1005088 - DNA, 120 bp, Artificial Sequence
  ENSG00000237352_31 (sequence is synthesized)
taacaatgaacagaacaaaggggtgtgtgatccagtccttgctctgttcactgagctctgcccagcggctggttgctttcacacgaggaaaacctttttttctgctctcttggcacaaat

SEQ ID NO: 1005089 - DNA, 120 bp, Artificial Sequence
  ENSG00000237352_32 (sequence is synthesized)
aaatttcatttctctccctgtgtctctaagatgacatctatcaaacctctgattctcttttggttctttacagaaaccccacttgaaattttcaggtaggatggggagaagggcaaacct

SEQ ID NO: 1005090 - DNA, 120 bp, Artificial Sequence
  ENSG00000237352_33 (sequence is synthesized)
acccaagggaatgactactatgacatctgatgagtctcacggtgttgcccaggctgaatacaatcgtgcaatcatgactctctgcagacttgacatcctgggctcatcaagcaatcctcc

SEQ ID NO: 1005091 - DNA, 82 bp, Artificial Sequence
  ENSG00000237352_34 (sequence is synthesized)
cctcccgaatagctgagactacaggcacccaccaccacatcacactctacaaaaaatttctggtggtctcaaactcctgact

SEQ ID NO: 1005092 - DNA, 120 bp, Artificial Sequence
  ENSG00000237352_35 (sequence is synthesized)
tcccaaggtgctgggattacaggtgtgacccaccacacctggccaactgcagggattctttatttgaagatcatggataggtttcaggaaatatgtgaacactctgaaatgtatacccta

SEQ ID NO: 1005093 - DNA, 120 bp, Artificial Sequence
  ENSG00000237352_36 (sequence is synthesized)
ataccctagttctgtttgtgtgagtattaactttgatcagattttcagagaggtctgtgaccaacttcctgcactaaaaaatgtttacaaaccactgctccacaggataaagttcaaacc

SEQ ID NO: 1005094 - DNA, 120 bp, Artificial Sequence
  ENSG00000237352_37 (sequence is synthesized)
tctcagtctaaaggaaatacaaagccattcatgacacagtttttacatacaccatcttcattttggatttctcagccccaattgcttgaacatgtcttgccgtttcttatctccttgcct

SEQ ID NO: 1005095 - DNA, 120 bp, Artificial Sequence
  ENSG00000237352_38 (sequence is synthesized)
ttgctcaagctgtgtcctctgtcttgaagatcctctttttctcattctttccagggatctccctcccttggttaagtcccagttaactagtataacttcattcaagagtttcttcttcca

SEQ ID NO: 1005096 - DNA, 120 bp, Artificial Sequence
  ENSG00000237352_39 (sequence is synthesized)
caaatctcatgttgaattgtgatccccagagttggaggtagacgtggtgggagatggttggatcatgggggtggtttctaatggtttaacactgtctcctagtgttgttttgtgacagag

SEQ ID NO: 1005097 - DNA, 120 bp, Artificial Sequence
  ENSG00000237352_40 (sequence is synthesized)
tttaacactgtctcctagtgttgttttgtgacagagttctcacaagatcttgttgtttgaaagtgtgtaacacctcctacttcgtgcactttctcttttcccttcttcaccatgtgaaga

SEQ ID NO: 1005098 - DNA, 79 bp, Artificial Sequence
  ENSG00000237352_41 (sequence is synthesized)
ttcgtgcactttctcttttcccttcttcaccatgtgaagatgtgcctgcttctccttcaccttctgccataattgaatc

SEQ ID NO: 1005099 - DNA, 120 bp, Artificial Sequence
  ENSG00000237352_42 (sequence is synthesized)
aagcatcatatttctatcaacgtatccactgtgcttggacacaattgcaggcccttgacatcttttgcctggattattgcaacagcctccaaaaggactcgtctgtctccatgatacccc

SEQ ID NO: 1005100 - DNA, 120 bp, Artificial Sequence
  ENSG00000237352_43 (sequence is synthesized)
tccatcctcctctgcatcatcaccaagggaatctttgtaaagcaaaggcatgatcatgcttatcacctggtggaaacccttcagagactctccactccccagagcaggcaccacatcgtt

SEQ ID NO: 1005101 - DNA, 120 bp, Artificial Sequence
  ENSG00000237352_44 (sequence is synthesized)
cagaacaatgcgggagttgcagagagaggtgtcctgtgtttgttcccagtcttccttcactcacctgcacctgctcctgccctgcttcggccaacatgttctatgcagctgctcactgat

SEQ ID NO: 1005102 - DNA, 120 bp, Artificial Sequence
  ENSG00000237352_45 (sequence is synthesized)
atatggaccctcatgaatcagaggaagaacgaggcctggagtcatgaaggggcttaactgaagtcacaaggctcacggcaggaccagtatcaaaatagaccccaatgtgcggcaggctca

SEQ ID NO: 1005103 - DNA, 120 bp, Artificial Sequence
  ENSG00000237352_46 (sequence is synthesized)
cactgtgcttggactctgtaatattcaccggcaggaaaacccaagggaatgactactatgacatctgatgatgaaaaaacaggcacagaaaaattcagggatcacggctaataaatagag

SEQ ID NO: 1005104 - DNA, 120 bp, Artificial Sequence
  ENSG00000237352_47 (sequence is synthesized)
atactgcatcttctcacttacagactgcccctgtttcagcctccaggagagtctgtgacaaggagtgggctccctctgcaaggtgcttggattcctctgaagaaagaaagcaaggaaaca

SEQ ID NO: 1005105 - DNA, 120 bp, Artificial Sequence
  ENSG00000237352_48 (sequence is synthesized)
tgaagtatggtgatggtggcattttcaagggcgggtgatgaatggaaacttcctgacatttcaagcgacaacatctgaaaggaaatggaattttcctgaagcacaggcaggaggtccccg

SEQ ID NO: 1005106 - DNA, 120 bp, Artificial Sequence
  ENSG00000237352_49 (sequence is synthesized)
tcacaagctattgatttggtgtgcacatcttgcatttaatctggtgattaatttggagggaggctgcatgcatgctgtgctttcatttagtgagtttaaaagcccacaacttctgattta

SEQ ID NO: 1005107 - DNA, 120 bp, Artificial Sequence
  ENSG00000237352_50 (sequence is synthesized)
ttttgcttcattcatgaggagctgttttattgcaaagggttgaatgacaggtttcctggcaggctgtaaagacaggtaaaatttaaataaggaacataaaatctttgaagacactctatt

SEQ ID NO: 1005108 - DNA, 120 bp, Artificial Sequence
  ENSG00000237352_51 (sequence is synthesized)
ctctgccctgtgacttcaagaccaccaaaatacaagaagtatgtgtagagctcgaaatatgttcctaaaatattcaaagtattttaataataaattgagaattaacataagcactctcta

SEQ ID NO: 1005109 - DNA, 120 bp, Artificial Sequence
  ENSG00000237352_52 (sequence is synthesized)
atgaggaaacagaagctcattgaaggcaacttgaaggtggatctacatgtccctcccccacattagaccacaagaggctcaaagatagggagaaatgcacactcatgttaaagctgcatt

SEQ ID NO: 1005110 - DNA, 120 bp, Artificial Sequence
  ENSG00000237352_53 (sequence is synthesized)
tgctaggattataggcatgagccactacattcagctactgcttgtatcttctgattcttgttttgataccactgaccttagtttcaaaacagacaagggaaaaagagaaacatcagaaag

SEQ ID NO: 1005111 - DNA, 120 bp, Artificial Sequence
  ENSG00000237352_54 (sequence is synthesized)
aaggttcaagaacccaccaattcaatccccatagatcaacctcttgaatacagagcagatgaggaaaggtaatgtatggatctagaggggcaaatgaaaggtattctgcatggaccgtga

SEQ ID NO: 1005112 - DNA, 120 bp, Artificial Sequence
  ENSG00000237352_55 (sequence is synthesized)
tatagtgtggatgtgtgtccctacccaaatttcacgttgaaatgtatcccctatgttggaggtggggcctggttggaggtgactggatcatgggggtggatttatcataaatgatttagt

SEQ ID NO: 1005113 - DNA, 120 bp, Artificial Sequence
  ENSG00000237352_56 (sequence is synthesized)
accatacccttagttctgtcctcatgatagtgagttttcgcatcttgtgagagatgtcatttaaaagtgtgtggcatgctccccactccctctcttgctcctgttctggctatgtgttgt

SEQ ID NO: 1005114 - DNA, 120 bp, Artificial Sequence
  ENSG00000237352_57 (sequence is synthesized)
aagccaagtagatgccagcatcatactctctttacagcctatggaatcgtgaaccagttaaacctcttttctgtataaattacccatccacaggcatttctttacagcaatgtgagaatg

SEQ ID NO: 1005115 - DNA, 120 bp, Artificial Sequence
  ENSG00000237352_58 (sequence is synthesized)
gcctaatatggactggaaggatatgcagacttttcctggaaagcagagttgaggaaggacatcccatcgagggaaagaatgtgcaatctttttgtgtggaacgctcagaacattctaagt

SEQ ID NO: 1005116 - DNA, 120 bp, Artificial Sequence
  ENSG00000237352_59 (sequence is synthesized)
actttggcatagcaaaggcatagggaatgagagacagcatggtaggaaataaaaatgtgttcagagagtggcaggggctggctcatggacagctaaggcagggagcactattctgcaggc

SEQ ID NO: 1005117 - DNA, 120 bp, Artificial Sequence
  ENSG00000237352_60 (sequence is synthesized)
acaggggaccatgaagggcagttaagtatggacttcctatgactgcagagtgggtaacgattcgaggaaagggaaggggtctagaggcaggggtctccttgggaggcactgcaaccatcc

SEQ ID NO: 1005118 - DNA, 120 bp, Artificial Sequence
  ENSG00000237352_61 (sequence is synthesized)
tacagagatgagggtgagggtcggaagaagcagaagcctaccctctcttaagcaagatgaagacaaacgagacccgtggactccatggaggctggatctacatcaccatagtgccattgc

SEQ ID NO: 1005119 - DNA, 120 bp, Artificial Sequence
  ENSG00000237352_62 (sequence is synthesized)
cttccttcaagggcaagtgaggaacagtcttccttcactcacctgcacctgctcctgccctgcttcggccaacatgttctatgcagaaaccccacttgaaattttcagggtggttttgct

SEQ ID NO: 1005120 - DNA, 120 bp, Artificial Sequence
  ENSG00000237352_63 (sequence is synthesized)
tcacttagaggaaggcaggggcacaagatgggaggacccagagctccgggttcttaagaaatcttctccaagggcaactctgagtggtgaagacaggatggagtcagttgactctagacc

SEQ ID NO: 1005121 - DNA, 120 bp, Artificial Sequence
  ENSG00000237352_64 (sequence is synthesized)
ttgtcccagtctactactttctactatgacctccagcagggctgggagctacacaggccagggactttgttttcttccccgtctttcctcagggcccatcacagaaatgcctttaggccc

SEQ ID NO: 1005122 - DNA, 120 bp, Artificial Sequence
  ENSG00000237352_65 (sequence is synthesized)
gaagcatcatatttctatcaacgtatccactgtgcttgagatggagtctcactacattacccaggctggtctcgaactcctgaacttgagctatcctcctgccttgggctcccaaggcgc

SEQ ID NO: 1005123 - DNA, 120 bp, Artificial Sequence
  ENSG00000237352_66 (sequence is synthesized)
acagacaagggaaaaagagaaacatcagaaagtctgattaaagtagaagcatcatatttctatcaacgtatccactgtgcttggcaggggatgggcccttctgctgcagcataagagggg

SEQ ID NO: 1005124 - DNA, 120 bp, Artificial Sequence
  ENSG00000272529_0 (sequence is synthesized)
ccccaccaaaacctctaataaggcacacagctctgctgacatcccatttcagtgttttgagaccctaagcagcagacgacccagttcagcccacctggatttctggcccacagaaactca

SEQ ID NO: 1005125 - DNA, 120 bp, Artificial Sequence
  ENSG00000272529_1 (sequence is synthesized)
agaatcaaaattcactttgccccatgatcttcaccagaacggcatacttgcctctcccctcgtcagattgaaaaggttcctatgatttagggtcttccagcacccctcaggaagcttgac

SEQ ID NO: 1005126 - DNA, 120 bp, Artificial Sequence
  ENSG00000272529_2 (sequence is synthesized)
tcccttgactaaatggaatcaatccttcctgcctgaatttcatccattcatcatgctctcacagtggctgacacacagtaggaactcaatatttatttgttggataaatttttaaaaaga

SEQ ID NO: 1005127 - DNA, 120 bp, Artificial Sequence
  ENSG00000272529_3 (sequence is synthesized)
tataacttacttgtatcactaaattttgtatatgaagtgaaatatggctgtctgagaaaataggacaattgagtttatggaagaaaaaagtgcagataaagattaaaggtcaaatacttc

SEQ ID NO: 1005128 - DNA, 120 bp, Artificial Sequence
  ENSG00000272525_0 (sequence is synthesized)
gtaggccctacgagagactgctggcttggggcgcagcccgtacctctgggagaggccacaaaggggtcggagagcgcggtcctgtgcacagttagggttaagtccgctcagtctccattg

SEQ ID NO: 1005129 - DNA, 120 bp, Artificial Sequence
  ENSG00000272525_1 (sequence is synthesized)
ggccctgatcctgaagttctgtgccctccgaagaaagggcctattcacgtttcctggagacgccggaggtgcccagcttgtgctcaccactcaagcagctctccccttgctggaggtgtg

SEQ ID NO: 1005130 - DNA, 120 bp, Artificial Sequence
  ENSG00000272525_2 (sequence is synthesized)
ggttggagaattgcagaatttccctctcggcccgaatgagccattaccaaagcattttgtcaaaaatagtgaagttagtttggccttccaaggttaggtggtgtggtagattgcgggacc

SEQ ID NO: 1005131 - DNA, 120 bp, Artificial Sequence
  ENSG00000272525_3 (sequence is synthesized)
tatccccgagccccactcctcagaatgcaactctgtacgacgaaggaactgggtaatccgcatttcagccaatttagcagatgactaaccaccttaaaacggtccacacaattatcttgt

SEQ ID NO: 1005132 - DNA, 120 bp, Artificial Sequence
  ENSG00000272525_4 (sequence is synthesized)
ttatcaggcaaaaaaattgactcctaggtaccgaattggcatggatttgacaattagcgattcacggttaagcagactttatctatcttaatccaatcaaaggagaatttctgcctgctg

SEQ ID NO: 1005133 - DNA, 120 bp, Artificial Sequence
  ENSG00000272525_5 (sequence is synthesized)
tgtttggagagacaacgcgtggatgtgagttaaactttgttaaacccaggacaagctttaagataaaacgactgatatttaaaatggcaatttaaataaaaatgttctctgatcagcctt

SEQ ID NO: 1005134 - DNA, 120 bp, Artificial Sequence
  ENSG00000272523_0 (sequence is synthesized)
aaaaccaggagagcatggagctttttcgctggtccggcgcggtctcttgcgttcctgtggcgggcacctgactccccatgcccgagtactgtcctcaggcggaacggcgtctgcagcgag

SEQ ID NO: 1005135 - DNA, 120 bp, Artificial Sequence
  ENSG00000272523_1 (sequence is synthesized)
cttcccgctgggagcctccttctgacggcggaaaggagcttcacctggggcggccggcggggaacggagaagaatccaccggggaagtggacggggctggctcccgggcctggcgctgcg

SEQ ID NO: 1005136 - DNA, 120 bp, Artificial Sequence
  ENSG00000272523_2 (sequence is synthesized)
gctctcgggccgtcagacctcccgcgggttgcgtcactttcctcggttttctagacagcagttgtggggttgaatccttgccgtggttttgtaagaattaaatgagataatgaacgcgaa

SEQ ID NO: 1005137 - DNA, 120 bp, Artificial Sequence
  ENSG00000237359_0 (sequence is synthesized)
cagaataactacaaaacaaaatttgaagaggagtccaaggcattttctggttccatacttttttcattctcctgttggataccatttctcctgtctgatccaatgctgagctcagtggta

SEQ ID NO: 1005138 - DNA, 120 bp, Artificial Sequence
  ENSG00000237359_1 (sequence is synthesized)
atgaagtgccacattgtgaaaggggagcctagaacggggctgccagagagacagtctgtaattgaaagttctttcaagagaaggacttctatcaggtctgctgagggaataggagctcca

SEQ ID NO: 1005139 - DNA, 120 bp, Artificial Sequence
  ENSG00000237359_2 (sequence is synthesized)
cctgctgacttttttatgtttgctgactctgaaagaatgcaaaacatgaagaaattgaatggtgttatttcttttgtaatttctcagtggaaatattgttttcaaaattattgataagat

SEQ ID NO: 1005140 - DNA, 120 bp, Artificial Sequence
  ENSG00000237359_3 (sequence is synthesized)
ctaaccagggctttcaagaagaaaatgcaatctatagcttgttttaagagtggggattatgttggcttccctgggccagtctaaataattactttaatctggaacaacatataaattcat

SEQ ID NO: 1005141 - DNA, 120 bp, Artificial Sequence
  ENSG00000237359_4 (sequence is synthesized)
aaattgttgccaccacgactcttagggaatcctcgacttttcaaacattgcctctctcagccataaatttacactgcgccactcgcccatgtgtgttttgttttaagaagctgtagtctc

SEQ ID NO: 1005142 - DNA, 120 bp, Artificial Sequence
  ENSG00000237359_5 (sequence is synthesized)
ttgttacatgtagtttggaagaaatgctagatgtttttgatctaaagaagaaagatcaagtcctagtcaaactttagtattttaaagggcatagacattatttgagtatatgtcgtctgc

SEQ ID NO: 1005143 - DNA, 120 bp, Artificial Sequence
  ENSG00000237359_6 (sequence is synthesized)
tgtatctctaacaataaggagcagtagaaaatggggaatcaaataataatcaactgctaccgtaatgcagatctgaggtatttctatcgatcccaatatgaagattgcaaaggatttaaa

SEQ ID NO: 1005144 - DNA, 120 bp, Artificial Sequence
  ENSG00000277738_0 (sequence is synthesized)
agataacagaataaaagcaggcggccagagccagcagtgccaaccagctggggtccccttctgccatgtagaggctttgttctttcagtctttgcaataaatctttctgctgcttgctct

SEQ ID NO: 1005145 - DNA, 120 bp, Artificial Sequence
  ENSG00000277738_1 (sequence is synthesized)
ttgggttcacactgcctttctgagctgtaaggcagtgaaggtctcatcacgaaagtctacaatttcactcctgaagtcatggagaccacgaacctacagggaggaacgaacaactccaga

SEQ ID NO: 1005146 - DNA, 87 bp, Artificial Sequence
  ENSG00000277738_2 (sequence is synthesized)
acagtgagaccacaaacccactgggaggaaccaacaactccagacgggccaccttaaaagctgtaacactcactgcgaaggtccgca

SEQ ID NO: 1005147 - DNA, 85 bp, Artificial Sequence
  ENSG00000277738_3 (sequence is synthesized)
cagcttcactcctgagccagtgagacaggccaccttaaaagctgtaacactcaccgccaaggtccgcagcttcactcctgagcca

SEQ ID NO: 1005148 - DNA, 120 bp, Artificial Sequence
  ENSG00000277738_4 (sequence is synthesized)
agatcaagtacccaccaattccggacacaatagtacgtttttttaaaagtttatatacaaagaaataaaattatttgtaaaaaaataaaaacttagatattgaagttattgtgaaagatg

SEQ ID NO: 1005149 - DNA, 90 bp, Artificial Sequence
  ENSG00000249593_0 (sequence is synthesized)
attgctgatttggtcaagatgtaaacatatcgtagagctccagcatgggggctcacgcctgtaatacaaacactttggaaggccaagggc

SEQ ID NO: 1005150 - DNA, 81 bp, Artificial Sequence
  ENSG00000249593_1 (sequence is synthesized)
tgatcatggctcactgcagccttgactttccaagttcaagcaatcctcccacttcagcctctcgagtagcatagctgggac

SEQ ID NO: 1005151 - DNA, 89 bp, Artificial Sequence
  ENSG00000249593_2 (sequence is synthesized)
tggtcttgaaccctggctcaagcaaattatgggcgtaagccattgcacccaggttcaaagagttaaaattaattggtaaaccctcagca

SEQ ID NO: 1005152 - DNA, 120 bp, Artificial Sequence
  ENSG00000249593_3 (sequence is synthesized)
agttaaaattaattggtaaaccctcagcaggaagagcacaactaaggaaattaagagagccaacaaagcatgaggatctgtaatgatattcctggtttcattcttgatacagtttttgtt

SEQ ID NO: 1005153 - DNA, 120 bp, Artificial Sequence
  ENSG00000249593_4 (sequence is synthesized)
cctgtttcccatttctcaccttcctgtgacaaaccaagtctgaagattcagccgtacgtgggatcctgcagggacagcctgccctaaaagccaagaagagaaaaggctcatgaggtacaa

SEQ ID NO: 1005154 - DNA, 120 bp, Artificial Sequence
  ENSG00000249593_5 (sequence is synthesized)
ggtctttggaaggctgtcgggatggccagcaagccaacaggacttactagttcatgaagacacgactcagctgtgttcagttacctcctcaatccacccatccctctcccttgaacacac

SEQ ID NO: 1005155 - DNA, 120 bp, Artificial Sequence
  ENSG00000249593_6 (sequence is synthesized)
cagattgctgatttggtcaagatgtaaacatatcgtagagctccagcatgggggctcacgcctgtaatacaaacactttggaaggccaaggtgggagaatcactcaagcccaggagttta

SEQ ID NO: 1005156 - DNA, 120 bp, Artificial Sequence
  ENSG00000249593_7 (sequence is synthesized)
ctgggcaacaaaggctaccacataaagaatatgacattattaaattcccctgcagttacacagagcagtggctctacagtttcttgttggctgaattaagcatttaaagaaatgtttaag

SEQ ID NO: 1005157 - DNA, 120 bp, Artificial Sequence
  ENSG00000249593_8 (sequence is synthesized)
tcaacctgggcaacaaaaatttctctcactttcttacagggctaccacataaagaatatgacattattaaattcccctgcagttacacagagcagtggctctacagtttcttgttggctg

SEQ ID NO: 1005158 - DNA, 120 bp, Artificial Sequence
  ENSG00000249593_9 (sequence is synthesized)
aattaagcatttaaagaaatgtttaagtatttaatacaacatcttcaggtatttgaactaagagagtttcttgggaaatgtgctatttgatagattgagaagtctcccagtgctgttttg

SEQ ID NO: 1005159 - DNA, 120 bp, Artificial Sequence
  ENSG00000249593_10 (sequence is synthesized)
acagaaaaattttaaagcctccttgctcttggtggctttctttctcccaccaatttttggtgacttcaatttttgtgttagaccatttatgttcaaagcatccacatgaaacttaccctc

SEQ ID NO: 1005160 - DNA, 120 bp, Artificial Sequence
  ENSG00000249593_11 (sequence is synthesized)
tataaggtgctgtgagcaccacagacttgaataccagttcccatgctcaagaagccttcaatcttgttgaggagatagatgaaagaactggcttacaacagagaagtagatgtattaaag

SEQ ID NO: 1005161 - DNA, 120 bp, Artificial Sequence
  ENSG00000249593_12 (sequence is synthesized)
tcaacctgggcaacaaaatcaggccaagcaattctggccattgggacgtccattatactgctcacctggaaaaggcagcgcccagcacaaacgcagcatactccttcacgaggggctctg

SEQ ID NO: 1005162 - DNA, 120 bp, Artificial Sequence
  ENSG00000249593_13 (sequence is synthesized)
tgctgttcagcccattgatcaccacttgaagaccaccaaaggaaagcaggttgactgcatctgaagacattcatgataaaatatgcaagaaaatcgctctcccaaaggtttctgtctaag

SEQ ID NO: 1005163 - DNA, 120 bp, Artificial Sequence
  ENSG00000249593_14 (sequence is synthesized)
cctgtgctactggctagtggctatgtatcagacagtgcagaacatttctatcattacataaagttctattcaacagcattggtctaggctatcatttaagctccaaatccccaagtccgg

SEQ ID NO: 1005164 - DNA, 120 bp, Artificial Sequence
  ENSG00000249593_15 (sequence is synthesized)
tgtacccgctacagtctccctcgaatatatctttgttgccacaaaggctgcatcttgcccatatgctaatcccacgctatcaatcatgaggaaaactcaggaagctgaagcccaacaact

SEQ ID NO: 1005165 - DNA, 120 bp, Artificial Sequence
  ENSG00000249593_16 (sequence is synthesized)
gtggctgctacccatctttctcctccagattccacagggccccttcccaactgcatccttgcctctctgaactaggagaggactctgacagagaaatcaagtgtgaggattggtatttga

SEQ ID NO: 1005166 - DNA, 120 bp, Artificial Sequence
  ENSG00000249593_17 (sequence is synthesized)
ctgtgctagtgttttgtggtggcctagcctgttgttgccacttgaaaaatcatattcatacacatttggatggaatctccatgacagcaggggttttgtctgtctgtccacgcttgtagc

SEQ ID NO: 1005167 - DNA, 120 bp, Artificial Sequence
  ENSG00000249593_18 (sequence is synthesized)
tccagggactaggatggtgctgagcatatggttaggtgttcaatgaataactgttgcattaatgagtatgaatttgatcagaaaagaatgttcctgaaataaagctccagtgtgaataaa

SEQ ID NO: 1005168 - DNA, 120 bp, Artificial Sequence
  ENSG00000249592_0 (sequence is synthesized)
attgcaagcctctgcagaggcgctggagctgggtcagtccgccgctcaccccgcggccgcaccttcccgccttctcagcttacatggcgtcttcaacaaaaagtaattgtttagagaagt

SEQ ID NO: 1005169 - DNA, 120 bp, Artificial Sequence
  ENSG00000249592_1 (sequence is synthesized)
gacaagatgaaggaggactctgagtcctagtctccctcctcgagtccctgtgtgagcagaggtaaacaatgaaaactcaccaaccaggagaaattcacctaggactggcgcagaaggtat

SEQ ID NO: 1005170 - DNA, 71 bp, Artificial Sequence
  ENSG00000249592_2 (sequence is synthesized)
ctgaggcaggagaatcccttgaacctgagagatggaggttgatgtgagctgagatcacacaattgcaaaca

SEQ ID NO: 1005171 - DNA, 120 bp, Artificial Sequence
  ENSG00000249592_3 (sequence is synthesized)
gcagaggcgctggagctgggtcagtccgccgctcaccccgcggccgcaccttcccgccttctcagataaggtctcttgagctgctttttatctaaaggaagcagaagaaaacagcgaaat

SEQ ID NO: 1005172 - DNA, 120 bp, Artificial Sequence
  ENSG00000249592_4 (sequence is synthesized)
tcaagaaaaaaaatctccaaggtggttggcttcttggaaagcctgaatggtggccaaggaccacctgggctcccaaggagtggagggaggagggattcagttccacaggaaataaatggg

SEQ ID NO: 1005173 - DNA, 120 bp, Artificial Sequence
  ENSG00000249592_5 (sequence is synthesized)
aacagcccggtggagaagacaatgacaactgcaggacaacacctcaaccactccagaaaacagcccttgctcctccttctggccttttcatatttccaagttactgttttaaaggaaaaa

SEQ ID NO: 1005174 - DNA, 120 bp, Artificial Sequence
  ENSG00000249592_6 (sequence is synthesized)
aaaaaatgtgtgtgtggctgtttattctctaatgtgacaaaaacatgaccatccgggaggagaggggctaacggtgcaaccaactgaggctgaaacacagattcagctgaaatgcagctt

SEQ ID NO: 1005175 - DNA, 120 bp, Artificial Sequence
  ENSG00000249592_7 (sequence is synthesized)
ctgcagagcgggggccggcttccctcctagcccttcagctgctcaccctgtccctgcagctctgaaaaacgcccttccagtaagcggccaaggagcacacgagctcctcccaccagcaaa

SEQ ID NO: 1005176 - DNA, 120 bp, Artificial Sequence
  ENSG00000249592_8 (sequence is synthesized)
ggggaaggggaggccttggacagacggggcagtgagtgtgtctgggcatgagcccgaagccaccaccagcaaatcctccccacggatgccaggagagctctgatcctaaccaccaccacc

SEQ ID NO: 1005177 - DNA, 120 bp, Artificial Sequence
  ENSG00000249592_9 (sequence is synthesized)
ctcccttcagcaaaatcaaaacagggaaagaaaacataggaaaccaaacggcggcactcaacaatttgggggaacaagtaatttttaaaagtaagagttgttccgtaaaccagcactgag

SEQ ID NO: 1005178 - DNA, 120 bp, Artificial Sequence
  ENSG00000249592_10 (sequence is synthesized)
ctggtcacacggcctctggtctacctgctgagcatgtcagaaatcccgacgtggcgtctggggccccgtttccagggctgggtgtgtcagccacaggtgagcgacagttctgagtgagtc

SEQ ID NO: 1005179 - DNA, 120 bp, Artificial Sequence
  ENSG00000249592_11 (sequence is synthesized)
caagtgccgacctcacacaatgaaaggcgaaccagtcagggagctgctgttgtgtttcataaggtgggaaattaaatacaatggttaaatcataatgttaatggaaacctcttttggttt

SEQ ID NO: 1005180 - DNA, 120 bp, Artificial Sequence
  ENSG00000249592_12 (sequence is synthesized)
gcttttaaattaattttttatataacttctaaatcttcaagaagctaaaggcaacataaatattgtcattcaccatgaaaagacattttttcaataacttaggaaggattcaataaaagt

SEQ ID NO: 1005181 - DNA, 120 bp, Artificial Sequence
  ENSG00000249592_13 (sequence is synthesized)
ccaactacacttgaggcttatcatgaaacctaaaattcataaactaaactgaagtgaattcagattttcaagacctggaaagcaagcagagggagctcgtgtcagaaggtgactcagaac

SEQ ID NO: 1005182 - DNA, 120 bp, Artificial Sequence
  ENSG00000249592_14 (sequence is synthesized)
cgtgttgcctggagcatcactctccctgcaaggctgaagcacggggtggggcgggggagaggacgatcggctctgggagactgtgaagtgttttcatcctctgtaaacgtggtgctggta

SEQ ID NO: 1005183 - DNA, 120 bp, Artificial Sequence
  ENSG00000249592_15 (sequence is synthesized)
attgcaagcctctgcagaggcgctggagctgggtcagtccgccgctcaccccgcggccgcaccttcccgccttctcagttgttcaaagagatggctttgaattccagcttacatggcgtc

SEQ ID NO: 1005184 - DNA, 120 bp, Artificial Sequence
  ENSG00000249592_16 (sequence is synthesized)
attgcaagcctctgcagaggcgctggagctgggtcagtccgccgctcaccccgcggccgcaccttcccgccttctcaggctccaggggagaagcacagtccattccgtgctgctgccaca

SEQ ID NO: 1005185 - DNA, 120 bp, Artificial Sequence
  ENSG00000249592_17 (sequence is synthesized)
gaacaccacacactgggtgatttatgaagaacaaattgatttcggcacagttctgggagctgggacattcaaggtcaccacgttgccacctgtgaaggccttctgctgcatcctcatgtt

SEQ ID NO: 1005186 - DNA, 120 bp, Artificial Sequence
  ENSG00000249592_18 (sequence is synthesized)
ggggaagatcagaagtgagaacacatgctggccagtcctttcacagcagcatcaatccgtgcatggggcagggccctcggcctgagcgcctcccccaggccctaactcccagcactgccc

SEQ ID NO: 1005187 - DNA, 120 bp, Artificial Sequence
  ENSG00000249592_19 (sequence is synthesized)
tgctggggatggaatttccaacatgaatctgggggatgctttcggaccacagccggggagcctgccctggcttccagctgctggtggcccaggggctccctggcttgcctcgaggctgcc

SEQ ID NO: 1005188 - DNA, 120 bp, Artificial Sequence
  ENSG00000249592_20 (sequence is synthesized)
tccctccagcctccagtccgtcctctgctctgtcctcaccagggcctcctgtctcgagtcttcctccgcctcacttgtgtcatgggatttaggctccacccagatattccagaattattt

SEQ ID NO: 1005189 - DNA, 120 bp, Artificial Sequence
  ENSG00000249592_21 (sequence is synthesized)
catcccaaaatcctttatttaattatatctacaaagatccttttccaaacaagatcccatttgcaggctctgggggttaggatgtggcttatcttctggggccaccactgagtccactgc

SEQ ID NO: 1005190 - DNA, 120 bp, Artificial Sequence
  ENSG00000249592_22 (sequence is synthesized)
tgctacagacagcatctcaagtctgtccacttctccaccctgaccgcccccaccacagtccgcctctcctgcaactcctggcgctggcctctcctgcgtccatttctgcacagcctgagc

SEQ ID NO: 1005191 - DNA, 120 bp, Artificial Sequence
  ENSG00000249592_23 (sequence is synthesized)
gattttcaaaaacgacaccagacccatgctcctgcccacagccgccagcgccttctgtctccatgcaaagctggaccctgctggcgcctgcatccccatggtgtcactgccttgggggct

SEQ ID NO: 1005192 - DNA, 120 bp, Artificial Sequence
  ENSG00000249592_24 (sequence is synthesized)
cacagggacccacactggcatgttcatggtgcgcccgctgccaaggccgcctcatgccagcactccttcgtctccttacacaccacagcctggaagggtcctccctctctgcatccgccc

SEQ ID NO: 1005193 - DNA, 120 bp, Artificial Sequence
  ENSG00000249592_25 (sequence is synthesized)
atgtctccccttgtgaaattaaagcacagaatttctcgttttgaggaaaacctttatcctattttaaaacagtctcatcatccccgccctagttctctcttccactcacagtagcattcc

SEQ ID NO: 1005194 - DNA, 120 bp, Artificial Sequence
  ENSG00000249592_26 (sequence is synthesized)
tccaaaattgttaaaaacaaaacaaaactaagcaaagaatcttggagttacctttagaaataagagaggacttgttatggtttctacttagggatcaactgttacctcgttaaaggatga

SEQ ID NO: 1005195 - DNA, 120 bp, Artificial Sequence
  ENSG00000249592_27 (sequence is synthesized)
aaggttgagttttttggcgatgaacttcttcagatgcaagacggtcgcctgggctgagcagcggatccacttccgcttcagcccgcgcagtttgctgctgttacactccaggcagatgct

SEQ ID NO: 1005196 - DNA, 120 bp, Artificial Sequence
  ENSG00000249592_28 (sequence is synthesized)
cacctgcgggaaaggacgctggtgagagcgcagcaggagggttcccccggacggttctggaggcttccttagacatatttcactaattcctcaatctaggactgctgacctttttgagat

SEQ ID NO: 1005197 - DNA, 120 bp, Artificial Sequence
  ENSG00000249592_29 (sequence is synthesized)
cagacatctgctttgacttcaacactgcagaaaaagaatcttacataccttatctgaaaacctgtttatcgtctgcttgccattttgtgaactataacctcaccctgttaattctgtgtt

SEQ ID NO: 1005198 - DNA, 120 bp, Artificial Sequence
  ENSG00000249592_30 (sequence is synthesized)
attaacataatagttgagagttaatcccacagttacttatccatcgcaggcactgggttcttggtctccagctaagcctgtccggacaaacatggcgcaaaggggagtgggcggccccgt

SEQ ID NO: 1005199 - DNA, 120 bp, Artificial Sequence
  ENSG00000249592_31 (sequence is synthesized)
gtctgcgaatgcactcggggagacagcagcgactgcaggaagacagtagggagaagccttgagcagggccacaggcggaaggtcacagctgccttccaggtgaccagcagtttggccgca

SEQ ID NO: 1005200 - DNA, 120 bp, Artificial Sequence
  ENSG00000249592_32 (sequence is synthesized)
ggataaaaagtgactgttaaggggactgtggagtcccagcagccacgggctccctgcccggtgcgaaaaggaatctgcccaggacgaggcttcacccaagggcccggccggcttggcccc

SEQ ID NO: 1005201 - DNA, 120 bp, Artificial Sequence
  ENSG00000249592_33 (sequence is synthesized)
caagatgtgcctgacaaggaagggcgacgctcacggcaaacgcttctacaggtggagccgcaacaaacggcacagttagggcctaaaaatgcagtggaagaatggacagggggttaactg

SEQ ID NO: 1005202 - DNA, 120 bp, Artificial Sequence
  ENSG00000249592_34 (sequence is synthesized)
aaacatgtatgtctaaaattacaaaagatacaaaagggaggacaccaggggtacagacgggcaagtattgaaggtaatcagatacaatttctaaaaataaaaacactcacggaaactaac

SEQ ID NO: 1005203 - DNA, 120 bp, Artificial Sequence
  ENSG00000249592_35 (sequence is synthesized)
atctcagtggatggctgaaccacagattcttctcagccgaggacagattaatgtcctaaaaaaaaattcacttgaggaagttacccatcaggagtagagataaacacaccaattcaaaca

SEQ ID NO: 1005204 - DNA, 120 bp, Artificial Sequence
  ENSG00000249592_36 (sequence is synthesized)
ataaaaggaaggctaagagaaaggggagaagacgggagccccaaagggaagaacagaaaggaaaggaagtgttaagaaacagtgactaaggatctcccacaacagtgaagggcagtcctc

SEQ ID NO: 1005205 - DNA, 120 bp, Artificial Sequence
  ENSG00000249592_37 (sequence is synthesized)
attgcaagcctctgcagaggcgctggagctgggtcagtccgccgctcaccccgcggccgcaccttcccgccttctcagtctcctgcggctgccgtggaaattatcacgaggtggtgtctt

SEQ ID NO: 1005206 - DNA, 120 bp, Artificial Sequence
  ENSG00000274270_0 (sequence is synthesized)
aggcttcgtggcggcggcggcggcagcggcctcacccagctcgtgggctcgggccgcggctcaggcgtcacgcatagcgtgggcacccacgccctcgccacccgacgaggatctcgggct

SEQ ID NO: 1005207 - DNA, 120 bp, Artificial Sequence
  ENSG00000274270_1 (sequence is synthesized)
ccgcgacctgtgggagtgctgcggggcgtcccgcacttccgccctctctcgtctccggctccccagtcgccgccccgctcgccgagtgtgcgcgcattcgggcctcgcctcggagccggg

SEQ ID NO: 1005208 - DNA, 120 bp, Artificial Sequence
  ENSG00000274270_2 (sequence is synthesized)
aggctgtcctgtccccaggcccctcgcgcggccgctcttccaggcattgcggtgctagccccctctcccgcgcacgactggggagggcagaggtgtgagggatgcgggggtggctcgcag

SEQ ID NO: 1005209 - DNA, 120 bp, Artificial Sequence
  ENSG00000274270_3 (sequence is synthesized)
ccgttcgcgggcaggcgggcggagcgcgggaagcgcggtgcgggcgttccatggcgcacccagacgctctccctcctccgcaggtgcagcggggcgttgcgcgagctcgagtcccccttc

SEQ ID NO: 1005210 - DNA, 120 bp, Artificial Sequence
  ENSG00000274270_4 (sequence is synthesized)
ccggacagctagggagaagggagtttgcagaccggagctacagttggaagaatatagtttttgagaagttactggaagttagatgtgagacaaaaacagacgaactttccttcaaagcct

SEQ ID NO: 1005211 - DNA, 120 bp, Artificial Sequence
  ENSG00000274270_5 (sequence is synthesized)
tatgacgaaatgataggccttgccatacccttgaaatgaaactgagctccctaccggcctaaagccgctgttcctgagcttcatgtaaacaaggagggcggtaaacaccagaggaaggcc

SEQ ID NO: 1005212 - DNA, 120 bp, Artificial Sequence
  ENSG00000274270_6 (sequence is synthesized)
ttacaacaataccaagtgcaagtagctcatttgagtgttatttatcttagcagcttccctgagtgatttatgtatattgcagtttaactttacagggtgggaataaaataatttggcttc

SEQ ID NO: 1005213 - DNA, 120 bp, Artificial Sequence
  ENSG00000274270_7 (sequence is synthesized)
tcagctcactggcggaagaaactagagctgagctgggacgagggcaagaagcgcgtcgcacctttcctggcagctgaacagtgtgatgaacagtctggaagggttatgttattacttaag

SEQ ID NO: 1005214 - DNA, 120 bp, Artificial Sequence
  ENSG00000274270_8 (sequence is synthesized)
gggtttggggaaaccgttcccgcgcacagaccctcattcgggccaactgcaggccgtgggggactcttcaaggactcgcgcaacccgagccgagcttcctggctgggcactgggctcagc

SEQ ID NO: 1005215 - DNA, 120 bp, Artificial Sequence
  ENSG00000274270_9 (sequence is synthesized)
cagtgctgagagcgctttcgctgggccagtcaagacagcaataagtttgcctctatttgggaaacctttccaggcttgcctgccctcttttaagagggagactaggtggtgggatcgtca

SEQ ID NO: 1005216 - DNA, 120 bp, Artificial Sequence
  ENSG00000274270_10 (sequence is synthesized)
gctgccaatgtgtgcactcgttctaaagaaggcgagaggaagtaaagcgaacctgtgcagtgtttgctgggcttccaaaacgcggagcttagtcgaccccccagcgaaccggacggcgct

SEQ ID NO: 1005217 - DNA, 120 bp, Artificial Sequence
  ENSG00000274270_11 (sequence is synthesized)
ctcacacctaacggtactcagagcctggtgcgggagctggcgcgctcgctcctggtttccttccaatttaggcaaaggccctggccgcccgtcttcctgcttctgctgtgccctgccaca

SEQ ID NO: 1005218 - DNA, 120 bp, Artificial Sequence
  ENSG00000274270_12 (sequence is synthesized)
gcactcctaagacggcgaattcgtttctgcgccaattttgttttgaatatctacaaaccacttttccttgcatgaagaaaacaaggcagggccccctggcccgtcccacacctgcgagag

SEQ ID NO: 1005219 - DNA, 120 bp, Artificial Sequence
  ENSG00000274270_13 (sequence is synthesized)
gcagagatacagaggcctcgggcctcagccttcatttccccgccctagcttcgcgccaagctgcagtgtccccgacacactgtcaggacacgcgcttttcgcccctactttgttcttgcg

SEQ ID NO: 1005220 - DNA, 120 bp, Artificial Sequence
  ENSG00000274270_14 (sequence is synthesized)
cagtcttcccagctgcggagaggagggagcgaaagcaaaacgaaagcacccggggcgcatcagttgcaatagcttccctgagcgcggccgtgggaggccaagatctgaggtcgcgaggcg

SEQ ID NO: 1005221 - DNA, 120 bp, Artificial Sequence
  ENSG00000274270_15 (sequence is synthesized)
acggtgggggcccgagctgcgcagaaactgggtgggggcggtccctggagggcgcccgggagctgctagaagttgtccggagcccctcaacccccttggaaaagcgaacgcggatgttaa

SEQ ID NO: 1005222 - DNA, 120 bp, Artificial Sequence
  ENSG00000274270_16 (sequence is synthesized)
tataccaactccgcagggaacttttggcccgggtcttgagctgaaattccagactgaatgggaccgtgctgaaagttcgacgaggcaaaggagtatggcgcgggggcaagctttgacccc

SEQ ID NO: 1005223 - DNA, 120 bp, Artificial Sequence
  ENSG00000274270_17 (sequence is synthesized)
cggcttcgtatcctcgggagaggccgggactccggctcgcccagcgagggtgcgcagaggcctcctgggattctaggcccacagaatttttgctccagtgaagttggataagcactccgc

SEQ ID NO: 1005224 - DNA, 120 bp, Artificial Sequence
  ENSG00000274270_18 (sequence is synthesized)
ctccccgcaaaaaccagagttctcggcttataaacacttcaataaactctggtgacattctccgcgctcgctccttgccctcgcggcagtcactgcagggacaaaggcggcctgcgcaga

SEQ ID NO: 1005225 - DNA, 120 bp, Artificial Sequence
  ENSG00000274270_19 (sequence is synthesized)
cttggaagaggcgcggcccgcgtgggcggctttaccggccaaagacgttttcagttaaggggaggcatcttcagagctgagggtaactccccacagccaccccgcaggtagggcagccaa

SEQ ID NO: 1005226 - DNA, 120 bp, Artificial Sequence
  ENSG00000274270_20 (sequence is synthesized)
ccccaatctggtcagcttaaaagtgtcctcggtttcgccccctttcccagcgaaccaacactggcagattggcctgcgagccgctcgctctgttgctctagcacatttatgtagccaaac

SEQ ID NO: 1005227 - DNA, 120 bp, Artificial Sequence
  ENSG00000274270_21 (sequence is synthesized)
ggtcgaagagccccatctttaagcccaataaacacttaactttattctatttaataacacattttgttgtggcaatatttgtggattttggcaggtattaaaatctggtgatcctaaatg

SEQ ID NO: 1005228 - DNA, 120 bp, Artificial Sequence
  ENSG00000274275_0 (sequence is synthesized)
gtggagcccttatgacctaaatgcctcctgaaggttccacctctcaataccaccacaagaggaaccaagttttcatgcttgaactttggggggacacattcattatatcaggcctcctgg

SEQ ID NO: 1005229 - DNA, 120 bp, Artificial Sequence
  ENSG00000274275_1 (sequence is synthesized)
ttgaggccctacccaaactgtttaaggatcagagcactactgtctgtggctgcataaacttggcacgttgctacactactctgaaccttagtttgccatcaataaaatgaggagaaagca

SEQ ID NO: 1005230 - DNA, 120 bp, Artificial Sequence
  ENSG00000270964_0 (sequence is synthesized)
gcagcagctcccgggaggatgcgcccccggcgtgggaagccgaggaaccggcgcgcggcgcgcggcgcgtggcgcgtggcgagtcggggagagactggtcttgctcgctcaggagaccct

SEQ ID NO: 1005231 - DNA, 120 bp, Artificial Sequence
  ENSG00000270964_1 (sequence is synthesized)
catcgcccacagagcgcccgcggcgacccggtcacggcccttccatttcctgaccctgcttaatgacagcgaggtgaaaacatctaccaaacgaagggtaaaaggctggagtccgccaaa

SEQ ID NO: 1005232 - DNA, 120 bp, Artificial Sequence
  ENSG00000270964_2 (sequence is synthesized)
agccaatttaaggcttaacattgcagaccgtttgtctttacaaaagcttcaaagacggggctgcagctcccggttatccccactttgtcaagccatgaatctgaatgttcgtggggttgt

SEQ ID NO: 1005233 - DNA, 120 bp, Artificial Sequence
  ENSG00000270964_3 (sequence is synthesized)
gtgcatcgaatcagcaagagcaaggcaagaattcaagaaatagttcttttttatccccccttccaagtcacaggttcagaggatcatcatctttctcccacattagcaaaacatatttgc

SEQ ID NO: 1005234 - DNA, 120 bp, Artificial Sequence
  ENSG00000270964_4 (sequence is synthesized)
atttttcagtgaagttctttaccgcacgagtgccctaaaatagcaaacagttccctgttcaaaagcaatagtaaagaaattcgccgaagagtttaattgcctggggacagctgcagtagt

SEQ ID NO: 1005235 - DNA, 120 bp, Artificial Sequence
  ENSG00000270964_5 (sequence is synthesized)
cgcatcatcgtctcttattaaactgttgcagaaatattcggtctagtccatgtattttcaactaaatagcactgcttacgcagttggtgatatggtgatatcacggaagtagcaataaac

SEQ ID NO: 1005236 - DNA, 120 bp, Artificial Sequence
  ENSG00000270964_6 (sequence is synthesized)
ccggattcaagcgattctcctgcctcagcactaccacccccaccagcccccaacccctgccgagtaactgggactacaggcgtgcgccatccgtgcccgctcatttttgtattttcagta

SEQ ID NO: 1005237 - DNA, 120 bp, Artificial Sequence
  ENSG00000270964_7 (sequence is synthesized)
cggccaaccttggttatcttcaaatgccttgttacctcagattttaaagtgcataaggttgtagaacgatggtgcctctacagaagtttctttacaaattgtaatgtgtaggttcgtcct

SEQ ID NO: 1005238 - DNA, 120 bp, Artificial Sequence
  ENSG00000270964_8 (sequence is synthesized)
ttatttctttcttatgaaggtgcacgaattggctttactttctggggttgaattttgtataaactcggttgaggaggcttgtcagtttcccttctaacagtaaggtgcttgattaatgtg

SEQ ID NO: 1005239 - DNA, 120 bp, Artificial Sequence
  ENSG00000270964_9 (sequence is synthesized)
agagaaaaaaattaatgttggtcattttcagttacaataccaaaattttttctgcatactttactctgagttacttttatatttaatttgaaaggccattgtaggagataaattatcaca

SEQ ID NO: 1005240 - DNA, 120 bp, Artificial Sequence
  ENSG00000270964_10 (sequence is synthesized)
ttttaagttactgtaaatcaatagcttaggtagaaattcatttagtcagatccttcagatattctaggaatttccccttttcacctgcacttcacttctgtgaaaaataaaccgttcatc

SEQ ID NO: 1005241 - DNA, 120 bp, Artificial Sequence
  ENSG00000236754_0 (sequence is synthesized)
atgtgcaaaggacgccttaccggcgagctcgttgaaccccaggttgttaaggttggcaaacagtgggaagtagatgatggagaaaggaatgtctctgcagaagaggaaggagaaacactg

SEQ ID NO: 1005242 - DNA, 83 bp, Artificial Sequence
  ENSG00000236754_1 (sequence is synthesized)
agaaaggaatgtctctgcagaagaggaaggagaaacactgagctccgagctgccctggggctgccacccaatggtgcgatctc

SEQ ID NO: 1005243 - DNA, 120 bp, Artificial Sequence
  ENSG00000236754_2 (sequence is synthesized)
attacagagcacagaggctcatcaggaaggaccccctggcagccctggccccatccccgcagcaacggaaggaacaccagttccccatgtcccatacgctcacacctgctgcccagcctc

SEQ ID NO: 1005244 - DNA, 120 bp, Artificial Sequence
  ENSG00000236754_3 (sequence is synthesized)
ccaggggacctgagaagcccacctcggtacatgccgaagaagccctccgcccgagccgtcttcatcaggcagtcgatcctggaagcagaggccagagtaggagcgggaggcagactgtga

SEQ ID NO: 1005245 - DNA, 120 bp, Artificial Sequence
  ENSG00000236754_4 (sequence is synthesized)
aaaaaaagaaaaaaaaaaacggtcatgaggccagttctgccattgtgtgatctgtaagtggaggtcttcttctttgggcctcagctataaaataaatgagtcatgttactgtggctttgt

SEQ ID NO: 1005246 - DNA, 68 bp, Artificial Sequence
  ENSG00000236754_5 (sequence is synthesized)
gcccaggctggagtgcagtggcacaatcagctcactgcagcctcaaccatctgggctcaagtgatctt

SEQ ID NO: 1005247 - DNA, 67 bp, Artificial Sequence
  ENSG00000236754_6 (sequence is synthesized)
ttttcattttttttttctgtctcggtctcccaaagtttcgggattacaggcgtgagccgccgcacct

SEQ ID NO: 1005248 - DNA, 120 bp, Artificial Sequence
  ENSG00000236754_7 (sequence is synthesized)
ttacaggcgtgagccgccgcacctggccaggttactgttggtataggaagtctacccgcaagtttagggagctggaggcagccctaacacggagggaagcattgtcttctcatgccaggt

SEQ ID NO: 1005249 - DNA, 120 bp, Artificial Sequence
  ENSG00000236754_8 (sequence is synthesized)
agggaagcattgtcttctcatgccaggtttagctcccaccattagccgcaaattttatgtatttatttactttttgagatgaagtcttgtgctgtcgcccaggctggagtgcagtggtgt

SEQ ID NO: 1005250 - DNA, 86 bp, Artificial Sequence
  ENSG00000236754_9 (sequence is synthesized)
tcaggtgatccaaaagtgctgggcacacccagccagccccaaattttaacacatcagcaataatttatagctggggctcacaactc

SEQ ID NO: 1005251 - DNA, 120 bp, Artificial Sequence
  ENSG00000236754_10 (sequence is synthesized)
tcttctgaggggatgaaaagctaaagcaatcagcatcttgaaggcgagggatgtgtcagggatgagaaacagaaggaaggtctcttgggacccactttctccatgagggcctctagtgag

SEQ ID NO: 1005252 - DNA, 120 bp, Artificial Sequence
  ENSG00000236754_11 (sequence is synthesized)
cctccgccagcagccagattgcaacccagtatggcttccagggtcaggctgttttatctataagtgcaaaattactgtttatcccatagaaaggacacgtctcccaactccttaccatct

SEQ ID NO: 1005253 - DNA, 120 bp, Artificial Sequence
  ENSG00000236754_12 (sequence is synthesized)
agagtagatgatagtgggcctttcacaaaggaagaaacttgggacgataaagagaactgtaaacttaattttgtagttagagaagatgaacccaaacaattaaactatgttgaacaataa

SEQ ID NO: 1005254 - DNA, 120 bp, Artificial Sequence
  ENSG00000236756_0 (sequence is synthesized)
gtggcgagtcaggcgcgggcccggatccaagatcaaactcagctgaagtcagttcctctcaacctgccctggcatcaaagtctcaaagcaagtgggggccaaccagcaacaaccccaggg

SEQ ID NO: 1005255 - DNA, 120 bp, Artificial Sequence
  ENSG00000236756_1 (sequence is synthesized)
gagctttgacaaccacagaatttgagatggctggtaatcgttctcagaacataaaacacaaacagacagccctgattgctattccaatgtcatcacaaacccccaggatgcttggaaggc

SEQ ID NO: 1005256 - DNA, 120 bp, Artificial Sequence
  ENSG00000236756_2 (sequence is synthesized)
caaggaatcaaggtcagctgtatccacagccctagtctcaagccttcatcctcttacccgatagcaggcgattcccagtcctagccagatagatgagccccagtctcaggaagatgaagt

SEQ ID NO: 1005257 - DNA, 120 bp, Artificial Sequence
  ENSG00000236756_3 (sequence is synthesized)
gcatctcagaagcatccactacaaagctaatggttcgttcatagcatgccttggcctcagaatgatttccactcagaaaatagagatggcccttcaggccccagacattggggttctggg

SEQ ID NO: 1005258 - DNA, 120 bp, Artificial Sequence
  ENSG00000236756_4 (sequence is synthesized)
aaagtgaaaagcaagtagtatatgggataaggtagtatttaaaagtaccttgatgatctttgtttaacatttaaatttagatagattgtccatttcctttctcttttctttttcagatca

SEQ ID NO: 1005259 - DNA, 120 bp, Artificial Sequence
  ENSG00000236756_5 (sequence is synthesized)
accgttttctttttctaagagcactcagaaacataaccatttaattgtacaaggagacatttttctagctctgccctcagatttctttcttgcattcttcaaagccattttgggtgtgga

SEQ ID NO: 1005260 - DNA, 120 bp, Artificial Sequence
  ENSG00000236756_6 (sequence is synthesized)
gtaaatattaagaaaaacattcaagcataaccccaatactgttcacatgagaaaatataagaaatctagaaaaattgaaataaacactatcagctaaagatatccttttctctgctcttt

SEQ ID NO: 1005261 - DNA, 67 bp, Artificial Sequence
  ENSG00000236756_7 (sequence is synthesized)
taaacactatcagctaaagatatccttttctctgctctttgcaaaactcatgattacagtgcaatgg

SEQ ID NO: 1005262 - DNA, 120 bp, Artificial Sequence
  ENSG00000236756_8 (sequence is synthesized)
ctcggcctcccaaagtgctgcgattacagttgtgagccaccgcgcccagccaactcatgattacttaagaaaagcaaatggaagggtatagagagatgagtttactgacagctgatgacc

SEQ ID NO: 1005263 - DNA, 120 bp, Artificial Sequence
  ENSG00000236756_9 (sequence is synthesized)
gagatgagtttactgacagctgatgaccacccttctgttcaccagaaatctacgtgtgatatggcatcaccacctttaaataaagccccttctccagactcaagaggctttagcaaaagt

SEQ ID NO: 1005264 - DNA, 120 bp, Artificial Sequence
  ENSG00000236756_10 (sequence is synthesized)
gctggggcctccttgagggcataacagctcatgtgcaagcactctgtgcacatactgcaaggataatcagattataagcaacatataaatggctgcattgcgtctttttcggttgaagga

SEQ ID NO: 1005265 - DNA, 120 bp, Artificial Sequence
  ENSG00000236756_11 (sequence is synthesized)
ttctgtctctgataataaataatacgaaatgtattacagaatgaaataattatcctcaacttcaaaaggtaaagggtgaattacaaacattctgcacttcatagttccattaccagctat

SEQ ID NO: 1005266 - DNA, 120 bp, Artificial Sequence
  ENSG00000236756_12 (sequence is synthesized)
tcacctagtcaccaaatgaagacattaccaagtgaataacttgcaatattgtacaattctggtcttgctggtcatcatactaggtgagtgttagactgcatgtattatgcagcagacaaa

SEQ ID NO: 1005267 - DNA, 120 bp, Artificial Sequence
  ENSG00000236756_13 (sequence is synthesized)
ggcacatcatcaaccaccccatttacaaaggaggtaacattttcaggcagctgacattgtaaggaaacttaagtgaggtaaaactgcctttctaacaatctagacttgaaatcttagaaa

SEQ ID NO: 1005268 - DNA, 120 bp, Artificial Sequence
  ENSG00000236756_14 (sequence is synthesized)
aatctagacttgaaatcttagaaacataaatgtctgttttggatccacctccaaacattggttatgtttaccagttttgtagtttgggtcaatttttgtattttgtttttttttttttct

SEQ ID NO: 1005269 - DNA, 120 bp, Artificial Sequence
  ENSG00000236756_15 (sequence is synthesized)
caatcctcctgccttggcttcccaaaagtgctggaattataggggtgagccccatgcctggccaaatctttgctttttacactttataagacctacaaaattaacaaagttagatatact

SEQ ID NO: 1005270 - DNA, 120 bp, Artificial Sequence
  ENSG00000236756_16 (sequence is synthesized)
actttataagacctacaaaattaacaaagttagatatacttcttaagtcgagggtaaatccttcttttcatctcccactgttcccatctcagcctataatgtagaaaattctacattata

SEQ ID NO: 1005271 - DNA, 120 bp, Artificial Sequence
  ENSG00000236756_17 (sequence is synthesized)
cttacacctttttaggagaatactagagggaacagctgcagctattttttccacctgccttctgggtctctgacctgggggagctaatgacttatttagctgtggaagaagagagtctgt

SEQ ID NO: 1005272 - DNA, 120 bp, Artificial Sequence
  ENSG00000236756_18 (sequence is synthesized)
ttctattttgcggagggttaatgtgttaaagcctcctgcttaatgtggctcaatcccacccagttaataattcttgccctttcttgagcttgcctgcccttgagtagggcatgcacttgg

SEQ ID NO: 1005273 - DNA, 120 bp, Artificial Sequence
  ENSG00000236756_19 (sequence is synthesized)
caggatcaaaaccaaacactcctggctcctgagtcttgatctctcctactgcttgctcatgaatatgcttctttcttcccatgtaataggcagacttcctagaatgctcttcttctctga

SEQ ID NO: 1005274 - DNA, 120 bp, Artificial Sequence
  ENSG00000236756_20 (sequence is synthesized)
gaggaggcttcaattcttcagctgctctacctgtgactgcatgggtaagtcaaatgtggggctagttatgttgtccagccaagttttaccaataaaaataagctaatatttttattcccc

SEQ ID NO: 1005275 - DNA, 120 bp, Artificial Sequence
  ENSG00000236756_21 (sequence is synthesized)
cacatagtactgtgtatgtttctagttggatctaacctagaagggaagaagggaatgatttggctcctgtgaacccccaacactcacaaaatgaattcccataataaagtgatatcaggc

SEQ ID NO: 1005276 - DNA, 120 bp, Artificial Sequence
  ENSG00000236756_22 (sequence is synthesized)
ccaggggagctttgacaaccacagaatttgagatggctggtaatcgttctcagaacataaaacacaaagctggactgtagtggaacaatcacagttcactgcagcatcggcctcctgggc

SEQ ID NO: 1005277 - DNA, 71 bp, Artificial Sequence
  ENSG00000236756_23 (sequence is synthesized)
cagctaattttttaagtttttgtagagacggggtcttgctgtgttgcacaggctggtctcaaactctggct

SEQ ID NO: 1005278 - DNA, 120 bp, Artificial Sequence
  ENSG00000236756_24 (sequence is synthesized)
tacaagttacttcaaattcttgatgttgaatttcatctcactgacttcaggcttttaaaacacatgggaatacttgagacctaagaatggttgtgagtcaaataaaaaagtagaactaaa

SEQ ID NO: 1005279 - DNA, 120 bp, Artificial Sequence
  ENSG00000236751_0 (sequence is synthesized)
aggctaacagaaacccagccctgcccactgggtgaaactgcaagtcgagagcgtgggaaaccagcaagttgagagaggatccagaagtaaccccttctaaaacgggaaagatgccttccg

SEQ ID NO: 1005280 - DNA, 120 bp, Artificial Sequence
  ENSG00000236751_1 (sequence is synthesized)
aaagcacttggccctaaagagaaaacactaggaggatgggaaccagggacagagaagctacttgctctgcagctgtttgggccagatgtgacttgctcctccttgttttccaacatgatt

SEQ ID NO: 1005281 - DNA, 120 bp, Artificial Sequence
  ENSG00000236751_2 (sequence is synthesized)
ggaacacactggcggaagagcacactgacaagcaccagcagacaacggcacgctggggcacgccggcaggccatcaacctgcagaacgatgtggagtttggcctgggcagtcggaggaga

SEQ ID NO: 1005282 - DNA, 120 bp, Artificial Sequence
  ENSG00000236751_3 (sequence is synthesized)
gtccagctgctgagcagtccgactccaggaaaaaaacaccttcccattccatctcccttctggctctcccatcttctgagagctacttccattcaataaaaccttgcactcattctccaa

SEQ ID NO: 1005283 - DNA, 120 bp, Artificial Sequence
  ENSG00000236751_4 (sequence is synthesized)
acaaacaggcctcgttaagtccctgccccatttattaccattagataatattctttgtcctatcatatttctccatgactgttcattcttcatcaaacctagaataaaaacactcaaatg

SEQ ID NO: 1005284 - DNA, 120 bp, Artificial Sequence
  ENSG00000236751_5 (sequence is synthesized)
cactgggtgaaactgcaagtcgagagcgtgggaaaccagcaagttgagagaggatccagaagtaaccccttctaaaacgggaaagatgccttccgaaaggatgtgacttgctcctccttg

SEQ ID NO: 1005285 - DNA, 120 bp, Artificial Sequence
  ENSG00000236751_6 (sequence is synthesized)
tgaggcctccccagccacgtggaactgtttgagtacttgtgagtttctgacataatagaatgaaagaagatcagagcaggaagatattttagagattggagccctggcccagaaattggt

SEQ ID NO: 1005286 - DNA, 120 bp, Artificial Sequence
  ENSG00000236751_7 (sequence is synthesized)
tggcccagaaattggttgttatgatttgagaagagtcaaagaccctgcacttgatggatcaactggcatcacctagaccagtaaactggctcgtctggtctgtggccccacacccaggaa

SEQ ID NO: 1005287 - DNA, 120 bp, Artificial Sequence
  ENSG00000236751_8 (sequence is synthesized)
tagccccctgcccaccaaactaccttcaaaaaagcctagcctctgaagttttgaggaggctgatttgagtaataataaaactcaggtttcctgtttagccagctctagtatattaaactc

SEQ ID NO: 1005288 - DNA, 120 bp, Artificial Sequence
  ENSG00000236751_9 (sequence is synthesized)
tttctgtattgcagttctcctgtctgaatgtcagctctagctgggcagtgggcaagaagaacccattgggcaattacaaagagggaagtaagacatgactgctgtcacatttcaatgcct

SEQ ID NO: 1005289 - DNA, 120 bp, Artificial Sequence
  ENSG00000236751_10 (sequence is synthesized)
ttctgggcctgataatttaaaggggctcacatttctcaaagccaacttatcccaatcttgccaaccacaagttttgtagcagttacggaaaacaaaaactacaacctgggacaagaccaa

SEQ ID NO: 1005290 - DNA, 120 bp, Artificial Sequence
  ENSG00000236751_11 (sequence is synthesized)
agtcacatacccctctgttctcattgctgtataacaactccattcctactttggttcagggagttacctaattttgaggtgctccctgatgaacattgactgaataaagcctttgacctc

SEQ ID NO: 1005291 - DNA, 120 bp, Artificial Sequence
  ENSG00000236751_12 (sequence is synthesized)
ggcttattttcctgagagtctctaagtgactcactgcatcacgtaaaactaagaaaaaggatgtcctgaattttcctgcttagagagcttgtttttctttcctgttgcatcaaaggggtc

SEQ ID NO: 1005292 - DNA, 120 bp, Artificial Sequence
  ENSG00000236751_13 (sequence is synthesized)
tgttaaactttctaaaagtactaatctgacctgatatctgaagtaacagataggaatttgggctctttaaatggagcccttcccccatacctgcatctcattgaagaggctgaacttcaa

SEQ ID NO: 1005293 - DNA, 120 bp, Artificial Sequence
  ENSG00000236751_14 (sequence is synthesized)
aatcatgttggagaattaagtctcgttcccagatttaatttcttatttttatattgttgcataagaaatctactctataaggcatctattttcaaatttggaaaatcttattttaagttc

SEQ ID NO: 1005294 - DNA, 120 bp, Artificial Sequence
  ENSG00000236751_15 (sequence is synthesized)
atttatttaaagaccaacaaacaaaaacaccaaattcactagcccaggtctttatggaccaccatctcccctccccgcctccatttctccctggagtagtgattgtggggccactgcatg

SEQ ID NO: 1005295 - DNA, 120 bp, Artificial Sequence
  ENSG00000236751_16 (sequence is synthesized)
aattttactctattatttatctaatgagcaaagccaaggctggcaatgctgagaatgcatgagggaaaaaaagatatcacaatgacagcacactctgcagcgttccatccaaaagcaagg

SEQ ID NO: 1005296 - DNA, 120 bp, Artificial Sequence
  ENSG00000236751_17 (sequence is synthesized)
agaagaccacagaagctctgcatttggaacttttcctggattctgtcccatttgcttcttcccatgaccgattttgatctgtatcctttcccctgtaataaacagtaaccataagtagaa

SEQ ID NO: 1005297 - DNA, 120 bp, Artificial Sequence
  ENSG00000236751_18 (sequence is synthesized)
aagtcgagagcgtgggaaaccagcaagttgagagaggatccagaagtaaccccttctaaaacgggaaagatgccttccgaaaggtgaccaaattcttgttttagatggtggtgttaattt

SEQ ID NO: 1005298 - DNA, 120 bp, Artificial Sequence
  ENSG00000236751_19 (sequence is synthesized)
gggaggttggaagggaggcaggtgggagaagggacatgtccctttcgaagagcccctttgtttcttctgtggagcacagctctgtgggaggcatctgctctttacctatagaccggatgg

SEQ ID NO: 1005299 - DNA, 120 bp, Artificial Sequence
  ENSG00000236751_20 (sequence is synthesized)
cctggtactggtcttctctagactgaaggtcctccaccaggtctcctgctgctgctacctaagaaagaaatctcacaagggtgttaaaagcacttggccctaaagagaaaacactaggag

SEQ ID NO: 1005300 - DNA, 120 bp, Artificial Sequence
  ENSG00000233502_0 (sequence is synthesized)
gttcctcccaccacgactcatggaccagtcattacaatagcctgccaaaccaacccacctttcaaaaccccactccagggcccctgcttcaggactcgcagatctactctccctgctcag

SEQ ID NO: 1005301 - DNA, 120 bp, Artificial Sequence
  ENSG00000233502_1 (sequence is synthesized)
atccagtacagtgtccacagccgctggcctcagtgaacatggcaaaactgaggctccgaagagtggggagctggcctaaggtcttgaagccagagacagccagagctgggactcaagcca

SEQ ID NO: 1005302 - DNA, 120 bp, Artificial Sequence
  ENSG00000236753_0 (sequence is synthesized)
tccggttctcctgtgcgcgccccggatccgccacacacctcgccccttctccctgggctcgctctccggaccctaaccccttcccgagcgaggccgagcaacgctctcagcagctgaact

SEQ ID NO: 1005303 - DNA, 120 bp, Artificial Sequence
  ENSG00000236753_1 (sequence is synthesized)
aagactccggaggccgcacgtccccctcagcaggccccgcctgggcctctcggctcggctgccctccattgcacccctggcccaaccgtgctgacgcggaagggtggggcagcacgagct

SEQ ID NO: 1005304 - DNA, 120 bp, Artificial Sequence
  ENSG00000236753_2 (sequence is synthesized)
caaggcccggcacttactcgggaagccactgcagttaccaaagagtatgtcgcttattgtctaagaggttggactcctgaaagcctggacagtgtcatcatcttcacctgaagagtggaa

SEQ ID NO: 1005305 - DNA, 120 bp, Artificial Sequence
  ENSG00000236753_3 (sequence is synthesized)
aaattcaagcaaagagtttctcaggaaatgaccaagtaaaacatctggagtaagtcagcaggattcacagtgactccccccaaccagctggtggtgtttctctctgaaagcagcgcttgg

SEQ ID NO: 1005306 - DNA, 120 bp, Artificial Sequence
  ENSG00000236753_4 (sequence is synthesized)
taccagtgtgaactctcttccttcagaagtctcatcaggtgtttcagatgagttctccggaatttggacctcctactcttgggttgaaggtggacgtaatacgagggtctggtcccccat

SEQ ID NO: 1005307 - DNA, 120 bp, Artificial Sequence
  ENSG00000236753_5 (sequence is synthesized)
accttgaggactccgctgccatctgacaattacagacaatccaattgtcctcatccttgaggactctgctgccatctgacaattagagacagtccaaaacatgccacactttgatcctaa

SEQ ID NO: 1005308 - DNA, 120 bp, Artificial Sequence
  ENSG00000236753_6 (sequence is synthesized)
acacattcctggctttggtcacttttgaaaagttcctgagttatgagaaatcaataataagagtgttcaaaacctgaacactctttttagaaatacctgctggaactacatatatgattt

SEQ ID NO: 1005309 - DNA, 120 bp, Artificial Sequence
  ENSG00000236753_7 (sequence is synthesized)
atggggtactgtcttgtagtatctgggaaagtagacccatctaacctggaatgatcataggcaacaatgaccaaaaatggggatcttttgatatacctaaagtaatttatttgtgcacac

SEQ ID NO: 1005310 - DNA, 120 bp, Artificial Sequence
  ENSG00000236753_8 (sequence is synthesized)
cattggaaagagctggttttagaaccagacatgtaaataagagactgacttccactggcacctaaaaacttctaaaagaaatcctgaaagaaaaagtcaccttcattcaagaggaaattc

SEQ ID NO: 1005311 - DNA, 120 bp, Artificial Sequence
  ENSG00000236753_9 (sequence is synthesized)
tacaggtttctgataactttggagatcatatcattggactaagtaacaactttcaggatataattggagacacttgttattttactaaggatttgactggaatgacatattttcagatat

SEQ ID NO: 1005312 - DNA, 120 bp, Artificial Sequence
  ENSG00000236753_10 (sequence is synthesized)
gaccagactgctttgaagaatggaggttgactctatagaggcaattagaaagcctcttggaaagactggcctggtcccttgtctacgtagttccctttcaagatttctgtcctgtgttaa

SEQ ID NO: 1005313 - DNA, 120 bp, Artificial Sequence
  ENSG00000236753_11 (sequence is synthesized)
gtaaagaatgtcactttctgacaggcctgggaacctcaaaatatttccgctgtgtatctctcattgttttatttcttctgagaaaactaaattcatggtacactgaagaggtgattccac

SEQ ID NO: 1005314 - DNA, 120 bp, Artificial Sequence
  ENSG00000236753_12 (sequence is synthesized)
aagtgatggcagctataaatcaatgactggtaggactacctgggcatgagcctttctggcaatgagggataccttgacactcagattttgatcatcagtgctttcaaaaggaaagatttt

SEQ ID NO: 1005315 - DNA, 120 bp, Artificial Sequence
  ENSG00000236753_13 (sequence is synthesized)
tgatcaaaaggaagaaatgagaaaaagaacttttatctgaagaatgcaagtcctttccaattatcagatccagagaggtattaaaatgagacggcaatcctgtcctacacacaccccctt

SEQ ID NO: 1005316 - DNA, 120 bp, Artificial Sequence
  ENSG00000236753_14 (sequence is synthesized)
ttgaggcatgtactcatctttttatactgcttactattgccacaagtagctgaaaattagcctactggtgctgcaccagacattataacccatatcctatagcttaataatggatagcca

SEQ ID NO: 1005317 - DNA, 120 bp, Artificial Sequence
  ENSG00000236753_15 (sequence is synthesized)
aatggatagccaatcaacagcttatgttatgttaatgtaaattattggtaaataactcaggaactgcctcttctttccttttaaaaacccacttgtgggccgggcgtggtggctcacgcc

SEQ ID NO: 1005318 - DNA, 120 bp, Artificial Sequence
  ENSG00000236753_16 (sequence is synthesized)
gctcgctccttgacggctgaccgacactgggtctgaggtgtaagcgctttccaggcccttccctggggcttggaggggaatggcgcaaaggacttttcttacaagcagagaggttggact

SEQ ID NO: 1005319 - DNA, 120 bp, Artificial Sequence
  ENSG00000236753_17 (sequence is synthesized)
ggctttctccctttcacctccagaccctccttttccttccagccctgtgatctgaactcatccctttctgccgcttctcttggcttccatacatctcttaggcagagatgttttaaaatt

SEQ ID NO: 1005320 - DNA, 120 bp, Artificial Sequence
  ENSG00000236753_18 (sequence is synthesized)
tcacaatgtacacatttccttctctcaggggaaatgaatttaaatttagagcagaaggaacaagcagaacaacaacagaatgggaataagactgctgagactataaaaatgcagatccaa

SEQ ID NO: 1005321 - DNA, 120 bp, Artificial Sequence
  ENSG00000236753_19 (sequence is synthesized)
caaaattttttctcaccaggtctagtgaatgacactgtgatatggtctggctctgtgttcccaacaaaatgtcatctcgaattgtaatccccacgtgtcgggggagaagcctggtgggag

SEQ ID NO: 1005322 - DNA, 120 bp, Artificial Sequence
  ENSG00000236753_20 (sequence is synthesized)
ggagatgattggatcatggaggcagtttcccccatgctgttttcatgatagggagggagttcttacgagatgtgatggtttaaaagtgtttggcagtggccgggcgcggtggctcacgcc

SEQ ID NO: 1005323 - DNA, 120 bp, Artificial Sequence
  ENSG00000236753_21 (sequence is synthesized)
gccaccgccctcgccagtttataagtcctttacggaaacaacactgaagggagctggagggcagtagctaatgtgctgtcctcctggagtggtcctggttttaaatgtcttgtccccgcc

SEQ ID NO: 1005324 - DNA, 120 bp, Artificial Sequence
  ENSG00000236753_22 (sequence is synthesized)
ttccagagtcagatggagacaggaaaaggaaatggtcccgtgtcctcctaccctgtttggtttgcagtctgtgatgcccttcattgtaaacatttcttgtgagccgcatcctactaatct

SEQ ID NO: 1005325 - DNA, 120 bp, Artificial Sequence
  ENSG00000236753_23 (sequence is synthesized)
tgtggcattggtttgctcgggaatgacgttcacccacagacctgaaaagtccttacagagttgggaagctgcgtgtcatcattttttcagttggcaaatctgcccactttgaactgacat

SEQ ID NO: 1005326 - DNA, 120 bp, Artificial Sequence
  ENSG00000236753_24 (sequence is synthesized)
aattgtagcctaaaagttcagagagagagtagttcaggaaaaagactattccttcttcttagagggaacagcagccctgaaaactatgtggacatcataccagcttcttacaacaaaagg

SEQ ID NO: 1005327 - DNA, 120 bp, Artificial Sequence
  ENSG00000236753_25 (sequence is synthesized)
atagagctctgcagggaactgccttttttccctctctgtcttacagcagaggtgcaggtcatggtttttctgcctctgcctcagaaccaggggtttgggtcaagtttttttcacctctgt

SEQ ID NO: 1005328 - DNA, 120 bp, Artificial Sequence
  ENSG00000236753_26 (sequence is synthesized)
ttgtttactatcacttgaaaattctgaattagtctttaattttaactaattcctgttagttcctaactgaaatgtgtaccccttttgctcttccaggtggacgtaatacgagggtctggt

SEQ ID NO: 1005329 - DNA, 64 bp, Artificial Sequence
  ENSG00000236753_27 (sequence is synthesized)
aacaagcagatcacgaggtcaggagatcgacactgtcctggctaatacggtgaaaccccgtctc

SEQ ID NO: 1005330 - DNA, 120 bp, Artificial Sequence
  ENSG00000236753_28 (sequence is synthesized)
ccatctcaaaaacaaacaaacaaaaatgagattcaacctcctcccatctctctgctgtcttcagtaccacatgaaaagatctagaggagacttctaatgactcagacccctaaaggaaga

SEQ ID NO: 1005331 - DNA, 120 bp, Artificial Sequence
  ENSG00000236753_29 (sequence is synthesized)
cagaaaaagctgcctctcactccctttctggggtcttctgtcttcctgtggagtgtgaagagtcatggagagatttcatgacagtttccagcacaaaactctgctctcttttgtatcgtg

SEQ ID NO: 1005332 - DNA, 120 bp, Artificial Sequence
  ENSG00000236753_30 (sequence is synthesized)
tcgcctgatccctttgacttttaggagtactggatattactttgttctgtgagagaacacttaacctttgtgtatgtgatggctggcaagttactggaggtggctgacagcagttgttta

SEQ ID NO: 1005333 - DNA, 120 bp, Artificial Sequence
  ENSG00000236753_31 (sequence is synthesized)
cagtgaatggttattattattactacagggagttactggtttctttgctggttaagataagaaaggcacggtttaaatacttagagaaatgtttttgtattgaagtacaccatgaaagtg

SEQ ID NO: 1005334 - DNA, 120 bp, Artificial Sequence
  ENSG00000236753_32 (sequence is synthesized)
ttgcatagcccagtcccatggagtttccctctttttggggacccaggattcagcctaaaaatggaatccttaatttataaagctctagatgctctgccttcaattgcatctgcttttcac

SEQ ID NO: 1005335 - DNA, 120 bp, Artificial Sequence
  ENSG00000236753_33 (sequence is synthesized)
atatttaaattattaggctctaaaaactgtaaatgctttgatggccctgctccttaatgggctctgccctgagctcagtgatccaactggaaaacagactaaattaaaagctacttatct

SEQ ID NO: 1005336 - DNA, 120 bp, Artificial Sequence
  ENSG00000236753_34 (sequence is synthesized)
aagtgaaataggtctccttataaaatccaatgatagattcctgtgattttgtattaccttggcatccatttttaattttcttccaacacacccaaactcctccttgaaaaggcttaaatt

SEQ ID NO: 1005337 - DNA, 120 bp, Artificial Sequence
  ENSG00000236753_35 (sequence is synthesized)
ctttctccttgtactttgagatataaagttactactgcattttctctaaaactcagtacgagcttcagccatgtggaacagataaactttaaacttttccatttacaaaggtacagtttg

SEQ ID NO: 1005338 - DNA, 120 bp, Artificial Sequence
  ENSG00000236753_36 (sequence is synthesized)
aatccaactgtccttgtaaaactagtgagttttaccagtctcatgactaaaatttttttctctgcttggttttgttttgtttttcttacctcagttcaccagcagtttcaatgtggctaa

SEQ ID NO: 1005339 - DNA, 120 bp, Artificial Sequence
  ENSG00000236753_37 (sequence is synthesized)
aattttttaattaaagctatgaagtcattatctgtgtctgtctgatttatgtgtaccatgtatacatgtctgtttatatattgtctacatggtaccactgacttatagaaaacgtgctca

SEQ ID NO: 1005340 - DNA, 120 bp, Artificial Sequence
  ENSG00000236753_38 (sequence is synthesized)
taaataatataaccaacccaaatgctttccatggtcacttgactttagtaatcttgggtttaaattaagatagtttttaaattattggtaaagtaaaatagaaacgtcttcaaattttaa

SEQ ID NO: 1005341 - DNA, 120 bp, Artificial Sequence
  ENSG00000236753_39 (sequence is synthesized)
tttagacatgtttgcctagatctattggttagactggtttatactgtctctgctaaatgtcttaaggtcataaggccattgcttttatggtattttttggtatttgcttaatttgtctat

SEQ ID NO: 1005342 - DNA, 120 bp, Artificial Sequence
  ENSG00000236753_40 (sequence is synthesized)
gagcttatgtctttggatttgagcctttagattctgaggactagacaagtggccctggggacagtgcctgggccccatcatccctagttgagctgtgcctcttggctttactgcaaggag

SEQ ID NO: 1005343 - DNA, 120 bp, Artificial Sequence
  ENSG00000236753_41 (sequence is synthesized)
actaagagttaacattgtggttaatatatgtaactaaaactactaggccagaaatttacatagagagcatataaagaagatgtaaagaaagttgaaaagggtaatttttttcctttacgt

SEQ ID NO: 1005344 - DNA, 120 bp, Artificial Sequence
  ENSG00000236753_42 (sequence is synthesized)
aagaggggactttggtcaaaatgataagggggatagtaaatctttgtcctaagtagaataccaatataagaaaaatgaagtataggacaaaactgaaggtgtaagcaagttgtaaaaggt

SEQ ID NO: 1005345 - DNA, 120 bp, Artificial Sequence
  ENSG00000236753_43 (sequence is synthesized)
ttgtataagattaatctcatgaaaagaattttgtatgtgataaagttggctaaaattagaaggagattattaacttttctaaaaattatgcattgatatttaaagcacactgatgtggga

SEQ ID NO: 1005346 - DNA, 120 bp, Artificial Sequence
  ENSG00000236753_44 (sequence is synthesized)
cccctgtttcagaataacagggctttcttggagcattaatctgctctttaatagaaaaatttttaaaggttatagaaattttatgcagttaaaactgagggctagatgcggtggctcaca

SEQ ID NO: 1005347 - DNA, 120 bp, Artificial Sequence
  ENSG00000236753_45 (sequence is synthesized)
acaaacaaacaaaaaacaaaaaaaaatacctgcctgagatttgatagatttgtttataaggatttaatgaaattagccttaggattaataatatactgatgcaaaagtaaaatttggttt

SEQ ID NO: 1005348 - DNA, 120 bp, Artificial Sequence
  ENSG00000236753_46 (sequence is synthesized)
ttaataatatactgatgcaaaagtaaaatttggttttctcttttgaataagatttttaagtatttttaagaaacagtaaaaaaaagttcaccttttaagtaaaaaaaaaaaatgggaaag

SEQ ID NO: 1005349 - DNA, 120 bp, Artificial Sequence
  ENSG00000236753_47 (sequence is synthesized)
agagattctgttggtctcatgccgtctttataaggtctttggattgtttggaaaaccgagtttactctctatcaaagagtaaagggttttgctttttgcaatctttgaattatcactttg

SEQ ID NO: 1005350 - DNA, 120 bp, Artificial Sequence
  ENSG00000236753_48 (sequence is synthesized)
gctaaatgaatgaatactattttacagtgacttatgatcctatttggtcaaatattttaaacttttaaattggacatacttcctaaaatcaaatttcaaattctaaaattaagtattttc

SEQ ID NO: 1005351 - DNA, 120 bp, Artificial Sequence
  ENSG00000236753_49 (sequence is synthesized)
caaaaggaacctctggaagtccaagagaggaatattaggcatatttagcatgttaaaatcatatggaaagcattgtcaaagaaataatggtgtttaactttctttgagttatattaggat

SEQ ID NO: 1005352 - DNA, 120 bp, Artificial Sequence
  ENSG00000236753_50 (sequence is synthesized)
gaatgtgttttgtatgagattcctaaaattttaatgtgtcttggtatatgttatcagtcataattatgattattatgttaaactgttgtaaaccacaggaataaccaaatttccttgtca

SEQ ID NO: 1005353 - DNA, 120 bp, Artificial Sequence
  ENSG00000236753_51 (sequence is synthesized)
attgcatctttaaccatggctattctaagtcttttgctatctaaaacaattagttttatttctcttctcataaagcagttacaattgtctataattcaaaatttgctttttcttcaagga

SEQ ID NO: 1005354 - DNA, 120 bp, Artificial Sequence
  ENSG00000236753_52 (sequence is synthesized)
attgctaactcaacatcaagcagaacacgaattaattacatgtgactgaactgacagaagactgaaaagatttgctgactttttatttaaaacattgctggtttttttttttattttgtc

SEQ ID NO: 1005355 - DNA, 120 bp, Artificial Sequence
  ENSG00000236753_53 (sequence is synthesized)
ttccagagtcaagaaaactttttttccttgagctatttatttatactttataacaattgggtaaaaatacctttgtgaacaacattgaaacatctgcctttctctctacctgattactcc

SEQ ID NO: 1005356 - DNA, 120 bp, Artificial Sequence
  ENSG00000236753_54 (sequence is synthesized)
aaaatttggaaactattcatgagtactcttattttatggcaatctagttatttgcatacatttaataagaatcttttttctgtaacaggatataattggagacacttgttattttactaa

SEQ ID NO: 1005357 - DNA, 120 bp, Artificial Sequence
  ENSG00000236753_55 (sequence is synthesized)
taggggagaagccggcactcgggcgccgcagcgacagctccgccagccgccatcttgtcagcaccgtagcggccgccaccgaccgctggcagcgaacgggaggaggggagggggcgtggc

SEQ ID NO: 1005358 - DNA, 84 bp, Artificial Sequence
  ENSG00000236753_56 (sequence is synthesized)
ccaggaagcagagcttgcagtgagctgacatggcaccactgcactccagcccgggcaacagtgcccacttgtggctgagtgtgg

SEQ ID NO: 1005359 - DNA, 72 bp, Artificial Sequence
  ENSG00000236753_57 (sequence is synthesized)
tactaaaaatacaacaattagccagcactcaagacttcaagaatgtcttgaacccaggaggcggaggttgca

SEQ ID NO: 1005360 - DNA, 120 bp, Artificial Sequence
  ENSG00000236758_0 (sequence is synthesized)
agtatttccctccggagtgtagctcctgtgaaatgctccaagatgatctcggatgcaaattcagccatgcaagagtgatgaaatgcttgcattatttccaaagatgaattaagacaatga

SEQ ID NO: 1005361 - DNA, 120 bp, Artificial Sequence
  ENSG00000236758_1 (sequence is synthesized)
ggcagctcttcatttgtcaaattttcaaaggattctgtgaggcccccaaaacttgagaacctcttggattcatctctccactctggtttctacccccagaatctatcaagtggcctcact

SEQ ID NO: 1005362 - DNA, 120 bp, Artificial Sequence
  ENSG00000236758_2 (sequence is synthesized)
cctggattacctccagcacaagagaaagtgcatattctgtctgctctactgggccaggggagtagggaaagaacaggagacagtaaggataaaatgaaagcaacataaatgggcagcata

SEQ ID NO: 1005363 - DNA, 120 bp, Artificial Sequence
  ENSG00000236758_3 (sequence is synthesized)
aaatagaaaaagcagctattgcatctccctcatttcagattatttgtcagatatgcccttccccacacatgtgtgtatgcatgttccattacatcacagttctgtccatctgcccgtccc

SEQ ID NO: 1005364 - DNA, 120 bp, Artificial Sequence
  ENSG00000236758_4 (sequence is synthesized)
actagaccatgaatccttggcaatcaagaccataactctcatagtacccaacacaataactgccctgtaatacattcccaataagtatttgctgaatttaattgaagcaaattaatagaa

SEQ ID NO: 1005365 - DNA, 120 bp, Artificial Sequence
  ENSG00000236758_5 (sequence is synthesized)
gaagacatattgtgcatagttcctataattatatacaaactgaggcccagaactgaaccattagccatggtattggtatcactgtcaactcagactcccaggcaacagtgtaaatggaat

SEQ ID NO: 1005366 - DNA, 120 bp, Artificial Sequence
  ENSG00000236758_6 (sequence is synthesized)
ggcagctcttcatttgtcaagatccagcacaaaggtgctcaagaaatgttgatatgaaaaaaaatcaaaccaacctggctaagggttctctacactggaaattacctgtggataagttat

SEQ ID NO: 1005367 - DNA, 120 bp, Artificial Sequence
  ENSG00000236758_7 (sequence is synthesized)
gggacaccaaaataataagaaggacttgcaatcaaaacctgaagaggttttctctgacattgacttcagcagttcttcaccctaggaggtctacagaggggcttcaggaaaccagaaacc

SEQ ID NO: 1005368 - DNA, 120 bp, Artificial Sequence
  ENSG00000233509_0 (sequence is synthesized)
agagttggacatttctattttgatttgcatttcaattgaggttgatagggagtgaccttcacgtctgaatgacctgcagatgagaacagaatagacttgattatgaagcaagaaattttt

SEQ ID NO: 1005369 - DNA, 120 bp, Artificial Sequence
  ENSG00000233509_1 (sequence is synthesized)
aaaggatttatctgatggaacatcaagaggattctttctttcttttaagagatatgaggtctcactctgtcatagtggcacaatcatagctcagtgcagccttgaactcctgggctccag

SEQ ID NO: 1005370 - DNA, 120 bp, Artificial Sequence
  ENSG00000233509_2 (sequence is synthesized)
aagcagctgggactacagatgaataccatcatgcccccagctagtaagagggttctatgtgttgattcactgggaaaccagagactagagatacctgtgaagacactttcaagaagttag

SEQ ID NO: 1005371 - DNA, 120 bp, Artificial Sequence
  ENSG00000233509_3 (sequence is synthesized)
aagaattacccttgaatgaagaaaggagctgactagaagtagtttattgaataacacacaaagattgtttcaaacctacaaaagataaatgtgaggaagggatttggggaatcctcctat

SEQ ID NO: 1005372 - DNA, 120 bp, Artificial Sequence
  ENSG00000233509_4 (sequence is synthesized)
gtcctccagtctggctatacattaggatggaacagaaatcctaccaatgtgatgaatgtggcaaagctttcagagtgcatacctcaatggccatcagaaaacctatactggagtgaaacc

SEQ ID NO: 1005373 - DNA, 120 bp, Artificial Sequence
  ENSG00000233508_0 (sequence is synthesized)
ggggccgaccagctcgggccgctggcacagtcacgcgcgtccacacatcacccccgcacccacacgccgggcagggtcctcgcctcttcgccccgcgccgcgccgcgcagccaagcatcg

SEQ ID NO: 1005374 - DNA, 120 bp, Artificial Sequence
  ENSG00000233508_1 (sequence is synthesized)
tctgccctgtgggggcgcaggcaccccaggtgattctcaggcacgcaagagtgtttgaatggctgatgcagtgtcagggacaaggaaagttgagagcctccaggcacaactccagggctg

SEQ ID NO: 1005375 - DNA, 120 bp, Artificial Sequence
  ENSG00000233508_2 (sequence is synthesized)
ccaagccagctcctggactttttaaaattcctggaattgtgtctctctatcatggggctggtactattaccatacgtttcagaaaacagcatctgtttacaaagcgttttattatacaac

SEQ ID NO: 1005376 - DNA, 120 bp, Artificial Sequence
  ENSG00000233508_3 (sequence is synthesized)
acagaaatacatttcaccccaaatgataacagtgaacttcagcccccagaatctccttctccccttcgtgaaacagagctgggatgatggcagaggactccagaacgcactgagattgtt

SEQ ID NO: 1005377 - DNA, 120 bp, Artificial Sequence
  ENSG00000233508_4 (sequence is synthesized)
ccttggcgtgacaaatggcaaaggactctagaacgcacagagattgttccttggtgtgacgggccagacagcacacctttcttcaagccattctcacatcaaataaaacgttgataaatc

SEQ ID NO: 1005378 - DNA, 120 bp, Artificial Sequence
  ENSG00000233508_5 (sequence is synthesized)
attgtttctctaagcttgaaaaatgctactaactcaagacaaggtgaaagtgagtttgttgaaatcaacgtgaaggatcgagggtaccaacttggaatgtaaaaccatagaaaataccat

SEQ ID NO: 1005379 - DNA, 120 bp, Artificial Sequence
  ENSG00000233508_6 (sequence is synthesized)
ctgggaacacggaaatcatctgtcttatctggaagcctgtctccagagtggcaaacttagggactggtttgaggacagagtgtgccctgtgtgctggggaggggtgtaaaggactgggat

SEQ ID NO: 1005380 - DNA, 120 bp, Artificial Sequence
  ENSG00000233508_7 (sequence is synthesized)
ggaggagggggggctccagatgttcttttacccataaatacactgtacatcaccgtctgccactgaagcttaaggattgaaaaccttggggatgtttcactggttttgcttccgcctctg

SEQ ID NO: 1005381 - DNA, 120 bp, Artificial Sequence
  ENSG00000233508_8 (sequence is synthesized)
caatgtttgaacttgcattttctgagccacgtatgcaactaaaagccttacatgcattacccacccttcacctctcttactagtcctatttacaggtgagaaaactgaggcacaaggagt

SEQ ID NO: 1005382 - DNA, 120 bp, Artificial Sequence
  ENSG00000233508_9 (sequence is synthesized)
ttcctcctgacagctcctggactttttaaaattcctgtaattgtgtctcccaatcatgggccaggaatatgagaatcagctgtgaacttcgagcctgtccatctcaaaactcttcatctc

SEQ ID NO: 1005383 - DNA, 120 bp, Artificial Sequence
  ENSG00000233508_10 (sequence is synthesized)
caagacatttcaatagagctttgccagtaaacaaaaataaatacggttcggtttacccagaggccaaatcccttgtaataagttctgggccagtttcttcccagagcgggagaatataca

SEQ ID NO: 1005384 - DNA, 120 bp, Artificial Sequence
  ENSG00000233508_11 (sequence is synthesized)
gttgtagtttgagttgattttatttctttgaggctttgtttttctagtctttcaggccttaacctcactccctcaggaacagctgaaatatgagaagagatcatatggcccccaaaaagt

SEQ ID NO: 1005385 - DNA, 120 bp, Artificial Sequence
  ENSG00000233508_12 (sequence is synthesized)
ccccagattaaccaagattgatgccacccagggcccagttggggtcaacaccctgtgtcaggtgcgctctctgtataattcctgtttcctgtgagaagagcattaaaggcccgttaatgt

SEQ ID NO: 1005386 - DNA, 120 bp, Artificial Sequence
  ENSG00000233508_13 (sequence is synthesized)
tttaaaatgaaatgcaacctcttaataatcaggtttctccactctgctaggattccaaaaaaaaaaatcagcaactgacaaatgttaaaaatttcctcgctgctaatcatgctttccccc

SEQ ID NO: 1005387 - DNA, 120 bp, Artificial Sequence
  ENSG00000233508_14 (sequence is synthesized)
gcttccctttctttccccctctcttctaacatgaatttattttctatttgaaagccaatctcactggttattagatattctccctgctgtcactatcagtaaattattaaacagctgacc

SEQ ID NO: 1005388 - DNA, 120 bp, Artificial Sequence
  ENSG00000233508_15 (sequence is synthesized)
aagctttgttttaaaatgattctcttatgaagctcagtgatatatttgctatgaatactgaatggtgccgcggtctctaaggtcacgtgaatgattcctatttactacctttagcaaaat

SEQ ID NO: 1005389 - DNA, 120 bp, Artificial Sequence
  ENSG00000233508_16 (sequence is synthesized)
gtgtgtgcaattagcggcaagaacttgacttgaatcacagttactagggatgcctgtagctcatttacatggagctccctttactcattacactcctgcccaggagaagcgtgttaagat

SEQ ID NO: 1005390 - DNA, 120 bp, Artificial Sequence
  ENSG00000233508_17 (sequence is synthesized)
tctaggccaggtcacgaaatagcatatagacttgtcttttgtcattcctcacctcctttcttgtcttgccactgctgagccttgacatacctgtgggaatcctttgtttcatggagcagc

SEQ ID NO: 1005391 - DNA, 120 bp, Artificial Sequence
  ENSG00000232453_0 (sequence is synthesized)
actgccgaggcccatgggcgggaagccgggcggcgggcgggacgtggcctcggtcccggccctgccccgccccgccgccactgagactcccagcgccaccaacgtcggagttgcagtttc

SEQ ID NO: 1005392 - DNA, 120 bp, Artificial Sequence
  ENSG00000232453_1 (sequence is synthesized)
tttctttagctgtcatatgcagacaagtactacccacctcgcctttggagtgagcagcatccctgtgcccatcctgctgtgattcaggagtctcgcagaagacatcagaatgcctttctc

SEQ ID NO: 1005393 - DNA, 120 bp, Artificial Sequence
  ENSG00000232453_2 (sequence is synthesized)
tgagtcacagtctgtatcttctagaaaaggctgtccatcttcaccccaagcccactggctcctgagatacgacatccagacccagtgcagctggacctggcccaggaagatcatgcggtt

SEQ ID NO: 1005394 - DNA, 120 bp, Artificial Sequence
  ENSG00000232453_3 (sequence is synthesized)
tctgggaagcactggagaaggaaaaggctgaagaaaggaagaccggaaaagaaatacaagtccttccgccttggcaaagatgatagtaccgttcccttcagtgttccggttctgctctat

SEQ ID NO: 1005395 - DNA, 120 bp, Artificial Sequence
  ENSG00000232453_4 (sequence is synthesized)
tggataagttccggtttgactatgactacgtgaaaatgtggaaccagaccttcaccccacattccagctccagctctaccacagaggaagtgcaatatcaccttagttattcaacacatt

SEQ ID NO: 1005396 - DNA, 120 bp, Artificial Sequence
  ENSG00000232453_5 (sequence is synthesized)
cacgactctctcatgtcccaatttcctgtccattgttctttcctctacttggcctgatttctaaaggcctctcttggttgcattaagcgggattcctgagggattcccttggcagttacc

SEQ ID NO: 1005397 - DNA, 120 bp, Artificial Sequence
  ENSG00000232453_6 (sequence is synthesized)
ttgggggagctcttaggtttggggctgatccatgtcctctaaatgtaggacttcaaagctcccaaagataggcaggcccagtgggaagctgggaaatgctctctgacccctctgggaggg

SEQ ID NO: 1005398 - DNA, 120 bp, Artificial Sequence
  ENSG00000232453_7 (sequence is synthesized)
ctggcagtcagagggccttttggaaagagtcagacctgatccataagtccctggaaaacaccctgcccagggagcaaatgccactgtggccttgactgaggcttcagaagagtttgggag

SEQ ID NO: 1005399 - DNA, 120 bp, Artificial Sequence
  ENSG00000232453_8 (sequence is synthesized)
ctgcaattcatccacacacgcattcattttcaagtagtggtttgcagttcaggctttggagccacataagcctggcttcaaagccactttccagctttgtaggaagtctctacattttta

SEQ ID NO: 1005400 - DNA, 120 bp, Artificial Sequence
  ENSG00000232453_9 (sequence is synthesized)
aacctccatttttttttcctgtaaaactggggtcttcatggtacttaacttcatcgtgatgttgagagaatgaaaagaaaaaggataaataaatggcttagcctcgtgccttggcacata

SEQ ID NO: 1005401 - DNA, 120 bp, Artificial Sequence
  ENSG00000232453_10 (sequence is synthesized)
tcctttcttatcgtctctatcagcatgtgggctctatcagcatgtgggtgtgctgtcattagcaccctgagagcacaactgaacaaaactgtagcccagggcattgaaaacctctcggag

SEQ ID NO: 1005402 - DNA, 120 bp, Artificial Sequence
  ENSG00000232453_11 (sequence is synthesized)
agggccaggtgtgaccaggtactggggaaaaaataagaagctgccatcagttgagaagatggccctggcaactggctatcaactgaaaatcctgcaaaaggatatttctcctgtgaagca

SEQ ID NO: 1005403 - DNA, 120 bp, Artificial Sequence
  ENSG00000232453_12 (sequence is synthesized)
ggtcatttcaactggggccttctgtgcctccagggacactgtgttccaatctcctacagaaggaactgaagtttgtctgggtttggaactggaaggtggggctgactgacaggttcagag

SEQ ID NO: 1005404 - DNA, 120 bp, Artificial Sequence
  ENSG00000232453_13 (sequence is synthesized)
tctggcttgcagacaaggtacagatggaaatcttcctggactcaggccaagaagaggagaaaggccctgtgcccatcctgctgtgattcaggagtctcgcagaagacatcagaatgcctt

SEQ ID NO: 1005405 - DNA, 120 bp, Artificial Sequence
  ENSG00000232453_14 (sequence is synthesized)
ccccgccccgccgccactgagactcccagcgccaccaacgtcggagttgcagtttctttagctgtcatatgcagacaagtactacccacctcgcctttggagtgagcagcataggaagga

SEQ ID NO: 1005406 - DNA, 120 bp, Artificial Sequence
  ENSG00000232453_15 (sequence is synthesized)
aatatggttatactttccttgctaaggaaatccaaccctccacaaggcagctttcttcccatccccttgaccttttaggaaaaagccctgtgcccatcctgctgtgattcaggagtctcg

SEQ ID NO: 1005407 - DNA, 120 bp, Artificial Sequence
  ENSG00000232453_16 (sequence is synthesized)
gttcaaggaaacgcagcaagtttgtggtagaagcaagtccagattccaggacccgaaggtctttgtagcagcctttgcagcagcctggagctactgaaaacagaagactggtccaagtga

SEQ ID NO: 1005408 - DNA, 120 bp, Artificial Sequence
  ENSG00000232453_17 (sequence is synthesized)
ggtctccagctctaagggctcggattcacggcagagatccacggttcctggctcctctctctagcccttagtcctctctattactgcaaggatttggcttcaaggaaaagaaatacaagt

SEQ ID NO: 1005409 - DNA, 120 bp, Artificial Sequence
  ENSG00000232453_18 (sequence is synthesized)
cattagcaccctgagagcacaactgaacaaaactgtagcccagggcattgaaaacctctcggagagggccaggtgtgaccagccctgtgcccatcctgctgtgattcaggagtctcgcag

SEQ ID NO: 1005410 - DNA, 120 bp, Artificial Sequence
  ENSG00000232451_0 (sequence is synthesized)
tggggattccctaaccccttctttcttggcacagacaggcagagaacacctcttttctcacccctgggcagccccaggaagtcaatccttccactattcctgctccgtgcctctcttccc

SEQ ID NO: 1005411 - DNA, 120 bp, Artificial Sequence
  ENSG00000232451_1 (sequence is synthesized)
tctgcccagattcctgggagactcaaaaccctgttcaactctctctgggctagctgctcccctccccaagaggatttctctccagagctggtatcatcgcttaatgatgttccaccaaca

SEQ ID NO: 1005412 - DNA, 120 bp, Artificial Sequence
  ENSG00000232451_2 (sequence is synthesized)
gctatcactgaatacataaagaaattgagcctatatgatttcaatcttcaccttctgatgctgatgaaacaggattctatgcagtttacagggggcctggaggaatgaatcagtggcagt

SEQ ID NO: 1005413 - DNA, 120 bp, Artificial Sequence
  ENSG00000232451_3 (sequence is synthesized)
gagtgacagagtggtctcagcaggaagaggtggaggcaacgctgggatttggaaatgcctctttttccacagggagaagcagcaggctgaagtggctctttagggagacacatacctcca

SEQ ID NO: 1005414 - DNA, 120 bp, Artificial Sequence
  ENSG00000232451_4 (sequence is synthesized)
ggtggcatctgtgctgtgcctgtcattcattgagaacagtttgttttctgcttatggaatcacaaaaatatttaatctgaagcttcagtggtgcagccgtccttgaggctgcagaccata

SEQ ID NO: 1005415 - DNA, 120 bp, Artificial Sequence
  ENSG00000232451_5 (sequence is synthesized)
ggatccttccttctctgtctggatgcactggagggccagcattctcggaggtggccagggtcctctgagaagccagcgcccaagtggtacctgagtccagtgaacggcaagtttcttttc

SEQ ID NO: 1005416 - DNA, 120 bp, Artificial Sequence
  ENSG00000232451_6 (sequence is synthesized)
ctctccagtcaagtaattgcatccatttcatcttcccagccctcctctagatgggaggtggagactttgagtaaagctgatcaccttacgtaatgtgagtgggtctcgtccaatcaactg

SEQ ID NO: 1005417 - DNA, 120 bp, Artificial Sequence
  ENSG00000232451_7 (sequence is synthesized)
aaggctttaagagcaaagacaaaggtttttcaaagagaaaaagaagactctcctcaagactgtgacatagaaactctgcctgaatttctagcctgctgccctgcagaatttagagtcaag

SEQ ID NO: 1005418 - DNA, 120 bp, Artificial Sequence
  ENSG00000232451_8 (sequence is synthesized)
cctacaacataactcttacctgaattctcaggctgctgacttaccctgcagattttggacttgccagcccctcacaatcccatgagccaattccttaaaataaatctctctttttccctc

SEQ ID NO: 1005419 - DNA, 120 bp, Artificial Sequence
  ENSG00000232451_9 (sequence is synthesized)
gggagctgctatcactgaatacataaagaaattgagcctatatgatttcaatcttcaccttctgatgctgatgaaacaggattctatgcagttttccacagggagaagcagcaggctgaa

SEQ ID NO: 1005420 - DNA, 120 bp, Artificial Sequence
  ENSG00000232451_10 (sequence is synthesized)
gtggctctttagggagacacatacctccacaggaagagcagtctagattgttttagcacattccacttaaggattgcagtgtgacagcagagaaaatcctctccagtcaagtaattgcat

SEQ ID NO: 1005421 - DNA, 120 bp, Artificial Sequence
  ENSG00000232451_11 (sequence is synthesized)
gaatttcgatagaggagtggcaggaggtgtactggctgaagaggaggcccaaggaactccttttcatacatcaaaactgagcttatcacctctaccctgaagtcatcctggacatcactg

SEQ ID NO: 1005422 - DNA, 120 bp, Artificial Sequence
  ENSG00000232451_12 (sequence is synthesized)
gtcccagttaatcactcacttatctttgccatccttgacctgggaagagaacgttgccctcattggtctggaatcagcaggtacctcatggctggaggtgtattttcagactcctttggc

SEQ ID NO: 1005423 - DNA, 120 bp, Artificial Sequence
  ENSG00000232451_13 (sequence is synthesized)
atctggtgaggcctgtggattcattctcagaatcacatttttaaatgcacataataaaatacatagaattgcaaaggaagttaattatattgaaatacagttatcaaaaatataaataaa

SEQ ID NO: 1005424 - DNA, 120 bp, Artificial Sequence
  ENSG00000232451_14 (sequence is synthesized)
gtagctctgggatttgctgcatgttgctggccctgagttttggagagaagccctgataagactaagagggatgctgataacctggagggacattgatgacagaaaatcctctccagtcaa

SEQ ID NO: 1005425 - DNA, 120 bp, Artificial Sequence
  ENSG00000232451_15 (sequence is synthesized)
gtaattgcatccatttcatcttcccagccctcctctagatgggaggtggaggtgtgtgtaccaatctcttaattcagaaatgagacaagaggaggaaaaaggagttccggagactttgag

SEQ ID NO: 1005426 - DNA, 120 bp, Artificial Sequence
  ENSG00000232455_0 (sequence is synthesized)
agcccaggacatgctcataaataaccatcagcactacaagaaagacgtaccaaatgtgatttggaggcgcaaggtgcacaggaatgaaggacaaaggacatcaagggccctgctggactt

SEQ ID NO: 1005427 - DNA, 120 bp, Artificial Sequence
  ENSG00000232455_1 (sequence is synthesized)
ggaacccaggcctgctggagcagagatcacatcacattgccaagttcattattcagattcacaattgggatcacacaactaaggcacctgctgtcctgtgtggtggcacacttaacttgg

SEQ ID NO: 1005428 - DNA, 120 bp, Artificial Sequence
  ENSG00000232455_2 (sequence is synthesized)
catgccagcctgtaagaatcaattggggcatctcttcacaacactgtgacaaaagatggcaagttggtagcttgaaactggccctgatgggagtatgtacatcacggaaattggcaaatg

SEQ ID NO: 1005429 - DNA, 120 bp, Artificial Sequence
  ENSG00000232455_3 (sequence is synthesized)
atcacggaaattggcaaatgctagaaatcaggacccccctccaaagctaattacatatctaccatgagaccactgcctaaagagccaggatgtccctatgttgcccaggctggtctcgaa

SEQ ID NO: 1005430 - DNA, 120 bp, Artificial Sequence
  ENSG00000232458_0 (sequence is synthesized)
actcacctaggaagtggtaggattgagatttgaatttggaagccttacctgaggatttttcacttaaccaactacgctacacttttaacagtcccttttccccgcaaagacttccaaaaa

SEQ ID NO: 1005431 - DNA, 120 bp, Artificial Sequence
  ENSG00000232458_1 (sequence is synthesized)
gaaagctaggtatcctcttttagggtatatttttgtctccaaaatttcccttataccaatggataagaaaaaaagtgacttgatttcaggttccaggtgcttggatttattcttcttctt

SEQ ID NO: 1005432 - DNA, 120 bp, Artificial Sequence
  ENSG00000232458_2 (sequence is synthesized)
aaaatgtctctgagtagtgggacagaaatttccccacccttctcctcatgaagctgtgtagacaggccacaaaagaaaagagcaactgactttcccatttctacatgacttgaccatgtc

SEQ ID NO: 1005433 - DNA, 120 bp, Artificial Sequence
  ENSG00000232458_3 (sequence is synthesized)
accaacacctgtgtcaaaaggaagtttcaccagatgcagtcaggcctccgcaggggctgctgagccgcagtgtctccaggaagacccgctgatgagtcacactccaatccactcatcaga

SEQ ID NO: 1005434 - DNA, 120 bp, Artificial Sequence
  ENSG00000232458_4 (sequence is synthesized)
ccaccgtgctgctggccttctgttgtctggtaagagccagagcacttggagaaaaatgcaaatgcgtctttagtacctacataaagttttacagaaatatgcaaataagacttaaagctg

SEQ ID NO: 1005435 - DNA, 120 bp, Artificial Sequence
  ENSG00000232458_5 (sequence is synthesized)
tggacaagaagaggaattgatcccaaatctcatcagctatggcaaggataacatccctgcctctgggagcctggcagcaccttttgcatactggtgagattgcactctggcctgtgcaga

SEQ ID NO: 1005436 - DNA, 120 bp, Artificial Sequence
  ENSG00000232458_6 (sequence is synthesized)
agaggaggctactggatagcatgagactctgtggtgatgggagagagggcacagggtgagtcttttctcacccatttgggtaacaaaacaaagaacctgagaaacacctaagttgtgctt

SEQ ID NO: 1005437 - DNA, 120 bp, Artificial Sequence
  ENSG00000232458_7 (sequence is synthesized)
tacagacttgaactcagagaaggatgagcttggaaatgcccagggttccatgatggtaagcatcaaatttttcaaaagatgtaagaaaagaaaaatgaagtctgatgcacccacaagcac

SEQ ID NO: 1005438 - DNA, 120 bp, Artificial Sequence
  ENSG00000232458_8 (sequence is synthesized)
agctttctggatagtgaacaaagagctaagatacacatctctgggttcattgaaacaacctctagaacagtttcacatatttccttttctctgtttctttcagctctttcaaccaaacca

SEQ ID NO: 1005439 - DNA, 120 bp, Artificial Sequence
  ENSG00000232458_9 (sequence is synthesized)
tgagtcattttccaatgtggcagtctattcctctatgtttaagtcactttaggcaatttgtaaacccaagtatgaagcttctatcggtctagcttgaatagaagcattaacggagtgctt

SEQ ID NO: 1005440 - DNA, 120 bp, Artificial Sequence
  ENSG00000232458_10 (sequence is synthesized)
aacctttagacaactcttttgtgaaggctggacaacagacggcttgatattatcttttcagtagggacacggaagaccagtggtgtgatgaggtagttgaaggcagatgtgttgtcctga

SEQ ID NO: 1005441 - DNA, 120 bp, Artificial Sequence
  ENSG00000232458_11 (sequence is synthesized)
accagatatatctcaaccacaggacacggatctgccaaaaccaatttaacaggtgggcagctgttactcgcctcccaccgcctcacagagttaggctctgagcgtgaacgcagacaactt

SEQ ID NO: 1005442 - DNA, 120 bp, Artificial Sequence
  ENSG00000232458_12 (sequence is synthesized)
ttgtcacaggaatttattcccagcatatgaataagagagtctccttaagagagtctttaacttcttaagggcaaaagaggacagtcaattaccagaaagaaaacattgctattatatgat

SEQ ID NO: 1005443 - DNA, 120 bp, Artificial Sequence
  ENSG00000232458_13 (sequence is synthesized)
atatgtaacagctttgttttctatttttccatcaatgcagaatccttctcaggagccctctcctctggtctcctttcactatctctgtgtcctgcttaccttctcccagaaccctggctc

SEQ ID NO: 1005444 - DNA, 120 bp, Artificial Sequence
  ENSG00000232458_14 (sequence is synthesized)
tcaatctgttgttccatttagttttaccacctgtaaaatttctgtgaaatccacagggtcctattggttttgaaactagctttaggttcttcaaaactcaaacatgttcaacctttgtct

SEQ ID NO: 1005445 - DNA, 120 bp, Artificial Sequence
  ENSG00000232458_15 (sequence is synthesized)
tactaatagtgcccactttttattgaatgattgtgatggcctatgcagtcctatgcaaatagagatacttatttttttaaaaagggtttctgtgtaaaagagtggtgaggcagaagagag

SEQ ID NO: 1005446 - DNA, 120 bp, Artificial Sequence
  ENSG00000232458_16 (sequence is synthesized)
tgacaatgcgggggaaacaccctgaaacctgccttgtggtatttgaaactaggccattacaatgactgaattcttaccattttttttagattttcaaccaacagtcttctttcattcatg

SEQ ID NO: 1005447 - DNA, 120 bp, Artificial Sequence
  ENSG00000232458_17 (sequence is synthesized)
atatcagcaaattaacaaagtgcagctaatgtaaataactttcattttccattgtccattttaaaacaaagaggtcattctctgatagtagatgcatagatggtatgttctacatcagtt

SEQ ID NO: 1005448 - DNA, 120 bp, Artificial Sequence
  ENSG00000232458_18 (sequence is synthesized)
tttgttttgttttccaaatagtctgttttgtctttcagaggtagaattaccaaatctctgaaacttaaatcaacccaaagacaaaagtatgttttattttgtttcatttgttttagtatg

SEQ ID NO: 1005449 - DNA, 120 bp, Artificial Sequence
  ENSG00000232458_19 (sequence is synthesized)
aatatatagtactttaaaagaaacatcatatacaactcgattaatatgaattcataatgttgacattagaaataggccaacaatcattctaaagtgaaaccatctttattttgaaaatta

SEQ ID NO: 1005450 - DNA, 120 bp, Artificial Sequence
  ENSG00000232458_20 (sequence is synthesized)
ccaaatattttctactttttaagttattattaatatataactctgcctattttttcagagtaattgacgaaggtaagactaaaacaaatgaattaatgaataaaggaaaaaagaaagaaa

SEQ ID NO: 1005451 - DNA, 120 bp, Artificial Sequence
  ENSG00000232458_21 (sequence is synthesized)
gaagaggcaggtgatacaaggatgcaaatacacaggcccatataggcttacattgctgcaaacatagttaaatttggctcttagccccctggcagtcaaagcaaaagaggggagatatgg

SEQ ID NO: 1005452 - DNA, 120 bp, Artificial Sequence
  ENSG00000232458_22 (sequence is synthesized)
tcagttgcatagttcttattattagatgagaagaaacatgctagttcctcaggggaagcgaatgtatttttcttgtactaatgtctcaagcaaatcaggctggtggggcctcacatggga

SEQ ID NO: 1005453 - DNA, 120 bp, Artificial Sequence
  ENSG00000232458_23 (sequence is synthesized)
aatgctgagtgatgttatacacactgaacttaacaggagtcctacaagcaaggctagagtctcctccttagaaaccaagggcacaaccttaaaatgcaatccagtttaggcaatttgtaa

SEQ ID NO: 1005454 - DNA, 120 bp, Artificial Sequence
  ENSG00000232458_24 (sequence is synthesized)
acccaaatatgaagctcttatcggtctagcttgggtagaagcattaacagagtgcttaacctttagacaactcttttgtgaaggctggacaatagacagcttaatattgccttttcagtg

SEQ ID NO: 1005455 - DNA, 120 bp, Artificial Sequence
  ENSG00000232458_25 (sequence is synthesized)
gggacaaggaaggccagtgttgtgatgaggtagttgaaggctgatatgttgtcctgaaccggatatctcaaccacagcatagggatctgccaaaaccaatttaacaggtgagcagctgtt

SEQ ID NO: 1005456 - DNA, 120 bp, Artificial Sequence
  ENSG00000232458_26 (sequence is synthesized)
actctcctaccaacaccccacagagttaggctctgagtgtgagtgcagacaactcttctagtagaaatttactcccagcatatcaataaagaattaagtattcaccttctgcaaacagaa

SEQ ID NO: 1005457 - DNA, 120 bp, Artificial Sequence
  ENSG00000276063_0 (sequence is synthesized)
accagagatggcacaggagcagttgagtagaatcatcattgaaagatgggctgtacatctctgatctggggaaaataataataattttttttaaaaaaaaagatcggctgaacatggaag

SEQ ID NO: 1005458 - DNA, 120 bp, Artificial Sequence
  ENSG00000276063_1 (sequence is synthesized)
aggtttacccgtcaaacaaaattatttacttctactttttgttcagtgacaatacgattaatcgtactaataacaaatatgcaaatgtttcatataaaagtacatattctagcaaacatt

SEQ ID NO: 1005459 - DNA, 120 bp, Artificial Sequence
  ENSG00000276063_2 (sequence is synthesized)
aaattccatcagaacttggggaaaagggcaaaaaataaataaatttttaaaagaaagaaatcaaattccaaaaatgtgaattttaatggaatattgttcccctaaataggaaactatgtg

SEQ ID NO: 1005460 - DNA, 120 bp, Artificial Sequence
  ENSG00000276063_3 (sequence is synthesized)
gtacttaaaaggttttatcctcaggatgccttctaataatcctttgtgtttattcattataatcaccacctaaaaattagtagcagtataccagctttattaaagatgtatagcaccaaa

SEQ ID NO: 1005461 - DNA, 120 bp, Artificial Sequence
  ENSG00000270380_0 (sequence is synthesized)
ttcagttggtgcttttattctaaagccagcaggttggtgtgtagttgcctccctggtctgaatcagtgcccctttcagcccctgccctgctccctgtcccttgctcccaccccaatctgg

SEQ ID NO: 1005462 - DNA, 120 bp, Artificial Sequence
  ENSG00000270380_1 (sequence is synthesized)
acagaggactgccctcctcaaagtcaccaacctgctctcagggctgatccttggaaaggagttgtttaaggaaacaccctaattgccttctaatatgtcaatatcagattagattgaacc

SEQ ID NO: 1005463 - DNA, 120 bp, Artificial Sequence
  ENSG00000270380_2 (sequence is synthesized)
caccatttgcattttaatggaaaagctgtgggaattgggggcttcagtggttaactggtaaagtgtggaaagagagcaggtcacctggggaggggagggggaatgtcctttctgccattt

SEQ ID NO: 1005464 - DNA, 120 bp, Artificial Sequence
  ENSG00000270380_3 (sequence is synthesized)
accacctctctggcagcctgagcagggaagagaaccaggctggccacctttcacaccacagcctcaagctgtgacatcctcaggccagcctggggaccatgtcatgatgggaggtatgtc

SEQ ID NO: 1005465 - DNA, 120 bp, Artificial Sequence
  ENSG00000273723_0 (sequence is synthesized)
tctggttcctggggcgacgcgcccggcggccgtactattcacttccccagaacgccacagcccaggctttcttcttagtgggcttcccagaccaagaagggaaacctttcatccgaaggt

SEQ ID NO: 1005466 - DNA, 120 bp, Artificial Sequence
  ENSG00000273723_1 (sequence is synthesized)
actgaggggaggaaggtggcctgaagttatctcagtgccgctttgtttcccaccccagtcggtcagcccttcctcagcgccctttaacccttgcagatcggatggagaaagctgccagca

SEQ ID NO: 1005467 - DNA, 120 bp, Artificial Sequence
  ENSG00000273723_2 (sequence is synthesized)
cgttctagggatgggggcagattgaggagcgggagggagtagtctttgtctaactttataccagtaccaaactatgttaatttaatgtagttttataataaatctttaagtcctgtaact

SEQ ID NO: 1005468 - DNA, 120 bp, Artificial Sequence
  ENSG00000273723_3 (sequence is synthesized)
tattctcccaagattgttttggcttattctacggcctttgtatttctaggtgaattttggaattagcttgttaaaaaggggggggattttttattgggctcgcattgaatctatagatct

SEQ ID NO: 1005469 - DNA, 120 bp, Artificial Sequence
  ENSG00000273723_4 (sequence is synthesized)
tatcttaacaacaagtccttcaatccatgaatatcattcttcccccaccatttatttaagcggtctttaatttctcctggcaatattttgtagattgcacatatatctatattttaatgc

SEQ ID NO: 1005470 - DNA, 120 bp, Artificial Sequence
  ENSG00000273723_5 (sequence is synthesized)
agctgtgcttggatagattgcagtatagagatcatatatatctttcattagatttattcttgagtatttagtgttttgtatacaatgttaaatggcattttgacttttttatattctact

SEQ ID NO: 1005471 - DNA, 120 bp, Artificial Sequence
  ENSG00000273723_6 (sequence is synthesized)
cgtaagaataaacaatattgattttaacatactgaccttatatgcaagcatcttgctaagttcccttgttatttgtaatactctgtagattctttcggaatttctgtgatcaaaatcttg

SEQ ID NO: 1005472 - DNA, 120 bp, Artificial Sequence
  ENSG00000273723_7 (sequence is synthesized)
caatccacgaataaagatggtttaacttctctgtaacctttataccttttatttttatttatttttgccttttgttgctggctagtgtttccactattgaataaaaacagtgataatgga

SEQ ID NO: 1005473 - DNA, 120 bp, Artificial Sequence
  ENSG00000224459_0 (sequence is synthesized)
ggcccaggctgtgccagggatccagaggctaaagcacattccagcaaaaacactggcccccgcttggaacccagagcccagtctgggtccggcaaggggctggccctgtgcccacctaac

SEQ ID NO: 1005474 - DNA, 120 bp, Artificial Sequence
  ENSG00000224459_1 (sequence is synthesized)
tgagccatttccttccagactggggcacatttcctgcccggagggaacagagcacattcccaggcggcatggactgggtcctgcattgggggaggggattccgtaggcattttcccaacc

SEQ ID NO: 1005475 - DNA, 120 bp, Artificial Sequence
  ENSG00000224459_2 (sequence is synthesized)
gtagggctaggagcacggttcaaagggtgctgctggagctgtccaaggggtggccattcttcggggaatgagctgaaaccacccggccctgccttgggtgcagcctgctctgtatcccag

SEQ ID NO: 1005476 - DNA, 120 bp, Artificial Sequence
  ENSG00000224459_3 (sequence is synthesized)
gtgtgctgagcgtagagcgagaaggatccttgagtcacccctgcctgctcccaagcagcagtcttcggaggaggagatcaggacccagacgcacatcgagggaccaccatgtgcagacac

SEQ ID NO: 1005477 - DNA, 120 bp, Artificial Sequence
  ENSG00000224459_4 (sequence is synthesized)
agagagaaagcagcatctgcaagccatggacagaggcctcagaagaaaccagcccactgacaccttggtctccagcatccagcctccagaactgtgagaaaatacatttctattgtctaa

SEQ ID NO: 1005478 - DNA, 120 bp, Artificial Sequence
  ENSG00000264031_0 (sequence is synthesized)
gaatatggaggaggagaaacaagaagtggggagaagggagataatttttcttttcttttttttttttgaaacacagtcttactctgtcgcccaggcaggagaatggcgtgaacccgggag

SEQ ID NO: 1005479 - DNA, 120 bp, Artificial Sequence
  ENSG00000273729_0 (sequence is synthesized)
gcagacttgggctggaagctcccggcccgaggggagggggcgagggtgcccggtggtggccgccgttgcctcttggccccctccccggagtggctggtgcgtggaagctcgaaaggggct

SEQ ID NO: 1005480 - DNA, 120 bp, Artificial Sequence
  ENSG00000273729_1 (sequence is synthesized)
gtctcttcctctccccggggacccccctacgagctgcgtcctctccccgacgggccccctggggcgagggccagagggttcagtgccacccggtgcccgggtccaatcttgctgaagccg

SEQ ID NO: 1005481 - DNA, 120 bp, Artificial Sequence
  ENSG00000273729_2 (sequence is synthesized)
ctgcttccccggaggaccgggggagggggtggcagccgagaaaggaccttctcccctccgcagcgtcggccgttctgctggcggcgactgggtttgcaccccggagggagccgccgcggc

SEQ ID NO: 1005482 - DNA, 120 bp, Artificial Sequence
  ENSG00000273729_3 (sequence is synthesized)
cactgcttccaggacgcacgagagcagaggagaggagtgcacgcacgcaggctcccgccgcccccaggcctggccggcgcccgggccgccgcggctggcggcgctcacgttggctgcagg

SEQ ID NO: 1005483 - DNA, 120 bp, Artificial Sequence
  ENSG00000273729_4 (sequence is synthesized)
gcgctcgcgcggcgcctcggcccgggtcgcatcccttcccgctcgtgctcacgctcgcccggaatgtggggttgtgattgttactctacgttccggaggcgcgtctcggcgctcctgctc

SEQ ID NO: 1005484 - DNA, 120 bp, Artificial Sequence
  ENSG00000273729_5 (sequence is synthesized)
cggctgcggctcgcgctgtccccggcttggccgcgcgggatgccgcccgggcggagcgctgacgtcaccgccatgctctgcaccagttcttccccctcccctttacacttcctctgtgga

SEQ ID NO: 1005485 - DNA, 120 bp, Artificial Sequence
  ENSG00000273729_6 (sequence is synthesized)
gcccacttgttgctcaggcaaggcgcatgcgcggcaggacgcccagattcctcccagccggcccctcctccgcgcctccgccctcccctcccccctcgccgtgtgtgtacaacagctgag

SEQ ID NO: 1005486 - DNA, 120 bp, Artificial Sequence
  ENSG00000273729_7 (sequence is synthesized)
gcccggcgagctaatgctggaagtccagagctgggggtggaaattaaacagacgatgacctttcctttccctgccgggcattcccaagtaaaaacgcatttaagaaccactagcgtcgtt

SEQ ID NO: 1005487 - DNA, 120 bp, Artificial Sequence
  ENSG00000273729_8 (sequence is synthesized)
tccgatccctgctccccaccccacccccaagcctcggcagtgaatttaaatgtcctgtttcaggatttttcgccgtgaatttcgtataaggtattaaccatttcatctgcggttgaacct

SEQ ID NO: 1005488 - DNA, 120 bp, Artificial Sequence
  ENSG00000273729_9 (sequence is synthesized)
tatcccccccggcatggatgttaaattcatcgccaccactgatgccgaagcacctgcaaaattagctgttttccaatcttccagaaattgtcttttctatttgtttttgtgccctgatct

SEQ ID NO: 1005489 - DNA, 120 bp, Artificial Sequence
  ENSG00000273729_10 (sequence is synthesized)
aggaacccgggcttcaacgatagagctaaatgaattcagagtgcgctacccttccccccagccgcactttaaaaattttggctgaacgtctgaagaagatacgagcaccccgaggccttt

SEQ ID NO: 1005490 - DNA, 120 bp, Artificial Sequence
  ENSG00000273729_11 (sequence is synthesized)
aaggaaaacaggcaactggctgcgcacagctgcagttcagggcagggagggggaggggccggagaggccaaacaggtgagtgttttttctagagtttgatttttaaaaggtggaggcagc

SEQ ID NO: 1005491 - DNA, 120 bp, Artificial Sequence
  ENSG00000273729_12 (sequence is synthesized)
atttaataatactgatacatttttgtaaagcacagccgcagttttcaaagttctttctcaggcgctgtgatctcactccatgttgccccagaaggcggaacaaggccgtgattttttttt

SEQ ID NO: 1005492 - DNA, 90 bp, Artificial Sequence
  ENSG00000273729_13 (sequence is synthesized)
cttccgcctcagcctcccaagtagctgtgattaccggcacccgccatcaggcccagctaattttttgtatttttctggtcttgaactcct

SEQ ID NO: 1005493 - DNA, 120 bp, Artificial Sequence
  ENSG00000273729_14 (sequence is synthesized)
tgctgggattacaagcatgaaccaccacgcccggccaaggccgtgatttcttctgccttacaagatcactgctcatcagtattgcttatggcacgatggatatgttggtcatagctctag

SEQ ID NO: 1005494 - DNA, 120 bp, Artificial Sequence
  ENSG00000273729_15 (sequence is synthesized)
tcatagctctagttggggcatttctattgattattctaattattgggtttgcttttttttttttttttatttcatgaaaactgagataatcccagggaaggctggagaagggaaagcaat

SEQ ID NO: 1005495 - DNA, 120 bp, Artificial Sequence
  ENSG00000273729_16 (sequence is synthesized)
ataatgggatttcggattctgaagtgtggcccaccagattgaaatttcctctccatcactaactggctctccacccttaagctagttacccacaaaatctctcttttccatggaaaagag

SEQ ID NO: 1005496 - DNA, 120 bp, Artificial Sequence
  ENSG00000273729_17 (sequence is synthesized)
tttccatggaaaagagaatggaatgatagctcccaggttgttagggttgtttgagatttcaacttcggttttttgtttttttgagataggatcttgttctgttgcccaggctggagtgca

SEQ ID NO: 1005497 - DNA, 69 bp, Artificial Sequence
  ENSG00000273729_18 (sequence is synthesized)
tcaagttacacctggccaatttttttgtatttttggaaagggatggggttttgccgtgttgcccaggct

SEQ ID NO: 1005498 - DNA, 120 bp, Artificial Sequence
  ENSG00000273729_19 (sequence is synthesized)
tcttgtcataagaagagataacgcttacttagacttgccgtgggaccttagtaaactaggtggctttacttgcatcacccttaatattatctacattattaaggggatattatctatagt

SEQ ID NO: 1005499 - DNA, 90 bp, Artificial Sequence
  ENSG00000273729_20 (sequence is synthesized)
ttaatattatctacattattaaggggatattatctatagtattttgttgttgttttgagacagagtccactctgtcacccaggctggagt

SEQ ID NO: 1005500 - DNA, 120 bp, Artificial Sequence
  ENSG00000273729_21 (sequence is synthesized)
tgggattacaggcatgacccaccgtgaccggcctattacagtattaaacccttaatattatctacagggtagattcttttacctccattttacaaaccaggaaagtaaagaggctatata

SEQ ID NO: 1005501 - DNA, 120 bp, Artificial Sequence
  ENSG00000273729_22 (sequence is synthesized)
ccaggaaagtaaagaggctatataacttgcctacagccattagtgatggggctgggatttgaatccagtaaatctgatttgaggtgtctttgacaagctcaggcttgcagaggtggtttg

SEQ ID NO: 1005502 - DNA, 120 bp, Artificial Sequence
  ENSG00000273729_23 (sequence is synthesized)
gggtgctcaaaattcccatcagccccagttgatttggtgttacatacaatcttacgtaagtactatgccaatacaccttcataaccaacccccagcctccccttccaagcgcatttgtac

SEQ ID NO: 1005503 - DNA, 120 bp, Artificial Sequence
  ENSG00000273729_24 (sequence is synthesized)
cactgagttctatatacagaagttgtagatctgtcactaccagactgtaacttaaatacaccatacagaatggagagcagtgttggactcacagttagtgttagttattattagtattga

SEQ ID NO: 1005504 - DNA, 120 bp, Artificial Sequence
  ENSG00000273729_25 (sequence is synthesized)
tactagtgttggtactattgctggttgacatgtgacagtacttagtaaactgcataaattgtgaggatcactattatcactcttattactagtaattgcaataaagttcagtggaagcaa

SEQ ID NO: 1005505 - DNA, 120 bp, Artificial Sequence
  ENSG00000271387_0 (sequence is synthesized)
gcgtcccgtccggccttcccgggcctgtcacttgggcggtggcgtgggagcggcgaggctgctcggggggcagccgggtgggcccagctctaggggagattcgggtcagcccctgagccc

SEQ ID NO: 1005506 - DNA, 120 bp, Artificial Sequence
  ENSG00000271387_1 (sequence is synthesized)
ctgagcccagcctcccggctgtgcctgctggaagcagacggagggaaggccgggcgtctttggcccaccgcgcggccgctcccctcccgggccaggctgaacgggcgggcgcagcccaga

SEQ ID NO: 1005507 - DNA, 120 bp, Artificial Sequence
  ENSG00000271387_2 (sequence is synthesized)
ctctgccaccgatccgcctccatactgacccgagctgcggcgcctgcaagattaatgaagcatccgcgattcggtagaggcggcacggggaggaaagacacaagatcgtgctgcccccct

SEQ ID NO: 1005508 - DNA, 120 bp, Artificial Sequence
  ENSG00000271387_3 (sequence is synthesized)
gtggaccctcacagaagctcaatcaatttcccaccctctggaaaagggtatttttctcttccctggcatattgggtgtttcttgtgtgcacctaattgatctttttccattgatagcctt

SEQ ID NO: 1005509 - DNA, 120 bp, Artificial Sequence
  ENSG00000271387_4 (sequence is synthesized)
tggatgtcttttgtgcggcttccccgcgcttcactgctccctcattgccttagacacgcgaggaatgtcaggcccccagagtgagaacacccaagaaaacaataggggcaaaagatcctc

SEQ ID NO: 1005510 - DNA, 120 bp, Artificial Sequence
  ENSG00000271387_5 (sequence is synthesized)
cctgggcctcgcggattatgcacaaaccagatcatttcccacattcggccagggtgaagatggaaaatggaaaagaacgccatcagagtggtgacactgacgagaaaagccaattcataa

SEQ ID NO: 1005511 - DNA, 120 bp, Artificial Sequence
  ENSG00000271387_6 (sequence is synthesized)
tttagtttaatgaaatgagttagtaatcaaccactaatgtctaggaaattggccttttttgaaaactggttttccctttctccacccctttttttttcaaattaaaagactagtatccca

SEQ ID NO: 1005512 - DNA, 120 bp, Artificial Sequence
  ENSG00000271384_0 (sequence is synthesized)
attactgcagaactgaagattgtgcaaaccaggtgggaaacacctgggacagcatatgggcaggatcctcaagaaggtgcaactcccctttgcactcctcacaaaaatgtggggttgtgg

SEQ ID NO: 1005513 - DNA, 120 bp, Artificial Sequence
  ENSG00000271384_1 (sequence is synthesized)
ttagattccaaatctggaggtcttttcaattgatctagaccaagcaatagaagtagaccaaggaaagggaggcaagcaaggtgtgagttttttcctctcctaagtttggtaattctgaat

SEQ ID NO: 1005514 - DNA, 120 bp, Artificial Sequence
  ENSG00000271384_2 (sequence is synthesized)
ttcctggaggagaagctcgtaatggtctgcttggctctctgcctttatagcctctactggagccacttaacccgcaatttgtaggttcagctgtacccccaggcctaaggccacccctgt

SEQ ID NO: 1005515 - DNA, 120 bp, Artificial Sequence
  ENSG00000271384_3 (sequence is synthesized)
ccctaggtgagggaagataagttcaacccagcctaccctgcctctgtcctccctggtcacctggctcatctacaaaaagcgaagattcccccttagtgtctggcagagatgcacatttac

SEQ ID NO: 1005516 - DNA, 120 bp, Artificial Sequence
  ENSG00000271384_4 (sequence is synthesized)
tcctgggtagaagttaaaaaaacaaaagatgtatttgctttttttaaatctgcttggaaatataaacaaaggtgaaatcttataaaataaagtgttccaaaaacacttgcccaggtatca

SEQ ID NO: 1005517 - DNA, 120 bp, Artificial Sequence
  ENSG00000271382_0 (sequence is synthesized)
cccactgaatttcagcagggatagaagccagagttggtttgccatcaacccacttccaaaaggaaatggcaggagtccagcagcatcatgtagttacaatctcccatgccaggaagaaac

SEQ ID NO: 1005518 - DNA, 120 bp, Artificial Sequence
  ENSG00000271382_1 (sequence is synthesized)
atctcccaagctcaaattctacccactttgacacttgaaaagtaaaacatcttcatacgaatgaatggggagatgggtgtgattgctggcagtgcaacaatgagttgaagcttgattgtt

SEQ ID NO: 1005519 - DNA, 120 bp, Artificial Sequence
  ENSG00000271382_2 (sequence is synthesized)
tattaactgttgtaaacaaattatgaatttgtgccagtagccaaaatagagacaactgggcataataaatattaattctcaaggagatcatctaacaaactacctaaaagatcctttgtg

SEQ ID NO: 1005520 - DNA, 120 bp, Artificial Sequence
  ENSG00000271382_3 (sequence is synthesized)
gactccaagggtgttaattatatgagactttattctctattcattaattcattcaagattttgttgagtgaatgtcagcctgctacagtacagggctggcaaattgtttccatctctagt

SEQ ID NO: 1005521 - DNA, 120 bp, Artificial Sequence
  ENSG00000271382_4 (sequence is synthesized)
gctaattgtggttatagctgctcagtgggctgtattgaaaaagactgagtccaaatctgggcttcatgagaaagagtatcatgaagatactcttcatgatactctacattagaggtgtct

SEQ ID NO: 1005522 - DNA, 120 bp, Artificial Sequence
  ENSG00000271382_5 (sequence is synthesized)
tctgtgaaagtggaacaaaggagtgtctgaggtatttgtcattcctgcaagttggaaaaggccttatctggcatgagaaggagtagatttggggtaaatcgtttccatcttatgtgtctt

SEQ ID NO: 1005523 - DNA, 120 bp, Artificial Sequence
  ENSG00000271382_6 (sequence is synthesized)
tatttccttaaattggtaaatcgaggaagttcatctaataatttttaaggttcttccttcctactcttatttatttatccattattttatctgtccttgcatttgaggtgatttctcacc

SEQ ID NO: 1005524 - DNA, 120 bp, Artificial Sequence
  ENSG00000271382_7 (sequence is synthesized)
ttgtgaatgcattcctccctagcataaaaaccaaaatctcattttcctagcctcctatgtagtaagaatacagcaatgggatctaggtccatcagtcagatacatctgtcctacatttgt

SEQ ID NO: 1005525 - DNA, 120 bp, Artificial Sequence
  ENSG00000271382_8 (sequence is synthesized)
ttagaatattatgtaggagatgagactatttcaccccaaaatatggctgtaggtggccagaatgtgtaccccaaatatgcctctttaaaataaggatcactttgagctgattatttgggg

SEQ ID NO: 1005526 - DNA, 120 bp, Artificial Sequence
  ENSG00000271382_9 (sequence is synthesized)
agacagtagacacaggagaagctctgaaaacagagtagaagttaagcttttgtaagagaaatttgcatctataaaggaaatctccatcgtaagggtgtctcatctctgtagaagaaaaag

SEQ ID NO: 1005527 - DNA, 120 bp, Artificial Sequence
  ENSG00000271382_10 (sequence is synthesized)
aatgagtctaagttactaaaaactcttatcaatagagaaggcaacttaaacacaagtaaggttttttttttgtatagttacccttgtttaaggtgcttttcctccctctaactgggtagg

SEQ ID NO: 1005528 - DNA, 120 bp, Artificial Sequence
  ENSG00000271382_11 (sequence is synthesized)
tcagagaatagtatttaagcttgaagtcaaagctatgatacttctgagatttattcaaaagctttgagatatttcctgtattatttcatttatgttgctataaaggaatacctgaggctg

SEQ ID NO: 1005529 - DNA, 120 bp, Artificial Sequence
  ENSG00000271382_12 (sequence is synthesized)
ggtaattcataaagaaaagaggtttgtttggctcacagttctgcaggctgcacaagaagcatggcaccagcacttgcttctggtgagggtctcaggctgcttcaactcatggtggaaggg

SEQ ID NO: 1005530 - DNA, 120 bp, Artificial Sequence
  ENSG00000271382_13 (sequence is synthesized)
gaagggaagctggcacgtgcagaaatcacatggtgagggaggaagcaatgggggtgggggaggtaccaggctctttttaacaaccagttctcgagggaactaatgagcaagaactcactt

SEQ ID NO: 1005531 - DNA, 120 bp, Artificial Sequence
  ENSG00000271382_14 (sequence is synthesized)
attatgacaaagatggcaccaagccattcatgagggatctaccccatgactcaaacacctcccattaatccctacctccaacattgggatcaaatttcaacatgaggtttggaggcaata

SEQ ID NO: 1005532 - DNA, 120 bp, Artificial Sequence
  ENSG00000271382_15 (sequence is synthesized)
cacattcaaactatagcattccccctgaaggatcccagggaatttcacaccacagtatggcattctgatatgctgattgtaaaaaattaaagtaaaatgctgggagatacttcacactga

SEQ ID NO: 1005533 - DNA, 120 bp, Artificial Sequence
  ENSG00000271382_16 (sequence is synthesized)
tattgacttatttaccttaagaccagccctgccaaatagaatacaatcaccttccattacccttccctgaatttgattatctatcataggtagaagactgaagaatctacatctggatga

SEQ ID NO: 1005534 - DNA, 120 bp, Artificial Sequence
  ENSG00000271382_17 (sequence is synthesized)
acttcttcacaagataatatctaattttgaagacaatcatttacaagctaatttctgtcccttggttcattcattttccctaagaaacattttactactcctcaaaagaaattcctacca

SEQ ID NO: 1005535 - DNA, 120 bp, Artificial Sequence
  ENSG00000271382_18 (sequence is synthesized)
ttttccatccctcctctcccccttatgaagaagggtgtgtaatcatctggacctcattaggtatttgggtaatcactctcctgtgattttcccttgtgcattttaaaattaaatttgtat

SEQ ID NO: 1005536 - DNA, 120 bp, Artificial Sequence
  ENSG00000271382_19 (sequence is synthesized)
tcttttgctcctactaatctccttcttatcagttcactttcagtgaaccttcggagggcgaaggggaagctttccttctttgaccctacacctgaatatctcccatgtgtacatacatga

SEQ ID NO: 1005537 - DNA, 120 bp, Artificial Sequence
  ENSG00000271382_20 (sequence is synthesized)
ggtatacatgttattaaactttgtttttctctcattttgttacagcagtccattccaaccaagagctcagaaaggggagagaaaaaattaattttttcctccttacactagtgatggtgc

SEQ ID NO: 1005538 - DNA, 120 bp, Artificial Sequence
  ENSG00000271382_21 (sequence is synthesized)
acagagtccatctggcaaggataaaggcagagacattctgttcattaaagcagcagtgatagggccagctctggtggctgtcccaagcagggggcaatgatgacttcactgagcagctct

SEQ ID NO: 1005539 - DNA, 120 bp, Artificial Sequence
  ENSG00000271382_22 (sequence is synthesized)
gcagcacaggttggggcactgttcctgtctgctagcctctaatcttttgtctctgggcctcccttggagcccttcagctgtttaattctttttgaaataaactcattttactgctgaaat

SEQ ID NO: 1005540 - DNA, 120 bp, Artificial Sequence
  ENSG00000271380_0 (sequence is synthesized)
ggagcaaggaccggacgagacgctacgcctgaaaacaggcggcgggcgagggacgaggcttaccacggcaccacgcgagtggaaagggtcgtctccgctagcggcggcccacaccagctc

SEQ ID NO: 1005541 - DNA, 80 bp, Artificial Sequence
  ENSG00000271380_1 (sequence is synthesized)
cgtaccatcccgggcggtggagccgccgcggaggggcgcgcgcgagccgaaggcgcacccgggaggcccaggtagcccgg

SEQ ID NO: 1005542 - DNA, 120 bp, Artificial Sequence
  ENSG00000271380_2 (sequence is synthesized)
cggtgctggggcgccgggcaggcccggctcccgcctcgacccacccggagccagccccctctgcggacacgacatccccatggggacggtggcgcgaaacgccccactctgccgcaccca

SEQ ID NO: 1005543 - DNA, 120 bp, Artificial Sequence
  ENSG00000271380_3 (sequence is synthesized)
caataggcttcccagaagggttaagaggcagaggtagaagaaatacggactttaatgaagagttttccctttggtataagtgagacccgtggaaacatccaaacagcaaaaggaggccag

SEQ ID NO: 1005544 - DNA, 120 bp, Artificial Sequence
  ENSG00000271380_4 (sequence is synthesized)
gatgaaaacggtcaactctcccttatccacaaggccaaaagagggggggccggcttgctgtggtgtggccaccccgggcctaggctgggccgggcctgtagaaggtactcaggaactgca

SEQ ID NO: 1005545 - DNA, 120 bp, Artificial Sequence
  ENSG00000271380_5 (sequence is synthesized)
ggttttgcgtttcccctccatgaaactgacaggcattcgggctgacttctgcctctcagtctcgcggtaagagacccaagtttttctagtcctagatggaaataaatttcatctgcctca

SEQ ID NO: 1005546 - DNA, 120 bp, Artificial Sequence
  ENSG00000231877_0 (sequence is synthesized)
aagtggttcctccaccagggagacaagtttaattgctgtgggtcagagctggcctccccggtgcagggaggaggagatcccatgagtgcgtggcagaaaacgccagccactcatgacgcc

SEQ ID NO: 1005547 - DNA, 90 bp, Artificial Sequence
  ENSG00000231877_1 (sequence is synthesized)
catgagtgcgtggcagaaaacgccagccactcatgacgccttgagccagggtcatactatattgacctggctggtctggaactcctggcc

SEQ ID NO: 1005548 - DNA, 120 bp, Artificial Sequence
  ENSG00000231877_2 (sequence is synthesized)
ctgggaagcaatggccagtctcagacttaaggattaagagaattttcctaatgattccagaatcggatactaagaaacacggacactgccagggaaggcgcagtggctcccgtctgcagt

SEQ ID NO: 1005549 - DNA, 86 bp, Artificial Sequence
  ENSG00000231877_3 (sequence is synthesized)
agaagaattgcttgaacccaggaagcagaagttgcagtgaggcgacattgtgccactgcactccacccggggtgacagagcctgag

SEQ ID NO: 1005550 - DNA, 120 bp, Artificial Sequence
  ENSG00000231877_4 (sequence is synthesized)
aaacaaacaaacaaacaaacaaacgaggacactgtctgagcactcttattctgcatttgaagaaatacagaaacaatggcaaaaaatcatttgctcagaattacagtaaagaatctgcaa

SEQ ID NO: 1005551 - DNA, 120 bp, Artificial Sequence
  ENSG00000231877_5 (sequence is synthesized)
gtgttggcaagcataactttgattattatttgattacatgaattatgaaatgcatgtaagttgaagttttagagagacatataaatacacagtataattgggggttcttattattaaggt

SEQ ID NO: 1005552 - DNA, 120 bp, Artificial Sequence
  ENSG00000231877_6 (sequence is synthesized)
cccttgtctttagtatctgatagtttcgcatctccttcctcatgagtccatggcagaaagtgtcagtctgtcttttcctggctcctgtgggttagaaccatttatgaagtacatatctct

SEQ ID NO: 1005553 - DNA, 120 bp, Artificial Sequence
  ENSG00000231877_7 (sequence is synthesized)
ccatagtagctcccttatggtgttttgataagaagctattctgggaccttcagcttttcttctgttactacctgttgaggtgagagcaaaggagatagagacagcaaaggaggcaagaag

SEQ ID NO: 1005554 - DNA, 120 bp, Artificial Sequence
  ENSG00000231877_8 (sequence is synthesized)
tggtctactctcttttccatctttcacccaaggataagtactaaccacagcagagcttatatctggctatatattaaggatattttcctgaagacctgaagaaaacaaaacagcataaca

SEQ ID NO: 1005555 - DNA, 120 bp, Artificial Sequence
  ENSG00000231877_9 (sequence is synthesized)
ttagagcccagataaattttgaacaagataaagatttgatcttggagcccttggggttcagctataacctatctcttctgagatgatttagttatcctccctccaggtggaggcagcttc

SEQ ID NO: 1005556 - DNA, 120 bp, Artificial Sequence
  ENSG00000231877_10 (sequence is synthesized)
atgaccattcctcctggatatatgtgcatttgggggaagacccttattccatcacaaagcaccagataggagtagagtcctggctcatccactctaatgctgaattccccagtgtcctct

SEQ ID NO: 1005557 - DNA, 120 bp, Artificial Sequence
  ENSG00000231877_11 (sequence is synthesized)
tgctctgacattggcaccctgtcagcctgtcccttaacaccataaactactattggtacattttccaaagtttaagcttacttagaatatgtatgattgttttctagcctggttcaattc

SEQ ID NO: 1005558 - DNA, 120 bp, Artificial Sequence
  ENSG00000231877_12 (sequence is synthesized)
cttttcatgaatttgtattcattactaggtcaagataaatacacattcttcctgtagttttccaggtcttgttttctgaactcgggagcaattgtttaaaaattaatacagtgacagtga

SEQ ID NO: 1005559 - DNA, 120 bp, Artificial Sequence
  ENSG00000231877_13 (sequence is synthesized)
taatctgtgtaatgtgatattcaaaagcaaaatttgcattttaaaaatgacagattttgtagccttcaccatagttgtaatgttttaacaatttgaagccaatttcgatgagtaccctaa

SEQ ID NO: 1005560 - DNA, 120 bp, Artificial Sequence
  ENSG00000231877_14 (sequence is synthesized)
tttctccaaatatttagcaagaagagttttcctaagcaaagagtctaggccatggaaaattaactttcctctttctcacacttgtgagaacagtgaggctcagagagtctgaattatttg

SEQ ID NO: 1005561 - DNA, 120 bp, Artificial Sequence
  ENSG00000231877_15 (sequence is synthesized)
ccaaaggtcctaagagtggtggagctgggattcaaaactatgtcactcttactctacaaccatgctgccttctaaaatttgtcactgaatgtaacttcccttagcacataaaactgtgtg

SEQ ID NO: 1005562 - DNA, 120 bp, Artificial Sequence
  ENSG00000231877_16 (sequence is synthesized)
cagcaaaagttctacaagctccggggtcaaggggaacaataggttttctgtgtctccagataagttgactcaacccgatcatattcaattcaattttcatttattgatcgtccatcggtt

SEQ ID NO: 1005563 - DNA, 120 bp, Artificial Sequence
  ENSG00000231877_17 (sequence is synthesized)
tcaggtactaagtgctagacataaaaatgaccagagaaaaaagagaattttggaatgagagcagaatggattattttcttctttctttcttctggttcaaatagtatatctcctgcacat

SEQ ID NO: 1005564 - DNA, 120 bp, Artificial Sequence
  ENSG00000231877_18 (sequence is synthesized)
gacagttttcctgtaacctggtgtagcactttgaaaatccagtaaagcagaagtgacagcgctgtaactcatgaactccactgagattgctatggtgtgacaaacctgtctcagctgtct

SEQ ID NO: 1005565 - DNA, 120 bp, Artificial Sequence
  ENSG00000231877_19 (sequence is synthesized)
gtatataaattaggaattcctaaagctttcaatacgaaagttgctgtgaactgcttcatttcaaactgaaagcattgaaatgctaattaggaagcattttttttttccttcaaagtaact

SEQ ID NO: 1005566 - DNA, 120 bp, Artificial Sequence
  ENSG00000231877_20 (sequence is synthesized)
ttaaataacttttcgggaaagtaaacacaattagtctatttttatgggacagatttctccctatgagaggagaatggccatttttgtgaactactgttggatatgacatatatattttgg

SEQ ID NO: 1005567 - DNA, 120 bp, Artificial Sequence
  ENSG00000231877_21 (sequence is synthesized)
aagtccctttcaatcgttggatttggcagataaaatgtttataccgattgtattttattgaaagccattttatgcaaattaatttaacacagaatttaatgattttggatgctgtgagat

SEQ ID NO: 1005568 - DNA, 120 bp, Artificial Sequence
  ENSG00000231877_22 (sequence is synthesized)
gaggggaaataacctttaaaattaacactgcaattttcatcttctgattgtctcagcctcccccagaatagaaaatgcttattctcttggagagagaaataaatttaatctttacacggg

SEQ ID NO: 1005569 - DNA, 120 bp, Artificial Sequence
  ENSG00000270036_0 (sequence is synthesized)
ttaagcgacccacaagcatatccttctttgtccaaggtttgttttgaaagtgggcaacgccctaactgggtaggggatagttgccatcttagcttaggtaggggctggcaaggaaaacgt

SEQ ID NO: 1005570 - DNA, 120 bp, Artificial Sequence
  ENSG00000270036_1 (sequence is synthesized)
gtctggggggccctgtagtcttcagatagaaaagtaggtgccttctgttagccatggctgcttggatggccaaaggccactgtgggtttttcagcagcgcttttagcagaattccttcac

SEQ ID NO: 1005571 - DNA, 120 bp, Artificial Sequence
  ENSG00000270036_2 (sequence is synthesized)
actgcccccaccccacttgcagatgatggaaggcttgctggcaattactgaaagaaaatgggaggtgggaaaatggagctgcatttatattttacttcctgaatgtcaaggtgatgctgg

SEQ ID NO: 1005572 - DNA, 120 bp, Artificial Sequence
  ENSG00000270036_3 (sequence is synthesized)
aatattaaagggaacattccccttctttgggatataggaaatgctgctgcaaacttagagataagggaagagatatgcagagttaatgaggaccagctttacctctcaagtgcccagaaa

SEQ ID NO: 1005573 - DNA, 120 bp, Artificial Sequence
  ENSG00000270036_4 (sequence is synthesized)
tggctttaataatcaggtctgggttctttgaggcttcctttctttaacttagaccattccttcccaacagaaatacagatttctccttttaccttctggctggccattagatagggggct

SEQ ID NO: 1005574 - DNA, 120 bp, Artificial Sequence
  ENSG00000270036_5 (sequence is synthesized)
aaaacttcgaataaatctcactgtcaaaaacttttgatttatccagaatatttgggttttctcattttttttaaaaaggaaataacaggttattgaataaagaatttcattaatggttaa

SEQ ID NO: 1005575 - DNA, 120 bp, Artificial Sequence
  ENSG00000270035_0 (sequence is synthesized)
ggcacaggggaggccctgagtcacacgatggtgatgcccagggcagaagatgtcagaagacaggcagtttgacagtgcttctgaaggtcgtgaaaaagccaggggtgagtctgtaaagtc

SEQ ID NO: 1005576 - DNA, 120 bp, Artificial Sequence
  ENSG00000270035_1 (sequence is synthesized)
cctgctggccatgatgatgtccctgacagctggggatcctggcgagaacagcattcagaacttgggattttccttgcagatcacaatggttggctgactcaggggaaagggggagctttg

SEQ ID NO: 1005577 - DNA, 120 bp, Artificial Sequence
  ENSG00000270035_2 (sequence is synthesized)
tcctggcctggggtcagcagcctgggctctggttccagttccgcacccccccttgccccccagaactacctgtatggcaagctcctttcccttcctgtgcctcagtttcctcctctgtaa

SEQ ID NO: 1005578 - DNA, 120 bp, Artificial Sequence
  ENSG00000270035_3 (sequence is synthesized)
aatcagtttagactacactgcaaggttgtccagcccgcagtcagtgggctgcatgccagccaggacagctttgaatgtggcccaacacaaattcgtaaaccttcttaaaacattatgaaa

SEQ ID NO: 1005579 - DNA, 120 bp, Artificial Sequence
  ENSG00000270030_0 (sequence is synthesized)
cacacgccctgacaccgtcctgatggggtcctgcagagaagcctccttagcccacagtgcttctacccaccctcaatgtataacttcacgttcagaaatgtgttacccccctcctcagac

SEQ ID NO: 1005580 - DNA, 120 bp, Artificial Sequence
  ENSG00000270030_1 (sequence is synthesized)
ctcacacaattcacgaatttccaaacagcaggaaacagaaacttctaagaaagcagaacccttgagtccaggtgggagaaggtgcctgagaaaacagccctgccagagacagtaccccag

SEQ ID NO: 1005581 - DNA, 120 bp, Artificial Sequence
  ENSG00000270030_2 (sequence is synthesized)
cacccttcccacggtaccccagcgtccggacgctactccacagacggccacgtaagagaccaggaaccacacttcccaagccttctgcactcccaaaaacatcagcttcccggaaacctg

SEQ ID NO: 1005582 - DNA, 120 bp, Artificial Sequence
  ENSG00000270030_3 (sequence is synthesized)
actcccaaaaacatcagcttcccggaaacctgagacatgctcaaggaagagcacggtgtgaagtcagctgtgggtggaggatgacccaggtgcccaggcaagagactgaaggcacaaact

SEQ ID NO: 1005583 - DNA, 120 bp, Artificial Sequence
  ENSG00000270031_0 (sequence is synthesized)
ctaaatctgctatgaggctgttttatatcccgaacagctgaatgtatttcaattaggatagtaagaagtacagttaaagtagaagacttcatagattctttatgttgagtgttgccatag

SEQ ID NO: 1005584 - DNA, 120 bp, Artificial Sequence
  ENSG00000270031_1 (sequence is synthesized)
ttacttatccaagtctttatctcagtgtacaaataatgtgaatgaagtctttctcacttcccttcaatttggtgttgcatggctttttagaaataaatagcatttcatgtccttcgccca

SEQ ID NO: 1005585 - DNA, 120 bp, Artificial Sequence
  ENSG00000270038_0 (sequence is synthesized)
agctcatggccctccagacagaacaaaggggtcccaaaatgcctagcgtggaatcacagaatggcccaggcttgaaccatctctattcccagagatagtcacagagatgcacgctatggg

SEQ ID NO: 1005586 - DNA, 120 bp, Artificial Sequence
  ENSG00000270038_1 (sequence is synthesized)
acagtcttggcagggtctttgaggaggaagtggattcagcaggatgatggggctggcatcgtggatgccagcaacgtggatgcctgttggtggtgtgctgatgctacacacatgcattca

SEQ ID NO: 1005587 - DNA, 120 bp, Artificial Sequence
  ENSG00000270038_2 (sequence is synthesized)
cacatatatgcagacacatgtacacacacatgcacacacacactaaaaacacccacagacatgcatgcttttacatttatttatgataggtgtgccccagagaggagtatcttttaccag

SEQ ID NO: 1005588 - DNA, 120 bp, Artificial Sequence
  ENSG00000270038_3 (sequence is synthesized)
ctggttgtttctgaattctggaagagtctggacagagaaattcccagcatatcctgcatctcattcttggtgtgaagcaggaacacgcactcattcctatttggctatagtcttcacagc

SEQ ID NO: 1005589 - DNA, 120 bp, Artificial Sequence
  ENSG00000270038_4 (sequence is synthesized)
tttctactgtttcttttaaaagaaggaaactaaaataatataattcaatgttgtccagtcagctttgattactgtcggtccctgtgtgtgaagtgctgtgctggcttgaacgggacatgc

SEQ ID NO: 1005590 - DNA, 120 bp, Artificial Sequence
  ENSG00000270038_5 (sequence is synthesized)
aaaaatcaagaaggcaaggtccagtccttaaagccctagagcaagggttgacaaaccacagtacttgggctaaacccagcccaccacctgtttttgcaaataaagttttattggaacaca

SEQ ID NO: 1005591 - DNA, 120 bp, Artificial Sequence
  ENSG00000270039_0 (sequence is synthesized)
gaaaacagtgtggggcaaagaacaggactaggctttgaaacccacagtgggtgttggcaaaagtcacctttgtttcagcttcagtttgaatttaggcacctacttttgatttttatttta

SEQ ID NO: 1005592 - DNA, 120 bp, Artificial Sequence
  ENSG00000270039_1 (sequence is synthesized)
gagaaaaaatttaaatttatttttaaaagtacatacaataaaatatactcttttgacatacaattctaagaattttcacaagcagaatcatgttactaccaccacaataaaggcacagaa

SEQ ID NO: 1005593 - DNA, 120 bp, Artificial Sequence
  ENSG00000270039_2 (sequence is synthesized)
tctccatcactatagttttgccttttccagaatgctgtaagtggagtcatacaatatttagcctttcagtctggcttctttctcttagcagaatgcatatgagatctctgttgggtttac

SEQ ID NO: 1005594 - DNA, 120 bp, Artificial Sequence
  ENSG00000270039_3 (sequence is synthesized)
cagcgcgctgctcatccctttttattgctgagaagtattccatcatgtggatgtactactgtttgtttatccattttccagtggggttgtttctgattatgaataaaggtgctataaaca

SEQ ID NO: 1005595 - DNA, 120 bp, Artificial Sequence
  ENSG00000264785_0 (sequence is synthesized)
gatagtgaagctagtctgggaagagacggcatcagctccccatatctgagccactgtgccgacaaggcccagcctcctcaggctctccttggctggacacaccagagatggagctgacct

SEQ ID NO: 1005596 - DNA, 120 bp, Artificial Sequence
  ENSG00000264785_1 (sequence is synthesized)
tgctggtacatcagtgaccacactgcgtggggcagtgggatcaggcaggacaggccttcatcattcatcagaggcctcaccaggcaagagcggcggtgagagaaagtctcgaagctcttc

SEQ ID NO: 1005597 - DNA, 120 bp, Artificial Sequence
  ENSG00000264785_2 (sequence is synthesized)
ttgccatggtaggatcccatgccgctgttccctgcggaggagaagtaagcacagggctcagcatcctgcccccaggacgccccaggtttccctctccaccttgttgggtgtatcccagaa

SEQ ID NO: 1005598 - DNA, 120 bp, Artificial Sequence
  ENSG00000235221_0 (sequence is synthesized)
gcagcctgccaccatcttggaagtggctcaccaccgtcttgggagttctgtgaacaaggacccctggtaacattttggcgaccacgaagggacatccaaagctatatgaagaatagagcc

SEQ ID NO: 1005599 - DNA, 120 bp, Artificial Sequence
  ENSG00000235221_1 (sequence is synthesized)
aatattacaacaaataaccttcatgcctgcaaaaactttttcagcttaactaatgcttgtgatgtttaacgcctgtcttttcaacttggtctactgagtcttcaatactggtgactgagc

SEQ ID NO: 1005600 - DNA, 120 bp, Artificial Sequence
  ENSG00000235221_2 (sequence is synthesized)
tgcttgaagtgaactctggacaaggtggagagcatcttcttgatttaagatatcttgcagtaagggaagctctgtcctgagaagcctttacagaggcacaggaagaggccaggacctgaa

SEQ ID NO: 1005601 - DNA, 120 bp, Artificial Sequence
  ENSG00000235221_3 (sequence is synthesized)
agaaccacctaaataagccccttccagatacctgagccttagaaactatgtaatataataaagacttgtttgggggcaatttataacccagaactggataaccaatacagttatgttttt

SEQ ID NO: 1005602 - DNA, 120 bp, Artificial Sequence
  ENSG00000235221_4 (sequence is synthesized)
aacaaacagctggctggggtgaagagtgcaggttgaaacaacaaaaataattttccccgtagaaatgtacctcacccatatgaaaaattatacttgcaatcagattctcagcagcagtgc

SEQ ID NO: 1005603 - DNA, 120 bp, Artificial Sequence
  ENSG00000235221_5 (sequence is synthesized)
tttaaagtacatttgtatttatttttaattgacaaattaaaaattatatatgtttatggtgtaaaacatgatgctttgatataggtataaaccgtggaatggctaaattaagctaattag

SEQ ID NO: 1005604 - DNA, 120 bp, Artificial Sequence
  ENSG00000235221_6 (sequence is synthesized)
ggcaacctcctttgagtcccctccctttgtataggagctctgttttcactgtgtttcactctattaaatcttgcaattgcactcttctggtccatatttgtcacggcttgagctgagctt

SEQ ID NO: 1005605 - DNA, 120 bp, Artificial Sequence
  ENSG00000235221_7 (sequence is synthesized)
tcacttgccgtccaccactactgtttgctgctgtcacagacccgccgctgactcccatcccgctgctgactcccatccctccggatccggcagggtgtccgctgtgctcctgatccagca

SEQ ID NO: 1005606 - DNA, 65 bp, Artificial Sequence
  ENSG00000235221_8 (sequence is synthesized)
ccggatccggcagggtgtccgctgtgctcctgatccagcaagactcccattgccactcccgatag

SEQ ID NO: 1005607 - DNA, 120 bp, Artificial Sequence
  ENSG00000235221_9 (sequence is synthesized)
tggtgactgagctgcttgaagtgaactctggacaaggtggagagcatcttcttgatttaagaaataatgctgcaaagccgggcatagtgacatgcacctggagtcccagctacttgggag

SEQ ID NO: 1005608 - DNA, 120 bp, Artificial Sequence
  ENSG00000235221_10 (sequence is synthesized)
ttcaaagttgcagtgcactatcatggcacctgcgaagagccactgcactcgcactctagccaggggagcatagtgacacttcatctattacaaaaaattatataaaaattataaaaagag

SEQ ID NO: 1005609 - DNA, 120 bp, Artificial Sequence
  ENSG00000235221_11 (sequence is synthesized)
ttgatttaagattcacagtttctgaaaggaccatggactaattggatcacaagcaaactgaaacattacaggataaacttacatttaatgagagataatcatctgacaaaagggcagaga

SEQ ID NO: 1005610 - DNA, 120 bp, Artificial Sequence
  ENSG00000235221_12 (sequence is synthesized)
ttgtaaatttttctttagcttatctacccaggtgtttgcattattttaccaaataatagaattcacataaatatgcagagttttcaaagagactgtattgaagttaatgcttgtgtacat

SEQ ID NO: 1005611 - DNA, 120 bp, Artificial Sequence
  ENSG00000235221_13 (sequence is synthesized)
tattatttagtgaaaagttaaaaatgatggcataatgttttgtttcattttcccatgttaatagtaaggtatacccagagtacatttcttattaagaaaaaaaaagattggggtcacctt

SEQ ID NO: 1005612 - DNA, 120 bp, Artificial Sequence
  ENSG00000235221_14 (sequence is synthesized)
tggggtcaccttgatcaaaaattacctgtatactagttcagatatattatatatgaactacagtttaagaaatatcatcaaatattattaatatattctactatctaaaaattctgctat

SEQ ID NO: 1005613 - DNA, 120 bp, Artificial Sequence
  ENSG00000235221_15 (sequence is synthesized)
tatggctaaaaaagcttgatactggttgttacagtaaatctttactaatttatgaagcatcaaattcagatttttaaaaattatgtcaagctcaagctatttagaattcagcatagtttt

SEQ ID NO: 1005614 - DNA, 120 bp, Artificial Sequence
  ENSG00000235221_16 (sequence is synthesized)
atagttttatatactacataagaagaaaacagcttaaaataaaattatattattttattgggatgggctctggagcccatccattatttgattaaataaataaaaataaaaaataaaaaa

SEQ ID NO: 1005615 - DNA, 120 bp, Artificial Sequence
  ENSG00000275601_0 (sequence is synthesized)
gaagcatagatgttcactgctacttcacttcactggctaagattcctgggtagacttcactgggctcctggtctctatttccattaagactcctttgccttgctatagcagcctgaaaaa

SEQ ID NO: 1005616 - DNA, 120 bp, Artificial Sequence
  ENSG00000275601_1 (sequence is synthesized)
ttccaagaattttaaaaagttatttttcatcttcagagaggacacattacttgatgtagagtggaggcagtcacttctgcacattctgtgctgctgaggcaatttctgctattcgttcct

SEQ ID NO: 1005617 - DNA, 120 bp, Artificial Sequence
  ENSG00000275601_2 (sequence is synthesized)
ttattcatttttccagagagtaaaagtgctactgcttctataatttggacttccctacttaaactattttaaactactcaaaactatattctgctttacaagagccttattttacttcat

SEQ ID NO: 1005618 - DNA, 120 bp, Artificial Sequence
  ENSG00000275601_3 (sequence is synthesized)
tgctctgtttgggttcctgttttgcaagggcaaaaactgaataaaaattatagcattctattttccagccacaaatgtggtcctcagctctttctaattatataatcccatgctcctgag

SEQ ID NO: 1005619 - DNA, 120 bp, Artificial Sequence
  ENSG00000275601_4 (sequence is synthesized)
agctagaatttattgttaagtgaaaaaattttgtattttattgaatttaagctgtcatcaatggtgaaattcactgtttaccaataagaaataaaaatcatgctcaattaaactgggaca

SEQ ID NO: 1005620 - DNA, 120 bp, Artificial Sequence
  ENSG00000287346_0 (sequence is synthesized)
agtagctgggattacagggcctcgagggcgagacttcggctcacagctgtatcccagggcctagaactgtgtctgacatataccagtttttcttcccagggtctccccaagagctgcttc

SEQ ID NO: 1005621 - DNA, 120 bp, Artificial Sequence
  ENSG00000287346_1 (sequence is synthesized)
ctttgactcctgctgtgtgtagttctgctgacaatgacctggacagctctgcgccatgcacagcgtctcttttctccgacttaccaaattttagacactactgactcctccatgtgaaag

SEQ ID NO: 1005622 - DNA, 120 bp, Artificial Sequence
  ENSG00000287346_2 (sequence is synthesized)
atgggaattcagctacatcacattaccctacaaactttattgttaatatttcttcccggtcagccccaaacactgaatgtaaatacggtccaacatcaacctgcaaacgaacactgacat

SEQ ID NO: 1005623 - DNA, 120 bp, Artificial Sequence
  ENSG00000287346_3 (sequence is synthesized)
gaaagtgcagttggaaaggatctcgcaaaggaacagaatctggtgatcctaatcgtaatgaacgtgatcgccgggtattgagagcttgcaggtaccagggctccggcactacgtgtttca

SEQ ID NO: 1005624 - DNA, 120 bp, Artificial Sequence
  ENSG00000287346_4 (sequence is synthesized)
gaggaaactgagataacctacgacagcgaaaaggtagcagagctgggactggtgcccaggctcgccgagtggaaaagccctcggccaccgtggagagctcgcttcctgtggtctgaagcg

SEQ ID NO: 1005625 - DNA, 120 bp, Artificial Sequence
  ENSG00000287346_5 (sequence is synthesized)
tcgcccctgcaccggcttctgctgccaaggatggcttttcctcactggtgcccacctacgctcacttgtgtcatgtggttaagcccttttggcaacataagacctttcccaagaatgtgc

SEQ ID NO: 1005626 - DNA, 120 bp, Artificial Sequence
  ENSG00000287346_6 (sequence is synthesized)
ctcggtgcagaggaagacggtgggggcaggccccctccccgggatgctccaccctccctgacctcacacgggtgcaacctgggccgtggccgagacctgctgtgtggcagacaatgggaa

SEQ ID NO: 1005627 - DNA, 120 bp, Artificial Sequence
  ENSG00000287346_7 (sequence is synthesized)
gcctgtgtgtcgtcctgggtgccggatttagacaatatttagctttcccttggtggaaaagcctttcccctcctgctttgggcaggaactggttcctgttgggcggggcctggctgctgc

SEQ ID NO: 1005628 - DNA, 120 bp, Artificial Sequence
  ENSG00000287346_8 (sequence is synthesized)
cccacccccacccggccgggcaccttgaccggcagctctccgggctgctccctgcctgtgtccctgagcactgactccagaggtttaatcattaacgggcacgtttggccttcggtcgtg

SEQ ID NO: 1005629 - DNA, 120 bp, Artificial Sequence
  ENSG00000287346_9 (sequence is synthesized)
ggctggaatttgggacctgtgcccgggaacaatgatctccgacacattattttgtgtaaaatcacttttagctgccattagctaataaagctggaataaagtgaggtccattaaccagca

SEQ ID NO: 1005630 - DNA, 72 bp, Artificial Sequence
  ENSG00000287346_10 (sequence is synthesized)
agtattttttgatgctcttgcatctggggctgacccaacactgctcatcccatgtggtcattgctggcttac

SEQ ID NO: 1005631 - DNA, 120 bp, Artificial Sequence
  ENSG00000287346_11 (sequence is synthesized)
tgagaaggaaacaggaagtggcagatggaagggtggtttttcttcccagggtctccccaagagctgcttcctttgactcctgctgtgtgtagttctgctgacaatgacctggacagctct

SEQ ID NO: 1005632 - DNA, 120 bp, Artificial Sequence
  ENSG00000287346_12 (sequence is synthesized)
cctccacctcccagggtcaagtgattctcctgggtcagcctccggagtagctgggattacagatttcttcccggtcagccccaaacactgaatgtaaatacggtccaacatcaacctgca

SEQ ID NO: 1005633 - DNA, 120 bp, Artificial Sequence
  ENSG00000287347_0 (sequence is synthesized)
atgacattttttaagtgctgaaagcaaaggaatattaacccacaactctatattcaggaaaatatgcatgacaaatgaaggagaaataaagatattctcagaagaaggaaaactaagaga

SEQ ID NO: 1005634 - DNA, 120 bp, Artificial Sequence
  ENSG00000287347_1 (sequence is synthesized)
attcttaaccagcagacctccttgagaagaacttctaaacatttcttctaaacagacagaagggctctaacccgagcttcaagccccatttgtatgcagctgtccatgggtgtcagtagt

SEQ ID NO: 1005635 - DNA, 120 bp, Artificial Sequence
  ENSG00000287347_2 (sequence is synthesized)
tgtttgacttagcagagccgagagccccgggttgggagtggagagaaaaaagggaagagctgcattccagtcaacatgctcctggaaggacctgacctctcccgctcactttttaaaaag

SEQ ID NO: 1005636 - DNA, 120 bp, Artificial Sequence
  ENSG00000287347_3 (sequence is synthesized)
gctccatagtcaaggaaagctttcttggaagaaatctacagctgggttgctgttgacactctttgtatcagaagaaagccatccacgatggtcagagaagcacatcacagcaccgattgc

SEQ ID NO: 1005637 - DNA, 120 bp, Artificial Sequence
  ENSG00000287347_4 (sequence is synthesized)
caaattgctttggcacatgcatgtgtgtgggcggggactgtggctgtgtcttggacactgcccagcactcagtgggcacttattaaatatggaataacaagaagtattttagagggaaat

SEQ ID NO: 1005638 - DNA, 120 bp, Artificial Sequence
  ENSG00000287347_5 (sequence is synthesized)
acacaaacaagacagcaattttttcacatgtcacccatttaaaggtgtagcagctgtggagtagagcctttattgtatatgtaggcaccaaagaaacgtactaaaatagagttgcactta

SEQ ID NO: 1005639 - DNA, 120 bp, Artificial Sequence
  ENSG00000287347_6 (sequence is synthesized)
tcatagccaaagtcataactgttacacaatgaagagtagatgcttaatctctgctttgctttacactgacagcgaatagaatcgatttcaaatgataccttgtctctatttcagtctgcc

SEQ ID NO: 1005640 - DNA, 120 bp, Artificial Sequence
  ENSG00000287347_7 (sequence is synthesized)
ttttttctcctccttgaaactatgagaggatgctagttatgcatcatttgaggactggagaagagaagtctttcttctgctttcttctgcccacatccttataagtgtggaaaaagtcta

SEQ ID NO: 1005641 - DNA, 120 bp, Artificial Sequence
  ENSG00000287347_8 (sequence is synthesized)
cacatcacagagatgcccttagactccatataatggccaggacataaacccagactcatgtgcaatgatagagggatgctaggttcatgctgacacccctgtccactccaccaccatcac

SEQ ID NO: 1005642 - DNA, 120 bp, Artificial Sequence
  ENSG00000287347_9 (sequence is synthesized)
caatgccaccatgcctagcacagcagtgatggctgcagcggagttacccggcctcatgctcagtgaagtcactggtaactacgactccacatgaggaatagatttttgcatgtataaaaa

SEQ ID NO: 1005643 - DNA, 120 bp, Artificial Sequence
  ENSG00000287347_10 (sequence is synthesized)
ttaagagcagtacctcaaggacatgcgggaacaccaggttagagctaagccctgtgcagcctcatttttaggagtgaaggaaggaccagtaatgaaggaataaaaatatttgaaacattc

SEQ ID NO: 1005644 - DNA, 120 bp, Artificial Sequence
  ENSG00000231903_0 (sequence is synthesized)
gctcctccagctacagcagccaaagcatattcaatccggacaagtttatcagacgggctgaatgtagtcagcgaaaagccgtaccgcgctccgccatctttacccgaagagccaaagcac

SEQ ID NO: 1005645 - DNA, 120 bp, Artificial Sequence
  ENSG00000231903_1 (sequence is synthesized)
gcaaaggtggttgaggaattggaaaggttgactggggctgcaccttggaatttattttgtcttggataatatgtaacattaacagagagcagaagctgattaaagtatcttggtgccaaa

SEQ ID NO: 1005646 - DNA, 120 bp, Artificial Sequence
  ENSG00000231902_0 (sequence is synthesized)
aaagtcagcaggaggaagtagaaatgagacagaggcctctgtctcctaatcttttccataggctactgttttctttcttttctcatgaggaaaaatgataaaagcaaaataaacaaatta

SEQ ID NO: 1005647 - DNA, 120 bp, Artificial Sequence
  ENSG00000231902_1 (sequence is synthesized)
gctaccacttatgaaaatccccaggaaattccttttccagagttctcacttactaatttggctaacattaccaatggtaacagaccccacgtatccgccacaattgctgtgagttgcaga

SEQ ID NO: 1005648 - DNA, 120 bp, Artificial Sequence
  ENSG00000231902_2 (sequence is synthesized)
ggaaaaagactgggaggaaatcttcacttttcttctgcaacagcaaccaacagaaatgaaagagccaggggattttgcaaaatatcaactcctgagaactaagaatgagagcctttcctg

SEQ ID NO: 1005649 - DNA, 120 bp, Artificial Sequence
  ENSG00000231902_3 (sequence is synthesized)
cacatttctcttctgctggacattcagaggactgtttctcactaatatcaggagaaatctgtcttggtgttggagcctcttggaattcgtgacaaggaaaaaagtacaccaagtaaacta

SEQ ID NO: 1005650 - DNA, 120 bp, Artificial Sequence
  ENSG00000231902_4 (sequence is synthesized)
gtaaaacaaaaggaccagcaacaaggcaccatctttgaagcaagaaacagtcccttgccagacatcaaatctgctagcaccttactcttggacttccacaactgtgaacaatatattcca

SEQ ID NO: 1005651 - DNA, 120 bp, Artificial Sequence
  ENSG00000231902_5 (sequence is synthesized)
caagaatgaacaagttacccattctaagatattttgctagagcagcccaaacagactacaacagtttgattttctagttattctttcacaacacggatattaaatggtgacctgcctcca

SEQ ID NO: 1005652 - DNA, 120 bp, Artificial Sequence
  ENSG00000231902_6 (sequence is synthesized)
aagctttacatcatccatattaccctgcagcaggaacagattgatggggattctatagcacatccttgaattgtgtttatccaatccacatttctcttctgctggacattcagaggactg

SEQ ID NO: 1005653 - DNA, 120 bp, Artificial Sequence
  ENSG00000231902_7 (sequence is synthesized)
tttctcactaatatcaggcctttttcagttatgagtgaatcccaaatcaaactgacttaagaaacacaaaagagaaatctgtcttggtgttggagcctcttggaattcgtgacaaggaaa

SEQ ID NO: 1005654 - DNA, 120 bp, Artificial Sequence
  ENSG00000231902_8 (sequence is synthesized)
aaagtacaccaagtaaactagtaaaacaaaagtgagaaggcccttgacagatgtgagccccttgaccttggacttcccagcctcaagaaccacaagccaaataaatttctgttcattata

SEQ ID NO: 1005655 - DNA, 120 bp, Artificial Sequence
  ENSG00000231902_9 (sequence is synthesized)
ccttcatttgctgctccagcacaattgcacggaagcaatagcagggatagttagagtgcatacaattgattccaatccatccatcacttaaactactgtctaggacatcaggaggccaca

SEQ ID NO: 1005656 - DNA, 120 bp, Artificial Sequence
  ENSG00000287342_0 (sequence is synthesized)
gttcagcaggaaccccggtgctgggacctgagcccagggccacctgcatcgcggcccaacctgtctggggcctcgtcctctctcgtgtacacacaggagctcctggcaccccggagggca

SEQ ID NO: 1005657 - DNA, 120 bp, Artificial Sequence
  ENSG00000287342_1 (sequence is synthesized)
gcccccaaccctgaaacacacagcggcagcggcctgacctccccggcactctctacgtcatgtgtctcagatggggacctgtgagtcccggaacctgactcacgggtttgtgtccactcc

SEQ ID NO: 1005658 - DNA, 120 bp, Artificial Sequence
  ENSG00000287342_2 (sequence is synthesized)
tgggccaggtggtgtgtctctcgggaccaagtggatgttgagataccagccggacagctattataccaatgcagaaagaaggaaatggtggcttgggtactagtgccgggggacggggga

SEQ ID NO: 1005659 - DNA, 120 bp, Artificial Sequence
  ENSG00000287342_3 (sequence is synthesized)
gaggacatggttgcttgggccaaaggatggtgctgaagtggggagaaggggtctgattccaggtatgttttgaaggtgaagccaacaagagttgctgacagattcagcgtggggatgaga

SEQ ID NO: 1005660 - DNA, 120 bp, Artificial Sequence
  ENSG00000287342_4 (sequence is synthesized)
ggaaaggagagtctgggctgagcccagggtctcgcctaactagctagagggatgaggccacgctgacccagtggggagtggggaagggcagtgcagggaggacaatggggagtttgttct

SEQ ID NO: 1005661 - DNA, 120 bp, Artificial Sequence
  ENSG00000287342_5 (sequence is synthesized)
gagcatgtcctggctgagatgcctgctggacttcaagctcaagaaacctcttggatttaaatctagagttgagaggagaggttgtccttcaggggtccatatgaaagcttcaggtgcttc

SEQ ID NO: 1005662 - DNA, 120 bp, Artificial Sequence
  ENSG00000287342_6 (sequence is synthesized)
cgagggatcctctggcatgacaggtctgagcccgtctttccctctccggcactgcagggctcccgcagttctgcttagattcctagcagcctctgctcagcccctctgcgctcaccctgt

SEQ ID NO: 1005663 - DNA, 120 bp, Artificial Sequence
  ENSG00000287342_7 (sequence is synthesized)
ctttcctctccccgggatcttgtctctccaagccctggctgtgtgagcagtcctgcactctgattctcgtcttcctgctggcacgacagtgttgaaagctcctctgagcttctcggattc

SEQ ID NO: 1005664 - DNA, 120 bp, Artificial Sequence
  ENSG00000287342_8 (sequence is synthesized)
tcagcagacctccctgctcagcttctcagcatctctgctcatgccagttatgagtttgcggttgccccaaagggtgcagaagttcgggtcacctcaacgcgtttccctcccccacaatgt

SEQ ID NO: 1005665 - DNA, 120 bp, Artificial Sequence
  ENSG00000287342_9 (sequence is synthesized)
cttgggccttcaggtcctggctgccttggtaactctctgacacattgagacacatgtggtcatttgttttctccaacctggttgatggaagccaaaagtggactcctttttatttttttg

SEQ ID NO: 1005666 - DNA, 120 bp, Artificial Sequence
  ENSG00000287342_10 (sequence is synthesized)
ttttttgacagggtctttctcttttgcccaggctggagtgcagtgatgcggtcacagctcactgcagcctcaacgtcctgggctgaagccatcctgccgcctcagcctcttgagtatctg

SEQ ID NO: 1005667 - DNA, 120 bp, Artificial Sequence
  ENSG00000287342_11 (sequence is synthesized)
ggagcacaggtgtacaccaccatgcccggttaatttatttttgtagagacggtgtctcgtcatgttgcccagcgttccgcctaggcctcccgaagtgctgggattgcaggtgtgagccac

SEQ ID NO: 1005668 - DNA, 120 bp, Artificial Sequence
  ENSG00000287342_12 (sequence is synthesized)
tgtgcccagcctcctcgtttttcttacagttgtgtttcactttatggatctattatgatttatataacaacctcttatcaacgggcttttaggccattgtaaataatgctgcagtgagta

SEQ ID NO: 1005669 - DNA, 120 bp, Artificial Sequence
  ENSG00000287342_13 (sequence is synthesized)
atttcacacatagacggcctcacctgtgcgcaatggtatctataggataagcagaattgccgggccaaagggcagatgcatttacatttttattgatgttgccaacttcgtggccataaa

SEQ ID NO: 1005670 - DNA, 120 bp, Artificial Sequence
  ENSG00000287342_14 (sequence is synthesized)
cgttgtgctaacttgtcctttcatcagctatgtacgagagcgcctgcttccccacaagtctgtcaacattgagggttgcctggcattttgctttttgccagtctgacccgtcataaaatg

SEQ ID NO: 1005671 - DNA, 120 bp, Artificial Sequence
  ENSG00000287343_0 (sequence is synthesized)
gtgttgaagaagagtgttaagagtagacattcttgtcttgttccagttctcaaggagaaaggttctagcttttgcccactcagtatgatgttggctatgagtctggcatagatgactcat

SEQ ID NO: 1005672 - DNA, 120 bp, Artificial Sequence
  ENSG00000287343_1 (sequence is synthesized)
tattttgagttaagataaaataacatggacagatttctcccaccacctgaaaacactaaaacaagacagagcgtatgaaacaatggcactcaagacactgaagatgggcaataaaggagt

SEQ ID NO: 1005673 - DNA, 120 bp, Artificial Sequence
  ENSG00000287343_2 (sequence is synthesized)
gatcattcagaggaagaaaaaaaatgagatcatctgtatgactatgattttccaagcttactacctggagaaaggggacagtgcggtcactgtacagtcaggtgagtgttgaggagataa

SEQ ID NO: 1005674 - DNA, 120 bp, Artificial Sequence
  ENSG00000287343_3 (sequence is synthesized)
acctgggagtatgaagaagccaagtgtgctcaagttcatgtggctgagtcccggaataaaaagctgtgtagacagagaactccagacacctgcactgagtcactcctaagatacagttca

SEQ ID NO: 1005675 - DNA, 120 bp, Artificial Sequence
  ENSG00000287343_4 (sequence is synthesized)
gtacttcttagcacatacatgtaaggaaacaatcagaggctgggaaaaaaactgcctaagaggattagagggaagacatgccaaatcttacacagagcatgaaatggggactattctgaa

SEQ ID NO: 1005676 - DNA, 120 bp, Artificial Sequence
  ENSG00000287343_5 (sequence is synthesized)
gatccagaattttaaaatctcaaaccttatgagccactgattagactgacatatgaaggattttgcttcagaaaattaatcttacactaaatgcaggttttgcccctcctaacaaaggtg

SEQ ID NO: 1005677 - DNA, 120 bp, Artificial Sequence
  ENSG00000287343_6 (sequence is synthesized)
aaaagcaagactgaaaggaaagtctcaggtaatttaacctatctcagaataaagctcaagaactaatcacgattagatctaacactcaacaagggaaacttcacaatgtttggcatccaa

SEQ ID NO: 1005678 - DNA, 120 bp, Artificial Sequence
  ENSG00000287343_7 (sequence is synthesized)
taaagaaattatcaggtatgcaaagaagcaaaatgaaaaaaacctagcagaaaaattaatcaatcgaaactgactcagaaaattgataaaattaggagacagggacactaacaattatga

SEQ ID NO: 1005679 - DNA, 120 bp, Artificial Sequence
  ENSG00000287343_8 (sequence is synthesized)
agcctaaatcaaacttccaaaggtaaaaactaaaatgtcttagataaaaatacactgaaagagactgacagcacatcagatattacaaaagaaaatgttaatgaacctgaagacatatca

SEQ ID NO: 1005680 - DNA, 120 bp, Artificial Sequence
  ENSG00000287343_9 (sequence is synthesized)
acagaaagcataaacacaacagaaagactaaaaaaatgcaaataatcagtaaattgtggaacaacttcaagtagataaatacatgtgtaattgaagtccccacaaaagagatgagaaaag

SEQ ID NO: 1005681 - DNA, 120 bp, Artificial Sequence
  ENSG00000287343_10 (sequence is synthesized)
aagaaatcaagaaaacatttgaagaagtgatggtcaaaattgttccaaatttaatgaaaactatcaccaaaagcagctcagtaaattcaatgtacaagaaaaaaacgaagaaaactacac

SEQ ID NO: 1005682 - DNA, 120 bp, Artificial Sequence
  ENSG00000287343_11 (sequence is synthesized)
aaaggaacattatattcaaatggattaaagttgtaaagataaaaacagaagtagtcagaaaaattacacattatctacaaaagaaaagaggtaaggctgacaagagattcatcagaaata

SEQ ID NO: 1005683 - DNA, 120 bp, Artificial Sequence
  ENSG00000287343_12 (sequence is synthesized)
ataaaagatagaacaagtggcacactatctttaaagtattgaaagaataaaagccgctaatctagaagtccttgccagttaaatgatctttgaaaagcaaaaggtgaaattttgtaaaac

SEQ ID NO: 1005684 - DNA, 120 bp, Artificial Sequence
  ENSG00000287343_13 (sequence is synthesized)
aacacaacacaactttgagtcacacaaaaggatatagtttggatatttgtctccacccaaatctcatattgaaatgtaattaccagtgttggaggtgagacctagtgggaggtgtttgga

SEQ ID NO: 1005685 - DNA, 120 bp, Artificial Sequence
  ENSG00000287343_14 (sequence is synthesized)
tcatgggggaagatcctttacagcttggtgctgtccttacagtagtgagtactcacaagatctgattgtttaagtgtgtagcacctcacccacattctctcttgctcctgttttcaccat

SEQ ID NO: 1005686 - DNA, 120 bp, Artificial Sequence
  ENSG00000287343_15 (sequence is synthesized)
gtgaagtgcttgctcccacttcatgtcccactattagtaaaagcttcctgaggcctctacagaagctgaacagatgccagcgccatgcttgcacagcctacaaaactttaagccaattaa

SEQ ID NO: 1005687 - DNA, 120 bp, Artificial Sequence
  ENSG00000287340_0 (sequence is synthesized)
agagcaggaggcttccatccaccctttccatcgcaacgcgggagccccctcctcagaacctacataaggcaccgaagcgcagcccagtacgcgcggggacccatctggcccagccccagg

SEQ ID NO: 1005688 - DNA, 120 bp, Artificial Sequence
  ENSG00000287340_1 (sequence is synthesized)
aaagcagccaccgagggcagacgcgcgccttacctgctaccaagagatcagctgtctaaacagcagcttttttgattgttgggcttcctgaaagaaaccttgctgacagcttctcactga

SEQ ID NO: 1005689 - DNA, 120 bp, Artificial Sequence
  ENSG00000287340_2 (sequence is synthesized)
cctgcaggacggaaccgtacctgagaggggatgggggctctctcacaaaagaatatttggggcagaaccctggaactggccaccagggacatcccaaatatcccctcctcctcagggctc

SEQ ID NO: 1005690 - DNA, 120 bp, Artificial Sequence
  ENSG00000287340_3 (sequence is synthesized)
accccgacatcctcagccaaatgaaggctctgaacccagccatcagctcgcaaggcacaactcactttgcaggctaatcaaaatgctttctgaagaaaagaaaactaattatcccacggc

SEQ ID NO: 1005691 - DNA, 120 bp, Artificial Sequence
  ENSG00000287340_4 (sequence is synthesized)
aaaaccagtgcctccaacctctctggggctcacacatcccatcaatttatcagggacacagtagcatgtttaaccctttagccctaggcagaagttcatccaggggagtgggaaagtaga

SEQ ID NO: 1005692 - DNA, 120 bp, Artificial Sequence
  ENSG00000287340_5 (sequence is synthesized)
ggctgctattctgtactgcttttattggggggtgctggcagtggttagtttgaaaaacgtttgctgtacgttgcatcagaggtcacattcatgggacaagctttgattaacaaataatat

SEQ ID NO: 1005693 - DNA, 120 bp, Artificial Sequence
  ENSG00000287340_6 (sequence is synthesized)
aagaattccctcttttcttctcttacttcctacctgcctttatttatttatttttgcattcacaaaactaaagagaaagtcactccacagaacacgaatggaataaaaggccaaccattc

SEQ ID NO: 1005694 - DNA, 120 bp, Artificial Sequence
  ENSG00000287340_7 (sequence is synthesized)
tacctttccaatcctcactctccctttcccattctttactgttgcgtcaagcaatctgctgtacggacgggttcgcactgctttcctttatttttttttctcttgctggcattagaaaag

SEQ ID NO: 1005695 - DNA, 120 bp, Artificial Sequence
  ENSG00000287340_8 (sequence is synthesized)
cctgtaaataacccaagaagaggagagaattttttccttcagctcattttcataagaaacatgatacataatacatggcactttaataagactttatctgaacggtttaatgaaaaacaa

SEQ ID NO: 1005696 - DNA, 120 bp, Artificial Sequence
  ENSG00000231908_0 (sequence is synthesized)
taacaatctagagcaccacagagtgtttccaggtcggcacaaaagcgaacgggacagggcgccctgggcggcggcagcttggccggcccgctgcctagcgcgcccccgaggggcggtaat

SEQ ID NO: 1005697 - DNA, 120 bp, Artificial Sequence
  ENSG00000231908_1 (sequence is synthesized)
ggaacgtacctttggctgaagaaagagtgctcccggccagcgcggggtcgcctagggggttccgcgctgcctaatgcaaaggatggaaaagttacagaagcagagatgggtttcagcagc

SEQ ID NO: 1005698 - DNA, 120 bp, Artificial Sequence
  ENSG00000231908_2 (sequence is synthesized)
tctcgaactcctggactcaagtgattggccctcctcggcctcccaaagtcctgggattacaagcgtgagccaccatgctcagttggcgggggattatctgtgatccaatgaagttggact

SEQ ID NO: 1005699 - DNA, 120 bp, Artificial Sequence
  ENSG00000231908_3 (sequence is synthesized)
agagatgtgaagccttagaaaacggtggattgaaaaaagaattttagtctcctccagagattatattttgtgtgttcattgctctcaaaaacatgaaaataaagagtattttatattgtg

SEQ ID NO: 1005700 - DNA, 120 bp, Artificial Sequence
  ENSG00000231908_4 (sequence is synthesized)
gaatccatggtgccactttcccggtgatcccggtgggggaaggggttgccgcccggcagagattcagtcccgaatcccgacagcgaagagacttgtatgccacctgcaggccggggagcg

SEQ ID NO: 1005701 - DNA, 120 bp, Artificial Sequence
  ENSG00000287348_0 (sequence is synthesized)
gagacgcgctagatccaccaccaagcttgcaagcagaagaggcagcaagtgatgctgaaggctgtgctgcagccacttcaccggaacctagagctacctgtgaacaggtctcctacacgt

SEQ ID NO: 1005702 - DNA, 120 bp, Artificial Sequence
  ENSG00000287348_1 (sequence is synthesized)
tgaagatttttctggatttagggtgtctaacctttgatgggaaagggcagcttcatcttggagtgtttactttcaagaattgctatgggctaaaaatcaattctctttaaaagcaaagat

SEQ ID NO: 1005703 - DNA, 120 bp, Artificial Sequence
  ENSG00000287348_2 (sequence is synthesized)
ttaatctgataaggaatcaatgcagcatgctaaatacctttcatatggcatgaaaacgtcttcagttactcaagccacaggcaatgagaataaggtgccacagcaccgtatttttcacaa

SEQ ID NO: 1005704 - DNA, 120 bp, Artificial Sequence
  ENSG00000287348_3 (sequence is synthesized)
aaagagtgacctgggattcaagaaacctgtatagtataactatcgccagttcgttttgtggctttgggcaagtcacttcaccttttgtgaaagtctggagcttctttaaaatttctgaac

SEQ ID NO: 1005705 - DNA, 120 bp, Artificial Sequence
  ENSG00000287348_4 (sequence is synthesized)
tgcattagataacgctttaaaaatatacctgacattctgtaactttaaataaatgaaaaatgccaatctattaagtgcttaattttgtgccgggcacgatttcaaattctttccttattt

SEQ ID NO: 1005706 - DNA, 120 bp, Artificial Sequence
  ENSG00000287348_5 (sequence is synthesized)
tggagtcagggtaaaacctacttcgagtctggtcttaaccacgatgatgctccttcgacgatttcttcgagtactgggccctgttcaacctcatcttggtatcactaaacgctcgtgtgt

SEQ ID NO: 1005707 - DNA, 120 bp, Artificial Sequence
  ENSG00000287348_6 (sequence is synthesized)
gtgtctggtggttacatcttcccaaactggattttaaatgaatacagtgaaccctaacgtttttctggtgtggatagtaagtaggcccattggattaacaatacttaagcttgggtaatt

SEQ ID NO: 1005708 - DNA, 120 bp, Artificial Sequence
  ENSG00000287348_7 (sequence is synthesized)
gaaagcattttttaaaatgaagacggtcctattttggaaatgcagaaaggcgagatgaaagccaaactctgacagttaagtcctaacctccagtacctcagaatatgaacttatttggaa

SEQ ID NO: 1005709 - DNA, 120 bp, Artificial Sequence
  ENSG00000287348_8 (sequence is synthesized)
ataagctgttgaagaacaccatgtgacaacaaaggctccaacttcagttacccagctgcaagccaaaggaatgccaaagacagccagcaaacctccagaagagaggaagagacaaggcag

SEQ ID NO: 1005710 - DNA, 120 bp, Artificial Sequence
  ENSG00000287348_9 (sequence is synthesized)
gattccccgctggaggcttcagaaagagcatgtcactgcccacccccacatactgcctctggtttgtggtactttgttacagcagcccttggaagctaatacaaatgctattataaagcc

SEQ ID NO: 1005711 - DNA, 120 bp, Artificial Sequence
  ENSG00000287349_0 (sequence is synthesized)
aggggataaaaagcaggccatgcgagccacctgtggcaacccacttgggttccctgcgatgttgtggaagggttgttgttttgctgtttccagtaaatgttggtgttgctcagtttttgg

SEQ ID NO: 1005712 - DNA, 120 bp, Artificial Sequence
  ENSG00000287349_1 (sequence is synthesized)
gtccacactgtgtttatgagctgtaacacgcactgcaaaggtctgcagcttcactcctgaggtcagcgagaccatgaactcaccaacctgctgggagggatgaacaactccggacgcgcc

SEQ ID NO: 1005713 - DNA, 120 bp, Artificial Sequence
  ENSG00000287349_2 (sequence is synthesized)
cgtttatgaactgtaacaccacgaaggtctgcagcttcgctcctgaggccagcacgaccatgaacccattagaaggaatgaacaactccagacgcgctgcccttaggagccgtaacactc

SEQ ID NO: 1005714 - DNA, 120 bp, Artificial Sequence
  ENSG00000287349_3 (sequence is synthesized)
actgtgaagggaaaaccccagctgacatcttttcttctggagacagtacaagatgacgtctttggagggctcttcaaataaagtatgatgcaaataaaaagattttgccttttggaaact

SEQ ID NO: 1005715 - DNA, 120 bp, Artificial Sequence
  ENSG00000269495_0 (sequence is synthesized)
gaggccagaccagctagagggtgggtgtctgacatgctgagggggcaggggcagggcctggagaataagagtggcacctctcaagcccaggctcaagctcaaggacagagcccaggctca

SEQ ID NO: 1005716 - DNA, 120 bp, Artificial Sequence
  ENSG00000269495_1 (sequence is synthesized)
cagggcaaggaggggacagagaaagatgtgggtgcaggacgcacagacacctctccttccctgcctgctgagccaccctcaccaggccctcgggatcaggtccaagttcttctgcctggc

SEQ ID NO: 1005717 - DNA, 120 bp, Artificial Sequence
  ENSG00000269495_2 (sequence is synthesized)
gctcagtggcatcatcttccgctgacctacatttccagccatatcattcatttctcccacctcaaacgccagcctccaccatccaggacgattcacaggtgagaaatctgcagtgaagaa

SEQ ID NO: 1005718 - DNA, 120 bp, Artificial Sequence
  ENSG00000269495_3 (sequence is synthesized)
agggattttcctgtattctcttagtggtggggcccaggatgtggcagctggtggtgttggctgagcagtccctctccaggggaaggggctggatgagttcagagagtttggctgggcgtg

SEQ ID NO: 1005719 - DNA, 120 bp, Artificial Sequence
  ENSG00000269495_4 (sequence is synthesized)
ccaggcgcaacagcatgatgtcctggtcatggctggcggcatcatagtcagggtggatcacagcccggacaacagaactctgctcctgggaactctccctttgccgaaggttatgcttcc

SEQ ID NO: 1005720 - DNA, 120 bp, Artificial Sequence
  ENSG00000269495_5 (sequence is synthesized)
ccaggaagacctgaagattcctgggaaggaagagggctgggtctcacctggagcccttgggctgcagttgaggcttcagagagggctgggaagtcatgaatcgctggcctgctcctccca

SEQ ID NO: 1005721 - DNA, 120 bp, Artificial Sequence
  ENSG00000272894_0 (sequence is synthesized)
gggcaagatggcggccgcggccgtgcggcccgtgacctggaccactgggctgggacccacgaccccaccaccacgcctggaggacgcgcagcggcgcctcggccttggaaggggagtttc

SEQ ID NO: 1005722 - DNA, 120 bp, Artificial Sequence
  ENSG00000272894_1 (sequence is synthesized)
cctcggggcggggtcactggccgggaggccccgccttccgcccgaaagcgccggtgcaccccgcaggccctgcccgtgggtccacaggccggatccccgggttcctaggctgggactgct

SEQ ID NO: 1005723 - DNA, 120 bp, Artificial Sequence
  ENSG00000272894_2 (sequence is synthesized)
caggccggatccccgggttcctaggctgggactgcttctcagaaccactctgtcgtttttaagcagggtcacacactctagctcactgggtccattttaatttctattaaacattttttt

SEQ ID NO: 1005724 - DNA, 120 bp, Artificial Sequence
  ENSG00000272894_3 (sequence is synthesized)
ttttttgcaaatgatgtagtaggagatccaaggtgtttggttaatgatttattcactcattagtcattccacaaacttgtcttgagcacctgttatgtacccagcactgtgctggaatgc

SEQ ID NO: 1005725 - DNA, 120 bp, Artificial Sequence
  ENSG00000272894_4 (sequence is synthesized)
tgaggagacaggagtgaagtaaaaagacatggttccggcaggaaacaggcaaggagagccttgacttggtagggctaacacagtgctacacaggagggacgcccgctcggtgtcgggggt

SEQ ID NO: 1005726 - DNA, 120 bp, Artificial Sequence
  ENSG00000272894_5 (sequence is synthesized)
cagcaaagcttccttaaggaccactaggttgagacaagaaggatgagtatgggattagccaggaaagggaaaagggcagtgggaactggaagagaagagccttctaggactgggaaagag

SEQ ID NO: 1005727 - DNA, 120 bp, Artificial Sequence
  ENSG00000272894_6 (sequence is synthesized)
agaggacatagcagtgaggaggcagtaggtatggatgaatgagcagaggaagtggggagagattaaggtgctttcagaaacgggttggaaaccagtttagtgagtttggatggcatttac

SEQ ID NO: 1005728 - DNA, 120 bp, Artificial Sequence
  ENSG00000272894_7 (sequence is synthesized)
ctaaaggcaatgttagagtcatcgaaagtttttaatcaggcaagtggtatgatcagttttttgttttgttttgttttttttgagacggagtctggctatatcgccaggctggaatgcaat

SEQ ID NO: 1005729 - DNA, 80 bp, Artificial Sequence
  ENSG00000272894_8 (sequence is synthesized)
caagcgattctcctgcctcagcaccatgagaaaactgaggcacagagaggtgaaataaggcccccagaatgctcttctcc

SEQ ID NO: 1005730 - DNA, 120 bp, Artificial Sequence
  ENSG00000272894_9 (sequence is synthesized)
cacagagaggtgaaataaggcccccagaatgctcttctccaagacttagaaaaatcaaatgctatccatccctcaagatacatccctccagcccctccttgaagtctcctgcagctagaa

SEQ ID NO: 1005731 - DNA, 120 bp, Artificial Sequence
  ENSG00000272894_10 (sequence is synthesized)
ccctccttgaagtctcctgcagctagaagtagaagtagcatctatccccatctggactccttagcactttgctgtacctgccttagtccccatctctttacacacacacacacacacaca

SEQ ID NO: 1005732 - DNA, 120 bp, Artificial Sequence
  ENSG00000272894_11 (sequence is synthesized)
ttacctattatattacattatattattgtagttctacaggaactacaaggaattctactgtgaattccttaagggtgggatacattttacaatcatcactgtttctctcattagttgtgg

SEQ ID NO: 1005733 - DNA, 120 bp, Artificial Sequence
  ENSG00000272894_12 (sequence is synthesized)
aatcaaaaaaatgagtgcacgatgaaaaattattcaaacacatacatgctttcattccaattgaaaatgtaaaaatattactgttaaaacaatattaaaggacatgtaatacaattcaaa

SEQ ID NO: 1005734 - DNA, 120 bp, Artificial Sequence
  ENSG00000272894_13 (sequence is synthesized)
cctccctttcagcaagatgagaaaactgaggcacagagaggtgaaataaggcccccagaatgctcttctccaagacttagaaaaatcaaatgctatccatccctcaagatacatccctcc

SEQ ID NO: 1005735 - DNA, 120 bp, Artificial Sequence
  ENSG00000272895_0 (sequence is synthesized)
aatctctagagatccatgttttgggggaaaggtaacaacttcacagtttgatgatattggaggtttcaataataatcaacacagggccccaacttcctattttcataaaaatgatcaggt

SEQ ID NO: 1005736 - DNA, 120 bp, Artificial Sequence
  ENSG00000272895_1 (sequence is synthesized)
agtgtccccttgcataagaaagacagaaaggctaacaaacatacaaataaattttaaggtaaagtcttggcctcgaatttacaaatttcatggaattcggctttgaagtctagcagaggg

SEQ ID NO: 1005737 - DNA, 120 bp, Artificial Sequence
  ENSG00000272895_2 (sequence is synthesized)
gaagactcaacacataacagtaacaaactatgtaacacttagagagcacttactaaaatggtcagtctttcaactaagtgctttagacatacaactaacttaattctcatcctatcaggt

SEQ ID NO: 1005738 - DNA, 120 bp, Artificial Sequence
  ENSG00000272895_3 (sequence is synthesized)
ttctatttaacagacggaaagttatttacccaaggtcacacagctagaaagcgaccaacttgaacccaggaggtctccagggtccatactcttgaccctatatttcaaaatcttaacaca

SEQ ID NO: 1005739 - DNA, 120 bp, Artificial Sequence
  ENSG00000272895_4 (sequence is synthesized)
gaactagagaacttctagcttcaagggctgtgtagcttccttctcagcagctgcatgaatggtggagtggaaaaagcacaggcttggagacagagtttagactggaacctttgtttgtcc

SEQ ID NO: 1005740 - DNA, 120 bp, Artificial Sequence
  ENSG00000272895_5 (sequence is synthesized)
actctccgcccttaagcaaatcaattaccttctctcagtctcatttttcccaaatgtaaggaaattacatttctcactttcctcaaatgtaagggattataataaacgcttcaaagaact

SEQ ID NO: 1005741 - DNA, 120 bp, Artificial Sequence
  ENSG00000272892_0 (sequence is synthesized)
atactcagggacaccgtccccccctccgccccccgccctccgtaagtgctatttttacatcgaatgccctagtctggaagtaggtaaactgaaactaagctcaaatcaaaaggagaaagg

SEQ ID NO: 1005742 - DNA, 120 bp, Artificial Sequence
  ENSG00000272892_1 (sequence is synthesized)
ctggaaaacaagaggctacaagctccagaagctccgagcgaggatgaaaattagccagcccacaggtgggctctgcgcggccctgaaagtcgcactctgacctgaccctttccgcctctc

SEQ ID NO: 1005743 - DNA, 120 bp, Artificial Sequence
  ENSG00000272892_2 (sequence is synthesized)
gtttttccttccagcctcgcttcaaagttctgtattgcagaatgaaatcggcgcctttccccagcggtttttccaaatacgagcaaaggaggcacaaaacgcaggttccagaaactgtgc

SEQ ID NO: 1005744 - DNA, 120 bp, Artificial Sequence
  ENSG00000272892_3 (sequence is synthesized)
ctgcaaccattcgtccttatttcccgacacacgggcccctgctccccgctaaggctggggtcctggacacgagttttgcgctctgatagaagggcttagattccagattgacactgggct

SEQ ID NO: 1005745 - DNA, 120 bp, Artificial Sequence
  ENSG00000272892_4 (sequence is synthesized)
ctctaaagcctgctcctcaatctactgatccggtccagcttaagatccagtagaaagaaaacatagcctgcccggaccgtaacctttttgtttcagaccctgcatttgtaaaatagccta

SEQ ID NO: 1005746 - DNA, 120 bp, Artificial Sequence
  ENSG00000272892_5 (sequence is synthesized)
agagcaagacagcgtcctggtccaagaaccggatgagtcaaaaggcgttactgttgagtcagacatagaatacatgaatacctagaaattcgtaaatgattctccaaaggctgttgaaat

SEQ ID NO: 1005747 - DNA, 120 bp, Artificial Sequence
  ENSG00000272892_6 (sequence is synthesized)
gacagagcaagactctgtctcaaaaaatgaaaaaagaaatagcgttttcaagttataatcaggtgcgatgatgaatgctattaatgccatttttaagaatagtaagtgcaggatgttgat

SEQ ID NO: 1005748 - DNA, 120 bp, Artificial Sequence
  ENSG00000272892_7 (sequence is synthesized)
atttttaagaatagtaagtgcaggatgttgataggttattctgggaggaagggagatggggtatgtgaactctgtactttcccctcaattttgctgtgaaactaaactgctctaaaagta

SEQ ID NO: 1005749 - DNA, 120 bp, Artificial Sequence
  ENSG00000265781_0 (sequence is synthesized)
gagcaacatgtggtctggtactgctagattcatgagtccccatctgctcagaattcaagatgggatctctgctcttagcatcaagaccctttttgatgaatgcaaatggtggctgacaga

SEQ ID NO: 1005750 - DNA, 120 bp, Artificial Sequence
  ENSG00000265781_1 (sequence is synthesized)
aaagactgacagtctacatcagtctcctgatttacagcacatttaactctcctgagtcaacacaaagaaaaagaaacaggatattagtaacgagaagaaaagccatgtgaatccataggg

SEQ ID NO: 1005751 - DNA, 120 bp, Artificial Sequence
  ENSG00000265781_2 (sequence is synthesized)
agaaggcagctgtctgcataccaggaggagagctcccacccgaacccaaccatagtgccaccctgatcttgtacttccagcctctcagctgtgagaaaataaatgtctgttgtttaagac

SEQ ID NO: 1005752 - DNA, 120 bp, Artificial Sequence
  ENSG00000265786_0 (sequence is synthesized)
aaatataccatccccactgaacagatgagaaaactgaggctcagaggtgtcagctcctgagagagccctggctttgtggggtgaagtcctttgattgcctcaggttcctgatctgttcgt

SEQ ID NO: 1005753 - DNA, 120 bp, Artificial Sequence
  ENSG00000265786_1 (sequence is synthesized)
gaccctgttagcccaaaagctggcagagctccattctttttaggtcttattctcagacggtcttgggtaaatggtggctgattgccttcagcatctagaacaaaacactctatggcccag

SEQ ID NO: 1005754 - DNA, 120 bp, Artificial Sequence
  ENSG00000265786_2 (sequence is synthesized)
tatgatcttattctcttgaggaatggaccatgcagtatccttcaaggaagaatcaagaatgtttccacagagaatatacatatttcatctctttctctgctgaatggatccccactgaaa

SEQ ID NO: 1005755 - DNA, 120 bp, Artificial Sequence
  ENSG00000265786_3 (sequence is synthesized)
gccatgaatttctcttattagaccctgtagaatcccagtttatggcagtgacattaaaaacatctagtttatgacttggattaggcagcctgtaaaatggcttccagtgatccctgctct

SEQ ID NO: 1005756 - DNA, 120 bp, Artificial Sequence
  ENSG00000265784_0 (sequence is synthesized)
ccgcaggtaaaaattatacttttatttgagtcaccaggagaaagattcacttgtggttcaagtcaaatgttcagaatcataacaggccagaaaggtttgatcccgagcacaagcccacga

SEQ ID NO: 1005757 - DNA, 120 bp, Artificial Sequence
  ENSG00000265784_1 (sequence is synthesized)
atgaaatgtttggacagaggcccatgcccgttccatccagagagaaaaccaagaagtcgatcaagggggaagcctgccagaggagggagcccgcagaagtggcagaagaaggcttcagtt

SEQ ID NO: 1005758 - DNA, 120 bp, Artificial Sequence
  ENSG00000265784_2 (sequence is synthesized)
ggcaaaagaagctggaagaggggtaggaatcacaagctgtcgcaggttttaaaaaacagagacactgaagaatggacgggtcacgcccaggacggatgcgatgccgtggaatgtgctgaa

SEQ ID NO: 1005759 - DNA, 120 bp, Artificial Sequence
  ENSG00000262061_0 (sequence is synthesized)
aggcacagctgtccttcactcgcacggagcaacctcgggacagatggtgggagaggaagggcaactcgaggaggcacattttaggaaactgcccacggagccagtttcgattctccaaac

SEQ ID NO: 1005760 - DNA, 120 bp, Artificial Sequence
  ENSG00000262061_1 (sequence is synthesized)
ctcgtcagcatgcagaggctccctgactcggcagcaaggagggcctcatcagccgacccccatgcccggcacccccttcaccacagggtcctgaaaactccagagagcagtgccctgtgc

SEQ ID NO: 1005761 - DNA, 120 bp, Artificial Sequence
  ENSG00000262061_2 (sequence is synthesized)
aaatagggccttatagaaggtgagtggaaaagcagggaaggcaaacccccaaattcaggagggaggatggaattggcctggggagcagaggcaggaggttctgtggacagggctggtgga

SEQ ID NO: 1005762 - DNA, 120 bp, Artificial Sequence
  ENSG00000262061_3 (sequence is synthesized)
gctctggggggagcagaggcaggaggttttgtggacatggttgatggacctctgcggggagaagacggaggagattttgtggacagggctggtggagctctgcggggagcagacacagga

SEQ ID NO: 1005763 - DNA, 120 bp, Artificial Sequence
  ENSG00000262061_4 (sequence is synthesized)
ctacatgtccccacccctctcactgctgtagcttcagggcagaagagccacagagccaaatgctgcagagatgaagggagacggaaagagccaaatgctgcagagatcaagggagacgga

SEQ ID NO: 1005764 - DNA, 120 bp, Artificial Sequence
  ENSG00000262061_5 (sequence is synthesized)
aggatgtcgcctccagagctggggccacgggcagcgccagggcaggttcatcactgatggcaagtctgtggctgaccacgttcacaggggtggccctgagcaaaggtcggacatgaggac

SEQ ID NO: 1005765 - DNA, 120 bp, Artificial Sequence
  ENSG00000262061_6 (sequence is synthesized)
cacagagacggccattagagctcaccaccccgggcgttcgtcactgcagacatcactgcagacacagagaaggccattagagctcaccaccccgggcgttcgtcactgcagacatcactg

SEQ ID NO: 1005766 - DNA, 120 bp, Artificial Sequence
  ENSG00000262061_7 (sequence is synthesized)
cagacacagagacggccattatgcagcctcacgtggtcactcctgggggcggtaggatattttatcctaaagagaaaacaccttaaattctcacatcagccacccccatggcgactctta

SEQ ID NO: 1005767 - DNA, 120 bp, Artificial Sequence
  ENSG00000262061_8 (sequence is synthesized)
acaccttaatgtagcaccttccaacttttcctgggcatttatgtacaaattgtaataaaattgggttcttactgcatacgctgcttgctggtttctaaataaaattgggttcttactata

SEQ ID NO: 1005768 - DNA, 120 bp, Artificial Sequence
  ENSG00000262061_9 (sequence is synthesized)
accagtgggtaaactatgctcgccaccactcagcactcacctcttgggctcagagggcagaaagtctgacccttctctcttaaaagcagggtcctgaaaactccagagagcagtgccctg

SEQ ID NO: 1005769 - DNA, 120 bp, Artificial Sequence
  ENSG00000262061_10 (sequence is synthesized)
gtaaactagagacgtgatccccagggccaggtctgtctctgaggtcctaccagctgggacaggtaagaggctggggaaggaggagcgtgtgtgtgtgcgcgtgtgtgtgtacaggagcat

SEQ ID NO: 1005770 - DNA, 120 bp, Artificial Sequence
  ENSG00000262061_11 (sequence is synthesized)
ttcagttctatcgacatgaaatttccatttctccttccctgctggaccttgggtgccctagagggtccctacatcctcctccttccctcccttcctgatgcccacacagagcctgctgca

SEQ ID NO: 1005771 - DNA, 120 bp, Artificial Sequence
  ENSG00000262061_12 (sequence is synthesized)
aagtaggtgctcagggaatatccatttaattcaactgtatttcatcagagagatgtggctttcccagacaaggaagaattcagaaaacagcccagacatgctcagagcagacagctggac

SEQ ID NO: 1005772 - DNA, 120 bp, Artificial Sequence
  ENSG00000262061_13 (sequence is synthesized)
tctaaccaggctctgcgacttgctgactcacaggccgtttgtccctcaagattccccacggggtagtcggcctcaaggcagctccacctgacggctgagctcgctccttgctgaggggct

SEQ ID NO: 1005773 - DNA, 120 bp, Artificial Sequence
  ENSG00000262061_14 (sequence is synthesized)
ggtgcccccaggagcctcctctgggaagctgagacctcctggtgccacctcgaccccgccgggcgacacacgctgagcagaggcagcactcgggctggccggcccagcaggcagatgttc

SEQ ID NO: 1005774 - DNA, 120 bp, Artificial Sequence
  ENSG00000262061_15 (sequence is synthesized)
cggaacccttgtaaaaccccgcagtacagggactaggaggacccgaggggtacagggaacggaacaggagttgccggtgataatttcccgaaaaattcctaggggacagaggctcatcag

SEQ ID NO: 1005775 - DNA, 120 bp, Artificial Sequence
  ENSG00000262061_16 (sequence is synthesized)
ccccaggcaacttcctgagacagatcggtaaaaacaaccccttcttccaggaggatgcaattctctctctaaagtcgagagctcaccaccccgggcgttcgtcactgcagacatcactgc

SEQ ID NO: 1005776 - DNA, 120 bp, Artificial Sequence
  ENSG00000262061_17 (sequence is synthesized)
agacacaggaggttctgtggacagggctggtggagctctggccacttcctccgtaaactagagacgtgatccccagggccaggtctgtctctgaggtcctaccagctgggacaggaggat

SEQ ID NO: 1005777 - DNA, 120 bp, Artificial Sequence
  ENSG00000216863_0 (sequence is synthesized)
gtagtgttccagacagttttatcatccacattgctgacctggaagatgcatcattgtctatgatatctgcaatggaaatgatcactaggcaatttcagccttgcaaatctaactgtggcg

SEQ ID NO: 1005778 - DNA, 120 bp, Artificial Sequence
  ENSG00000216863_1 (sequence is synthesized)
aaatctaactgtggcgtgtggaaagaagaggaaccagaaaagaatgtttgtgaagttctggcttgaatctcgtgccgggagtgtgaagaaggtccttgcttccccttcaccttctgccat

SEQ ID NO: 1005779 - DNA, 120 bp, Artificial Sequence
  ENSG00000216863_2 (sequence is synthesized)
acgcctcccagccgtgcttcctgttaagcctgtgaaactcctttggaatgagtacacatccaggagtgaagaagacaagctcaactgccattctctgagcagttcaaggcatactgagtt

SEQ ID NO: 1005780 - DNA, 120 bp, Artificial Sequence
  ENSG00000216863_3 (sequence is synthesized)
gcgggagttgtgtggtggtccactctgactgcaagcacccctttcttgaaccgaacagagtcaagtggaatcaaaggacattacctgttgattcttgggcaaggcccagaatttggtgga

SEQ ID NO: 1005781 - DNA, 120 bp, Artificial Sequence
  ENSG00000216863_4 (sequence is synthesized)
catacttaaagaagaaaggaatcttcagctaaagtgtctacgatcaattcagatttggagggcatggatcttctgacagtaggggccattctaggattttttggttgaagagatgaactt

SEQ ID NO: 1005782 - DNA, 120 bp, Artificial Sequence
  ENSG00000216863_5 (sequence is synthesized)
caacttggttccagatgggtggtccagctattctgctgacaacatttttcagggcaaggcttttgctactggaatgatttaaggaagatccctcagtgtttcagagtaaagatatttcta

SEQ ID NO: 1005783 - DNA, 120 bp, Artificial Sequence
  ENSG00000216863_6 (sequence is synthesized)
aagaagtacctgtgtcattgcccatcttgaagattgacttttatggattgctcaaatactgatatcagctcaatgtcaatatatactcctacatataaaatccatcttctaatcataatc

SEQ ID NO: 1005784 - DNA, 120 bp, Artificial Sequence
  ENSG00000216863_7 (sequence is synthesized)
actaggttttaaccatttaaggccatgaggtgtgaggtcttttgagagtgaaagaactcatattaatccagctcctgactcctaaaaaaacagtaactcttgtaattaaaatgggcagag

SEQ ID NO: 1005785 - DNA, 120 bp, Artificial Sequence
  ENSG00000216863_8 (sequence is synthesized)
gaagcactgggccatgtggcgagcagcagtgtcaccaggaaacatgccgagctgggtcaggaactgcgcaaggaggaggagacactgctcctgttgaaggcagccctcgcatgacctgct

SEQ ID NO: 1005786 - DNA, 120 bp, Artificial Sequence
  ENSG00000216863_9 (sequence is synthesized)
gaatcacatcaaggttgaagcattggccctccaatcaatgattagttctgggagaggggatgaggtgctgtcttctccaacttctccaactgtgcctgaacagtcacacgtcatgtcagt

SEQ ID NO: 1005787 - DNA, 120 bp, Artificial Sequence
  ENSG00000216863_10 (sequence is synthesized)
gcatatagagaatgaagcatcagtcaaccaaactacgctggagtggagcatagagtcctgtgacagaagaggaggaggaagagaaagaagaatcagatccctaaaggagggaaaaagcca

SEQ ID NO: 1005788 - DNA, 120 bp, Artificial Sequence
  ENSG00000216863_11 (sequence is synthesized)
ggattcattatacaaattaaatttctaagtctcaggctctttctccccaaggaaatcatcttgccatgagccctagggcctgcttgaatggagagcaagaactataggaggatgtgtagc

SEQ ID NO: 1005789 - DNA, 120 bp, Artificial Sequence
  ENSG00000216863_12 (sequence is synthesized)
tgcaaaaatttctcatcaataactcaatcttcagaacgttatgacatacagaaaatcaaagatgctgtgtcttagcattgagcaatatgggtggtgctatgtctgtagtctggtcaaatt

SEQ ID NO: 1005790 - DNA, 120 bp, Artificial Sequence
  ENSG00000216863_13 (sequence is synthesized)
cagtaactgtgttcaaaacaaaatttcctctggaatactattgagaaaatctggcatttgcaaaaagggcagagtttaaatatgagccagtctttccaatcaacaatacctcttttaaga

SEQ ID NO: 1005791 - DNA, 120 bp, Artificial Sequence
  ENSG00000216863_14 (sequence is synthesized)
aaaccaactaacagctgtttgcatgccgttgaatccttgtgagcagttaggccacagtctaggacagaaagatgacacggggaaggactgagggccatctgagaacaaaagttgttgcta

SEQ ID NO: 1005792 - DNA, 120 bp, Artificial Sequence
  ENSG00000216863_15 (sequence is synthesized)
cttctcagaggcattgagacacactgcatgctgtagactgctttgtgtaactgttgtcacatcttgcttgagatgtcattggcagaatgttcttaaaaataaattatagataaatagcca

SEQ ID NO: 1005793 - DNA, 120 bp, Artificial Sequence
  ENSG00000216863_16 (sequence is synthesized)
gttccagacagttttatcatccacattgctgacctggaagatgcatcattgtctatgatatctgcaatggaaatgatcactaggcaatttcagccttgcaaatctaacgctttacctatc

SEQ ID NO: 1005794 - DNA, 120 bp, Artificial Sequence
  ENSG00000216863_17 (sequence is synthesized)
ctgcaaatgcctcagaatcacctaccaatataaaagatggtaggttgcattttaaagtagttctccttctacagtatgaacagtgacggacaggctgagagcggagagactttcccttgg

SEQ ID NO: 1005795 - DNA, 120 bp, Artificial Sequence
  ENSG00000216863_18 (sequence is synthesized)
acccttgcctcagtaacttttaatacatgtaagacggatcatctgactttggactttctgaagcaataacatcggaaagttaatcagagttggcgttctgggaattcaagggcagagata

SEQ ID NO: 1005796 - DNA, 120 bp, Artificial Sequence
  ENSG00000216863_19 (sequence is synthesized)
agtgtttcctccagatacttcactgtatttcagcaaatgacctgaggaaagaagtcaaaacttcatcacgaaatagaagactgttcattttcaatatttcttccttggcctctatgtggc

SEQ ID NO: 1005797 - DNA, 120 bp, Artificial Sequence
  ENSG00000216863_20 (sequence is synthesized)
actcccttgctgtctgtcctgttgacttctatggcttccacccaagggaggacagcattatagtgggtgaatccagcacaccccaaactgcccctgctcccctctcccccgggcatgtgg

SEQ ID NO: 1005798 - DNA, 120 bp, Artificial Sequence
  ENSG00000216863_21 (sequence is synthesized)
gccctcgaaggcaggcttctccaaaccagcagcatgtgaaccctgccagaagtgaggaagagctctaggagagcagccagcagcatctgttttgcatacaaagggcagcaacaatcaaat

SEQ ID NO: 1005799 - DNA, 120 bp, Artificial Sequence
  ENSG00000216863_22 (sequence is synthesized)
ctcttctagaaaagttttcttggacattcatggagtaaaatagagttggataaacaagccaggtttagagtgagcagcgtttgaacaaatatcagctccaaaggtattgttgtgccttcc

SEQ ID NO: 1005800 - DNA, 120 bp, Artificial Sequence
  ENSG00000216863_23 (sequence is synthesized)
accctccattagtggcctaggctgggctagacctgggcagctgtcgaggggaggacaaccttgtcagaatggcttctattaacagctagcagtgggctttcaactggaatcagtaggaag

SEQ ID NO: 1005801 - DNA, 120 bp, Artificial Sequence
  ENSG00000216863_24 (sequence is synthesized)
aagacaaaatccaatgacacagactctggaagtgaaattcctcagcagaggatggtgggggcccgggtacactccactggaccaatccttgatttgacttcaggcagccggaaagcttgg

SEQ ID NO: 1005802 - DNA, 120 bp, Artificial Sequence
  ENSG00000216863_25 (sequence is synthesized)
atgtatgtccctaagtcctggaggccatggatgtagctccgccccctgtggcctctgcgttgctggctggttagtttgaggcatagaggagggcccaactcttacacagctagtcccatt

SEQ ID NO: 1005803 - DNA, 120 bp, Artificial Sequence
  ENSG00000216863_26 (sequence is synthesized)
ttccatattctagctctacttgaggtttttctttagctttatattttgaaataattatattttcacaggaagttgcaaaaagatacagagaggtctcatatgtctttccccatcatcccc

SEQ ID NO: 1005804 - DNA, 120 bp, Artificial Sequence
  ENSG00000216863_27 (sequence is synthesized)
catggtaagatcttacatggaggacaataccaaaactgggacattgacactgatacaatccacaaagtttattcagatgtcaccagtttaacaatcattcgtgtgtgtgtgtgtacaagc

SEQ ID NO: 1005805 - DNA, 120 bp, Artificial Sequence
  ENSG00000216863_28 (sequence is synthesized)
acagcagagtcgctgtgaaaaggagctgacccccctccaatctcacttccaccagccttccacatactcatggccaagtgcaaccccaagattgcaatgtccttcctgctttgtaaaggt

SEQ ID NO: 1005806 - DNA, 120 bp, Artificial Sequence
  ENSG00000216863_29 (sequence is synthesized)
agtctttctccccctccctttctcctagctctcctcttctctcttcctgtctctcattctttccctctctccctgtctccctccctttctctctctctgtttctctttttcttctcatac

SEQ ID NO: 1005807 - DNA, 120 bp, Artificial Sequence
  ENSG00000216863_30 (sequence is synthesized)
cagtacttagatctggctaccatcctgagattaagaacactgacttttcttcaaacacatcttaacattcatggctcattccctgtggcccacattactctaagagctggtattgcttcc

SEQ ID NO: 1005808 - DNA, 120 bp, Artificial Sequence
  ENSG00000216863_31 (sequence is synthesized)
tgcatgtgcttttggcagaacacaggctggccccaggaggatgttaggtattacaagcatgcttccaatagaggcacgacctgcggaggagaaagggcgtagagggcccaggagacctta

SEQ ID NO: 1005809 - DNA, 120 bp, Artificial Sequence
  ENSG00000216863_32 (sequence is synthesized)
ccagccacaggcagcttagctgcactggcaagactgcctctagcaaacagtttatggagggaaggaaaaattgggttaacagaatgtgaataaagctggtctgcttctgactgctcaata

SEQ ID NO: 1005810 - DNA, 120 bp, Artificial Sequence
  ENSG00000216863_33 (sequence is synthesized)
aaacagtactggatggttgtttaataatgggggggtgtgttagggttctctagagaaacagaaccacttggcactggagacagagtgtctgagtgtggttgaactgctagtcccgggcca

SEQ ID NO: 1005811 - DNA, 120 bp, Artificial Sequence
  ENSG00000216863_34 (sequence is synthesized)
aatagtagcagatattcctctgcatctttcagaattctttcccaaatgtaacaaaataacaaacagaccttgcttttgatttcttcttttaggttggctgatggccaattctgccagctt

SEQ ID NO: 1005812 - DNA, 120 bp, Artificial Sequence
  ENSG00000216863_35 (sequence is synthesized)
gtgttctatttatcaaacagatctagttgggcatggatctagaagtctgtcttctttcatggctgtacttttactggagtgtcttaattttcttggcgaattcataggatgacgttcaag

SEQ ID NO: 1005813 - DNA, 120 bp, Artificial Sequence
  ENSG00000216863_36 (sequence is synthesized)
ggtcaccgtagacctttacaggaggatgatgcataaggcttcagtaaaatcgcattgctggaaatccattaccagcacaatgcaaaattaactttcttcttttctgtccttaatgccact

SEQ ID NO: 1005814 - DNA, 120 bp, Artificial Sequence
  ENSG00000216863_37 (sequence is synthesized)
gtgttccctcctcctcctcccctcatactccctccccacctttgtggaaaaagaaataatttacaatgtggtaaatgtattctagctgtggttttctattatgtcctgatctcttctttt

SEQ ID NO: 1005815 - DNA, 120 bp, Artificial Sequence
  ENSG00000216863_38 (sequence is synthesized)
ttctacctgtcaaatcttattactgtagcacagcaaggctccccaatgggtcattatttcaaataatagtagttccactcccatttgactctcttatgccagcatttcctcgggaattga

SEQ ID NO: 1005816 - DNA, 120 bp, Artificial Sequence
  ENSG00000216863_39 (sequence is synthesized)
ctcacacattcaagtcatacgtatgaactggcttccggtttcatctcagatatgtaaacggtgtgttcaaaatacttaaacatgtttcttgctatcaaatgcaacaaaaataaaatgaac

SEQ ID NO: 1005817 - DNA, 120 bp, Artificial Sequence
  ENSG00000216863_40 (sequence is synthesized)
cttatggtgagagcagcggccctggtggaagcgtggtagcccctagaaggtccaggatggaacacagaagctttcccttgggatatgtgagtgctccagcagttgtaaagagagctctga

SEQ ID NO: 1005818 - DNA, 120 bp, Artificial Sequence
  ENSG00000216863_41 (sequence is synthesized)
ctcagacacgcctaggtgtgtctgggagattagtagatggtgttcaacaaggatctatttaaacaagggagacattaatttggattcctttggttgtaaatttccaaaaaaaaaaaaaag

SEQ ID NO: 1005819 - DNA, 120 bp, Artificial Sequence
  ENSG00000216863_42 (sequence is synthesized)
tgttccagacagttttatcatccacattgctgacctggaagatgcatcattgtctatgatatctgcaatggaaatgatcactaggcaatttcagccttgcaaatctaactgtgaagaagg

SEQ ID NO: 1005820 - DNA, 120 bp, Artificial Sequence
  ENSG00000216863_43 (sequence is synthesized)
tgcttccccttcaccttctgccatgattctaagtttcctgacgcctcccagccgtgcttcctgttaagcctgtgaaactgtgagtcaatcaaacccttttcttcataaattacccagttt

SEQ ID NO: 1005821 - DNA, 120 bp, Artificial Sequence
  ENSG00000216863_44 (sequence is synthesized)
tatagcagtgtgaaaatggactaatacagaaaattggtaccagagaggtggggcattcctataaagatacctgaagatgtagaagcaattttggaatttgggtaatgggcagaggttaca

SEQ ID NO: 1005822 - DNA, 120 bp, Artificial Sequence
  ENSG00000216863_45 (sequence is synthesized)
atgggcagaggttacaacaatttggagggctcagaagataggaagatgaggggaagtttggaacttcctagagacttgttcaatggttttgaccaaaatactgatagtgatgaatagtga

SEQ ID NO: 1005823 - DNA, 70 bp, Artificial Sequence
  ENSG00000216863_46 (sequence is synthesized)
actgggaaggtgcccctgctctagggatctgtggaaagaaatttctaggcagtaaagtgttcaagatgtg

SEQ ID NO: 1005824 - DNA, 120 bp, Artificial Sequence
  ENSG00000216863_47 (sequence is synthesized)
gtggaaagaaatttctaggcagtaaagtgttcaagatgtgatctggctgcttctaacagtgtatagtcatatgtattcataaagagatgttctgaaattggaacttacattaaaaaggga

SEQ ID NO: 1005825 - DNA, 120 bp, Artificial Sequence
  ENSG00000216863_48 (sequence is synthesized)
agctgaatataaaagtttggaaactttgcagcctgaccatgtggtacaaaagaaaaaaaaacatatttctgaggagaattcaagccagctgcagagatttgcgtaagtaaagaggagcca

SEQ ID NO: 1005826 - DNA, 120 bp, Artificial Sequence
  ENSG00000216863_49 (sequence is synthesized)
aatgttaatagctgagacaatggggaaaatgtctccagggcgtgtcaacgaccttagcttcagccccccccatcacaggcctggaggcctaggaagggaaaatggtttcctgggccaggt

SEQ ID NO: 1005827 - DNA, 120 bp, Artificial Sequence
  ENSG00000216863_50 (sequence is synthesized)
tcagggcccctctgctctgtgcagccttgggacatggcaccctgtgtcccagccactccagctccagccatggctaaaaagtgccaaggtgcagtttgggccattgcttcagagggtgca

SEQ ID NO: 1005828 - DNA, 120 bp, Artificial Sequence
  ENSG00000216863_51 (sequence is synthesized)
agcctcaagccttggtggcttccatgtagtgtcaggcttgtgggtgctcagaaggcaagggttgaggcttgggaacctctacctagatttcagaggacgtatggaaacactggatgtcca

SEQ ID NO: 1005829 - DNA, 81 bp, Artificial Sequence
  ENSG00000216863_52 (sequence is synthesized)
acccacacacacagtctccattgggacactgcctagtggagctgtgagaagggggccactgtcctccagaccccagaatgg

SEQ ID NO: 1005830 - DNA, 120 bp, Artificial Sequence
  ENSG00000216863_53 (sequence is synthesized)
tcctccagaccccagaatggtagatccgctaacagctttcactgtacacctaggaaagatgtaggcactcaatgctagcccatgaaagcagccacggtggctgttccctgcagagccaca

SEQ ID NO: 1005831 - DNA, 77 bp, Artificial Sequence
  ENSG00000216863_54 (sequence is synthesized)
gaacatgagatttgggagaggccaagggtggaatgatatggttcggctctatgtccccacccaaatctcatctcaaa

SEQ ID NO: 1005832 - DNA, 84 bp, Artificial Sequence
  ENSG00000216863_55 (sequence is synthesized)
tgatatggttcggctctacacatgttgtgggaggggcctggtgggacgtgattgaatcatgggggtggatttcccccttgctgt

SEQ ID NO: 1005833 - DNA, 120 bp, Artificial Sequence
  ENSG00000216863_56 (sequence is synthesized)
tagtgagtgagttcttgcaagatctggttgtctgaaagtgtgtgacatgtctccctttgctctttctccatcctgccaccatgtgaaggaggtccttacttccccttcaccttctgcctt

SEQ ID NO: 1005834 - DNA, 120 bp, Artificial Sequence
  ENSG00000216863_57 (sequence is synthesized)
tccttacttccccttcaccttctgccttaatgttaagtttcctgaggccttccagccatgctttctgttaagcctgtgggtcaattaaacctctcttcataaattacccagtctcaggta

SEQ ID NO: 1005835 - DNA, 120 bp, Artificial Sequence
  ENSG00000216863_58 (sequence is synthesized)
aatacagagcatatcctaggctataaaataaacctaaataaacataacatttaaaagagttgaaattatacagagcatattctctgatcataatggaatcgaggtagaaatcaataacag

SEQ ID NO: 1005836 - DNA, 120 bp, Artificial Sequence
  ENSG00000216863_59 (sequence is synthesized)
aatgataacaggaagatctctagatcggtggaaattaaacaacatacttctaaatcctaaggtcaaagagaatgtctcaaaagaaattaacaaaaacctatagaactgaagaaaaatgaa

SEQ ID NO: 1005837 - DNA, 120 bp, Artificial Sequence
  ENSG00000216863_60 (sequence is synthesized)
aacagatatcaagaacacctgagatgaagttaaagcagggctaagtgagaaattatagccctaaatgtttacattataaatgaggaaagttctcaaatgaataacctacattcctacttc

SEQ ID NO: 1005838 - DNA, 120 bp, Artificial Sequence
  ENSG00000216863_61 (sequence is synthesized)
aagaaattagaaaaagaatagcaaaataaacccaaagcaagtataacaaaggaaataaagataagggcagaaatcaatgaaatggaaaataggaaaacaatggggaaattatgaaataaa

SEQ ID NO: 1005839 - DNA, 84 bp, Artificial Sequence
  ENSG00000216863_62 (sequence is synthesized)
aatggaaaataggaaaacaatggggaaattatgaaataaagagctggttttttgaaaaaaatcaatgacgttgaaaaatatcta

SEQ ID NO: 1005840 - DNA, 120 bp, Artificial Sequence
  ENSG00000216863_63 (sequence is synthesized)
ccgtgcttcctgttaagcctgtgaaactaaatttgggggatgcatgcaacttttcccttgtctgaagtgataactctgcattcattcttgaccaccattaatcatgcatagctgtgctca

SEQ ID NO: 1005841 - DNA, 120 bp, Artificial Sequence
  ENSG00000216863_64 (sequence is synthesized)
ctgaggcaatgtttttgagccaatggatgaacaagatctcattagcactggtttccatggtttatcgctcatggccaatgtcacacagaattttcaaccaggatgggaacgcccagcagc

SEQ ID NO: 1005842 - DNA, 120 bp, Artificial Sequence
  ENSG00000216863_65 (sequence is synthesized)
gtggatattgttatgcaaggaagagatgtgaatatacaggaaatgagatccttaaaggggttgccgtccagatgttagatcaaagagattatgattcattcaaccaagtcgctggacttt

SEQ ID NO: 1005843 - DNA, 120 bp, Artificial Sequence
  ENSG00000216863_66 (sequence is synthesized)
tgaaggcctatccaagtcatggtgcctttgaggttgcgcctgttactattcaaaacttggtatgtgttattccatgtaaatgttatgcaatgattcaaaaatgaataccaggttgaaaga

SEQ ID NO: 1005844 - DNA, 120 bp, Artificial Sequence
  ENSG00000216863_67 (sequence is synthesized)
tgttataacagtcccttgttccaatgaactctacctttgtgagcaaaggtgaccaaaaagaccacactgcatgaccagcagcccacaaaccagactgggctaagttctgctgctatttct

SEQ ID NO: 1005845 - DNA, 120 bp, Artificial Sequence
  ENSG00000216863_68 (sequence is synthesized)
ttagtgcttttagtaggttattgttttaggtggcgtatctgtacctcctcataaaagatttttgggtccacattttccactcaaaatcatagtagccatgatgaacacctggcatccttt

SEQ ID NO: 1005846 - DNA, 120 bp, Artificial Sequence
  ENSG00000216863_69 (sequence is synthesized)
ggacaactttccataactacataataatgagccagtttttaccatccatattagatatggctagagtgactattttctgaatcaaaattgtgctgagcatttgccaaatatcagataaac

SEQ ID NO: 1005847 - DNA, 120 bp, Artificial Sequence
  ENSG00000216863_70 (sequence is synthesized)
ttaaagccctagaagtatcttagaaagtccaaggggagtgtcattgttctagacttagttcaaaagatgctagacaatggcgtccaagttcagcctttgtagacatatagagtgaacatt

SEQ ID NO: 1005848 - DNA, 120 bp, Artificial Sequence
  ENSG00000216863_71 (sequence is synthesized)
acccttgctgttataggttttattctccactgagggccacagagcctcaccattggtttgccccacacacaacagggtaaattcctactcctttgtcaattaggaattttccaggcaatg

SEQ ID NO: 1005849 - DNA, 120 bp, Artificial Sequence
  ENSG00000216863_72 (sequence is synthesized)
tgtttacctcttgggtaaatacattactttcatcagtgtaacttaactataaagtatttttagaggatcagattatttgagtatggctgtgataagtctctccttaaatggaccttaaca

SEQ ID NO: 1005850 - DNA, 120 bp, Artificial Sequence
  ENSG00000216863_73 (sequence is synthesized)
aagtagaaagaaaacgttagcagacatttcagactaatgatgttttctttttttcaagtgggttatttagagttgaatagcaattacttaaagctagtagcaaaggaacattttctgtaa

SEQ ID NO: 1005851 - DNA, 120 bp, Artificial Sequence
  ENSG00000216863_74 (sequence is synthesized)
tgatgtttatttatgccttttcattctataacattcagcatgtgacaaaggaattagagaaaagactagtcgaatctggagccatgcaattaatgaaatccatatgtttgaagaaatcgt

SEQ ID NO: 1005852 - DNA, 120 bp, Artificial Sequence
  ENSG00000216863_75 (sequence is synthesized)
cttatataactcccatgcttctgatatttcctagaacgtcttagattgaggtcattgtgcactattaacagagtcctggttaataatgtacaatgaccttaattcagcatgtttttaatg

SEQ ID NO: 1005853 - DNA, 120 bp, Artificial Sequence
  ENSG00000216863_76 (sequence is synthesized)
aatagctgaacttcatgcttataacatcctgactatgcttacaaatatttttctaaattgctggtctgtttgcagatgcattatcagtgcatgcaaaaaataagattatgcctcgtttag

SEQ ID NO: 1005854 - DNA, 120 bp, Artificial Sequence
  ENSG00000216863_77 (sequence is synthesized)
gattctctttcttgtaaagtccaatcactgctgcattaagataggtatgggaatgtgtaggcaaagtcacatatagtgacacacattggataaaaaatataaacttcagccacatgattc

SEQ ID NO: 1005855 - DNA, 120 bp, Artificial Sequence
  ENSG00000216863_78 (sequence is synthesized)
tttcactcaaaaacataatgtggctctcctttatatctttttttaatgatttgcatagctttccattgtgtgtatgtgctataatttgttttaataaacccccactaattgatagctgga

SEQ ID NO: 1005856 - DNA, 120 bp, Artificial Sequence
  ENSG00000216863_79 (sequence is synthesized)
ttgtttcctagtttgtaatttataaaccatgatgcaattaacacccagggaaacatatctttgtgtacttgacaaatatttctacagcataagtttctagaaggggaatttctggttcaa

SEQ ID NO: 1005857 - DNA, 120 bp, Artificial Sequence
  ENSG00000216863_80 (sequence is synthesized)
aggaaatgtacacttaagctatgattggtattgctaaaaaactatttgtttcaaattctcgccaattctgggaatcggcattttcaatttttgccaatttgatgtgtcaaaaatcttact

SEQ ID NO: 1005858 - DNA, 120 bp, Artificial Sequence
  ENSG00000216863_81 (sequence is synthesized)
atcattgtctatgatatctgcaatggaaatgatcactaggcaatttcagccttgcaaatctaacatccagataccaacctcaccatcgtctgactactatgtccctggtgcacaatgcct

SEQ ID NO: 1005859 - DNA, 120 bp, Artificial Sequence
  ENSG00000216863_82 (sequence is synthesized)
gccttcactacagcctttcacacaaagcatttaccctgttgcttaattgtctgatcgtcccactcccttggatgagaactgcatctcttccatctcttattctgagtggcttggctaaga

SEQ ID NO: 1005860 - DNA, 120 bp, Artificial Sequence
  ENSG00000216863_83 (sequence is synthesized)
cattcactgactccatggggaaacttcacctacagaggaaagagccatcctcctgtgggcaggtgatgtgtccttgttctttccctgacgtgcccagtcctcttgcaagtgacttgaaag

SEQ ID NO: 1005861 - DNA, 120 bp, Artificial Sequence
  ENSG00000216863_84 (sequence is synthesized)
atcattgtctatgatatctgcaatggaaatgatcactaggcaatttcagccttgcaaatctaacgggacagaaacagggccagatgcacagggtggtttacgtgactgcacagctgcaaa

SEQ ID NO: 1005862 - DNA, 120 bp, Artificial Sequence
  ENSG00000216863_85 (sequence is synthesized)
gatgatctctgggacttttcttgacatgccgcaaatgctgaaaaggaattcccttctgcttctagaagtcatgaactagatatgatttaaaagaaaaagctaaggtgtttgttgtccttg

SEQ ID NO: 1005863 - DNA, 120 bp, Artificial Sequence
  ENSG00000216863_86 (sequence is synthesized)
gcatctgatgttgtggaatatgatggatgggtgagcaggaactgacaaactggctgggaggtaacagctgaggccagcctggtctgctcattgatggtgctggatttgaaccaaacgtac

SEQ ID NO: 1005864 - DNA, 120 bp, Artificial Sequence
  ENSG00000216863_87 (sequence is synthesized)
tgctaaggaagagactgagatttcaggcagggaagtgacttcctcacatctccagactcagcctccagggccctcagcactgcaccctggttgctgtgcgggtctcaccctgcagtacat

SEQ ID NO: 1005865 - DNA, 120 bp, Artificial Sequence
  ENSG00000216863_88 (sequence is synthesized)
gagcgaggcagacagaagacagaagcagagctttagatggaggcgaaacgagtccagatatgtgtgccggaacctggtcctcctaggattcaagttgcttacagagagggacaagaccca

SEQ ID NO: 1005866 - DNA, 120 bp, Artificial Sequence
  ENSG00000216863_89 (sequence is synthesized)
acaagcttcccaattttgataaaattcttcactgagattgtgcaggtcactgtcactctgcgaaggtgctgcttttctcaacccaaaggaaactgggatagaggaaaatgcactgaagtg

SEQ ID NO: 1005867 - DNA, 120 bp, Artificial Sequence
  ENSG00000216863_90 (sequence is synthesized)
tatcgctcatggccaatgtcacacagaattttcaaccaggatgggaacgcccagcagctggatgtccagctgccaattcatcaatttgagaagaagaggagggaacacacagagacagag

SEQ ID NO: 1005868 - DNA, 120 bp, Artificial Sequence
  ENSG00000216863_91 (sequence is synthesized)
gagaaggccctatgaagatggaggcagagactgcagttatgtttccacagcctgaggaacgcctgtggccaccagcagctggaggaggcaaggaaggattcttagagccttcagtggaag

SEQ ID NO: 1005869 - DNA, 120 bp, Artificial Sequence
  ENSG00000216863_92 (sequence is synthesized)
tctgttgtttaaaggcatcacatttgcataatttgttatggcagtcctagaacagtgatacacagggtagatccaaaggtgccatcaatagggaatatacacagttatttacatgaaatt

SEQ ID NO: 1005870 - DNA, 76 bp, Artificial Sequence
  ENSG00000216863_93 (sequence is synthesized)
gccatcaatagggaatatacacagttatttacatgaaattggcatatcatcgctgtgaaaggaaaataattgggga

SEQ ID NO: 1005871 - DNA, 120 bp, Artificial Sequence
  ENSG00000237320_0 (sequence is synthesized)
cactcttcacacagtgcttacgagtttctgaagtctttattggtactctgcacaccttcacacctccgtgagaagaaaacagtagatttatattagaaactgtattgaaaaatgtctact

SEQ ID NO: 1005872 - DNA, 120 bp, Artificial Sequence
  ENSG00000237320_1 (sequence is synthesized)
tcaaacacactcaaaggactttccggttgttttattgctatgccagaataccttcatgtaactgaagtaacttggactaagcaagagagaaaaacgttaacaggccaggcctgggtccaa

SEQ ID NO: 1005873 - DNA, 120 bp, Artificial Sequence
  ENSG00000237320_2 (sequence is synthesized)
tgttcttgaggcctagtcaatatcaatgtaagcatcacaatgaaggaaaacatgactacataaaaaattaacaacaaggaggctgatttccttttgagaggaaaaaattttgaaaacctg

SEQ ID NO: 1005874 - DNA, 120 bp, Artificial Sequence
  ENSG00000237320_3 (sequence is synthesized)
aagaattgagagcatagaaagaaacccatgtaatcatgtaagtacagtgcctgccacaaagttaacactatctgttcaatccatactgaaagaaaaaataaatgttgagacagtatcttt

SEQ ID NO: 1005875 - DNA, 120 bp, Artificial Sequence
  ENSG00000237327_0 (sequence is synthesized)
tcttaaagcaaaatctactttaattaagccccaaacattctgatgaaagatgataatcctcttgtactgtgaacttgtgatcttacaaagaagtctggagtagcagagaggtcaaagaaa

SEQ ID NO: 1005876 - DNA, 120 bp, Artificial Sequence
  ENSG00000237327_1 (sequence is synthesized)
agattattacaccgttagcaattcaaagtggctaacactgatttcaatgtgggtaaccacattccttgaaatcaaagatttgatatgaaactgacaataaagaattcatatggaactcaa

SEQ ID NO: 1005877 - DNA, 120 bp, Artificial Sequence
  ENSG00000271815_0 (sequence is synthesized)
ccccatcctcaccccacctgccctatgaagtttgactcctttgaactttaatgtcccaggattgtagtgctggagcaggattagacccaggcaacagcattccagttggctaattctgaa

SEQ ID NO: 1005878 - DNA, 120 bp, Artificial Sequence
  ENSG00000271815_1 (sequence is synthesized)
gccagttggcagggagcataaaagtaggagggccttgtgccagctgctaagcatacaaggtgtgtatgtgtgtgcgcgccagctaactaagcatacggggtgtgtgtgtgtgtgtgtgtg

SEQ ID NO: 1005879 - DNA, 120 bp, Artificial Sequence
  ENSG00000271815_2 (sequence is synthesized)
gtgtctgtgtgtgtgtgtgttggaaggaaagcatcgggaagtaatccaaactagaagggctatggtcatctaccctgtgttgattatggaagtcctttgctttcatgtcacttgcaaatt

SEQ ID NO: 1005880 - DNA, 120 bp, Artificial Sequence
  ENSG00000271815_3 (sequence is synthesized)
tgaagtgggctggagtggaggtgggggggttgcagttggggcaattctgtctccactctaaaatcagctgggattgtactcagtagaatccttggacacaataaagcaaatagagtatta

SEQ ID NO: 1005881 - DNA, 120 bp, Artificial Sequence
  ENSG00000237324_0 (sequence is synthesized)
ggcacacagctagactacatttcccaggacctcatatggtgccaccaagacagagctgactgtatcacccaatgccaagccctcagcgtcactgtcaagtcacattggttacctgagcca

SEQ ID NO: 1005882 - DNA, 120 bp, Artificial Sequence
  ENSG00000237324_1 (sequence is synthesized)
ataatctcatggaactcaatttctgagagctgaagatggaaatgtgaaggcaatccagctcttaggaggagaatatctgccttctctgcaaagagaaattgtcattttattttttaaggg

SEQ ID NO: 1005883 - DNA, 120 bp, Artificial Sequence
  ENSG00000237324_2 (sequence is synthesized)
tgattttgtcactgggaatggctgcccacccagtgacattttcctatgtaccttgcatccaactgtggccttgcgacatattttcatgaagggaatatgagcaaaagtgaagtaacttcc

SEQ ID NO: 1005884 - DNA, 120 bp, Artificial Sequence
  ENSG00000237324_3 (sequence is synthesized)
atgagactctgacttcagagctgatgacgtaaaatgcagggcctaatctatcttggcaatgtggcagtggtggcagtagctccatccaatttcccatggtagcaattccagccacagatt

SEQ ID NO: 1005885 - DNA, 120 bp, Artificial Sequence
  ENSG00000237324_4 (sequence is synthesized)
caatgccctgcattgttggcatcagaagcacaacagtttatgtgtgcctagcaagggtggcagtgcatcttcacaggaccacatttgggcatgattctggatgttgttcctcactgtgag

SEQ ID NO: 1005886 - DNA, 120 bp, Artificial Sequence
  ENSG00000237324_5 (sequence is synthesized)
aatttcaaacatggctttctactctgttctgaggaagaagattctgtgtgctacataatatcctttaatctactccttttatgcctaaattagcaagagttagtttctaatacttgaaag

SEQ ID NO: 1005887 - DNA, 120 bp, Artificial Sequence
  ENSG00000237324_6 (sequence is synthesized)
cagcgtcactgtcaagtcacattggtcattatgaattgtgtaaatgcccttggggattagctgagcagagaagaatgaagttatacggcaaatgatcaagaggaataattgacatcagac

SEQ ID NO: 1005888 - DNA, 120 bp, Artificial Sequence
  ENSG00000237324_7 (sequence is synthesized)
taaaatgtgattctcaaccttgcctagatattggaataacttgaagtgctctctctccaaatatgatacgtaggccccaagactggagattctgatgtaatcagcatcaggattttctta

SEQ ID NO: 1005889 - DNA, 120 bp, Artificial Sequence
  ENSG00000237324_8 (sequence is synthesized)
cactagaacaatgtttcctctcctaggtcataagaattaattggtagtcttgtttaaaagtgtagattctcaggcccaacgtaagacatgctgaatcagtcagtcccttcagtgtctttg

SEQ ID NO: 1005890 - DNA, 120 bp, Artificial Sequence
  ENSG00000237324_9 (sequence is synthesized)
aatcttttatttttttttttaatgaaggcccccaaatgattcttcaggaaagtttgtaaatgcttccttaggctctatgctctgctggaaaaagtgttatgatctgtccttctcacctgt

SEQ ID NO: 1005891 - DNA, 120 bp, Artificial Sequence
  ENSG00000237324_10 (sequence is synthesized)
acccctacggcatagcatagaccctagatcatatcatgtattcaataagtatttgatattatttaattaattgacatttttcaagtgcaaatgagtaaaaataattgataaaatttaaaa

SEQ ID NO: 1005892 - DNA, 120 bp, Artificial Sequence
  ENSG00000271811_0 (sequence is synthesized)
aatagtttgttgcttttataagcacttttctcaacctctcttttctccgctggcatgagaatgggagggcctgacgagtcttatggtagcaagcgtccaggggaacccgcaatcctagtt

SEQ ID NO: 1005893 - DNA, 120 bp, Artificial Sequence
  ENSG00000271811_1 (sequence is synthesized)
tttgggctcccatcaagagttgccaagaaagctgttgtgagctacttggaagtcaggacagctgggcctccagcctgcagtgacaatgaggctcagactgtgaatcagggaagaggggag

SEQ ID NO: 1005894 - DNA, 120 bp, Artificial Sequence
  ENSG00000271811_2 (sequence is synthesized)
tgtctcgggaaaggatggctagagcagactctcccccacccccaaagggactcagggatgaaaccaggagtctggcgctctttgtatcccgctggaagtctactcgagtgggaaacgatt

SEQ ID NO: 1005895 - DNA, 120 bp, Artificial Sequence
  ENSG00000271811_3 (sequence is synthesized)
gtctcctgcggagagatggggaatattaaaaagaagcctttggctcttttagctatatagaaacagtcctcgtcctttctaaattttctcttcagctgaaattagcaaaacaaactccac

SEQ ID NO: 1005896 - DNA, 120 bp, Artificial Sequence
  ENSG00000271811_4 (sequence is synthesized)
ttacaccttcaatattagattcttaattttgcaaaattcctaactataacctgggccgaatatagttagaaggagtaggtattctctaaagtgagggcttctcccagaccctccccaccc

SEQ ID NO: 1005897 - DNA, 120 bp, Artificial Sequence
  ENSG00000271811_5 (sequence is synthesized)
cactcaccatcagcaattctgtccccacccccaccttggttgatattcactacactgtcctctctgtagaatgctttctttcactttttactgagtctcccagactagtaaattctcaac

SEQ ID NO: 1005898 - DNA, 120 bp, Artificial Sequence
  ENSG00000271811_6 (sequence is synthesized)
ttctgtgctcaaatacattaagtgttcaaagaaatagttctttaacattgtttgggatccagtggctaatgggagagtgtggagtgtgaatgggggtggtggcagaacatgggtaatcag

SEQ ID NO: 1005899 - DNA, 120 bp, Artificial Sequence
  ENSG00000271811_7 (sequence is synthesized)
ggagaggaaagaggaacaggtcataaaaataggcagacctacttcaatgaggacagtgcatcccgctgtcatttcttaatctgaacttctgcaaactctttgaaaaaaaatgcgcctgcc

SEQ ID NO: 1005900 - DNA, 120 bp, Artificial Sequence
  ENSG00000271811_8 (sequence is synthesized)
cgtttccaacctctaaattagcgaaaccagattgtcctaataagaccttttgttggaaacacatgtagtcataaaaaggtagacggaaagtcaattagacacgcgcgcacacacgcacac

SEQ ID NO: 1005901 - DNA, 120 bp, Artificial Sequence
  ENSG00000271811_9 (sequence is synthesized)
attcacaagccggtgctaagtgtgcacccggcgcagctggctcccgggccgcggcgggatgcaaatacaaaacagcgacgcgggaaatcgatttgtcacaaagggagaggtgtaaacgca

SEQ ID NO: 1005902 - DNA, 120 bp, Artificial Sequence
  ENSG00000271811_10 (sequence is synthesized)
gcgcaaaggaattgcttgcccaatctaccagccacactctctcgggaccttgccccgccaacttctcttcgccagagaaacgcccaggagagcgggaacattttctagggcgctcccaag

SEQ ID NO: 1005903 - DNA, 120 bp, Artificial Sequence
  ENSG00000271811_11 (sequence is synthesized)
ttggaattctcatcacagtaatatcagcttctagagtctcagcttttgcaacaaccctggcgccagaaattttcttatgcagcaccatcctgggactctggggcccactggcagtctaaa

SEQ ID NO: 1005904 - DNA, 120 bp, Artificial Sequence
  ENSG00000271811_12 (sequence is synthesized)
tttgagcttcaattatctcgttgaagaggggagccaatgaaatataaagctttaagggtagcttggaaacttttctctttagaggaggtgaaatacaggattaagtgcctcactgagtcc

SEQ ID NO: 1005905 - DNA, 120 bp, Artificial Sequence
  ENSG00000271811_13 (sequence is synthesized)
ccagagctgaatgtcaaggccagccaagaggtggtgatttcggtttattttacatgcagaagtaggggcccgggttacctccttctcttagaattttggggaaattgatagtccagtgac

SEQ ID NO: 1005906 - DNA, 120 bp, Artificial Sequence
  ENSG00000271811_14 (sequence is synthesized)
tcctacccacttttgggtgaaggacgatttggaatttgaagtgtggggagacaggcctgtgaagtccgaaggactcactgggtctccagatcccccaactctggaatgcagtgaataccc

SEQ ID NO: 1005907 - DNA, 120 bp, Artificial Sequence
  ENSG00000271811_15 (sequence is synthesized)
acccccatgtttcagagcatctctcccatgtgttagacgtcgtgcagtcctgcattttggctgagacacctaaccccggtgcactcaggtcagagcgccagggcttcaggcagacagcaa

SEQ ID NO: 1005908 - DNA, 120 bp, Artificial Sequence
  ENSG00000271811_16 (sequence is synthesized)
tgggtcacacgggtccttatagttccttcctcttcccaggagtgtcattttagattttacaacacgagcgaataaatcatctccaaaccaacaagatgtcaccttcaggctccccactgc

SEQ ID NO: 1005909 - DNA, 120 bp, Artificial Sequence
  ENSG00000263331_0 (sequence is synthesized)
ccgcgtgcatgctgggctctcctggctcagctgctttcacacattgccgatcagcagcagcagcagtgaaggagaacttaagtggccgtgcccacctgctgctgcttgggtcctgtgcac

SEQ ID NO: 1005910 - DNA, 120 bp, Artificial Sequence
  ENSG00000263331_1 (sequence is synthesized)
gagctgactcttcaccttccagccttggctcaaatgtcaccttcacagtaaaggctacccatggctgggtgtgtggttgtgcaggatctgccccttccaaagggccagaatggaaaaatg

SEQ ID NO: 1005911 - DNA, 120 bp, Artificial Sequence
  ENSG00000263331_2 (sequence is synthesized)
aactcacttctgttctctactacactaaaacaatgcttagcacataaccaggacctggcacctatttgttaaatgaatgaatgaatgaatgactaaataaatgaaaaaaaaaaaaaaaaa

SEQ ID NO: 1005912 - DNA, 120 bp, Artificial Sequence
  ENSG00000263335_0 (sequence is synthesized)
tttttttaatatttaattgaacagggagatcatcgcctctcctccaggaacgcaactagaggaaaggacttgccttgcagcaagagagacctcagcgagccgggaagaggctcctcccca

SEQ ID NO: 1005913 - DNA, 120 bp, Artificial Sequence
  ENSG00000263335_1 (sequence is synthesized)
cagaactgggcaccacccagcactgcccaccacaccaccgcgccacctcctcacctgcagcttgtggactttgtcattgagctccgcccgggcccgctccccatcgctgcacttggactg

SEQ ID NO: 1005914 - DNA, 120 bp, Artificial Sequence
  ENSG00000263335_2 (sequence is synthesized)
cagctcctgcacctgcgcctccagcttcttcttcttatgttccacctcctgcttggcctggcccaggacccgcagctccccggccagaccctgacctgtagtaatttgaggctgctgatg

SEQ ID NO: 1005915 - DNA, 120 bp, Artificial Sequence
  ENSG00000263335_3 (sequence is synthesized)
acctgagcctcatgggaccgcgtctcttcatccagggccttcttcagcaccgtcacctcctgctccctcttggcccttggtgggaggaacacagtgaatggcagttgggtggagacagag

SEQ ID NO: 1005916 - DNA, 120 bp, Artificial Sequence
  ENSG00000263335_4 (sequence is synthesized)
ggtcatctcagtgccgtgcaaaagaatgagagctcttccaggacccagagctgcagtcctcatcaccacccctctctagctgtgtgaccttgggtcattcacctaacatctctggaccta

SEQ ID NO: 1005917 - DNA, 120 bp, Artificial Sequence
  ENSG00000263335_5 (sequence is synthesized)
aaatttcctcagctgcaaaatgtggagcatatcacctgcctaggacatctgtaatgactggcaaacaaatacacaaagtaatagaattgaaaggatgtctgtgaactgcaaaattttgct

SEQ ID NO: 1005918 - DNA, 120 bp, Artificial Sequence
  ENSG00000263338_0 (sequence is synthesized)
tggctgcatagtattccatggtatatacgtaccactttttgattatccagtctaccattgatgggcacctggattgattccatgctttgctattgtgaatagtgctttgataaacacagg

SEQ ID NO: 1005919 - DNA, 120 bp, Artificial Sequence
  ENSG00000263338_1 (sequence is synthesized)
aacacaggagtgcaggcatctttttggtagaatgggttcttttcctctgttttccccctaatcttgagatacctatactttagccccgaaaggcaaactcaagaggcaaggtctgtaggt

SEQ ID NO: 1005920 - DNA, 80 bp, Artificial Sequence
  ENSG00000263338_2 (sequence is synthesized)
acaggcgtgcaccaccatgcctggctaaatttttttttgtatttttagtagaggtggggtgtgctccgcatgcctcagcc

SEQ ID NO: 1005921 - DNA, 120 bp, Artificial Sequence
  ENSG00000263338_3 (sequence is synthesized)
cctcagcctcccaaagagctgggattaaaggcgtgagctactgcgcctggcctttaggtactatatttatatctgtgctttatacataaagagtgagattttgcacagctcctcaccaag

SEQ ID NO: 1005922 - DNA, 120 bp, Artificial Sequence
  ENSG00000259410_0 (sequence is synthesized)
ctctcgtctggcaggagccgcaatgttggctcagtcatttggatttaaattgaagataccctgtgtaacgaactcgaccaggagcggaaggcgcgctatgccatccagcagaaattgaaa

SEQ ID NO: 1005923 - DNA, 120 bp, Artificial Sequence
  ENSG00000259410_1 (sequence is synthesized)
ccagctgacagaagcttccctcagcatcttctctaagtggtgtgccactggcaaggcacctgaccatgaacggcttcccccagcaccccatcacctgaagaatttgcagcaagtttcaag

SEQ ID NO: 1005924 - DNA, 120 bp, Artificial Sequence
  ENSG00000259410_2 (sequence is synthesized)
tgtttctgcgcggagcttagccctggggagaggaggaagcccgggctgtgaccccggcctttcggagggtggtctgcgtttcctcactggcccctccccttgtcttccagataccctgtg

SEQ ID NO: 1005925 - DNA, 120 bp, Artificial Sequence
  ENSG00000259415_0 (sequence is synthesized)
gtattgtttatgtgggatcctgtatttgtgaaacttaaggaatgggacgagtaatagaaataaaatatcagaaaggagcgttccatagagttaggttaatggagaaggtatgcagattct

SEQ ID NO: 1005926 - DNA, 120 bp, Artificial Sequence
  ENSG00000259415_1 (sequence is synthesized)
gaggtctgtgaactcttggaggaggtagggggcttttggctgcatgtgaaggaaacactgatttaggatctttatcttccctacacattggagacagaaaagaaaacaattcccaccctc

SEQ ID NO: 1005927 - DNA, 87 bp, Artificial Sequence
  ENSG00000259415_2 (sequence is synthesized)
ctacacattggagacagaaaagaaaacaattcccaccctcaactcagccagatcatggtgagttttaatttaatttaatttattttg

SEQ ID NO: 1005928 - DNA, 120 bp, Artificial Sequence
  ENSG00000259416_0 (sequence is synthesized)
attacaggtgagagccaccttgcctagccccagtcactgttgaggtcaccattttaaagctgaggaaacatgctcagcatggcagcagaagctctggcagtttctgtgtgtctggcccca

SEQ ID NO: 1005929 - DNA, 120 bp, Artificial Sequence
  ENSG00000259416_1 (sequence is synthesized)
gctgcccaggccccctgaacctgaggggccttgctctggccctggggttggcctgggtttggcacctggcgctcgggcccctgagggcttgcagtaggggagcagtggcttttttgagtt

SEQ ID NO: 1005930 - DNA, 120 bp, Artificial Sequence
  ENSG00000259416_2 (sequence is synthesized)
gaatttagtagggctggactcctttcctgtcctttctgcaggtaaaggagatgagcagcgttgctctggtacgcagagaagcttccagacactcctgggttgcacgatagattaagtaat

SEQ ID NO: 1005931 - DNA, 120 bp, Artificial Sequence
  ENSG00000259416_3 (sequence is synthesized)
cagctccatgccaggacccagggctccaaagccatttccaggataaatgcaggctctgagagcgagtgccacggatgactcctccatggccgcactttcttcacattggctcctgtgagc

SEQ ID NO: 1005932 - DNA, 120 bp, Artificial Sequence
  ENSG00000259416_4 (sequence is synthesized)
ttcctcaacgctttcgaagctggccccgcttctgtccactctgcagagtgaacgttgaggcctgcgaggtccctgccatgcctgtctcctcctcccagcagtagtgtgagctctgctccg

SEQ ID NO: 1005933 - DNA, 120 bp, Artificial Sequence
  ENSG00000259416_5 (sequence is synthesized)
ggatcaaggccagatctttgcagcccatgtgcttggctccctcagctgagcctcaggacgtgggtcctcagtttgtgctgtgcagcgtgaggggccacactgcagtcaagccagctgggt

SEQ ID NO: 1005934 - DNA, 120 bp, Artificial Sequence
  ENSG00000259416_6 (sequence is synthesized)
gcaaacagcagcttttcttctacttggtggccctccttgggaaggtccctctgctcctgtaacttcatttcctcattgataacaaagaaaaaaacagatcatattgcctgttgtaaggat

SEQ ID NO: 1005935 - DNA, 87 bp, Artificial Sequence
  ENSG00000261863_0 (sequence is synthesized)
cagaaagttttaaaattagccaggtgtagtgacacatgcttgtagtccccattacttggaaggccaaggcgggaggatggcttgagc

SEQ ID NO: 1005936 - DNA, 120 bp, Artificial Sequence
  ENSG00000261863_1 (sequence is synthesized)
cccattacttggaaggccaaggcgggaggatggcttgagcctgggaggtcaaggcatcagtgagcgatggttgtgccactgcctggagatagagtgagaccctgtctcaaaaaagaaaga

SEQ ID NO: 1005937 - DNA, 120 bp, Artificial Sequence
  ENSG00000261863_2 (sequence is synthesized)
aagaaagaaagaaaaatccctaagacctgacctgcctactccctagaaagcaccaaataaggaaaagcactccggaagaatgaagctaagaaggctgtgctctctgaggcatccgggcag

SEQ ID NO: 1005938 - DNA, 120 bp, Artificial Sequence
  ENSG00000261863_3 (sequence is synthesized)
ccttcactggagggacaaggtccagtgggaccttcttactcaagatggcttcaattccaatcaccagagagttttgagaaccagtgggaggggttcctgggcagcggggctctgctccta

SEQ ID NO: 1005939 - DNA, 120 bp, Artificial Sequence
  ENSG00000261863_4 (sequence is synthesized)
ccgggatttgtttattcagctgatgttaataaatgaagctgaaggtaacaagctgtcacttagcatctccaggctggaccagaactgccattggttaagtttcagacttcagccccaaag

SEQ ID NO: 1005940 - DNA, 120 bp, Artificial Sequence
  ENSG00000261863_5 (sequence is synthesized)
cactagcacgagactgaaaaaaaaaaagaaaatcaaattcagttagaacagagacgtgctgagaagctgggccagagaccccgcggggaacctgccgttgtttgtcaaaaaacgaggcca

SEQ ID NO: 1005941 - DNA, 120 bp, Artificial Sequence
  ENSG00000261863_6 (sequence is synthesized)
gcgaggaagaagccaaccatgcctcccgctccactcgctttggaacccacagaatgttcaacagggcagcacctttcagttattaagacactcagattccaccctggtgcagtgaagcaa

SEQ ID NO: 1005942 - DNA, 120 bp, Artificial Sequence
  ENSG00000261863_7 (sequence is synthesized)
actggattaaccacgcggcacgtggcagagccacagcgcaaaccacggctcctgctgctgaggaaaatacaggcacctcggccactctgggctgtgggttcgacgtgagcagcctcaggg

SEQ ID NO: 1005943 - DNA, 120 bp, Artificial Sequence
  ENSG00000261863_8 (sequence is synthesized)
cagagacggattctgttcatgtctgtcccctctgccatcccaggtctcaggggttctgttcacctgaccatggcagagttgttttgcccacctgtgaaaaccactccaaccatcatggtt

SEQ ID NO: 1005944 - DNA, 120 bp, Artificial Sequence
  ENSG00000261863_9 (sequence is synthesized)
accattgcattgcatgttggcaaatttggggaacatcaccttccaggccacttacagcactcgaataagggctttgacaaaacacaagcgttattatgaatataataataatcagcgtta

SEQ ID NO: 1005945 - DNA, 120 bp, Artificial Sequence
  ENSG00000264812_0 (sequence is synthesized)
agtgtcgggagcagccggcgccaccgctttgccgtaaccactttaaccacttcctttttcacgactgcacggcacttactggccttccgccggcacagacagcagattcgccctggtccg

SEQ ID NO: 1005946 - DNA, 120 bp, Artificial Sequence
  ENSG00000264812_1 (sequence is synthesized)
gtcgctcccggctccttccatggcccctgaccgaattttgtctgctcatcaggaaaccaaagtggcgtctgaagatcagtgtttttctaattagcagagactttacttcagtgaaacaga

SEQ ID NO: 1005947 - DNA, 120 bp, Artificial Sequence
  ENSG00000264812_2 (sequence is synthesized)
actgtttagaaacctgggtgattttcgtggtgttctgtggggagctattttgctatgacttctggccagtgtactttattttaaatttagttttgaataaatcatgcatcaaaatttgaa

SEQ ID NO: 1005948 - DNA, 120 bp, Artificial Sequence
  ENSG00000272555_0 (sequence is synthesized)
agtccttgtgaggctgtttccttaccctttgatgaggtgtagtcacagcttcagaggctccccgcaaagtttttgtcatcagtgatggaacacaagatgtaagagctgaagagttatgaa

SEQ ID NO: 1005949 - DNA, 120 bp, Artificial Sequence
  ENSG00000272555_1 (sequence is synthesized)
gagaaaaacaaaatatagcatatggccaaagtgatttatctttatactttttttaatctttaaaagatatttattgccctataatatacctacagaaaaatgcactgaccctcagtgtac

SEQ ID NO: 1005950 - DNA, 120 bp, Artificial Sequence
  ENSG00000272555_2 (sequence is synthesized)
atgagattctttcataaatttcatgtgtacatgcgtacttcaagtgtacgtgaaatgacctctgtttatattccatcacaatgcctggacaagacttacttaatataagtgaaaaaatca

SEQ ID NO: 1005951 - DNA, 120 bp, Artificial Sequence
  ENSG00000272554_0 (sequence is synthesized)
tccagattgtggcttactagttcccgcccagggcctcagaatcttctacctgtagttggaaaacaagctccaagttatactcaggaagagaaaaaaattaaaagttccagtaggccgaga

SEQ ID NO: 1005952 - DNA, 120 bp, Artificial Sequence
  ENSG00000272554_1 (sequence is synthesized)
agcccatgatccaccgtgttgaaggaagatttgcttcacctcaccaccccccaaccccctcccgcccccccgcggtaatactaagctgttcacacgctgtgaagaagacccgaagactag

SEQ ID NO: 1005953 - DNA, 120 bp, Artificial Sequence
  ENSG00000272554_2 (sequence is synthesized)
gttgtcaactgttggggcctacctgcgccagacttcttcctcagtggccagctttctcaccccccgttagccaccagggggccgcctgcttggaacaagtggtgtagacgccacagcttt

SEQ ID NO: 1005954 - DNA, 120 bp, Artificial Sequence
  ENSG00000272554_3 (sequence is synthesized)
gcctgcaagtcctatggtgcagacttattaagagtagagaagaaagcacggacttctcaccgaggaccaaagggaaatggggtctctggggcctgcaactttcttaaaagtgcatcagtg

SEQ ID NO: 1005955 - DNA, 120 bp, Artificial Sequence
  ENSG00000272554_4 (sequence is synthesized)
aaaccctgcttatccagcggggtggttgttaatgctgtcagcaggggtggggggcctctcacccctttccctgggacgctcagaagaagcgagaataaaacatacatgtcactggctgga

SEQ ID NO: 1005956 - DNA, 120 bp, Artificial Sequence
  ENSG00000272554_5 (sequence is synthesized)
aatctagagaaccttccaataaataacctatacattgtcaggcagctgaggatccatatcgtcataactctattatactgcgtgttacacgaatagatgtgaatattaaattatgatgtc

SEQ ID NO: 1005957 - DNA, 120 bp, Artificial Sequence
  ENSG00000227169_0 (sequence is synthesized)
aatataaggggcaactctgggacctgggaagaaaccagaaggcttggcatttcctttctcgtggcattgtcaaagggaacattctgttgacatcagaggatgaattctgcttcaaggagt

SEQ ID NO: 1005958 - DNA, 120 bp, Artificial Sequence
  ENSG00000227169_1 (sequence is synthesized)
cccacagcagtctgtagagctcttctcagctcgttatcaagcctaatattccaatggcccacattttattctttatattctcagatataatttcctattaaaaatacaaatccccacaaa

SEQ ID NO: 1005959 - DNA, 120 bp, Artificial Sequence
  ENSG00000272874_0 (sequence is synthesized)
gtcgcacgcgctggccaaacgggcgcaccagacacttttcagggccctgccaaagacctcccaatgtctactggcgtcccagacacaagagatccaggccaagactcacacttcacaaga

SEQ ID NO: 1005960 - DNA, 120 bp, Artificial Sequence
  ENSG00000272874_1 (sequence is synthesized)
tacacagacacgggccttagggaacaggaaattccatgaaacttccatttacccaattagccggactcactgagccccagaatagggttttcaaccaactcctactaaaattaaaaagta

SEQ ID NO: 1005961 - DNA, 120 bp, Artificial Sequence
  ENSG00000272874_2 (sequence is synthesized)
atgtgtggtatagattggaataatagacattggaggctacaaacgatgggaggcggagaggggtgagggttgaaaaattacctattgggtgcaacattcactatccgggtaatggggcac

SEQ ID NO: 1005962 - DNA, 120 bp, Artificial Sequence
  ENSG00000272874_3 (sequence is synthesized)
tagaagcccactccaccactatgcaatatatgtatttgtaccccgtaaatctataaaaataaaaactacattaaaaataataataatgtctggtcatctaaatagtacctctacagctta

SEQ ID NO: 1005963 - DNA, 120 bp, Artificial Sequence
  ENSG00000272874_4 (sequence is synthesized)
ttaagtgctctggagacgtcccagttgcctgtccttcccattaaaggtgatatccagtgctgatttccccttcaacctcgggttcccataaacctcttctttctcactcctgctgccctc

SEQ ID NO: 1005964 - DNA, 65 bp, Artificial Sequence
  ENSG00000272874_5 (sequence is synthesized)
ggttcccataaacctcttctttctcactcctgctgccctccggtactccaataaagaatgataga

SEQ ID NO: 1005965 - DNA, 71 bp, Artificial Sequence
  ENSG00000272874_6 (sequence is synthesized)
gaaaagaaacagtcccagtatgcatccatgtgcatgtgcatgcaggtgtatctgcctgtgagagctgcgca

SEQ ID NO: 1005966 - DNA, 120 bp, Artificial Sequence
  ENSG00000272874_7 (sequence is synthesized)
gcatgtgcatgcaggtgtatctgcctgtgagagctgcgcacgcggctctgagtacctgggaagacacccatgtacagatgctgtacatgtgcggggtcactctctggcgcattcggaggc

SEQ ID NO: 1005967 - DNA, 120 bp, Artificial Sequence
  ENSG00000272874_8 (sequence is synthesized)
atgagggctacgtgcaatgcgagggaacctatgtccaggcttcctttcttggttttcctcctctgaactcatgcatcccttcacaaacagtccagctcctggctaaaaacctatgtgtga

SEQ ID NO: 1005968 - DNA, 120 bp, Artificial Sequence
  ENSG00000272874_9 (sequence is synthesized)
tttttcagcccaaacacaggcaatgacaggttttacctggcaggcctcacagctgagtcgtgcacagctgatgcgttgcagtctttaaagacagttgcagacacagactcaggcctcctg

SEQ ID NO: 1005969 - DNA, 120 bp, Artificial Sequence
  ENSG00000272874_10 (sequence is synthesized)
gacagtcgacctctcacacacatctccgctcccaacccaagtcttcattcagacacgtcttcattgcagtggggtaggccttcggccaggacctccttatcttggggagtggagaatcct

SEQ ID NO: 1005970 - DNA, 120 bp, Artificial Sequence
  ENSG00000272874_11 (sequence is synthesized)
tgaagacactttcctccatgctgactcagaagttttcccactctcccttccccaccccatccctggcccccaggtccgtacaacttcaggagcctttttgttggaagcttttctgcagtg

SEQ ID NO: 1005971 - DNA, 120 bp, Artificial Sequence
  ENSG00000272874_12 (sequence is synthesized)
agaccaaccccacacctgtgctcatccacccgaccccagttggcatcattctatgaggaaattagaacaggtggatctgtgttctacaaaataaaacaaaccaggttctctggtttagcc

SEQ ID NO: 1005972 - DNA, 120 bp, Artificial Sequence
  ENSG00000227165_0 (sequence is synthesized)
gccattgtttctctgtgtgatccaaagaaaacccgcatcccaatctcacgctggatttgttcaatacggattcctgagtctcatccaaacccaatgagtcagaatgtctaggattggggc

SEQ ID NO: 1005973 - DNA, 120 bp, Artificial Sequence
  ENSG00000227165_1 (sequence is synthesized)
acagagatctgcattttgaacaaagctgatcccccatcccaagattcttctgcaccctggagtgtgggaactgtggttctagtcagtacacttgatgtcaagatgttgcaaatgcccttg

SEQ ID NO: 1005974 - DNA, 120 bp, Artificial Sequence
  ENSG00000227165_2 (sequence is synthesized)
agaaaacccagccaaggattctcagaacaacccgagcaactttcctatcctgtctctcctgatgaaggctcctgctgcttcttatgagatgttcactaagcattgatggaaatggagaga

SEQ ID NO: 1005975 - DNA, 120 bp, Artificial Sequence
  ENSG00000227165_3 (sequence is synthesized)
agtttcaaagagaagagagctcagatttgggctatgggacaaatgtggaaggaggaagaaggaaatgaaaggtggagtgtggacagagtggtgactcttggaaaggaagacctgagggag

SEQ ID NO: 1005976 - DNA, 120 bp, Artificial Sequence
  ENSG00000227165_4 (sequence is synthesized)
actctccagagttccgccgcttaggcggttgtgctaatctgcgtcagctggggctgtatttggaagaagaggcgctgcctccagtcaagtctgtttttttcagatgaagactttaccgta

SEQ ID NO: 1005977 - DNA, 120 bp, Artificial Sequence
  ENSG00000227165_5 (sequence is synthesized)
tcccaaagttgtgtgtcatgcccgaagtgtctgggatccccgagtgcctgtggtgcccaagagctatgaatctgctatcatcaacacagagggtaccttctgaatgggctatgtctacag

SEQ ID NO: 1005978 - DNA, 120 bp, Artificial Sequence
  ENSG00000227165_6 (sequence is synthesized)
tgatgctgcaaatggaagctaaccctaggatgactggcctctgacacttgagccatcccatcatctgtcatgggttgacccatccatcccctcaatgagcctgaccttcaggaccactga

SEQ ID NO: 1005979 - DNA, 120 bp, Artificial Sequence
  ENSG00000227165_7 (sequence is synthesized)
cagaggagcagtcaatagaaattaattgttaaatacccagaaaatctgaaatggtatttaatatgcagttcatcaagagcaaaagttccttaaatcttcatctagaaaagttatttataa

SEQ ID NO: 1005980 - DNA, 120 bp, Artificial Sequence
  ENSG00000227165_8 (sequence is synthesized)
gggatgaatatgttgtatgaatatgttgtatgcaaatattatattcaagggcaagaccatgaaaacagtttaagaatccgacagggaattagataaagacatcggagtgcacttgtcaaa

SEQ ID NO: 1005981 - DNA, 120 bp, Artificial Sequence
  ENSG00000227165_9 (sequence is synthesized)
atacagctatcaagaatgatgatgttgaaaaatagtttagcaatataattgtctagaaccacagggagtctgagattttacccaacttgtgagttaacaactctgctatagcttcatgaa

SEQ ID NO: 1005982 - DNA, 120 bp, Artificial Sequence
  ENSG00000227165_10 (sequence is synthesized)
agaagacacaagactcctgggtcaggaacaaaggtctctaatactcacagcaatatcaggagccagaatttcaggatcctttttcctgccagtttctcaagtcctaattaccaccgagtt

SEQ ID NO: 1005983 - DNA, 120 bp, Artificial Sequence
  ENSG00000227165_11 (sequence is synthesized)
acaggaaagggccaggtaacactagcactgccatcagtggctgtattacagaacaggaactccaagcttaggaaacccaaatcttttatagttaacaatgaacacatctgccattgttct

SEQ ID NO: 1005984 - DNA, 120 bp, Artificial Sequence
  ENSG00000227165_12 (sequence is synthesized)
atgcctctgctcacaagatgtgcagaaacgtgagaggctcatggagaactgtttccctacaatgacaaaatgctgacgatatattgttatgtaaaataaagcaggcatttttcacctcat

SEQ ID NO: 1005985 - DNA, 120 bp, Artificial Sequence
  ENSG00000227165_13 (sequence is synthesized)
tttcatgaaatatagtgtgtttatatagatatttagaaaagtatgaaaggacattcatccagatatcaatagaagagtttattatttttgctagttgtaagttcaaacttttctagtaaa

SEQ ID NO: 1005986 - DNA, 74 bp, Artificial Sequence
  ENSG00000227165_14 (sequence is synthesized)
tttttgctagttgtaagttcaaacttttctagtaaaaatagattacttgtgaaattatttttacgagtgcagtg

SEQ ID NO: 1005987 - DNA, 81 bp, Artificial Sequence
  ENSG00000227165_15 (sequence is synthesized)
ctcctaaatgtcaatttaataactgagggagcccttaaaataccccgctgacttccacacgggtgtgtaaaatagaatctg

SEQ ID NO: 1005988 - DNA, 120 bp, Artificial Sequence
  ENSG00000227165_16 (sequence is synthesized)
accccgctgacttccacacgggtgtgtaaaatagaatctgctcacgtcttagaggagataagtacatgcttaatgttcttaggagagacctgccttttgacatggaagctgtggtattgt

SEQ ID NO: 1005989 - DNA, 120 bp, Artificial Sequence
  ENSG00000227165_17 (sequence is synthesized)
tgacaagagcatacctccttaaaccatgcaaaccacgttcacatcaaagctgcctacgaatgattattttccatgatgctatgctccctcctgcctgcctcagtggcaagtgtgactcag

SEQ ID NO: 1005990 - DNA, 120 bp, Artificial Sequence
  ENSG00000227165_18 (sequence is synthesized)
caagtgtatccagggcatccctcactcttacttatttttgccaaatgcagtggaaatgtatagactttttttcatatttatgttggctgcagagcataaatctgaataggttctccaaag

SEQ ID NO: 1005991 - DNA, 120 bp, Artificial Sequence
  ENSG00000227165_19 (sequence is synthesized)
taagctttttctgcatgcatttgctcccaatgatgataggtattatgaattgctttatagtaatcattatccttttccatatgttttacggttagtctgtgctataaacttgtttgattt

SEQ ID NO: 1005992 - DNA, 120 bp, Artificial Sequence
  ENSG00000227165_20 (sequence is synthesized)
gtggagaggataaggagggcctcgcttggcttcctgctgctcccctgattagaagcccttctaaggggatcaaggctgtgactggctatgagaagagaaaactaatgctccatttcccac

SEQ ID NO: 1005993 - DNA, 120 bp, Artificial Sequence
  ENSG00000227165_21 (sequence is synthesized)
tcagtccctgggctgctgaactcttccccaccacttgaggaggagctacgctgggaagagatgagctgatgcccagctcagctgctcttctgagtcttcaatttccagaccaacctccct

SEQ ID NO: 1005994 - DNA, 120 bp, Artificial Sequence
  ENSG00000227165_22 (sequence is synthesized)
taaggtgactgacagtggggacctcaacctcacctacagggatgtggactgatcccatggtctcagtgagagacccaggcaatatttctacatgaagcatgttggatttctgaattatcc

SEQ ID NO: 1005995 - DNA, 120 bp, Artificial Sequence
  ENSG00000227165_23 (sequence is synthesized)
agcctcaaatgacaccgggatgggacagtgttaacccagataagaaaactgaggctctgagaagttgagggacttggtcaaggccacatgtcagtgagtgccagaagtttctgctactcc

SEQ ID NO: 1005996 - DNA, 120 bp, Artificial Sequence
  ENSG00000227165_24 (sequence is synthesized)
accatctcgacctacccctgtgacccgccaaaagaagctggccttccccatcctcctgtctccgcagtgccatttgcctttcagtctcctaaaaagaagcacttactctcttccccaaat

SEQ ID NO: 1005997 - DNA, 120 bp, Artificial Sequence
  ENSG00000227165_25 (sequence is synthesized)
gtgctaatctgcgtcagctggggctgtatttggaagaagaggcgctgcctccagtcaagtctgtttttttcaggtggggactgtaggcctttgtgccctgctggaaatcgtgaaaagcaa

SEQ ID NO: 1005998 - DNA, 120 bp, Artificial Sequence
  ENSG00000227165_26 (sequence is synthesized)
gagagaagagtcccagttattcttgctgcctttgataagtgaatttagggcaactactagtgccagtaggcatgggggatctaccgatgaagaagacacaaagtctccgctctcgtggag

SEQ ID NO: 1005999 - DNA, 120 bp, Artificial Sequence
  ENSG00000227165_27 (sequence is synthesized)
tttacagagaataatgaatgagattaattaagaaatgaatgagattaattgaatgaaattgccagactgaatgaagtgaatggcctgaatataaacaatttccaaatacagataacactg

SEQ ID NO: 1006000 - DNA, 120 bp, Artificial Sequence
  ENSG00000227165_28 (sequence is synthesized)
catatctggtgtttgcaatactcccttcgcacttgaggaagaagcactatgtctggggccaagtgtgaccctttgtctgttgctgggtacctttcatttcgcactttctcctctgctgct

SEQ ID NO: 1006001 - DNA, 120 bp, Artificial Sequence
  ENSG00000227165_29 (sequence is synthesized)
ctttgtatgttgtgtggtttcatggtccactgtggagctcagagtatagagttcttcagtatatctcttaaaatctatcgtttgaataacactttgttgagatataattcacatataaaa

SEQ ID NO: 1006002 - DNA, 120 bp, Artificial Sequence
  ENSG00000227165_30 (sequence is synthesized)
tttttgaagtgattgaatatacttacaatatgaggagcagacaatgtaggtgtcctgcccatacctcctatccgacacctttaccatttttgtggacaatggctcctgataaaggctttc

SEQ ID NO: 1006003 - DNA, 120 bp, Artificial Sequence
  ENSG00000227165_31 (sequence is synthesized)
tactcccagctgctagaaccctgcagtgattaaccaatgactgaagtttacagggtgaggtggagtataactattccagctcccttctctgctgactggaacaacactgtcctccactgt

SEQ ID NO: 1006004 - DNA, 120 bp, Artificial Sequence
  ENSG00000227165_32 (sequence is synthesized)
ttccagagcttctctgtggaaccaagccataggttcacctccatgggacttcactaatattgcagcctgacttgtcttccttccctttccggtcccattttccatttcctaactgttttt

SEQ ID NO: 1006005 - DNA, 65 bp, Artificial Sequence
  ENSG00000227165_33 (sequence is synthesized)
gtgcagtagtgcgatctcagctcactgcagccagcctccgtcacacttacccattgatcctccta

SEQ ID NO: 1006006 - DNA, 120 bp, Artificial Sequence
  ENSG00000227165_34 (sequence is synthesized)
tgggattacagcacacttacccattgatcctcctatcatcaataagaatccgttgagaacatcttccagtacagagaggaaccaacatctggttaattcaaacacaacccctgggatcag

SEQ ID NO: 1006007 - DNA, 120 bp, Artificial Sequence
  ENSG00000227165_35 (sequence is synthesized)
gcgccgacaccttgaagttcactgtgtagggcaacatcccggcggccagcccaggacctgggcgctgacccgcaaccaggaagcggcggacactgtgcttccgttccaaacagagtccgg

SEQ ID NO: 1006008 - DNA, 120 bp, Artificial Sequence
  ENSG00000227165_36 (sequence is synthesized)
gtggccccctcggcgccgctgtcaggttcctctagattcaagttctacaggctccgggttccaccgctcccggattccatcgcccccaggttccgttgccttcagtttcctaggatccta

SEQ ID NO: 1006009 - DNA, 120 bp, Artificial Sequence
  ENSG00000227165_37 (sequence is synthesized)
ggttccgcactctccagagttccgccgcttaggcggttgtgctaatctgcgtcagctggggctgtatttggaagaagaggcgctgcctccagtcaagtctgtttttttcagaggaagtta

SEQ ID NO: 1006010 - DNA, 120 bp, Artificial Sequence
  ENSG00000227165_38 (sequence is synthesized)
actctccagagttccgccgcttaggcggttgtgctaatctgcgtcagctggggctgtatttggaagaagaggcgctgcctccagtcaagtctgtttttttcaggctgctcttctgagtct

SEQ ID NO: 1006011 - DNA, 120 bp, Artificial Sequence
  ENSG00000227165_39 (sequence is synthesized)
gggatagtgattaccttatagattgtgattaggatcagataaactataagtaaagccctgtggtataatgtgtgggacaaaactaacacaatttcaaattttctgcaacaagtaaacagt

SEQ ID NO: 1006012 - DNA, 120 bp, Artificial Sequence
  ENSG00000227165_40 (sequence is synthesized)
attttataattgacaaaactaaaaacgaactttaaacttaaaatttcatattacacaattgacaattcaattaactttccaatattagtgtctctgcgtatatatgtgtacagagacata

SEQ ID NO: 1006013 - DNA, 120 bp, Artificial Sequence
  ENSG00000227165_41 (sequence is synthesized)
tgtaacttatttaactttaaagtatattttctaatagctatttaagagccatcaaactttccaaaaaaagagatagcttttaaaaataagtgtttcaacttgtgatagttacttgcataa

SEQ ID NO: 1006014 - DNA, 120 bp, Artificial Sequence
  ENSG00000227165_42 (sequence is synthesized)
attgataatttaaccagctaattattaaatctataatagacaggatgaagcagcattaggagagggtatttatcagttgcctgggggctgtctcatagcttagttgaaattcttttggtt

SEQ ID NO: 1006015 - DNA, 120 bp, Artificial Sequence
  ENSG00000227165_43 (sequence is synthesized)
gcaaatgtcacaaacccacttcaaattagcttaagctcaggcaaaatttgctggaaggatcctgaggcagtagctccaaaagtcaaagaaaaagccaaataacccagtgatcaggaaaaa

SEQ ID NO: 1006016 - DNA, 120 bp, Artificial Sequence
  ENSG00000227165_44 (sequence is synthesized)
ggaagaatgaagtaggaacctctagggcccaaggttgtggatttttcttctagagacttgacatccacattactcagcaatattttcccatttgctttttctcttgactttaattctgga

SEQ ID NO: 1006017 - DNA, 120 bp, Artificial Sequence
  ENSG00000227165_45 (sequence is synthesized)
gagagaggaattgagtggtgcagcttgggtcaggtgtccacatgtccacacctgttgtaagcacctatggctgagaggtcagggtcacataacagaagtatggctgctggggcccaagcc

SEQ ID NO: 1006018 - DNA, 120 bp, Artificial Sequence
  ENSG00000227165_46 (sequence is synthesized)
catgcgtgtgcatgtgttgtgtatatgcatttctgtgtgtgtggcagggagtgcaaaggtggagggggtgacactcagggatctgtggctggactggcatccctgaagttcttctccaca

SEQ ID NO: 1006019 - DNA, 120 bp, Artificial Sequence
  ENSG00000227165_47 (sequence is synthesized)
catgtttttgcttcagagggatagaaatttccattcctcttacatttttataacattgttagatgacttcctcactctggattttggtgttctaaccagaagttcataggcaatacctaa

SEQ ID NO: 1006020 - DNA, 120 bp, Artificial Sequence
  ENSG00000227165_48 (sequence is synthesized)
atgctctttgagcttccgcagtgcacattaatacttcatccagcaacttggagagtccatctcagtagaaaattcagctggtttcacgtggaaacacccactgcccttagtaatggagct

SEQ ID NO: 1006021 - DNA, 120 bp, Artificial Sequence
  ENSG00000227165_49 (sequence is synthesized)
gccaagaatgaatcatgctcaaatttgtccttttagcagaataatgctgccctctgacagcaactgaataggcttttatcttttggggaagtaaattttcttcctccatacagtttcatt

SEQ ID NO: 1006022 - DNA, 120 bp, Artificial Sequence
  ENSG00000227165_50 (sequence is synthesized)
aatatttgtgaactgagccaccatgcttgcctgcatgcctgtgccaggccctcttgcggcagcccactcccactccccttaattcactaatcatctgcacacaacgggctggaggaagat

SEQ ID NO: 1006023 - DNA, 120 bp, Artificial Sequence
  ENSG00000227165_51 (sequence is synthesized)
ggaacttagccctggctgggggcagggacctggttgtgaacccttggcctaatggagacttggtcaagcagtatcaactgtcaggacttttatttcctgatctgtaaactgggatcagaa

SEQ ID NO: 1006024 - DNA, 67 bp, Artificial Sequence
  ENSG00000227165_52 (sequence is synthesized)
tcaggacttttatttcctgatctgtaaactgggatcagaatctccccctttttttttttttttttca

SEQ ID NO: 1006025 - DNA, 120 bp, Artificial Sequence
  ENSG00000227167_0 (sequence is synthesized)
tacagtgagaaatttcaaatggagtgctactgacatctgccacaggacaattctttgtcatgtgcaactgccccactttgaagagtgttaatgtctctgttcccataaccagtaacagcc

SEQ ID NO: 1006026 - DNA, 63 bp, Artificial Sequence
  ENSG00000267543_0 (sequence is synthesized)
aattctcctgcctcagcctcctgagtagtagggactaccagcttacactaccacgcccagctg

SEQ ID NO: 1006027 - DNA, 120 bp, Artificial Sequence
  ENSG00000267543_1 (sequence is synthesized)
agtgttctaaatcttaactgggattgtggttacatgggtctatacacttattggactactgaaccatacattgtaaatggttatactgtattgtatgtaagttacacgagaataaagatg

SEQ ID NO: 1006028 - DNA, 120 bp, Artificial Sequence
  ENSG00000267543_2 (sequence is synthesized)
atttagagagttagaaacaaaacaagaatgaagaatgatgcttgttttgctcaccatctagcagaaaagccagacatacaaataatcatcaaacagtgggatgagtgttcaaagtatgtt

SEQ ID NO: 1006029 - DNA, 120 bp, Artificial Sequence
  ENSG00000267546_0 (sequence is synthesized)
agttcaaaactacggcggctgggggctggccgcgtcctcagcgcgaccctggagctggggaagaatggatcatggcagaatacagaaaatgagctcatgtgtgcaagcctccttccggaa

SEQ ID NO: 1006030 - DNA, 120 bp, Artificial Sequence
  ENSG00000267546_1 (sequence is synthesized)
atcataacagctatgtgtatatgaagtgtttactctgtggcaggtactctggaagcaccttttattcactgtctcatctgattctcatgacagccctgtcattatcccccacccccccac

SEQ ID NO: 1006031 - DNA, 120 bp, Artificial Sequence
  ENSG00000267546_2 (sequence is synthesized)
gcctaaaaacccatggtctcagccaccatgccatgtttcctaaaaaaattacgctatgacagtggaccgtttttgcttaactccagagactttaattcacccacctagaaaacctgtcat

SEQ ID NO: 1006032 - DNA, 120 bp, Artificial Sequence
  ENSG00000267546_3 (sequence is synthesized)
gaaaatatagaggattttttcctgagagttcttaggaccgtgaaacagtgtcacaaatcctgttcagaaagctgggatcatgcagatgaccaggcagatggaagaaaagtaaaaatataa

SEQ ID NO: 1006033 - DNA, 80 bp, Artificial Sequence
  ENSG00000267546_4 (sequence is synthesized)
tttttttgagacagagctttgctcttgtcgcccagactccatctcaaaaaaaataaataaataaaaagtgagattttaaa

SEQ ID NO: 1006034 - DNA, 120 bp, Artificial Sequence
  ENSG00000267546_5 (sequence is synthesized)
ataaaaagtgagattttaaaaagaaatcttattaagtcattttaagttgggtgttctgtttcagtcaaatcatcctaaatgatatcttttaaaaataattcttcccagaagaatggatca

SEQ ID NO: 1006035 - DNA, 120 bp, Artificial Sequence
  ENSG00000267546_6 (sequence is synthesized)
gcgtcctcagcgcgaccctggagctggggcttgtacttaaatacttcctgcgaagttttgactgagacgctgcaacaattcccgagctgtttcatcgtggcaccttcctggtggcaggtg

SEQ ID NO: 1006036 - DNA, 120 bp, Artificial Sequence
  ENSG00000267546_7 (sequence is synthesized)
gattagcacattgtctgcaacccaggaggacttggaggaaagtcccagctctgctgattctagctgagtaaccttggcaaaggtcacctcacttctctctgagtcttattttctcatctg

SEQ ID NO: 1006037 - DNA, 120 bp, Artificial Sequence
  ENSG00000267546_8 (sequence is synthesized)
ggtcgcccagctctgtgtatgtggagagacggcaggaaggaccagagagtgaggatgtgaggaactctagccgtcctgaatctaccactgttcagtaatttacagttcaaaccggattgt

SEQ ID NO: 1006038 - DNA, 120 bp, Artificial Sequence
  ENSG00000267546_9 (sequence is synthesized)
gccagctcacatatatgggacacttacccaacatgctaagcatcttccacacgttatctaatcaacccttacaactctaagagacagataccagtaggatctccatcctacagctaaaga

SEQ ID NO: 1006039 - DNA, 120 bp, Artificial Sequence
  ENSG00000267546_10 (sequence is synthesized)
cctcagcgcgaccctggagctgggggtgtttttaagtttggggcgaggccggtgaagccgaggcgcgggcggcaaggagcgctggagagcgacggggctcggcctccgcggctgcccagg

SEQ ID NO: 1006040 - DNA, 120 bp, Artificial Sequence
  ENSG00000267547_0 (sequence is synthesized)
gggaaaaattattttcactaactttaagactccagagacacttttctcagccatgaccagtaatgtttttaaaagattttggaaggaatagctcctcactataccaccagttcgtgattt

SEQ ID NO: 1006041 - DNA, 79 bp, Artificial Sequence
  ENSG00000267547_1 (sequence is synthesized)
ttctgcctccaaagaaagaagtaaaacccacatcctgggcctggtagttaaagattgacccatgacctaatcggttatg

SEQ ID NO: 1006042 - DNA, 120 bp, Artificial Sequence
  ENSG00000267547_2 (sequence is synthesized)
acattgtatagaaaagtaccatgaaaatccctgtcctgtcctgttccattctaattaccggtgcaggcagccccgagtcacgtaccccctgtttgctccatcgatcacgaccctctcatg

SEQ ID NO: 1006043 - DNA, 120 bp, Artificial Sequence
  ENSG00000267549_0 (sequence is synthesized)
gaaacgtctactagtgacggtcaagccacctacaaccggtcccaaagccgcaaacgagtcaggcatcgtggtaggacctggcgagtggggccggggagagcgggacgcctggatcgggaa

SEQ ID NO: 1006044 - DNA, 120 bp, Artificial Sequence
  ENSG00000267549_1 (sequence is synthesized)
cttgtcgcattcacattggctgctaggaggcctcggcgaccacttccggatccggggcgggggtcgcaactcccagcccttgctcagagggctgaactagaattcccagaagcctctgcg

SEQ ID NO: 1006045 - DNA, 120 bp, Artificial Sequence
  ENSG00000267549_2 (sequence is synthesized)
gccgccttcctgctccttcactcctgcttcccccacaaataacacttcttctttaggcattgaagactgttcctttctgggtgaaggagaatcacgtagcaattgggagcaagatgcatc

SEQ ID NO: 1006046 - DNA, 120 bp, Artificial Sequence
  ENSG00000267549_3 (sequence is synthesized)
catgtaacccagtactggaggtcaagatggagacaatctccacagccaccatggcctttccctgagtgctactataactcaggaggaaagccacccagatactgcagaacaccaacatgc

SEQ ID NO: 1006047 - DNA, 120 bp, Artificial Sequence
  ENSG00000267549_4 (sequence is synthesized)
tttgtgcttgagagttgaaaatgagaccaccttgccatgtcaattcaggtctcttaaagtcttcccttgcaggagaagagggaagtgaaaagatcttcttgtgaacagggtctggtgtgg

SEQ ID NO: 1006048 - DNA, 120 bp, Artificial Sequence
  ENSG00000267549_5 (sequence is synthesized)
acctccagcaaactccaacagattaattcattgacagaatgggattgtcttgtgaaagggaaatatcttggatcccttcaagctgggaacccctcagggcaaatctgcctacttctgtca

SEQ ID NO: 1006049 - DNA, 120 bp, Artificial Sequence
  ENSG00000267549_6 (sequence is synthesized)
attcatcaatctcattctccgtccagttttgtgcccttgctggagaggagttgccatcatttgtcatacacaagtatcaatagccaaattgatcacgcaaaagaaacgatatcagagatt

SEQ ID NO: 1006050 - DNA, 120 bp, Artificial Sequence
  ENSG00000267549_7 (sequence is synthesized)
tcacgcaaaagaaacgatatcagagattgaagatcaacttactaaaataaggcatgaagaaaagattagagaaaaaagaatgaaaaggaactaacaaagcctccaagaaatatgagacta

SEQ ID NO: 1006051 - DNA, 120 bp, Artificial Sequence
  ENSG00000267549_8 (sequence is synthesized)
gagttgcacacgcgcattgaggcgtgtcttccctggttctgcgtccgtgaagcctagagattcccgagcctgggtcacccgggcggtgtcgcatgtcgtctgcggggaggttggggctgc

SEQ ID NO: 1006052 - DNA, 120 bp, Artificial Sequence
  ENSG00000267549_9 (sequence is synthesized)
tcgcgcgaggcgctctgggtctcatttccgaggccgaaaatgctggctccaaagtggtgccctgggagatgagggcgactcgcagattccaccctattctctgaatgggcttcgagtctc

SEQ ID NO: 1006053 - DNA, 120 bp, Artificial Sequence
  ENSG00000267549_10 (sequence is synthesized)
atcagtctgatccactccaagggagatcctagttgggtccaatctgttgttccctgggatcgttcaccatggatagaagttaaacgtaagaaagcaggtttagagagtcagaagggccca

SEQ ID NO: 1006054 - DNA, 120 bp, Artificial Sequence
  ENSG00000267549_11 (sequence is synthesized)
cacctctacacctcccaccttcccattcagctcttccccaagtcattcttgaattccaaggccaaggacataagagccagtggagtattgctataaagatatctgaaaatgcagaagcaa

SEQ ID NO: 1006055 - DNA, 120 bp, Artificial Sequence
  ENSG00000267549_12 (sequence is synthesized)
agggctcagaagaagacaggaagatgaaagaagtttggaatttcttagagactgttaagtggttgtgaccaaaatgctaatagtaatatggacagtgacgtcctggctgctgaggtgtca

SEQ ID NO: 1006056 - DNA, 120 bp, Artificial Sequence
  ENSG00000267549_13 (sequence is synthesized)
tagtaatatggacagtgacgtcctggctgctgaggtgtcagatggaaatgaggaacttattgggaactggaacaaacgtgacatgtgttatgccttaggaaagaacttggttgaattgtg

SEQ ID NO: 1006057 - DNA, 120 bp, Artificial Sequence
  ENSG00000267549_14 (sequence is synthesized)
tttctaagcagcaaagtgttcaagatgtggcatggctgtgtctaacagcctatgttcagatgtgtgagcaaataaatgacctaaggttggaaattatattctatttaaagaggaagcaga

SEQ ID NO: 1006058 - DNA, 120 bp, Artificial Sequence
  ENSG00000267549_15 (sequence is synthesized)
gaagcagaccatagtagtttggaaaatttgcaacctggccatgtggtagaagagaaaagcctattttcaagagaagaattcaagtgagctgctaagcaaccacttgatagagaaatttgc

SEQ ID NO: 1006059 - DNA, 120 bp, Artificial Sequence
  ENSG00000267549_16 (sequence is synthesized)
ataagtaaaatgcaaacaagagctgatagcaaagacaatggcagaaaggtctcaaaggcatttcagagacctctgcagcaacccctcccatcacaggcaatccatccatccagtaaagct

SEQ ID NO: 1006060 - DNA, 120 bp, Artificial Sequence
  ENSG00000267549_17 (sequence is synthesized)
agaacatggaggaggggatgaacagctggagagcttctgggcaggaaaaaaatccttaagtcaggcaaagaatagattgaggagacagagaacctgaagggtgacagcactttttaaagc

SEQ ID NO: 1006061 - DNA, 120 bp, Artificial Sequence
  ENSG00000267549_18 (sequence is synthesized)
tcagtggtcctctgcaggactttttgaaccaagcaatgtagagacagcttaccatatgaacttatgttgttactcaagaaagttgagaactaaataggttttcagctattgtaggccaat

SEQ ID NO: 1006062 - DNA, 120 bp, Artificial Sequence
  ENSG00000267549_19 (sequence is synthesized)
aataaatcagactgtctattgatattacttttgcttcactaagaaaacaggatactactacagacacatcagaatgactacaattgaaagaacgacaatataaagtcttggaaaggatgt

SEQ ID NO: 1006063 - DNA, 120 bp, Artificial Sequence
  ENSG00000267549_20 (sequence is synthesized)
ggaatgactggaattatcatacattggtagtgaacatgttatatggtacaaccactttggaaaactgacagttttttaaaaaattaaacacacaactatcccatgaccctacctctatta

SEQ ID NO: 1006064 - DNA, 120 bp, Artificial Sequence
  ENSG00000267549_21 (sequence is synthesized)
caagagaaaggagtgcacatggccatagagagatatgttcatacagctttattcacagcagttaaaaacttaaaacaagctggatgtccattaatgagtgaatgcataaactaactggta

SEQ ID NO: 1006065 - DNA, 120 bp, Artificial Sequence
  ENSG00000267549_22 (sequence is synthesized)
cattcatgcaatggaatgctactaagaactgttgacgtataccctacacatatgaattgctaacattatgctaagagaagccagatgcaaaagaatacatattgtatactattctaagaa

SEQ ID NO: 1006066 - DNA, 120 bp, Artificial Sequence
  ENSG00000267549_23 (sequence is synthesized)
ggccaagaactggcaaaatgaatctatgggataaacatcagaatagtggttcttctaagggggtgatgaatgggaaggagctcaagggaagtttccagtgtgatggaaatattctttacc

SEQ ID NO: 1006067 - DNA, 120 bp, Artificial Sequence
  ENSG00000267549_24 (sequence is synthesized)
ttctaggtgatggttacatgggcatacacatcatcgtgctgtacacttaagataggtacatgatacttcaataaaccatttttaaaagaaaacatccattcctggaaacagaacagacac

SEQ ID NO: 1006068 - DNA, 120 bp, Artificial Sequence
  ENSG00000267549_25 (sequence is synthesized)
atcacacataaacaagaacgctttgttcttatcagaatgtattacttcatttaaagtcatggtttggccctctggttggtagtggaggccctccaattcctatgacttgactaattattg

SEQ ID NO: 1006069 - DNA, 120 bp, Artificial Sequence
  ENSG00000267549_26 (sequence is synthesized)
ttgatcttgagaaatgtacataatgggttgtatttgtttggctatagaaaaaagatgagatttctgtcttagcaatctctttagccgactgcctatggtacatactggattctggtgtaa

SEQ ID NO: 1006070 - DNA, 120 bp, Artificial Sequence
  ENSG00000267549_27 (sequence is synthesized)
cctaccctataccactcgtcccggaaagggtgagccggtgacctttcaccctctctgggcctcagtttccctttttgtgaaataatgtctggtacccctgctgtgctcccttactatttc

SEQ ID NO: 1006071 - DNA, 120 bp, Artificial Sequence
  ENSG00000267549_28 (sequence is synthesized)
agggccccgggcaagagacacactctgtgtctcagtttccgcataggtaaagtgaggatgatgttagaatttgatgttaaaatttaggtggtggttgtgagaattaagggaacctcagag

SEQ ID NO: 1006072 - DNA, 120 bp, Artificial Sequence
  ENSG00000267549_29 (sequence is synthesized)
caatggccagcacacaatgacccttcaaatgtcagcggctttgatgatcaccattcttaccttttctttggagatttggacaagttaccgccccaccttcctccagggtctttgtgtatt

SEQ ID NO: 1006073 - DNA, 120 bp, Artificial Sequence
  ENSG00000267549_30 (sequence is synthesized)
cactggaattccggaaacctgtccctgtcataccagttgctgtgtgacctccgtcaatcatggttctttactgagccctgagactccgcacgtgaaaatggatggggatgaacttccagt

SEQ ID NO: 1006074 - DNA, 120 bp, Artificial Sequence
  ENSG00000267549_31 (sequence is synthesized)
ccaggcagtgccactgactttgcttggggacctggggcaagctctgtggcccagcattgcaccatctgtaacaacataaccaaggggtgcgcaattgagctttgaggttaatttcggtgc

SEQ ID NO: 1006075 - DNA, 120 bp, Artificial Sequence
  ENSG00000267549_32 (sequence is synthesized)
taaaatcccggtcagtagttccgtcatcttcacagacctcaccctacccaatgcccttattgtgctccacatcccaatcaacacttactgattccagatttgtaatttttgccattgtag

SEQ ID NO: 1006076 - DNA, 120 bp, Artificial Sequence
  ENSG00000267549_33 (sequence is synthesized)
tgagaagtaattaactattttatggttttttaaatttgaatttttgactatcaggattagcatattttttttttcttcgttaaagactagtcaagtgcattagtgaggaggggggaaaga

SEQ ID NO: 1006077 - DNA, 120 bp, Artificial Sequence
  ENSG00000267549_34 (sequence is synthesized)
gtagaccaaggaatttggtctgtaactgactgtggacaatacattggtagaactcactacctttgagccagccagaatctttttattattcactggatattcaggttttgcctctgtaaa

SEQ ID NO: 1006078 - DNA, 120 bp, Artificial Sequence
  ENSG00000267549_35 (sequence is synthesized)
ttttctttcattgccatttttttcaaatagttcattcaatctttgttttcagatgtgctttccacaatcaggttacaaattctctgccactaatgatcattacaattcctcttctcagcc

SEQ ID NO: 1006079 - DNA, 120 bp, Artificial Sequence
  ENSG00000231539_0 (sequence is synthesized)
aggaatctacctttaaagaacagagtggatgactctgatgcaggttgaactggaccccataaaggggcaccactgccatttgttgctctgaggtgcaacctacagacctgcagaccctgg

SEQ ID NO: 1006080 - DNA, 120 bp, Artificial Sequence
  ENSG00000231539_1 (sequence is synthesized)
agcaaaagttcatcttgcagaggcctccagttcctcctgtgtgtcaggaacaattccggggattcagctgtgaacacgagtcaacgatcttccccatgtcaagcttatcttccagtggag

SEQ ID NO: 1006081 - DNA, 120 bp, Artificial Sequence
  ENSG00000231539_2 (sequence is synthesized)
tgctgagactactcctgataaatcctgacatttcagggtactgtgcaggagacttacagacaccagaaacccgaaggcagcattcacctggataatgctagaaggaaacataaaaggtca

SEQ ID NO: 1006082 - DNA, 120 bp, Artificial Sequence
  ENSG00000231539_3 (sequence is synthesized)
gagaaggccccgaccatatgtacatcttacggaccactgatgatgcttcaagattgctggtcaggtgaaggaaacaccatgaccaccccaaatcaatcacatagaattccatgactgagg

SEQ ID NO: 1006083 - DNA, 63 bp, Artificial Sequence
  ENSG00000285567_0 (sequence is synthesized)
atcctgtgcactttattcttccctaccagcctcagaagccacgtgctgaagacagtgaagttc

SEQ ID NO: 1006084 - DNA, 120 bp, Artificial Sequence
  ENSG00000285567_1 (sequence is synthesized)
taccagcctcagaagccacgtgctgaagacagtgaagttctgtctgggaagaagcatcgatccctaaatgactgcatggagcagagcagagatgtctgctcactaagttggttcgaagct

SEQ ID NO: 1006085 - DNA, 120 bp, Artificial Sequence
  ENSG00000285567_2 (sequence is synthesized)
gaggaggaaaaaaattaggtgctaggatgctggagagatcctcagaaacccctctacatgaatcatttaagtagatgaagagctagattgcaataatcattgggaggagaagaagaataa

SEQ ID NO: 1006086 - DNA, 120 bp, Artificial Sequence
  ENSG00000285567_3 (sequence is synthesized)
tgatgcagttacgaaggctgaagcccggacttgatttgagttcggcctgcggagccccggctgagctacctgccttctagccccacggtggaaagggagaatccagacatccttgagacc

SEQ ID NO: 1006087 - DNA, 120 bp, Artificial Sequence
  ENSG00000285567_4 (sequence is synthesized)
tacccaaggagtttccctgttactgccctgccatccttctgatgccaccctgttccgtatctggctggagccagcgtggttgtgtctgggtttggctccatagtagatgttctcggtggc

SEQ ID NO: 1006088 - DNA, 120 bp, Artificial Sequence
  ENSG00000285567_5 (sequence is synthesized)
cttactattcctgtgcacgccggccacttttgcctgaagctctctgtggctgccaatgcccactttgttgaaagtacttggaaattaagaccctctagggagtatctctgagttgtgcct

SEQ ID NO: 1006089 - DNA, 120 bp, Artificial Sequence
  ENSG00000285567_6 (sequence is synthesized)
ggtgagatttcatgaaggaatggcccagctcctgcagacctaggcgggatgtctgaggtgcaccttctacacgctctttcagttggattaagtcctaggatgcccacaggggtcactgag

SEQ ID NO: 1006090 - DNA, 90 bp, Artificial Sequence
  ENSG00000285567_7 (sequence is synthesized)
tgaagccgtggaccctcgcggtgagtgtcacagctcttcaaggcggcgtgtccggagttctttccttctgatgcatcctgtgcactttat

SEQ ID NO: 1006091 - DNA, 120 bp, Artificial Sequence
  ENSG00000285567_8 (sequence is synthesized)
tgatcaactatgggagacccaaagaccactcagtcctttttccgatgaatggctgtgtatgtcacactagcaacaaacagaaccgcaagagctcctgtgacaatgctgagcccgatcact

SEQ ID NO: 1006092 - DNA, 120 bp, Artificial Sequence
  ENSG00000285567_9 (sequence is synthesized)
gcgccttgcagagcagatgccgtctgtacctccctcctgttaagaaaccagagggtttttaattgcctgattattaagaggctcttctggctgctcctggtttcctgggaagtttcccat

SEQ ID NO: 1006093 - DNA, 120 bp, Artificial Sequence
  ENSG00000285567_10 (sequence is synthesized)
gaagtttcccatctagccgctaggtatctctctctgccacccaggccagagttcagctgatgcagggcaggggagcccccaagtggagcctagtgtgtccggaactggtgggttcttggt

SEQ ID NO: 1006094 - DNA, 79 bp, Artificial Sequence
  ENSG00000285567_11 (sequence is synthesized)
atgaagccgtggaccctcgcggcagagcaacataaattgtgaagatttcatgaacatttatcagttcccaaataatact

SEQ ID NO: 1006095 - DNA, 120 bp, Artificial Sequence
  ENSG00000285567_12 (sequence is synthesized)
tcttaatcctgttatatttattagctgaggatgtacatcacctcaggacggctgtgataattgtgttaactctaaaaattgattgtaaaacgtgtttcaacaatatgaaatcagtgcacc

SEQ ID NO: 1006096 - DNA, 120 bp, Artificial Sequence
  ENSG00000285567_13 (sequence is synthesized)
caagggaagacaaccataaggtctgactgactgcagggtcgggcaaaaagagccatatgtttcttcttgcagagagtctataaacagacgtgcaagtaggagagatatcgctaagttctt

SEQ ID NO: 1006097 - DNA, 120 bp, Artificial Sequence
  ENSG00000285567_14 (sequence is synthesized)
agagccatatgtttcttcttgcagagagtctataaacagacgtgcaagtaggagagatatcgctaagttcttttcctagcaaggaatattaatgttaataccctgggaaaggaatgcatt

SEQ ID NO: 1006098 - DNA, 74 bp, Artificial Sequence
  ENSG00000285567_15 (sequence is synthesized)
cattcctggggagaggtctataaatggctgctctgggaatgtctgtcttatgcaaggcttactagggtggggaa

SEQ ID NO: 1006099 - DNA, 120 bp, Artificial Sequence
  ENSG00000262884_0 (sequence is synthesized)
aaggggtacagtctgggtgaccttgagacctggatgcccctctgactgtcagctaactggtggagcgcgtgggtctccctgctaggcaacttcagacacagccccaggattccagcaggc

SEQ ID NO: 1006100 - DNA, 120 bp, Artificial Sequence
  ENSG00000262884_1 (sequence is synthesized)
ctgtccccgtcagccagtgcacccagaccagactggtcagtctggtatttctgagtcccatcccagcccccacaccaccgatgagagccctgcctggaagagaagtggcctcaagcagcg

SEQ ID NO: 1006101 - DNA, 120 bp, Artificial Sequence
  ENSG00000262884_2 (sequence is synthesized)
caacagccctacctaaggatgacccggaggtactcgatcccctctgcttcctcgcacttgacggacaggatcaagttccccaggctgctgccggtacagtaaaagtttagatgatcctaa

SEQ ID NO: 1006102 - DNA, 120 bp, Artificial Sequence
  ENSG00000262884_3 (sequence is synthesized)
aaaaagaaactgagtgtgagcaggaaggaggaagaaaccttccaggtatgttccccctaaaccacctccttcaccaggagaagccccacagcaacaaggaagagaaggatgctactgatg

SEQ ID NO: 1006103 - DNA, 120 bp, Artificial Sequence
  ENSG00000262884_4 (sequence is synthesized)
acaatgacaacgacattaacaggtaccgacggccggatcctcaggaggcgccaggcaccgtgccaggggcttaatacccactatctccttcagtcctgaccacagctgtatccgggagag

SEQ ID NO: 1006104 - DNA, 120 bp, Artificial Sequence
  ENSG00000262884_5 (sequence is synthesized)
aacatcatccccatttcacagatgggaaaaccaatggtcggggggttaagtcactgcccaggatgacacgatgagtaagggacagatccagggttcaaacgcacagctgtcttgactctg

SEQ ID NO: 1006105 - DNA, 120 bp, Artificial Sequence
  ENSG00000262884_6 (sequence is synthesized)
aagggcaagttcttaaccacaagataccgagtccacattctcattcccatggggcggccctcaccagttcacactatctggggcaagacagcaaggaggaaccctggcacctccacccag

SEQ ID NO: 1006106 - DNA, 120 bp, Artificial Sequence
  ENSG00000262884_7 (sequence is synthesized)
gggagctgggaggtgtcctgagccagtgggtcactccctggctcggggaacacgggcgaaaaacacagctccccagacctgctggatcagactgaggccctggaatctgcatgctaacaa

SEQ ID NO: 1006107 - DNA, 120 bp, Artificial Sequence
  ENSG00000262884_8 (sequence is synthesized)
gacccaggggctctgaggcagcctcccgtcacgtgagactctgcaaagcggcctcaggctacagatttccggaatctgccctcagtacatcaagaacctggtaaatctgaagggcagaat

SEQ ID NO: 1006108 - DNA, 120 bp, Artificial Sequence
  ENSG00000262884_9 (sequence is synthesized)
ctattcttttaaatttaactttgtcacttttaagcaatcagaggctcgcagacactatgcagtacaagcactcagaggatctgcctgaatgaggacggagagatttgcgtgatttagatg

SEQ ID NO: 1006109 - DNA, 120 bp, Artificial Sequence
  ENSG00000262884_10 (sequence is synthesized)
aacacatttttcctcgaacagtcaaaactccagccaccgtccttcaccccaaacactacccattccatcgcctcccgaaacatttgcggggggtggtccccacaaggactcatggcactg

SEQ ID NO: 1006110 - DNA, 120 bp, Artificial Sequence
  ENSG00000262884_11 (sequence is synthesized)
ggcctccctgattgttacatggctcccctgccccgtcccctatcccaggacagaggccctcagacctctccaactaagacagcagcaggcagcaacaaaaggacagactaggaaggagat

SEQ ID NO: 1006111 - DNA, 120 bp, Artificial Sequence
  ENSG00000262884_12 (sequence is synthesized)
gctgctccccagcgatgttggggtgcccacgttctccgggtcctcgatccaatagcccccaaactgtggcaggatgacctgaggaacccaaacataaaccctgccagctgatgatgcagt

SEQ ID NO: 1006112 - DNA, 120 bp, Artificial Sequence
  ENSG00000262884_13 (sequence is synthesized)
gtccgaaggtgctgaacttctcacccctcgtgataccagcttctcatcctagaacgctcattccggaaaatgacccctagtctcccccagcacccctttccaggcaggcggactgacctc

SEQ ID NO: 1006113 - DNA, 120 bp, Artificial Sequence
  ENSG00000262884_14 (sequence is synthesized)
caagtgataagcggcacccctgggttgggaagctgagagctgactgcccactggaacccggggcacagagcctgacacccttacacactgcacagggtagggaagagccgggccaaacgg

SEQ ID NO: 1006114 - DNA, 120 bp, Artificial Sequence
  ENSG00000262884_15 (sequence is synthesized)
ccaagcctgaggtcccaccgaggcctccacccccagcctgctctgaagctgtcctaaggcatcaagccaggacccctctgctgcccaccgtgcactggtctaacaaggcagtcgtgaagc

SEQ ID NO: 1006115 - DNA, 120 bp, Artificial Sequence
  ENSG00000262884_16 (sequence is synthesized)
ggcccgtggtgcgagtcagagttagacaggtgtgagacagaagaccccagcatcccggcagcccctcctgccttcctctcgccctagcccctcaccagggccgtctggccaccccctcac

SEQ ID NO: 1006116 - DNA, 120 bp, Artificial Sequence
  ENSG00000262884_17 (sequence is synthesized)
ccacccagcccaccttgttcttctggggtcccggcttctgctcttcaagcttgatcccctatagaaacaaggaaaacaggatccacagaaaagcaaaggtcagaagacagggccagataa

SEQ ID NO: 1006117 - DNA, 120 bp, Artificial Sequence
  ENSG00000262884_18 (sequence is synthesized)
agagcacctggccttacagggggttagtaacaggagcagcagcaaaagctggcccgtgctgggcctgcacacatcacacctggccaggggcgggcctcacagcagcctcaggtgaggcaa

SEQ ID NO: 1006118 - DNA, 120 bp, Artificial Sequence
  ENSG00000262884_19 (sequence is synthesized)
cagcgccgctgggctaacagcatagacttgagccagatcgccggggttcaaatcccaacactgccacctatcagcctgatgaccttggcaagtcacagaaacctctctgtgactcaatgt

SEQ ID NO: 1006119 - DNA, 120 bp, Artificial Sequence
  ENSG00000262884_20 (sequence is synthesized)
tctcatctgtaaaatgggaatgatgatggcatcgactatggtggtgaaggttaaaggttaacaatgggttgagcacttggaacactgactggtatataataaatgctgtgggtcattatc

SEQ ID NO: 1006120 - DNA, 120 bp, Artificial Sequence
  ENSG00000262881_0 (sequence is synthesized)
ctcccttcacccgcggctgcctcctgcccccatgactacagtgtgatgctgtctgggaagctgaatgtcatcttccctgggcttacctgccaggctcctctcatccacatcttccagcct

SEQ ID NO: 1006121 - DNA, 120 bp, Artificial Sequence
  ENSG00000262881_1 (sequence is synthesized)
ctagccacatggacccctccggaaagcatgtgtgtgtggggggtatgtgtgaacatttttcatgcttgatgtgagccggaagaaaaatgagcttctctatttgataagtgtggacctgcc

SEQ ID NO: 1006122 - DNA, 120 bp, Artificial Sequence
  ENSG00000262881_2 (sequence is synthesized)
cacagcactaaatttggttctgccgtcaccggcgccatgaagcagcagcctggtttagaggcttgcctttggtttcaaataatttctccaggctcatgttacatatgacccattcacaga

SEQ ID NO: 1006123 - DNA, 120 bp, Artificial Sequence
  ENSG00000262881_3 (sequence is synthesized)
acgtgtcttttggctcctgcacgactagcacaggcagtagaaccagatgggggatgctctgaggttgcagaggcaggaaggcaagcgggagagagcttgggcctggacagagggatgagc

SEQ ID NO: 1006124 - DNA, 120 bp, Artificial Sequence
  ENSG00000262881_4 (sequence is synthesized)
tggctccctccccagctgtgaaatctctgagtctcagtttgcttctctgcaaaatgaggataataatccccacctcgggactgaggattaacgaggcaatggttttagcagaataatcca

SEQ ID NO: 1006125 - DNA, 120 bp, Artificial Sequence
  ENSG00000262881_5 (sequence is synthesized)
ctgctgctattattatcagcatcttcgtatagcaaaactcatttggaccaatggggagtgcgttaagttggtctgaagtagggcaaaggaacgattatagaatgtttcaaaggaaatgtg

SEQ ID NO: 1006126 - DNA, 120 bp, Artificial Sequence
  ENSG00000236193_0 (sequence is synthesized)
gacttctcctaatctataagcagcaagagcagatgtgcttgtaagaaacaaagatcttgttttcatacaaatgcgctcaaaataaaacacaaaggaagaaaaatacccagagcacataat

SEQ ID NO: 1006127 - DNA, 120 bp, Artificial Sequence
  ENSG00000236193_1 (sequence is synthesized)
gcaaagaacaagaattgcttctaaatagaatgttttacaaagttttccataaagcctcagctgctcctcaagccacaaccggcttgaacatggatggcagacatgaaattacagtattca

SEQ ID NO: 1006128 - DNA, 120 bp, Artificial Sequence
  ENSG00000236193_2 (sequence is synthesized)
gcaaagtgacactcttaagactgttaaaagaaactattgttcaaggtagatggaattagaagaccctcagcatgtgggacttatatgccagctgaatagaccccagactatcagtgcact

SEQ ID NO: 1006129 - DNA, 120 bp, Artificial Sequence
  ENSG00000236193_3 (sequence is synthesized)
cagggaagtaaagtttgacagtatttatatgctttacttatgaactggatttggtatcttagaatattttctttgaaaaggtagttccatttttggctttcttgcttcttcatagtgcca

SEQ ID NO: 1006130 - DNA, 120 bp, Artificial Sequence
  ENSG00000236193_4 (sequence is synthesized)
atctaggtcaacaggagtaagtgagaccattgttccatatcccgcttaaaaagagaacactacttcaaagacaagaacaacatcacctgacaaaaataaaagaagttatcggttttaaaa

SEQ ID NO: 1006131 - DNA, 80 bp, Artificial Sequence
  ENSG00000260011_0 (sequence is synthesized)
cacagcactcaccgaccccaggcgtgactacgtttgaggcaaccatgaaggcttcagacattcaaacttcttaatagacc

SEQ ID NO: 1006132 - DNA, 120 bp, Artificial Sequence
  ENSG00000260011_1 (sequence is synthesized)
ggctgagctttcctcattggccgtcatgccttggatcattaaggacactttggaacggagctttgctattctctgaagatacacaaaatcctccactgctcacgtcataatctatttacc

SEQ ID NO: 1006133 - DNA, 120 bp, Artificial Sequence
  ENSG00000260011_2 (sequence is synthesized)
aactgtggaaaattccgcggtgcctgtggtttttaaagtgatgctgaagcgagcacctttgtgcatatgtcttgatccacgcctgattttaaaatttcagataaaatcctagaagtgaaa

SEQ ID NO: 1006134 - DNA, 120 bp, Artificial Sequence
  ENSG00000260015_0 (sequence is synthesized)
acagagtttatttttaattttgctttgtcagtctgtgaaagtaattcaacagtgtcatgataatgtacatagttaatgaagttaatttatatttagcttgggtctaaatcacataataaa

SEQ ID NO: 1006135 - DNA, 120 bp, Artificial Sequence
  ENSG00000260015_1 (sequence is synthesized)
ttttgcataaaaattaacagaagttgattctatctttctccataaccactattcataagttgaaaaaatgtagttttaatgaaaatgtattaaaaacttagcaactgctctcattctata

SEQ ID NO: 1006136 - DNA, 120 bp, Artificial Sequence
  ENSG00000260015_2 (sequence is synthesized)
gaaaatgaagccacggctgggcacaattctggacctcattggatatctcagacttggaatgcaggaaatttaaagctgttctaaagtggatcttgaataagactctgagacttctgtgtg

SEQ ID NO: 1006137 - DNA, 120 bp, Artificial Sequence
  ENSG00000260017_0 (sequence is synthesized)
tttttctttttttcttgagacacagcctggctctgttgcccaggctgtagtgcagtagccaccgcgcccggccgatttttcatcgtttgatacaaacagaatcatgccaaatgtccggat

SEQ ID NO: 1006138 - DNA, 120 bp, Artificial Sequence
  ENSG00000260017_1 (sequence is synthesized)
agatgtttgtttcagttttagggtctctgactgcctttttaggactacaagcaacactcttgccagttcctggaacggtgcttggtggagtatcagctgatgtagcaagatttttttgga

SEQ ID NO: 1006139 - DNA, 120 bp, Artificial Sequence
  ENSG00000260017_2 (sequence is synthesized)
tcagctttctagcattctgtgacatgacatcaggctgagtcttctggccagtgttactccggactgctacagagaaagagttggtggctcaatttacatgtaaacagaacatggaggggg

SEQ ID NO: 1006140 - DNA, 120 bp, Artificial Sequence
  ENSG00000260019_0 (sequence is synthesized)
gcaaagctactatttactgagcatttcccataaggtcaaaagaaccacttggaacactcattcagcatacagattctgagcccctccctgaagatctgattcactaggcttggtgtaaag

SEQ ID NO: 1006141 - DNA, 120 bp, Artificial Sequence
  ENSG00000260019_1 (sequence is synthesized)
tcctggaacccatagatttaacaggagccctccactggcatatattatgggaaatagtttgggaagtagtgctttacatgatttatgtcaagtaattattacaattgctctctgaagccg

SEQ ID NO: 1006142 - DNA, 120 bp, Artificial Sequence
  ENSG00000260019_2 (sequence is synthesized)
ctaccatgattatctcaattttacagatgaagaaaccagctcagagtataagatatggtatacctaagtcaaatagttaataaacaggagcgctgctgactctggcacccaggactgctt

SEQ ID NO: 1006143 - DNA, 120 bp, Artificial Sequence
  ENSG00000260019_3 (sequence is synthesized)
gtcttcaaagccaggactccgactactgaaggcccaagactcttggcggtctgaatctggggtcccagctgccttgccaggatggcagatatctctccactaatgcaggtgtcttagaag

SEQ ID NO: 1006144 - DNA, 120 bp, Artificial Sequence
  ENSG00000260019_4 (sequence is synthesized)
ttccagtggctagaattccaagatcaaggtgtcagcagcatggttctttctgagagctgtgaagaagaatccgttccatgcctctcccccagtttctggtggtgtgctggcagtctttgg

SEQ ID NO: 1006145 - DNA, 120 bp, Artificial Sequence
  ENSG00000260019_5 (sequence is synthesized)
cattctttggcctgcagacgcatcaccctaatctcagcccagctccggaacgcctttcccatgtttggtgtgttttctacctaatgagttttgatggaagtgaaggctgttatttacctc

SEQ ID NO: 1006146 - DNA, 120 bp, Artificial Sequence
  ENSG00000260019_6 (sequence is synthesized)
tggaagctaaaaataccagctccctggtcatctcagagttggtttccgatgcaactaaaaacatcaactgatatgaggtccaaaagatggaattttaagcaccaaagacgctcccttatg

SEQ ID NO: 1006147 - DNA, 120 bp, Artificial Sequence
  ENSG00000260019_7 (sequence is synthesized)
ggcaaagtctcaataggacatctgcatgttcagttgagattctgctttcccctcagatgacagaattattggcaaccagttaaattgacgcaattggaaacccagaaacatgatcaacaa

SEQ ID NO: 1006148 - DNA, 120 bp, Artificial Sequence
  ENSG00000260019_8 (sequence is synthesized)
agataaggagatggagataccagtcacccctatcaaagtggcaagtgggagggggatgctggttggtctgtcggagctgacgaaggaatgggattggaatgtttcttttaccaattatgt

SEQ ID NO: 1006149 - DNA, 120 bp, Artificial Sequence
  ENSG00000260019_9 (sequence is synthesized)
ccatctcacttgctcagaactttgcctggtgagagcggttacaagcgaacaaggtggaaatgaaagaaaccctgactttcccactaggaaggaagagactgttccttcttgtgatgtact

SEQ ID NO: 1006150 - DNA, 120 bp, Artificial Sequence
  ENSG00000260019_10 (sequence is synthesized)
ctgaagaaaaattctaggatttggacagatttcttgggttataaaacatgattttcttctctgtttcttgggcttttataatgggtactgttgttttcttgcaaagctttaatgattcca

SEQ ID NO: 1006151 - DNA, 120 bp, Artificial Sequence
  ENSG00000260019_11 (sequence is synthesized)
taaggacttgtataaagtttatgggagaattttcaatgtagatgtgaatggcagaaacccaagaatctgtgtgaggttgaataagatcctgtgtctccagagaggtctgatggggagaca

SEQ ID NO: 1006152 - DNA, 120 bp, Artificial Sequence
  ENSG00000260019_12 (sequence is synthesized)
cagatctaaattttaaaggtggtttgggccttctcaatcatatattaaggtccttttatgttatagataagtaaattaaggcccagaaagattaatagcccaaggtcccaagacctgctt

SEQ ID NO: 1006153 - DNA, 120 bp, Artificial Sequence
  ENSG00000260019_13 (sequence is synthesized)
gagacctgtgccccatttctgactaatattcttcatgatattgtatcactctgtatcaaaaccaaccaaccaataaaaccaaccaaccaaccaaccaacagaaaacattcaggagagtga

SEQ ID NO: 1006154 - DNA, 120 bp, Artificial Sequence
  ENSG00000260019_14 (sequence is synthesized)
aaatgccgtctgtgcagacagattttccttattttaggaaatggttggagtcagtgcatttgaagttcaatgagtgagctttatcctaaaaaagctgcttccaggcctgatatgttccct

SEQ ID NO: 1006155 - DNA, 120 bp, Artificial Sequence
  ENSG00000260019_15 (sequence is synthesized)
gaaacataaggacattcctcattcaaggctgtttgcaaagatctaaatgaaggctgttattaaacaaacaaaaccccaacctctcactaatgtcagaaatcagaaaatgaattatctaag

SEQ ID NO: 1006156 - DNA, 120 bp, Artificial Sequence
  ENSG00000260019_16 (sequence is synthesized)
tattgtctactgactagctagcactatgcaggtatgagtatcagagttcttctctgctctgtaagctataatcctccaggctctttagcctaggggtagaaaatggagtcctcaccaggc

SEQ ID NO: 1006157 - DNA, 120 bp, Artificial Sequence
  ENSG00000260019_17 (sequence is synthesized)
tgcaagcgtatgcacactgaggaaaggctacttgaggacaaaagagaaagcggcccatctaccagctgggaagagaaccctcaccacaaaccaaattggctgaaaccttgatcttggact

SEQ ID NO: 1006158 - DNA, 80 bp, Artificial Sequence
  ENSG00000260019_18 (sequence is synthesized)
ttcttcttgttttcaaatgtgtatttaaccttgttttcaaatgtatgtttgcaaatgcaagttatcagtttcctctcctg

SEQ ID NO: 1006159 - DNA, 120 bp, Artificial Sequence
  ENSG00000260019_19 (sequence is synthesized)
atgtatgtttgcaaatgcaagttatcagtttcctctcctggatttttctttttaatttttggtgccagcacaggacctctctgtgatacctgtgtatcacaaagcaattcttggaaggct

SEQ ID NO: 1006160 - DNA, 120 bp, Artificial Sequence
  ENSG00000260019_20 (sequence is synthesized)
taggcagtgggcaaggcaaacctcttgggcagttgcaactgtactagagatgatggtggcagaattctccaggccttttgtcgcttctcctttttccatgatgacttcattctctcagat

SEQ ID NO: 1006161 - DNA, 120 bp, Artificial Sequence
  ENSG00000260019_21 (sequence is synthesized)
gactatggtttgaatgagtccactccagaattcaggtgttgaaacttaatggctaatgtgatagtattagagatagggcctttaagaggtgaataggccatgaagcttctttcttataaa

SEQ ID NO: 1006162 - DNA, 120 bp, Artificial Sequence
  ENSG00000260019_22 (sequence is synthesized)
tgaaggctcttataaaagaggcttcatgtggctcccttgcccttctgtcttctgccatgtgaggacacacgattcctcttctctggaggatgcagcaacaaggcatcattttggaattac

SEQ ID NO: 1006163 - DNA, 120 bp, Artificial Sequence
  ENSG00000260018_0 (sequence is synthesized)
gctgccaggcggcgagaacgcgctgggggaacccttggtccgctctgcgcgtcgctctaggatccccgaaaaggagcacgggcgcgaaagcggccaggctgggccaggatctagaaagac

SEQ ID NO: 1006164 - DNA, 120 bp, Artificial Sequence
  ENSG00000260018_1 (sequence is synthesized)
tgcctggcgcaggctccctgcccccgcgggcctgctgtcatggactcgtggagagctcgcttcccgcgcggacccttcctgcaggggtccacgtccaggcaccggcggctcggacacccc

SEQ ID NO: 1006165 - DNA, 120 bp, Artificial Sequence
  ENSG00000260018_2 (sequence is synthesized)
gcggtagctcgttaagatggcgaagtgtccggtccggaacacgcgaaaccccaaatcccgcctgcccgacctcctgacccccggccccacgggacgacagactgggcctcccgacgcgca

SEQ ID NO: 1006166 - DNA, 120 bp, Artificial Sequence
  ENSG00000260018_3 (sequence is synthesized)
gcgcgctgccgggacaccggtgcgtgcgaaacggaggacctttgtaacgccacgtgtttgctctttttgaaaaaacaagaataaatgtgttaaactgtctgaaaagcttgccgcctaaaa

SEQ ID NO: 1006167 - DNA, 120 bp, Artificial Sequence
  ENSG00000288062_0 (sequence is synthesized)
gcagacgtgcatcccttccggcctgagggccctcctggccgtgactcccgccccgctcctcctccaaagagagatcggggccgctgacaggggccctccgtagccatgggggatgggact

SEQ ID NO: 1006168 - DNA, 120 bp, Artificial Sequence
  ENSG00000288062_1 (sequence is synthesized)
ggggggtcggttccagccacggtgcagccgccgccgggcagaccgccgggcttggccgcagccacggcgacatctagccccggttctgcgaggcttgggagcgccagccagcttgggagt

SEQ ID NO: 1006169 - DNA, 120 bp, Artificial Sequence
  ENSG00000288062_2 (sequence is synthesized)
ggccaggcagctgttgccagcaggacagcgcgctgggaagccaggggccgcggggacctggggctggaaaccacatctgcccacagccacagtctcctgcacctgtcatcctggcggcgc

SEQ ID NO: 1006170 - DNA, 120 bp, Artificial Sequence
  ENSG00000288062_3 (sequence is synthesized)
cctggcgtcggagaagcagcagacgcggagctcctgcagctggcaccgctgcagcaaccggtcccggtgcaggcgtcagtggaaggcggcctcctcgcgcggctcccgtggcctcaggac

SEQ ID NO: 1006171 - DNA, 120 bp, Artificial Sequence
  ENSG00000288062_4 (sequence is synthesized)
caggggtgcggccagcaccgccctcacgccccgcacctcgtctacattgtcctccctggaggcggctggacctgagtaaggctcacagcgatcggcccccgcaaggactggcatgcaggg

SEQ ID NO: 1006172 - DNA, 120 bp, Artificial Sequence
  ENSG00000288062_5 (sequence is synthesized)
ctcaggatcccgcactctggccctgcggcaccgcacctttcagcagcagctggaactcctgcagcagcgccttgggtgggatgctggggcccggggttcctggcaggccgaacttcagct

SEQ ID NO: 1006173 - DNA, 120 bp, Artificial Sequence
  ENSG00000288062_6 (sequence is synthesized)
tcttgtcttggcccctgatcctcttcctgttgttgaacctttgtcactctgcaacgaaaagcatccaggcgtccttgatttcggcactgcgtgcacgctcagccgagctcatcggacggg

SEQ ID NO: 1006174 - DNA, 120 bp, Artificial Sequence
  ENSG00000288062_7 (sequence is synthesized)
cggttctccccaggcccgctggcagcttgttccctgggggcggctcctggacgcagctctttgcaggcccaccaggctcaggggagccaaggcccgccgcggccaacaggcctgtggaga

SEQ ID NO: 1006175 - DNA, 120 bp, Artificial Sequence
  ENSG00000288062_8 (sequence is synthesized)
gtaagagtaaggtgggctctgcagggcagcggcccggaaccatgagagaagcgcgtcagtctgggctccaagcgcagcctctcgggattctccgggacccacggcttataatgcgcttaa

SEQ ID NO: 1006176 - DNA, 120 bp, Artificial Sequence
  ENSG00000288062_9 (sequence is synthesized)
atcccacgcctcgcacgagagacagcaagtcaccgtcaccgcctaccgcccctgacccgctcccactctcgctgcagcggagggtgtgtgggagagagagggacgcagggagggaaaagc

SEQ ID NO: 1006177 - DNA, 120 bp, Artificial Sequence
  ENSG00000288062_10 (sequence is synthesized)
gcggggagggcgaacatcttttcataagctttccgccttctatatgccatctctgatgggagcctctttagatcttttgtccatttactaattgggtggcttgaattcttattgttgagt

SEQ ID NO: 1006178 - DNA, 120 bp, Artificial Sequence
  ENSG00000288062_11 (sequence is synthesized)
tgtaagtggtttttaatggtctggatgcaagacaggtgttttacaaatattttcttcctgtctgtggcttgtttcttcattctcttaatatttcctttcccagagcaaaagtttttaatt

SEQ ID NO: 1006179 - DNA, 120 bp, Artificial Sequence
  ENSG00000288062_12 (sequence is synthesized)
gcacccagccaaaattgatacatttaaaatatactatttttaatataaatggaagatggagaatcactatgagtatttcattaatattttgtgggaagcctaataaaaataaaatttcct

SEQ ID NO: 1006180 - DNA, 120 bp, Artificial Sequence
  ENSG00000288062_13 (sequence is synthesized)
gtgagtatacctcacccctccaaatgttgaggcacttctccaaggaacagttctttggctgatttttggtgttttatcttccaccagtagtaaaatgaatgacatgacttatggcccaag

SEQ ID NO: 1006181 - DNA, 120 bp, Artificial Sequence
  ENSG00000288062_14 (sequence is synthesized)
gctttactcagaagcttggtgcctgttaccagcgctgctgggagctcctgaggtagacacaaaggccaggtgtcagggagactacccaagagcaaagagccggagaggggaggcaggtgc

SEQ ID NO: 1006182 - DNA, 120 bp, Artificial Sequence
  ENSG00000288062_15 (sequence is synthesized)
tgttggacaaaattgccatcactaggcaggtgctgtgaatacaacatagatctgagtcagattccatatgcagggtccggggtgagtgcctcggatcactgtctggctggaattctccag

SEQ ID NO: 1006183 - DNA, 120 bp, Artificial Sequence
  ENSG00000288062_16 (sequence is synthesized)
aaacctggtttatacagtgtaattgaaacttgaagcagcatctgatgcacttggggcaaggccgattagaactaggtgattggaacacggtctggctaggaaggaagggaccatgcgcat

SEQ ID NO: 1006184 - DNA, 120 bp, Artificial Sequence
  ENSG00000288062_17 (sequence is synthesized)
cagggcagaaaccgcaggcgggcagatggccattacagcccagcgggctgcccattactctcctccaggcccaggagactaaacacacttgagtcgcaactgcctctggacgtgggaact

SEQ ID NO: 1006185 - DNA, 120 bp, Artificial Sequence
  ENSG00000288062_18 (sequence is synthesized)
gtggtcttgtttccagtcacctatctcagcaagaaggagcttccgttgtgcttgcagacttgaccctactagtctgggctggggagttctgtgtctgcccatggctggtcattattgtct

SEQ ID NO: 1006186 - DNA, 120 bp, Artificial Sequence
  ENSG00000288062_19 (sequence is synthesized)
acaaaacctactgtgtgatctgtaagaatttttatgactagctagctcaagggcatgatgacatgcctatgctattgctgagggaatatctctgttttcaggtgaaggttttttctaatt

SEQ ID NO: 1006187 - DNA, 120 bp, Artificial Sequence
  ENSG00000288062_20 (sequence is synthesized)
ttatgttcagaattacatacaagaggcacagtggaggtatataaatgaagatgaatccaccagcattctttcaaaatactgaaccacactttctggtagacattggggtggagtggctgc

SEQ ID NO: 1006188 - DNA, 120 bp, Artificial Sequence
  ENSG00000288062_21 (sequence is synthesized)
aagcagagtgtctgggttggaattctcattccacagcttcatgctatgcgatagtgagtaacttacttttcctctctgtgtcacagtttcctagtctctaaaaacagataatagtgacct

SEQ ID NO: 1006189 - DNA, 120 bp, Artificial Sequence
  ENSG00000288062_22 (sequence is synthesized)
accttatagactgttatgaagattaaattaatttatatatgtaaataagacttggaacatagattttctgtaaatgttagccattgttattgctcctattgacctgaagtataaaaacag

SEQ ID NO: 1006190 - DNA, 120 bp, Artificial Sequence
  ENSG00000288062_23 (sequence is synthesized)
aaatgtgaccctggtccttgaccttgggtggcatcaccagataagcaatagtttagggaaaaatgtttgtactgggtattttcattattcaaaatattattaataatgtgctattaagat

SEQ ID NO: 1006191 - DNA, 120 bp, Artificial Sequence; identical to SEQ ID NO: 978490
  ENSG00000228383_0 (sequence is synthesized)

SEQ ID NO: 1006192 - DNA, 120 bp, Artificial Sequence
  ENSG00000228383_1 (sequence is synthesized)
cctcgcttcaaaggattcctctgcctgctgatgctgcttttcccccacatgaggagaacatgcagacagttataaaaaattctgtgcctggggtactctcgctctgtagaccaggctgga

SEQ ID NO: 1006193 - DNA, 120 bp, Artificial Sequence
  ENSG00000228383_2 (sequence is synthesized)
gcgcagtggcaggatctcagctcaacacatcctccgcctcccaggttcagcctctgcagtagctgggattacaagcatgcatcaccacgctcagctaatgttttgtatttttagtagaag

SEQ ID NO: 1006194 - DNA, 120 bp, Artificial Sequence
  ENSG00000228383_3 (sequence is synthesized)
gtatttttagtagaagccaggcttcaccatgttggccaggctgctctcctactacagatctcaggtgacccgcccgactcagcttcccaaaatccaaagtgctgggaatacaggtgtgag

SEQ ID NO: 1006195 - DNA, 120 bp, Artificial Sequence
  ENSG00000228383_4 (sequence is synthesized)
actccagtattttttacctaagccagtggacgagtggagttgcctttattttttttttcatggtctcgctgtgtcatccaggctggagtgcagtagtctgatctcggcttactatacaat

SEQ ID NO: 1006196 - DNA, 79 bp, Artificial Sequence
  ENSG00000228383_5 (sequence is synthesized)
ggctggagtgcagtagtctgatctcggcttactatacaatctctgccacccatgttcaggtgaagtgccactaggtctg

SEQ ID NO: 1006197 - DNA, 120 bp, Artificial Sequence
  ENSG00000228383_6 (sequence is synthesized)
gttgcccatgctagtctccaactcctgacctcaagtgacccaccaacctcggcctcccaaaatgtagaaattacaacaagagccacgaagcctggcctggagttgtggctttttgacata

SEQ ID NO: 1006198 - DNA, 120 bp, Artificial Sequence
  ENSG00000228383_7 (sequence is synthesized)
agaaatctgtggagggaaaagcttggtttgtgggagcacctgagctcagtttggctcaaaggtttgggatacctattattgagtggcagtgatggtatgttgttaatgtacaatatcttc

SEQ ID NO: 1006199 - DNA, 120 bp, Artificial Sequence
  ENSG00000228383_8 (sequence is synthesized)
ctgtatatagcatacgtctatgctcatcagatattttcaggtaaaaaaagatagtctttccagtagtttgagccattatagcaatttccaccaggggatttcaaagtccaattccagttg

SEQ ID NO: 1006200 - DNA, 120 bp, Artificial Sequence; identical to SEQ ID NO: 978497
  ENSG00000228383_9 (sequence is synthesized)

SEQ ID NO: 1006201 - DNA, 89 bp, Artificial Sequence; identical to SEQ ID NO: 978498
  ENSG00000228383_10 (sequence is synthesized)

SEQ ID NO: 1006202 - DNA, 120 bp, Artificial Sequence; identical to SEQ ID NO: 978499
  ENSG00000228383_11 (sequence is synthesized)

SEQ ID NO: 1006203 - DNA, 120 bp, Artificial Sequence; identical to SEQ ID NO: 978500
  ENSG00000228383_12 (sequence is synthesized)

SEQ ID NO: 1006204 - DNA, 120 bp, Artificial Sequence
  ENSG00000228383_13 (sequence is synthesized)
acaattatggattaattaaaagattacacaacccatatattatgggtttctcatttaagtgtatatatacatgggcaaactcacagtgtgccagtatgtgtctatatccaaatatataca

SEQ ID NO: 1006205 - DNA, 120 bp, Artificial Sequence; identical to SEQ ID NO: 978502
  ENSG00000228383_14 (sequence is synthesized)

SEQ ID NO: 1006206 - DNA, 120 bp, Artificial Sequence; identical to SEQ ID NO: 978503
  ENSG00000228383_15 (sequence is synthesized)

SEQ ID NO: 1006207 - DNA, 120 bp, Artificial Sequence; identical to SEQ ID NO: 978504
  ENSG00000228383_16 (sequence is synthesized)

SEQ ID NO: 1006208 - DNA, 120 bp, Artificial Sequence; identical to SEQ ID NO: 978505
  ENSG00000228383_17 (sequence is synthesized)

SEQ ID NO: 1006209 - DNA, 81 bp, Artificial Sequence; identical to SEQ ID NO: 978506
  ENSG00000228383_18 (sequence is synthesized)

SEQ ID NO: 1006210 - DNA, 120 bp, Artificial Sequence; identical to SEQ ID NO: 978487
  ENSG00000228383_19 (sequence is synthesized)

SEQ ID NO: 1006211 - DNA, 120 bp, Artificial Sequence
  ENSG00000228382_0 (sequence is synthesized)
gttttcagagtaccctgctgtggccttggaaacagaaaacccacacagaggtcaaacgcagttctcgtggagtcaccttgtcatcctgctttgttttggaaggaactgggtcggaggcag

SEQ ID NO: 1006212 - DNA, 120 bp, Artificial Sequence
  ENSG00000228382_1 (sequence is synthesized)
cacagtaggactacagcatctttaacccttgtgcctagcagagttccacatacatgaaataagatgctttgggaaatcattcttctttttgcaacgtcagtgacttgaaccagaaactga

SEQ ID NO: 1006213 - DNA, 120 bp, Artificial Sequence
  ENSG00000228382_2 (sequence is synthesized)
tattgactcacttgggctctgactctttccaagttacacatctgggggcctaaggaactgccccatgagttcccggagctgcgatgggcatgggacgggaagctttgtaagcaattaatc

SEQ ID NO: 1006214 - DNA, 120 bp, Artificial Sequence
  ENSG00000228382_3 (sequence is synthesized)
ctggccacgatcaggccctctgaaagtgcctagttggatgcttgccaatctgctatgccttggaggaaaaaatcatttcaatttaagaaaatagacacagaagcaaaaaaccaaagtgag

SEQ ID NO: 1006215 - DNA, 120 bp, Artificial Sequence
  ENSG00000228382_4 (sequence is synthesized)
cctggaaggtttgcctgtctgtgacagtctacagagcagctgtttgtgcctgtcacctgctcaggctctcacggtgactgcatggggagggcagggtgtgtgcattgatacctgccgtgc

SEQ ID NO: 1006216 - DNA, 120 bp, Artificial Sequence
  ENSG00000228382_5 (sequence is synthesized)
ccagtgtacgccgaggtttgcccatgctgcagctggaaggctgcagaacaaaggttcgttccaacctctacacttgaattgcattctgcgtcatcatcctgccttctagaacaacatcca

SEQ ID NO: 1006217 - DNA, 120 bp, Artificial Sequence
  ENSG00000228386_0 (sequence is synthesized)
gttaagcctgcaggttctccaatgcatccagttatgaatcccttccctctccttgcacaaggccagttcagaaacctgactctgcactccgtagaggagaaaaccttcccattgatccca

SEQ ID NO: 1006218 - DNA, 120 bp, Artificial Sequence
  ENSG00000228386_1 (sequence is synthesized)
aatgatgattgatctctcccattagagcctgctcaccccttagggaacttggaaaggagatgagaaagcaagagaaagtaaaagcaagcagagcatccctctccaccccctgcacctgcc

SEQ ID NO: 1006219 - DNA, 120 bp, Artificial Sequence
  ENSG00000228386_2 (sequence is synthesized)
ccacaggttttaaagaatttcctccagtctttgaacagctccagggagacagcctgagctcccgttcagtctgtagaaggttctttctctagataagtgtttcccaacctggctacacaa

SEQ ID NO: 1006220 - DNA, 120 bp, Artificial Sequence
  ENSG00000228386_3 (sequence is synthesized)
cagaaggactcaaggaattcattaaaaacatcagtttctatgcctgaccccagagattctgatttggaacacatgcagtagctttggctttcttgtgctaaaatgttcttcccaccatct

SEQ ID NO: 1006221 - DNA, 120 bp, Artificial Sequence
  ENSG00000228386_4 (sequence is synthesized)
ctgccaactgaactcctgaatctttaaggacaagctcaaatgctaccagcttctagaagcttccaagatttcttccagttagttctctctcaagaattccagtaaatttccagagcactt

SEQ ID NO: 1006222 - DNA, 120 bp, Artificial Sequence
  ENSG00000236255_0 (sequence is synthesized)
cggaccaagtgccccctgcactttcaacgccgtaggtctcccggcagccctggaaggacagtcttacccggacgccacggtggtctcccggcagccctgggaaggacagtcttacccgga

SEQ ID NO: 1006223 - DNA, 120 bp, Artificial Sequence
  ENSG00000236255_1 (sequence is synthesized)
cgccacggtggtctcccggcagccctgggaaggacagtcttacccggacgccacggccgagctgcccttccctccctgctgcccccagggaaggctgctggtgtcctcagatgcgggcag

SEQ ID NO: 1006224 - DNA, 120 bp, Artificial Sequence
  ENSG00000236255_2 (sequence is synthesized)
gaggaacccgccagcgcctgagagcctggcccgaaccaggcctggaggtgctggggcgaagacacagaggatgtggcctccatccctggtaacagacggttaccagggcggctttgggtg

SEQ ID NO: 1006225 - DNA, 120 bp, Artificial Sequence
  ENSG00000236255_3 (sequence is synthesized)
aggacattgaaaaaggtcagactccctgggagcagcgccctggactccattctcatcacagaccagtggttcccaattgaagtcagttttgctcctcagggcacacttaacaacatctgg

SEQ ID NO: 1006226 - DNA, 120 bp, Artificial Sequence
  ENSG00000236255_4 (sequence is synthesized)
ttaattgtcctgaccgagaggacaatgctactggcatctagtggacagaggccagggatactgctgaacatcccgcagtgcacaggacgcctgcaacacagattatccagccccaaacgt

SEQ ID NO: 1006227 - DNA, 120 bp, Artificial Sequence
  ENSG00000236255_5 (sequence is synthesized)
caatagtgccggagttatggaaccctaatgaagacaattcttgaaggcatagactgaatcttatttatctttgtttccctcatgtctcacaagcagagtatgagttcagcaaataggagt

SEQ ID NO: 1006228 - DNA, 120 bp, Artificial Sequence
  ENSG00000236255_6 (sequence is synthesized)
tgaacagaaatcaggaggaggtgctgattgacaggaaaaaagaaagatttagtttagagctgagaattcagctggacagccataggggctctggcatggagactggaagtcagaagagaa

SEQ ID NO: 1006229 - DNA, 120 bp, Artificial Sequence
  ENSG00000236255_7 (sequence is synthesized)
tttgcagcaagacatttagagccatttatccagccatcataattttattgagtaactattttgtgtgaggcactgtactggatgctttggcaacagagataagcaaggcaacccctgtga

SEQ ID NO: 1006230 - DNA, 120 bp, Artificial Sequence
  ENSG00000236255_8 (sequence is synthesized)
cttgaggaaagaaaggtcggagtgtaggggaagagtgggacaaacacgcgacccagtcatgccgagagcatgcgctgagggggacgtggagcgaggagtggggctccaggctgctgaggc

SEQ ID NO: 1006231 - DNA, 120 bp, Artificial Sequence
  ENSG00000236255_9 (sequence is synthesized)
gcgcggtttgctcagccctagggccgggcgctttcccgctccctgaccgcctcctgttcctccgcaggccgagctgcccttccctccctgctgcccccagggaaggctgctggtgtcctc

SEQ ID NO: 1006232 - DNA, 120 bp, Artificial Sequence
  ENSG00000236255_10 (sequence is synthesized)
catctcttctgagcggagcctgtgggaacccagaggatggacacccagcgtggtctgaggaatcatgggccaaaacaggaggcatcaggagagatctcttgggatccatggaaagctcct

SEQ ID NO: 1006233 - DNA, 120 bp, Artificial Sequence
  ENSG00000236255_11 (sequence is synthesized)
cctccttcctgttcccctggatgccaagcgatgggcctgagaccctggctttgccatgtggatgctccccctcaggactttggatgtgcagtgattgctacaaaaagggcaatgaagatg

SEQ ID NO: 1006234 - DNA, 120 bp, Artificial Sequence
  ENSG00000236255_12 (sequence is synthesized)
cctggaccacagccacacagtctccatcacagcagtggtattctgtggaatgagtactaattttctggccacattttctgttaaaaactggttgttgagctgcccacttgtcttggtcaa

SEQ ID NO: 1006235 - DNA, 120 bp, Artificial Sequence
  ENSG00000236255_13 (sequence is synthesized)
gggatgctggagtggcctgggaaggcagtgttgtttgcttttcttaggatggaacacacttaggcatatttttggtcaaagcaaaagaagaattcaaagttaaaggactcacttgtacgt

SEQ ID NO: 1006236 - DNA, 120 bp, Artificial Sequence
  ENSG00000236255_14 (sequence is synthesized)
gtacacatttctcaggagtcctgtcaaccactgggaagaaagaggctggacttctgcattgaacccaggaacggggtttcacagcaatggaaacctggggttaaatatcaatggaacctt

SEQ ID NO: 1006237 - DNA, 120 bp, Artificial Sequence
  ENSG00000236255_15 (sequence is synthesized)
acatgacttgaagaatctttaatacaagctaggttttgaccccaaattagacatttggcagcctctcattacagtctatcttgcaaacctcagtgtggcaaggaatcagattcacccaca

SEQ ID NO: 1006238 - DNA, 120 bp, Artificial Sequence
  ENSG00000236255_16 (sequence is synthesized)
ctccctagtctaaaggattgtcctctgatccttccaggtggattaagccctttctaatctgtcatggacagagcaatgtacctgcctttgtttgttttccttaattctttcaagtgcctt

SEQ ID NO: 1006239 - DNA, 120 bp, Artificial Sequence
  ENSG00000236255_17 (sequence is synthesized)
gaatattgcaaatgcctagcgggtctgtagtgagagggtcatgaggcggaggagtgaggtgcgtagcaaggaatagcaggtggggccagagcagtaaaattaaccattgttctatttgaa

SEQ ID NO: 1006240 - DNA, 120 bp, Artificial Sequence
  ENSG00000236255_18 (sequence is synthesized)
gaagggtaggacgcatttttaggttttttggctatttctccttttggtaatagcatctattttctttagagaattatctcttccccctcactcctctcctagtggaggtacaggcatgag

SEQ ID NO: 1006241 - DNA, 120 bp, Artificial Sequence
  ENSG00000236255_19 (sequence is synthesized)
aaaaagctaaaccaatgacatgttctcaaatataacttacaatcccaggagtcatgatgaaatggttgaaaaaaaaaatagttgaagctcactaaccttagcatcacatttcaatgagat

SEQ ID NO: 1006242 - DNA, 120 bp, Artificial Sequence
  ENSG00000236255_20 (sequence is synthesized)
tgtcaaataattcttgtttcccaggcccccagagctgccgagtttctgacttctctaagccaggttcacaagccttcccttcaattctgtgaggatttttttccccatttttcctgaagt

SEQ ID NO: 1006243 - DNA, 120 bp, Artificial Sequence
  ENSG00000236255_21 (sequence is synthesized)
tacgtggtcactttctgttacttgcaaccagagtaacttaattgataaagtcagtgaggaaggaatagaatacaacaaatggcttaaaaacagaaggccaagcgtgatggctcattcctg

SEQ ID NO: 1006244 - DNA, 79 bp, Artificial Sequence
  ENSG00000236255_22 (sequence is synthesized)
tggtggctcacacctgtagtcccaatttaggaggtttcagtcagtagagattgaactactatactctagcctggatgac

SEQ ID NO: 1006245 - DNA, 80 bp, Artificial Sequence
  ENSG00000236255_23 (sequence is synthesized)
caagacaatgagctaacacagaagccatagtggactttcttcaatattttaagaaaggtgaaaaatagcaggaatttaac

SEQ ID NO: 1006246 - DNA, 120 bp, Artificial Sequence
  ENSG00000236255_24 (sequence is synthesized)
gattctgattcagtaggcctttgccagggcagaggtatgtaggtgatgctcacgctcagctaggtttgggagcaaccagactagaacccattcacatacagactcttagtaaatgttttc

SEQ ID NO: 1006247 - DNA, 120 bp, Artificial Sequence
  ENSG00000236255_25 (sequence is synthesized)
tgctctcatcttgcaaagtgaaagtgcccagcacaggcaatggtgttagtacgttgtagtcattcacaaactagggctgcccagaagagagacaggctgggactttcgagagagaaacag

SEQ ID NO: 1006248 - DNA, 120 bp, Artificial Sequence
  ENSG00000236255_26 (sequence is synthesized)
ctgtttcatttgaatgcctggtgtgggaagaagaaggacagcctagcttcatggaaccttcttgcaccaaacaaagcctccagatccctccacagtgctccattcaatccctgtccattg

SEQ ID NO: 1006249 - DNA, 120 bp, Artificial Sequence
  ENSG00000236255_27 (sequence is synthesized)
gtggtggaccaaagaagaaaccaatttgccttggccacatgtctttgagaaaaaaagccactctcccttctgggactcagagcatctgtacctgtaatataagaggggaatgtggaaaat

SEQ ID NO: 1006250 - DNA, 120 bp, Artificial Sequence
  ENSG00000236255_28 (sequence is synthesized)
aagaggggaatgtggaaaattctaactggatgatcacttttctgtggagggaaaaacacattttttgttttaaggggctagccagcatcaaacctttttttgagatggagtctcgctctg

SEQ ID NO: 1006251 - DNA, 120 bp, Artificial Sequence
  ENSG00000236255_29 (sequence is synthesized)
cattatctattcttcctcagctacaaagcccctgatttcacctaggcacatggctgcccaaaaaagacaaccctgtctggccccccttaaacctgattgtagctatctaagttgtagcca

SEQ ID NO: 1006252 - DNA, 120 bp, Artificial Sequence
  ENSG00000236255_30 (sequence is synthesized)
atgaggtgtcagaggaagtaccatgcagtgcaacttcttaagtagcctagaaagatggggtcacatccccctgggttgtttccttctttgtgtcattttgatctctctcgctggaaaaca

SEQ ID NO: 1006253 - DNA, 120 bp, Artificial Sequence
  ENSG00000236255_31 (sequence is synthesized)
gaaatgatgtctggagtgtaagcagccatcttgggctaggagactacatgctgacatggtgacacaccacccagaaagaatctgagtagtcgatgatcacagagctaccatatcagcact

SEQ ID NO: 1006254 - DNA, 120 bp, Artificial Sequence
  ENSG00000236255_32 (sequence is synthesized)
agactctctacctccacattttatttgtgtgacatagaaataaagtttaagctttgttttttctggggtgtatgtgtgtacacatgtgcgtctctgtctgtctcacatgcagtgagacct

SEQ ID NO: 1006255 - DNA, 120 bp, Artificial Sequence
  ENSG00000236255_33 (sequence is synthesized)
aagttgaagataaaaaggggaaaatgagggtagcagatgaagcaaagtcacacagaaagctggcaggcgagtagtagaatcagagtacaggctgagcatcccaaatctgaaaatccaaaa

SEQ ID NO: 1006256 - DNA, 120 bp, Artificial Sequence
  ENSG00000236255_34 (sequence is synthesized)
tcggaagtgctccaaaacctgaaacttttggagcaccaacacaatgctcaaagtaaatgctcagtgaagcattttggatttcatattttcagatttgggtttgcccaaccggtgtaatac

SEQ ID NO: 1006257 - DNA, 120 bp, Artificial Sequence
  ENSG00000236255_35 (sequence is synthesized)
aaaaaaaaaaaaaaaaaaaatctaaagtctgaaacactcctggtcccaagcattttgaatacaggatactcaacctgtatgacactttcctattggaccctctttcctaccccaaataat

SEQ ID NO: 1006258 - DNA, 120 bp, Artificial Sequence
  ENSG00000236255_36 (sequence is synthesized)
tcctaccccaaataatacttaataagtttttgtttcaaaagtgccactctgagcatctttggctataaggagcagagtcacattctagctcccctggcacctgcttcacaggagcccatg

SEQ ID NO: 1006259 - DNA, 120 bp, Artificial Sequence
  ENSG00000236255_37 (sequence is synthesized)
tgagaagaccaggttctggtcaggacaggcatacctgagagctgttggggtctgtgatctgctgaaaaatgacttctcaatgttcttcacatcctaatcctcagaaactgtgaatatatt

SEQ ID NO: 1006260 - DNA, 120 bp, Artificial Sequence
  ENSG00000236255_38 (sequence is synthesized)
actttatatgacaacagggattttaaagatgtgattaagtaaatagtttggagatggacagattatcctggattatccagatgggcccaatgtaaacacaagggccctcatgagagggag

SEQ ID NO: 1006261 - DNA, 120 bp, Artificial Sequence
  ENSG00000236255_39 (sequence is synthesized)
gcaagagggtcagagaagatgctgtgacagcagaagcagaggacagagagtcgcagagagatttgaagatactacacagctggctttgaaaatgcaggaaagggccatatctgttgcttc

SEQ ID NO: 1006262 - DNA, 120 bp, Artificial Sequence
  ENSG00000236256_0 (sequence is synthesized)
cttctactccttctgctatgcgagaacacagcgtttgtccatttcacaatgtgaggatacagcaagaagtgtcatcttggaagcagagagcaaacactcatcagacattaaatctgacag

SEQ ID NO: 1006263 - DNA, 120 bp, Artificial Sequence
  ENSG00000236256_1 (sequence is synthesized)
caccttgatcctggacttcccagcctctagaaattgtatgcaatggtatgaggaactgttccacattaaaggagactaagaagacataacaactcgatgcaatgtgtgattctggactgg

SEQ ID NO: 1006264 - DNA, 73 bp, Artificial Sequence
  ENSG00000236256_2 (sequence is synthesized)
aagacataacaactcgatgcaatgtgtgattctggactggatcttgcattggaggagaaaatgctataaaagt

SEQ ID NO: 1006265 - DNA, 85 bp, Artificial Sequence
  ENSG00000236256_3 (sequence is synthesized)
cctccgcctcccggattcaagcgattaacacgtgccaccatgtccagcatatatatatatatttttgtagagatggggtttcacc

SEQ ID NO: 1006266 - DNA, 120 bp, Artificial Sequence
  ENSG00000236256_4 (sequence is synthesized)
cctttttttctctatgtttctctgactcaacctttgacacttagaaggtagcacacttccaacatatccttccgtcttccaagatatagtccatacaactttccatagttcgaatgttta

SEQ ID NO: 1006267 - DNA, 120 bp, Artificial Sequence
  ENSG00000236256_5 (sequence is synthesized)
tcccccaaacctcatgttgaaatttgatccccaatgttggaagtggggcccgatgggaggaatttgggtcatggaggtggatccctcatgaatgacttgatgtcctccttgtggtaatga

SEQ ID NO: 1006268 - DNA, 120 bp, Artificial Sequence
  ENSG00000236256_6 (sequence is synthesized)
gtgagttcttgctccattagttcctgagaaagctggttgtttaaaaacaaaaacaaaaacctgtaagctcccttccctctctctttcttgtcatttggtctctgcacatgccagctcccc

SEQ ID NO: 1006269 - DNA, 120 bp, Artificial Sequence
  ENSG00000236256_7 (sequence is synthesized)
ttctccttctgccataaatggaattaacctaaagccctcaccagaagcagacgctggcactgtgcttcctgtgcagtctgcagaaccgtaaaccaaataaatctcctttcgttataaatt

SEQ ID NO: 1006270 - DNA, 120 bp, Artificial Sequence
  ENSG00000236256_8 (sequence is synthesized)
atgaatctgtatctgcaccctaagttatggccacagttagcaggaactaaaaccttacatgtggctgatgctcagagagtgaggaaaatcacagttcatgatggcatttgggacgcagag

SEQ ID NO: 1006271 - DNA, 120 bp, Artificial Sequence
  ENSG00000236256_9 (sequence is synthesized)
actataggagtctttagaagaagcaaccagccggactgtcttgaaacgcgatcagaaaaagccaagaatagagatggggttgttcaggaaaaatctgtgaggaccctcttttctgaatgt

SEQ ID NO: 1006272 - DNA, 120 bp, Artificial Sequence
  ENSG00000236256_10 (sequence is synthesized)
gtgaatcaatgtgacatacgtagaagacccacaagatttttgagaatgttctaccatcagaaacacttccaactgggcctaaaagggacagagacagaaaaaaatgaaagaagattgtga

SEQ ID NO: 1006273 - DNA, 120 bp, Artificial Sequence
  ENSG00000236256_11 (sequence is synthesized)
aaaggtttactgccatattttgaagagatagatagcatttccagcttccactcctctcattttaatgggcaacaagaaaaggaactaccaggagtaaggttcaaattttaatacacagaa

SEQ ID NO: 1006274 - DNA, 120 bp, Artificial Sequence
  ENSG00000236256_12 (sequence is synthesized)
gaggtgtatctaaaggtttaatgaaaattgaagggtcagaagtacattcatgtccagggatcaccaatgaggaaatgtgcagcagagctgataatattgtgtaggagaacagacaaggaa

SEQ ID NO: 1006275 - DNA, 120 bp, Artificial Sequence
  ENSG00000236256_13 (sequence is synthesized)
atgaccaaggtgcttcccaaccactgccactgtctgcattcgagtttcgttttacctctggacatttgctttggctgctgccacttggaatgactgccacagctaaatcgagtgatattt

SEQ ID NO: 1006276 - DNA, 120 bp, Artificial Sequence
  ENSG00000236256_14 (sequence is synthesized)
ttaaccctatgtgttcatggaggcactccagctacaaaccaaaggaaatcccaatttagattacttggaatcagtactataaaattatgcagtttgtgaatatattcttggtgtttcaca

SEQ ID NO: 1006277 - DNA, 120 bp, Artificial Sequence
  ENSG00000236256_15 (sequence is synthesized)
gttgacaacactatattcccttgagtaccaaactcacagaaaccccatggaatgatctctctctccaagtacagtttttctggaatcagtatgaggtgtgagactaatcagacaagggct

SEQ ID NO: 1006278 - DNA, 120 bp, Artificial Sequence
  ENSG00000236256_16 (sequence is synthesized)
ttagcaaatgtgcatttttaaaataaacagcctagaaaaattatggcagttcttttatggcccagaataacatgttttcacttatcagctgcttaacagagaaatgaattgatacaaaaa

SEQ ID NO: 1006279 - DNA, 120 bp, Artificial Sequence
  ENSG00000236256_17 (sequence is synthesized)
catcattggaacatggatggttgattagatggaagtattacattaatgatacatttcctgaatttggtaactttgctattgttacctacaagaataatcttgctcttaggaaacagtaat

SEQ ID NO: 1006280 - DNA, 120 bp, Artificial Sequence
  ENSG00000239205_0 (sequence is synthesized)
aattttgtcagagccattctagccttctgagccataaacaggagttctgcattagaaacttgaaggccactacctgttctgttgaagctgatattagaacaagtggtctttattccaaca

SEQ ID NO: 1006281 - DNA, 120 bp, Artificial Sequence
  ENSG00000239205_1 (sequence is synthesized)
cctgttcgtctctcaattctaagagccatgcacctgctaggattattgaagaagttggaaatacagaaaaatatacagtgaaatatttaaataattaggaagattataaaccaaagttaa

SEQ ID NO: 1006282 - DNA, 120 bp, Artificial Sequence
  ENSG00000239205_2 (sequence is synthesized)
gtgcttctatttaattttttaaatgtacacatgcctatctatccatatgtagctatatatttaaatactttgaatcaaattcttagtcttattttacttaaattatacatgcacattttg

SEQ ID NO: 1006283 - DNA, 89 bp, Artificial Sequence
  ENSG00000239205_3 (sequence is synthesized)
aaaattacttaaatatacttttaattattataccgtatatactcttatttatgtaagagacaagttttactatgttgcccaggctggcc

SEQ ID NO: 1006284 - DNA, 88 bp, Artificial Sequence
  ENSG00000239205_4 (sequence is synthesized)
acacaaccatgcccagcttaattaatactttaaatgtttaacgtatataatttgatgataaaaaatacagacttagagtctacgaaca

SEQ ID NO: 1006285 - DNA, 120 bp, Artificial Sequence
  ENSG00000239205_5 (sequence is synthesized)
aatttgatgataaaaaatacagacttagagtctacgaacatgtaacattattatagacctagtaggagttcctgtttgctatgctacattactttttgtaagatatgtaaaggcatataa

SEQ ID NO: 1006286 - DNA, 120 bp, Artificial Sequence
  ENSG00000239205_6 (sequence is synthesized)
atatattttacaaatggtagggccaaaactagggtgaggtaagcaaggtgtctcaggcacaaaatttcaggaggtcctcactctccattgcaaatgctgaccctgaccttccatgaacct

SEQ ID NO: 1006287 - DNA, 120 bp, Artificial Sequence
  ENSG00000239205_7 (sequence is synthesized)
gagagtgaatgtttcataaaaatttgcaccaggtgccttgtttgcctcaccctagtcctgaccctgacaaatgataatcctaagtttttgagtatcctaaaaatatactgtttaagatgt

SEQ ID NO: 1006288 - DNA, 120 bp, Artificial Sequence
  ENSG00000239205_8 (sequence is synthesized)
agtcaatatattctgttcctaaaatctaagcactaaattaacagtttgaaggcattctttgtaaataattatttcgcatttgaaaataatttaggatatttaaattatttttaagataat

SEQ ID NO: 1006289 - DNA, 120 bp, Artificial Sequence
  ENSG00000239205_9 (sequence is synthesized)
ctgtgtatcttattttaacctgtaggggtagaacagtttcttctacattttggcactgattctaccaagtgtgttcttaattttaggtccttctgcttgcaccctcaatactgtaaccat

SEQ ID NO: 1006290 - DNA, 120 bp, Artificial Sequence
  ENSG00000239205_10 (sequence is synthesized)
tagacaaatgtcttaggtagaatgatcaacactcattacctttacttcttaatctgccgctaatttctaaatgtgagtaatatccagttctcaaaaccaacataaaatgtgctgtcttgt

SEQ ID NO: 1006291 - DNA, 120 bp, Artificial Sequence
  ENSG00000239205_11 (sequence is synthesized)
ctttacctttcctctctgcaacactgggctgtttgatggtacctcttgcaatcccattcttcttgcctggcttctttctctaaggcagttccatcaagactgtctttgtatcgcgaagcc

SEQ ID NO: 1006292 - DNA, 120 bp, Artificial Sequence
  ENSG00000239205_12 (sequence is synthesized)
cacatcctcttagttttttgtttgcttgtttgctttcctattttgtttattttgtgttcatttcttttgcttttcttgtagcagcaatagacatagagtgatatttgaaattgtgaagtg

SEQ ID NO: 1006293 - DNA, 120 bp, Artificial Sequence
  ENSG00000239205_13 (sequence is synthesized)
gtatattgaaaggtttttttgtgtgtgtgtgggagaaatacttggtagtgaaaagtggaaaaagtaaagaaaaactagatgaactaagattacagaaaaatctttgggaggccgaggtgg

SEQ ID NO: 1006294 - DNA, 80 bp, Artificial Sequence
  ENSG00000239205_14 (sequence is synthesized)
taaaaataaattagccaggtgtggtggcattcgcctgtagtcccagcaggagaatggtgtgaaccagggaggcggagttt

SEQ ID NO: 1006295 - DNA, 66 bp, Artificial Sequence
  ENSG00000239205_15 (sequence is synthesized)
taaaaataaattagccaggtgtggtggcattcgcctgtagtcccagcaggagaatggtgtgaacca

SEQ ID NO: 1006296 - DNA, 120 bp, Artificial Sequence
  ENSG00000245059_0 (sequence is synthesized)
atccgctccgggcgctgccgccggaagggccagcgacggagggtctcagatggcggggcttgaggcccacccgggctctcgggtcggcgagtcccgttggggagcccttgtgcctgctag

SEQ ID NO: 1006297 - DNA, 120 bp, Artificial Sequence
  ENSG00000245059_1 (sequence is synthesized)
gatatttagcagatgccaggcggccagaaacgtcctcacttttctccctcggccctctggggaaccgccgtgagcgtttcccacggacacaaacttaacaggcccagaacgtccagggag

SEQ ID NO: 1006298 - DNA, 120 bp, Artificial Sequence
  ENSG00000245059_2 (sequence is synthesized)
gacgcgttgtgagcctcaaagagcccacttacgtgaccgacagcaccaggccgacgggcactcgctgaactgctggcccggagcagcacagctcttaagtgggcagtggcatcttttata

SEQ ID NO: 1006299 - DNA, 120 bp, Artificial Sequence
  ENSG00000245059_3 (sequence is synthesized)
caaataaaggaaggtggccccacgtccctaaaacaacagcttgctgaagagagatcgcaaagcatcccccactccagctcgggtctgactccaaagcccttctgctttagaaagtgtgac

SEQ ID NO: 1006300 - DNA, 90 bp, Artificial Sequence
  ENSG00000245059_4 (sequence is synthesized)
atctattgaaaacagctgggcaccgtggctcacacctggaatcccagctgaggcaggaggctcccttgagcccaggagttgaaggttgca

SEQ ID NO: 1006301 - DNA, 120 bp, Artificial Sequence
  ENSG00000245059_5 (sequence is synthesized)
aggcaggaggctcccttgagcccaggagttgaaggttgcagtaagctatgattgtgtcactgcactccagcctgggaaacagtgcaagaccttgcatattagaaaaaagtttctgggaag

SEQ ID NO: 1006302 - DNA, 120 bp, Artificial Sequence
  ENSG00000245059_6 (sequence is synthesized)
tataccaaaagtcttaactaagatttgctaaatgaatattaattaaataacctaacggcaagtacatggggaagttggaggatctagaacctgacttccttcacactaactattcctgca

SEQ ID NO: 1006303 - DNA, 120 bp, Artificial Sequence
  ENSG00000245059_7 (sequence is synthesized)
tttagcaggtaaaagcccgatagcatgattgagtggaaacatgaagggacaagggtttggctagttatgtttataaaaagtcaacataggaattgagtcaagataccagaaactctactt

SEQ ID NO: 1006304 - DNA, 120 bp, Artificial Sequence
  ENSG00000245059_8 (sequence is synthesized)
atagtaagatcccactttgcaaaaacggagaatggaagcgtacagaactgtaccttctcctcaattttgctgtgactgtaaacttcctctaacacataaaatgtattttaaagaaaaaaa

SEQ ID NO: 1006305 - DNA, 120 bp, Artificial Sequence
  ENSG00000236197_0 (sequence is synthesized)
cttctcagtcctgccaacagctgtgagtgagcatggacgcagatcctctcccagtggagcatttggatgaccacggctctggctaacacctcacttacagccttgggagagattctgagt

SEQ ID NO: 1006306 - DNA, 120 bp, Artificial Sequence
  ENSG00000236197_1 (sequence is synthesized)
cagaggcatccagctaaattgacccacagacacggcctataaaagccccaggctcagccagagcagagcagatgatggatgaccagctgcagagaagagctaccctttctgctgacagca

SEQ ID NO: 1006307 - DNA, 120 bp, Artificial Sequence
  ENSG00000236197_2 (sequence is synthesized)
gaagatgtcccaacaaccagcagaagagagaagctatccattctagggcctcttctctgctgagagcttcagaaacctgcagagacatcgagactaccagctgcagagtggaacaatcca

SEQ ID NO: 1006308 - DNA, 120 bp, Artificial Sequence
  ENSG00000236197_3 (sequence is synthesized)
ctccagggccacctctctgctgagagctaagaagacaatgagatgacctgcctgctaggaggagcttccctctccagggtctcctttctgctaggagctgaactctcattggaacatcct

SEQ ID NO: 1006309 - DNA, 120 bp, Artificial Sequence
  ENSG00000236197_4 (sequence is synthesized)
ggctgtggaaaggagctaccctctgcaggtctcctgtgtgctgttctattgatcaataaagctccccttcatctcgctcatcctccacttggctctgtacctcatgcttcctagttgcag

SEQ ID NO: 1006310 - DNA, 120 bp, Artificial Sequence
  ENSG00000236197_5 (sequence is synthesized)
gacaagaactcgggacctaccaaatggcagagctaaaagagctataacacaggactgaaacatgccccctgcttgccacattgagggcaaagagaaggagataagatctgtgccttctca

SEQ ID NO: 1006311 - DNA, 120 bp, Artificial Sequence
  ENSG00000236197_6 (sequence is synthesized)
ccagggctgtgactccctctttggggtcctgtggtgcctagtatctccaagcttccaggtgccactgcatttcccggtgccagctggggaagcttcctgcagtgcacctggtctggccac

SEQ ID NO: 1006312 - DNA, 120 bp, Artificial Sequence
  ENSG00000236197_7 (sequence is synthesized)
gtccgattgcacactggctgaaccccatgctccctcacacaccccttgccactccatgcctgacttacccttggcaggtatgggatccaggccagtagtgtcagccaagtaaagcctgcc

SEQ ID NO: 1006313 - DNA, 120 bp, Artificial Sequence
  ENSG00000236197_8 (sequence is synthesized)
aggccaggtaggcagaacaaacccagcgggcctaagcaagacttgggcaaagacatcaccagccagaaaaacaatatcccaagaatcttgtgacactaggcatagtgaagttctttatta

SEQ ID NO: 1006314 - DNA, 120 bp, Artificial Sequence
  ENSG00000236197_9 (sequence is synthesized)
taggcatagtgaagttctttattaatttgtagatttttaacctggaaaattctaatattttcaactattaaaaaagataatccccaaaataatgctttattgtcatgtaaaatattaaat

SEQ ID NO: 1006315 - DNA, 120 bp, Artificial Sequence
  ENSG00000236197_10 (sequence is synthesized)
tattctaagataaaattcattaacttgtctttaagaaactagttcctaaaatgcactttgaactgtatttataatctcactagtcctctacttaattaggaagtggaataaaatatttga

SEQ ID NO: 1006316 - DNA, 120 bp, Artificial Sequence
  ENSG00000236197_11 (sequence is synthesized)
tatattttctttttatatttacaaaagtcaccatttaaattctttgaattttaacatgttatacttttggaggatccactgagacactaaagtgggttcataaagccaaccaaactgtga

SEQ ID NO: 1006317 - DNA, 120 bp, Artificial Sequence
  ENSG00000236197_12 (sequence is synthesized)
tagcacagaaatgtacttcaggagctgtttaggaggagagacttttctttctcctcaaagtgattctcaaatagcaatagagtcctggtgcagtggctcatgcctacaatcgagcacttt

SEQ ID NO: 1006318 - DNA, 120 bp, Artificial Sequence
  ENSG00000236197_13 (sequence is synthesized)
gggaggccaaggtgggagaattgtttgagcccaggagttcaagatcagcataggcaacatagcgagacctcatctctacaaaaaatacagaaattagccaggtgtgccggcatgtgctgt

SEQ ID NO: 1006319 - DNA, 120 bp, Artificial Sequence
  ENSG00000236197_14 (sequence is synthesized)
gttttttgtccagctacttgggaggctgaagtggagggatttcttgaaactgggaggtcaagactgaagtaagccatgatcctgccactatactcctacatgggggaaagagcaagactc

SEQ ID NO: 1006320 - DNA, 120 bp, Artificial Sequence
  ENSG00000236197_15 (sequence is synthesized)
gggatttcttcttggtttggatccactgttgattttaggttacaaaaagatggcagattgcatcttgggcactctcttgtatgactttttggagaagccagttttcatgttgtgagaggc

SEQ ID NO: 1006321 - DNA, 120 bp, Artificial Sequence
  ENSG00000236197_16 (sequence is synthesized)
ctttttggagaagccagttttcatgttgtgagaggcctggcagaggggcccaaatgagttcgctgggaagcggatcacagaaaccatgaggcctataaaagccccaggctcagccagagc

SEQ ID NO: 1006322 - DNA, 120 bp, Artificial Sequence
  ENSG00000236197_17 (sequence is synthesized)
aaaaaaagaaaaaaagaaaaaaaaggcaatagaactgtacctttgctgtgatgctagtctactacaagttggcttttttctttaaattttgaatttttcattttcttttctagttcttca

SEQ ID NO: 1006323 - DNA, 120 bp, Artificial Sequence
  ENSG00000236197_18 (sequence is synthesized)
ccattttggttctggatatagtttccactagaagatgataatgatgataatgataatccccatgcatgcattaataattgggaatgtaattttataatctgaactttaaagacctctgtt

SEQ ID NO: 1006324 - DNA, 120 bp, Artificial Sequence
  ENSG00000236197_19 (sequence is synthesized)
aagattaaagggatttcttgtccttcatatgagacatgacaaggaatgagagttgcattttttaaattctttgtttctctatttgtgtatccaaataatttcataaaacattttataact

SEQ ID NO: 1006325 - DNA, 120 bp, Artificial Sequence
  ENSG00000236197_20 (sequence is synthesized)
actagaagggaaaataatcctttgaaatcttgaacagtgtattttggtgtttccttgattacttaatctgttgcagagattgttataattaaagctacaattttctctgtgttgctataa

SEQ ID NO: 1006326 - DNA, 120 bp, Artificial Sequence
  ENSG00000236197_21 (sequence is synthesized)
taaacagtattcattctggaacatcactcaatttcactaatactaagtactttaaagcaaatcccagacaatatgcgaatacttcagtatgtatctctatgggatagaaaagtctctcca

SEQ ID NO: 1006327 - DNA, 120 bp, Artificial Sequence
  ENSG00000236197_22 (sequence is synthesized)
ctgggtacagtgactttgctctcactcactttggaggagaagtgaactacttttcctgtgtatgaacgacagcagcatgttttcaccactagtgttgccatttggaaacttaagcatgaa

SEQ ID NO: 1006328 - DNA, 120 bp, Artificial Sequence
  ENSG00000236197_23 (sequence is synthesized)
tggaagagtgagtgtgagtggtgagaaatcaaattgatgaactgagttggatagtgtgtatggattctcttatctgccctcctaccctcagtctagatcactggagaggtcaataataaa

SEQ ID NO: 1006329 - DNA, 120 bp, Artificial Sequence
  ENSG00000236197_24 (sequence is synthesized)
acatttctcttgcagttcaaattctggatgagaattcgcttctgcaaattagaagcaattcatctaagataatgaacacagaagcgaagcagaagccattttcctacatcctttcgactg

SEQ ID NO: 1006330 - DNA, 120 bp, Artificial Sequence
  ENSG00000236197_25 (sequence is synthesized)
agtgtaactctggcttcctgattactggattgcagcaagaggagtatattcataacacacagttgcagcaaccatattagctataactggctcttgggtggatcatttctgtactcccta

SEQ ID NO: 1006331 - DNA, 120 bp, Artificial Sequence
  ENSG00000236197_26 (sequence is synthesized)
aagtcattccagcaagaacagcctagaactcatatcttagatcttccaactattttataagcatcaaattctcttgtattaaatatcttcctgttttaaataaatgtaatttttgtttcc

SEQ ID NO: 1006332 - DNA, 120 bp, Artificial Sequence
  ENSG00000236197_27 (sequence is synthesized)
tggactaaatcctgactcacacgctatttgatgtatctgtgtgtctgtggaactaatactaaagtttcatgaaaatcccctttttatgtgtgatacattaatttttctattttacttgtc

SEQ ID NO: 1006333 - DNA, 120 bp, Artificial Sequence
  ENSG00000236197_28 (sequence is synthesized)
ctatttacaattctcttaagtctatagtcactcttaaatttccatgctattctatgtctattcattaaataaaatgctaattgcaatgtttaaaatctacttcatgacccaccaacaggt

SEQ ID NO: 1006334 - DNA, 120 bp, Artificial Sequence
  ENSG00000236197_29 (sequence is synthesized)
tgcaagcttcagttaaaagacactgcttacagcatgatcttattaagagagccgaagtatactgcagaatatcacaactgcattacttatttttcttttattccatcctggtcttcatga

SEQ ID NO: 1006335 - DNA, 120 bp, Artificial Sequence
  ENSG00000236197_30 (sequence is synthesized)
tagacaatcgaagcttttccagctatcatcttattggcctctacctaaataggagacagcattcaggcaagtctccacatagctaaaaaatgttttcaacaaataagcaaaaatggagaa

SEQ ID NO: 1006336 - DNA, 120 bp, Artificial Sequence
  ENSG00000236197_31 (sequence is synthesized)
cagaaaataagaagaagaaaatcgtacgactgacattaaggtttgggggaaaactgctcttgatctaaaaagaatgcaaggtttttttataaaaccattttctgaaagctttcattgacc

SEQ ID NO: 1006337 - DNA, 120 bp, Artificial Sequence
  ENSG00000185332_0 (sequence is synthesized)
agaatacgcatggggacaagcctggggggccgtctgagagtcccccaaccctggatccccacggcagcccccactgttgggtttttcagtggctggtgtgccctgggctggtcacctctg

SEQ ID NO: 1006338 - DNA, 120 bp, Artificial Sequence
  ENSG00000185332_1 (sequence is synthesized)
cattttgctctgctgggagtttgctcctggccctccaacagcgcctcctctgtgaggaggaactcctgttcccgtggctctgctggctctggaggctggagttcccgtgctgggccctcc

SEQ ID NO: 1006339 - DNA, 120 bp, Artificial Sequence
  ENSG00000185332_2 (sequence is synthesized)
cccggccaccccaccaggctctgctgtaggctgggctctcaaggcagctgctccaggaggggccccctaggaagggactgccacactcctgggagcgttcctggccccctccagtgcaaa

SEQ ID NO: 1006340 - DNA, 120 bp, Artificial Sequence
  ENSG00000185332_3 (sequence is synthesized)
tgaccctgggccccaaggctccgaacacccgcccctctgctccaggaaacaggccccggcagaaagccgcctggcctctgtccgagcccgggcacccgggttcacgtgctgggctgcccg

SEQ ID NO: 1006341 - DNA, 120 bp, Artificial Sequence
  ENSG00000185332_4 (sequence is synthesized)
ccaaggagctttcagggcaggaaatgtgatcgggcagctgatttatctccttacctggtctttgttcacagcctggctccggccccccaccctgctgcagggcccgaggacgtctcccca

SEQ ID NO: 1006342 - DNA, 120 bp, Artificial Sequence
  ENSG00000185332_5 (sequence is synthesized)
ggggtccccacctcggtctccttggggggactgtgctgagcccagctgcctctgtgagatgaagataagaaggcgaagacatgaagggcctgcctgggggcagtctggctttcttgcagg

SEQ ID NO: 1006343 - DNA, 120 bp, Artificial Sequence
  ENSG00000185332_6 (sequence is synthesized)
ggggctgcacctggttccctcctccctctcgctggcagcctgcggggtggtgaggatgaaggggctgtggggccggggtgcagggattagagggaggtgactgccatctcttcctcctca

SEQ ID NO: 1006344 - DNA, 120 bp, Artificial Sequence
  ENSG00000185332_7 (sequence is synthesized)
tcgtgtttttcacctcttaagtcaactttagattctcggactcagagttctctcctgacggtggcagggtcctcagatcaccggtgcagacagggccagacagggccaatgtggggaccc

SEQ ID NO: 1006345 - DNA, 120 bp, Artificial Sequence
  ENSG00000185332_8 (sequence is synthesized)
actcagcctgtggcctctgcaggagggaggtcggaggcctcagcagccaccccggccacctcctgaaacagtgaatgtccttcattttcagctggcaagctctgatcttacaacgaggta

SEQ ID NO: 1006346 - DNA, 120 bp, Artificial Sequence
  ENSG00000185332_9 (sequence is synthesized)
tggaactgttcagaaaactttcagcagacgttcgagggaaaacagctcagcttcccatgccccccacctctgccaggagcgaccccatatcccccaaacagaattctggtagcccgggac

SEQ ID NO: 1006347 - DNA, 120 bp, Artificial Sequence
  ENSG00000185332_10 (sequence is synthesized)
cacagggtcttcctgtgcctcccctgccagctctgcatgactttgtcacgtacttgagtgctggctgagatgatgctaccgctaccaaacaggtgggaggccagccccagccccagcccc

SEQ ID NO: 1006348 - DNA, 120 bp, Artificial Sequence
  ENSG00000185332_11 (sequence is synthesized)
agccccaccggggccggagctcccggtgaagaagcgtctgcctggttcgcaggtgtccaggacacaccagtcgcctgactcccggtcaggcaaacgcacacatcaagttcttgcaagcca

SEQ ID NO: 1006349 - DNA, 120 bp, Artificial Sequence
  ENSG00000185332_12 (sequence is synthesized)
ggcttcctggggggcatcgtggggtgtgctgcctgccaggagaccccactcctggtcacggggttccgtcccacacagtggcaggagccatgcatgattcttggctgaagaagaacccgc

SEQ ID NO: 1006350 - DNA, 120 bp, Artificial Sequence
  ENSG00000185332_13 (sequence is synthesized)
acagctatgtggtctgccgcccagcagggaagcccccacatcagccctaagggaacttcccaaagctcagcaggtgcctcttcctgccatccgctaggtcttctcttggcccctctccca

SEQ ID NO: 1006351 - DNA, 120 bp, Artificial Sequence
  ENSG00000185332_14 (sequence is synthesized)
agccttgacccatagctgacacttctagaaaagtctttaccgagaaacggaccggctgcatgggtggtgaggagggcagttgcccagggcctggcatcagaggggcctgtggctaaggct

SEQ ID NO: 1006352 - DNA, 120 bp, Artificial Sequence
  ENSG00000185332_15 (sequence is synthesized)
tgcccagggcctggcatcagaggggcctgtggctaaggctgtcctgaaattcttaatcattttacctctgaacttgcgggtttttgttgttgttttttgaggcagagtcttgctctgtca

SEQ ID NO: 1006353 - DNA, 77 bp, Artificial Sequence
  ENSG00000185332_16 (sequence is synthesized)
tcggcctcttttcctgcctcctaaacaagtggccaggaattctcctcctgcaccgggtccccagattgtgtggcaag

SEQ ID NO: 1006354 - DNA, 120 bp, Artificial Sequence
  ENSG00000185332_17 (sequence is synthesized)
aattctcctcctgcaccgggtccccagattgtgtggcaagccctgcagatggcacaggggactggttcttcctcgtggaaagccaggcccggacacctctcgggcatcgcctgttggggt

SEQ ID NO: 1006355 - DNA, 120 bp, Artificial Sequence
  ENSG00000185332_18 (sequence is synthesized)
gaccctcccacacccagcctggaaccctagccagctcagcctccgtccgctgagaaatcaaggtgaccttgtggctcagccctcagggggcactcaccacacaagagttccctttcaaga

SEQ ID NO: 1006356 - DNA, 120 bp, Artificial Sequence
  ENSG00000185332_19 (sequence is synthesized)
ccccctgttcggggctggggcccccaggaacggttggggcaccttcctggggccctgtttttccccaggagcggggcctgggagctgagggcgtctcatctccccacaggcatctgctgc

SEQ ID NO: 1006357 - DNA, 120 bp, Artificial Sequence
  ENSG00000185332_20 (sequence is synthesized)
tgctcctggctgccactcacccctgtgagatgctgagggcaggatacctgtctgtgcggggcgtgggaaaaagggagaaagcctggcagagggttgggggctaagaagcaaagggcgtgg

SEQ ID NO: 1006358 - DNA, 120 bp, Artificial Sequence
  ENSG00000185332_21 (sequence is synthesized)
aagggccaccgtgcacttttgaagtctctacttgccagtggccaccccacctctccctgccctcatccaaggacggacaggcctggcaggtggaccggagctgtggggcagaagcatccc

SEQ ID NO: 1006359 - DNA, 120 bp, Artificial Sequence
  ENSG00000185332_22 (sequence is synthesized)
aggcctggcctcagaggagggaggccatggtgaaagtggaggctgtctgcatccacctccccagcctttgtcaccgggacctcagcctgaccccaggcccaccccaggctgctcaccgag

SEQ ID NO: 1006360 - DNA, 120 bp, Artificial Sequence
  ENSG00000185332_23 (sequence is synthesized)
gtgggtaccctgcccaccgccagctcagatgcggtgtgtggactcccttctctctgggggtgagcgggagttccctcccctccacatcaggagctgggggagagctggagggccctggga

SEQ ID NO: 1006361 - DNA, 120 bp, Artificial Sequence
  ENSG00000185332_24 (sequence is synthesized)
tccccttgaccctggtcatcagccccagccctgacaggccctgcgtgtgccatgtgtggcctgggtttggagctcagcaccctgcgggaattctattaaatctccgattttatctgaaaa

SEQ ID NO: 1006362 - DNA, 120 bp, Artificial Sequence
  ENSG00000185332_25 (sequence is synthesized)
ggccccaaggctccgaacacccgcccctctgctccaggttaaaatctggattgaaaaagcaagtggggtttgttggcctctcaaaaagtggagcataggccgggtgcggtggctcacgcc

SEQ ID NO: 1006363 - DNA, 120 bp, Artificial Sequence
  ENSG00000185332_26 (sequence is synthesized)
ctagcttggctgagcccgatgcttctcaaggtgaggagggcgtccttgaagcctccggccaccccacaccaagcctggctccggccccccaccctgctgcagggcccgaggacgtctccc

SEQ ID NO: 1006364 - DNA, 120 bp, Artificial Sequence
  ENSG00000232252_0 (sequence is synthesized)
taacacaacaaataactatgtactcaacacccagttgaagaaataaaatcatgacaacagagctggcactttctctttcaagttatgtctttgtgtccatcctgcttccaaattacattg

SEQ ID NO: 1006365 - DNA, 120 bp, Artificial Sequence
  ENSG00000260907_0 (sequence is synthesized)
caaagtgctgggattacaggcatgaccaaatgtgctcctttaccaattgtttctgtctcaggaattggtttcttgttgcactgtgatacacatgaagccatatacctttttcagctcatt

SEQ ID NO: 1006366 - DNA, 120 bp, Artificial Sequence
  ENSG00000260907_1 (sequence is synthesized)
atccccagaatgtatttgtacattattaacacagaatagacacctaataaatatttctaaatttttattgttcttccttgccacaaaacagcaatcacttttttttagcatgatgtacat

SEQ ID NO: 1006367 - DNA, 120 bp, Artificial Sequence
  ENSG00000260907_2 (sequence is synthesized)
gcccttctatcatcttgccctgaactatttatcaaatcttatttcttcccactcccccatttgtttcccgtgctgtggctgtacagaactacttagagctctgtcaactctccatgctat

SEQ ID NO: 1006368 - DNA, 120 bp, Artificial Sequence
  ENSG00000260907_3 (sequence is synthesized)
tttataataatcaacactaatgaaaagaaagggggctttataacagaggcagaactcattatgttctaaaaaatacacgcatgtttcccatgttgaatagtgtcccgcagaaagtcatgt

SEQ ID NO: 1006369 - DNA, 120 bp, Artificial Sequence
  ENSG00000260907_4 (sequence is synthesized)
ccagctggaacccaggaatgttaaactatttggaaacagggtctctgcagataacacttagttaagacaaggtcacaatgcattagggtgggctgtaaagccaatggctgtgtcctttca

SEQ ID NO: 1006370 - DNA, 120 bp, Artificial Sequence
  ENSG00000260907_5 (sequence is synthesized)
ggaaggtcgtgggaacatacagagacctacagggaagacggccatgggacaagggaggcagagtctggagttacgctgcctacagtcacggaatgccaaggacagctggaaaccaccaga

SEQ ID NO: 1006371 - DNA, 120 bp, Artificial Sequence
  ENSG00000260907_6 (sequence is synthesized)
agctaagaaggagattttacctgaaagcctctcaaagaaatcaatcatactcacacctcctttttgaatttctggcctcgtgaatggtgaaaaaataaatttctgtcgtcttaagcccca

SEQ ID NO: 1006372 - DNA, 120 bp, Artificial Sequence
  ENSG00000260905_0 (sequence is synthesized)
agccaccgcgccttgtctctgttatatttatttctctatttaaattgatggatatatgcaaacctgatcattatcatacttatgcctagacacaagagaggcaataaactaatctaagtg

SEQ ID NO: 1006373 - DNA, 120 bp, Artificial Sequence
  ENSG00000260902_0 (sequence is synthesized)
gtaagctccaagcctcggggtctaggaggagagaagggagcaggaatcctccttccgaatgccaaccccgggagggcagggctggatcttccctggtggctgctccacctccagcacgga

SEQ ID NO: 1006374 - DNA, 120 bp, Artificial Sequence
  ENSG00000260902_1 (sequence is synthesized)
gaacatagcccggcacacaatgaggagactgagagaagtaaaggttcattcccgaggagttgagggtaaacccagggtaaacctgtgccttcctgcttaccctcccaccaagctgaaagg

SEQ ID NO: 1006375 - DNA, 120 bp, Artificial Sequence
  ENSG00000260902_2 (sequence is synthesized)
ggcctcatgcacagagaatgaaaaaaggtgatttgactttctgaggagttgacaaggtcactgccaaggtccacacctttgggttaaagcagggcatcccaaactccctgatctgaagga

SEQ ID NO: 1006376 - DNA, 120 bp, Artificial Sequence
  ENSG00000260902_3 (sequence is synthesized)
tcttccgggctgggtacaatacacatttcaatgcctgcccccaggcccagtgaggtgagattccctgcagcttgaatgagattcttcatttggagaaacagggggttaaggctctggagg

SEQ ID NO: 1006377 - DNA, 120 bp, Artificial Sequence
  ENSG00000260902_4 (sequence is synthesized)
ccctgttaaaagcctggggttgggggaacacagggactcccttctcaccaaagggcctgaagtctgaaccaggccatcagaggagaacccggccgttaatcattcactcaatgtgtggta

SEQ ID NO: 1006378 - DNA, 120 bp, Artificial Sequence
  ENSG00000260902_5 (sequence is synthesized)
gagtctaagggccagggcctgtccgtgccctgctgtgcccagctagggagccggggcagctcgggaaggccctgacaagcaattgactccaacttcctacctctgacagccacctgtcct

SEQ ID NO: 1006379 - DNA, 120 bp, Artificial Sequence
  ENSG00000260902_6 (sequence is synthesized)
tgaatcctggggacgggaagctcagtcctcacagggccgacccttcccttgtgggctggctttgcagaacagaggtagcaatgtcaccttccccaatgcaccaggaagggtggtggttta

SEQ ID NO: 1006380 - DNA, 120 bp, Artificial Sequence
  ENSG00000260902_7 (sequence is synthesized)
aagagaggcattttgatgagccaccagggccgactcctgatttattttccccattcgagctccagagtggagactgcgttctctctgccggccctgtggcagagggtgaaggaggtagtg

SEQ ID NO: 1006381 - DNA, 120 bp, Artificial Sequence
  ENSG00000260902_8 (sequence is synthesized)
gctccggaaagaccatattaattagcttaatgagcacttgtgcatttgtgtgcacagacatgggaggcaagtgtgaatctctgtcaccgacatcattaattgctgggggtgcatctcccc

SEQ ID NO: 1006382 - DNA, 120 bp, Artificial Sequence
  ENSG00000260902_9 (sequence is synthesized)
ccacccaaaacctagacacttagagaaatgaatcaggcccagtctgggaacaccattaaaacacttggctgctctgggtgccggtccattgccctgtggctgctggggctctgtccttca

SEQ ID NO: 1006383 - DNA, 120 bp, Artificial Sequence
  ENSG00000260902_10 (sequence is synthesized)
agaagaggctgctgtcaacacacacagtccctgcaggagcagcctccaagctgccttccagcaggggggccccaggccgaagcctggtcctctacagcttaggggagtccctaaggaggg

SEQ ID NO: 1006384 - DNA, 120 bp, Artificial Sequence
  ENSG00000260902_11 (sequence is synthesized)
gagcaggtgtggggaaagcaccttccacccccagcaggagccacacactgagtcgggctgattatttcctgcagtgtgctctctgatgctgggatggagccccagccccaccactcacca

SEQ ID NO: 1006385 - DNA, 120 bp, Artificial Sequence
  ENSG00000260902_12 (sequence is synthesized)
gccctgagcccccacgaagtccctgttccttctgggtgtccctctcctcatctgtaagatgaggctttgctggcacctatggcacatgcccactaggaagatgaaataagatagtgaccc

SEQ ID NO: 1006386 - DNA, 120 bp, Artificial Sequence
  ENSG00000260902_13 (sequence is synthesized)
tgaagcccttagcccagtgcctggcacacaggtaactgtcggcaatgttagattttttttactgagcattgttaacaaagtccctggcacatagtaggcagtgaattaggatttcatgtc

SEQ ID NO: 1006387 - DNA, 120 bp, Artificial Sequence
  ENSG00000260902_14 (sequence is synthesized)
tttcagcaggtggaccttgtgtttggagatctaatccacgtgccatttctcactgacttgatagtttggttaaccaatgtttaaccttttataaataccatttgttcacatctcacctat

SEQ ID NO: 1006388 - DNA, 120 bp, Artificial Sequence
  ENSG00000260902_15 (sequence is synthesized)
cctcaggatccagacgctccctgcctgtctgcgtaggtgagggttcagggcctcctcaagctggttgggccactggtgctcccagtaccataagcaccctgcacgtatgtatgtcatgta

SEQ ID NO: 1006389 - DNA, 120 bp, Artificial Sequence
  ENSG00000260902_16 (sequence is synthesized)
tacgagcatgtatgactcttttcatagatgaggaaactgaggcgcagagacttgcttagacacacagctggcaagcagcggaaaggtctgaccccaggtcatttgtgaccacacacctgg

SEQ ID NO: 1006390 - DNA, 120 bp, Artificial Sequence
  ENSG00000260902_17 (sequence is synthesized)
ttttaactcaagaccctcccaaccaaaatcgagataatttcccctgaaacagtggcaggcacagcacttacaagggtgtgaaggggtccccttgcggctaggcacacctgggtgggtggt

SEQ ID NO: 1006391 - DNA, 120 bp, Artificial Sequence
  ENSG00000260902_18 (sequence is synthesized)
agagcagtatccatacccctggcttctccttgcaccttcattttaacccccattttatcagcaccctctttactccaagcactgggggaaacccagtggggtcagatgcacccgaccagc

SEQ ID NO: 1006392 - DNA, 120 bp, Artificial Sequence
  ENSG00000260902_19 (sequence is synthesized)
aattaaaagcaacactggctcttgcctcactctgaggatcagagacataattggtggggcccagtgcaaactgaaaatgcaataccttttcttcaaaaattaagaatttctagaggtcac

SEQ ID NO: 1006393 - DNA, 120 bp, Artificial Sequence
  ENSG00000260902_20 (sequence is synthesized)
tgcagcatgtgggggtctgagccaagcacagggccctcctcaatgtggggcccagtgtggccacactggttgcatagccatggagctggcccagctcctgctcacagcctggcacagact

SEQ ID NO: 1006394 - DNA, 120 bp, Artificial Sequence
  ENSG00000260902_21 (sequence is synthesized)
gggagcaaaatacatgtttattgagtgagtgaaatggcatgttcacccccaactctgtgaggtggactcaggatcatgaatttgcaggtgggtaaactgaggctcaggaagtttccagat

SEQ ID NO: 1006395 - DNA, 120 bp, Artificial Sequence
  ENSG00000260902_22 (sequence is synthesized)
tcatcctgttctacctgaagcccaggtccctgcctcctaccactcttgtttgcccactgttccatgctgaccccaatcctggcctttgttttcctgatcccagaaagaagggatagttta

SEQ ID NO: 1006396 - DNA, 120 bp, Artificial Sequence
  ENSG00000260902_23 (sequence is synthesized)
ccatgggctggagtttattttatttttgtgttttccaataattgattccaacagttcctacagacagacgtcctgcagaaggaaaacatgttttgctcgctcaaccttcgacttcctcat

SEQ ID NO: 1006397 - DNA, 120 bp, Artificial Sequence
  ENSG00000260902_24 (sequence is synthesized)
ggcaccacagtggtgggggcccatggcctcgaggaaagcgtggggtgacttttcccttggttatttttttccatctcactgttgggggacaacaaaacatgttttcctttttctccaaag

SEQ ID NO: 1006398 - DNA, 120 bp, Artificial Sequence
  ENSG00000260902_25 (sequence is synthesized)
gaaatcggaactttcttattgactactcattgcctaaaactcaccttccttctccgtgataatcttggattggatgagatgtgtaagttaacttcaaaataaaggaatgtccttcatttt

SEQ ID NO: 1006399 - DNA, 120 bp, Artificial Sequence
  ENSG00000260902_26 (sequence is synthesized)
actaaaaggacaaccatcacaaccaaagatttcattcacatggagccaccaacaccactgaaattcaccgtggcttcctcgtcagtctgtgcacacatttgaagtggctttataatttca

SEQ ID NO: 1006400 - DNA, 120 bp, Artificial Sequence
  ENSG00000260902_27 (sequence is synthesized)
agttcacacgtttgctcataatgttacctttttcaaatgcacagggctgagtgaacatacacattgccaatattctggtcaagttgaaatggctgcttagaggtcatggaaacagaatta

SEQ ID NO: 1006401 - DNA, 120 bp, Artificial Sequence
  ENSG00000260902_28 (sequence is synthesized)
ggtgtatggtgtgaggaaggggtcaagaatctttttattcccatgtgaatgtccaatttatccagcaccatttatttaaaacaccctctctcactgtactgttgtgtctcccctattata

SEQ ID NO: 1006402 - DNA, 120 bp, Artificial Sequence
  ENSG00000260902_29 (sequence is synthesized)
aatttggcacttctatacatgttgggctagttctggactttcctttctgttccttgggtctatttttttatctttgcaccaagaccaccctgtcttaattactattgtatccactgaaat

SEQ ID NO: 1006403 - DNA, 120 bp, Artificial Sequence
  ENSG00000260902_30 (sequence is synthesized)
caagaaatcatgctagacttagtaactctcctattgttgaacatttaggttgttgccaatgttttattataacgacttgtgtaatactgagtcatagcaataaagaaacaatcatagttg

SEQ ID NO: 1006404 - DNA, 120 bp, Artificial Sequence
  ENSG00000238158_0 (sequence is synthesized)
catatcatccctgcccattagagtgaacaatattagcaaaggcactgagaaggaataatcttggcctgtttatcgaacgggactattcatttccctggctacgaggattttaaaaagcaa

SEQ ID NO: 1006405 - DNA, 120 bp, Artificial Sequence
  ENSG00000238158_1 (sequence is synthesized)
aagaaatttattggcagatctgatcacccttatgagagagcaatcaagtaagacagcatgtagcccctggaaattgctggaaatcatcatgtggccctaaggagtgccagcctaacgatg

SEQ ID NO: 1006406 - DNA, 120 bp, Artificial Sequence
  ENSG00000238158_2 (sequence is synthesized)
aagcagaaagagggatggcgagatgactgaactgttgagtcaagtcacatccaaagcccatgtggcctctgatcttttcagataaatgagttattaaatattttatttaaaccagtgaaa

SEQ ID NO: 1006407 - DNA, 87 bp, Artificial Sequence
  ENSG00000238158_3 (sequence is synthesized)
catatcatccctgcccattagagtgaacaatattagcaaaggcactgagaaggaataatcttggcctgtttatcgaacgtagacaca

SEQ ID NO: 1006408 - DNA, 120 bp, Artificial Sequence
  ENSG00000238158_4 (sequence is synthesized)
gagcttctgcgtagcgaatgcatctttgtgcagggagggtggtgtaccttaactccacaaaggatcaaagcttctacactcaggacccttctggaccttgccctatgcacctcttcatct

SEQ ID NO: 1006409 - DNA, 120 bp, Artificial Sequence
  ENSG00000261058_0 (sequence is synthesized)
agctgggactacaggcgtgcatcaccatgcccagagtcaagaaaacttttaagctatttacaacttttaacaattgagttaagtatactcaagaacaaaattcagagcatatttgtttct

SEQ ID NO: 1006410 - DNA, 120 bp, Artificial Sequence
  ENSG00000261058_1 (sequence is synthesized)
ttggaaactatttgtgagatgctggccagtacaactttctgctctgatggaaccatgctagatctgcgcttcccactttgtagccagtggtcatgcattgctatggagcattcaaaatgt

SEQ ID NO: 1006411 - DNA, 120 bp, Artificial Sequence
  ENSG00000261058_2 (sequence is synthesized)
ggctaagggaaaattaatagaggacaatgtggttgtgaattttagaaggtcttgaaaagtacagcccacacacgtggtgcttactcagtgctgttacacataaggcggtaaggggaattt

SEQ ID NO: 1006412 - DNA, 120 bp, Artificial Sequence
  ENSG00000213373_0 (sequence is synthesized)
agttgtccttgactgcatggtttctgctggtccaagcaaacttctcctgccacgcctaaccttggagagcaggctggagtgcggtggcaccatcacagctcactgcagcctcagtctcct

SEQ ID NO: 1006413 - DNA, 120 bp, Artificial Sequence
  ENSG00000213373_1 (sequence is synthesized)
gggcttaagggatcgttttgcatcagtctctgggtagctgggcctacaggcgcacaccaccaaacccagctaactttttattttttgtggagatgggggtctctctacattgcccagact

SEQ ID NO: 1006414 - DNA, 120 bp, Artificial Sequence
  ENSG00000213373_2 (sequence is synthesized)
ttggcctcccaaaatgctgggattacagtgatcaatggaggaagtgtttcatggtggacatgggaaactggccagatcaactgctgtcaccttctaagacccagacggggaggaggaatg

SEQ ID NO: 1006415 - DNA, 120 bp, Artificial Sequence
  ENSG00000213373_3 (sequence is synthesized)
tgtcaccttctaagacccagacggggaggaggaatgccagagaagctgcagactctccggccacggagcctgagtggagcagaggtggcccactgtcagccacaggtcaagtgtcagggt

SEQ ID NO: 1006416 - DNA, 120 bp, Artificial Sequence
  ENSG00000213373_4 (sequence is synthesized)
ggggacggggcaggctccaccagaaggcgggggcaggctccaccagaaggcggggccagaccacagggcaaggtggagatgagtctgtggcacccccaggaagtttaccagatttgcccc

SEQ ID NO: 1006417 - DNA, 120 bp, Artificial Sequence
  ENSG00000213373_5 (sequence is synthesized)
agagcttctgaccctttggatctctctgggctgcattcttcagggtcccattgcttctttcttgaaggtggaaggaaatgttcccatcagagccttccaacaggccaccttgggggcttc

SEQ ID NO: 1006418 - DNA, 120 bp, Artificial Sequence
  ENSG00000213373_6 (sequence is synthesized)
tcctgagagctccttgtgcacacaccccttcagggtggcttgggttgcgccctcagaccccagtggggggccgtatggcatcctccttggtcagcaagtgagccacagcagcaggcccct

SEQ ID NO: 1006419 - DNA, 120 bp, Artificial Sequence
  ENSG00000213373_7 (sequence is synthesized)
cacagacctcagcctggggccacaggtcccttctccccatctccgcatctggagaagcaacctgtggagcagccaagagtggcagccctggctctctacagcattcattttcagggcaag

SEQ ID NO: 1006420 - DNA, 120 bp, Artificial Sequence
  ENSG00000213373_8 (sequence is synthesized)
tgttgcccaggctggagtgcggtggcgcaatcatggctcactgcagcctcgaccttctggggtcaagtgatcctcccaattcagcctccaaatttctttaaacaaaaaaaaatgcaagaa

SEQ ID NO: 1006421 - DNA, 120 bp, Artificial Sequence
  ENSG00000213373_9 (sequence is synthesized)
caaatttctttaaacaaaaaaaaatgcaagaaaggcaaaacaagatatttatctgggctgagagggtaaagagaagctctatctttgagctgagacacaaaatggaaagaagaggcagca

SEQ ID NO: 1006422 - DNA, 120 bp, Artificial Sequence
  ENSG00000213373_10 (sequence is synthesized)
gcagcggcagtagcagttctgcctttccaaaccttccctatctaagtgctttcaagatatgctgaaagtcatgaattgaagtgtggttcccacggctttagtccttgtatgaaggtcctt

SEQ ID NO: 1006423 - DNA, 120 bp, Artificial Sequence
  ENSG00000213373_11 (sequence is synthesized)
ttgctagaacttacttcctttccagcccatatggttgacctgggggtccaggcagttctcaagggaaccacaggattccatgtgatctgggatcccagttgatgatccctcttctggtca

SEQ ID NO: 1006424 - DNA, 120 bp, Artificial Sequence
  ENSG00000213373_12 (sequence is synthesized)
caagctgaattggacccaaatctgcaccctaaactcccctcttgccagatcctgcccagtcagtgccgtcccctcagactgggtgggcagcctgggcttcctgctgagacgggacccccc

SEQ ID NO: 1006425 - DNA, 120 bp, Artificial Sequence
  ENSG00000213373_13 (sequence is synthesized)
cctctcttcttgatctcactcccaggaaagacactgaaggagcagaggtgtggacgccacatactggacggggtttcaccatctgctgggacgggacaccctctcttcttgatctcactc

SEQ ID NO: 1006426 - DNA, 84 bp, Artificial Sequence
  ENSG00000213373_14 (sequence is synthesized)
atctgctgggacgggacaccctctcttcttgatctcactcccagaaaagacactgaaggagcagaggtgtggacgcctcatact

SEQ ID NO: 1006427 - DNA, 120 bp, Artificial Sequence
  ENSG00000213373_15 (sequence is synthesized)
agttgtccttgactgcatggtttctgctggtccaagcaaacttctcctgccacgcctaaccttggagagcaggtacccaagcaagccactcctcaggcattttccccacaactagaaatc

SEQ ID NO: 1006428 - DNA, 120 bp, Artificial Sequence
  ENSG00000213373_16 (sequence is synthesized)
cagaggctttggatcttgagaagaacatgaaggaaagatgccaggaagtacagtctggtctgctgatgatgatcaatggaggaagtgtttcatggtggacatgggaaactggccagatca

SEQ ID NO: 1006429 - DNA, 120 bp, Artificial Sequence
  ENSG00000213373_17 (sequence is synthesized)
gtccttgactgcatggtttctgctggtccaagcaaacttctcctgccacgcctaaccttggagagcagtgatcaatggaggaagtgtttcatggtggacatgggaaactggccagatcaa

SEQ ID NO: 1006430 - DNA, 70 bp, Artificial Sequence
  ENSG00000213373_18 (sequence is synthesized)
gaagtgtttcatggtggacatgggaaactggccagatcaactgctgtcaccttctaaagagagggttttg

SEQ ID NO: 1006431 - DNA, 120 bp, Artificial Sequence
  ENSG00000261051_0 (sequence is synthesized)
gtattttttgctaataaaattaagtatcaaattacttttggtgagggatgggcaactgtattgtactgctgataatttgcagtcaggaaaaattttgttttccttctcataacaacactg

SEQ ID NO: 1006432 - DNA, 120 bp, Artificial Sequence
  ENSG00000261051_1 (sequence is synthesized)
ttaagccatgattcagtttactttcacatttttcttgagccaagtatagaatgctattaaattaaattttattggttttaaattataattttagcctgtttcaatctttgtgaaagctaa

SEQ ID NO: 1006433 - DNA, 120 bp, Artificial Sequence
  ENSG00000261051_2 (sequence is synthesized)
ttctatcactcaacataattaagttattctcctcttgggctcgtgccacccaaaatgatgagctagctttcgacaactgagtcttggtaatttacaaaactgttcagaaagacgaaccaa

SEQ ID NO: 1006434 - DNA, 120 bp, Artificial Sequence
  ENSG00000261051_3 (sequence is synthesized)
aatttgaatggcttgctgtgttctgtataaatttataatcgaaagtctgatcatggctacaggtttttttttttttttaacttgttctgtttttcaacaaacaatatacttatttgcaat

SEQ ID NO: 1006435 - DNA, 120 bp, Artificial Sequence
  ENSG00000261051_4 (sequence is synthesized)
taaatgaaaataaagcattgaattctgaagttttagagaatgaccttagagatttttagtggttgtcagccttagcctcctattaaaatcatctgggaactattaaaagcatttaatgtt

SEQ ID NO: 1006436 - DNA, 120 bp, Artificial Sequence
  ENSG00000261051_5 (sequence is synthesized)
gtgaccctacctagacctattaaattccattctctggggtgaagccaggccatcagttattttaaaagttctccaagtgcttctaatgtgcagcacaggttgggagaatctgatctagct

SEQ ID NO: 1006437 - DNA, 120 bp, Artificial Sequence
  ENSG00000261051_6 (sequence is synthesized)
tagcacttaaaggttatagtgctaccactacataacacttctatattgagtttactgtagtatattaatggagctatcttaagtggaaaatgtctgatcaatcattaaatagcaatctaa

SEQ ID NO: 1006438 - DNA, 120 bp, Artificial Sequence
  ENSG00000261051_7 (sequence is synthesized)
gtgaaatctataactaaaatttctatctggaaagacaaaaagaaaaaccaacttctctttgagggtatgctatacccagagacttggctagtgctaaggagggcatggtagacttcccga

SEQ ID NO: 1006439 - DNA, 120 bp, Artificial Sequence
  ENSG00000261051_8 (sequence is synthesized)
ctcagtcactctgttttagcctctaaaccactaggacgtgatttgagaaatttcatgaagcctcaaggtgttctttcaggttatttgtacaatggggaagaaaatatctatagttcaacc

SEQ ID NO: 1006440 - DNA, 120 bp, Artificial Sequence
  ENSG00000261051_9 (sequence is synthesized)
tctttcccatactcatgacagatcacctggcctgtgcttcagtattttacagattgttcatctgtggctgaaaagctcttatcaaaatgctcttacttttattgagctgataaagttgcc

SEQ ID NO: 1006441 - DNA, 120 bp, Artificial Sequence
  ENSG00000261051_10 (sequence is synthesized)
atcctaacttctatccattggttctggctctgcctcctggaggaacacagactatgttgattgtcttttccctgtgttagcaatgcagatggattgtaattttcctaaatctgctcttca

SEQ ID NO: 1006442 - DNA, 120 bp, Artificial Sequence
  ENSG00000261051_11 (sequence is synthesized)
agaaaagatttcaagttttgaaaaccatatcatcatcctgtcctcggtgacacctgtttctctcctttgtcaacatcacctttcacaatgtgtcacctggatagcagatcgaacaacctg

SEQ ID NO: 1006443 - DNA, 120 bp, Artificial Sequence
  ENSG00000261051_12 (sequence is synthesized)
gctataatagtggttctgatagcctcctttgatctcgtcattgtattctagaaatgaagcccaagattttatgtatttttaccgcggtcataccacgttgatttaaaagatcaatgattt

SEQ ID NO: 1006444 - DNA, 120 bp, Artificial Sequence
  ENSG00000261051_13 (sequence is synthesized)
tcaagccaggctggacattaaaatcacttgggagagctttgaaaaaatatagcgatatcctgttttacccttgatcaattaaatcagaatctctggggataaggcccaggtacagtgatt

SEQ ID NO: 1006445 - DNA, 120 bp, Artificial Sequence
  ENSG00000261051_14 (sequence is synthesized)
tttaaaagtacttcaatgaccctaatatgcatctaagtgagttctatccttaaatgtggtttctctcaatttgtaggtaaatacaatattttgttgttgtttgaatgtaaatatcaggct

SEQ ID NO: 1006446 - DNA, 120 bp, Artificial Sequence
  ENSG00000261051_15 (sequence is synthesized)
tttgatctgttctagtttaattttctgataatagtagtcccagaattttcaaatgcaattctttaagattgcaatgaagttagaactcttacgttactgtttatgtccacaaaatgttta

SEQ ID NO: 1006447 - DNA, 120 bp, Artificial Sequence
  ENSG00000261051_16 (sequence is synthesized)
gtccacaaaatgtttagaaaagtttgaaaaggattttgaaaaagattaacagtgttaatatttcttatattgttgggtttatgcataatataatttggttaatatgtatcataaataaaa

SEQ ID NO: 1006448 - DNA, 120 bp, Artificial Sequence
  ENSG00000261057_0 (sequence is synthesized)
gtttaatttcacgtatgtcacaaaacatggtgaaatctctcaccattttcctctcatctgtgggaccagagctgccttttctccctttctccccaacagctctgaacagctgtcctgggg

SEQ ID NO: 1006449 - DNA, 120 bp, Artificial Sequence
  ENSG00000261057_1 (sequence is synthesized)
gactgtaggtttaaagacataagagaattatgtggcagatggccttgattatttgtgtggggcagatggtatgtacggggaaacacagagcgggggcttaggcgggagcttcccttcgtg

SEQ ID NO: 1006450 - DNA, 120 bp, Artificial Sequence
  ENSG00000261057_2 (sequence is synthesized)
ggcagcatcttgcatctgcaagcttaatcctgggcacgaggcccaattctatgctcctctttgttgccttctccagctgtgagacattcactggaattttcagtaaataacttcttagga

SEQ ID NO: 1006451 - DNA, 120 bp, Artificial Sequence
  ENSG00000261054_0 (sequence is synthesized)
acttctgcagtgggtccttcatatgacattcgctcagtcctccagacttcagaggggccgagttttatgtgccttgcagcctggctcacatcctccagcacctgtgactgggcaaagcct

SEQ ID NO: 1006452 - DNA, 120 bp, Artificial Sequence
  ENSG00000261054_1 (sequence is synthesized)
gtggggctgctgacctccacagtggccgacactgggccctggggagtgcgctgtcccgagctgtgagaggccccaccagcaacctcgctctcgcctgaagggatgtacagctcccgggtg

SEQ ID NO: 1006453 - DNA, 120 bp, Artificial Sequence
  ENSG00000261054_2 (sequence is synthesized)
gcccaacgcctaaagcgaatgccagcagccggggcctccgctccaccttcctcatctgggctgccaggcgctgggctgcgttgcctgctcaggctctcccgaaccaccgactccacagcc

SEQ ID NO: 1006454 - DNA, 120 bp, Artificial Sequence
  ENSG00000261054_3 (sequence is synthesized)
ttctccatctcactggcctcatctttgctcagctcctccaggtctaaccgatcggcatccacagtttgtgagacgttgacttcagcaaccagggtcacggaactgccaccagcaccctgg

SEQ ID NO: 1006455 - DNA, 120 bp, Artificial Sequence
  ENSG00000261054_4 (sequence is synthesized)
accttcttgacatccacggaaacgctccccggcccaccctgcccctctctggtgagggcggacagctcctccctcatgcgctcgggaagggtttcctccagctgcccgatgacctccacc

SEQ ID NO: 1006456 - DNA, 120 bp, Artificial Sequence
  ENSG00000261054_5 (sequence is synthesized)
agctgctgccggggctccttggaggagatgcccttcatggaggtgtggaattcgtggggtattttaatttctttttcaatgactgtgggttcggcatgaaattcaccgcttctagcttgt

SEQ ID NO: 1006457 - DNA, 120 bp, Artificial Sequence
  ENSG00000261054_6 (sequence is synthesized)
tctttccagtgagtggaacccaggtccccctccagagagggcgctgggacatccaagggcttcacaaccttctcgcccactgcaccgtccttctgtgtcctccttcgagtcccctgcacg

SEQ ID NO: 1006458 - DNA, 120 bp, Artificial Sequence
  ENSG00000261054_7 (sequence is synthesized)
atttcatcctgccaagagtacctgatggtggattcctcctcgatgtggatctgcccgtacaccgagccgtcatctctgtcgtgccccccggggtgttcatctggagtggacacaaaataa

SEQ ID NO: 1006459 - DNA, 120 bp, Artificial Sequence
  ENSG00000261054_8 (sequence is synthesized)
ctctgctcgccctctgaatcacctgcctctgtcacttcttccacgaagctctttcctgtccacgtaagtgacttttgtgtctggaaaagaatcagcagatgcttctgtctctggagactg

SEQ ID NO: 1006460 - DNA, 120 bp, Artificial Sequence
  ENSG00000261054_9 (sequence is synthesized)
agtgaactgcttcaggatactggtaacgatgttttctgctacggtttctgtcatggaatcgccttgcagagaaccagtggcatcactggtgcccaacctgaaccgtagctctcttgcttc

SEQ ID NO: 1006461 - DNA, 120 bp, Artificial Sequence
  ENSG00000261054_10 (sequence is synthesized)
ctgcaaacctttcggggacacctctgctcttctgtcctgggatacttctagactaatcggcacctctctctctcgcacgctcttctccttcggtgagtccttctccttagccttctcctt

SEQ ID NO: 1006462 - DNA, 120 bp, Artificial Sequence
  ENSG00000261054_11 (sequence is synthesized)
catctgctggctttctctctgtctcgcttccttatctaactttgtcaattcttcccatcttaggtttctctcctcggaagccttctctttagaatcgaacattttctcttctggctttgt

SEQ ID NO: 1006463 - DNA, 120 bp, Artificial Sequence
  ENSG00000261054_12 (sequence is synthesized)
tcggatggtttctggtctgtttctttcttgctccctcgtggctttcacttctgttttctttcccagaatgacggtcctctcatttgaccgtgtgctttccgaagcacctgctgccacctt

SEQ ID NO: 1006464 - DNA, 120 bp, Artificial Sequence
  ENSG00000261054_13 (sequence is synthesized)
gtctcggcgatcccggtacgactcgcgggcaattgtggaatcttcacctatgtaaacggggacctcccttgtatctccggcttttggtctgtcagggaatgttttcacttgagcctcagt

SEQ ID NO: 1006465 - DNA, 120 bp, Artificial Sequence
  ENSG00000261054_14 (sequence is synthesized)
atttcttaaaaggccataggttggagagaaagttctgacgttggtttgactgctgacggcttttccgtatgagttttcctgctgggtagtggccgaggaagaatatcccgagcccaagaa

SEQ ID NO: 1006466 - DNA, 120 bp, Artificial Sequence
  ENSG00000261054_15 (sequence is synthesized)
gcctcttctggcatcacctccaatagatgtgcccgtctgagatccacggtgccctgacaggttagaatacagtgccgagctgtgattgaaacttgccaaaggtgctttctgccttgaaaa

SEQ ID NO: 1006467 - DNA, 120 bp, Artificial Sequence
  ENSG00000261054_16 (sequence is synthesized)
tagattcctttcattttccctctgtagtagtgagtcggtatagtgataggatttgtttctgaattctgtagaaattgaacaaagcattcattaaaatgacagtcatcattacccttttcc

SEQ ID NO: 1006468 - DNA, 120 bp, Artificial Sequence
  ENSG00000261054_17 (sequence is synthesized)
atctacaagcattgttgcaggccaaatcccattccatcataataaatatacactgttaccacagaaagctcattataaagataagttatatttggtgcccaaattattttttggcagttt

SEQ ID NO: 1006469 - DNA, 120 bp, Artificial Sequence
  ENSG00000261054_18 (sequence is synthesized)
acaaaatcctgttacaataaaatgtagcactacaaatacttcagcctaacacgtttctccagttactgatattaaaatactcactcatcttaacattaatcataaagcacaatgcatatc

SEQ ID NO: 1006470 - DNA, 120 bp, Artificial Sequence
  ENSG00000261054_19 (sequence is synthesized)
ccagagaggtcagaggtgctcgtttttgtggctgaaatttcacaatcttatattttgaaatcattaatttctgctttttgaggtaagtttaatttactgtagcagagaagagctctgtaa

SEQ ID NO: 1006471 - DNA, 120 bp, Artificial Sequence
  ENSG00000261054_20 (sequence is synthesized)
ttacaaagtgtgtcattattaaacaccaaatagcattatcctccactatttaatatactcttctgtttcactgatttccatattgggccaacaagtattaaagaatttaacttctttaag

SEQ ID NO: 1006472 - DNA, 120 bp, Artificial Sequence
  ENSG00000238156_0 (sequence is synthesized)
cccaaaattatgtaacttctccacaggataagatccgatcctacagtaaatagaaaggtgccacttattcatctgaagaagcaaaaggaaatgctttcaacccagatcccagacacagag

SEQ ID NO: 1006473 - DNA, 120 bp, Artificial Sequence
  ENSG00000238156_1 (sequence is synthesized)
gacatttggggatgtcaaaactaggaaggacgctactgcatcaggaaaagaagcaagggaagagtgaaaacactggcttggaatgagctctgatcatgtctactctctcctactcctact

SEQ ID NO: 1006474 - DNA, 120 bp, Artificial Sequence
  ENSG00000238156_2 (sequence is synthesized)
ttttcttggagctacaaagataaattgtttgagtctttaggagagcctaactccttattcaagtatttccttgctcctggatgtggaaaaattgcttaaataaaaactactcaaaagaaa

SEQ ID NO: 1006475 - DNA, 120 bp, Artificial Sequence
  ENSG00000280341_0 (sequence is synthesized)
atatttcaaagatccaatagggtctatttctgaaaactcagcccccatatcataaaaccagcttaaagaagggaagtgacttagagaaggggaagaactttgagagtttgaaataataag

SEQ ID NO: 1006476 - DNA, 120 bp, Artificial Sequence
  ENSG00000280341_1 (sequence is synthesized)
ctgtattgagttacactagtttacctgaaagttagggggagctatatctttagtaaaatgaatgtatggttttaggaattacaactactggttggggcagtccatccttgctctcacttg

SEQ ID NO: 1006477 - DNA, 120 bp, Artificial Sequence
  ENSG00000280341_2 (sequence is synthesized)
cacatagttggaccaactacgtcataaaagctttgtgtaaagggggcaagactcccagttgacactggggtcttcattgaaactttcccagactaaatgatccaaattcactaatgtcca

SEQ ID NO: 1006478 - DNA, 120 bp, Artificial Sequence
  ENSG00000280341_3 (sequence is synthesized)
gtctgaggacagccgggaagtacagaggtacttttctgaagtggagagctgtctttggcctgacaaggctccacaaggtataacaaggcaagcatcaaatgtaatagtttcaggcaaaat

SEQ ID NO: 1006479 - DNA, 120 bp, Artificial Sequence
  ENSG00000280341_4 (sequence is synthesized)
gggttccattgtctaagtcaatgttttctattagcctaaacctgggcactatattttcaattaaggccttaactacattattggccatcacatttgaaaagggaatagctttgacccagt

SEQ ID NO: 1006480 - DNA, 120 bp, Artificial Sequence
  ENSG00000280341_5 (sequence is synthesized)
gagtaaggtgatctactgtcactagtaaatattttagacgacctattgaaggcatctctgtgtaatcaatctggatactttaagtctggactccttctaccaaggggtaatctttttata

SEQ ID NO: 1006481 - DNA, 120 bp, Artificial Sequence
  ENSG00000280341_6 (sequence is synthesized)
gtttgtttattagttttcttacacactatgccactgtctgtaacctgtttggccagagtataaatccctatacacccaaaaactttcagaactctgtcacacatggcttgggaccccagt

SEQ ID NO: 1006482 - DNA, 120 bp, Artificial Sequence
  ENSG00000280341_7 (sequence is synthesized)
gggtcccttgatgaagttgggacaagttttccctcataaggggtttggacaacatttccctctgctctggcagtatccacttttcttttgaattctccttagcacctatttttattagtt

SEQ ID NO: 1006483 - DNA, 120 bp, Artificial Sequence
  ENSG00000280341_8 (sequence is synthesized)
tctcttttccgtggaggagaaaatggagattatgtcaggaggaggaaggtaaagagttcagtgaaaaatagatgttttaaaagaaatggcagcctgtttgcctatgtaatctgctaggtt

SEQ ID NO: 1006484 - DNA, 120 bp, Artificial Sequence
  ENSG00000280341_9 (sequence is synthesized)
atttcctagactgtcaaaagaaagacttttctggtgtctggggacatggacagtcactatttcttctggcaactgaaggttattcaatacttgggtgaatagctccttatgaacaagatc

SEQ ID NO: 1006485 - DNA, 120 bp, Artificial Sequence
  ENSG00000280341_10 (sequence is synthesized)
ttgacgtttactattaatgagacctcgttcagtccaaatttttccgaatctatgagccactccaaaggcgtacttagaattggtatagatggctccttcctagttctgcaagtactttaa

SEQ ID NO: 1006486 - DNA, 120 bp, Artificial Sequence
  ENSG00000280341_11 (sequence is synthesized)
ggctcggctgagtgcaaacagctcacaagtttgggcagtccaattattagacaattttcctgcctcaatttcttcaagagtttctccatcaattactgaattccctgttgcatctttttg

SEQ ID NO: 1006487 - DNA, 120 bp, Artificial Sequence
  ENSG00000280341_12 (sequence is synthesized)
cctcaatcacctgggaggagccatctataattaagtgtcatcccatcctgaagggagtttatcctaggtcttgtcagacctttgtatggtaatcagttaaatctaaacatgtgtgctatc

SEQ ID NO: 1006488 - DNA, 83 bp, Artificial Sequence
  ENSG00000280341_13 (sequence is synthesized)
tttgtatggtaatcagttaaatctaaacatgtgtgctatctctttagatttggatcccctattagaaaaactgctgcgttaag

SEQ ID NO: 1006489 - DNA, 120 bp, Artificial Sequence
  ENSG00000280341_14 (sequence is synthesized)
gccacctccctgctttctgatttaagatatttctaacttgatggggctttctcactgtcaattttcctccaaaggttaacttcctgatttctttgaccattagtgctgtagtcacaatgg

SEQ ID NO: 1006490 - DNA, 120 bp, Artificial Sequence
  ENSG00000280341_15 (sequence is synthesized)
attggatacattgaggccacccactagtaactgaatctaaggcttttgacaggaaggccacgatgggctgctgatggcctccgtgttcttaagtgagcactgctaatgctaccccattat

SEQ ID NO: 1006491 - DNA, 120 bp, Artificial Sequence
  ENSG00000280341_16 (sequence is synthesized)
ccacgttgacaaaaaggtggaatggcttttctagggaaggtaaggctaagacaggggctgttataagcctttttatctgctcttcaacctgatcgacttcttcagaggtccacagcaggt

SEQ ID NO: 1006492 - DNA, 120 bp, Artificial Sequence
  ENSG00000280341_17 (sequence is synthesized)
cgtcagtcttcccctcggcaaattttggatatagaagtttactgtttagtgcatgtgagttaatccataagcagcagtatccaactaaccctaaaaatttcctgagttcttgtttaagtt

SEQ ID NO: 1006493 - DNA, 120 bp, Artificial Sequence
  ENSG00000280341_18 (sequence is synthesized)
tgaggcaagggtagggacacgattccctcaactcattcaggccctattcttcacttctctgcacttatcaactggtctaaatatttaatttcaggttctacatactgaagcttttttctt

SEQ ID NO: 1006494 - DNA, 120 bp, Artificial Sequence
  ENSG00000280341_19 (sequence is synthesized)
cgagactcataactcctcgaactgcagatggttgagaatatgtgtagagaagccagctaccttctctatatcttcaccagatataagaatatcatcaacatattggagcaggcatatttg

SEQ ID NO: 1006495 - DNA, 120 bp, Artificial Sequence
  ENSG00000280341_20 (sequence is synthesized)
tttgggatgataactttttctaatacttgttctaaaatttgactgaaaaggttaggggagtctgtgaacccttggggtaagactatccatcgatagtgttgtttctaccctgaatgggga

SEQ ID NO: 1006496 - DNA, 120 bp, Artificial Sequence
  ENSG00000280341_21 (sequence is synthesized)
tcctcccactcaaaagtaaatatatcttgcctatcttctgccaggagacatgcccaaaaagcatccttcaaatctattacagtaaaccattgattattatatggaatcttgctgagaatt

SEQ ID NO: 1006497 - DNA, 120 bp, Artificial Sequence
  ENSG00000280341_22 (sequence is synthesized)
gtgtaaggatcgaggacaatggggtgggtagattggactatttggttaatagccctaaagtcctgtaccagccggtatgacccatctgatttcttgactggcaatgttgaggtgttttaa

SEQ ID NO: 1006498 - DNA, 120 bp, Artificial Sequence
  ENSG00000280341_23 (sequence is synthesized)
ggggacatagagggctcaagaagcccatttttaataagactttcaattataggtttcaaacctatcctgccctctaggggaatgaggtattgtttcctccttactacttccttggggatt

SEQ ID NO: 1006499 - DNA, 120 bp, Artificial Sequence
  ENSG00000280341_24 (sequence is synthesized)
tttagcttgatgtggttggagggactcagaggttccctcagtttccttctttggatcagacattaggattaatatatttgtcatctgcagtggtgagtagctttaatgaggtgaggaaac

SEQ ID NO: 1006500 - DNA, 120 bp, Artificial Sequence
  ENSG00000280341_25 (sequence is synthesized)
atctgacttctgtgttttctaaaatttttgctttaaatccttctccatttaccccacaaaccaaaagttcccctgaagagtaggcaatattagatggggggaaaacaaacagaggatcga

SEQ ID NO: 1006501 - DNA, 120 bp, Artificial Sequence
  ENSG00000280341_26 (sequence is synthesized)
caatattagatggggggaaaacaaacagaggatcgagccactcctgaattgactaaaaatgttataaaatcatgcttaggtcccacttctagacttatcaagggctcctggtgggactca

SEQ ID NO: 1006502 - DNA, 120 bp, Artificial Sequence
  ENSG00000280341_27 (sequence is synthesized)
tcctcaaaagccatgagtggaagggcctctttttccttttctaatttgggacattctctcttgaagtggcctgttcttccacatttttagtgcctaccttgcccttccccactctcagtt

SEQ ID NO: 1006503 - DNA, 120 bp, Artificial Sequence
  ENSG00000280341_28 (sequence is synthesized)
ctgggattctttgattttactcccctatactatttagatggcctggtagacgagagccttgatcctcccaatggaggcttgggtcctttaaaggagggtttggaacctttatagtttctg

SEQ ID NO: 1006504 - DNA, 120 bp, Artificial Sequence
  ENSG00000280341_29 (sequence is synthesized)
gcccactggaagctctgtttaggggtacatggatttggagccatctgttggaaggtgaataacataagttttgtcttttgtttttgcttttcttcgtctctcttcacagatactttttga

SEQ ID NO: 1006505 - DNA, 120 bp, Artificial Sequence
  ENSG00000280341_30 (sequence is synthesized)
ctttttgaatctctctgagaagttcacttgaggtcagttttcccaatcttctaatttttgtaacttttttgaaatatctggacaacgttggctaggcgcagtggctcatgcctgtaatca

SEQ ID NO: 1006506 - DNA, 75 bp, Artificial Sequence
  ENSG00000280341_31 (sequence is synthesized)
ggagattgagaccatcctggctgggcgtagtggtgggcgtctgtagttccagctactggggaggctaaggcagga

SEQ ID NO: 1006507 - DNA, 120 bp, Artificial Sequence
  ENSG00000280341_32 (sequence is synthesized)
gctactggggaggctaaggcaggagaatggagcaaaccctggaggcggagcttgcagtgaatcaagattgcaccattgcactccagcctgcgtgacagacagagactccatctcaaaaaa

SEQ ID NO: 1006508 - DNA, 78 bp, Artificial Sequence
  ENSG00000280341_33 (sequence is synthesized)
ccattgcactccagcctgcgtgacagacagagactccatctcaaaaaaataaaaagaaatatctggacaacttcaagt

SEQ ID NO: 1006509 - DNA, 120 bp, Artificial Sequence
  ENSG00000225156_0 (sequence is synthesized)
gcacaataacagctggcactggggtgcgggaggacggtgaaagctcgagtcccaggctccaaatcctccaggagtaactggggtgacccgaggagagcagcgcactggatatcagatgtt

SEQ ID NO: 1006510 - DNA, 120 bp, Artificial Sequence
  ENSG00000225156_1 (sequence is synthesized)
tcactgcagaaatgctgatgtgttggattacaggattcctggccactctctctggttgccagcccagcaccaagcctcccagacattgattctctgctgctctgtggcatagaagactac

SEQ ID NO: 1006511 - DNA, 120 bp, Artificial Sequence
  ENSG00000225156_2 (sequence is synthesized)
agtgatgggctctgcagacttcaccttggagtccccctttcatccctgctcattagtctcctcctcggttgtttggttgaatgtttcctaatgccaagggacaaggccacctacatccca

SEQ ID NO: 1006512 - DNA, 120 bp, Artificial Sequence
  ENSG00000225156_3 (sequence is synthesized)
agccagctggaggagcagcttccagtcttcagagatgggcccctcttcttcagttggccttggtagtcaggacagaggacagagggatatattgtaacatatattgtaaaatttgagcca

SEQ ID NO: 1006513 - DNA, 120 bp, Artificial Sequence
  ENSG00000225156_4 (sequence is synthesized)
catacacgggataaatgacaacgcaaataatcatctccgaaaagaaatctgacatccgacgacttagaggccagagccattgctgacgctcctggggaggaacattctttgcaagcattt

SEQ ID NO: 1006514 - DNA, 120 bp, Artificial Sequence
  ENSG00000225156_5 (sequence is synthesized)
gtgcctcagtgagggtggtggggagccagcaaagtgctgggctctgcagaaatctagggggctgcctgggtgatgtacaaatgcagacctattacatcaatagaaaaatgtaatgtgttc

SEQ ID NO: 1006515 - DNA, 120 bp, Artificial Sequence
  ENSG00000225156_6 (sequence is synthesized)
attactatcaaggcggagtgctttttaaattcaccatttctgaaagactcaggattaatgtcaaactgtatgaaaagacccagcctttcacctttctttctcttgaccatagaatgcggg

SEQ ID NO: 1006516 - DNA, 120 bp, Artificial Sequence
  ENSG00000225156_7 (sequence is synthesized)
tctagtagggggagagcaaagggggcactttagaagaattgtgaagcaagcacagacagggtcacagagagccctggtatagcagaggtccacccccaccctggtgtcctcatacacatt

SEQ ID NO: 1006517 - DNA, 120 bp, Artificial Sequence
  ENSG00000225156_8 (sequence is synthesized)
atcgcactaaggaactaggcagaactctaagaagggctggtgaaggagagaagacacggggactcagcacattggctgtgctgacatatgtgagcctgagttggaagatggcgtgaatta

SEQ ID NO: 1006518 - DNA, 120 bp, Artificial Sequence
  ENSG00000225156_9 (sequence is synthesized)
agactgaagccaagaccccctccctcaaaaacagcacttatagatgttagagggcagaaaggcaaagtcagaggaagcctaaggttaagtgagtacgtaccctgcaccgggcactatcca

SEQ ID NO: 1006519 - DNA, 120 bp, Artificial Sequence
  ENSG00000225156_10 (sequence is synthesized)
aggtactttacatgaattcttaaagagcttctgagatataaatattattataaaacccatttgactaatggaaacctgagggtcagagaggttaaataatgcactaaatgacatacttga

SEQ ID NO: 1006520 - DNA, 120 bp, Artificial Sequence
  ENSG00000225156_11 (sequence is synthesized)
ctgtaatacctcccaggctcatgttccttttatgccacatgccatgtgtagccccaatgtcaagggctaggggtggggaaaaagagcagacagcaggcaggatgagactccctggaggtc

SEQ ID NO: 1006521 - DNA, 120 bp, Artificial Sequence
  ENSG00000225156_12 (sequence is synthesized)
tgagggaaggaacatcctggtgtaggaatattgtgcctgcaaggttgctgagatatgtctgtacacagcctggtgaatctggaagtgttgaagaaatggcttttgttttgttttgttttg

SEQ ID NO: 1006522 - DNA, 120 bp, Artificial Sequence
  ENSG00000225156_13 (sequence is synthesized)
tttttttaaacaggagccagaaaccagagggatccctaagaggacgaagacagctgcagagcaagtccaggttaccctgaaactgaaggtgtgaaggtgcaagctcagagcccaaaccca

SEQ ID NO: 1006523 - DNA, 120 bp, Artificial Sequence
  ENSG00000225156_14 (sequence is synthesized)
aaggccaccatacagatggggaactggtgggacaccagcattcctggggctcagtgtgagtgcaggcagcatggacagggggtgacaacatacagtgagggtgggggcaggccatgtcct

SEQ ID NO: 1006524 - DNA, 120 bp, Artificial Sequence
  ENSG00000225156_15 (sequence is synthesized)
ggcttcatgagacaggctaatgttgtttgcatgcccagctatttacaatcaggagactgaactgtgactctgcagaggcttataccagctatatacaggagccctttttcttgtatgctt

SEQ ID NO: 1006525 - DNA, 120 bp, Artificial Sequence
  ENSG00000225156_16 (sequence is synthesized)
tgcccactgtagacactcacgactgtagggatcccaggtaggaaggtaatgagggagactaggctccatctagcaaccatatgtgcagaaatgacaaagaaaacaggacctagagtttgg

SEQ ID NO: 1006526 - DNA, 120 bp, Artificial Sequence
  ENSG00000225156_17 (sequence is synthesized)
agagagggtaggtggggttcttctgacttctcagagtacagagtcacatggtttcccagaaagcaaggttcacaggacacatgcatatggacatgaacacaagaagagtctcgatcataa

SEQ ID NO: 1006527 - DNA, 120 bp, Artificial Sequence
  ENSG00000225156_18 (sequence is synthesized)
ggctgggcctccaggaacctgaggaaagctgcccagccatgcctcatggagagtgaatgtttaaaaatcagaaggtcattcaagactgaggacatctccggaaccaggttttaaggctgt

SEQ ID NO: 1006528 - DNA, 120 bp, Artificial Sequence
  ENSG00000225156_19 (sequence is synthesized)
cctcttagcgggtgggttttgtccactcttcagctccaccgctgacattatcagactttttcctgtaggcaccagagtcacggggcctatgacaatgtttcagatcttgaaaatacatta

SEQ ID NO: 1006529 - DNA, 120 bp, Artificial Sequence
  ENSG00000225156_20 (sequence is synthesized)
tgagtccaaaatatgaaacaagaactataaaaatcccattgatacacattttattagtatacccaaagttcattaatttaatatttgtgctgggtgtggtggctttacacctgtaatctc

SEQ ID NO: 1006530 - DNA, 120 bp, Artificial Sequence
  ENSG00000225156_21 (sequence is synthesized)
ggtgctttgggaggccaaggttggaggactgcttgaagccaggagtttgagacctgcctgggcgacacagggagaccccacatctctacaaaaaataaagataaaaattagctgggcgca

SEQ ID NO: 1006531 - DNA, 120 bp, Artificial Sequence
  ENSG00000225152_0 (sequence is synthesized)
gaaatgcagaagcgcagccagttgcgaaatcacagcgacttgctcaatttgcagtgtgcgatcttctcctgcagggctccaacctgaatatgccaacagagagggcagaaaattccctgg

SEQ ID NO: 1006532 - DNA, 120 bp, Artificial Sequence
  ENSG00000225152_1 (sequence is synthesized)
gagctgacatttccggaagaaacaacgttcaggcatgcaactggaatttaaatgagtatctgctttcgatgctgacagcaggagccttccctcccatatgcccgcaactgcacactcaaa

SEQ ID NO: 1006533 - DNA, 120 bp, Artificial Sequence
  ENSG00000225152_2 (sequence is synthesized)
cctcaggtagcacagaaaagaccagcgctccgactcctggggccagtggtgctggattttatttgcacttttctgggtttaaatattttgagaatttttttaaaaagcatttctctcttc

SEQ ID NO: 1006534 - DNA, 120 bp, Artificial Sequence
  ENSG00000239636_0 (sequence is synthesized)
gggccctgcgagctccaggtgcctctgccccgcggcgctggcgaagtcgaagcccgagaacgcccaccgcagcgatgcgaaggccgcttctggggtggggctgaggctgcagctgcctcc

SEQ ID NO: 1006535 - DNA, 120 bp, Artificial Sequence
  ENSG00000239636_1 (sequence is synthesized)
ctttcgcaccaaggaccccaaccttcagcgacgcagccgccgctcccgcccaggctgggaggcactgtagggatccgacgcttcaggtggccaaagagcgactttctctgattccagggc

SEQ ID NO: 1006536 - DNA, 120 bp, Artificial Sequence
  ENSG00000239636_2 (sequence is synthesized)
cctggcggggcaggctccagtaccgcactcggcggaggccgaaggtctgtggggcaggacaggagttcctcgtgccgtcggaagggccgaggacgaaggagggcgctaattcactcccca

SEQ ID NO: 1006537 - DNA, 120 bp, Artificial Sequence
  ENSG00000239636_3 (sequence is synthesized)
caacgccgaatcccgcagtgaccgcggagggccaaggtgcaggctgccccatggatgccacacgtggcagcggggagaaaagaagtgattcggtccctgccgagggttgctgccacccac

SEQ ID NO: 1006538 - DNA, 120 bp, Artificial Sequence
  ENSG00000239636_4 (sequence is synthesized)
gcactgctggcggactcagtgccaggcagccttgatggccaggcaacgtctaacccaggaggtgggacacatcctcggagtcaccagtgagatgtggcgagctgggagaaaagtcggctt

SEQ ID NO: 1006539 - DNA, 120 bp, Artificial Sequence
  ENSG00000239636_5 (sequence is synthesized)
cctgcatttgtcaccttctgcctccagccatggtagtaaaccaccgcggccagtcccgacccatcccggatccctcgggtctcacctgcaggtcctccagaccgggggccgccgccagcc

SEQ ID NO: 1006540 - DNA, 120 bp, Artificial Sequence
  ENSG00000239636_6 (sequence is synthesized)
ccggaaggccgagaggaactgcttcacaagattaaaggagaaacagaaaatgtatctagcgctgtgcttggggcatggcaggaactcaatgaatgcttattaaatactgtaaatgataaa

SEQ ID NO: 1006541 - DNA, 120 bp, Artificial Sequence
  ENSG00000239636_7 (sequence is synthesized)
gcgcatcgcgttctcagctggcgaagtccctgcggccccctccctccgagatttcgttagcgcgggacaggagggttggaaagtccagcactcaggcgccccgatcccccggccgaatat

SEQ ID NO: 1006542 - DNA, 120 bp, Artificial Sequence
  ENSG00000239636_8 (sequence is synthesized)
ccagcatggggcggaactgcttcacaagattaaaggagaaacagaaaatgtatctagcgctgtgcttggggcatggcaggaactcaatgaatgcttattaaatactgtaaatgataaaca

SEQ ID NO: 1006543 - DNA, 120 bp, Artificial Sequence
  ENSG00000287943_0 (sequence is synthesized)
agaccttctccttccttttgcctcaaagcatctaccagtaaatccttgaaactgaaaagggccagccggctcattgtcaggagaggagaactagagggctttgtggcatagcatcttgga

SEQ ID NO: 1006544 - DNA, 120 bp, Artificial Sequence
  ENSG00000251266_0 (sequence is synthesized)
acatctgctctgtcaaactaagcgtaagtggttcacagtctgtaccacagctaaatttaaagtatcagggtactattggcctcatagaaagattttggaagtattttctcctgcattttt

SEQ ID NO: 1006545 - DNA, 89 bp, Artificial Sequence
  ENSG00000251266_1 (sequence is synthesized)
ctcatagaaagattttggaagtattttctcctgcatttttcagaaaagttaacctgattagacaacactttgggaggccgaggtgggca

SEQ ID NO: 1006546 - DNA, 120 bp, Artificial Sequence
  ENSG00000251266_2 (sequence is synthesized)
attaaacagcggcagttcctgtaagtttttaagggttattggaagatgactttacttgtcttcatacagtttcacctaaattatgttggtgctgttgctttaggaccttcagacctggat

SEQ ID NO: 1006547 - DNA, 120 bp, Artificial Sequence
  ENSG00000251266_3 (sequence is synthesized)
ggggacgtatgataaggatcctggttctcaggccttctggtctgcactgtagctatacctccagctttcctgtgctgtcagtttggagacagcaggtcatgagacttcactgcattcata

SEQ ID NO: 1006548 - DNA, 120 bp, Artificial Sequence
  ENSG00000251266_4 (sequence is synthesized)
attatgtgagccagtttgtcatggtaaatatgtatgtatgcatgtatgtatccatccatccatcctgttgattctgtttctctggagaacgctgattaaaacacctctctgccttcagaa

SEQ ID NO: 1006549 - DNA, 120 bp, Artificial Sequence
  ENSG00000251266_5 (sequence is synthesized)
cgtattaatactttgaattttatagagagatattacatgagcagatgtggcaacattattgaatataaaatggttaattttgctgcatcacccaattttcttactctgataaaaactata

SEQ ID NO: 1006550 - DNA, 120 bp, Artificial Sequence
  ENSG00000251266_6 (sequence is synthesized)
atgtaagaaatgagataataattataagtgattatgacaagtgtaataataacatcacttttatggggaaataaggaaaagcaataatttataatgaaataaaaactaatgatcaacata

SEQ ID NO: 1006551 - DNA, 120 bp, Artificial Sequence
  ENSG00000251266_7 (sequence is synthesized)
acacagtctttgagatgtaagaactttatgacataattatgaagataaacattgatcctcacatctgctctgtcaaactaagcgtaagtggttcacagtctgtaccacagctaaatttaa

SEQ ID NO: 1006552 - DNA, 120 bp, Artificial Sequence
  ENSG00000251266_8 (sequence is synthesized)
agtaatagagaatttactgaataactattcatcagcatgatgggctcttacaacgtagaagaataatacacctgctgataatcgtgtttcttccaatagtttatactaatggaatttaga

SEQ ID NO: 1006553 - DNA, 120 bp, Artificial Sequence
  ENSG00000203307_0 (sequence is synthesized)
agtgtttttcaagagtcatcagtgcagagacaggcttcatgtttgttaccactcttgcgtcctgtttaggttttccactagactgcatgcgtcctgaggacaggctttgctgcatcttca

SEQ ID NO: 1006554 - DNA, 120 bp, Artificial Sequence
  ENSG00000203307_1 (sequence is synthesized)
gtacctccagaagagcccagaacaggtgcttccttcaagcagcgcaatgaatggggcaagtgtttctggaagagcagatggagtttcactctttcacccaggctggagtgcaatggcacg

SEQ ID NO: 1006555 - DNA, 86 bp, Artificial Sequence
  ENSG00000203307_2 (sequence is synthesized)
tccccaaaatgctaggattacaagcaagagccaccgtgcccagcccaccatctccattttgcaaaggaggaaactgagacacagtg

SEQ ID NO: 1006556 - DNA, 120 bp, Artificial Sequence
  ENSG00000203307_3 (sequence is synthesized)
accatctccattttgcaaaggaggaaactgagacacagtgacaccaaggatgacaactggagtaaaccatggaggcaggattctcaccctaacagatacctcaacaggccaaatttaagt

SEQ ID NO: 1006557 - DNA, 120 bp, Artificial Sequence
  ENSG00000251264_0 (sequence is synthesized)
tctaaaacagcttctactgggagattaattatagaagccacagaatttcctgaaaatgatttgcagtataaaggtgagtggctccaaatgtcagtggttgtcagctagatcttcagtcta

SEQ ID NO: 1006558 - DNA, 120 bp, Artificial Sequence
  ENSG00000251264_1 (sequence is synthesized)
ccttttcattggctccgtttgtaatagaaaagcaaaagttattccccagttgtataaggccgagtccaggtcgtacagaataatgaaatgggaaagctcagagaccctaatgttagacaa

SEQ ID NO: 1006559 - DNA, 120 bp, Artificial Sequence
  ENSG00000251264_2 (sequence is synthesized)
tggacatgccatgaaatgggaaaatgtgcattttacctcctccacagcacatggaattttgaagaccaaggagagataggagaacgggtcatcataggggttgatgggccagctttattc

SEQ ID NO: 1006560 - DNA, 120 bp, Artificial Sequence
  ENSG00000251264_3 (sequence is synthesized)
taaatgactgaagacttctgttcttttcaacaaacacagtcctccaattaggagctgcaaataagattatatgccctgaataagtctgaaaaggtccttttataattagaaagtttgtgt

SEQ ID NO: 1006561 - DNA, 120 bp, Artificial Sequence
  ENSG00000251264_4 (sequence is synthesized)
gtgggaagtggaagcagcatgaagtgctcactgtggctttattaaaagagtgacatgaagattttcccaaatcctcatctgagtgctcgaaaatgataaaataaaaattatgaaaaactg

SEQ ID NO: 1006562 - DNA, 120 bp, Artificial Sequence
  ENSG00000251260_0 (sequence is synthesized)
agacacttcaccctggtcaggggtacagtacttccttccgcagattttaccaggctcttgcttatccggtaatggttatcttcatgtaagctaaaaacattatcagtacccagaccttcc

SEQ ID NO: 1006563 - DNA, 120 bp, Artificial Sequence
  ENSG00000251260_1 (sequence is synthesized)
agagatgtgatcatactacctacgggaaggaactaacatattcaagcttacttctggctgtgtcactgacccaacagaggccagtaggtccagcatggcaagcatggctccaggatgaat

SEQ ID NO: 1006564 - DNA, 120 bp, Artificial Sequence
  ENSG00000251260_2 (sequence is synthesized)
gtttcaggtctgagaagcagccaagaaatcgaacagcatctgccaacttctcatactgaatctctgttttgaagaaatgagagttggctggctcatagcgcattgctgcagtcaacgtgc

SEQ ID NO: 1006565 - DNA, 120 bp, Artificial Sequence
  ENSG00000251260_3 (sequence is synthesized)
agaacacagtgtgaagaagttcaaacacttgattctggttcactttctcccagccattcttgggtggacagctcaaagatctttccatagcaacgagcaaggatgtaatgtacacaaatc

SEQ ID NO: 1006566 - DNA, 120 bp, Artificial Sequence
  ENSG00000251260_4 (sequence is synthesized)
ctccaactttcctaaaaactgttcttgaacgatggctttctcgaaggaccgacaggagggcctacaggagacaaaagaaaaaacaaatgaaaatacacataattcaaaaaaaaaaaaaaa

SEQ ID NO: 1006567 - DNA, 120 bp, Artificial Sequence
  ENSG00000280693_0 (sequence is synthesized)
acacacttgcaaaagcccactggggttcacgacagagtgaagccttcaccctcctgcagccacggcttgcttgcagaaagcatcagcgcaccttggagggaagaacgatctcccaaattc

SEQ ID NO: 1006568 - DNA, 120 bp, Artificial Sequence
  ENSG00000280693_1 (sequence is synthesized)
tggttcggaggttcccatacccagtaagcagagccaggctgaagggaacagtatctttctctccctcaccccagcgttccctaaggacagaatgcaagcttcttgcagccagtgaagccc

SEQ ID NO: 1006569 - DNA, 120 bp, Artificial Sequence
  ENSG00000280693_2 (sequence is synthesized)
acgaacgtatcctcagggcccagcacaaggacgggcacacagggaccccgaccgcgacttgctgaaagatactcatgctgagggaagccagcttccatgttgtaaggatgctgaagcagc

SEQ ID NO: 1006570 - DNA, 120 bp, Artificial Sequence
  ENSG00000280693_3 (sequence is synthesized)
actgtggagatccatgtggcaaggagctgaggcctctgccagcagccagcgccagtctgccagcgagatgagcaagccgtcttgcagccaattcaacgaattgttatctctggaccactg

SEQ ID NO: 1006571 - DNA, 120 bp, Artificial Sequence
  ENSG00000280693_4 (sequence is synthesized)
ggctcacatcgtgaacagctgctccaccctctgtctttcaccagcaagtttttctggtaacaagaccacataggtctcacttaagccatcttcaccaactaccaactattaaactggtta

SEQ ID NO: 1006572 - DNA, 120 bp, Artificial Sequence
  ENSG00000280693_5 (sequence is synthesized)
attcgtctttcagatcagaaacaagaggccaggagtaaaaactgtgccaatcagagaagaattacctggccaccaaattaccagtcactcactcatctcaactctcctccctggctcctt

SEQ ID NO: 1006573 - DNA, 120 bp, Artificial Sequence
  ENSG00000280693_6 (sequence is synthesized)
tactttgaagcttaggtctgcaatggttattttatatagaagagcaaaatatgctcctttcaaatttcacttttttttcttttttgaaattaaaaccaattttgtttagagacagggtcg

SEQ ID NO: 1006574 - DNA, 120 bp, Artificial Sequence
  ENSG00000280693_7 (sequence is synthesized)
aaaccaattttgtttagagacagggtcgcactctgccacccaggatggagtgcagtggcatgatcatagctcgctgtaaccccaaactcctgggctcaagtgatcctcacacctcagcct

SEQ ID NO: 1006575 - DNA, 120 bp, Artificial Sequence
  ENSG00000280693_8 (sequence is synthesized)
agacgttctcatgccaccctatcttcaaaaccacagagagttcatgagccagtcttgcccatctccaatcagggaacttctaaaataaaaatcttagcaatctccttggcccaaaacttc

SEQ ID NO: 1006576 - DNA, 120 bp, Artificial Sequence
  ENSG00000280693_9 (sequence is synthesized)
accccatcttggaagggaggggagagagaatgttctgatctatatctgatgagggcgtgtggttgggacctgagcatcctcctggttgggctagtgatggggagagagggctgttactca

SEQ ID NO: 1006577 - DNA, 120 bp, Artificial Sequence
  ENSG00000280693_10 (sequence is synthesized)
cgactccctcccacagaataccagaaacaggcaggcagctcaggtgtatgtaaggatgtgaggccaagaaaccagccctcaccaagttacccctgtaaatccttgtctccccatgcacct

SEQ ID NO: 1006578 - DNA, 120 bp, Artificial Sequence
  ENSG00000280693_11 (sequence is synthesized)
ctactttgagtcagaaatggattcattgcaggctcagttgtttgtattatgtgaatgaactgaacgtaaccaagcaccaagagagccctaaagacacagtagacctcctgtagaagggct

SEQ ID NO: 1006579 - DNA, 120 bp, Artificial Sequence
  ENSG00000280693_12 (sequence is synthesized)
ctgatggaccttcaaacattgcttctccaactttatggtgcacacaaatcacctgtgcatgttaaaatgcagacggtgacttacagatcttgggggaggccaagtgtctgcatttccaac

SEQ ID NO: 1006580 - DNA, 120 bp, Artificial Sequence
  ENSG00000280693_13 (sequence is synthesized)
aagctcccagatgatggccacactgctgatctgaggaccacattttgaacagcaatccttaaaacacacaaggctgtgggaccgcactcctgagaagagacctcactcttggaagggatt

SEQ ID NO: 1006581 - DNA, 120 bp, Artificial Sequence
  ENSG00000280693_14 (sequence is synthesized)
ctaggaggctgcattcaaaccatcccagagacagctcacaattttgttagggacctgatactaaaaattaccaaatcacaatcgtgtgctgagggcttactttgtgcttttcagatgaca

SEQ ID NO: 1006582 - DNA, 120 bp, Artificial Sequence
  ENSG00000280693_15 (sequence is synthesized)
tttcatttgatgctctcaataaccctgaagggatttcagagatggggattatgatggagcttcagaattaaactgattaaaactggcccagagtcacacaactatgaagaggctgagttg

SEQ ID NO: 1006583 - DNA, 120 bp, Artificial Sequence
  ENSG00000280693_16 (sequence is synthesized)
ggcctgtgtgttcgctgtccctgttcctgttcctggagcactgttcctgctgccctttgcccagccattgccttgcatccctcattgggaggcctttggtggccatgtgccctctctctc

SEQ ID NO: 1006584 - DNA, 120 bp, Artificial Sequence
  ENSG00000167046_0 (sequence is synthesized)
cttcctttccatcctccctggtcaggggagcccaacagcaacgcgagggcacccgaccctctgcctgcacctggagggcgcccgggtccccccaagccacggccaggacgtcgcgtggtg

SEQ ID NO: 1006585 - DNA, 120 bp, Artificial Sequence
  ENSG00000167046_1 (sequence is synthesized)
gggcagggaaaggggcgccgccgctgctggaaactagccctgtgcgctccgcccgcgctcccctcccggagatgtctcgagcgcctctggcgcgaacaaagcccggccgcccccgagaaa

SEQ ID NO: 1006586 - DNA, 120 bp, Artificial Sequence
  ENSG00000167046_2 (sequence is synthesized)
cttccgtgcatgaaggtttcctccttgactcggcagcagcggccgccgcagggcacagaggcgggaacgcgcggcgggggaccagggcgtctctctccggagcgctgccgcctcctggac

SEQ ID NO: 1006587 - DNA, 120 bp, Artificial Sequence
  ENSG00000167046_3 (sequence is synthesized)
tccccgctccagctccaaggaccggcatcgctgccgcagccgggaggccgagaacgcgcggtggcgacgccgccccaggccacgcggcgaggcggttccgaacggactcgggattcgctc

SEQ ID NO: 1006588 - DNA, 120 bp, Artificial Sequence
  ENSG00000167046_4 (sequence is synthesized)
ctgggcgctgtggggccgagtggagccaagcggccgtttttcagctccgcccttccgaaaggctgccgcagggtcggggccacgtggggcccgcggcagaggggctgggggaacgccacg

SEQ ID NO: 1006589 - DNA, 120 bp, Artificial Sequence
  ENSG00000167046_5 (sequence is synthesized)
ggcggccctggtgaaggtgcccgccggtctcggcctgacccccaggccctgttctggcacgcgccccacctgcgcgcacagtgagaccggcgccctagcctgggaatccggggaatctcc

SEQ ID NO: 1006590 - DNA, 120 bp, Artificial Sequence
  ENSG00000167046_6 (sequence is synthesized)
agcccgttgccttttccataaccccgtcttctttttcacactagctctgagggtggaaggcagggaggtgccagccacgttcccttccacagagggaactccctgttggaattcctaccc

SEQ ID NO: 1006591 - DNA, 120 bp, Artificial Sequence
  ENSG00000167046_7 (sequence is synthesized)
cggcttcctgccgtctgtcctggaacacattgctccaggcctccgagcctcagtttcctcgtttgcaaaatgggggcgataacagagcgtcctcaaaggggataagacggaagaagttgg

SEQ ID NO: 1006592 - DNA, 120 bp, Artificial Sequence
  ENSG00000167046_8 (sequence is synthesized)
tcataattgttgccaagtattaacaggtaaccacaatcacactccacaaagcttcccttttagtgtcagtgaaattaatttaaaagaagtttccgaaagtcaagtgtgtgtgtgtgaatc

SEQ ID NO: 1006593 - DNA, 120 bp, Artificial Sequence
  ENSG00000167046_9 (sequence is synthesized)
ctgagataagtcaggtaaggggggaaatgaccacctcacggccccaggctggtgaggaagtcctagccacggaggcggtgctgcaggacctggcctggtggcatagcgtggcgggcgggt

SEQ ID NO: 1006594 - DNA, 120 bp, Artificial Sequence
  ENSG00000167046_10 (sequence is synthesized)
tcaccgtggagagacgaaggaggtgctgcggcttgtgagaaaaggcccacaaccccatgcagttatttatgaaatggttttccttcctccagggcttggggctcctgcccactcgtatca

SEQ ID NO: 1006595 - DNA, 120 bp, Artificial Sequence
  ENSG00000167046_11 (sequence is synthesized)
ggtcccgggacccccccggtggtgtcctcagggctcccgccgtcccaggccgccctccacttctggaagcagacacgaggccacgagacccactgcttttgggtatctgctttcattcct

SEQ ID NO: 1006596 - DNA, 120 bp, Artificial Sequence
  ENSG00000167046_12 (sequence is synthesized)
gacactgccctttaagagaaaaaagtacccacattgttcccagatggagagggtccctcccagagggtgaggcactgccacaggggctcacggccctgccaggagtggaaggtgcacacc

SEQ ID NO: 1006597 - DNA, 120 bp, Artificial Sequence
  ENSG00000167046_13 (sequence is synthesized)
cagaagtatttctcctgtgaaggaagggggctgagcttcgctgcagacctggcctcaggtgtggatgagcttcgctgcagacctggcctcaggtgcggagtctgcgggagcagcatttcc

SEQ ID NO: 1006598 - DNA, 120 bp, Artificial Sequence
  ENSG00000167046_14 (sequence is synthesized)
aggcagacctgacagaaggtgcctttgagaggtggtgagctccgtgttacaggaggcttgtgagcacaggtagcccatcttctggtgatgatgctggagaagcaattcaaatgtcagaag

SEQ ID NO: 1006599 - DNA, 120 bp, Artificial Sequence
  ENSG00000167046_15 (sequence is synthesized)
caggactggactctgtttccaaaactcacgtctggattctaccccctgaaaacattatttacacaatgtttttcctttaaacaattcacacatttgattaaaagggtaagtttatttttt

SEQ ID NO: 1006600 - DNA, 120 bp, Artificial Sequence
  ENSG00000281560_0 (sequence is synthesized)
aaacttttatacgttgttggatttttatttttttcctgtattttatttgttatttgagccataacaaagaatttcaccactcaagtcaaaaacacatttttttctagtaatttgtgttct

SEQ ID NO: 1006601 - DNA, 120 bp, Artificial Sequence
  ENSG00000281560_1 (sequence is synthesized)
agtacaaatgtagtctcattctatttatcatgcaggttgctgatgtccttggggtttgttctgttgtttggagtgggatgtgacttcaattgtatgttattgttgcttttccaagtggat

SEQ ID NO: 1006602 - DNA, 120 bp, Artificial Sequence
  ENSG00000281560_2 (sequence is synthesized)
actcggttccgttgagggcgtttacctttgttctggtcatatatgatcacctttattatctactgaagtctgatgttctctgggtctatttctgtcctttctggtttattccactggccc

SEQ ID NO: 1006603 - DNA, 120 bp, Artificial Sequence
  ENSG00000281560_3 (sequence is synthesized)
atttgtcaaaccctgcaccagaactacagcactttagtggcagagattttacagctgttttttttatgcctggtgtcctggtgcttctccttcctctttgctcatctttttaagggattt

SEQ ID NO: 1006604 - DNA, 120 bp, Artificial Sequence
  ENSG00000281560_4 (sequence is synthesized)
tctttttaagggatttcctagctattgttgcatgactgtttttccatgtaaactttattaccaatgtatagctataaaaaatgcttgctgggccaggcgcgatggctcacacctataatc

SEQ ID NO: 1006605 - DNA, 63 bp, Artificial Sequence
  ENSG00000281560_5 (sequence is synthesized)
tacagagcaaggaaaaaaaaattcttgctggccttagaactggattagtgttaaatttgtctg

SEQ ID NO: 1006606 - DNA, 120 bp, Artificial Sequence
  ENSG00000281560_6 (sequence is synthesized)
cttgctggccttagaactggattagtgttaaatttgtctgttagctctgctagaatttgacaactttatgatagcatgcttcctgccgaagatcaagaactgcttttcagctggtcaagt

SEQ ID NO: 1006607 - DNA, 120 bp, Artificial Sequence
  ENSG00000281560_7 (sequence is synthesized)
ccacctgggagcctttggaaagcatttggaagcttttccccttaggttttccatcgtttatcaagatcattcctaagaactttgtggttttcactgctattttaaaccgagatgtttctc

SEQ ID NO: 1006608 - DNA, 120 bp, Artificial Sequence
  ENSG00000281560_8 (sequence is synthesized)
tctccttatgtcttctaagaggtaatgtggataggtaaaaaggtgactgattgttgtgtgttagttttatattctcctaaatgtttctaaaggcaatttttcatgatttagacaacttac

SEQ ID NO: 1006609 - DNA, 120 bp, Artificial Sequence
  ENSG00000281560_9 (sequence is synthesized)
ttaacctcatgatcacgttgatcaatacagtcagcactgaatcttctcctcccctccaaacacatggataaggtggataaggaatatttaattttttttttaaaagcacagccgcccatg

SEQ ID NO: 1006610 - DNA, 120 bp, Artificial Sequence
  ENSG00000281560_10 (sequence is synthesized)
ggaaggagaatctctgtggtacagaaatggggttggagtccctggggtgatcagtgctgtggccacaggaccactgtggacccagaagaccagcagcagggccaacacctgtccagggtg

SEQ ID NO: 1006611 - DNA, 120 bp, Artificial Sequence
  ENSG00000281560_11 (sequence is synthesized)
ggaaaccctacctcatcatggggtgacagcctcaggggctccggggtgactggactctgactgtgaactgagaaggggttgaaactgctttcccttctcccacacaggcagggcttctgc

SEQ ID NO: 1006612 - DNA, 120 bp, Artificial Sequence
  ENSG00000281560_12 (sequence is synthesized)
tgaaatgagcttctgccagaaataccccagacacattcaatactgaaatatggacctgcaaagtacccataggcaggaccccaccctgggctattgcggactggagccccgagcaggaga

SEQ ID NO: 1006613 - DNA, 120 bp, Artificial Sequence
  ENSG00000281560_13 (sequence is synthesized)
gcccacccaggcttggctttggagctggaggagacagcggtgaatggaacttccgctcaggatggggtctggaacactgggtttgggaacaactaagagtctcataaagggaagacatag

SEQ ID NO: 1006614 - DNA, 120 bp, Artificial Sequence
  ENSG00000281560_14 (sequence is synthesized)
caaggcaggtacagaaatagcaaggcgattgttcaggggcattgagctaagtaagtatatattacattcttaagtaaatacataaaaatcaaatgtgtaaaaaaaacagatgaaagagaa

SEQ ID NO: 1006615 - DNA, 120 bp, Artificial Sequence
  ENSG00000281560_15 (sequence is synthesized)
ataggcattttttaaaatagaaatgttggaaatgattaatattagtgatgaaatgaattcaagctctttcccccacgtagcaggctgtgagttgggtgatcaggcaggggtgggagaccc

SEQ ID NO: 1006616 - DNA, 120 bp, Artificial Sequence
  ENSG00000281560_16 (sequence is synthesized)
atgggggaaggggcggaaacagagccagtggggctgggcatggagctgagtccaatagcatcataggtctgctgtggtacccaaccgatgctctgtcaccggcaaggggtgtctggtctt

SEQ ID NO: 1006617 - DNA, 120 bp, Artificial Sequence
  ENSG00000281560_17 (sequence is synthesized)
gaggctcttgcctgctgagtggaaagatctacgtctttcgggagaccttgatgggaccttggcttcagaaatgtctcccccgctctcgggggagctgctgccccagctgggtctttggtc

SEQ ID NO: 1006618 - DNA, 120 bp, Artificial Sequence
  ENSG00000281560_18 (sequence is synthesized)
tgactgggctttgaacactctctctgcctgctgctcctctctctgctcagccctgcctggcgcagagagctgggcaccttccacccacccctgctgggatgcatcaagctgtctctcagg

SEQ ID NO: 1006619 - DNA, 120 bp, Artificial Sequence
  ENSG00000281560_19 (sequence is synthesized)
agggcccgggctcctggctgcagctctacctgcccaagtcccaaaagttctcacactgcaggtgctgcctcaacctccacccactcagcctgccagctacaaacctctgaactgcagggt

SEQ ID NO: 1006620 - DNA, 120 bp, Artificial Sequence
  ENSG00000281560_20 (sequence is synthesized)
agaaaaggagcttgccgaaggtccctgcctgccttgccccacaatgtagcctctcccggaaaggcaagctcagcctccactggaacccacatctgacatctgtgtcctatagttggcacc

SEQ ID NO: 1006621 - DNA, 120 bp, Artificial Sequence
  ENSG00000241213_0 (sequence is synthesized)
ccaaatgctagactgaaaaaagaatgtaaacagcttgatggaggggaggatcctggtgcacctgtggttttgacagcttttgctgctgcttgaggaggaaacaggttgcctgtttgttct

SEQ ID NO: 1006622 - DNA, 120 bp, Artificial Sequence
  ENSG00000241213_1 (sequence is synthesized)
gaatgatgcttctacagaagatccctcttgctatttcattcagggagctcgggagaggaagacaaaaagaatcaaatgcaaagcacagatcattgaaagggccagggtctgaagtgagac

SEQ ID NO: 1006623 - DNA, 120 bp, Artificial Sequence
  ENSG00000241213_2 (sequence is synthesized)
aactcgtgtcacagtgttttcaaacttgagaatgaagagaagaaaggaaatttggtttgatgttatcagttttgatttgctaacccaaaaggtccagaataaagaacaaatcattataaa

SEQ ID NO: 1006624 - DNA, 75 bp, Artificial Sequence
  ENSG00000241213_3 (sequence is synthesized)
acagcttcacaggcagaacacaacacacagatgcaaggtctcctgatggcagaaaaccttataacagacggggtt

SEQ ID NO: 1006625 - DNA, 120 bp, Artificial Sequence
  ENSG00000241213_4 (sequence is synthesized)
ctcgtgtcacagtgttttcaaacttgagaatggtacagtaaattagaatgacttaattgtagtgattttaaaaagatatgagtcctctaatggatggattaaagaaaagaatagcaagaa

SEQ ID NO: 1006626 - DNA, 120 bp, Artificial Sequence
  ENSG00000241213_5 (sequence is synthesized)
aatgcacatataccaaattttgactgcccgtgtgtttatacagccaatgttctgttctggtcaagaagaaaagttccaaagatcttaaagatgtcccagaaaagttctagagtactatca

SEQ ID NO: 1006627 - DNA, 120 bp, Artificial Sequence
  ENSG00000241213_6 (sequence is synthesized)
gatctcacactttgccttggaagctgtcattcccctccattggccccacaactgcagtataatcttcagtgacaggagaaaatcgaccttgtttgtacagaagtctcagcaggaataggc

SEQ ID NO: 1006628 - DNA, 120 bp, Artificial Sequence
  ENSG00000241213_7 (sequence is synthesized)
agatgcctgtttttgctgccaaggatggaggattggaatgggcccattatatattttgaggctttgaagaaaagtctcaggatatgttttcccattaaaatactgttataaacaattaga

SEQ ID NO: 1006629 - DNA, 78 bp, Artificial Sequence
  ENSG00000241213_8 (sequence is synthesized)
acagcttcacaggcagaacacaacacacagatgcaaggtctcctgatggcagaaaaccttataaccagagacggggtt

SEQ ID NO: 1006630 - DNA, 120 bp, Artificial Sequence
  ENSG00000241213_9 (sequence is synthesized)
tgccttggcctcccaaagtgctgggattctgtaatcccagtgagccaccgcgcctggcccatcagatgcttcaggtgactacagccagctccagaggttccaaagatcttaaagatgtcc

SEQ ID NO: 1006631 - DNA, 120 bp, Artificial Sequence
  ENSG00000241213_10 (sequence is synthesized)
gataacctgtttatgtcaagacatcacagatgagaaaaaatagaatattaaatcattgagtcaacttcataactgaaagtttttaactgaaatatatatgcttcacagataatctaacaa

SEQ ID NO: 1006632 - DNA, 120 bp, Artificial Sequence
  ENSG00000241211_0 (sequence is synthesized)
tgcgtgcatcaccacaactaagaggaaggaaagagcactggatgtggagtgaggagacatggattctgtcactaccctgctctgcagaacccaatagtatgtcattgaaacaaaacaata

SEQ ID NO: 1006633 - DNA, 120 bp, Artificial Sequence
  ENSG00000241211_1 (sequence is synthesized)
caaaaccctgtctacaaaagaagactcataagtcaacaataactcgggtttcataaaggaagaaagtcttagaggaggaaaatcaacccattcaaatacaggagcatctgcttaacacaa

SEQ ID NO: 1006634 - DNA, 120 bp, Artificial Sequence
  ENSG00000241211_2 (sequence is synthesized)
tggtgtgggcaggcgaatgtgtgcgtgtgcataggaacaagcctatatatggatgagacattagtggcaacgagaggagagccaccacgattgacaaagccacaactattacgatttgaa

SEQ ID NO: 1006635 - DNA, 120 bp, Artificial Sequence
  ENSG00000241211_3 (sequence is synthesized)
atatcccccgcaggcactgacttttggtgccagaatctccccggatttattttcaggcaagtgactcacaacctggtctccataagtaattccattaaaatgagtcgccggttccactaa

SEQ ID NO: 1006636 - DNA, 120 bp, Artificial Sequence
  ENSG00000281566_0 (sequence is synthesized)
cctgatttaccaacataacctgtttctggccatgctgtgaatctgcattctttactgtgtccttgggatactaggaggaaccagaggagcagatcctgctaggaggctaagcatgaagaa

SEQ ID NO: 1006637 - DNA, 120 bp, Artificial Sequence
  ENSG00000281566_1 (sequence is synthesized)
ggaattcaaagaaaccttgtggagaacgaagacacagcagggagtctctgatcaagtgccacatctttagagaagcttttccaaacaaccgattatgaagtacacattaacaatgaagcc

SEQ ID NO: 1006638 - DNA, 120 bp, Artificial Sequence
  ENSG00000281566_2 (sequence is synthesized)
tcttttcaagtaaagaagttttatttgatatgattaaaataactataacatatatgcgaaatatgaagccaaataataaaattaagaagcatggatccatcattctactcaaaaagcctt

SEQ ID NO: 1006639 - DNA, 120 bp, Artificial Sequence
  ENSG00000281566_3 (sequence is synthesized)
caagctccagataatcctcagtgaggtatactgtccgctcaatatccaagagtcacccttctacaagggacctctagactgcccataagtgagacatgacagaggtaaagtcatgctcct

SEQ ID NO: 1006640 - DNA, 120 bp, Artificial Sequence
  ENSG00000281566_4 (sequence is synthesized)
gtctcccttggacctggctggaaactgcattcatcaacccatggaaccacccccctgccatgaaagctagcaagaggccaagacccacagaacaaccaccatcatccctctgtcagcagg

SEQ ID NO: 1006641 - DNA, 120 bp, Artificial Sequence
  ENSG00000281566_5 (sequence is synthesized)
acacacacacacacaccccacacacaaagaatcctgggcaaccatcaggcgattgtaaggtggttgttaactgtgtctctaaaataacgattggtcacaaccagtgcaatggaaaggcag

SEQ ID NO: 1006642 - DNA, 120 bp, Artificial Sequence
  ENSG00000281566_6 (sequence is synthesized)
ggtcacaaccagtgcaatggaaaggcagtctctcaataaacagaaacacctggagctgatgatcagcagcttcctgatcaggtctcagaagtttggcaagctggcctacacatgcgcact

SEQ ID NO: 1006643 - DNA, 120 bp, Artificial Sequence
  ENSG00000281566_7 (sequence is synthesized)
aagaggcaaaatggcacagtttaactggtatatgacttccaatggacattcagcatgtaagggaaaaatgcctcaagtaagcatgcatacaactccactaaacacactgtgcatgctccc

SEQ ID NO: 1006644 - DNA, 120 bp, Artificial Sequence
  ENSG00000281566_8 (sequence is synthesized)
ctctcaagtgctggcaggccagtgcacatggggacagcccaccccaaagaaagtctcaagggtgtagggatgcaagaccccgggaatatgccaatgtattaaaccctaagtcaaaaggtc

SEQ ID NO: 1006645 - DNA, 120 bp, Artificial Sequence
  ENSG00000281566_9 (sequence is synthesized)
aaatcatgcacttgtctttcaagtcacccacttgaccctcttccaagtgtactttccttccttttgttactactctaaagctttttaataaattttcactttttgaattcttgtctgcaa

SEQ ID NO: 1006646 - DNA, 120 bp, Artificial Sequence
  ENSG00000281566_10 (sequence is synthesized)
gctccgcctcccgggttcacgccatcttgccactaaacctgatttaccaacataacctgtttctggccatgctgtgaatctgcattctttactgtgtccttgggatactaggtctctgat

SEQ ID NO: 1006647 - DNA, 120 bp, Artificial Sequence
  ENSG00000281566_11 (sequence is synthesized)
taggtctctgatcaagtgccacatctttagagaagcttttccaaacaaccgtaagtaaaatagcatgtgtcctacccctacagtctgtctgtagtcccttattctgatctagtttcttca

SEQ ID NO: 1006648 - DNA, 120 bp, Artificial Sequence
  ENSG00000281566_12 (sequence is synthesized)
tggcacttatatctgacattatttgtttatgtattatatatctttccaattagaatatgagatggttgagagaaaggactgttctctgtcttggttcaccattgtatcccagcacataaa

SEQ ID NO: 1006649 - DNA, 120 bp, Artificial Sequence
  ENSG00000281566_13 (sequence is synthesized)
catttaatgttgacaataacgctatggggtagataccatcatccctattttgcaaaagagaaaatttaaatttagcaaggttaaataagttgttcagtggtcacacagcagttaattgga

SEQ ID NO: 1006650 - DNA, 120 bp, Artificial Sequence
  ENSG00000281566_14 (sequence is synthesized)
aaacccagtatttgaacacagatattctgattctagtggacttattcataatactctactgcctctagtgtttatttattgagcacttactatgtagcaagcactatgttaaatgtttta

SEQ ID NO: 1006651 - DNA, 120 bp, Artificial Sequence
  ENSG00000281566_15 (sequence is synthesized)
tgggcataatttcattcagtcaatatccctatctttacagagagaaacttaaatcttaggtaggttatgtaatttgccctagttacacacataataatgggctatcctttatgaaatatc

SEQ ID NO: 1006652 - DNA, 120 bp, Artificial Sequence
  ENSG00000281566_16 (sequence is synthesized)
attatgggttgaattgtgtcccacaaaaaggtctctgatcaagtgccacatctttagagaagcttttccaaacaaccgattatgaagtacacattaacaatgaagcctcttttcaagtaa

SEQ ID NO: 1006653 - DNA, 120 bp, Artificial Sequence
  ENSG00000281566_17 (sequence is synthesized)
agaagtgagtagttttatttgatatgattaaaataactataacatatatgcgaaatatgaagccaaataataaaattaagaagcatggatccatcattctactcaaaaaactctggtaac

SEQ ID NO: 1006654 - DNA, 120 bp, Artificial Sequence
  ENSG00000281566_18 (sequence is synthesized)
caccaatctacactctattttcatgagatccagttttatagctcccacatgtaacttttcagacatgaattggaataagataaggccaacttgctcaactacattccttactaaaacata

SEQ ID NO: 1006655 - DNA, 120 bp, Artificial Sequence
  ENSG00000281566_19 (sequence is synthesized)
cttggaagatttacctacaatctaactgatatacttaacaaaattatatttttaatattgattgtacaattttttactccttaattgtatctgacagcttcttatactttaaacttgatc

SEQ ID NO: 1006656 - DNA, 120 bp, Artificial Sequence
  ENSG00000281566_20 (sequence is synthesized)
acttgatcaacagtaaattgtgaagagagtaactatacaccacatggcttgacaatatccaaacatcattcttgttctacaaaagttacaaatgacggagtctcgctctgtcgcccaggc

SEQ ID NO: 1006657 - DNA, 120 bp, Artificial Sequence
  ENSG00000236199_0 (sequence is synthesized)
cattatgaaaaactgaacacatttattcaatttccaacaatcaccaattagaaatgggcttaaatgacaatacaaagaaagctataagcaaacattttgacagggggatgtgaagaatta

SEQ ID NO: 1006658 - DNA, 120 bp, Artificial Sequence
  ENSG00000236199_1 (sequence is synthesized)
tgtgtgtgtgtgtgcagatactgtctctttacacacagaagtacaatgcttgcatcttggtacacagactttgtgataggtttttttccttgtcatgagcctttttgccatgaaggagcc

SEQ ID NO: 1006659 - DNA, 120 bp, Artificial Sequence
  ENSG00000236199_2 (sequence is synthesized)
agtatgggaaagtggttaagaacatgagatcttaagtcaaattcctggggtctgaatcccgactctccatcattagttgtgtgacacatgcaaaggacttatcactgagaatggcacatg

SEQ ID NO: 1006660 - DNA, 88 bp, Artificial Sequence
  ENSG00000241219_0 (sequence is synthesized)
tgtgaggatgtcatgagaagatgttcatctgcaagccaggaagcaggccctccccagacactggattctagtactatgagaaataaat

SEQ ID NO: 1006661 - DNA, 120 bp, Artificial Sequence
  ENSG00000241219_1 (sequence is synthesized)
gtgtattgtttgagtcacccactcttcggtaatgtgttgcagcagcctgaactgactaagacaccatcttgtttctgaagtcttatgactccctaccacttccagggacctgccaactcc

SEQ ID NO: 1006662 - DNA, 120 bp, Artificial Sequence
  ENSG00000241219_2 (sequence is synthesized)
actcataatcgtgaaacactgaatccttaccaaaaaaggaatgcttccaggaaaatgtcatatggtgtgtttgataatttgggactcaggcttagatatggagtctagctctgtccccca

SEQ ID NO: 1006663 - DNA, 120 bp, Artificial Sequence
  ENSG00000241219_3 (sequence is synthesized)
gtgactctgctccttgaaaatacatttaagtgatgccattcctgtccaaaaccaccactgactccttcttcagagggcaagccttgaaatcatgtgcatttgcctgtgagacgtttctcc

SEQ ID NO: 1006664 - DNA, 120 bp, Artificial Sequence
  ENSG00000241219_4 (sequence is synthesized)
gaggttgcggatcttggtttgcagaggagggctgcaacgtagtaggttcctccacgtggcttctcactgaagccagaatgactcatttagagagtaatcttggtgcggcctcttgctgcc

SEQ ID NO: 1006665 - DNA, 120 bp, Artificial Sequence
  ENSG00000241219_5 (sequence is synthesized)
ctctggtggagaaaacgggtattgaacaagccataacgactgatctctgaggcaaatgctgtgaagtgtcagcgcaaaggtccacggggaataattacacttcaagctattatctaaatg

SEQ ID NO: 1006666 - DNA, 120 bp, Artificial Sequence
  ENSG00000241219_6 (sequence is synthesized)
aacggagttcatctaaatgaatggagttggaacggttgttctatgagaatctgatttctcagcaagagaagttttaattccatcccctttttatttctgtttgctgcgaactggtttctc

SEQ ID NO: 1006667 - DNA, 120 bp, Artificial Sequence
  ENSG00000241219_7 (sequence is synthesized)
atttctccacacttgctcttccttttcgtgaacaatcattttgtgtattttgagatcattataaaattcttgtacgctcattttaaaacatttccagaaagtgaaagtcagcatgtgacc

SEQ ID NO: 1006668 - DNA, 120 bp, Artificial Sequence
  ENSG00000241219_8 (sequence is synthesized)
caggaaaattctaattcttaaaacactcaagactctaaactagggtttagacctatatattcagatctaattccaaaccaaaattcatttcagaagtttaaataaaacgtattagtctta

SEQ ID NO: 1006669 - DNA, 120 bp, Artificial Sequence
  ENSG00000236740_0 (sequence is synthesized)
aggagcgttgccattgatggctatgggagttgtcaggctgtggctctctttctcacagagaatgccagaggcactcgggaaggcatttgccagggctctgacagatgtaaagtaagcctt

SEQ ID NO: 1006670 - DNA, 120 bp, Artificial Sequence
  ENSG00000236740_1 (sequence is synthesized)
atccatgttgtgttctcacctggacacctggaaggtgctcagtatagaaaagtcacgagctagatgagataccagcttgatgtcgactccctccccaacaatggctgcctgtcttcgtct

SEQ ID NO: 1006671 - DNA, 66 bp, Artificial Sequence
  ENSG00000236740_2 (sequence is synthesized)
ttgccgatgagtcaactttgaagtgtgcctcattctggaaagtgaatcacgtaatcacaatggagt

SEQ ID NO: 1006672 - DNA, 120 bp, Artificial Sequence
  ENSG00000236740_3 (sequence is synthesized)
acaggcatgagccatcacacccagcctcatatattgtattctgtatataattaagacctttccttttcaaggcaatatatataacaataaaaagatgaattaagtaagccctctgaatta

SEQ ID NO: 1006673 - DNA, 120 bp, Artificial Sequence
  ENSG00000236740_4 (sequence is synthesized)
ccctctgaattaatatattaagtggtccctcagaagggagaaattttgaaattaaatattatctaaagattttgatattcacttaatgggagtatctgaattaagtgtcacaactaaaat

SEQ ID NO: 1006674 - DNA, 120 bp, Artificial Sequence
  ENSG00000236740_5 (sequence is synthesized)
agtagagtggtcacattccctagcaccagttctcaaactttgttaaaaatgcagattcctgagctctatcattaaacatttttatttagaagtggggagtgtggccttcgtatttcagct

SEQ ID NO: 1006675 - DNA, 120 bp, Artificial Sequence
  ENSG00000236740_6 (sequence is synthesized)
gcttaactagtagcacagcgaagacggtataagggtctttggatcactttttgaaaagcatggtcttagagagaaggaacagcccacactcgttcacagtgtagcaacacgcgggaaaga

SEQ ID NO: 1006676 - DNA, 120 bp, Artificial Sequence
  ENSG00000236740_7 (sequence is synthesized)
gaacagtcaaattgttttgatgatgacgaaaggaaatgcaggctttctagtatatacaaaacatattcaaaaatctagaagtttatcactaaggtttttggaagtaaatctacatttagc

SEQ ID NO: 1006677 - DNA, 120 bp, Artificial Sequence
  ENSG00000236740_8 (sequence is synthesized)
aactcaattttttagattttattctcaattatctggacatgagatttaggtctgtgattctcaggtcttcttagttatacatatcactcaaggagctatggactccaaatgacttatgtt

SEQ ID NO: 1006678 - DNA, 120 bp, Artificial Sequence
  ENSG00000236740_9 (sequence is synthesized)
tgtgataaagcctcatttaccccacaataataggaaagctgctctgattttctgaagttagaaatgaaagattaagtaagtacatttgttatagtttaatattacacattgtatgatgaa

SEQ ID NO: 1006679 - DNA, 120 bp, Artificial Sequence
  ENSG00000236740_10 (sequence is synthesized)
aacattgtctcctacactgcctcctattatctggaaaattagtaatactaaagtgttctttcaaaaccagagacctaaatggctggaagcaataattgctagagctctccaccaagcttt

SEQ ID NO: 1006680 - DNA, 120 bp, Artificial Sequence
  ENSG00000236740_11 (sequence is synthesized)
tctgtttattcctttagagcatagattagagtccattgtggttctcatctctgttatgcatgtttttttatgaataaaatgccaggcacacagagcatacatatgcacattttactacga

SEQ ID NO: 1006681 - DNA, 120 bp, Artificial Sequence
  ENSG00000236740_12 (sequence is synthesized)
gatagtaaaagctcaatgtgctgggactgcattcccaatgtgaccttattttcccactctttgcagttttaaaatgttacgttaatctggcgttctggacggggattttctcttctttac

SEQ ID NO: 1006682 - DNA, 120 bp, Artificial Sequence
  ENSG00000236740_13 (sequence is synthesized)
agtgagtcccagcagtatatagcggccatagaatagctaaacttgaagaggctttttggcaaagatttgaatatatgtcctttggccttttctggttcttgtctgtatttcataatacaa

SEQ ID NO: 1006683 - DNA, 120 bp, Artificial Sequence
  ENSG00000236740_14 (sequence is synthesized)
aactaatgaggatttcactttggtgaaatctgccttactaaatgatgcttgcaaataacacattcatttgttagcatttgggattctgattaaatcattttgctttagtagctgttaaag

SEQ ID NO: 1006684 - DNA, 120 bp, Artificial Sequence
  ENSG00000236740_15 (sequence is synthesized)
attatagtttgaaagaaaaaagtgttttggcattgagtactttgagacccctgtacagtgtaccaaaatctatgcaaattgttacgaggccttttaattacaggtgaaccccagcactta

SEQ ID NO: 1006685 - DNA, 120 bp, Artificial Sequence
  ENSG00000236740_16 (sequence is synthesized)
ttatcatctgatgcacagattatgcacatgtcatatattggtaataaaatatcaaagttagactgacactcttaaagtgcttaacactgttttattggcttactagccctaactggattc

SEQ ID NO: 1006686 - DNA, 120 bp, Artificial Sequence
  ENSG00000236740_17 (sequence is synthesized)
attgcatccatttttttcattctgccacttaaaacatttgccacgttgttttattcatgcttttatcacagctttgtctgtaactacattgacttgattactcatattctatggcaattc

SEQ ID NO: 1006687 - DNA, 120 bp, Artificial Sequence
  ENSG00000236740_18 (sequence is synthesized)
ctgacatttggcttatttttccactagcctccttacttttaaaaaccactccatctcatttttcaacaacctctgattatctcaaagttacctcggattatcctgacacgtccttcggct

SEQ ID NO: 1006688 - DNA, 120 bp, Artificial Sequence
  ENSG00000236740_19 (sequence is synthesized)
tctgaggatattgactcagtatttcaagactgaggtgactctgagacagaagacggagccagtggtgatgtgctcccttattcagactctttgaataatgctttttactcagctatggac

SEQ ID NO: 1006689 - DNA, 120 bp, Artificial Sequence
  ENSG00000236740_20 (sequence is synthesized)
tctgctagaaagacactttaatatttttgccatttatatttttctgttgttgaaaaataatagaaaccagtgccttagttggtttaacaattcaacaaagttgttttcaaaagaagaaag

SEQ ID NO: 1006690 - DNA, 120 bp, Artificial Sequence
  ENSG00000236740_21 (sequence is synthesized)
aaaatgtaactccatttaggttgtctttcatttgcaaacactaactgaaacttgagttagggattgtataacttggaaacagtattaataaaatgaagtcattgtcatattaaaaatgtc

SEQ ID NO: 1006691 - DNA, 120 bp, Artificial Sequence
  ENSG00000236740_22 (sequence is synthesized)
ctaatgttcactttaagtgtatttttaaaaacctcacaggcaatggtgtgaaagaaaccaaggagatgtttacattcattagttccactggaaaaaactggttaatgtaattgtatagat

SEQ ID NO: 1006692 - DNA, 120 bp, Artificial Sequence
  ENSG00000236740_23 (sequence is synthesized)
ttttcccttcttgttttgtgtgctgtataacccagtctttgctttatgtacaaataccctggtttctaaatgctacttattttcttcagaaataaagtatgctttcaatttagtgagtaa

SEQ ID NO: 1006693 - DNA, 120 bp, Artificial Sequence
  ENSG00000286699_0 (sequence is synthesized)
gcgaggcgaaagatctcgttttccctgacagctgacttcctctggcgcaattcatccagaggcgctggagggttctcgggcccagagggcctgccaaaaaggcagtcagacagttggttt

SEQ ID NO: 1006694 - DNA, 67 bp, Artificial Sequence
  ENSG00000286699_1 (sequence is synthesized)
cccagagggcctgccaaaaaggcagtcagacagttggtttatgagtcattctgtctctgtctctcct

SEQ ID NO: 1006695 - DNA, 120 bp, Artificial Sequence
  ENSG00000286699_2 (sequence is synthesized)
ggcctcccaaagtgttgggattataggcgggagccactgcgcccggcccattctgcctctcttactgccaagtatcctagagccatcttccggctgcagggaatgtgaactgaagagaaa

SEQ ID NO: 1006696 - DNA, 120 bp, Artificial Sequence
  ENSG00000286699_3 (sequence is synthesized)
tatcctagagccatcttccggctgcagggaatgtgaactgaagagaaaggtgtcctctcttctcataaagagacccaaagacgaatgccccgcagtctctcgttccaccttacgagaaac

SEQ ID NO: 1006697 - DNA, 64 bp, Artificial Sequence
  ENSG00000286699_4 (sequence is synthesized)
gacgagagatcccgagtacatctacagtcagccttgcgtctgcaggtgtacccaacagctccga

SEQ ID NO: 1006698 - DNA, 73 bp, Artificial Sequence
  ENSG00000286699_5 (sequence is synthesized)
gaccctctccccactattgtcttgtgaccatgacacatccccctctccggcgcggatcctccatatgctgaac

SEQ ID NO: 1006699 - DNA, 120 bp, Artificial Sequence
  ENSG00000286698_0 (sequence is synthesized)
gccctgctccttggtgaagatgctatccacagaagcagagtcaaggatgcttccatgagtctgccatcagcatcaggacccactgcaggcctgctgcctcccacagagcccgcaaggcag

SEQ ID NO: 1006700 - DNA, 120 bp, Artificial Sequence
  ENSG00000286698_1 (sequence is synthesized)
gaacgtgacacacccatctcagcagcctcaccagcatggcagcctggcacttaacaacaggcagaagccacctgggatggaagaaggagaaccccgcactcccctgaaagaaggcagagg

SEQ ID NO: 1006701 - DNA, 120 bp, Artificial Sequence
  ENSG00000286698_2 (sequence is synthesized)
ccagtcctctgagggatggggcagtcatccctcagaatgtgaaaggagagccagtgttcacatgctctggactcatggaagtcaaagaaaagccctctgctatcccaatctgccaggtca

SEQ ID NO: 1006702 - DNA, 120 bp, Artificial Sequence
  ENSG00000286698_3 (sequence is synthesized)
gcaataagaaatagaagaaaaccgatttggcaacatccagagggtattaaatattcatcctgagtgcccatcagtaaaatcccagcagaatacaccctctgacaagtcagctttccacca

SEQ ID NO: 1006703 - DNA, 120 bp, Artificial Sequence
  ENSG00000286698_4 (sequence is synthesized)
ctggaggctgtcctcatggaaacttgtttatggctttgtcaattttaatagccaaaccaagatattgtcgtaaacatttggaaaatgagtgctgacatttcccttactgcttctgtattt

SEQ ID NO: 1006704 - DNA, 120 bp, Artificial Sequence
  ENSG00000286698_5 (sequence is synthesized)
aggtatgtgtaattggagggcgttttgagctaaagaaaatcagaaggaagcaaggcaattatgctttacaattaaaagagaaaactgattaagagctaacaatcaaatatgtgaactggc

SEQ ID NO: 1006705 - DNA, 120 bp, Artificial Sequence
  ENSG00000286698_6 (sequence is synthesized)
agactaagctagatcaatggcaacatgacagtgatggcattccttgaagattctgttggggatgtgcatacgcaacaggaagcacacacagggcatggtcaaataacagatccacaagtc

SEQ ID NO: 1006706 - DNA, 120 bp, Artificial Sequence
  ENSG00000286698_7 (sequence is synthesized)
aactgtgccatccaaccagagattctgatgaatactgatatgggggcaggatcagcagggacgagtctggggcacagaccacagagaagcttgctgtgataaatgatatcacagcagtgg

SEQ ID NO: 1006707 - DNA, 120 bp, Artificial Sequence
  ENSG00000286698_8 (sequence is synthesized)
aaggctgatggtaaatggaccagcatgagtgagtcaacagtccctgggttcctatttgattctgatggaatacgaatatttaacacaatattctttaaaacgggggtagcaggggacact

SEQ ID NO: 1006708 - DNA, 120 bp, Artificial Sequence
  ENSG00000286698_9 (sequence is synthesized)
tctatggacgacaccagagcagggctaagaatctatgttttgaggggcaaggtatgcagggagagcaaaagaagagaggacagcgctggttctgagctctggtatccccaggtcttagag

SEQ ID NO: 1006709 - DNA, 120 bp, Artificial Sequence
  ENSG00000286698_10 (sequence is synthesized)
ccaccttgtggcagaagctggaagaatcaggagttaaaagaggcacaagataaaacttctacaccatcagcaaactgtgtcttgaggaacctctaccagtgtcttatgaccccaacttcc

SEQ ID NO: 1006710 - DNA, 120 bp, Artificial Sequence
  ENSG00000286698_11 (sequence is synthesized)
aaaaaacaaatttaaggacttgctaaaggggattaggaaatcaggagtggttaaccagagagaggaaacattaattacaagcatacggtaccaaagaggattcctgagaagaaaaacact

SEQ ID NO: 1006711 - DNA, 120 bp, Artificial Sequence
  ENSG00000286693_0 (sequence is synthesized)
ggactcacaaactaagtgtgaaattaattttaaaaacacatacatgcatttctaagtaactctcacattggccaccccatggatacctatgatcttttttgtgctatatgacagaatcag

SEQ ID NO: 1006712 - DNA, 120 bp, Artificial Sequence
  ENSG00000286693_1 (sequence is synthesized)
tggacagcatgcaccatgtggccgggagcaaggtaagagtccacttactccacctgtcatcctgagggtcctgacacaagcacaggccaaatattcagtgatctgtttatttctctctcc

SEQ ID NO: 1006713 - DNA, 120 bp, Artificial Sequence
  ENSG00000286693_2 (sequence is synthesized)
ctcaatgcccatacacatgaacacacatatacacagccaggtgcccccaaactcagtcttcccataaattcaaaatcaaacatgcatgatgtcagaggaccaatacttaagtagtaatga

SEQ ID NO: 1006714 - DNA, 120 bp, Artificial Sequence
  ENSG00000286693_3 (sequence is synthesized)
ttttttttaatgggcagcagacagcagggaaataagtttaaatgtttatttttgctgttttcccaaattcttagactttgcaagtaatgatatctttgtatctccagccttcctgaagca

SEQ ID NO: 1006715 - DNA, 120 bp, Artificial Sequence
  ENSG00000286693_4 (sequence is synthesized)
acataaggaaataggaacagaatggctttactggatttttccctcatgtcttgtgacccctgtcccaagttacctatttctgtctatcctcacagggtcttaattctctcaaagaagtta

SEQ ID NO: 1006716 - DNA, 120 bp, Artificial Sequence
  ENSG00000286693_5 (sequence is synthesized)
gctcataatagctattaactcttccaagctctttgaattttaataccctaagatttaaaagatcaaaagtcattcagttgatactagaatgagagatgctaggcagggacgtctttcaca

SEQ ID NO: 1006717 - DNA, 120 bp, Artificial Sequence
  ENSG00000286693_6 (sequence is synthesized)
agctttacaaaccaaaccagccaggccgttgtctaatctcctactaatgagagctgtattaatgttgccccagtatcttgaagtttccctagcgtcctttacatatttctgatgtatgag

SEQ ID NO: 1006718 - DNA, 120 bp, Artificial Sequence
  ENSG00000286693_7 (sequence is synthesized)
aatgacttggggaacatattaacacatagattcttaggagctcctcaaccaggaattcaaatttatttgttctgttctgaggtggtgcatatttaatttaacaagctccagccacactct

SEQ ID NO: 1006719 - DNA, 120 bp, Artificial Sequence
  ENSG00000286693_8 (sequence is synthesized)
gagattctgatgcatgtggattctgatccaccttttgagaaacatttttctaaaatcatggttctcagccccacctgcaccttggagtcacctgaggagctttgaaaaatagagatacct

SEQ ID NO: 1006720 - DNA, 120 bp, Artificial Sequence
  ENSG00000286693_9 (sequence is synthesized)
gggtcctgaaaaccctccaccttaaattccaatagccttgatacagcctggaaattgggaattttaaaaggcctacaggtgatactaaagagcataaggtcaaatgccatactgctagcc

SEQ ID NO: 1006721 - DNA, 120 bp, Artificial Sequence
  ENSG00000286693_10 (sequence is synthesized)
gcctaagccagtaccaacaccccaatcctcagctcgtcattatttcaccatggagttctggatcctaatctgcccagctgccatggattccacaggagattcttatcaggatgagaaaag

SEQ ID NO: 1006722 - DNA, 120 bp, Artificial Sequence
  ENSG00000286693_11 (sequence is synthesized)
cagtgagctttcagcctgtcactctattatatacaaccagaagcctgctcaggaacgaagattactctgggtagcagaatgaaactccattaaaaacaggctctacagattgattttaaa

SEQ ID NO: 1006723 - DNA, 120 bp, Artificial Sequence
  ENSG00000286693_12 (sequence is synthesized)
gccacctacactgcagtttcttcaatttagctctacttatctgattatgcatcacaaaaggaagcagaaattcagcttaattgtgaagccattgcagcagaaccaagcaaatgatagaaa

SEQ ID NO: 1006724 - DNA, 120 bp, Artificial Sequence
  ENSG00000286693_13 (sequence is synthesized)
acctcatgatcacagacagaatcacactcactgatgctgaatgaaatgacagacatccgtccctctgcagaagcctgaatactgatcacagaattttacgttctgacattgtgtgtctct

SEQ ID NO: 1006725 - DNA, 120 bp, Artificial Sequence
  ENSG00000286693_14 (sequence is synthesized)
tgtcagatagtgttgtcctttactttccccgcttcagttgtgaaagtcaggtgcagtctcatactatttttttttaaaattcattatgacaagtaaatggtctctgggaaagcgaacatc

SEQ ID NO: 1006726 - DNA, 120 bp, Artificial Sequence
  ENSG00000286693_15 (sequence is synthesized)
ctcatccactgtttactgaaactgtaacactgtcatgagtgaagaatgaaacatgtttaatgtaaagagtttgcagaatgatgatcagaggaaaagaacattaaacagaagaaacataaa

SEQ ID NO: 1006727 - DNA, 120 bp, Artificial Sequence
  ENSG00000286693_16 (sequence is synthesized)
tataagaatggggagagagatgtaatcaaaagacagcttgtaagggaggttacatgctgccatttgcttttcagctgtgttttccatagtgggacagatcttgctctttgttacttctac

SEQ ID NO: 1006728 - DNA, 120 bp, Artificial Sequence
  ENSG00000286693_17 (sequence is synthesized)
ttttgctttttcccatctgcaaagagggaaacaatctgcttttgaatctctggtgaagcatcacctagaagctgctgccaaagcttgatatccagagtgctctaaaacatagtgtgatgt

SEQ ID NO: 1006729 - DNA, 120 bp, Artificial Sequence
  ENSG00000286693_18 (sequence is synthesized)
gccctttcatcttaaaggattatttttggctgggcagacctctctaagatagattataaggagctggcttttaaaggcaatgaaaactgcttctgtattcacatttaccccctccctcca

SEQ ID NO: 1006730 - DNA, 120 bp, Artificial Sequence
  ENSG00000286693_19 (sequence is synthesized)
ttatctgaggtatgtaaataatgttttaaagtggtgatgtgagaatattaattatgttttcatttcttgttcctgttaccatgtaatatatcttcaagtgctgagaaaacatcttacaaa

SEQ ID NO: 1006731 - DNA, 120 bp, Artificial Sequence
  ENSG00000286692_0 (sequence is synthesized)
ggactccttcagggtctccggaaacgcggcgcggaggagctgttgctactcagccctgcgaggcgtcagtgctgcccctgcctcacccctaccctcccactcttcgcgcgcacaccccgg

SEQ ID NO: 1006732 - DNA, 120 bp, Artificial Sequence
  ENSG00000286692_1 (sequence is synthesized)
ctttcacaataactggatgagcgggcctggcctgcagcgacgacctagtgggccctgcctctccactcccgcggtgatgtaccgttaccaccctcttaaaggagcccaggaaggaggcgg

SEQ ID NO: 1006733 - DNA, 120 bp, Artificial Sequence
  ENSG00000286692_2 (sequence is synthesized)
ccgtcacagagcgtgtagggaaaacacagcacagtgattatcaggacgaaaccaaacaatcggaactccgcagaggtgtagggagatgtgaggagaatgacacagatcaaagagcttttt

SEQ ID NO: 1006734 - DNA, 120 bp, Artificial Sequence
  ENSG00000286692_3 (sequence is synthesized)
ccaagccagtattttccaaaccgcgggttataatctctagcgcattgtgaaattggtttggtagatcgggatcatcaccctccgtttttaataaaattgagaatagaacaaaatagaaaa

SEQ ID NO: 1006735 - DNA, 120 bp, Artificial Sequence
  ENSG00000286691_0 (sequence is synthesized)
cctttttcaaagctgtactgttgtcggtaaattctttttaccaaccccccagtcgaccacttcccggtgccggggctctgacaccgcgcgcagagacagaggcaggcggccccctctctg

SEQ ID NO: 1006736 - DNA, 120 bp, Artificial Sequence
  ENSG00000286691_1 (sequence is synthesized)
ctgccccttctccctgctggtctcatgaatgctctcacctgagcttctccttttccttttctactttctcctttaccaagggcgcagctgctcttcggagaggcagttgggtccacagaa

SEQ ID NO: 1006737 - DNA, 120 bp, Artificial Sequence
  ENSG00000286691_2 (sequence is synthesized)
tcagctgcctcttggagagcggtgtgaggttatgagggagctgaggggaagtaaagagagggtccagtgtgcctcaccttggtcccacacaccgaaggaaagggtttcagagaggactgg

SEQ ID NO: 1006738 - DNA, 120 bp, Artificial Sequence
  ENSG00000286691_3 (sequence is synthesized)
tggatgctgacacaccgtccattttgagaagactccttgtatgggtggcagtgtgcttccccaaaactcatgttgaagccctaacccataacaccttagaatgtgactgtatttagagac

SEQ ID NO: 1006739 - DNA, 120 bp, Artificial Sequence
  ENSG00000286691_4 (sequence is synthesized)
tggatttctaaagaggcgattaattttaaagagaccattagggtgagccctaatccaatctgcctgctgttcttataagaagaggaaattgaacctgcaaggagctattagggcctcttg

SEQ ID NO: 1006740 - DNA, 120 bp, Artificial Sequence
  ENSG00000286691_5 (sequence is synthesized)
cagagagggatgaccgcatgcagaggccacaagagggcgccctctgcaagccaaggagaaacctcagaagacaccaaccctgaagaggaaattgatgttggacttctggcctccggaaga

SEQ ID NO: 1006741 - DNA, 120 bp, Artificial Sequence
  ENSG00000286691_6 (sequence is synthesized)
cagctgcctccttgctaagagaaagacgtttcagtgtctgcctcctgggaatggagtctcctggtgactctgaggatggcgcaggactctcccagctaacactacacagaggctccccct

SEQ ID NO: 1006742 - DNA, 120 bp, Artificial Sequence
  ENSG00000286691_7 (sequence is synthesized)
cttcatgccacccctttgccagctgcagcctgtgtggacccagacacttctgacccaggctccagtgcccgcatgtctgatagcctgtatttcaaactctgggctctcctggacattccc

SEQ ID NO: 1006743 - DNA, 120 bp, Artificial Sequence
  ENSG00000286691_8 (sequence is synthesized)
tctccagctgtatatgatgttatttttcagacccatttactgttgtccagtggcctgccaagacctttaggtgaagacgctgactccctcgccggctcttcttcattcttttcaaacaca

SEQ ID NO: 1006744 - DNA, 120 bp, Artificial Sequence
  ENSG00000286691_9 (sequence is synthesized)
cgtcagagtggaacgcacatcctttttgcttcaccttccagggagagaacgagtcttgaagcatcaacagctctttgaacacttcccaggaagactattcaaggacatctctactggaat

SEQ ID NO: 1006745 - DNA, 120 bp, Artificial Sequence
  ENSG00000286691_10 (sequence is synthesized)
cagaattatttccttggagatggagagctccaaaacccacagtgcttggaagtgagtattgtgtggttggagatagtttgcagactttagatggtagctgtggatggtgaactgaaagtc

SEQ ID NO: 1006746 - DNA, 120 bp, Artificial Sequence
  ENSG00000286691_11 (sequence is synthesized)
atcctcagcttaatgatgagttgtcatttataaaagatatccaaattttttattgcaattattgtatagaagtgatctcacatctgttctccttttctctgcttcccaaaggtattatac

SEQ ID NO: 1006747 - DNA, 120 bp, Artificial Sequence
  ENSG00000286690_0 (sequence is synthesized)
tcctacaaatggcctgacactcactgtaacttatcttcacagtgcaccattcagaagaatttgaagagactgcacatcaatctctttcatttctagagcagtttagaggattttttttct

SEQ ID NO: 1006748 - DNA, 120 bp, Artificial Sequence
  ENSG00000286690_1 (sequence is synthesized)
tttatataggagtcatgacaagagccaactgaagcttttctgcaaatacatctcccacgatatgttacttctctttctctttcacgatgctgaaacagaaaaaggaaactactctctccg

SEQ ID NO: 1006749 - DNA, 120 bp, Artificial Sequence
  ENSG00000286690_2 (sequence is synthesized)
tagtaaaaggagcttcattggataccctgcaaggtataaaagctgaaatgagaaatgagaaaacatacaattctttaagtctaggccttgaaaagttgccgaagattagtgaagaaagaa

SEQ ID NO: 1006750 - DNA, 120 bp, Artificial Sequence
  ENSG00000286690_3 (sequence is synthesized)
cacaagttctccagttcttccctctgaatttacggcactgtgttgatatagctttagctgtcctctctgatataatgtgtatgctgctttcatatgaaataagtcacatgaatggagtca

SEQ ID NO: 1006751 - DNA, 120 bp, Artificial Sequence
  ENSG00000286690_4 (sequence is synthesized)
gtgattcctttccaaaattcctgacagatgttccacacaccccaaaattactgatctttattcaataatcaaattctcagcagataaccatttttcaaagaaatgttattttgcctgcta

SEQ ID NO: 1006752 - DNA, 120 bp, Artificial Sequence
  ENSG00000286690_5 (sequence is synthesized)
aatgaaaggaagggagatcattaacagttctctaagaaatgcattttaaatgaaaggctttttttttcagcctttggaaagaagaatatcaaaagttaaactgaaacatccagggaaaac

SEQ ID NO: 1006753 - DNA, 120 bp, Artificial Sequence
  ENSG00000286690_6 (sequence is synthesized)
tcaaattaatatgttaattctgtcaacgttcaaggttctgagtccaagcctagaagtagcgtagcatatggtgatttactgctccctagctatcattttaactacagtttttgaaatcac

SEQ ID NO: 1006754 - DNA, 120 bp, Artificial Sequence
  ENSG00000286697_0 (sequence is synthesized)
cccagtcgcctccttgcccagcctgctaactgctagaaaccaacaagggcataccagggtctgacttgggaagagttgccaatccatccaggagggcccagtgaaagcaaacattccgaa

SEQ ID NO: 1006755 - DNA, 120 bp, Artificial Sequence
  ENSG00000286697_1 (sequence is synthesized)
ggcaaaaaaacctgaaagctcagaaggtaaacaacttgtccagattgcgcacagagtggctgatttagtagaggcaaacaattccaagttagaaacagacagctgaccagcggtccatgg

SEQ ID NO: 1006756 - DNA, 120 bp, Artificial Sequence
  ENSG00000286697_2 (sequence is synthesized)
agcatcctgtgctgcttcaagggtccagagtggggaagcagctgggaccctcggcctcagtggaatggcatcaggggccctacttccagccagcaggctccagctacgagcacatgagaa

SEQ ID NO: 1006757 - DNA, 120 bp, Artificial Sequence
  ENSG00000286697_3 (sequence is synthesized)
aagatcctgaaggcaggcactgtccacaaatcactcaagaattgaacattttttcattttgaaatgaaactgcatttgagggtactgccaactataaatcaaatgttgccttttgaaaaa

SEQ ID NO: 1006758 - DNA, 120 bp, Artificial Sequence
  ENSG00000286697_4 (sequence is synthesized)
aggaaaggaaaagaaagtaatcaactaaatggagactgttgcctcctatcacaacgtcttgcaattaaaggtccatttcttctctaagttctccttttctcctaggaaaattgaatgttt

SEQ ID NO: 1006759 - DNA, 120 bp, Artificial Sequence
  ENSG00000286697_5 (sequence is synthesized)
ttctagttatgagacgagaatgctaaccaaaattgttgccagttcaaaatgtgttatcttagtggtgtttaatgtccaagaaaaaaacaattagctctcttccatgtttcaaagcccaaa

SEQ ID NO: 1006760 - DNA, 120 bp, Artificial Sequence
  ENSG00000286697_6 (sequence is synthesized)
atcgtaagaggacagtttgaagttttatgcatggcactggatattttgagggtagtgtattttaattactttttaattgaagtatactttatatataataaagtgtgcaagactggtaaa

SEQ ID NO: 1006761 - DNA, 120 bp, Artificial Sequence
  ENSG00000286696_0 (sequence is synthesized)
cttccatctctgcagaggaagagcaggagaagacagagctgagggacagaccttctcacctggagactgtcctgcggtcaggagtcaatggggaaagccatggtctccctggacccagag

SEQ ID NO: 1006762 - DNA, 120 bp, Artificial Sequence
  ENSG00000286696_1 (sequence is synthesized)
ccagcctcccaccagggaactgtgacggggctatggccttgccagcactcgagaggccttccctgcctgccacggcccttctccagtgggtgcgtccttcctcctcactgctgcgccagt

SEQ ID NO: 1006763 - DNA, 120 bp, Artificial Sequence
  ENSG00000286696_2 (sequence is synthesized)
cataggatgacaggtttatctgcccatctacatctacactgagaagtctacaagggcacggaatcatcttgttcctcatcaccagatccccaagctcatccccaagaccagcacaagggt

SEQ ID NO: 1006764 - DNA, 120 bp, Artificial Sequence
  ENSG00000286696_3 (sequence is synthesized)
ggccccggcaaatgtttgctgaatgaatatgtccacccttgagggcacatgctgatgatccatttcctccaaatgatcctcagcctttggcccacgagagaaaaagataggaaagaacgc

SEQ ID NO: 1006765 - DNA, 120 bp, Artificial Sequence
  ENSG00000286696_4 (sequence is synthesized)
gaacttaagggtttcccctgacttcccaggtttcaatttctcctccagatttctcgaaatctaagatttaaacaggccaccacagactctgcccagcccctcccatcccagagagagaga

SEQ ID NO: 1006766 - DNA, 120 bp, Artificial Sequence
  ENSG00000286696_5 (sequence is synthesized)
aatcctaagacattaaatctcagaaaaggatgagccccctcccctaccctctttgggcatttggggaaactggggttcagtaaaaggcaaagacttgcccagtcacagagcaaattaggt

SEQ ID NO: 1006767 - DNA, 120 bp, Artificial Sequence
  ENSG00000286696_6 (sequence is synthesized)
cacagcctgaaccaggctcccgacctcccagctctctcccctataccatggtcatcattggacctgtgccagcgtccattccaccggacctgctctcagaatcttcactgtccaggacag

SEQ ID NO: 1006768 - DNA, 120 bp, Artificial Sequence
  ENSG00000286696_7 (sequence is synthesized)
gtcacagagcttggtaggaagctcctggtgacctcaccaagcatctctcttggcttaggaaactccccctctcctccggggaattgcccccccaccatgagactctgtggagggagttca

SEQ ID NO: 1006769 - DNA, 120 bp, Artificial Sequence
  ENSG00000286696_8 (sequence is synthesized)
ccttgaaggtgatgaacacatctaagtccccaagggggcaaggatttccactggaaatgctgatgcttgggaagccccagatgtgacctcatcccctggaggaggtaacaacaacctcct

SEQ ID NO: 1006770 - DNA, 120 bp, Artificial Sequence
  ENSG00000286696_9 (sequence is synthesized)
gccctggggagcagccccagaatggctccccagcagccaccaagtcaacaataacatcccgttgtttcactggacaaaagcgagggagggcagaaccagccgggcaggttgagactgggg

SEQ ID NO: 1006771 - DNA, 120 bp, Artificial Sequence
  ENSG00000286696_10 (sequence is synthesized)
atatgggttctgtttccccatggacaggctggttcacctctgaccttggggttccaagccttctttagctcctccaaccactgataaaatggaagaggggtgcacagcttacaaacgcat

SEQ ID NO: 1006772 - DNA, 120 bp, Artificial Sequence
  ENSG00000286696_11 (sequence is synthesized)
gccaacctcctgctaagccccagccctcacctgcaatctactcccttacagttcctgcttacaggaagatcaggaccacacatgcacatccttgactggcccatgtgtcagtgacagccc

SEQ ID NO: 1006773 - DNA, 120 bp, Artificial Sequence
  ENSG00000286696_12 (sequence is synthesized)
ttgggggacaatccctacagcctttcttgctctggcaggctctaagggtcaaagacaagtgtggagctcaaggacacccagcaggtacatgatggcccatctctctccctggcctgagct

SEQ ID NO: 1006774 - DNA, 120 bp, Artificial Sequence
  ENSG00000286696_13 (sequence is synthesized)
acgctgtgccagactttcatcaagctgcagaggcagcaatctccctgatcagtgcaggctgggcccctctcagagttccctgctttaatctttctctagaacttggggatccaagcagca

SEQ ID NO: 1006775 - DNA, 120 bp, Artificial Sequence
  ENSG00000286695_0 (sequence is synthesized)
tttttcacattcagtatgatgttagctgtgggtttgtcgtatgtggcatttattatgttaagatttcaatgcagcaaaccctgtgaaaacctaatcaaactttttattaaatatgaagat

SEQ ID NO: 1006776 - DNA, 120 bp, Artificial Sequence
  ENSG00000286695_1 (sequence is synthesized)
tcagagcagaatggagctgaatggatgctgggcagaggacattgaacttcacttcctccttggaagctagatttggccatgtgattagctacagttaatgtttgtaagtggaagccttaa

SEQ ID NO: 1006777 - DNA, 120 bp, Artificial Sequence
  ENSG00000286695_2 (sequence is synthesized)
aagttgatgtgcaatttgctacactcccttcccactgccaaatgttggtgaaaacgtgtcaagatgatgcctctgccagcttgagtcttcatacccttcttctgacttgctttggacatg

SEQ ID NO: 1006778 - DNA, 120 bp, Artificial Sequence
  ENSG00000286695_3 (sequence is synthesized)
tagtatcatggagaactaggatttcaaactggatcattttgagggtaaaagggacaacaggcacaatttgacaatgtatgttcatcctagtgaaacttgtaatgttaagccactgagacc

SEQ ID NO: 1006779 - DNA, 120 bp, Artificial Sequence
  ENSG00000286695_4 (sequence is synthesized)
tgggggttgtttttttaccgcagcgtaacctagcctatcttgattgatatataaatgcatgtatagaaatgctcaataactcattcatagaagtgcaacaaatgactcatgttgcactat

SEQ ID NO: 1006780 - DNA, 120 bp, Artificial Sequence
  ENSG00000286695_5 (sequence is synthesized)
aactgtgtgaggttggtaagaaaatggattctaacatctaggcctaaggtgagtcagctacatggacactgacaagtgagtaacctgctgggatcaagagctcttggcttccaagtgaag

SEQ ID NO: 1006781 - DNA, 120 bp, Artificial Sequence
  ENSG00000286695_6 (sequence is synthesized)
gcccagaaagactagcctcggtcttgtctgtatgaccgtatatgcttaagagtatggcaccaagtttttaccgtggaggagcctgagccaacctacagaatgtttgatttgaccagcaga

SEQ ID NO: 1006782 - DNA, 120 bp, Artificial Sequence
  ENSG00000286695_7 (sequence is synthesized)
gtattgtagacaaaacatgaatttgcagccctttcagttgaggaagcactctcagctttgccactgccctttgtttctttctgtcatttgatcctgctcttttccacttcttcacctcag

SEQ ID NO: 1006783 - DNA, 120 bp, Artificial Sequence
  ENSG00000286695_8 (sequence is synthesized)
ttgtattacctgcctggcttttgaagacatttgagtttggacctctgcagggaaccattgtacctgagatggaaagcacagcagcccgcatggacagaaacagggcacttcacctctgca

SEQ ID NO: 1006784 - DNA, 120 bp, Artificial Sequence
  ENSG00000286695_9 (sequence is synthesized)
gtgttccttccataaccccagtctaatcataagcaaaataatcagacaaacccagattaggagacatcctacaggatacctggacagcattcctaaagcctgtcagggtcacaaaaaaca

SEQ ID NO: 1006785 - DNA, 120 bp, Artificial Sequence
  ENSG00000286695_10 (sequence is synthesized)
aggaaagactgaagactgtcataggccagaagcaaatggagagacatggcaactaaatgcaatgtagtgtcctggatcagatactagaatagtaagtaacaggtcatcaataggaacact

SEQ ID NO: 1006786 - DNA, 120 bp, Artificial Sequence
  ENSG00000286695_11 (sequence is synthesized)
ggtgaagtctgaagaatgtctggaatttagataacagttacgtaccaataatgggctcttagttttgacaaatgtaccatggtaatgtaagacattaacaatgggagaaactgggtgagg

SEQ ID NO: 1006787 - DNA, 120 bp, Artificial Sequence
  ENSG00000286695_12 (sequence is synthesized)
tgaaaacctaatcaaactttttattaaatatgaagattcagagcagaatggagctgaatggatgctgggcagagggtcagttttactttagtagagcatctttttgatgtgctggtaaag

SEQ ID NO: 1006788 - DNA, 120 bp, Artificial Sequence
  ENSG00000286695_13 (sequence is synthesized)
acacgacatttatcaaagaataattttcccaaaaaggggcaaaatcatgactctcatagagataaaatgaacatgtgctaaagattttattcgactcattgattaagtgactgaaccaga

SEQ ID NO: 1006789 - DNA, 120 bp, Artificial Sequence
  ENSG00000286695_14 (sequence is synthesized)
gtactatgttgaaaagaagtggtgagaatgaacatttttttcttgttccagttcttagagaaaaggctttcgactttttcacattcagtatgatgttagctgtgggtttgtcgtatgtgg

SEQ ID NO: 1006790 - DNA, 120 bp, Artificial Sequence
  ENSG00000286694_0 (sequence is synthesized)
ggaggctggatgagtcacttggagaaaagaagaccacattccagagggttccatgatgtggacactttcagcaggtggtgagggctagcgatatgtggcgtggtaccctctcttgatgct

SEQ ID NO: 1006791 - DNA, 120 bp, Artificial Sequence
  ENSG00000286694_1 (sequence is synthesized)
gggcagtggcggtgagcacagctcccagttagccatgcgatcatcaggatatgtgtgactcaggacaccatgttgtcagatcttcaccatcctaagcacaatgtaacaacccataatggc

SEQ ID NO: 1006792 - DNA, 120 bp, Artificial Sequence
  ENSG00000286694_2 (sequence is synthesized)
taagtagtgtcccggtaacatggaggaatgaaaaagttgtgtaaatggcatcaagattgtcttaagattatcaagctaatagaagcaataaacatcaccagttgttttaggatttattct

SEQ ID NO: 1006793 - DNA, 120 bp, Artificial Sequence
  ENSG00000286694_3 (sequence is synthesized)
tcaagggagggtttgcacttaaagggacattatctcttccaactaataccaatgaacaagagtaatgaaacaaagaggcataatttctaccaccagaaaactcttacatatgtagttttt

SEQ ID NO: 1006794 - DNA, 120 bp, Artificial Sequence
  ENSG00000286694_4 (sequence is synthesized)
aaaatgtacactatgcagtaaaagatacgaaatccaatattagactaggtatgtaaaatcagaaatatttttctccagagacccagagaacttgaggtagtcattgtcctcaaagccctt

SEQ ID NO: 1006795 - DNA, 120 bp, Artificial Sequence
  ENSG00000286694_5 (sequence is synthesized)
tgcacatcaagatatgcaaggtccaactgcttcacttggaattcaagtcttccaaaatatagtcccagctttatgtgctactaaagatctgcattcaacctttcaaggtccttaacactg

SEQ ID NO: 1006796 - DNA, 120 bp, Artificial Sequence
  ENSG00000286694_6 (sequence is synthesized)
atatgattatgatgtctcacctctatcctccataaatataaaacaggatcacaagcataggcaacaaaaacaacactagacaaatgggactatgttgaactaaatagcttctgcacagca

SEQ ID NO: 1006797 - DNA, 120 bp, Artificial Sequence
  ENSG00000286694_7 (sequence is synthesized)
tctacacacaatcaacagtgtgaagagacagcctggtgaattggagaaaatatttgcaaactattaatgtgacaaaggactaatatccagaatgtacaaggaactcaaacaacccaacag

SEQ ID NO: 1006798 - DNA, 72 bp, Artificial Sequence
  ENSG00000286694_8 (sequence is synthesized)
acagggaaatccacaatgagacattttcttacccctgttagaatggctactattaaaaagacaaaaaaaaaa

SEQ ID NO: 1006799 - DNA, 120 bp, Artificial Sequence
  ENSG00000286694_9 (sequence is synthesized)
tgagacattttcttacccctgttagaatggctactattaaaaagacaaaaaaaaaatagtaacagatgctggcaaggatctgttggtgagaatctaaattagtacagccattatggaaaa

SEQ ID NO: 1006800 - DNA, 120 bp, Artificial Sequence
  ENSG00000286694_10 (sequence is synthesized)
caaaaaactaaaaatagaactaccatatgacccagcaatcccactatggggtatttttctaaaggaaaggagttcagtacatcacagcatacctgtgctctcagtttacgacagcactat

SEQ ID NO: 1006801 - DNA, 120 bp, Artificial Sequence
  ENSG00000286694_11 (sequence is synthesized)
tcacaatagcaaagataggggatcaacctaagtgtccatcaatggacaaatggattaaaaatgtgatataaatacacaaatagaatactatttggccataaaaaaggaataaaatcttgt

SEQ ID NO: 1006802 - DNA, 120 bp, Artificial Sequence
  ENSG00000286694_12 (sequence is synthesized)
tggaggtcattatgttaagtgaaataaggctgtcagagaaagacaaacattgcaagttctcactcatatatggaagctaaaaaaagttgatcttatggaggtagagaggagaatgataga

SEQ ID NO: 1006803 - DNA, 120 bp, Artificial Sequence
  ENSG00000286694_13 (sequence is synthesized)
ggaggtagagaggagaatgatagataccagatgctgcgaaggtgtgctggtggggaaggggattaagagagtgcttagttggtgggtacatacagttagataggaggaataagttctaat

SEQ ID NO: 1006804 - DNA, 120 bp, Artificial Sequence
  ENSG00000286694_14 (sequence is synthesized)
gttctataccacagtggggtgctatagtcagtaacaacgtattgtctagttcaaaatagctagaagagagaacttgacatgttcccaacatataaaaatgataaatacttgaggtgatgt

SEQ ID NO: 1006805 - DNA, 120 bp, Artificial Sequence
  ENSG00000286694_15 (sequence is synthesized)
ctaccctaaataccttgacttgatcattccacattccatgcatgtaacaaaatatcacatgtactccataaatatgtacaaatatgtgtatcaattgaaaaaaggaaaaaaaataacata

SEQ ID NO: 1006806 - DNA, 120 bp, Artificial Sequence
  ENSG00000236744_0 (sequence is synthesized)
attgattgttatgcccttcaagcatgaatgaattagcaccttatggttgggtatgttgactcagaatattcaagataagtccagccacaatcgattccgcagggatcaggctcccgccat

SEQ ID NO: 1006807 - DNA, 120 bp, Artificial Sequence
  ENSG00000236744_1 (sequence is synthesized)
ccacttcaccctactattgtcactaatttcaactaaaatttacgaagaaaatgcatgcagtccgtatttcagtactctaagaagtaagagacagtaggcatgttggacagcgtctcactc

SEQ ID NO: 1006808 - DNA, 72 bp, Artificial Sequence
  ENSG00000236744_2 (sequence is synthesized)
tctcactctgtcacccaggctggagtgaactgcacaatgggctcagtacgatatccggcctggccaatttgt

SEQ ID NO: 1006809 - DNA, 120 bp, Artificial Sequence
  ENSG00000233296_0 (sequence is synthesized)
acaggggagagttacctgttgctgtgggagcaatgaggagttatggaggaaaggagaggtaccaagaccagaccaaatccctgatggctggtgtggccaggcatgtagtggaggctggcc

SEQ ID NO: 1006810 - DNA, 120 bp, Artificial Sequence
  ENSG00000233296_1 (sequence is synthesized)
cccccagaagcacgggaccccatccgggacgccgctgtgcatgcagctgtcacatctccctggacccccctctgctggcagtttctcagattttccttgttttcgatgactgggatagtt

SEQ ID NO: 1006811 - DNA, 120 bp, Artificial Sequence
  ENSG00000233296_2 (sequence is synthesized)
ttgaagagtaatggtcaggcatgctgtagaatttctctcagttggggtttttctgatgatctgattgggattatggaatttggggaagaagaccatagaagtaaagtgctatttttatta

SEQ ID NO: 1006812 - DNA, 86 bp, Artificial Sequence
  ENSG00000233296_3 (sequence is synthesized)
acacttaccaggagcccagcaagctcttccttaggctgaagccatcctgactcaaatctgcaagagactcgggtatcttgagggtg

SEQ ID NO: 1006813 - DNA, 120 bp, Artificial Sequence
  ENSG00000233296_4 (sequence is synthesized)
atattttaagttcggcctaaaggtttttctgcacatcatgaaccataacaaggagaggtgtaagtagaccgtagcctacacttgtgccagtcactgagtttcggccaatcaaacatagcc

SEQ ID NO: 1006814 - DNA, 120 bp, Artificial Sequence
  ENSG00000233296_5 (sequence is synthesized)
aactgttcaaactgtgttcaaataaggcaaatgctgagccataaccaatccaatgtcccttcaatgtccataaatcttcttccaaccaaatggttgtgctggagcctctgaacctactct

SEQ ID NO: 1006815 - DNA, 120 bp, Artificial Sequence
  ENSG00000233296_6 (sequence is synthesized)
cagactgattcgcaattcattcattgctcaaagacttttaaatttaatttggctgaagtttttattttatcaagggttaccccacagcaagagcccctacagaagcccgcacgtcatgct

SEQ ID NO: 1006816 - DNA, 120 bp, Artificial Sequence
  ENSG00000233296_7 (sequence is synthesized)
tgccatccgccttccttctctctcaacaaagaaggagaccaggatttggaatagtggaacccaattttttaaaagtcgacaactcctggaagccactgtagcgactcggaatcaacattc

SEQ ID NO: 1006817 - DNA, 120 bp, Artificial Sequence
  ENSG00000233296_8 (sequence is synthesized)
cggccggggccttcttggccacaggccgggtgctctgtggggcctaccctacgcctctccgccgtcctcccccgaactggtggttacgcgggccgcgagttaccgtgagcacggctggga

SEQ ID NO: 1006818 - DNA, 120 bp, Artificial Sequence
  ENSG00000233296_9 (sequence is synthesized)
tgctgacggggaaagagctgacagagaaggcggacggcatggtgttgggaagcccgctctcacagcaaccgccgaacccggcctggccagaatccacagaggagggcgccaaatcctctc

SEQ ID NO: 1006819 - DNA, 120 bp, Artificial Sequence
  ENSG00000233296_10 (sequence is synthesized)
tcgtgagatctgcccttctcacgaaacttgcgcttgcttcctctcgcggtcccagcaggcagctgattgtttagatggagagaccacaggggagagttacctgttgctgtgggagcaatg

SEQ ID NO: 1006820 - DNA, 120 bp, Artificial Sequence
  ENSG00000233296_11 (sequence is synthesized)
aggagttatggaggaaaggagaggtaccaagaccagatgaggactgaacattagacttcccatgattgcagaactgtccttcgctgcagctgtaaaatcgcggcaaggcaggattcatcc

SEQ ID NO: 1006821 - DNA, 120 bp, Artificial Sequence
  ENSG00000233296_12 (sequence is synthesized)
tggtggtgggtgcaggccctgattcccgtcactgagcagggatacagcaggaagctccacctctgagcacagcaaggggattgttctgattctgagtgtgtctgtttgctagagcggtgg

SEQ ID NO: 1006822 - DNA, 120 bp, Artificial Sequence
  ENSG00000233296_13 (sequence is synthesized)
ccacacttccccggttctgcaattgtggataatttagcatgacttgttgggcattgcaaatatcatgtcgtggagagtctgggctctgttattttttccagctgtgtgtgtgtgtgtgtg

SEQ ID NO: 1006823 - DNA, 120 bp, Artificial Sequence
  ENSG00000233296_14 (sequence is synthesized)
tgtgtgtgtgtgtgcatgcacgcgcacgcgtgtgtgtgatgagaccattaagttggtttgacagactgcaaactgcctgttgaacagcagctgaattcttaatttggttcttttatcctt

SEQ ID NO: 1006824 - DNA, 120 bp, Artificial Sequence
  ENSG00000233296_15 (sequence is synthesized)
cttgtgtttcgtggagtttgcctcacacattcagcgttcggatgtcaactggagttctggatggaagttatacacagaatttggggttctccatctctgattctctccttccttctcaat

SEQ ID NO: 1006825 - DNA, 120 bp, Artificial Sequence
  ENSG00000233296_16 (sequence is synthesized)
tcttcaggagggaaagaccaagggtttcctgttggtgttttggcaactccgcatggcatggcgtcagactcaccctaagctaaaaaccataaaagccctctttccctttgtttcttccac

SEQ ID NO: 1006826 - DNA, 120 bp, Artificial Sequence
  ENSG00000233296_17 (sequence is synthesized)
acatcacactcccctcccataatccatgcttttcatctccactcactttttatatttgctcattgtctagatattccctgcaggagagtgacattagacgggctcacttggccaccatgg

SEQ ID NO: 1006827 - DNA, 120 bp, Artificial Sequence
  ENSG00000233296_18 (sequence is synthesized)
gaagcagaaatccagagatggacacattccctaaatgcttctatgctgccctgtaggagaggtgttactctactcacattgccgtgaggaaactgaggctcagaagtagcatcctttgtc

SEQ ID NO: 1006828 - DNA, 120 bp, Artificial Sequence
  ENSG00000233296_19 (sequence is synthesized)
tgaaaggacatagctcgtgagcgctggaagcatagtttggtgtctgacttggccaattccaaagcttgtgtgatttgcaccagcactcagatgcattcttccctctccctccctacccaa

SEQ ID NO: 1006829 - DNA, 120 bp, Artificial Sequence
  ENSG00000233296_20 (sequence is synthesized)
gaaaaatgctatccctcccttttcctctaattagaaaattcttttgtatagtaggagattattaggaaataatcatttctctccaaaagtaacacactgaggaggcagtatctgagggtt

SEQ ID NO: 1006830 - DNA, 120 bp, Artificial Sequence
  ENSG00000233296_21 (sequence is synthesized)
ttgcccaaatatggcctttcaacctctgaattcatgcctacagaaattccaagatgtttgtcatagcatttttattctaaccctccttaatgagtgatacagtttgcctgtgtccccacc

SEQ ID NO: 1006831 - DNA, 76 bp, Artificial Sequence
  ENSG00000233296_22 (sequence is synthesized)
catgggtggtagtttattcatgggggcagttaccctcatgctgttttgctaatagtgagtgagttctcatgagatc

SEQ ID NO: 1006832 - DNA, 87 bp, Artificial Sequence
  ENSG00000219445_0 (sequence is synthesized)
tcccccgtcctcctgctctttgctccataagaaagatccacctacgacctcacgcaatttcaaatccggttccaaaccttatgaatc

SEQ ID NO: 1006833 - DNA, 120 bp, Artificial Sequence
  ENSG00000219445_1 (sequence is synthesized)
tcaaatccggttccaaaccttatgaatctactgtagctgatctagatacacttcaggtctcagctgagaactcacatccttctgaagcttataagacttgggcaaaatccaacttgaatc

SEQ ID NO: 1006834 - DNA, 120 bp, Artificial Sequence
  ENSG00000219445_2 (sequence is synthesized)
aattagtgaaacagaatgaatccaccttttcaccacttcaatcaaatgccagttagtagcaattagtactcactgaagatgatatacgatcctgaaaattctaatcagagatggcatttc

SEQ ID NO: 1006835 - DNA, 120 bp, Artificial Sequence
  ENSG00000219445_3 (sequence is synthesized)
accatgttgcctgggttggtctcaaactcctgagctgaaagtgatcctcccacctttgcctctcagtgttgggattacagaaatgagccaccacacctggcccacagacaccttctaata

SEQ ID NO: 1006836 - DNA, 120 bp, Artificial Sequence
  ENSG00000219445_4 (sequence is synthesized)
tgcttatgtgcatgtccacattagtgaatggaagaatgctttcttctgtctctatggaaaaaaaatcctggggagaaattcaagctagctgaagaaatttgcataagtaatggggaacca

SEQ ID NO: 1006837 - DNA, 120 bp, Artificial Sequence
  ENSG00000219445_5 (sequence is synthesized)
gaaaatgtctccagggcatttcagagatcctagaggcagcttttcccatcacaggcctggaggcctaagagggaaaaagtggtttcttgggttaaccttgggatgtggcatcctgcatcc

SEQ ID NO: 1006838 - DNA, 120 bp, Artificial Sequence
  ENSG00000219445_6 (sequence is synthesized)
tgtggtgttgagcctgcgaatgcacagaagacaagagttgaggtttgagtacctccacctagatttcagaggatatatggaaatacctggatgtctaggcagaagtgtgctgcaggggca

SEQ ID NO: 1006839 - DNA, 120 bp, Artificial Sequence
  ENSG00000219445_7 (sequence is synthesized)
gtctaggcagaagtgtgctgcaggggcagagccctcatggagaacctttgctaaggcagtgtggaagggaaatgtgtgggttggataccccacagagagtccccactggggcactgccta

SEQ ID NO: 1006840 - DNA, 79 bp, Artificial Sequence
  ENSG00000219445_8 (sequence is synthesized)
aaaagcagccaggagggggactgtacgcggcagagccacaggatggagctttccacaactgtgggagcccactccttgc

SEQ ID NO: 1006841 - DNA, 87 bp, Artificial Sequence
  ENSG00000219445_9 (sequence is synthesized)
taaaagcagccaggagggggactgtacgcggcagagccacaggatggagctttccacaactgtgggagcccactccttgcatcggca

SEQ ID NO: 1006842 - DNA, 120 bp, Artificial Sequence
  ENSG00000219445_10 (sequence is synthesized)
gggcctgtggcccctttgttttggccagtttcttccattttgaatcggaacatttacccaatgattctaccctcactgtgtcttggaagtaactaacacctgcttattgattttacaggc

SEQ ID NO: 1006843 - DNA, 87 bp, Artificial Sequence
  ENSG00000219445_11 (sequence is synthesized)
caggtgaatgagataaaactttgggggcttttgggaaggcaatgactggttttgaaatgtcaagacatgagatttgggatgtgccag

SEQ ID NO: 1006844 - DNA, 120 bp, Artificial Sequence
  ENSG00000219445_12 (sequence is synthesized)
ggttttgaaatgtcaagacatgagatttgggatgtgccaggggtggaatgatatgatttggctctgtgcccccacccaaatctcacttcaaattgtaatccccatgtgatgtgggaggga

SEQ ID NO: 1006845 - DNA, 77 bp, Artificial Sequence
  ENSG00000219445_13 (sequence is synthesized)
ccaggtgcatgacagtggggagttctcatgcgatccgatggtttaaaagtgaaagtttcccctgtgctctctctctt

SEQ ID NO: 1006846 - DNA, 120 bp, Artificial Sequence
  ENSG00000228404_0 (sequence is synthesized)
cgctctgagcccgacggggccctgaatggcttttcctgccctggctcctcccatcatattttaaatgccgtcttcctcccgctccaaggaaaccttctcttgacgtcagacagaggctgc

SEQ ID NO: 1006847 - DNA, 120 bp, Artificial Sequence
  ENSG00000228404_1 (sequence is synthesized)
accggtacagctgccatctcctcttggtggtgtcctttgtcaagagcatgtcagggtgatgagtcatctgggacaggtcaccctcccagcaccgagaagccgacgggggaggaacagact

SEQ ID NO: 1006848 - DNA, 120 bp, Artificial Sequence
  ENSG00000228404_2 (sequence is synthesized)
attgaacacagatgtgatttctaaagaagactgaaggcagggatactgacactgaagtcctgcctgtgtaataacaccgaagagggcagggaatcgctgcgtcctgtgacttgaaggcca

SEQ ID NO: 1006849 - DNA, 120 bp, Artificial Sequence
  ENSG00000228404_3 (sequence is synthesized)
ctgtgaaggaaaacaatgcagtgaaagaaagttcctcctatgtggacattgtatcacgtttatttatcttcctggatatgcttatggcctttaaaacatattaaaataggctatgctatt

SEQ ID NO: 1006850 - DNA, 120 bp, Artificial Sequence
  ENSG00000228403_0 (sequence is synthesized)
tggagttctggccaccatctgataacattctgctcaggcttaaatgggccaatggaagtacagggactacttcagagctgggcataagagaggtgctcatcaaagatttgggtcacagtt

SEQ ID NO: 1006851 - DNA, 120 bp, Artificial Sequence
  ENSG00000228403_1 (sequence is synthesized)
atacctgcataaccaaagcttccagacacagagcacatttccatcatgtgctccaacacacctagccatcatgcctcctcatgcaggtttgcctacctgcagtgccctgcccacttgacc

SEQ ID NO: 1006852 - DNA, 120 bp, Artificial Sequence
  ENSG00000228401_0 (sequence is synthesized)
tgggctcaggcccagagtgccagctttgccctatcccatagcctggagccaccacaggaggggcactccactctcttgggctcctggagcctcagaggcagagccagccgggagtgcagg

SEQ ID NO: 1006853 - DNA, 120 bp, Artificial Sequence
  ENSG00000228401_1 (sequence is synthesized)
agggagaactttcctgtggacgtcctgtgttctccagacgcagagaaccctcatcaaccgagggggaggtcacttccgaatccacagatggcgtgtgagtgcatggcgagcgcctccagg

SEQ ID NO: 1006854 - DNA, 120 bp, Artificial Sequence
  ENSG00000228401_2 (sequence is synthesized)
gcctgcaaggggttcctgcgaagaccagcaccttggggaagagcctgcggctgaacttgaactcgcagctacctgagtcagacctgtgctttttcacctctacggaagatgtcagagcgt

SEQ ID NO: 1006855 - DNA, 120 bp, Artificial Sequence
  ENSG00000228401_3 (sequence is synthesized)
ttccctagcaatgttttagaagttacttctgtctggaaaaaaatggaaaaaatggcaaattatgttatgtataatttgataattttaaagaattaatgatgtaattattactcaaaccca

SEQ ID NO: 1006856 - DNA, 120 bp, Artificial Sequence
  ENSG00000228408_0 (sequence is synthesized)
ccatgagaatggaggccattcatagcagaactacgagacaagaggagcctaggtccctgagctgcagaactgcatactaacctgatgagaagactaatgctcagtgaggtgaactccttc

SEQ ID NO: 1006857 - DNA, 120 bp, Artificial Sequence
  ENSG00000228408_1 (sequence is synthesized)
ctgagaatgcagtttctgaggaccttggctcatttcaaaatctggaaatatatttgaacacctctcccagaagtgggtaagaagttagaataatggaaaggcttggctccaagttcagtt

SEQ ID NO: 1006858 - DNA, 120 bp, Artificial Sequence
  ENSG00000228408_2 (sequence is synthesized)
gaatgtcaaaaagcccaagtttggctgaatggactttgtgtcgtgaaatctcagctccctctctcttcttccaggccaaatacctactggatgaaactgataaaattaaacaaagagaga

SEQ ID NO: 1006859 - DNA, 120 bp, Artificial Sequence
  ENSG00000228408_3 (sequence is synthesized)
gaagtggttttcaatgcaacccatcatcaaagggaaggagttgatgaaaagaaatgaaattgaaacgtgcacctggggagaagtgattgaaggttcttcatttaagggattggctccttt

SEQ ID NO: 1006860 - DNA, 120 bp, Artificial Sequence
  ENSG00000228408_4 (sequence is synthesized)
tctcttattatactgtgaaatctgaaaacatctcttgaaattctggtcactgtcttctggacatcccaaggcgcaccatctccacagttcctccctcctagattatcccatccagtgtgg

SEQ ID NO: 1006861 - DNA, 120 bp, Artificial Sequence
  ENSG00000228408_5 (sequence is synthesized)
catccagtgtggcaaatggaaagactcttccagtgggcaactgaaaaggacaccaaagaaagcagatacagcccatgatcaaagaagcacataacttcagtttggaacatgactgataga

SEQ ID NO: 1006862 - DNA, 120 bp, Artificial Sequence
  ENSG00000228408_6 (sequence is synthesized)
aagatcaattagacaatgtacaccaatcaaaggtaagcaccaacaggtgctattgtaccagaaaacaaacacaaaggctgaggctttccagtgtttggggaaacagcctcaataaaaggg

SEQ ID NO: 1006863 - DNA, 120 bp, Artificial Sequence
  ENSG00000228408_7 (sequence is synthesized)
atctcaggaatggatttatccttctatccttccttccaccccttcaactgagcctctactacatgctgggcactgtgccaaaggccggcaactcggaaatgaataggcttggttcctgcc

SEQ ID NO: 1006864 - DNA, 120 bp, Artificial Sequence
  ENSG00000228408_8 (sequence is synthesized)
ctcaagtgacttatagtccacggtggcggtggagggtgggtggatagggaagttgttgagggaagacaaagaaacgtgcagtgaagtttaccagaacatagggtgtaggctgctgacgga

SEQ ID NO: 1006865 - DNA, 120 bp, Artificial Sequence
  ENSG00000228408_9 (sequence is synthesized)
gggagttcaggaaaggatgtatcccggatagaggtgatgcctaggcagagtctggaaatatgagtaataataagagcaagcatacaggaagatacaggctgggcgcagtggctcacgcct

SEQ ID NO: 1006866 - DNA, 90 bp, Artificial Sequence
  ENSG00000228408_10 (sequence is synthesized)
gcactttgggaggccgaggcacgtgggtcacttgaggtaaggagtcaggggtgctggtggaacacttgaggccaggaattcgagaccagc

SEQ ID NO: 1006867 - DNA, 120 bp, Artificial Sequence
  ENSG00000228408_11 (sequence is synthesized)
gatagcgccactgcattccagcctggggactgcaggagacttcatctcaaaaaaaaaaaaacaacaagatatggcagatgctgctgccatctgtacacagttttagatgtattaactcat

SEQ ID NO: 1006868 - DNA, 120 bp, Artificial Sequence
  ENSG00000228408_12 (sequence is synthesized)
ttaattctctcaagacctcaagtttagatatcagtgctatccccatttcatgatgcacagagagatcaagtaacttgcccaagtcaagcagctaccttggggctgagctggagtttaaac

SEQ ID NO: 1006869 - DNA, 120 bp, Artificial Sequence
  ENSG00000228408_13 (sequence is synthesized)
ccaggcactcagtgacagcatccacactcataaccacgatgctaagagtttgccagacaggtgagaagcaacatttttggaagagggtcagggccataggttttgtgaagtgacagagca

SEQ ID NO: 1006870 - DNA, 120 bp, Artificial Sequence
  ENSG00000228408_14 (sequence is synthesized)
tgacattcagattcagtagggcttaaagacccaagttttggaaagtagaggagatctgaaccttagccgtagcttctagaggtgggctaagagcaacctgggcacatgtagtggtgacca

SEQ ID NO: 1006871 - DNA, 120 bp, Artificial Sequence
  ENSG00000228408_15 (sequence is synthesized)
gaggacttgcagccatcaaatcactatggtgtgctgtttatttctcccaaagactcaggaggggagaggtttgatacttttttctcatatcagataactttaaaatgtagttttatatta

SEQ ID NO: 1006872 - DNA, 120 bp, Artificial Sequence
  ENSG00000228408_16 (sequence is synthesized)
tagaataggatgtaaaattaccatgacatttttccttgtttcttcttccttttgatatatgatttaaattgtttctttaatgtatttatttatactaaataaaacaactcatggttatat

SEQ ID NO: 1006873 - DNA, 120 bp, Artificial Sequence
  ENSG00000228408_17 (sequence is synthesized)
acaccatctgatccagtttcaatatgactgcctggatgaagaaggatttgagactaagtttattcctccaaagcaaaccaactgagaatgcagagacagggtcttgctatgttgcccagg

SEQ ID NO: 1006874 - DNA, 120 bp, Artificial Sequence
  ENSG00000228408_18 (sequence is synthesized)
tttttaaaacatctgatttccacttgaaaccttgaattgtatcattggcaacaaataatgtcagttattttccttgagatgacaacttcacttagttattttcaagaaaactgctgccat

SEQ ID NO: 1006875 - DNA, 120 bp, Artificial Sequence
  ENSG00000228408_19 (sequence is synthesized)
gtagccaactgtgaatgaccacagtttgcctgtcagtcattctgtcaagtaaaatggtgctcctcaaacaaagcagcacgtttagctcacaactcaacaaccacacagcagtcttcctcc

SEQ ID NO: 1006876 - DNA, 120 bp, Artificial Sequence
  ENSG00000228408_20 (sequence is synthesized)
cacccaccatggcacttatattaatataagcagcagaggtgctttatgtatgagtattgtgtgaaaatactcaaaagacctgtaaccaagggtcaagattactacaattaatttctactg

SEQ ID NO: 1006877 - DNA, 120 bp, Artificial Sequence
  ENSG00000286039_0 (sequence is synthesized)
tccgtcggccggaacccgctcctgggccgcgcggctgcagccgggagcgcggactcggggtgtcgggcggtgtccgcgcccctccccaccccagggcccttctcgggggagatatccagg

SEQ ID NO: 1006878 - DNA, 120 bp, Artificial Sequence
  ENSG00000286039_1 (sequence is synthesized)
agctgaaagagattcctcaggaggaagtggaaacctctgaaaggagaggaaaccgactcttttgcaagaaaactgagcgccggctggaaggcctaaggaaagcagccgatggctcccaag

SEQ ID NO: 1006879 - DNA, 120 bp, Artificial Sequence
  ENSG00000286039_2 (sequence is synthesized)
acaactctgtccggccagtactccagggcaacttcaaccccactaggacccaggccaaaaccatatatatatatatatatatataaattaacgcaaaacagagccactttggtgcctacc

SEQ ID NO: 1006880 - DNA, 120 bp, Artificial Sequence
  ENSG00000286039_3 (sequence is synthesized)
cctccacaagtaggtaggcacatccaggtagctctgtcagaagatgggacctggcgccttgcaggggtagccctatggagatccagaagccccgtttcgagctacgaagtctctcttcta

SEQ ID NO: 1006881 - DNA, 120 bp, Artificial Sequence
  ENSG00000286039_4 (sequence is synthesized)
ctgcagtcttctctccaacgtggagatctagcaacttccctccccctgggattccctgtgaatccactctagttgggatatagcctctctacagctcagtgacgtagcgcgccaaaacca

SEQ ID NO: 1006882 - DNA, 120 bp, Artificial Sequence
  ENSG00000286039_5 (sequence is synthesized)
agtacccaccccggcaactggaagacctagctgtcctccatcccgcctccgcagtcgataatctccaggatccaagcaaagtgcctgtccacgttgtcaccagatccacaagcgcttttg

SEQ ID NO: 1006883 - DNA, 120 bp, Artificial Sequence
  ENSG00000286039_6 (sequence is synthesized)
aaagaataaccaagataaagtatgtggtgtgaaaatatcagctgcctcttctttttttgtttttgaaacggagtctcgctctgtctcctagggtggagtgcagtggcactatctctgctc

SEQ ID NO: 1006884 - DNA, 66 bp, Artificial Sequence
  ENSG00000286039_7 (sequence is synthesized)
tgacctcaaatgatccgggtggaaaacattagcttctaatagcagtcttggagtggagtgaagacg

SEQ ID NO: 1006885 - DNA, 120 bp, Artificial Sequence
  ENSG00000286039_8 (sequence is synthesized)
cattagcttctaatagcagtcttggagtggagtgaagacgttcaggaagtggtggagataggcctgctcaattaaccggccccagatatcatttctctggctacctcttttctcgcctgg

SEQ ID NO: 1006886 - DNA, 120 bp, Artificial Sequence
  ENSG00000286039_9 (sequence is synthesized)
tttgtttgttttgttttgttttttttctgcaaaacgttttctgctgcaactttctctttatttatgcctttatctttcttaaacaagaggtccctggaaataactaactaaggaggggag

SEQ ID NO: 1006887 - DNA, 120 bp, Artificial Sequence
  ENSG00000286039_10 (sequence is synthesized)
gaaataactaactaaggaggggagaggaaccccctcacccccaatttcatgaatgagtgctacattcatgctggccgggtaccaagagcatctttagatctttagacctgagtcttctca

SEQ ID NO: 1006888 - DNA, 120 bp, Artificial Sequence
  ENSG00000286039_11 (sequence is synthesized)
tctgtgaaaaagaggttaaagcagatgaaccctaaaggcccatttccagtcttaaattcaacactttcaagacaaaacttttcttctgtattcctgagtgtgtatatatatgttatgtaa

SEQ ID NO: 1006889 - DNA, 120 bp, Artificial Sequence
  ENSG00000286037_0 (sequence is synthesized)
attaaacttgtacattttactttccttctttcagaatgctaataaaaaacttttgtttatacttaaaaaaaccataaatcagacaaacaaaagaaacgattccaacatcacttctgtgat

SEQ ID NO: 1006890 - DNA, 120 bp, Artificial Sequence
  ENSG00000286037_1 (sequence is synthesized)
gagaaaagaggcaatggaattcaacataagcaaagaaaactctacctggaggaaagaaatcgatcagcgaggaaacaactcggggctgctgccagactgcaggccatgcgaggaggagcc

SEQ ID NO: 1006891 - DNA, 120 bp, Artificial Sequence
  ENSG00000286037_2 (sequence is synthesized)
acccatccctgccagaccaggaagcagccgtcctacctcccagagaaacagacctcagccctaatgatcactcaaatccgagtcaatccctctatttaaaaaaagctcacacatagtctc

SEQ ID NO: 1006892 - DNA, 120 bp, Artificial Sequence
  ENSG00000286037_3 (sequence is synthesized)
ccctcccttccccagtcctcttggcgacagggcggtcacaggacatatgtgttcttcaccagctgctccttgtcatctccggagctccagacggtgcgcagggcacgctcctggttcctc

SEQ ID NO: 1006893 - DNA, 120 bp, Artificial Sequence
  ENSG00000286037_4 (sequence is synthesized)
cgtgccacccggatcaggtagaccatggagttattgcaggagttcctctccacgtcaaagtaccagcgtgggaaggatgcacggcaaggcccagtgactgcgttggcggtgcagtattct

SEQ ID NO: 1006894 - DNA, 120 bp, Artificial Sequence
  ENSG00000286036_0 (sequence is synthesized)
ctgcaaacaagtaggtgtcagtttccaggatcgaaaccaggaggaagctcaaagagcatccagcccccatgctgtaaaagggattcaaggcccagaaccagaaggtgattagccttgcag

SEQ ID NO: 1006895 - DNA, 120 bp, Artificial Sequence
  ENSG00000286036_1 (sequence is synthesized)
caggacagagggcagacagcaccgaagcccaggtctgctcactctgctgggagcacttcccaggccactgtggatctgggccttgtcctcagcttggggtggctgcaggagcatcctgag

SEQ ID NO: 1006896 - DNA, 120 bp, Artificial Sequence
  ENSG00000286036_2 (sequence is synthesized)
gaatgaacccatgccagagcactgaagatgcccccaccgcccccgctgcagactcctcacccaggtctcttcatctcaaaggggctgtcatagaggcccagggctgtgacctggaggaac

SEQ ID NO: 1006897 - DNA, 120 bp, Artificial Sequence
  ENSG00000286036_3 (sequence is synthesized)
acactccaccttcctgacatccagcccgtctatcactctgatggtggaaaggaacagagtgaggactcaaagggaggtgctgggagcaaccaaggacatcagtgcctccttctcaaccag

SEQ ID NO: 1006898 - DNA, 120 bp, Artificial Sequence
  ENSG00000286036_4 (sequence is synthesized)
acaccctgggctctgagccctaatggttctccctcccactgtggcctaagtgtcttcacattcaaggctctggcagtcaagaggattacatctcaacatgagatttggagggaccatcca

SEQ ID NO: 1006899 - DNA, 120 bp, Artificial Sequence
  ENSG00000286036_5 (sequence is synthesized)
aactatatcacacgcttcccatcctcaagaatgtggctgggccagacccagactctgaggacattcagggacactgtgcctcgccagccctctgaagtgctcagaacgtatgtcccgacc

SEQ ID NO: 1006900 - DNA, 120 bp, Artificial Sequence
  ENSG00000286036_6 (sequence is synthesized)
tgccaggaaccatgcactgggaagtgggtggacaggagagacaagacatgctccttccccaagaggaggctgcaggcagcaagggaaacccttagtgctgaataatattccattgtctgg

SEQ ID NO: 1006901 - DNA, 120 bp, Artificial Sequence
  ENSG00000286036_7 (sequence is synthesized)
tgaaagacatcttgatagcttacaagttttggaaattcggaataaagctgctaaaaacatccatgtgcagttctttgtgtggatgtacattttcaacccatttggataaacagaatggac

SEQ ID NO: 1006902 - DNA, 120 bp, Artificial Sequence
  ENSG00000286036_8 (sequence is synthesized)
ttgcagttgctggattacatgtgcttaaggtgagattcacttgcacctgaatcagcagaaaatatttggagcttcaagaataaatgcagatggcacttagagatgctgcacccaatgtca

SEQ ID NO: 1006903 - DNA, 120 bp, Artificial Sequence
  ENSG00000286036_9 (sequence is synthesized)
taagggattctgtggaggagctcattccgatgaaatagccttctttctgccagatctcgcatgaaccgatcttaaattgagttgcataaggcaaacaccagaccactcatcacttaagaa

SEQ ID NO: 1006904 - DNA, 120 bp, Artificial Sequence
  ENSG00000286036_10 (sequence is synthesized)
gcttaatagaacagaaatgccctgaagacagagtcaagagttaaagtggaaggagaaatgcctaaacgggaaagactgttcattctacagtgccctgagtatgaccattttctaagcaca

SEQ ID NO: 1006905 - DNA, 120 bp, Artificial Sequence
  ENSG00000286036_11 (sequence is synthesized)
gcccaaatagccatagctaaaggtgcagatgagaagttaaagatgcaataggacaagcccaagagctcctccagacatgcatccaactgttgttacctttttgtgagggaatgtgaatct

SEQ ID NO: 1006906 - DNA, 120 bp, Artificial Sequence
  ENSG00000286035_0 (sequence is synthesized)
tacttgtatttgctccagctactagagcacacagagagtagctcttcagttaggagagagaagtcagggaaggcctccacagagggttattttagctgagctttatagaaaaacatgggg

SEQ ID NO: 1006907 - DNA, 120 bp, Artificial Sequence
  ENSG00000286035_1 (sequence is synthesized)
aaaggacttgaaaaagtatgtaggtgacttttagtatcagctccaacatgtaaagagcttggaagtcatcacatccctcctcacagcaaaaacaaacaaaaaactgtacagattggaata

SEQ ID NO: 1006908 - DNA, 120 bp, Artificial Sequence
  ENSG00000286035_2 (sequence is synthesized)
tcaatggcttttcttagatccatggaagaattaaagtcataggacaaaccaccactcaaaaccctggagagacaggcaaatacagagaatcacaattgggatcagcttactgggagaaga

SEQ ID NO: 1006909 - DNA, 120 bp, Artificial Sequence
  ENSG00000286035_3 (sequence is synthesized)
ggctgctggtcagtgactgctaggaacactaaaatgactcatggaggtactaccttgatggtcttggaaaagatccagaagaattctctgcattatcaggcagagagactcctgttccat

SEQ ID NO: 1006910 - DNA, 120 bp, Artificial Sequence
  ENSG00000286035_4 (sequence is synthesized)
tctgttactttcttccaagcaaaaagagtctcactctccttgttctgagccacataaagccggcggtggagtgacacaagcatccctgtggccaccaccactatgactgcattgggtcag

SEQ ID NO: 1006911 - DNA, 120 bp, Artificial Sequence
  ENSG00000286035_5 (sequence is synthesized)
acctgaagccagcacagcagtggggcttgccaaggctggctgtaaccacttcctggctactgcctatgtttgctgaaggccctggggctctacaattagctggtggcaaagccggccagg

SEQ ID NO: 1006912 - DNA, 120 bp, Artificial Sequence
  ENSG00000286035_6 (sequence is synthesized)
cctgtgtccttcccttcagagccgtgaggtcccccaggccccaggtgagtccagaggtgccttttgggaatcagggactagagtaaaaaaacttggaagtctagctggtgttctattgta

SEQ ID NO: 1006913 - DNA, 120 bp, Artificial Sequence
  ENSG00000286035_7 (sequence is synthesized)
ctgtggctgagctggtattcagaccaccagatgcagtccttcccactcttcctttcccttcccaaatgcagaggagcctcaccccatagccactgtcaacccaggccacgaggagtactg

SEQ ID NO: 1006914 - DNA, 120 bp, Artificial Sequence
  ENSG00000286035_8 (sequence is synthesized)
ccaggctacctccaatattcccttaagcatcgaggtatcttaagtcaagcttgtgttgaatgcttcctgccttgggactcgcccttcagggcaatgggttcccctctggcctggggcagg

SEQ ID NO: 1006915 - DNA, 120 bp, Artificial Sequence
  ENSG00000286035_9 (sequence is synthesized)
tgcagaaatggtgtccaacagtcaagtcctggaatcggagacctcaagagcccacttggtgctttaccccactgtggctgtgctggtacctaaggtgcaagacaaagccctctttacttt

SEQ ID NO: 1006916 - DNA, 120 bp, Artificial Sequence
  ENSG00000286035_10 (sequence is synthesized)
tgctggtacctaaggtgcaagacaaagccctctttacttttccttctgcttttctcaaacagaaggagttttgccttgttgccaccacagctagtaatgtgctgagtctcacctgaagcc

SEQ ID NO: 1006917 - DNA, 120 bp, Artificial Sequence
  ENSG00000286035_11 (sequence is synthesized)
cctaaatgtaactgctggttattcagggtcctgccaaccttcagttagcaggtgatgaatgctgccaggactgagtccttttcttcaaggtagtgggtttccttctgacccatggtgtgt

SEQ ID NO: 1006918 - DNA, 120 bp, Artificial Sequence
  ENSG00000286035_12 (sequence is synthesized)
ctagaaatgtcatctgggaactagggcctggaatgggggcctcacgactcttcccagtcccctattctgccgcagctgaactggtatccaagatgcaagatgaagtcctccccactcttc

SEQ ID NO: 1006919 - DNA, 120 bp, Artificial Sequence
  ENSG00000286035_13 (sequence is synthesized)
gggtctcctttggagccacgggctgtgcagcctggagttagggaaggggtgacgccagcacgcccttggctgccttagctggtgtctcagtatgtcacctgccctcccagttaactgcct

SEQ ID NO: 1006920 - DNA, 120 bp, Artificial Sequence
  ENSG00000286035_14 (sequence is synthesized)
ctgggcctagttcagcactagaactcgcctgagatctgcagtcttcatggcctgggctgcctttcaagtttacttggagacccagactgtagccctcggtggtgaggtttgcaggaactc

SEQ ID NO: 1006921 - DNA, 120 bp, Artificial Sequence
  ENSG00000286035_15 (sequence is synthesized)
aagtttagaccactgggatcagtgattcccctctgggtagggctgttattaaatgctccctccatgggcaggcgtcagctgagttgggtgtggttttccttcctgccgtaacaggacagc

SEQ ID NO: 1006922 - DNA, 120 bp, Artificial Sequence
  ENSG00000286035_16 (sequence is synthesized)
actgagttcagtgcatcacagttgctgtgttctccctcccgtgcacgcagagatatcctcagtaccacaacacagctgcaggggcagaggggcgtcagtgattcaggactgtttttgcta

SEQ ID NO: 1006923 - DNA, 120 bp, Artificial Sequence
  ENSG00000286035_17 (sequence is synthesized)
tttcttcggtgtctctttcagcattataaagttaagagcaggtactatgagtgctcacctgatttttaacacctcatgaagttgttaaattggtgtccttgtggagggggatgatagctg

SEQ ID NO: 1006924 - DNA, 75 bp, Artificial Sequence
  ENSG00000286035_18 (sequence is synthesized)
gttgttaaattggtgtccttgtggagggggatgatagctgcagtcttctattcctccatttttctctgtctcctc

SEQ ID NO: 1006925 - DNA, 90 bp, Artificial Sequence
  ENSG00000286035_19 (sequence is synthesized)
actcctgagtagctgggactacaggtgctaccatgaacagctaaatttaatttttttaattattatatattgtgggcgaaaaggcacaaa

SEQ ID NO: 1006926 - DNA, 83 bp, Artificial Sequence
  ENSG00000286035_20 (sequence is synthesized)
gcgggtatagggtcaggtgctgaaagcacattgtgacaagttacctagaaggcaagagctgagccttctgtcacgcccgcata

SEQ ID NO: 1006927 - DNA, 77 bp, Artificial Sequence
  ENSG00000286035_21 (sequence is synthesized)
ctgggaagacacccacgacgtagcagaccgcaaaagggagtctcctttccttggtggagtcagggaacactctgctc

SEQ ID NO: 1006928 - DNA, 70 bp, Artificial Sequence
  ENSG00000286035_22 (sequence is synthesized)
tgtctgggaagacacccacgacgtagcagaccgcaaaagggagtctcctttccttggttatccaggcctg

SEQ ID NO: 1006929 - DNA, 86 bp, Artificial Sequence
  ENSG00000286035_23 (sequence is synthesized)
actttcatgctcctccagcacggtagaagaaatagtgaaaggcttaaagtctttgacctttcttataagtgcatagaagaaaacgc

SEQ ID NO: 1006930 - DNA, 120 bp, Artificial Sequence
  ENSG00000286035_24 (sequence is synthesized)
ttataagtgcatagaagaaaacgctgatgtatgccaccttctctctgcttcagctacctaaaagggaagggccccctgtcctatgatcacatgacttgcttcaacttgtcaatcacttag

SEQ ID NO: 1006931 - DNA, 87 bp, Artificial Sequence
  ENSG00000286035_25 (sequence is synthesized)
gtcttgtatgcaataaatatcagcgtgcccagccattcgggaccactacctgtctccgtgtcttaatggtagtggtcccctgggccc

SEQ ID NO: 1006932 - DNA, 120 bp, Artificial Sequence
  ENSG00000286034_0 (sequence is synthesized)
agggaggataggaatgagagaatgatgccactggtctatccagaatctttgagctaagattttatccccatgagagcaggcctcggtcttccccacctctgtgtccatcaagttacccag

SEQ ID NO: 1006933 - DNA, 120 bp, Artificial Sequence
  ENSG00000286034_1 (sequence is synthesized)
gatatctgcctcatagtaggtcttgctcaatccagatgtatcgctgaaaccaggcaaattctcctgcatttctgtcactcacccttggctgcttccggacaccttaccttctcctgttct

SEQ ID NO: 1006934 - DNA, 120 bp, Artificial Sequence
  ENSG00000286034_2 (sequence is synthesized)
caaacgtgtgggagattctggaggatgaaagaacactacctgcccaactggaagctaattagctgagaagtcttagaggagacggctggaaacatcctccttgagggtagcggccaccct

SEQ ID NO: 1006935 - DNA, 120 bp, Artificial Sequence
  ENSG00000286034_3 (sequence is synthesized)
gtatacatctcttcagagcccagcgctgcctgtgcacagtttattttagtctgaaagatctggaaatatagaaaacatctccatctttctgctgttgagttcccagtgcccctgcaaaat

SEQ ID NO: 1006936 - DNA, 120 bp, Artificial Sequence
  ENSG00000286034_4 (sequence is synthesized)
aatatctgtgactctatccctcgacccataattcccagcctccatcctagcttctgggatagagttccatggataattcagcaattgcaggaaaatttgggcccccaacagtgaacaaca

SEQ ID NO: 1006937 - DNA, 120 bp, Artificial Sequence
  ENSG00000286034_5 (sequence is synthesized)
gaactcaaaagatgcaaatacgaggataatggaccactggaggctgatccaacacaaaatacacattaccctgtgctacgttcaggaataggagggttcctgtctagttgcagaaaaagg

SEQ ID NO: 1006938 - DNA, 120 bp, Artificial Sequence
  ENSG00000286034_6 (sequence is synthesized)
ataagaggtcatatcaaaacagcacagtcatctgaaaatggaacttatgtctacaaaagttacaggaaaccacatcaagaagactttgttttggtgccccaagaggattaacctactaaa

SEQ ID NO: 1006939 - DNA, 120 bp, Artificial Sequence
  ENSG00000286034_7 (sequence is synthesized)
tcctactagcaagtttctggagaactctataaattgtagcaaatcaataacctctgaagtgtaacctctacttggactgcagccattgagaagatgttctctataccttcaaggacagag

SEQ ID NO: 1006940 - DNA, 61 bp, Artificial Sequence
  ENSG00000286033_0 (sequence is synthesized)
acaccagtgactgaagttttggccaatctctcataattgagaaaataaccaaagggaaggc

SEQ ID NO: 1006941 - DNA, 82 bp, Artificial Sequence
  ENSG00000286033_1 (sequence is synthesized)
cttgtggatgaactgtaacctaccttaataggtatacaagaatgaaaaactaacttaagagtatgcacctggaacaacagct

SEQ ID NO: 1006942 - DNA, 120 bp, Artificial Sequence
  ENSG00000286033_2 (sequence is synthesized)
cactcaggcactgccaaatgttcaaaatgtgttcaaacaaggcaaacactgagttgtttcggtacctcacttccgatttcggtatgctattttccttttgtctataaatcttcttccatc

SEQ ID NO: 1006943 - DNA, 75 bp, Artificial Sequence
  ENSG00000286033_3 (sequence is synthesized)
taaatcttcttccatcacatgatgattcgtgaatcgtttattactctattaaactcctttaaagtttttctttta

SEQ ID NO: 1006944 - DNA, 75 bp, Artificial Sequence
  ENSG00000286033_4 (sequence is synthesized)
agggctcctttcaacatatcaaagagtggaattaactgataaagtgctgagacaagcgatgtctgcagttcccag

SEQ ID NO: 1006945 - DNA, 120 bp, Artificial Sequence
  ENSG00000286033_5 (sequence is synthesized)
ctgataaagtgctgagacaagcgatgtctgcagttcccagcaatttattcagagatagtatcataaagccccacatttgtctggcagatattgcccagagccccctcacctatcactttg

SEQ ID NO: 1006946 - DNA, 120 bp, Artificial Sequence
  ENSG00000286031_0 (sequence is synthesized)
ccatgttcttcgtcttcagttcctcctcggcaggcctgcagggcagaggagagagtacatggatctaataataccctgagaggtcacttctgccacccactggcaccttctgagcctctg

SEQ ID NO: 1006947 - DNA, 120 bp, Artificial Sequence
  ENSG00000286031_1 (sequence is synthesized)
tgctagcccaccttcacctgacagctgctgttttctcttctgctgcctttgtttatcccctcatcctaaaagtcctacagcctcattatagaaaattcgcaaaatacaggaaagtctaaa

SEQ ID NO: 1006948 - DNA, 120 bp, Artificial Sequence
  ENSG00000286031_2 (sequence is synthesized)
gaagcaagaaaaacaatcacacatcagccagagacaactactgttaccattctggaaaatttccttccagatattctacgaaatcatttagattctacagacataatttcacagctagct

SEQ ID NO: 1006949 - DNA, 120 bp, Artificial Sequence
  ENSG00000286031_3 (sequence is synthesized)
gttgcaaagcaaaccagcaaacagcattgggcatagttttatcgacacttgtatcatttctttaggatacattcctggctatggaaagagaaaagatagaagaacccatcttttcggctg

SEQ ID NO: 1006950 - DNA, 67 bp, Artificial Sequence
  ENSG00000286031_4 (sequence is synthesized)
atggaaagagaaaagatagaagaacccatcttttcggctgggccacttgaggttaggagttcaagac

SEQ ID NO: 1006951 - DNA, 120 bp, Artificial Sequence
  ENSG00000286031_5 (sequence is synthesized)
tacaaaaaattagctgggcatggcggtgcacgcccatagtcccaactacttgggaggccgaggcaatgtgacattcttgatacttctgacaatggttgaaaaatttttttttttgagatg

SEQ ID NO: 1006952 - DNA, 120 bp, Artificial Sequence
  ENSG00000226711_0 (sequence is synthesized)
acacaaattaatccactcaaatgttggcaagtggagcagagtcccaggacaggtacagaaacacccccagttcaaggatcttcacacctggatttaggcctacacctgcaactaccccag

SEQ ID NO: 1006953 - DNA, 120 bp, Artificial Sequence
  ENSG00000226711_1 (sequence is synthesized)
atggagccatctcagccatgacaacagagaatgtaccactctcacgtgaggaagaggggtaggcagtgctcctgtatcaccagctgttaatgagaccctgaggaaaccacatcatggaga

SEQ ID NO: 1006954 - DNA, 120 bp, Artificial Sequence
  ENSG00000226711_2 (sequence is synthesized)
gtaaggaactcatcctatgaaagagcaattggtggctgcaagagctgtctctgggacagctgttcatgtctatatctgcagggtaaccctcatagtcatatgcagtcatatccatagtca

SEQ ID NO: 1006955 - DNA, 120 bp, Artificial Sequence
  ENSG00000226711_3 (sequence is synthesized)
tatctggagtcagtctccagtttgactgagtgaatggagaaactaaacatttattactgaataataacattaataaaccatcttaatgatagtaataataaacatattgatgagtattaa

SEQ ID NO: 1006956 - DNA, 120 bp, Artificial Sequence
  ENSG00000226711_4 (sequence is synthesized)
ttccaaaaaaagagatgctccttgtggtcctgggaccagggataggactccagttgagcctggtggaagaggtcctcatcctagcccaacggagagccatgcagctgagcttgggcgatg

SEQ ID NO: 1006957 - DNA, 120 bp, Artificial Sequence
  ENSG00000226711_5 (sequence is synthesized)
tggtccacgtggttgtttctgagtgtgtcctgaggttcctggatggcttgcagttccctatgcagatccaatgcattttttgcttttttgcttctacaacctggaatttatatgttcaag

SEQ ID NO: 1006958 - DNA, 120 bp, Artificial Sequence
  ENSG00000226711_6 (sequence is synthesized)
atgcgcggtctgcctcccgcggcgggccgggtctccagggaggacctgagtttttcttcacccatggtcagggaggcgccatcgccctggctttggggctggggcctccggggaggttcc

SEQ ID NO: 1006959 - DNA, 120 bp, Artificial Sequence
  ENSG00000226711_7 (sequence is synthesized)
ggtaggggcgttggagaggccgctctttttgcaaggcccgagatggcgggccctgcgcaggccgccctattccgcgccctcagggcgtcagtatccgcctgaggccggatacccactctg

SEQ ID NO: 1006960 - DNA, 120 bp, Artificial Sequence
  ENSG00000226711_8 (sequence is synthesized)
ggctcggatacccgcgctgggcccggagcatcctcggcgctgccctcccagagccccgcagaggctgaggtggcgcgggggcggccccggctccgcgagaagaggcggcagcgagggctg

SEQ ID NO: 1006961 - DNA, 120 bp, Artificial Sequence
  ENSG00000226711_9 (sequence is synthesized)
gaggacccgggctacggggctccggggcgtctggcctgggtgggactgagcccatccagggactgggactccggggttctggtgtaggtggatcccgggcaggctcaggaccaagaccct

SEQ ID NO: 1006962 - DNA, 120 bp, Artificial Sequence
  ENSG00000226711_10 (sequence is synthesized)
ctccttccaccaaggagcgcccagaggccggcgggagctccaggttcacctcctcctcctccagggacgacttgagaaggcatcctgaccctatgcagaaatgcagaaacacttccatga

SEQ ID NO: 1006963 - DNA, 120 bp, Artificial Sequence
  ENSG00000226711_11 (sequence is synthesized)
gctaaacaacctatgtgaaggcctgaaagccaaagcaagatcctcttattacaaagctgtccaacaaaaagttttccaagtaacactggaggtccatcactcactcttcctggtctggaa

SEQ ID NO: 1006964 - DNA, 120 bp, Artificial Sequence
  ENSG00000226711_12 (sequence is synthesized)
atgccagaaatgtcctccttggtccttctgagagtcaagatcttttcaaagtcacctcaggagccacagaaccactccatcctacctgaaattgcaggatgactcttcttttgaccagag

SEQ ID NO: 1006965 - DNA, 120 bp, Artificial Sequence
  ENSG00000226711_13 (sequence is synthesized)
tctcaaaaatatattcgttgataattttgattcctgggagccgccattgcttgcaaaagatgtgccagggactagacattttctgtctcctcacttgtccggggaagactgaagttttac

SEQ ID NO: 1006966 - DNA, 120 bp, Artificial Sequence
  ENSG00000226711_14 (sequence is synthesized)
tgaaacacagagatgggaatctgaccctctgagcagcctcaggattttctaagtcttccaagcagagtggaaatactggaaatcccacttccagctggatgtctggatgaactcctgaaa

SEQ ID NO: 1006967 - DNA, 120 bp, Artificial Sequence
  ENSG00000226711_15 (sequence is synthesized)
agtgtcctgcagcaggtgagctgtggccagagcccaaggatgaaggggactccctcactctgtgactgtgaagaggaagcctgaggtgtagcaggcccaggccccagaagtatggaaaaa

SEQ ID NO: 1006968 - DNA, 120 bp, Artificial Sequence
  ENSG00000226711_16 (sequence is synthesized)
atgaggccatttccaatccagaggaagaccttctagaagaagtgatgggtgggagagtgctgacatactatgcaaagctactatttggagttggacacgagtgcatgtgaccttgtgcca

SEQ ID NO: 1006969 - DNA, 120 bp, Artificial Sequence
  ENSG00000226711_17 (sequence is synthesized)
tccaggcagtgactttctgtacagctacagtcacctctggacacctgcggagactttaaaaatttccagaaggtcaggaatttttggagacctttcttatggctacgttgcctgcaaagg

SEQ ID NO: 1006970 - DNA, 120 bp, Artificial Sequence
  ENSG00000226711_18 (sequence is synthesized)
tgaatcaataagcttctgaactgacttagaaaatgttgcagagactcttgtgaacagatagaccctctcctgccactccagatagacgtatccgggtcacacacacctgatttaacaaca

SEQ ID NO: 1006971 - DNA, 120 bp, Artificial Sequence
  ENSG00000226711_19 (sequence is synthesized)
acctgatttaacaacatctcattatctcagatataatacgtaagtttggaggtggatgctttcagccattaagttcaaaagtactgccacaagggccaggcatggtggctcacacctgta

SEQ ID NO: 1006972 - DNA, 120 bp, Artificial Sequence
  ENSG00000226711_20 (sequence is synthesized)
aggtcaaagcaagcagatcacgagatcaggaaactgagaccatcctagccaacatggtgaaatcccatctgtactaaaagtacaaaaattagctgagtgtggtagtatgtgcctgtagtc

SEQ ID NO: 1006973 - DNA, 60 bp, Artificial Sequence
  ENSG00000226711_21 (sequence is synthesized)
acacaaattaatccactcaaatgttggcaagtggagcagagtcccacacctccgcctcca

SEQ ID NO: 1006974 - DNA, 120 bp, Artificial Sequence
  ENSG00000226711_22 (sequence is synthesized)
cttactgcaggaaagaagatccagtgagatagttagtccacaaatggaatgtcaatccataaacacacttaagtaacagaataaatttagtatgagcgtttttatgtgggagctcttgaa

SEQ ID NO: 1006975 - DNA, 120 bp, Artificial Sequence
  ENSG00000226711_23 (sequence is synthesized)
atggttgctgctcatatgtcagagacatatgcagtttaagaaaggtagcagttccaatcctggtttggcccaacagtcactgcatttttggtggggaaaagggatgtgggaggagatggt

SEQ ID NO: 1006976 - DNA, 120 bp, Artificial Sequence
  ENSG00000226711_24 (sequence is synthesized)
acatcttcatctttttctctgggttttctgtcagaaagggatgttgcttactccagtggcaaaaaatgccagtgtcttctgccagagtgggttactgagggccatggtggttccaccttg

SEQ ID NO: 1006977 - DNA, 120 bp, Artificial Sequence
  ENSG00000226711_25 (sequence is synthesized)
tggctgatacagatagtccctttctgcttttgtttctagccaaaaaagatgtttctcgcatctcaggtatgcagacttcagcagctgttttttctatatggctattttttttttctttca

SEQ ID NO: 1006978 - DNA, 120 bp, Artificial Sequence
  ENSG00000226711_26 (sequence is synthesized)
ctctctctttctctcttttttttttgttggcttcactgtgttgccatagtttcttaaatggtcccttgaaccctcccagagctattttggtttgtacataactatctatatatttttttc

SEQ ID NO: 1006979 - DNA, 120 bp, Artificial Sequence
  ENSG00000226711_27 (sequence is synthesized)
ttggggggagtgtgtagagctaaaggctggtatatcctgctcctgctccccgaaagtgacgttattcccccaagctaatatttcaggctttcaatttattcatgctttcatctgtttaaa

SEQ ID NO: 1006980 - DNA, 120 bp, Artificial Sequence
  ENSG00000226711_28 (sequence is synthesized)
cataagtagaaattactttttctctccacatttagatttgatctatctactttaattgctaatagtgtcttagtcatagaatagattagttagaaaaaagtgtttttgacattataaatg

SEQ ID NO: 1006981 - DNA, 120 bp, Artificial Sequence; identical to SEQ ID NO: 954799
  ENSG00000226711_29 (sequence is synthesized)

SEQ ID NO: 1006982 - DNA, 120 bp, Artificial Sequence
  ENSG00000226711_30 (sequence is synthesized)
tctctaatggtaaagctgatggctttgtgctattacaatatccttcaaataaagtgacgatctggtggaaagaacaactaaagcaaggattaggaagaaaacagttaataccttcatttt

SEQ ID NO: 1006983 - DNA, 120 bp, Artificial Sequence
  ENSG00000226711_31 (sequence is synthesized)
taccttcattttggtctcactctgcattaagagttttcattgtgttaaggatttattatacattaagtaatttaatgttcatttaataataaatggatcctattaaatatgatttttaaa

SEQ ID NO: 1006984 - DNA, 84 bp, Artificial Sequence
  ENSG00000226711_32 (sequence is synthesized)
atgtgctgctggattctgtttgctagtattctattaagagattgagcagcttgactaccacacaaattaatccactcaaatgtt

SEQ ID NO: 1006985 - DNA, 120 bp, Artificial Sequence
  ENSG00000226711_33 (sequence is synthesized)
tccactcaaatgttggcaagtggagcagagtcccaggacagatcacattcttaacctctagagagtcttgcaggaccagagccttacctttcccagtctgcaatctctacaggtacagaa

SEQ ID NO: 1006986 - DNA, 120 bp, Artificial Sequence
  ENSG00000283638_0 (sequence is synthesized)
cacatgatattatcttcgcgccactttcgcaaaaacccttttttttactccaggttttgctccagctcaaaggtactgttcttatcttgctttaatacaacgcttcttaaagtcgggtct

SEQ ID NO: 1006987 - DNA, 120 bp, Artificial Sequence
  ENSG00000283638_1 (sequence is synthesized)
aagttctcttccctccccctcctcttctttccactgctagtcgttaccattaaaggtcgaaagttgcattgcagtcggtgcaatctcacaggagggatctggttgggtagtaaacttcgg

SEQ ID NO: 1006988 - DNA, 120 bp, Artificial Sequence
  ENSG00000283638_2 (sequence is synthesized)
gctgcgtagtttccagaaagtatcacgcagacgtgccagggtaggctgcaaggtctgttgcatgaaaaaggggaggaagcccacctgtgcgagtgactcgcgttggagaaatgattgtgg

SEQ ID NO: 1006989 - DNA, 120 bp, Artificial Sequence
  ENSG00000283638_3 (sequence is synthesized)
ttttcgttgcatccaccgctgactcctgaggggcgctggcagttcaggttggactctttcgcgggccaggggcgggagaggccagtcttttgtaatgtttgcctgagctactactgtgca

SEQ ID NO: 1006990 - DNA, 120 bp, Artificial Sequence
  ENSG00000283638_4 (sequence is synthesized)
ccagtgcaccaggttgagaatcacatggcgcccttgtcctcttctgggctttgggctgccacaatcaccctggtaacaatggtggaaagggaggggtccggcttcattttgcaccccttc

SEQ ID NO: 1006991 - DNA, 120 bp, Artificial Sequence
  ENSG00000283638_5 (sequence is synthesized)
cctccttccttgccccccgcttgccttccagggctttcctcctccgacccagcgtgctcactggtctctgatttgtaacctcgtaccctgcacacccccgcccacccccccaacccccgc

SEQ ID NO: 1006992 - DNA, 120 bp, Artificial Sequence
  ENSG00000283638_6 (sequence is synthesized)
acgctccccaaatcccatcttgcgcctgtgtccgccagggacgcggagaaggtatatagcccggttgtctctcattttgcccggtgttcaaagtctggtatgcttaattccattttgatt

SEQ ID NO: 1006993 - DNA, 120 bp, Artificial Sequence
  ENSG00000283638_7 (sequence is synthesized)
gtgcgtcttaaactaagacatcattttattctacagagcgctgtcgggctttggccttgaagcagcccgccctcaattggttctcattagcggtggaatgagaggagaaagcaagataat

SEQ ID NO: 1006994 - DNA, 120 bp, Artificial Sequence
  ENSG00000283638_8 (sequence is synthesized)
tgcaccgtatcttccgcacatttgcgcgtgtattcggtggctgctaccgttaacgatacctgccaagaaaccctgatttagtgggtgaagagggcgcctggcaagggcgaaagcctccca

SEQ ID NO: 1006995 - DNA, 120 bp, Artificial Sequence
  ENSG00000283638_9 (sequence is synthesized)
acagtagcacaaggtgctaggggttaaaactttcacatgtgcagagagtaagtcgtgtttctatttcttccctcctcgggccttaggaacactttcaatctagcggcgaggtggcgcgca

SEQ ID NO: 1006996 - DNA, 120 bp, Artificial Sequence
  ENSG00000283638_10 (sequence is synthesized)
tgcgcgcgccgggtgggggacacccctgtcccacggctccgtgggcctcgtcgtctgtctccggtggggggctgaggcgagcgccgcgggagcgagatgggacaaggtggtagtgagtgc

SEQ ID NO: 1006997 - DNA, 120 bp, Artificial Sequence
  ENSG00000283638_11 (sequence is synthesized)
gccatcctggcccggatgccggtggcacccgcaccggctccggccacggcctctgcctgggccgctgtcccaggcgcgcctttaattaaggactccagcttgggggaagagagaagggaa

SEQ ID NO: 1006998 - DNA, 120 bp, Artificial Sequence
  ENSG00000283638_12 (sequence is synthesized)
aatgccgactgcggtccgcccgtgggtaactggggctcggtggggttttcgctttggcggggtgggggttccgtttcctaattcctgtgcgggccgggtgggcgggggcgggcttttttc

SEQ ID NO: 1006999 - DNA, 120 bp, Artificial Sequence
  ENSG00000283638_13 (sequence is synthesized)
cttgggctattaaaggcagaggggcgggcttttcccagggatatagctacggacagagggccaaggggacggagcgctcctcaagtggtggcagggaggctcgtggccccgcgtcgctct

SEQ ID NO: 1007000 - DNA, 120 bp, Artificial Sequence
  ENSG00000283638_14 (sequence is synthesized)
ggacaggggcgctttggggtgagatgtgcgctcgcggccttgatccatttagtggacgctttttctcacttctcttccccttctggctccgcgggagactgcgctcgcacccggccccgg

SEQ ID NO: 1007001 - DNA, 120 bp, Artificial Sequence
  ENSG00000283638_15 (sequence is synthesized)
agcgctcgagctgcgcgctgggacactgggtatacgtgtggaggggacacccggagagggcggcccgtgcgggatccccgcgctctccacctgcgaggggcgggccggagctgggtcccg

SEQ ID NO: 1007002 - DNA, 120 bp, Artificial Sequence
  ENSG00000283638_16 (sequence is synthesized)
ctgggcaagaagggagcccttcgttggggcagctgtgatccggtagagttgactggttgggtgggaggggacggagcgggcgggacttgagaaaagcaaagtaccagagtgcggttgagg

SEQ ID NO: 1007003 - DNA, 120 bp, Artificial Sequence
  ENSG00000283638_17 (sequence is synthesized)
ggtagcgggcagcgcgcgggaaacgactccccttttcttctccaccgttgacctttaggttcctggaaaactttggtggtgagggtgtgaaatgagggggtgcacgtggagggaaaaaag

SEQ ID NO: 1007004 - DNA, 120 bp, Artificial Sequence
  ENSG00000283638_18 (sequence is synthesized)
ggactcccctccctcttggcttctatcccaccaacccgggaatggagggggagggaggcgtgggcttggcgcgtttttggtgctttgaatggagaactccgtttcccatgatgctttgtt

SEQ ID NO: 1007005 - DNA, 120 bp, Artificial Sequence
  ENSG00000283638_19 (sequence is synthesized)
tctttctctttaatttcggcggcggctgaggctgcacgaggactggagcgcgtggtgtgagcagctggagcacaccctggacgcgcgggctgctcgcggacttcaacgggagcattaggt

SEQ ID NO: 1007006 - DNA, 120 bp, Artificial Sequence
  ENSG00000283638_20 (sequence is synthesized)
gagtctgcatggatctgtgaggacggaaaagaagagctcctggaagacttaaaattttgctacaggaataggccttggccatgtaaaagtgcttacagtgcaggtagctttttgagatct

SEQ ID NO: 1007007 - DNA, 120 bp, Artificial Sequence
  ENSG00000283638_21 (sequence is synthesized)
actgcaatgtaagcacttcttacattaccatggtgatttagtcaatggctactgagaactgtagtttgtgcataattaagtagttgatgcttttgagctgcttcttataatgtgtctctt

SEQ ID NO: 1007008 - DNA, 120 bp, Artificial Sequence
  ENSG00000283638_22 (sequence is synthesized)
gtgttaaggtgcatctagtgcagttagtgaagcagcttagaatctactgccctaaatgccccttctggcacaggctgcctaatatacagcattttaaaagtatgccttgagtagtaattt

SEQ ID NO: 1007009 - DNA, 120 bp, Artificial Sequence
  ENSG00000283638_23 (sequence is synthesized)
gaataggacacatttcagtggtttgttttttgcctttttattgtttgttgggaacagatggtggggactgtgcagtgtacagttgtgtacagaggataagattgggtcctagtagtacca

SEQ ID NO: 1007010 - DNA, 120 bp, Artificial Sequence
  ENSG00000283638_24 (sequence is synthesized)
aagtgctcatagtgcaggtagttttggcatgactctactgtagtatgggcacttccagtactcttggataacaaatctcttgttgatggagagaatattcaaagacattgctacttacaa

SEQ ID NO: 1007011 - DNA, 120 bp, Artificial Sequence
  ENSG00000283638_25 (sequence is synthesized)
ttagttttgcaggtttgcatttcagcgtatatatgtatatgtggctgtgcaaatccatgcaaaactgattgtgataatgtgtgcttcctacgtctgtgtgaacacaccttcatgcgtatc

SEQ ID NO: 1007012 - DNA, 120 bp, Artificial Sequence
  ENSG00000283638_26 (sequence is synthesized)
tccagcactcatgcccattcatccctgggtggggatttgttgcattacttgtgttctatataaagtattgcacttgtcccggcctgtggaagaaaggaggatttttatcgtcttcttatt

SEQ ID NO: 1007013 - DNA, 120 bp, Artificial Sequence
  ENSG00000283638_27 (sequence is synthesized)
ttaacttttaaaagccgtaagttctgatatttagtcattgtaaaatgatctgttttgctgttgtcgggtggatcacgatgcaattttgatgagtatcataggagaaaaattgcacggtat

SEQ ID NO: 1007014 - DNA, 120 bp, Artificial Sequence
  ENSG00000283638_28 (sequence is synthesized)
ccatctgtaaaccgcaggacctttgttggcgacattcctgatcagcgctacagtaagctagatggtaaaaaatcctttctctagttgctgctattaaaaaataatttgaaatatatttgg

SEQ ID NO: 1007015 - DNA, 120 bp, Artificial Sequence
  ENSG00000283638_29 (sequence is synthesized)
atttctaaaaactatgatagctaatttataaagtatgtgttttggaactttggtgaatgatcagattgttactgaatgtgaatgaacctcaaaataaatgaaatttatagatctgaaaaa

SEQ ID NO: 1007016 - DNA, 120 bp, Artificial Sequence
  ENSG00000283638_30 (sequence is synthesized)
atgactcttttttttttaaaaaaaataattagcaatgctagaggagtttgtaaaatatctcttgggaggatcctaaaggaaaacttggacatagctgcttttcaagtttgcatctacata

SEQ ID NO: 1007017 - DNA, 120 bp, Artificial Sequence
  ENSG00000283638_31 (sequence is synthesized)
aagcaccaagatgcctaattttaggaattttattaccctgacaatatttggatgacatgtactaattttgttttagtacacgtgctcattcttaggaagggaatgaagagttgtaaacca

SEQ ID NO: 1007018 - DNA, 120 bp, Artificial Sequence
  ENSG00000226715_0 (sequence is synthesized)
atccatgagaagacacagtgttccatccagaggatgtagcatcaaggcgtcatcttaaaagcagagaaaagactcttacttgacaccagatgccagtgcattgatcttggacttcccagc

SEQ ID NO: 1007019 - DNA, 120 bp, Artificial Sequence
  ENSG00000226715_1 (sequence is synthesized)
ctctagaactgtaaacagccctgggacaaagaacagactacgggtattgccttcttaatcaacaataaagtattagttggcttccaggcagacaccactgactttcaagagaaaggcacg

SEQ ID NO: 1007020 - DNA, 120 bp, Artificial Sequence
  ENSG00000226715_2 (sequence is synthesized)
ggagtaaggaagtaaagaattcagggcaaacgtcgagctttcctctgggctccaatgtaaaagaagtggatagcggctgactagtgtacatattatgtatgcagactttgaaggaatccc

SEQ ID NO: 1007021 - DNA, 120 bp, Artificial Sequence
  ENSG00000226715_3 (sequence is synthesized)
ctctgatgggcagagtggctcgtttcctccctgaagtttccttcatgccacattctggattacaacctcctccaaagagtgtcatctgtcaatataatgtcatctcttgatttctctgtt

SEQ ID NO: 1007022 - DNA, 120 bp, Artificial Sequence
  ENSG00000226715_4 (sequence is synthesized)
ttcttttcttcactataataggtgctgcttgaaaatacaacaaactgtcttcagaatacttttatgtgttgttgaaagaaagcactgcagctaatatagctacaaaggagaaacagttat

SEQ ID NO: 1007023 - DNA, 120 bp, Artificial Sequence
  ENSG00000226715_5 (sequence is synthesized)
tcttaaatgtcatctatttgctggacctgaacaggaattcactatggagctcatacaactaccaccttcagctattaatcaaggagtcattcaactgagaaaggggagattgagatgttg

SEQ ID NO: 1007024 - DNA, 120 bp, Artificial Sequence
  ENSG00000226715_6 (sequence is synthesized)
aatcatttctcattctgtgaagtctaccagaataacccataaagcaaatatcaacctatttcaagtgagttgtgcaagaaaattatttagaataaaatgatagtttgttttttcaattca

SEQ ID NO: 1007025 - DNA, 120 bp, Artificial Sequence
  ENSG00000226715_7 (sequence is synthesized)
taccagaataacccataaagcaaatatcaacctatttcaagccaaaataaatggatgtgaagcagattggactcaaagcattgaaatcaagactttggcattaactaactctgtgtgttt

SEQ ID NO: 1007026 - DNA, 120 bp, Artificial Sequence
  ENSG00000226715_8 (sequence is synthesized)
agacaaaatggaatcatcttgaagaacacagattatcaggccttaccctagagtttcttactcagtacctctggtgtgagagcacaaaaactggcctttataacaagtcctcatgtgatg

SEQ ID NO: 1007027 - DNA, 120 bp, Artificial Sequence
  ENSG00000226715_9 (sequence is synthesized)
ctgatgctgttagactggaagccacgctcgtgaaccatgggtttagatatcactgggaccctcatggagcccattttctcaggcgtagaatgtgactgaagaccacttaccaccaaagaa

SEQ ID NO: 1007028 - DNA, 120 bp, Artificial Sequence
  ENSG00000226715_10 (sequence is synthesized)
ccacaaatcattgataatccattttccaacttcttcaaattccagaccatcaacaagctattcaaaacaataaatgttaatagttttggtggagttaagcagcagaagttaaaagcattg

SEQ ID NO: 1007029 - DNA, 120 bp, Artificial Sequence
  ENSG00000226715_11 (sequence is synthesized)
cgggaatccagaacaacgccgtatggacccctctgcaggtagcaaggaaaagcgccagtaacttttaaaggcttgttttgcatattattcaggcctaaatcacggttctcataaattgat

SEQ ID NO: 1007030 - DNA, 120 bp, Artificial Sequence
  ENSG00000226715_12 (sequence is synthesized)
taccatttgacccagcaatcccattattgggatctctgtcgaagtacagatcaggcatgacctcccatgggtgttcacgggaaatggtgccacacatgcgcagaacttcccgagccagca

SEQ ID NO: 1007031 - DNA, 120 bp, Artificial Sequence
  ENSG00000226715_13 (sequence is synthesized)
gagttactagtttaatttgtcactatttctccaatacatatatgtaagtgcttatcgtcttttaatcctagatattcttctggaagtaataataaaagttgaaagctggaaggaaaataa

SEQ ID NO: 1007032 - DNA, 120 bp, Artificial Sequence
  ENSG00000226715_14 (sequence is synthesized)
atctaggaccactccactgatctgactactttatgagaaacataatcagattattataacatatgaagactgtcagtggtacattctagtgtcaccctggatattatattattgaaagta

SEQ ID NO: 1007033 - DNA, 120 bp, Artificial Sequence
  ENSG00000226715_15 (sequence is synthesized)
taatggtcttttaagttgagagaaagagcatgtgcaaaattgggaaaccaaccatcacatcacattccatcatgtaataagaatacctagatgtttggtgctgctttaaatgtgaacaga

SEQ ID NO: 1007034 - DNA, 120 bp, Artificial Sequence
  ENSG00000226715_16 (sequence is synthesized)
ctctagaactaatgctggtagctgtgtaattaggcaagttcttctctgctattttaagaaaaagacttcatagaaaaatttagttcagcctggtgtggatgcatttcagaatctgtgaaa

SEQ ID NO: 1007035 - DNA, 120 bp, Artificial Sequence
  ENSG00000226715_17 (sequence is synthesized)
tagaaaaatgaaaaatactgatacagcagacgaattctggaactaacacttccacaaatcattgataatccattttccaacttcttcaaattccagaccatcaacaagacatcaagggct

SEQ ID NO: 1007036 - DNA, 120 bp, Artificial Sequence
  ENSG00000226716_0 (sequence is synthesized)
caattccaagagtatcatctgagccagcctgaacttcctctgctactattattcaaataaggatttgaataagcagaatttgcttcagtgaggaaactgcctggggcatcagcctaggag

SEQ ID NO: 1007037 - DNA, 120 bp, Artificial Sequence
  ENSG00000226716_1 (sequence is synthesized)
aggtgtggaccatgagagtgggctgggggcggccctccctctcactcataggggagcaaaccaaacagctcaggctggaagtcctgcagggaattcagcaccggggtggcctttctcctc

SEQ ID NO: 1007038 - DNA, 120 bp, Artificial Sequence
  ENSG00000226716_2 (sequence is synthesized)
aagtctcagttcaaggttctgtctagaatgaagaccacttgcatcccagttgccagggttgcctccacctcattgagagcatcttcaaacaaggcacctctccataggaggacagggaga

SEQ ID NO: 1007039 - DNA, 120 bp, Artificial Sequence
  ENSG00000226716_3 (sequence is synthesized)
ctgcataatgtgagaaaacaggctgaagaactccttgtgtcagctcaccttcatctccaatgaggcagaccctgagctggtggccatggcaaagggaatgctgtgtttctgcaggtggac

SEQ ID NO: 1007040 - DNA, 120 bp, Artificial Sequence
  ENSG00000226716_4 (sequence is synthesized)
gatgagattctcagcccctggcatgagcacagctgtagggaacacttcctttaacttcgtttggctttcttccaccagttcctccttggacatcaggagctgcaagatgtctattataat

SEQ ID NO: 1007041 - DNA, 120 bp, Artificial Sequence
  ENSG00000226716_5 (sequence is synthesized)
ctgtgctgcctctaatgcctacttacccattaccagggactttacaacccagctgtatttcttttcatagaaatcacatatttcttgaaacagcactgaatatagccattcagtatccag

SEQ ID NO: 1007042 - DNA, 120 bp, Artificial Sequence
  ENSG00000226717_0 (sequence is synthesized)
gcgccagatggggcgggaggaggggagacccggcacccaccggcccagagctgcctgacgcggcctgggcggaccccgccgcccgggtgcctaggcacgattccagggatccagggtaaa

SEQ ID NO: 1007043 - DNA, 120 bp, Artificial Sequence
  ENSG00000226717_1 (sequence is synthesized)
gcggttcgcgcgggaacaggaggatatgtcaggcacaggctattccccatcactatagccacagaggactggtccagatgcggatcccgatctgtgcttcttcagatggttggataccaa

SEQ ID NO: 1007044 - DNA, 120 bp, Artificial Sequence
  ENSG00000226717_2 (sequence is synthesized)
gaaagctgctcaggaaaccttacaacacaatggaaaaaacattggagctcctggttaagccttcagactccaggaggcacaccattgggctcctcaagttctcacccctttggtctcaga

SEQ ID NO: 1007045 - DNA, 120 bp, Artificial Sequence
  ENSG00000226717_3 (sequence is synthesized)
ctgaattataccaccaacttccctggttctccaccttgcagatggcagattgtggaacttcttggcctccatagttgcatgaagcaattctcatattaattcgccacttacatatctata

SEQ ID NO: 1007046 - DNA, 120 bp, Artificial Sequence
  ENSG00000226717_4 (sequence is synthesized)
catattctcttgggtctgtttctctggagaaccctgacttatacatgaccttcatgtatagctaaataacaatgtattaatattttccacagaggtgtcatgtctctgtatattaaatga

SEQ ID NO: 1007047 - DNA, 82 bp, Artificial Sequence
  ENSG00000226717_5 (sequence is synthesized)
aaaaaaatgacttgagaggctgaggagggagaattgctagaacctgggagatggaagttgcagtgagccaagattatgccac

SEQ ID NO: 1007048 - DNA, 120 bp, Artificial Sequence
  ENSG00000226717_6 (sequence is synthesized)
tgcactccagcctgggtgacagagcgtgacactgtctcaataaaaataaaaatatatgatacagattcatcaaaattataaaactacctcagtttttaaaaaacatgtttgtcactgttt

SEQ ID NO: 1007049 - DNA, 120 bp, Artificial Sequence
  ENSG00000226717_7 (sequence is synthesized)
tatggtatctgattgcaaaattacaataatgatggctagtatttattagttgatgaaacacaaccataatttgtaaggtatagtaattcccatcaactttagaaactgaattagcaatca

SEQ ID NO: 1007050 - DNA, 120 bp, Artificial Sequence
  ENSG00000226717_8 (sequence is synthesized)
aaactatatatatccattcttttaattatttttaaaagcctataataaggatgttaaaggtaaagctaagttttcaataataaccctaaaataactgcattatgcatatcctttggaaag

SEQ ID NO: 1007051 - DNA, 120 bp, Artificial Sequence
  ENSG00000226717_9 (sequence is synthesized)
aaagagagcaatgagggatggatttaaaatattctatctaccaagttattttatgcaaatagtttttaaaataacatcatataaattaacaaagatcagggcaagttccttaatcaaagt

SEQ ID NO: 1007052 - DNA, 120 bp, Artificial Sequence
  ENSG00000226717_10 (sequence is synthesized)
taaacagttatcacattcaagatcttacctatacatatctacttaagacactgtaaattttgcttcttctgatactgagtaatgttgcattttcttttataaatgagacataaggatgat

SEQ ID NO: 1007053 - DNA, 120 bp, Artificial Sequence
  ENSG00000226717_11 (sequence is synthesized)
aatgttgcattttcttttataaatgagacataaggatgatagcaaccacacatgcacactccagagattgttctaacttccctccaccccttcttttgaaacagggtcttgctctgttgc

SEQ ID NO: 1007054 - DNA, 120 bp, Artificial Sequence
  ENSG00000226717_12 (sequence is synthesized)
ctctcgaagtcaagcaattatcccacctcagcctcctaagaagctgggaccacaggcgagagccaccacacctggcttattgttttttgcatgtttagtagagatgaggtttcgccatgt

SEQ ID NO: 1007055 - DNA, 90 bp, Artificial Sequence
  ENSG00000226717_13 (sequence is synthesized)
cctctgcatgcatgcctggcctaactttttcaggtgtattaacactatgccatctaaattttgcatctaacaaaactcattttcagaaaa

SEQ ID NO: 1007056 - DNA, 120 bp, Artificial Sequence
  ENSG00000226717_14 (sequence is synthesized)
catctaaattttgcatctaacaaaactcattttcagaaaacaggttgattggaggtcatggaacggttaaatattagagctgagacttgtatccaggcagtctggctcctgagtctctgt

SEQ ID NO: 1007057 - DNA, 120 bp, Artificial Sequence
  ENSG00000226717_15 (sequence is synthesized)
gcttaaccaatattcagtgttatacaaatcgttttcttaactctgtatgccttttctttcctaagttcagaggcttccgaaaaatttagctgaaagtgagaaattcctattcagtgaatg

SEQ ID NO: 1007058 - DNA, 120 bp, Artificial Sequence
  ENSG00000226717_16 (sequence is synthesized)
gagactatagagtagagccggtgccaaaggataattgtgggaccgtctcagagaactaagtttcaatttttaaagtgggtcttttaatttatatttctatttgagtcattttgtatttta

SEQ ID NO: 1007059 - DNA, 120 bp, Artificial Sequence
  ENSG00000226717_17 (sequence is synthesized)
tgaccaatcatcttgtgttccacatatctaatgatataatcaaaaattatatagaaaagagttaaacaaatttatgattttttctaactaaattatttacaagtctgttctattaccata

SEQ ID NO: 1007060 - DNA, 120 bp, Artificial Sequence
  ENSG00000226717_18 (sequence is synthesized)
tctattaccataatttactatatttgctaattttcccttttgtaaaattatttttatctattcacattttcttatttcctaccttcatctataaacaggagaaaaaaattatgtaaagcc

SEQ ID NO: 1007061 - DNA, 120 bp, Artificial Sequence
  ENSG00000226717_19 (sequence is synthesized)
agtgcctctcttttataataaggggtcaactatttggaacctccataagatttcccccttttttagtgaaggacaatatgtttttcaggtacttactcccgacctttggtttatatgtaa

SEQ ID NO: 1007062 - DNA, 120 bp, Artificial Sequence
  ENSG00000226717_20 (sequence is synthesized)
tgatattgtggcaggaaaaaaatatagtggcctttatatataccacaggctttatgtacattttaaatatttaaaattgtaaaatgttaaaaatgtaagtaaaaggaaaacaagatgaca

SEQ ID NO: 1007063 - DNA, 120 bp, Artificial Sequence
  ENSG00000226717_21 (sequence is synthesized)
accatatcattatgagactattatttttagcattataaacttacagatgataagccaattatactatttctttttatggaacgatatgtaaagtaaataaaagtaacaagtatatacaca

SEQ ID NO: 1007064 - DNA, 120 bp, Artificial Sequence
  ENSG00000283633_0 (sequence is synthesized)
ttcctggtgactaggatgtcgtcggaggagaacaagtgcgtggagcagccgcagccaccaccccccgaggagcctggagccccggccccgagccccccagccgcagacaaaagacctcgg

SEQ ID NO: 1007065 - DNA, 84 bp, Artificial Sequence
  ENSG00000283633_1 (sequence is synthesized)
cccggccccgagccccccagccgcagacaaaagacctcggggccggcctcgcaaggcgcttcccctttccagagagccagaaag

SEQ ID NO: 1007066 - DNA, 120 bp, Artificial Sequence
  ENSG00000283633_2 (sequence is synthesized)
agaaacatctcaccaatttcaaatctggcacccactggaaatcagactgcccagctcgcccgacagccactcctggagcccctaaagctctagcccaaggctctctgactccttcccaga

SEQ ID NO: 1007067 - DNA, 120 bp, Artificial Sequence
  ENSG00000283633_3 (sequence is synthesized)
aaggctctctgactccttcccagatctattcggcttagcgactgaagattgacgctgcccgatcgcctcggaagtcccctggaccatcacagaagccgagcttcgggtaactctcacagt

SEQ ID NO: 1007068 - DNA, 80 bp, Artificial Sequence
  ENSG00000283633_4 (sequence is synthesized)
aaatgccttattttcttctgcaacaccgcaaccgcttggccccaatacaaacttgacaatgtctctaaatggccggaaaa

SEQ ID NO: 1007069 - DNA, 120 bp, Artificial Sequence
  ENSG00000283633_5 (sequence is synthesized)
agtctctgttcccaatgcgattcctcccagatcctcctcctttccctcccgcctgtcccctcggtcccaaccccaagcgtcgctgagtcttcccagtcttccttttctacagacccatct

SEQ ID NO: 1007070 - DNA, 77 bp, Artificial Sequence
  ENSG00000283633_6 (sequence is synthesized)
acccatctgacctttcccctcctccccaagctgcttgtcgccagaccgagctaagtcccaatacttcctcagcctcc

SEQ ID NO: 1007071 - DNA, 120 bp, Artificial Sequence
  ENSG00000283633_7 (sequence is synthesized)
agcgcttccccacctgcccaacaatttcctcttagagaagtggctggagctgaaggcatagtcaaggtacatgtacttttttctctatcagacctctctcagatcagtcaatgtttaggc

SEQ ID NO: 1007072 - DNA, 120 bp, Artificial Sequence
  ENSG00000283633_8 (sequence is synthesized)
ttccaatatctaactctgtcctacaacttaacctggagtgacttaaatgtcatcctgacttctactctctccccagatgaacgggaaagttttttctctagcccaatctcgtgctgataa

SEQ ID NO: 1007073 - DNA, 80 bp, Artificial Sequence
  ENSG00000283633_9 (sequence is synthesized)
aaatgtcatcctgacttctactctctccccagatgaacgggaaagttttttctctagcccaatctcgtgctgataaccgc

SEQ ID NO: 1007074 - DNA, 74 bp, Artificial Sequence
  ENSG00000283633_10 (sequence is synthesized)
gttgaagggcttaaaaacgaggtaaagacgaaaacccagcccaggtcatggcccacttagcagcaaccattaga

SEQ ID NO: 1007075 - DNA, 89 bp, Artificial Sequence
  ENSG00000283633_11 (sequence is synthesized)
atgacaagcttaaagaaactacccgaggtaaagacgaaaacccagcccaggtcatggcccacttagcagcaaccattagatgctatact

SEQ ID NO: 1007076 - DNA, 88 bp, Artificial Sequence
  ENSG00000283633_12 (sequence is synthesized)
tagaatctggccttcaaacccagcaggaattaatcggaagcagccagacggcaacgcatttcggagttacaattacttgcctctgctg

SEQ ID NO: 1007077 - DNA, 120 bp, Artificial Sequence
  ENSG00000283633_13 (sequence is synthesized)
cctctgctgtgagacaaaacccagccacacctcctgcatacaggaacttcaaaatgcctaagacgcagcaatcagacactcctacaagacttcatcaggatcttgcttcaagtgccagaa

SEQ ID NO: 1007078 - DNA, 120 bp, Artificial Sequence
  ENSG00000283633_14 (sequence is synthesized)
gcctctcccggtacctgctgctgctcccggggcttcgggaaatgcgagagtctgagccggggaggaggaacccgagcagcggcggcggcggccgcggcggcgggagccccccaagaggag

SEQ ID NO: 1007079 - DNA, 120 bp, Artificial Sequence
  ENSG00000283631_0 (sequence is synthesized)
attctcaaacttttgtcatttcacttctctcaaaaccactttagtggacctgttctctgtaaggtcactactgccctccacttcaaattccattgtctcctcaagtcctcaacttagtca

SEQ ID NO: 1007080 - DNA, 120 bp, Artificial Sequence
  ENSG00000283631_1 (sequence is synthesized)
tttgactaatgttattatttccttcttcttgaaacacttttcttccttctgggatcctctgctctcctagtacttctcctaccttcctgggtgctctctgcactcctaataaccaagcag

SEQ ID NO: 1007081 - DNA, 120 bp, Artificial Sequence
  ENSG00000283631_2 (sequence is synthesized)
tggtcactacacctagactttgagaagaaaccagaaatggataacctggatatgttctcgtggcaaacacagaagtaagtgaaaacactcaaggccttttgagacctggacctggaactg

SEQ ID NO: 1007082 - DNA, 120 bp, Artificial Sequence
  ENSG00000283631_3 (sequence is synthesized)
gcccaccatcacttccaccacattctattgcccaaaacaagttacagggccagcccagattcaaaggaaaggaaaatagactctggctcttcagtggatgaaattccaaggtcacctggt

SEQ ID NO: 1007083 - DNA, 120 bp, Artificial Sequence
  ENSG00000283631_4 (sequence is synthesized)
aaaggaagaggtgaagaagtaaggtcattaatgtaatctttcatactgtaacacttgctttttgacttagaaggttgagtgtgttttgtatgtcaatcacacctcagtaaaacggttttt

SEQ ID NO: 1007084 - DNA, 120 bp, Artificial Sequence
  ENSG00000283635_0 (sequence is synthesized)
gcctggcagacccggcgcgccgaagccggacgagggagacctccacctccggccaccggccagaggcgcgcccccagcggccagggccgcgggaaagtccgcgcggcatgcttcattcac

SEQ ID NO: 1007085 - DNA, 120 bp, Artificial Sequence
  ENSG00000283635_1 (sequence is synthesized)
gaaagtccgcgcggcatgcttcattcacgcattcacattcattcatttactcattcactcactcattcatcgcggggccccggagcagcccaggagaaggtggcagcaccgccctgcagc

SEQ ID NO: 1007086 - DNA, 120 bp, Artificial Sequence
  ENSG00000283635_2 (sequence is synthesized)
agctccgggggcacgcccacccgggcctctgaggtgcctgtggtcgacacttgtcccggcagctaccaagtgacctttcttatttttgagaccacgtgttgcaatttttggttcaggaaa

SEQ ID NO: 1007087 - DNA, 120 bp, Artificial Sequence
  ENSG00000283635_3 (sequence is synthesized)
tagagtcattgttactctggggaggtacaaaagaaagaaatgatgttgtccctgcccccaagcgcatcactagggagaaaggactatctcataaaaaggaaacttaatcaaatgctaaat

SEQ ID NO: 1007088 - DNA, 120 bp, Artificial Sequence
  ENSG00000283635_4 (sequence is synthesized)
tgggcgatgtgggctataaattaaccagagctatccccacaggctccgtgagaaaggcagcacttccaaggcgggtaagatgggccctgagaaagggacgccttacaacggtgcaagccg

SEQ ID NO: 1007089 - DNA, 120 bp, Artificial Sequence
  ENSG00000283635_5 (sequence is synthesized)
tagagacgcaggagccaggggtaggaggttgtcctgggagacagcgcgggaccctgcatcaccttgtttcgatggagtcctgcgatgaggaggaagggaaattgggagacaccctaccca

SEQ ID NO: 1007090 - DNA, 120 bp, Artificial Sequence
  ENSG00000283635_6 (sequence is synthesized)
ctccccaggccaccactgaagctggggagctttgctacagggaggaagccatgtggaacctaaactaagacactggatactgaaaatggtttgacaaagccgaccctcactcaaggcttc

SEQ ID NO: 1007091 - DNA, 120 bp, Artificial Sequence
  ENSG00000283635_7 (sequence is synthesized)
acgttggaatctatcttcccacctgtttcagagtcacagggtctccatacctctgaaaaagtttgctgaccgctggtgaccgttcatcacacagtggcgttatgattactggagttttca

SEQ ID NO: 1007092 - DNA, 120 bp, Artificial Sequence
  ENSG00000283635_8 (sequence is synthesized)
cctgtggtcagttatgatgggtgcagccagagagcaaggcattgggtggtgcttcctgagtgggagacaatgataatgatcatgattatgcagaagggtggtgccttcttatgttggagc

SEQ ID NO: 1007093 - DNA, 120 bp, Artificial Sequence
  ENSG00000283635_9 (sequence is synthesized)
tgaacactcagaagaaaggaaacggtgggcttgggagagttccttgccaacctaagacaaactttgaatgcccaagggcctcactggcagctcaggagatttacatctcctacagccact

SEQ ID NO: 1007094 - DNA, 60 bp, Artificial Sequence
  ENSG00000283635_10 (sequence is synthesized)
atctcctacagccactgggtaggagaaatcactgttgcagggattacctgaggtcaggag

SEQ ID NO: 1007095 - DNA, 66 bp, Artificial Sequence
  ENSG00000283635_11 (sequence is synthesized)
acgcgggaggcagaggttgcagtgagccaaaaagaaaaaagaaaatcagacctcggggcagatcac

SEQ ID NO: 1007096 - DNA, 86 bp, Artificial Sequence
  ENSG00000283635_12 (sequence is synthesized)
gcaaaatccccctctctactaaaaatacaaaagctagccaggcgtggtagtgcgtgcttgtaatcccagctactcgggacgctgag

SEQ ID NO: 1007097 - DNA, 69 bp, Artificial Sequence
  ENSG00000283635_13 (sequence is synthesized)
aaagaaaagaagacctcaaatttgataagggttgaaggctacaaacgagactaaagtcacagccttgac

SEQ ID NO: 1007098 - DNA, 120 bp, Artificial Sequence
  ENSG00000283635_14 (sequence is synthesized)
ggttgaaggctacaaacgagactaaagtcacagccttgacaggcctgctgcatcagtcaggagccagatagtgaatggtcctgagaccatggctatggacaattgagtagataagctgag

SEQ ID NO: 1007099 - DNA, 120 bp, Artificial Sequence
  ENSG00000283635_15 (sequence is synthesized)
aatctcaaacccccaaattctcagaagcctccaagccaacagaagcaaatacttcctccttgccggagaacaggttgttcttacggaataccttacctgtggtaggtgtcctgcaaggtg

SEQ ID NO: 1007100 - DNA, 120 bp, Artificial Sequence
  ENSG00000283635_16 (sequence is synthesized)
tttgttctcaagacctgccctcaccactgctccttgatgccaacatccaggggcaggcttcaccgtagctagagcagagaggcatatgctcagctctggtcagaactgtcctgttctcca

SEQ ID NO: 1007101 - DNA, 120 bp, Artificial Sequence
  ENSG00000283635_17 (sequence is synthesized)
aaggaattgcaaagctaatgtgtgccagcaggagctgaaggaacacaggtgacgctggttcttcgcagtgtggtggcgaaggagcataacgctagatgggtggctggagaagaattcgtt

SEQ ID NO: 1007102 - DNA, 120 bp, Artificial Sequence
  ENSG00000283635_18 (sequence is synthesized)
ggcacaggggcagtcatctgtgatttaaaactcgatgctttggcaaggacaccaggaactgattccaatcatttgttgggctgactccagtggtgtgctagttaatgtgtaacagttggc

SEQ ID NO: 1007103 - DNA, 78 bp, Artificial Sequence
  ENSG00000250472_0 (sequence is synthesized)
gggaggacccaattctgggtgtcaccagcatacatgttaaagcttgattttgttgtcattatttacttttcattatcc

SEQ ID NO: 1007104 - DNA, 120 bp, Artificial Sequence
  ENSG00000250472_1 (sequence is synthesized)
aaagcttgattttgttgtcattatttacttttcattatcccgttactttaattggtcataatcttcataaaaccaaaaataactcatttttttaacacttttgagattagttttctattt

SEQ ID NO: 1007105 - DNA, 120 bp, Artificial Sequence
  ENSG00000250472_2 (sequence is synthesized)
atctaaattttcatcacctatttcatgtgtggaaacctgcgattatatatgaatttctatttgtttaaacttgaccactgcaccataccatctccagaattgtttggcttgttttctttc

SEQ ID NO: 1007106 - DNA, 120 bp, Artificial Sequence
  ENSG00000250472_3 (sequence is synthesized)
tgctgcttatttcatgatatgcctgctgtggtgtgaaagagtttggattgtattgcatgcttttagaattattatctgaatatattttaggattttcaaatttttatggggcaacttttt

SEQ ID NO: 1007107 - DNA, 120 bp, Artificial Sequence
  ENSG00000250472_4 (sequence is synthesized)
tgtatgcattaatgtttaaaaatgtaaacgttaaaatatctttaaatgaagatattaaaaatattctgcatgtttgttgtataagtagattttggggcccaatgccatatagcatgctat

SEQ ID NO: 1007108 - DNA, 120 bp, Artificial Sequence
  ENSG00000250472_5 (sequence is synthesized)
taacatcacttccaataagtattattatgggctgattgctaaattttacctgaactgatatcatgtcagacatcttttaagatattcttttgagtgatgacagttatatgcaaagggtat

SEQ ID NO: 1007109 - DNA, 120 bp, Artificial Sequence
  ENSG00000250472_6 (sequence is synthesized)
attgatgtagctgtttaaagaccttttgtaatgtggtataccaaattcagccattcatttttggtattggatacatgatagtatgaaagaaggtgtaggttaagaagtttgtgtttaagt

SEQ ID NO: 1007110 - DNA, 120 bp, Artificial Sequence; identical to SEQ ID NO: 876499
  ENSG00000244198_0 (sequence is synthesized)

SEQ ID NO: 1007111 - DNA, 120 bp, Artificial Sequence; identical to SEQ ID NO: 876500
  ENSG00000244198_1 (sequence is synthesized)

SEQ ID NO: 1007112 - DNA, 120 bp, Artificial Sequence
  ENSG00000244198_2 (sequence is synthesized)
cccggcctggttaaggaaaaggagccgataaaacctctccagtatgcattcttagaaaccagatatacaaagacaagatctctgctttcaagaagctctcaatctgattgaggagagaaa

SEQ ID NO: 1007113 - DNA, 120 bp, Artificial Sequence
  ENSG00000244198_3 (sequence is synthesized)
gcagcagagcatggtcattcaacatttattcaaccaaaaatactaagtcagctctatacaaactaatggaaggatacagctatgcaaatatagaacactaaagtgttacatgacagatgt

SEQ ID NO: 1007114 - DNA, 120 bp, Artificial Sequence
  ENSG00000244198_4 (sequence is synthesized)
atgagcagaactgggaagaaaggaccctgaaaagttagctggttccaagtgaccctccaaggtatggagatgctttggggagctggtgagggaggcacagagcagactggggagtcaacg

SEQ ID NO: 1007115 - DNA, 120 bp, Artificial Sequence
  ENSG00000244198_5 (sequence is synthesized)
gaggggccaaggtgtcccggtggggcttattagaacctgcctgaagggagggtctcctaagacacaaaccaccactgtagatcgtgtattagaattattctctaatctttattctgaaag

SEQ ID NO: 1007116 - DNA, 120 bp, Artificial Sequence
  ENSG00000244198_6 (sequence is synthesized)
gggaagagtgctggattcagagcccacctcaggggaagacaggaccctctccaagatggtttccctagaagctactacctctccctggagggtggagatatttgctggtcaaagcaagaa

SEQ ID NO: 1007117 - DNA, 120 bp, Artificial Sequence; identical to SEQ ID NO: 876506
  ENSG00000244198_7 (sequence is synthesized)

SEQ ID NO: 1007118 - DNA, 120 bp, Artificial Sequence
  ENSG00000244198_8 (sequence is synthesized)
aggtcgggcgcaggcggggtgacccggggaaggggcgcgcacagagacagagggagccagccgggccccacggtgtcctcggacgcctccgaaatctccctgcgtgtttgtttcttcgga

SEQ ID NO: 1007119 - DNA, 120 bp, Artificial Sequence
  ENSG00000244198_9 (sequence is synthesized)
gcttcaccggagcctgactctggaaccggcctgtctgcctgctgcagtctgtcattcaacatttattcaaccaaaaatactaagtcagctctatacaaactaatggaaggatacagctat

SEQ ID NO: 1007120 - DNA, 120 bp, Artificial Sequence; identical to SEQ ID NO: 876513
  ENSG00000244198_10 (sequence is synthesized)

SEQ ID NO: 1007121 - DNA, 120 bp, Artificial Sequence; identical to SEQ ID NO: 876514
  ENSG00000244198_11 (sequence is synthesized)

SEQ ID NO: 1007122 - DNA, 120 bp, Artificial Sequence
  ENSG00000244198_12 (sequence is synthesized)
aagaaaaaattgtctgataaaaccacatctcatagaaacccaatgaatgcaacacatctaaaattttatctgcaaaaaacgagagaagacttgcccttctgtcagtaaagcacagataaa

SEQ ID NO: 1007123 - DNA, 120 bp, Artificial Sequence
  ENSG00000244198_13 (sequence is synthesized)
gagaagtaaacttttctggattgaggcaataattgggcatcaagagtccacgtgacaactgaggctggcagttcaaatgtcacacctcttaggaatgactttccttgcacagtgctctcc

SEQ ID NO: 1007124 - DNA, 120 bp, Artificial Sequence
  ENSG00000244198_14 (sequence is synthesized)
tcagggcacccttgacctctacattcctcaggttgtaaatcagggggtttagcatcgggttgaaagaactgtaaaatagaaaaaggaccttctgctgctcctcaggatggcgggacttag

SEQ ID NO: 1007125 - DNA, 120 bp, Artificial Sequence
  ENSG00000244198_15 (sequence is synthesized)
gggccatgtacatgacgatggcgctgccaaagaagagtcccactacgcagaggtgggaggagcaggtggagaaggcctttctgcggccctccccagactggatcctcaggatggccgcca

SEQ ID NO: 1007126 - DNA, 120 bp, Artificial Sequence
  ENSG00000244198_16 (sequence is synthesized)
ggatgtgtgagtaggagaccagcaccaggcagagtggtcccaccaggatgaacatgcaggctgcaaagatgaccacctggttgagccaggtatcagcacaggccagcctgaggacagaca

SEQ ID NO: 1007127 - DNA, 120 bp, Artificial Sequence
  ENSG00000244198_17 (sequence is synthesized)
ggatttcacagaagaagtggttgatttcacgaggcccacaaaagggcagtcttaggatgaggctcacatggaccatagccaggagggagccacatgtccaggaagtgatggccagagtga

SEQ ID NO: 1007128 - DNA, 120 bp, Artificial Sequence
  ENSG00000244198_18 (sequence is synthesized)
tgcagactttccaggtcatgatgatgaaatatcggagagggtggcagatggccacgtaccgatcgtaggacatcagcaccaacaggaggcattcagtatgtgcaaaactcaaaaagagaa

SEQ ID NO: 1007129 - DNA, 120 bp, Artificial Sequence
  ENSG00000244198_19 (sequence is synthesized)
aggtctatgtcatgcagccagcaaaggagatgggcttggctggatgcaggaggttcaccagcatctggggcactgtgttgcaggcataggcgatgttgacgacggccaggtgtgagagga

SEQ ID NO: 1007130 - DNA, 120 bp, Artificial Sequence
  ENSG00000244198_20 (sequence is synthesized)
agaagtacatgggggtgtggagtctggagtccagtgagatgagccccaggatggtcccattccccagcagggtgaagacatagaacagggagaagagcccaaagaggagcatctgaatcc

SEQ ID NO: 1007131 - DNA, 120 bp, Artificial Sequence
  ENSG00000244198_21 (sequence is synthesized)
ttgggcccaggagaaatcccagtaggaggaactctgtgaccattgtctgatttttcaccatttcactactaaaaaacaaacaaagaaacaaacaaaaaacaagcagctgtgtgacacgct

SEQ ID NO: 1007132 - DNA, 120 bp, Artificial Sequence
  ENSG00000244198_22 (sequence is synthesized)
tttaaagtctattttatttattgttttataaatttttagtttgtggaaaattgttagtaaatgtctttaagaactcattcagttatacataagtaaagttttacttgaaaacttgctgtt

SEQ ID NO: 1007133 - DNA, 120 bp, Artificial Sequence
  ENSG00000244198_23 (sequence is synthesized)
tgttaattcaagtccttcatatttgtaacaatcactatacctgaaatcccaaatgcaagaaattgtttttcaaatagaaaaagtgtagctgacttcagcaacaagaattgcaatatacta

SEQ ID NO: 1007134 - DNA, 120 bp, Artificial Sequence
  ENSG00000244198_24 (sequence is synthesized)
tataagtaaccaacggaaggaaattattgacaaatcaataattcaatttggcacttgacaaatggcagcatcaatgaattagcagtaagatgcttagcctgtgagttggtggtgtgctga

SEQ ID NO: 1007135 - DNA, 120 bp, Artificial Sequence
  ENSG00000244198_25 (sequence is synthesized)
attgatgaatttgtttttttgaccttggatcttggatcacagtttccttaatgaacttcaacatggtttttggtgcaaacatttgtcaatgccattgcaagaacaaaataacttgagtct

SEQ ID NO: 1007136 - DNA, 120 bp, Artificial Sequence
  ENSG00000244198_26 (sequence is synthesized)
tatctactttagtgagattaaagtgaggaaaggcactgtttttggccagtccctagtttaatttttgtcagtactaactgggatataaaggtgtgtttcccgaggatataagagacagac

SEQ ID NO: 1007137 - DNA, 120 bp, Artificial Sequence
  ENSG00000244198_27 (sequence is synthesized)
ttgcattctgagaaataaatttgtgaaacccacatgtaactgatgagaataacaatctagaggtgagaaacacgacactttcaggaaacattgagtggagagtttgaggagcctccagaa

SEQ ID NO: 1007138 - DNA, 120 bp, Artificial Sequence
  ENSG00000244198_28 (sequence is synthesized)
ggccactgcgggtgctttgatgaaatctctgggaggcacagcagaagaatgtgattcattcagtgagcccaagtgtagtcggttgtatggcgtgcctgtctggaggaagactgtaggaaa

SEQ ID NO: 1007139 - DNA, 120 bp, Artificial Sequence
  ENSG00000244198_29 (sequence is synthesized)
aagaaggcaggtgaccaatatggagtgtagtcatcaggccagaggggcagcatttggcaatgcatccttaatgacattcagggtaaggaaaaaggggaaccagctgcaccaggatcctag

SEQ ID NO: 1007140 - DNA, 120 bp, Artificial Sequence
  ENSG00000244198_30 (sequence is synthesized)
tcatattcatcaatcaactgttaggtaacaatttatcttcttgagcagttatttctacaaagaagaaatgtgttgagtactaaacttcttgactccttttgcagtcacattttcaagttt

SEQ ID NO: 1007141 - DNA, 120 bp, Artificial Sequence
  ENSG00000244198_31 (sequence is synthesized)
aaataaatgaacatttaggtatcctggcttatgcattttcctcttttgcttttgggttgtatgatgcagttcctgaacaaaattcccaaagctgaatctaaaatgtgaggaccagactct

SEQ ID NO: 1007142 - DNA, 120 bp, Artificial Sequence
  ENSG00000244198_32 (sequence is synthesized)
gggtcaaggaaacctcattgaagcaagaactggggaaagagacagattcctttctaacagcaacagatgagatatctattttcttataagcattattgataggtgatcaagttaccttga

SEQ ID NO: 1007143 - DNA, 120 bp, Artificial Sequence
  ENSG00000244198_33 (sequence is synthesized)
cacaaaaataatctaaataacaaattaaaaattcctcacttgtgaccaggacttattaaattttaggttgatagtaaaaatttctcagtaggtgccgtcatatgcacctgtagttccagc

SEQ ID NO: 1007144 - DNA, 120 bp, Artificial Sequence
  ENSG00000244198_34 (sequence is synthesized)
tacttgggaggctgaaagcaggaggatagcttgagcccaggagttccaggacagcctggataacatggcaagccctcatctcataaaataacataaaataaaaaatttctgtgtttatca

SEQ ID NO: 1007145 - DNA, 120 bp, Artificial Sequence
  ENSG00000244198_35 (sequence is synthesized)
aactttctaaatttattttttaagctcataaggcatagaaaaatatttgactgtgaaagatgtattcaaacccacccacttataaaataataatttcctttctcaatttttcatttccct

SEQ ID NO: 1007146 - DNA, 120 bp, Artificial Sequence
  ENSG00000244198_36 (sequence is synthesized)
caaaaggaagacataaaggaaaaaagaaacacagtaaaagccatgattttttgaagccaactgaaagacaggtgtaaaagaaggaaaataaggtacctcatagtctgagtattctttcag

SEQ ID NO: 1007147 - DNA, 120 bp, Artificial Sequence
  ENSG00000244198_37 (sequence is synthesized)
aacagtagtcctgtttgattcagccttgatttcttttaaagaaatggagagggcatgttcatttttatatccctttaattgtgtatgttaatacacattttcaaatgacatataaatata

SEQ ID NO: 1007148 - DNA, 120 bp, Artificial Sequence
  ENSG00000244198_38 (sequence is synthesized)
agcaaatgaattaataactaagtattgatgtccttatattagatctggtttcttttacagtatagtcaagtataattatgccaaattcagccccttcttcccaaaggaaataaaatgcta

SEQ ID NO: 1007149 - DNA, 120 bp, Artificial Sequence
  ENSG00000244198_39 (sequence is synthesized)
caattcaggagaatttcatccctaatgatctgaattaaaatgaaattttaaaaatgtgtcaagaacaacgggaagattcataaagtgtttaaacacttgaattttgaatcacttctcttt

SEQ ID NO: 1007150 - DNA, 120 bp, Artificial Sequence
  ENSG00000244198_40 (sequence is synthesized)
tatctattttttttcttattttatttgatacctatgtgacatacttattgttaattaaagacaatcaagaggaaaccaaacagagtaaatttctagggggttggaaggagtggactgggg

SEQ ID NO: 1007151 - DNA, 120 bp, Artificial Sequence
  ENSG00000244198_41 (sequence is synthesized)
gattttgctctaccttgacacacgttgtaattccaaatgtacctttcaggcatagagatgtacattaatttatatatgtacaatttcagaatttaaaaaatgacagattatctggctaat

SEQ ID NO: 1007152 - DNA, 120 bp, Artificial Sequence
  ENSG00000244198_42 (sequence is synthesized)
acatggtaaggaaactagaattttaaagtaaatatctaagaaggcatttgttgctgtatatataagcaaaacagcgtaactttatggaacctgcattttaaaaagcaaatctcaaaattt

SEQ ID NO: 1007153 - DNA, 120 bp, Artificial Sequence
  ENSG00000244198_43 (sequence is synthesized)
aatgatctgtcaggttcttttttaaaatcttgggcatgggtaaagcagaatcgctgaagtgattacctgtagttaatctgtagctcagctgagctgcagggctgtttacttgtaagtaac

SEQ ID NO: 1007154 - DNA, 120 bp, Artificial Sequence
  ENSG00000244198_44 (sequence is synthesized)
aagtgagaaatgaaaactaagttatctcattgcttacatagttatgagccaagactttgcaaagttgtcttatggagtcagagttgataacgtaagtacgttttctggatataagaacta

SEQ ID NO: 1007155 - DNA, 120 bp, Artificial Sequence
  ENSG00000244198_45 (sequence is synthesized)
tcgtggaccatgaagaactgagtgtcagtttcatgtaacgaccgtctattcaataatctgctagaggttgataacaattgatcctactcttgagtgcttcctgtgaactgggcactggag

SEQ ID NO: 1007156 - DNA, 120 bp, Artificial Sequence
  ENSG00000244198_46 (sequence is synthesized)
gaacacagtgtagcaagttgatggttctgagcttgtgaagatttcattgtgaagatgtgcctcgggaggaaaagcagaaataaataaaaaggtacacattaaacaaaaatcctataaaaa

SEQ ID NO: 1007157 - DNA, 120 bp, Artificial Sequence
  ENSG00000244198_47 (sequence is synthesized)
gaaaatttaaagtattattaattattacatcgttttcctactttgttacaccaccacctaccacctgagttctttttctgtactctttccatgtgcaccacaaaaacttatcctccagtc

SEQ ID NO: 1007158 - DNA, 120 bp, Artificial Sequence
  ENSG00000244198_48 (sequence is synthesized)
tatggaaaatctaatatttatacatatttatctagtacattgcaggtgccttatgccctctttagtgccatgcttaatgaaagataagacatagatttagcatccatttgggtttatatt

SEQ ID NO: 1007159 - DNA, 120 bp, Artificial Sequence
  ENSG00000244198_49 (sequence is synthesized)
ctattgcaataaatatattctcatagattagcatgtattgtgactgtactggcaataattaaatgcataatttattaaacagctgacatgtattaattttcctgagctgtaacatctctc

SEQ ID NO: 1007160 - DNA, 120 bp, Artificial Sequence
  ENSG00000244198_50 (sequence is synthesized)
tagttcctctcctcttccccaccagggtcctcagccacacaccccgagccctgcctgcgggcccagcccccccatttccggagcctgcgccccggacccagcgggggctgatccctggga

SEQ ID NO: 1007161 - DNA, 120 bp, Artificial Sequence
  ENSG00000244198_51 (sequence is synthesized)
aaggcctggcttcctcttccttcctgtccctgccccacctccgccgggctccacagccgccgggagcccagggccgagacgggaggagggcacccacctggtcggtgtcacatgctgctt

SEQ ID NO: 1007162 - DNA, 120 bp, Artificial Sequence
  ENSG00000244198_52 (sequence is synthesized)
tccccagcgcaggcccggccgccccacccgcggcccgcccctggccgcccgacgggagggagggatcgggttctcctaggaagtttcagtatgcattcttagaaaccagatatacaaaga

SEQ ID NO: 1007163 - DNA, 65 bp, Artificial Sequence
  ENSG00000244198_53 (sequence is synthesized)
aaaatgctgatactgagggaactggaacaaagatgactgttgttatgttttagcaaagagactgg

SEQ ID NO: 1007164 - DNA, 82 bp, Artificial Sequence
  ENSG00000244198_54 (sequence is synthesized)
caaagagactggtggcattttgcccctaccatagagatttgtggaactttgatcttgagagaggtgatttagggtatctggc

SEQ ID NO: 1007165 - DNA, 120 bp, Artificial Sequence
  ENSG00000244198_55 (sequence is synthesized)
ttcaagaggtgatttgggtgctgttaaaagcatttcattttaaaagggaaacagcataaaaatttggaaaatttgcagccagttgatgcagcagaagagagaaacctgttttttgaggag

SEQ ID NO: 1007166 - DNA, 66 bp, Artificial Sequence
  ENSG00000244198_56 (sequence is synthesized)
cagggcatgtcacaggtcttcatggcagcccctcccatcacagaccctgaagactaggaggaaaaa

SEQ ID NO: 1007167 - DNA, 60 bp, Artificial Sequence
  ENSG00000244198_57 (sequence is synthesized)
ccctgcatcccagctgctccagccattgctaaaagggccgaggtacagctctgcccgtgg

SEQ ID NO: 1007168 - DNA, 120 bp, Artificial Sequence
  ENSG00000244198_58 (sequence is synthesized)
cccagaatggtagatccaccgacagcttgtaccgtgcacctggaaaagccacagaccctaaacgccagcccgtgaaagcagccaggagtggggactataccctgtgaagccacaggggca

SEQ ID NO: 1007169 - DNA, 120 bp, Artificial Sequence
  ENSG00000244198_59 (sequence is synthesized)
tgaagccacaggggcagagctgcccaagactaagggaacctacctcttgcatcattgtgacctggatgtgagacatggagtcagaggagatcattttggaacgttataatttgactgcct

SEQ ID NO: 1007170 - DNA, 90 bp, Artificial Sequence
  ENSG00000244198_60 (sequence is synthesized)
tcagaggagatcattttggaacgttataatttgactgcctcgctggattttggacttgcatggggcttgtaacgcctttgttgtgggcac

SEQ ID NO: 1007171 - DNA, 89 bp, Artificial Sequence
  ENSG00000244198_61 (sequence is synthesized)
agcttgcttttgattttacaggatcatgggtttggactacggacttttgggttaatgctgagatgagttaagactttgggggactgttt

SEQ ID NO: 1007172 - DNA, 64 bp, Artificial Sequence
  ENSG00000244198_62 (sequence is synthesized)
gggggccggtctttcccatgctatttttgtttctctctcattgtctcttgccgctgccatataa

SEQ ID NO: 1007173 - DNA, 120 bp, Artificial Sequence
  ENSG00000244198_63 (sequence is synthesized)
ttttgtttctctctcattgtctcttgccgctgccatataagaagtaccttttgcctcccactgtgattctgaggcctccccagccatgtgcaactgtaagtccaatgaaacctctttttc

SEQ ID NO: 1007174 - DNA, 120 bp, Artificial Sequence
  ENSG00000244198_64 (sequence is synthesized)
tcagcagcgtgaaaatggactaatacgatcaccctcttctttgttctcctttctatttcatctctaattttttttggcatttggagggtgctatacattgcaaaagttggggactcacta

SEQ ID NO: 1007175 - DNA, 120 bp, Artificial Sequence
  ENSG00000244198_65 (sequence is synthesized)
attgcaaaagttggggactcactaattccactgctcactgtatatcaaggtaatctgtcaggggtttggttttatataagaaacaaatgagtccccagaacatacaagttaagattattc

SEQ ID NO: 1007176 - DNA, 120 bp, Artificial Sequence
  ENSG00000244198_66 (sequence is synthesized)
aatcaagggaggcagtcattaccctttaacctctgaaagaaaactgcaagtaggcatcaaactaaccctgagatgggagagagtagaagttcccacacccagtgaattgtaggacattag

SEQ ID NO: 1007177 - DNA, 120 bp, Artificial Sequence
  ENSG00000244198_67 (sequence is synthesized)
gtaattattggtgggaagtaaatttgagtggggaactgaatttcaactgacttttatccttgaagatggtgcttctattttctcaaattagaaggttatgaaaattgcatctgaacaaca

SEQ ID NO: 1007178 - DNA, 120 bp, Artificial Sequence
  ENSG00000244198_68 (sequence is synthesized)
agttgtattagcataagttctagaagaaactgagaaagcaaggctagtctgaggaaaatttataccgctcacatttcccttctgaattggagaatagaattgaatagcaaaattgtaacc

SEQ ID NO: 1007179 - DNA, 120 bp, Artificial Sequence
  ENSG00000244198_69 (sequence is synthesized)
aacctacctttcaaagatgcattttatagtgaagtatattttgtgaacttttatatcttctattcttatttttctattgccctattttaaaatctatcttgaatttattaaatgtatatg

SEQ ID NO: 1007180 - DNA, 120 bp, Artificial Sequence
  ENSG00000196893_0 (sequence is synthesized)
atagcacgttacagtttgcaacagattttcacttccattggacccttgctccttggaacagccctgagatgtgggctgcacagaaacccgcattgcgtgtttgaggaaactgaagcccac

SEQ ID NO: 1007181 - DNA, 120 bp, Artificial Sequence
  ENSG00000196893_1 (sequence is synthesized)
agagattaagtgacttaagtacacagagcagagccgagacttgaactcggctttgccgatggccagcactgggctacttgtgagttaatatttaatcacatacaggttgaggagccgtta

SEQ ID NO: 1007182 - DNA, 120 bp, Artificial Sequence
  ENSG00000196893_2 (sequence is synthesized)
tccgaaatatttgaaaccagaaaagttttggatttcggactctttcagatttggagatacttacagaatacctgccagttgaacatccccaacccaaaactctaaaatctgagatgctcc

SEQ ID NO: 1007183 - DNA, 120 bp, Artificial Sequence
  ENSG00000196893_3 (sequence is synthesized)
aatgagcatttgctttgagcatcatgttggtgttcaaaatgttccagattttgggtttcagatttttgaaatccaacctgtgataattaattttaatgactgcggctgctactcttataa

SEQ ID NO: 1007184 - DNA, 120 bp, Artificial Sequence
  ENSG00000196893_4 (sequence is synthesized)
tcaccactgctacaactgccaccaccaccaccactgctaccactgtagaaccaatggcagcagcaaggtctggtcctgtgtgggccccttgatagcagacctcaccccagatggagacgc

SEQ ID NO: 1007185 - DNA, 120 bp, Artificial Sequence
  ENSG00000196893_5 (sequence is synthesized)
cattacccaaagagagaaacgggcttggtcaaggtctccaagcaagtctaccccaggctgggaggaggaccacaaggatcactaggccaccagctgggaccaatgctgacaccacaggga

SEQ ID NO: 1007186 - DNA, 120 bp, Artificial Sequence
  ENSG00000196893_6 (sequence is synthesized)
tggccaacaccaccacaggtccccttacccatatgcccacggccacattcagagcaaaatacacagtgatgacgatgatgtcagccacgctcagctgcgtcccgggagtgtggaggtcgc

SEQ ID NO: 1007187 - DNA, 120 bp, Artificial Sequence
  ENSG00000196893_7 (sequence is synthesized)
tggtggagttggcggccatggctgtcctgccgcaggcactaggtatgagcccgagggactgaggggcaaaccaggtcagaaagggtttcctggcagggagctcattgatcattaaaccaa

SEQ ID NO: 1007188 - DNA, 120 bp, Artificial Sequence
  ENSG00000196893_8 (sequence is synthesized)
gcggacagtggcatctccagcccatgatgtggctgcatgcagggcagctgcctcaccatgcagttcagcttcctcaccccatggtggggtgcagatcccagagcgcaggagtcagggagc

SEQ ID NO: 1007189 - DNA, 120 bp, Artificial Sequence
  ENSG00000196893_9 (sequence is synthesized)
ctgggagaagcaagtgggaggaggaaaggaaggagcctccttgaactcggagggggcttggggaaaatgaaccgcatttagtggacccggaggcagcccaaatagtcccagaaaggctgg

SEQ ID NO: 1007190 - DNA, 120 bp, Artificial Sequence
  ENSG00000196893_10 (sequence is synthesized)
gttgcttaatgggtggcttcacctatatctaatttgtataagaagcatagagcgtagggacaaccgcctcacctctgaagatactgccgtggcgggcagccatgtcctcccttggccatc

SEQ ID NO: 1007191 - DNA, 120 bp, Artificial Sequence
  ENSG00000196893_11 (sequence is synthesized)
gggctgtgagtggactgagcagggcttgggagggggacacctgcattatggctcacgtccagccaacacagcccaggctcagaggcagccccatgtcggacaataaagtcctgcttccag

SEQ ID NO: 1007192 - DNA, 120 bp, Artificial Sequence
  ENSG00000257725_0 (sequence is synthesized)
tcagcaactcttcatgtgggctcttcccttccccctttcaaaacttgcaattaaccctggtgattcagagcaaactgcgtagagtatgcaagatacagggaaacactgaatcctggggct

SEQ ID NO: 1007193 - DNA, 120 bp, Artificial Sequence
  ENSG00000257725_1 (sequence is synthesized)
aatcttactgtgattcatgaatataaatattcagtatctttcactgtatctatgcccactattgagcaggtctatattttcagtcctgtttatatgctatttacaatgatcgtcaaacac

SEQ ID NO: 1007194 - DNA, 120 bp, Artificial Sequence
  ENSG00000257725_2 (sequence is synthesized)
acttaagcaattcctttttattcctcatgcaatgggaagtaagcaaacattccatgaggttcattttatgaagcaataaaagaaagttagtcatcaaataaaataaaatggtaaaatcaa

SEQ ID NO: 1007195 - DNA, 120 bp, Artificial Sequence
  ENSG00000245248_0 (sequence is synthesized)
ccgcgtctcgcgtcactgagtcgcgtcacggctattggcttgttcctactgtggcgtcattagagcccggcctccggctggggccacccaggcaaccgatatacacagagaaccacgtgg

SEQ ID NO: 1007196 - DNA, 120 bp, Artificial Sequence
  ENSG00000245248_1 (sequence is synthesized)
aggaaaagcacgcgagtttggagcgggtggagcaggaacagaggtggactggaatgtcacacgacggggcagctggaaggcatcatcgccatcaacatacagccatactccaggattgcc

SEQ ID NO: 1007197 - DNA, 120 bp, Artificial Sequence
  ENSG00000245248_2 (sequence is synthesized)
catcttcaacataaacggactctcctggactccacttcccacatcagtcacagccacacttcctgagaaagaagtctacactcttcattcactttcattcacccacttccaacctggctc

SEQ ID NO: 1007198 - DNA, 120 bp, Artificial Sequence
  ENSG00000245248_3 (sequence is synthesized)
ctgttaccactggaccgtcaaaagtgactcttgtcaaagtcactattctggctacctattgctgtgtaataacctcctcaaaatttagtatctttaaaaaacaatttattatgtctcata

SEQ ID NO: 1007199 - DNA, 120 bp, Artificial Sequence
  ENSG00000245248_4 (sequence is synthesized)
cttctgtggttgactgggctcagctgggaaattcttcttggggtctgtttctcatgaggttgcagtcaacagctgggactggagtcgtctgaagcctcagctgagctggacatccaagat

SEQ ID NO: 1007200 - DNA, 120 bp, Artificial Sequence
  ENSG00000245248_5 (sequence is synthesized)
ggctcactcacatggctggcagtggatggtggctgttgggtgggagcttagcttgtgctggcaacttgagtgcctatatgtggccactctgtgtggcttgggcttctcagaatggcagct

SEQ ID NO: 1007201 - DNA, 120 bp, Artificial Sequence
  ENSG00000245248_6 (sequence is synthesized)
gcattccaggagaaccaggtggaagctgcaagacttcttatgagccaggcttggaagtcatgccatgtgacttctactatatactgttggtcataagcaagacaaggccatgccagattc

SEQ ID NO: 1007202 - DNA, 120 bp, Artificial Sequence
  ENSG00000245248_7 (sequence is synthesized)
aacagaagggattacccaggggcccagtttacataggaggccatctttggagactagctaccatagtcaccagcgcattggtcctcatcttacttgacttcatagcagttgacccagttg

SEQ ID NO: 1007203 - DNA, 120 bp, Artificial Sequence
  ENSG00000245248_8 (sequence is synthesized)
atcactgtttttcaaaactctcccttctttggctccacagacccctggatttcctctttcttcactgactgctctttaatctcttttgcaccctcaaaagcctaaatattggactgtctc

SEQ ID NO: 1007204 - DNA, 120 bp, Artificial Sequence
  ENSG00000245248_9 (sequence is synthesized)
agattctactctgggcctagaattatagaattattcctctgtcatgtctgcctgcatgatcttactcgtcccatggtcgatgtctaccatccaaataaaatttccagcatacttttgttt

SEQ ID NO: 1007205 - DNA, 120 bp, Artificial Sequence
  ENSG00000245248_10 (sequence is synthesized)
ctagcctggacctcttacctcttgctcaggactgggatatccagctgttttcttgatgcttccatttggatgtctaatgggcatcacagatttaatatatctgctttcccacctcaatgc

SEQ ID NO: 1007206 - DNA, 120 bp, Artificial Sequence
  ENSG00000245248_11 (sequence is synthesized)
ttccccagccttttctttctcaacagatgtcgtcatcatccacttgttcaaacaagagcccaaggatcatcctagattccttctcacttcctctcaatccatccctgaaacagccaaacc

SEQ ID NO: 1007207 - DNA, 120 bp, Artificial Sequence
  ENSG00000245248_12 (sequence is synthesized)
tcaaaattgccgtgctctacctctccccagtgcacaaaaacactctccacaccaagctgctgctgctgggggatggagggatggcgtcagcgattcaagactgtttttcctacctgttca

SEQ ID NO: 1007208 - DNA, 120 bp, Artificial Sequence
  ENSG00000245248_13 (sequence is synthesized)
cgtcagcgattcaagactgtttttcctacctgttcagcacttctttcagcgatatgaagttaaatccagaggctaatgatggaggattgctcgagttcaagaccagcctgggcaacatag

SEQ ID NO: 1007209 - DNA, 120 bp, Artificial Sequence
  ENSG00000245248_14 (sequence is synthesized)
tggtgtcgtgtgcctctagccccagaaggtgtgactcataagactggaaactcctgaacgtagcaaggatgctggcagccaagccaatgactacaaacatgataaagtccattacaagga

SEQ ID NO: 1007210 - DNA, 120 bp, Artificial Sequence
  ENSG00000245248_15 (sequence is synthesized)
tggaaagtccacagaacagaaaatgtgtctattttttcaccagtgaccctccagcactcagctatgcctggaacaaggtccaggttggccaatcccccgacacagccgagcccgcatggc

SEQ ID NO: 1007211 - DNA, 120 bp, Artificial Sequence
  ENSG00000245248_16 (sequence is synthesized)
acaccacaggccctgtgtgtgaggtctcccggcaggagctgagaggagaggtctggagggagaagggacttggaaccctgcattgggaagcttctggcagcaggacaggccattcctgca

SEQ ID NO: 1007212 - DNA, 120 bp, Artificial Sequence
  ENSG00000245248_17 (sequence is synthesized)
aggcagagtgaggcggctccacaggtgtggaccagcacgtgtttccacacagacacgacaatgtcctaggagggggctgctgacactgattgccatctgcgtgctgggtctggtgtaaaa

SEQ ID NO: 1007213 - DNA, 120 bp, Artificial Sequence
  ENSG00000245248_18 (sequence is synthesized)
tgacaggcacattcagtgggcctgggcgagccagggaagcttcccgatggaggcagttttgagtggagtctggaggaaaaaaaaaggacagccatcatcagatgagaaacagagggcctg

SEQ ID NO: 1007214 - DNA, 120 bp, Artificial Sequence
  ENSG00000245248_19 (sequence is synthesized)
gggcaaagggatgagtggtctaggatggctccaggaaaaatcttgctgctctgggaagatgccctgctgctccttctgctctgctctgtggtgattgatggctgtgggttcccgctgtcc

SEQ ID NO: 1007215 - DNA, 120 bp, Artificial Sequence
  ENSG00000245248_20 (sequence is synthesized)
atattttaccacagcaagagaagaagagggagcgatggatcacctggccactgcccttaccatcacttaaggagcagcatgcggtgaagagagaagaaagaggacctttaccagagtcag

SEQ ID NO: 1007216 - DNA, 120 bp, Artificial Sequence
  ENSG00000245248_21 (sequence is synthesized)
caggagctccacctccactcccctcaactcatggtctagatgaatgattgagtgaggtgagggagcggaggagagggcatgcagaggggcggagaggcatgaaagacaccgaaggacaaa

SEQ ID NO: 1007217 - DNA, 120 bp, Artificial Sequence
  ENSG00000245248_22 (sequence is synthesized)
gggaaggggcaagaaacagaggcggacagaagccatgggcgaggagaaagcaaaagggaggcatccccttctgaccatgaagggttaaccgctgtagaaattgcccatctacccagcact

SEQ ID NO: 1007218 - DNA, 71 bp, Artificial Sequence
  ENSG00000245248_23 (sequence is synthesized)
gtggtagtgctcgcctgtaatttttgcagtgagctgagattgagccattgtactccagcctgggtgacaag

SEQ ID NO: 1007219 - DNA, 120 bp, Artificial Sequence
  ENSG00000245248_24 (sequence is synthesized)
acacagcgctccccagccgctggaatccaggaagaattgaggtgctcaagacccaccacctctttgcctgcaaactctaagctcactgtcctgctcccttgctcccagaagtggcactgg

SEQ ID NO: 1007220 - DNA, 120 bp, Artificial Sequence
  ENSG00000245248_25 (sequence is synthesized)
ctcagcgagatgaagagtttacacctgtttctcacttgaattagggaagtctagtttgcattctcctgactggatgggcctgcattgaatctttcatctcattggtctggggatttggtt

SEQ ID NO: 1007221 - DNA, 120 bp, Artificial Sequence
  ENSG00000245248_26 (sequence is synthesized)
ctgaagaccaatgccttccagaatcttcctgtctctccccaaattctgggcggttctgtttccagcactcatccatgatgggggggtacaggaaatgagtgttgagggaaaggcatccca

SEQ ID NO: 1007222 - DNA, 120 bp, Artificial Sequence
  ENSG00000245248_27 (sequence is synthesized)
ccttctctctgttccatcttccagatctgacaactcactggaaagttcttctctgtgtccctgtcccccgtctggttctgaggccgctgctttccccagccttggtgccttgggttttct

SEQ ID NO: 1007223 - DNA, 120 bp, Artificial Sequence
  ENSG00000245248_28 (sequence is synthesized)
gctctgtgaaatgaaccaggtcccttatcctgttctcccctgaagaaaagagggtgtggggggcttggcacaggaaatggcccttgcctttcacaggctttggggtctgagggcagctct

SEQ ID NO: 1007224 - DNA, 120 bp, Artificial Sequence
  ENSG00000245248_29 (sequence is synthesized)
ttgagatcatggtcttggagcctgatgtcgtgattgggtgctttgggaagggtgggtgtattttacaagtgggaggacagagcatctttaggagtagagagcaaactgtggtggagtgcc

SEQ ID NO: 1007225 - DNA, 120 bp, Artificial Sequence
  ENSG00000245248_30 (sequence is synthesized)
acattaatgccctcagccagtcatgcctctttcacactgactctggcttggccataagacatgttttggccaacaggagttcagcaaacgtggtgcaagcgatttcctcagtgcttgcca

SEQ ID NO: 1007226 - DNA, 120 bp, Artificial Sequence
  ENSG00000245248_31 (sequence is synthesized)
tcttaggcaaggaccccggggctctgtgaggaagctcgagctggtcacagtggagagacctgaacagaagtgctgtggctaccatcccccgccccaatctgggagctgcccatcactgag

SEQ ID NO: 1007227 - DNA, 120 bp, Artificial Sequence
  ENSG00000245248_32 (sequence is synthesized)
tcacctggccacacatgcaggagtgagcccagcaaatcccgtatggagctgttccctgaccaaactgctgacccacagaaaagctgcctttggttactagttggggtgatttgttacaga

SEQ ID NO: 1007228 - DNA, 120 bp, Artificial Sequence
  ENSG00000245248_33 (sequence is synthesized)
acaatagctaactaagaaaccaggcgaggagaggggagaggatctaagacagaggaggcagcgtgagcaaaggaacagaaatacagcaaagcaaagcagaggcaggaaaaaacaggcagt

SEQ ID NO: 1007229 - DNA, 120 bp, Artificial Sequence
  ENSG00000245248_34 (sequence is synthesized)
tttatttctcgtggcggtgaaggctgagagaggatgatggagaaatggggaagaggcagtcgaggaagtccttgtctgtctggacttggataatgaggcatcatgacaggcttacaggaa

SEQ ID NO: 1007230 - DNA, 88 bp, Artificial Sequence
  ENSG00000245248_35 (sequence is synthesized)
tggacttggataatgaggcatcatgacaggcttacaggaagagtgtgaaatggctggataggtgtattttttagaaggattactctgg

SEQ ID NO: 1007231 - DNA, 71 bp, Artificial Sequence
  ENSG00000245248_36 (sequence is synthesized)
tggccaatgtggcaaaaccccatctctcctaaaaatacaaacattagccagttggatcacttgaacctggg

SEQ ID NO: 1007232 - DNA, 120 bp, Artificial Sequence
  ENSG00000245248_37 (sequence is synthesized)
tgtggggtttttttttttttgccaaacatttaaggtatttctttagatatatttgatttatattgtttagcaaaccaatacatttatagtgacaaaaaagtattactagttttataatat

SEQ ID NO: 1007233 - DNA, 120 bp, Artificial Sequence
  ENSG00000245248_38 (sequence is synthesized)
aaaagcagtctgttaccccatcctaaattcttactccccaaagcaaccctctcaactctagctatttcttctgctatttacttctatgtttaaaaatttctctcatatatatgtatatat

SEQ ID NO: 1007234 - DNA, 80 bp, Artificial Sequence
  ENSG00000245248_39 (sequence is synthesized)
tatagaactatttcttgatttttttttcagtgttaagtaggatctattgacatttcttttttttttttttttgaggtgga

SEQ ID NO: 1007235 - DNA, 120 bp, Artificial Sequence
  ENSG00000245248_40 (sequence is synthesized)
caggtgtgaaccaccatgcccagcctctgttgactttcaactatggaaaatgtggttttagctttcttatatgcccattttctccttcaccaaatacatacacttaaccttttcccatcc

SEQ ID NO: 1007236 - DNA, 120 bp, Artificial Sequence
  ENSG00000245248_41 (sequence is synthesized)
aatacatacacttaaccttttcccatcctccaatatatcgtcatcataatttttggttaaaatccctatttagtgttaccttagtccattcatactgctatgacaaaataccacagactg

SEQ ID NO: 1007237 - DNA, 120 bp, Artificial Sequence
  ENSG00000245248_42 (sequence is synthesized)
gcttataaacaacagaaatttatttctcagagttctagaggctgggaagtctaagctctaggtgctgcagacttagtacctgttgagggcccactttctgatttatagacagcgtcttct

SEQ ID NO: 1007238 - DNA, 120 bp, Artificial Sequence
  ENSG00000245248_43 (sequence is synthesized)
ttcttgctgtggcctcatgtagtggaaggagtatgggatctctgtggggcctcttttataaggagactaatctcattcattaggggttcaccctgatgacctaatcacctcccaaagagc

SEQ ID NO: 1007239 - DNA, 120 bp, Artificial Sequence
  ENSG00000245248_44 (sequence is synthesized)
ccacctccaaatatcatcaccttggggtttaggatttcaaaagatgaattttgaattttgagtgacacaaacattcagaccaaagggaatgtttatatcagtatgactacgtaaatatta

SEQ ID NO: 1007240 - DNA, 120 bp, Artificial Sequence
  ENSG00000245248_45 (sequence is synthesized)
ttcacagtaaatccatctaacctgttatgagcattcttttctcctccctctggagttaaatatttgccatctttttttttttttgggttgtgttgaaaatttaaaatatttaaaaatatt

SEQ ID NO: 1007241 - DNA, 120 bp, Artificial Sequence
  ENSG00000245248_46 (sequence is synthesized)
taaagtaaattataggtttacaagaaattgcataaatagtacagagaggtcttgtctgtacccttggggtgcagaggttagaggtctcatgtacccttcacccagtttcccccaatggca

SEQ ID NO: 1007242 - DNA, 120 bp, Artificial Sequence
  ENSG00000245248_47 (sequence is synthesized)
acattttgtataattggagtacagtatcaaaactggaaattgatattggtaaaatccacagaccttatttagatttccccagtcctctctgttttaactctaaacgtatcttgaagtcac

SEQ ID NO: 1007243 - DNA, 120 bp, Artificial Sequence
  ENSG00000245248_48 (sequence is synthesized)
cgcttctgtctatcttaaccactacaacttttgtcaaagttgctgtcatctattttaggaccatggcaatgtcctcctgatttcttgttctactgtcattctcctttatgtttctacaga

SEQ ID NO: 1007244 - DNA, 120 bp, Artificial Sequence
  ENSG00000245248_49 (sequence is synthesized)
gcagcaagagggatcttataaaaatatgaccagatcacatccttcaacacttccctgttacccttacaataaaattcaaactcttcaccatgacctccaaggctcctattgaatccggct

SEQ ID NO: 1007245 - DNA, 120 bp, Artificial Sequence
  ENSG00000245248_50 (sequence is synthesized)
cttgtctgcctcttcagtaacatcatggaccactccttaccattccctccatctggctgtgcttcctgcagctcttccaatggctggcttgttctcacctttgaagtctcagctcaaagg

SEQ ID NO: 1007246 - DNA, 120 bp, Artificial Sequence
  ENSG00000245248_51 (sequence is synthesized)
acactcccttgggctctccctcatcaccctaactaataggtcacttaatattgttattattttttagagacaaagtctcactatgtcacccaggcttgcctcaaactcctgggctcaagc

SEQ ID NO: 1007247 - DNA, 120 bp, Artificial Sequence
  ENSG00000245248_52 (sequence is synthesized)
acaggcgtgagccactatgcctggctatgtcacttattattctttattatcttctatatataaatgatcccaatctataattatttgatttattgattggtttacttgcttaatatccaa

SEQ ID NO: 1007248 - DNA, 120 bp, Artificial Sequence
  ENSG00000245248_53 (sequence is synthesized)
ttgatttattgattggtttacttgcttaatatccaactcccatactagaatataaatgttatagaacaagagattgtctgtaccatccactgttctagtctcattaccccacataaggcc

SEQ ID NO: 1007249 - DNA, 120 bp, Artificial Sequence
  ENSG00000245248_54 (sequence is synthesized)
aaatccaggccaagttcccacctggtgggaagcactgtgcaggttcgtggggatgcagccctgcacagcccagactggactccttccccatggaactcacaacacacgggagaggcagag

SEQ ID NO: 1007250 - DNA, 120 bp, Artificial Sequence
  ENSG00000245248_55 (sequence is synthesized)
tcttgtgcaaagatgagtcaggaactcctggagtgagaagggctcaggcctcacccagcagtgacctcagagagggtgtgcaaggtcagaagagcctccagctgagctcagcactgtgac

SEQ ID NO: 1007251 - DNA, 120 bp, Artificial Sequence
  ENSG00000245248_56 (sequence is synthesized)
aacagactttccaaaatatgcttaagggtctggccggggctggacatgctccagcaggtgtcagggaagaagaatgagcaagctggctgagtctgagcctggccccgcctaatgttgtct

SEQ ID NO: 1007252 - DNA, 120 bp, Artificial Sequence
  ENSG00000245248_57 (sequence is synthesized)
cctccctgaagcctcccctcccttctgtgctaccacagttcttaggtctgtggcgtcctgaagccactggtgccatgtgatggtttgcatttcaattaattaaaattacatgaaatgaaa

SEQ ID NO: 1007253 - DNA, 120 bp, Artificial Sequence
  ENSG00000245248_58 (sequence is synthesized)
cgcttgccattttaccacccagtatctgaaattagcagccgcctaatctctctctgccatatcactcaatggtttaattgtgcagaaaaaaatgtattaaaatgcaaagcactcagttgt

SEQ ID NO: 1007254 - DNA, 120 bp, Artificial Sequence
  ENSG00000245248_59 (sequence is synthesized)
acttctttatgttaaatcccttcttcgctctatctcccttttaattttacaaggttttttctctttccccctttcataaaggggagaactgggcacgcagggaatcatttcaactcccct

SEQ ID NO: 1007255 - DNA, 120 bp, Artificial Sequence
  ENSG00000245248_60 (sequence is synthesized)
ataaatctccaaaatgaatacttaaattcgaggaaaaaatacattcttacacctttaatttccctgctatgaagtgtaatgaaaaagcctgattatttttaattcttccctttaataatt

SEQ ID NO: 1007256 - DNA, 120 bp, Artificial Sequence
  ENSG00000245248_61 (sequence is synthesized)
cagcagcggagtgatttaagactaggattcataattacctttccgctttcttggcaaatggagttttaatagaaatgagagctctggcgactgaaatggatttcaacaggtcgctggggg

SEQ ID NO: 1007257 - DNA, 120 bp, Artificial Sequence
  ENSG00000245248_62 (sequence is synthesized)
gtcaggttcaacaccaattggtggaagagtgttcctaaggcccctcaggtgtggggtctggactggttacctgggcccacgtggacagaggaagtatatcaccttgtgctcactgggaac

SEQ ID NO: 1007258 - DNA, 120 bp, Artificial Sequence
  ENSG00000245248_63 (sequence is synthesized)
catctgttgtaatagtaacagaaggtcacagtgtgggtgcctaatgacccatttatcctagaaggaagaaactagtgaaaaatggccatcaggacagtcttcacgattagtaataataac

SEQ ID NO: 1007259 - DNA, 120 bp, Artificial Sequence
  ENSG00000245248_64 (sequence is synthesized)
taataactatgatgttaatgatagcagataccattaattgagcaaatactatgtgtcaggcacagtgttaagtgcttcagagacattctaggcaggcatgatggtgtgcacctgtagtcc

SEQ ID NO: 1007260 - DNA, 120 bp, Artificial Sequence
  ENSG00000245248_65 (sequence is synthesized)
tgaggtgggaggatcacttgagcctggctcacttgaggctgcagtgagctgtgatcctcaccaccaccatcatccaacctgggtgagagagtgagacccagtctctaaaaagaaaaaaaa

SEQ ID NO: 1007261 - DNA, 120 bp, Artificial Sequence
  ENSG00000245248_66 (sequence is synthesized)
ctaaaaagaaaaaaaaaagacattattttttctcattttcacaataatctattctacatgggggaaactgaggctcagagactgatatggtttggctccccacccaaatcttttcttgta

SEQ ID NO: 1007262 - DNA, 120 bp, Artificial Sequence
  ENSG00000245248_67 (sequence is synthesized)
gctcccataattcccacgtgttgtgagagggactcgatggaacatgattgaattatgggggcgggtccttctcatgctgttctcatgatagtgaacggttctcacaagatctgacagttt

SEQ ID NO: 1007263 - DNA, 89 bp, Artificial Sequence
  ENSG00000245248_68 (sequence is synthesized)
tctcatgatagtgaacggttctcacaagatctgacagttttaaaaacgggagttgccctgcacaagatctttttgcccactgccatcca

SEQ ID NO: 1007264 - DNA, 120 bp, Artificial Sequence
  ENSG00000245248_69 (sequence is synthesized)
aaatccaggagtcttcatttgtcacccaggctggaatgcagtggttcaatctcagcagctcactgcagcctctgcctctcaggttccaatggttcttgtgcctcagcctcccaagtagct

SEQ ID NO: 1007265 - DNA, 120 bp, Artificial Sequence
  ENSG00000245248_70 (sequence is synthesized)
aaaaggtgtgactcataagactggaaactcctgaacgtagcaaggatgctggcagccaagccaatgactacaaacatgataaagtccattacaaggatggaaagtccacagaacagaaaa

SEQ ID NO: 1007266 - DNA, 120 bp, Artificial Sequence
  ENSG00000245248_71 (sequence is synthesized)
ctccccggcgcccccagcccgctgacccccggccaggcaggcccgcgggggaggcaggaccggagccctgaggccctggccggcctcggggttgaggctcagctcgggataagtgatctt

SEQ ID NO: 1007267 - DNA, 120 bp, Artificial Sequence
  ENSG00000253134_0 (sequence is synthesized)
tcctcttgggcttctgccatcagtaggagaagaacatgcctcatggcactcactggtcccaagagaatgagagatacgtggagctgagcagctacggccaatgcctgcagcctgagcaaa

SEQ ID NO: 1007268 - DNA, 120 bp, Artificial Sequence
  ENSG00000253134_1 (sequence is synthesized)
acggctgtggctgtaaaggctctgtactgaaggcatggccacctcactgagtatgacagcagggagatgggaagagccagatttctcatgcggatatgaagacattaactgagccctgga

SEQ ID NO: 1007269 - DNA, 120 bp, Artificial Sequence
  ENSG00000253130_0 (sequence is synthesized)
gcccaaccagatacgaactgagggccatgaaagctgactcaccttcgcagcagaagatcatgattcttggctatgcaaacctgaggctgatgcatcctccagcagctgaccacggacatg

SEQ ID NO: 1007270 - DNA, 120 bp, Artificial Sequence
  ENSG00000253130_1 (sequence is synthesized)
tgcagcatcacagtgacagatggcatttcaaccacttggtttacaccttcctccactgtcaccaccattctgacagaaatgagttccatttgctccattttacataagggcaaaaggcag

SEQ ID NO: 1007271 - DNA, 120 bp, Artificial Sequence
  ENSG00000253130_2 (sequence is synthesized)
cattgactcaccaagtttacacagttagggaaaagagcaaccaggagagactacataaggaaatgcagacccaaaggcacagttagattgaacacttacatacagaattaaagagtcatg

SEQ ID NO: 1007272 - DNA, 120 bp, Artificial Sequence
  ENSG00000253130_3 (sequence is synthesized)
agcttgggctgagtggttaattgagtgaaaaagtggctcggaaggtatctccgccctatgaaggccttgatggggagcaactcaggccttgaaggtaaatgtcctgtcccacaggtgcca

SEQ ID NO: 1007273 - DNA, 120 bp, Artificial Sequence
  ENSG00000253130_4 (sequence is synthesized)
tgagctccgggaagtagagacgtgatcagactcccctgctacagccttgtacttgtcaccgaagggagatgtgcaggtgcaagcccgaccaagggacacctccgtggccatgacagcttt

SEQ ID NO: 1007274 - DNA, 120 bp, Artificial Sequence
  ENSG00000253130_5 (sequence is synthesized)
tcttcttaaaagaaaaaaccggaccgtgggttcagaaatccaaatccatttgtttatactcgattcataccaaagactacaaaatatacttgttaatctatatttaatatagctacttaa

SEQ ID NO: 1007275 - DNA, 120 bp, Artificial Sequence
  ENSG00000253130_6 (sequence is synthesized)
agcatcaagagtcaggcaggggcagcagcccacgttcagctggaattctgtggcttaacccaggggttttctatgtgtcatgagagataacacaacactctcaccaacgaagttgaataa

SEQ ID NO: 1007276 - DNA, 120 bp, Artificial Sequence
  ENSG00000253130_7 (sequence is synthesized)
attatatttaggactcacaagctggtagtgggaactatttgcagctttttgagcaggggaggaatgacgatcaaagctgtatttaaggaagaagaatctgacagtgctgcgtgggctttg

SEQ ID NO: 1007277 - DNA, 120 bp, Artificial Sequence
  ENSG00000253130_8 (sequence is synthesized)
accaatgtttccacctctgaagggccacggagccagggaggaggatttactcttctctgttaagaaggagctctgctgtcctgaccaaatgccagaagatgtgactttgctcagaccaag

SEQ ID NO: 1007278 - DNA, 120 bp, Artificial Sequence
  ENSG00000253130_9 (sequence is synthesized)
ctaccaaagaccactgcccttcgttccacgagcctggccctgtctacacagacaggcaacccaggagcctgatccaggagccgacaggtaactctgggccacacagcacttggcaactgt

SEQ ID NO: 1007279 - DNA, 120 bp, Artificial Sequence
  ENSG00000253130_10 (sequence is synthesized)
taagaattaaattgacttaagacagacataagacagatcaacagcagaagaacaaatttacttaatacaagttttacatggcaggagagactacataaggaaatgcagacccaaaggcac

SEQ ID NO: 1007280 - DNA, 120 bp, Artificial Sequence
  ENSG00000253130_11 (sequence is synthesized)
gggaaaagagcaaccaggtcaggatcagatacaacaaagaagtgattgcagatgttaaatggaacatagctctggtcgtttgataaatattcagtaatttcttcagtttgttaagaaaaa

SEQ ID NO: 1007281 - DNA, 120 bp, Artificial Sequence
  ENSG00000253130_12 (sequence is synthesized)
gtctaacaaggtttgtttgtacaaatttcccttggcctcaacttcctatccttgatgataagagtgatgctttccttctgctatagggaagggatctttcacaagcgaatttcatctcct

SEQ ID NO: 1007282 - DNA, 120 bp, Artificial Sequence
  ENSG00000253130_13 (sequence is synthesized)
acttgtaagaaacagaaagtcagagtgaccctctcacacctgttgtttttcaggtgccctaaactcaaaatagtcaatatgtcagagcggcctattttggggtggtgtgtaacccctgaa

SEQ ID NO: 1007283 - DNA, 120 bp, Artificial Sequence
  ENSG00000253130_14 (sequence is synthesized)
aacgtagagttgtcctctcaatggtatattaaggcatcatttaaaggttatttcattatttaggaaagcagttttcaaactttgcttcataattggaaacacctgggatgttcgaaaact

SEQ ID NO: 1007284 - DNA, 120 bp, Artificial Sequence
  ENSG00000253130_15 (sequence is synthesized)
atggctgcctggctcccacccctagacatcctgatttaatggtggggggtgatgtgataggctaaacaataacctcccaaagatgcccaccacctaatccttagaccctatgaatatgtt

SEQ ID NO: 1007285 - DNA, 120 bp, Artificial Sequence
  ENSG00000253130_16 (sequence is synthesized)
cccttacatgtaagagactttgcagatatgattaagttaaggctctgtagatggggaaaatatcctggattatctgaatacgcccaaggtcatcacaatggtgattaccaaaagaaggct

SEQ ID NO: 1007286 - DNA, 120 bp, Artificial Sequence
  ENSG00000253130_17 (sequence is synthesized)
ggagggtcagagtcagagagataaggcttaaagatggaggcagaggtcagagaagaccctgtgctgttgcctcacacggtgaggaaggggccacaagccaagaaatgcatgcagccttta

SEQ ID NO: 1007287 - DNA, 120 bp, Artificial Sequence
  ENSG00000253130_18 (sequence is synthesized)
gaaggtaaaaaaggcaaggaatggattctcctctagagcctctagaaggaagcagctctttggaccaattttcaactctgacctccagaactgtaagagaataaagctggattgcattaa

SEQ ID NO: 1007288 - DNA, 120 bp, Artificial Sequence
  ENSG00000253131_0 (sequence is synthesized)
atggactggacctggagcatcctcttcttggtggcagcagcaacaggtgcccactcccgagtgcagctggtgcagtctgggcctgaggtgaagcagcctggggcctcggcgaaggtctcc

SEQ ID NO: 1007289 - DNA, 120 bp, Artificial Sequence
  ENSG00000253131_1 (sequence is synthesized)
tgtatgcccacagattcacacacggtttgtcttctccatggacacctctgtcagcacggcggatctgcagactagctgcctaaagactgaggatgcagccatttattactgtgtgaggta

SEQ ID NO: 1007290 - DNA, 120 bp, Artificial Sequence
  ENSG00000253132_0 (sequence is synthesized)
tgataccgtactctacacagactctgtgaagggccgattcaccatctccagagacaatgcccagaattcactgtatctgcaaatgaacagcctgagagccgacgacatggctgtgtatta

SEQ ID NO: 1007291 - DNA, 120 bp, Artificial Sequence
  ENSG00000253133_0 (sequence is synthesized)
gcctcctgacgccggcgcagcgtcgccggggcgtcccagaccgcaggccccgcgcggccgcccaagcccggctcccacgtcccgctctcggctccccggaggtcggagactttgaggtat

SEQ ID NO: 1007292 - DNA, 120 bp, Artificial Sequence
  ENSG00000253133_1 (sequence is synthesized)
ctccacgtcaaaccttcatgaggcgacaccgcaagtagctgctgaggacgtagcggatcctctccatctccatttggtggatgctgaccttcaggtcctcccttttggctctcctgagat

SEQ ID NO: 1007293 - DNA, 120 bp, Artificial Sequence
  ENSG00000253133_2 (sequence is synthesized)
tttcttcctattaaatgagaaattaaggtttataaaaaacatgatgttcaaccatcatcaccggcaacgttgaggacccagactatgtttcagtccaaggaaaacaaaaatatcatgttt

SEQ ID NO: 1007294 - DNA, 120 bp, Artificial Sequence
  ENSG00000253133_3 (sequence is synthesized)
caaaaatatcatgttttatgcttgaaatggctacatctggtttctggtcacacagtggcatgataatggctcactgcattcttgacctccaaggcttaagtgatcctcctgcctcagcct

SEQ ID NO: 1007295 - DNA, 120 bp, Artificial Sequence
  ENSG00000253133_4 (sequence is synthesized)
taaaggtacataccacaaagcctggctaatttttaaattttttttaataaagatggggttttaccatgttgcctacagtggtcttcgaaatcctggcctcatgacatccccctgcattag

SEQ ID NO: 1007296 - DNA, 120 bp, Artificial Sequence
  ENSG00000253133_5 (sequence is synthesized)
cctccagaagtgttgggattacaggcttgaaccactgtgcctggcccctgatcaaaattctaaatgccaatctgttcattattgctacgggctgaagtgtgtccgcccctcaaaaatcta

SEQ ID NO: 1007297 - DNA, 120 bp, Artificial Sequence
  ENSG00000253133_6 (sequence is synthesized)
cctaacttccaggacctcagaccgtgactgtatttggagatggaggtctttaaagaagtgattaagttaaaatgaggtcattaggatggcccctaatccagtaagactggtgccctgata

SEQ ID NO: 1007298 - DNA, 120 bp, Artificial Sequence
  ENSG00000253133_7 (sequence is synthesized)
aggggtaattttaacacagacacacacgagagggaagaccatgcaaggacacagggagaatatggtcacctacaaacccaagacagaggactcggaagaagacaactatgctggcacttt

SEQ ID NO: 1007299 - DNA, 120 bp, Artificial Sequence
  ENSG00000253133_8 (sequence is synthesized)
gacctcagcctctagaattaagaaaataaatttctatttaagccacccagtctttgggacttcgctctgtggccctagcaaactaaaacaatcactaaaatgagcaaatctgcactacag

SEQ ID NO: 1007300 - DNA, 78 bp, Artificial Sequence
  ENSG00000253133_9 (sequence is synthesized)
cactacagggtctgatctcagacaccactttgctatccactatctggcgggtggtggtcttttggatggtttgcatgg

SEQ ID NO: 1007301 - DNA, 120 bp, Artificial Sequence
  ENSG00000253133_10 (sequence is synthesized)
ctgtccagggcatcaccaagattgaggccctcgctgtcttccagcaggcggcggtaggtggcgatctcagcctccagcttgaccctgatgttcagcaagtccttgtactcctggaccttg

SEQ ID NO: 1007302 - DNA, 120 bp, Artificial Sequence
  ENSG00000253133_11 (sequence is synthesized)
cgctggccctctgcccagttctgtgccagctttgactccaagtacagcaggattctgttgagctgctccatctgcagggcgtagcgggcctccacctccctcaggctgttctacaagctg

SEQ ID NO: 1007303 - DNA, 120 bp, Artificial Sequence
  ENSG00000253133_12 (sequence is synthesized)
gtcttcagatttctcattgagtccaggtcaatctccaagcactggactgtacgtctcagctccgtgtcatctcagcagctctgaccttggcagagtgtgtggtgaccactgtggtgctct

SEQ ID NO: 1007304 - DNA, 120 bp, Artificial Sequence
  ENSG00000253133_13 (sequence is synthesized)
cctcagtctgctgagaccagtacttgcctagcttctctgagttcttctgagacagctcatcctattgggccctgatgtctgccatgaccttggcgaggacttgagatttgggggcatcta

SEQ ID NO: 1007305 - DNA, 120 bp, Artificial Sequence
  ENSG00000253133_14 (sequence is synthesized)
cctccacggccaacccagagttggcaatctggacttgcaagccttttacttcctcttcatggttcttcttcatgaggagcagctcctccttgagagcgcccatctctgtctccagctgca

SEQ ID NO: 1007306 - DNA, 120 bp, Artificial Sequence
  ENSG00000253133_15 (sequence is synthesized)
gcagagtgacattggtgtcatcaatgaccttgcagagcccatggatgttgctctccacagactggcgcatggccagctcttgtctcatacttgactctgaagtcatcagcagcaagacgg

SEQ ID NO: 1007307 - DNA, 120 bp, Artificial Sequence
  ENSG00000253133_16 (sequence is synthesized)
tggtcttgaagtaatggccccagtctctgacatggggtctcttctccagatactcctggattttgctctccagcctccagttctcggtctccaggttcctcactctgtccaggtagtcca

SEQ ID NO: 1007308 - DNA, 120 bp, Artificial Sequence
  ENSG00000253133_17 (sequence is synthesized)
ggtggtcgttcaggctttgcatggtctccttctcattctggatgccccccatttctgccagacccccagccatctctgtggccaggcccccagaccccaagccgccccagaaactggtag

SEQ ID NO: 1007309 - DNA, 120 bp, Artificial Sequence
  ENSG00000253133_18 (sequence is synthesized)
aacaggacatggagatctgggatcccaagccccccagtgcctgcatagatgctggctgcgctgctgaccggccaggtgccatagctgggcggctggacagagcccagggactggtagttg

SEQ ID NO: 1007310 - DNA, 120 bp, Artificial Sequence
  ENSG00000253133_19 (sequence is synthesized)
gtggagaaggtggagggagtggtgaagctcatgctgtccggggaagagagcaggctttgtcaacgactactccttaatttttacttataatatacctgctgttgtaagataaagcaggta

SEQ ID NO: 1007311 - DNA, 120 bp, Artificial Sequence
  ENSG00000253133_20 (sequence is synthesized)
agaaattgagaggtgtgacatagaaatgtaagatgtttattttaaaacactaagctacattgtacggtacactactacaattctagtattatctgacaaatttagtgtcctatcatttac

SEQ ID NO: 1007312 - DNA, 120 bp, Artificial Sequence
  ENSG00000253133_21 (sequence is synthesized)
cactttaccatcatttactaccaaatcccaccaaatatgacacagagacaacttgtttaagaaaagttttattaatgtgttaatatttcagcaaagttattgcaacaggttgaaaatgca

SEQ ID NO: 1007313 - DNA, 120 bp, Artificial Sequence
  ENSG00000253133_22 (sequence is synthesized)
gacacactattacaggctgtaaagtaacaaatgagttttacacaattaaaatattaacacatacttatgggatttgttgaatgactaacagacccataaaagaaattaaatctgagacga

SEQ ID NO: 1007314 - DNA, 120 bp, Artificial Sequence
  ENSG00000253133_23 (sequence is synthesized)
aatccagtattagcacctacaatatatctgacagtgaaacttttaatggtttctctctcctaatgtatttttaaactctctcccaaatacagcgctctcaaaccccaaggataaacgaaa

SEQ ID NO: 1007315 - DNA, 120 bp, Artificial Sequence
  ENSG00000253133_24 (sequence is synthesized)
ggcataagcagccccgatcctaggaacgtacagccaaaagcagagctacaaatatggactcagacttgagagttttactgagaagtaacttactgtacttgagccaatcataagatttct

SEQ ID NO: 1007316 - DNA, 120 bp, Artificial Sequence
  ENSG00000253133_25 (sequence is synthesized)
gtgcactgaatactgtatatgagaaaattctgtgggtcataaggtttgccttagggatagttaaaaattagtaatatacagtattattcctatcaaatttttttctcataagttatattt

SEQ ID NO: 1007317 - DNA, 120 bp, Artificial Sequence
  ENSG00000253133_26 (sequence is synthesized)
ataacaaaactataattaaaatattttttatacctgcttattccatatccagggacacagcgggaacatttatgtgtctgatggtttggcatccactttattgtgcttactgatttttgt

SEQ ID NO: 1007318 - DNA, 120 bp, Artificial Sequence
  ENSG00000253133_27 (sequence is synthesized)
gatgaacaagcagcacgtatcatatctttccaacattcaaggtaatggaacaatgacataaaattctccaaagaaataactggaaattgcattaaatactgctttaattaggcataattg

SEQ ID NO: 1007319 - DNA, 120 bp, Artificial Sequence
  ENSG00000253133_28 (sequence is synthesized)
ctataataaaacaaataacattatacatttttttttcaataagcttcagtttgaggaactgaatagtagaaacagatcttaagatttgagtcatggtaaaaccagtaattctttgaaatc

SEQ ID NO: 1007320 - DNA, 120 bp, Artificial Sequence
  ENSG00000253133_29 (sequence is synthesized)
tgggaggtgcaaaacgacagccacagccaaccctcaccaaaatcctggagaaaaacattttattaatttaggggaacaagatagaacactggtgaagatacggcttgttgaggtctaaag

SEQ ID NO: 1007321 - DNA, 120 bp, Artificial Sequence
  ENSG00000253133_30 (sequence is synthesized)
ccacctgagaagctggcccaaggaatgaagagaaccaatggtatgtactggtggcagataacaagctttgcactgggctgaccaactgtgttttattaaatggctttgaataaaaaaaag

SEQ ID NO: 1007322 - DNA, 120 bp, Artificial Sequence
  ENSG00000253133_31 (sequence is synthesized)
tgaagtgcttcattgtgttttctcagaaactaatcaaaagattacagagtcctacacaatttggagacacaaagtggatgctgagcgactagaggtcactccaggtgtggaattttagaa

SEQ ID NO: 1007323 - DNA, 120 bp, Artificial Sequence
  ENSG00000253133_32 (sequence is synthesized)
agtgagtccttggagtaaatggcaccgtggctctggcagcagatagaaaggaatgatgctctggagaggaggtagggacactctgcggtcggccagtggatacatgaggggcccggctgg

SEQ ID NO: 1007324 - DNA, 120 bp, Artificial Sequence
  ENSG00000253138_0 (sequence is synthesized)
gcagctcctgatcaaagagcattgtactggtgaggcactcattctcccacatatgggctgaccccctggtgctgagtgagtgaggggctcttagatcttcggccacagactgaaggctgc

SEQ ID NO: 1007325 - DNA, 73 bp, Artificial Sequence
  ENSG00000253138_1 (sequence is synthesized)
gtcagcttccctacttttgaggtttttggactcagactggcttccttgctaagtagaagtgattatccacatt

SEQ ID NO: 1007326 - DNA, 70 bp, Artificial Sequence
  ENSG00000253138_2 (sequence is synthesized)
aagaacacgtgttgagtctgccggccttcacttttcccctgtgctggatgccttctgcccttgaattttg

SEQ ID NO: 1007327 - DNA, 120 bp, Artificial Sequence
  ENSG00000253138_3 (sequence is synthesized)
agagccagagcttcaagaaggaattggctaacacaaaagcaagaacatggattcttctgagaagtaaagaaagatgtttcccaaaagcaagcactttgtaggtggcgatgtgttgatgtg

SEQ ID NO: 1007328 - DNA, 120 bp, Artificial Sequence
  ENSG00000253138_4 (sequence is synthesized)
ctgggtctgataaaaagtgatcccaacagaaagttcctctcatctccagcctaggaaatctttaggccttcactcagatcttcactcaggccttcccggaccaccctctcaaaaattttc

SEQ ID NO: 1007329 - DNA, 120 bp, Artificial Sequence
  ENSG00000253138_5 (sequence is synthesized)
aaccgctttctcctgcacacttgaactctccctttctgcttgttctccttggcactcacattctatctcactgaattatctgatttcttgttatcttccacccaaggatgtaagcctcat

SEQ ID NO: 1007330 - DNA, 120 bp, Artificial Sequence
  ENSG00000253138_6 (sequence is synthesized)
ggaggcagctcctgatcaaagagcattgtactggtgaggcactcattctcccacatatgggctgaccccctggtgctgagtgagtgaggtgagcctggtcagaatggggttgggggcacc

SEQ ID NO: 1007331 - DNA, 120 bp, Artificial Sequence
  ENSG00000253138_7 (sequence is synthesized)
aagaaagagatagctcaatgtagggcccttgtgtccatgcaagtttcattcacatccccaaagcagtgtcaagcccctgaagccacatcaactctccaatactaagcccctaggttcttt

SEQ ID NO: 1007332 - DNA, 120 bp, Artificial Sequence
  ENSG00000253138_8 (sequence is synthesized)
gagcaaagtagttgactaagaaccaagaagaagatgaagaataaacattaacaatggctgaaaattgaggttttaggttttttacgaaatacaaaaatgccaatcacatttgtatctgct

SEQ ID NO: 1007333 - DNA, 67 bp, Artificial Sequence
  ENSG00000253138_9 (sequence is synthesized)
tttacgaaatacaaaaatgccaatcacatttgtatctgctggggttttatcagaaatcttccagggg

SEQ ID NO: 1007334 - DNA, 120 bp, Artificial Sequence
  ENSG00000253138_10 (sequence is synthesized)
tcagaatggtctcatctccaggcagctgtccctcttctggatctctggcaactccagttcacagcaccctttctcctcctagcctaggatccagtgcctttagcagcccagtcatgcgac

SEQ ID NO: 1007335 - DNA, 120 bp, Artificial Sequence
  ENSG00000253138_11 (sequence is synthesized)
tctctcacaccagcctggcacctgggtgtcgcccgaaagcctcctcagagctgtctttgatgagcaccacctgctgcctgtcagtccaactgcggtggagatggttggggtcaaatcccc

SEQ ID NO: 1007336 - DNA, 120 bp, Artificial Sequence
  ENSG00000253138_12 (sequence is synthesized)
attgtcaaggtgataggagagacctcagtgtgctttgtggatgcagaggatgaaaatcagcaaaactgaatgagctgtgtgctgttcttagaggaagcactaggtaaactattccagtac

SEQ ID NO: 1007337 - DNA, 120 bp, Artificial Sequence
  ENSG00000253138_13 (sequence is synthesized)
aattctgtttattcttttctgtgcaaacccaaatttagtgtacccaatacacatgcatatgaatacataccacatagaaatgcacagacatcacacacacccacaacactcagacacagg

SEQ ID NO: 1007338 - DNA, 120 bp, Artificial Sequence
  ENSG00000253138_14 (sequence is synthesized)
gatgtgagtgtatgcatgaacacatactcacactcacacaccattgtaaggcttgtcctcatcctaagagtttaacgtaatagcttttttaaaaaaaattgaataaatgaatgaatgaaa

SEQ ID NO: 1007339 - DNA, 120 bp, Artificial Sequence
  ENSG00000253139_0 (sequence is synthesized)
tctcccctgcatgtccatcgcaggcttcaatgtgtctggcaggcaggaaaattgaagtgcgaatttgagtgaccgtctgtacgtccaaaatggaaaatggcattcatcagactacttctt

SEQ ID NO: 1007340 - DNA, 120 bp, Artificial Sequence
  ENSG00000253139_1 (sequence is synthesized)
tctcttatttcatgtgtaactccttaacagaaaacaactgctgcacacggagggccttatcagacacaggacagggaccacagtattagcactcaagtgctcatagcctttcccccacca

SEQ ID NO: 1007341 - DNA, 120 bp, Artificial Sequence
  ENSG00000253139_2 (sequence is synthesized)
ctgttggccccaggggagacaaggtaattttctcccttcctggtcatcttggggcccagaccaccagctggagaaatgatgcagagagagcagatgagaaagctgaaatactgcaagttg

SEQ ID NO: 1007342 - DNA, 120 bp, Artificial Sequence
  ENSG00000253139_3 (sequence is synthesized)
aaatgactcgtcctagatcccaggtctagtgaagagtgagcaccagaaatcacatgtactagactaccagcagtcagatataatcagcccccaaatctcctgtggttcactatatataaa

SEQ ID NO: 1007343 - DNA, 120 bp, Artificial Sequence
  ENSG00000253139_4 (sequence is synthesized)
acaattcgatgtcaccccctccctgactagcatgtgggctccccaggttggagcccctttccctctcccctgcatgtccatcgcaggcttcaatgtgtctggcaggcagatgagaaagct

SEQ ID NO: 1007344 - DNA, 120 bp, Artificial Sequence
  ENSG00000253139_5 (sequence is synthesized)
ctgggcaagaacagatgcaaaccagagagattttgaagagcctggggtctctagacaattcggcactgctgtggatttcatgtttgtatcccctctaaatacatatgttgaagcccgagc

SEQ ID NO: 1007345 - DNA, 120 bp, Artificial Sequence
  ENSG00000253139_6 (sequence is synthesized)
ccccagtgtgatggtatttggagatggggccttcgggaggtgataaggtcattaaagtggagccctcatgaatgacattagtgccttacaagaagaagcaggagacagcttgcttcctct

SEQ ID NO: 1007346 - DNA, 120 bp, Artificial Sequence
  ENSG00000205300_0 (sequence is synthesized)
gacttctgaatgcggactggaggagatgaggatggagggctgggaggatagtaagagagggagcagggagaccagttacgggccactgaagtagtcaaggtgtcagacaagagctttgag

SEQ ID NO: 1007347 - DNA, 120 bp, Artificial Sequence
  ENSG00000205300_1 (sequence is synthesized)
acaagaggactcgtcttagagatagattgcatgagggccatgagggtaagggaggtgtccaagctgacctcagccttctggcttgtccactggttggatggggtcaccattttattgtaa

SEQ ID NO: 1007348 - DNA, 120 bp, Artificial Sequence
  ENSG00000205300_2 (sequence is synthesized)
gacaaccacaggagttgtttaggagacaccgggctacttcagcctggagctccaggaggaggtctgcattggtcgttgggacaataggaccaggacatggcaggctgcaggaccccagtt

SEQ ID NO: 1007349 - DNA, 120 bp, Artificial Sequence
  ENSG00000205300_3 (sequence is synthesized)
gcaccaaactgccatcccctcctgcctggtttcccttcttcatgaaccgatcaatgggccatagccaggttgggatgcatgtcttccacaggatgggaactacctccagctgatcagtta

SEQ ID NO: 1007350 - DNA, 120 bp, Artificial Sequence
  ENSG00000205300_4 (sequence is synthesized)
acagttcagttggggacctttgagtaaaatagatgaccctctattaggtggttgggcctcttccaatcagttgacagcctacagagaacaaagactgatctccccccagcaagaaggaat

SEQ ID NO: 1007351 - DNA, 120 bp, Artificial Sequence
  ENSG00000255992_0 (sequence is synthesized)
ggagtcgaggagacccgggccacccgcgtcgggaccagagaggctcgctcctgccccattcgcgacgcggctgactgagccggagccggaccacgtgggcgaaggcggaagtggaacgac

SEQ ID NO: 1007352 - DNA, 120 bp, Artificial Sequence
  ENSG00000255992_1 (sequence is synthesized)
ggcccgcgcagataatctggcataatctcaaaatccttaatcccatctctggggccacaattcaaccaactacaagcttgaatttggggaatgagccatggaggtgttggggagagcgtg

SEQ ID NO: 1007353 - DNA, 120 bp, Artificial Sequence
  ENSG00000255992_2 (sequence is synthesized)
ttcctggcagtgcaagagccaggaggcaggagacagccgtctgcagcagccccactcccgccctccaggggctgtgccttctcctacagaagtaccaggaggatcacggcgcccacagcc

SEQ ID NO: 1007354 - DNA, 120 bp, Artificial Sequence
  ENSG00000255998_0 (sequence is synthesized)
agaggatgggcaagccacggcttctccttctggaaacggagatcatctccaaagaagaccatcattttctactatggacaatgtggatgctagttctctcccattcacaggttcagcaca

SEQ ID NO: 1007355 - DNA, 120 bp, Artificial Sequence
  ENSG00000255998_1 (sequence is synthesized)
tgtgtggaaatggcctgtagcctgcaggagcctgaggagaagagaggagctagcagccccagtcaagtctagcgaagtgcatcttggcctgcagtgatggctgtttcccccagaaaggtc

SEQ ID NO: 1007356 - DNA, 120 bp, Artificial Sequence
  ENSG00000255998_2 (sequence is synthesized)
ggaacaatcagtgctgaaggagttgaagaggatgggcaagccacggcttctccttctggaaacggagatcatctccaaagaagaccatcattttctactatggacaatgtggatgctagt

SEQ ID NO: 1007357 - DNA, 120 bp, Artificial Sequence
  ENSG00000255998_3 (sequence is synthesized)
gagtttccatcacttgcagctgagagaacacttgttcttgaattttatccacaatgaggtgctggatgttttctgtttgccccatgaactcactctctgccttccctgtcttgctgtcta

SEQ ID NO: 1007358 - DNA, 120 bp, Artificial Sequence
  ENSG00000255998_4 (sequence is synthesized)
cccttattggttcttttttcctttctgctttggtttccagttggctctggccaatgatagaagacgataaaagagcgagggagaataaagtcatgtgtttatttcttcagcgttctccaa

SEQ ID NO: 1007359 - DNA, 120 bp, Artificial Sequence
  ENSG00000255998_5 (sequence is synthesized)
tttccaatggcatgagttgtacaggatgcaaatcacaggcagatgattcccaaagactcttctcctccgcccagatcttgatgtcctaccatcccctgaagttgatgtatgtggggttct

SEQ ID NO: 1007360 - DNA, 120 bp, Artificial Sequence
  ENSG00000255998_6 (sequence is synthesized)
gtaggcagcagaattaattccctgtgcctcctgcaattccctgagcctccctttctcaaaacgccagctttctcacaaggatagcctgagacatacggaagtgggaatgatgttctgttc

SEQ ID NO: 1007361 - DNA, 120 bp, Artificial Sequence
  ENSG00000255998_7 (sequence is synthesized)
tcaggtgaagtgtttgtgcatatgtgtgtgtcgggggagaggaagatttcctgaccaacaaagggcccaggccgactgccacaagtctgaatgcagacctgcagaagcagcagcaactca

SEQ ID NO: 1007362 - DNA, 120 bp, Artificial Sequence
  ENSG00000255998_8 (sequence is synthesized)
aaaggacagcattccacagaccttccctgcactgcccttcatagcccactctgcagctggacctgcctactcgccatacaccctgaaagctcccacttatccacctaacctcaacttgct

SEQ ID NO: 1007363 - DNA, 120 bp, Artificial Sequence
  ENSG00000255998_9 (sequence is synthesized)
ctagtgttcgaggagggctgagtggtggttttcctcgggccttccaacacttgcccttctcccccaagtattacaagccctcattctaaatatatccctgatttcataatactaatagaa

SEQ ID NO: 1007364 - DNA, 120 bp, Artificial Sequence
  ENSG00000255998_10 (sequence is synthesized)
ttgttctcagatgacttgcagcacctgagcatgtcctttattttatcttttttttaaaaaaaatacttaatagcattttcacttcctagtttctccattatgttgaagttgaatagtctt

SEQ ID NO: 1007365 - DNA, 120 bp, Artificial Sequence
  ENSG00000255998_11 (sequence is synthesized)
ttacttttcaagaacattatgggaattctgcaaaaagatagctacatgcaaagctatcatttctattgttacaaaaatatgtgacacacttaccttatgctatcaaagatgaatgctatc

SEQ ID NO: 1007366 - DNA, 120 bp, Artificial Sequence
  ENSG00000255998_12 (sequence is synthesized)
ctccacatatcctttaaatgggcttcacaagaagaggatggtcccatttctgaacattgccttgtcaatggatgaggaggtttgcactcagtcaaactggttaagctagaatcatatttc

SEQ ID NO: 1007367 - DNA, 120 bp, Artificial Sequence
  ENSG00000255998_13 (sequence is synthesized)
cctaaatctcttgtcctgtttatttccaggtgatgattggccaataaaataaatttagacgtgatttggatagtaaaaatgaagccacagtcactgatcactgaagatcattgtgggtac

SEQ ID NO: 1007368 - DNA, 120 bp, Artificial Sequence
  ENSG00000255998_14 (sequence is synthesized)
aggtgggagctaagagctagcaaggtatcagtgggatttacaagtcttttctttattctttatcctgctcttcttgtcaattgccagatttcctgaccaacaaagggcccaggccgactg

SEQ ID NO: 1007369 - DNA, 120 bp, Artificial Sequence
  ENSG00000254641_0 (sequence is synthesized)
ggcttgtctgttctggcccccttgcctgtcctgtctctgcccccttccactacttctgaggtggtccttttttacctcccgacatgatgacttcactcaccttcgggggctacccaggca

SEQ ID NO: 1007370 - DNA, 120 bp, Artificial Sequence
  ENSG00000254641_1 (sequence is synthesized)
tcctcatcaatctgaggaagagaaaacagatagaaggagtggtgactcacggggccgagtgcgggtggtccccttccagaatgtgtccttgtatggaatacggttgagattctggcccat

SEQ ID NO: 1007371 - DNA, 120 bp, Artificial Sequence
  ENSG00000254641_2 (sequence is synthesized)
cttctctgcccgctctagggaagaaaaacaacctaagctgtggtacagagggagaagacagatgctgacaagggccccatttgccaccaggtcctggaatgaaaaggccattatgatgag

SEQ ID NO: 1007372 - DNA, 120 bp, Artificial Sequence
  ENSG00000254645_0 (sequence is synthesized)
atcatgcttcagttccctaaaaaagaaaacacttctcctgtgcaggggaaattgcttcaatggatagattgcatttaaataatttaagtataaaattactcgaacaggccgactgatatt

SEQ ID NO: 1007373 - DNA, 120 bp, Artificial Sequence
  ENSG00000254645_1 (sequence is synthesized)
tcgaaaacgaaacagtcacaatcacttaagaatgctggcaaagttcgtgatttggtgtgtagatgagagaaggatggatagagaaaagcatcattacaaaagtgaaatgtgtgaatttta

SEQ ID NO: 1007374 - DNA, 120 bp, Artificial Sequence
  ENSG00000254645_2 (sequence is synthesized)
ttctggctttgaacattgagtagacgaagaagacaattccagacggaggaaactccacaagaaatatcatggaaatttgaaagaacacagtgggcttgggaagagagatctcagtggtgg

SEQ ID NO: 1007375 - DNA, 120 bp, Artificial Sequence
  ENSG00000254645_3 (sequence is synthesized)
aagcaccatcatcccaaggagacttaggacattatttgaagagagttttcccctgaggaaagtgcttcagaggagaaaatacaccagaaaaagacaaggccctgctctgaggagtgaaga

SEQ ID NO: 1007376 - DNA, 120 bp, Artificial Sequence
  ENSG00000254645_4 (sequence is synthesized)
caaagtcttgagaagtgcccctcatggacaccccagggtgcccatctccaggttaccaccaggtgcttccaagaccaagataaccaggcaatcatagtagatgcatcaatgcacccttgc

SEQ ID NO: 1007377 - DNA, 120 bp, Artificial Sequence
  ENSG00000254645_5 (sequence is synthesized)
ccaagggcctagacaagaggaggaaggaaaggaggagcacgtgcacaaagctaaggaggtgattaacaacatgatacagtattgtttagcttcgcatgaattttatcaccttgcctagaa

SEQ ID NO: 1007378 - DNA, 120 bp, Artificial Sequence
  ENSG00000254645_6 (sequence is synthesized)
ccagccaccatctgccagggctcctgactttttctgaaatgaatagacactaaagcctgctggggaatttcatggaaatcaagatgactcaacccagagtccatttcaaggctaggatgc

SEQ ID NO: 1007379 - DNA, 120 bp, Artificial Sequence
  ENSG00000254645_7 (sequence is synthesized)
tagaggacgccaacaaaggagtagggaagtgaaacggatcagctcacatccaagcccttgcatgatcaatcctgcagtaggagtgctgctcagttgggactcatgagagcccggaagagg

SEQ ID NO: 1007380 - DNA, 120 bp, Artificial Sequence
  ENSG00000254645_8 (sequence is synthesized)
ctagatccccacattttgacctccactggagtctcagaagaacaagtgccaggggggcttgccacagaggccaaggcagtgaatgtcaggcacatcacagtccccaagatggggagaaga

SEQ ID NO: 1007381 - DNA, 120 bp, Artificial Sequence
  ENSG00000254645_9 (sequence is synthesized)
ctgagatgcagggtaacaactgcaatccattcatgggagccatgtttatcttaaatcattgacagtgagataaggatcatgtcagccttcatacctttgatgatgatcccaggctgcaac

SEQ ID NO: 1007382 - DNA, 120 bp, Artificial Sequence
  ENSG00000254645_10 (sequence is synthesized)
agtgacacatagaactggattcagtaactaactacagattccatcaaccaggactagtaaagtgaaaggcagaaattgggaggaggggtttctttcttgcttataaaactttatttggtt

SEQ ID NO: 1007383 - DNA, 120 bp, Artificial Sequence
  ENSG00000254645_11 (sequence is synthesized)
gtgttgagtatgtgcatgtatgtatgaaatcccataaagcagtcttcttaggaacaagccaacatgccacaatgtaggagatctttggagcactggcctaaatggcagagagctcaaggg

SEQ ID NO: 1007384 - DNA, 120 bp, Artificial Sequence
  ENSG00000254645_12 (sequence is synthesized)
actctgctttgtacaaggcatgatttgtaccaccaccactatccctgtttcagagcactgttgaattgttccaaacctggatttctatgtcagctccctgtctatagtacttgactgata

SEQ ID NO: 1007385 - DNA, 90 bp, Artificial Sequence
  ENSG00000254649_0 (sequence is synthesized)
agacagagtccaggctggagtgcatggcacgatcttggcccactgcaatctgtttcctggcttcaagcgaggtaggagaattgcttgaac

SEQ ID NO: 1007386 - DNA, 90 bp, Artificial Sequence
  ENSG00000254649_1 (sequence is synthesized)
atgaacaaaaaaaaaaaagaagaagaagaagaaaactgtattttctttgcctaagcctagttagaaagaaaccactgtcccatcacaagg

SEQ ID NO: 1007387 - DNA, 120 bp, Artificial Sequence
  ENSG00000254649_2 (sequence is synthesized)
ctaagcctagttagaaagaaaccactgtcccatcacaagggactaaataaactgtaactcttttgattgttatctattttatctacagatgctacaatagaaaacatttcagttgttagg

SEQ ID NO: 1007388 - DNA, 120 bp, Artificial Sequence
  ENSG00000254648_0 (sequence is synthesized)
gaagagtggagaagagtcgagaagagtggagaagagtcgagaagagtcgagaagagtggacaaggcgaaccgtctgcagcgaggcggggctggggggcgcggggaggacggggttcaggc

SEQ ID NO: 1007389 - DNA, 120 bp, Artificial Sequence
  ENSG00000254648_1 (sequence is synthesized)
cggtgtcgctctcaaggggcagccctggtgtcacccccaccccctcccacgctgaagccttccggccgagctgtggcatccacgcaaatggggccgcctcggcacctccaggccagaatt

SEQ ID NO: 1007390 - DNA, 120 bp, Artificial Sequence
  ENSG00000254648_2 (sequence is synthesized)
taaatgttatcagcggcaattgatctgctcgggactgaggtttcgggtcctctgcggaattgggaggagcgtggatggtgaaggagctgctgcactgtggcacgggcttggccggggctg

SEQ ID NO: 1007391 - DNA, 120 bp, Artificial Sequence
  ENSG00000254648_3 (sequence is synthesized)
cctggctctgagcaggctcgtgggacggccctgtaaggaccccactgcaagaagggcacagaagcacctgagttggcgtctcagcagggacccccccaggaaatgcccttctacagctgg

SEQ ID NO: 1007392 - DNA, 73 bp, Artificial Sequence
  ENSG00000254648_4 (sequence is synthesized)
ctttacacacttagccatcgctatacacagtccacgcttgtgcacccacacccacaagcttatgctcacgtgc

SEQ ID NO: 1007393 - DNA, 70 bp, Artificial Sequence
  ENSG00000254648_5 (sequence is synthesized)
ccgcctcctgggttcaagagattctcctccctcagcctctagagtaactgggattacaggtttgccacgt

SEQ ID NO: 1007394 - DNA, 85 bp, Artificial Sequence
  ENSG00000254648_6 (sequence is synthesized)
cttggctagcccggcctcacaggcggattcttgaatccgtgtgtataattcttctcttacagtcatccagcaaacatgtacagac

SEQ ID NO: 1007395 - DNA, 120 bp, Artificial Sequence
  ENSG00000254648_7 (sequence is synthesized)
taattcttctcttacagtcatccagcaaacatgtacagaccctgctcacgtttccacataaccatcctcgtcttccttttctatccttcgggtccgcgcatttgccatccatacatgtta

SEQ ID NO: 1007396 - DNA, 120 bp, Artificial Sequence
  ENSG00000254648_8 (sequence is synthesized)
ctggatacagttagctggaacatatgaaatgccctttcctagcacacacaatggatctacgtatgtacaggcctaaaaacagaatacacatcctacatgacatgtacacatgtgcacaca

SEQ ID NO: 1007397 - DNA, 120 bp, Artificial Sequence
  ENSG00000240990_0 (sequence is synthesized)
gggctgccctgctgctcaccggtccacccatctgcctggtcttctggagctgaggactcgggaaaccatgcaattgaggcaagccttgggctgctttagaggcgctgacatccgaggaga

SEQ ID NO: 1007398 - DNA, 120 bp, Artificial Sequence
  ENSG00000240990_1 (sequence is synthesized)
cttctcctgggattgaaggagcaatgtttggaggaagcgaaagaaaggagaggacacagagcacagagcagccaggcagagccaggagctgagaagggcccagacctgaggcctcccaac

SEQ ID NO: 1007399 - DNA, 120 bp, Artificial Sequence
  ENSG00000240990_2 (sequence is synthesized)
aactctcttcttggaaggatctgggatgttgctgaaggaaaataaaaaaatatgtaaaaagataaccttttgtttttccctctccaggaaatagccaaagaggtccaacagccgagctta

SEQ ID NO: 1007400 - DNA, 120 bp, Artificial Sequence
  ENSG00000240990_3 (sequence is synthesized)
cattggccctggcgactggcttcccaggagctgttctttctcaggagctccacagcgcgggccatctccagaaaactgtcttcagagtgtatttccttttatcgtcaacccagagcccca

SEQ ID NO: 1007401 - DNA, 120 bp, Artificial Sequence
  ENSG00000240990_4 (sequence is synthesized)
ccgcggctaatgcaagaggccaaaaaatgtttggaggaagaaaaacaaaggcaggaagtggcggcggcctgacggtgcgtgtgtgtctgcagagaagggagggagccggctcagtctctt

SEQ ID NO: 1007402 - DNA, 120 bp, Artificial Sequence
  ENSG00000240990_5 (sequence is synthesized)
cttgtttttccaaacttcaaggtccaggcagccctctgcagggccgggccccattgctccccgcgcggcattggaggtggccgcccggagaggagaaggccaacgcctgcgccaggcttg

SEQ ID NO: 1007403 - DNA, 120 bp, Artificial Sequence
  ENSG00000240990_6 (sequence is synthesized)
gccacctcaggggaagcaacagatcgtcactcggtgttctcaccgaaagcacgtaatcgccggtgtaactcatgttggctggggggcctcccggcgcgcgcggagaggctggggtgcgcc

SEQ ID NO: 1007404 - DNA, 120 bp, Artificial Sequence
  ENSG00000240990_7 (sequence is synthesized)
cccatgcagcatgcttgtgctcaattgcagggtcctcgttctcgagtgtgcagagggcggtgagagctcaactctcgtccccacctcccacccgcagctccccgggtgggtgagggatgc

SEQ ID NO: 1007405 - DNA, 120 bp, Artificial Sequence
  ENSG00000240990_8 (sequence is synthesized)
cctggactggggatagccaggtgggagtccgtcgctgtgtggcctgtggtctcggagtctgttctcctggagtctcgcatttgcacccccttcttcgcagtccccctcccatagacttgc

SEQ ID NO: 1007406 - DNA, 120 bp, Artificial Sequence
  ENSG00000240990_9 (sequence is synthesized)
tctgggaagcgcctctgcctccgaccctagccggaaccccttcggggccagagtttgaagccgtggatgtgcctgcctggtggcttgtccgatttgcacggtgacttgattacactctct

SEQ ID NO: 1007407 - DNA, 120 bp, Artificial Sequence
  ENSG00000240990_10 (sequence is synthesized)
cattcatggtcacttccgaagcgctttagtgccttccgtccctaaaccgccaacagccagaacggcttctccccgcggtttgtcactgatccgcagggcccggaagggccttcgtcttac

SEQ ID NO: 1007408 - DNA, 120 bp, Artificial Sequence
  ENSG00000240990_11 (sequence is synthesized)
ccgggatccacctctcccctcatcttccctgcctacctcttcatcccaccttctgtccttggagaaactccctcctcctcgctgcctgccgggcttcggagtgactcggcagagacagag

SEQ ID NO: 1007409 - DNA, 120 bp, Artificial Sequence
  ENSG00000240990_12 (sequence is synthesized)
agggggggcttgcgcagagcctcagggaccctcctctctggggactaccatccctgagccttacgcttctttccacagcctttgcaggcggaatatcggaataaagtgggtccaggcgcc

SEQ ID NO: 1007410 - DNA, 120 bp, Artificial Sequence
  ENSG00000240990_13 (sequence is synthesized)
ctaggaaaaccgaaaacagttctagacagacctgcggttttatagcagttttggcagtcaacttcagcttgtgcctgagcagacggggttgtggtggcccgccagcgggggatgccaggc

SEQ ID NO: 1007411 - DNA, 120 bp, Artificial Sequence
  ENSG00000240990_14 (sequence is synthesized)
cacctcccccagcggcacgcagcccctctcttaattagatcggttttcccctggtgtccgggagagcggtcccggcagaaaggaggtccaacagccgagcttagcccaccgggctctggg

SEQ ID NO: 1007412 - DNA, 120 bp, Artificial Sequence
  ENSG00000240990_15 (sequence is synthesized)
gtcggaggaggcgaggttttccggggtgccgtaggctgtctcgaaaaactggtcgaaagcctgtggcaggacgccgttcctgcccacggtgctatagaaattggacgagactgcgggggt

SEQ ID NO: 1007413 - DNA, 120 bp, Artificial Sequence
  ENSG00000240990_16 (sequence is synthesized)
ggggtggtggtagacgttggccgagctcttggccagcacgtcgccaggcacgccggccgcgctgggcgcctgcaggcagtctctgtgcacgagctcctccgcggagtagcagtgggccag

SEQ ID NO: 1007414 - DNA, 120 bp, Artificial Sequence
  ENSG00000240990_17 (sequence is synthesized)
attgccgcgggggtgccatttagtggcgggctcaatggcgtactctctgaaggtcacttcgcgcacgggttggacctggggcaggttggaggagtaggagtatgtcattgggcgcgaaga

SEQ ID NO: 1007415 - DNA, 120 bp, Artificial Sequence
  ENSG00000240990_18 (sequence is synthesized)
cggggtctggggcagaaaagaagggaggctggagaaatctggacccgagacgtagtaagtacaacttggcaaatacatgttagaggagcagggaccacgctcatcaaaatccattattgg

SEQ ID NO: 1007416 - DNA, 120 bp, Artificial Sequence
  ENSG00000240990_19 (sequence is synthesized)
atttggagacgtaagctgacgtggaaatctatccccatccttagcagggaggtgctggtcatgtgacccgatgttgaaattgacaagctgctagctagtccgggccttttccccccccct

SEQ ID NO: 1007417 - DNA, 120 bp, Artificial Sequence
  ENSG00000240990_20 (sequence is synthesized)
gcagaaaagaagggaggctggagaaatctggacccgagacgtagaggtccaacagccgagcttagcccaccgggctctgggaaagacccgactgaggctaaagccgccccggaaggccaa

SEQ ID NO: 1007418 - DNA, 120 bp, Artificial Sequence
  ENSG00000240990_21 (sequence is synthesized)
gctctttctcctctgctgccgccgccgtctcccggcagccgccgccgccgccgctgtccgaacttgaagttgccggcgcgcccgttgcagccgccgccgccgccgcggaggtcgccgtgg

SEQ ID NO: 1007419 - DNA, 120 bp, Artificial Sequence
  ENSG00000240990_22 (sequence is synthesized)
atttagagtataaactctaagatctttggtatttaagtgtcaacatcgatttatttatttattgctgagctgactgtaactgactcaataacaaatctaatcgtgtattgcactggaaaa

SEQ ID NO: 1007420 - DNA, 120 bp, Artificial Sequence
  ENSG00000240990_23 (sequence is synthesized)
gaaatattcttattatgtattttctccaaataatggcctaccattgcatttgaatacctgctgtaaatatcaataatatgaagtaattactctgtagtcgagtaaactaatttattagca

SEQ ID NO: 1007421 - DNA, 120 bp, Artificial Sequence
  ENSG00000278022_0 (sequence is synthesized)
gtgtctctttgtcttggcaggtggaagcccctctgcttggaatagcaaacaatactaccagcttgccctctggcaagctcctttaagagttagctgtaatttcaccctctctctggcctt

SEQ ID NO: 1007422 - DNA, 120 bp, Artificial Sequence
  ENSG00000278022_1 (sequence is synthesized)
ggggaggggaatggtaccttggttatctttgaattcccaggaggtggcccagtgcctggtgcataggaggagctgaagaaacggaagacttcttaaagggatactcgccattcactttga

SEQ ID NO: 1007423 - DNA, 120 bp, Artificial Sequence
  ENSG00000278022_2 (sequence is synthesized)
agcacttctttgtacaacaaatttattttcatctgatcattgcacctctgctagccaaaacattttatcacaccagttactgctgcatggaacttgaaagcaataaaattatctttaaaa

SEQ ID NO: 1007424 - DNA, 120 bp, Artificial Sequence
  ENSG00000240996_0 (sequence is synthesized)
aggttttgctcagcagaggtatggaaggaagagtgtaggaagagaagaaagaaaaggattgagtcttatgtctataataccaaaatcttaacaaagtgcaaatcaagaaatgagacaaca

SEQ ID NO: 1007425 - DNA, 120 bp, Artificial Sequence
  ENSG00000240996_1 (sequence is synthesized)
ggatgtagaagtttaagcatattatttcagtgtgcaaagcatctccatgttattcagcattggagctcaactaccgactgtgtcaatcaaataagagtatcaggttcctgtgctaaaaat

SEQ ID NO: 1007426 - DNA, 120 bp, Artificial Sequence
  ENSG00000240996_2 (sequence is synthesized)
accaaatgttaggagactaaatataagcagaaaagacaagtaatagctgcataaccttgagcaagatactgactgagcctcagccttttcttcattaaaatgatatttttaatgcaggtc

SEQ ID NO: 1007427 - DNA, 120 bp, Artificial Sequence
  ENSG00000240996_3 (sequence is synthesized)
tatagtctttactctgcaattccaaaacaggacaaaaaacaaaacactgtgaaacccaaagtgtttttgtaagtttggcaccaggattatatgccaaagaaaacctactgtgaacaaata

SEQ ID NO: 1007428 - DNA, 120 bp, Artificial Sequence
  ENSG00000240996_4 (sequence is synthesized)
tgaagcctctattgtctcagcacttgtatccgtaagtcacacatgcctctgctatttgctgatattttctgacttggggattaattccatggaaaatgtcgaaaagggctaaagatatac

SEQ ID NO: 1007429 - DNA, 120 bp, Artificial Sequence
  ENSG00000257599_0 (sequence is synthesized)
tctggcagagagcgcggagagacgcagaacgcagccagctcctccagggccctccaggccctccggacccgggccggcgggtgaactggggggccccgggacaggccgaggcctctgccc

SEQ ID NO: 1007430 - DNA, 120 bp, Artificial Sequence
  ENSG00000257599_1 (sequence is synthesized)
tgcagataccggaggcctctgctgtggctgcccactggctgtgcccaggccttgaagccgcagcgaacctctctttcccaccccacctggatgactgatggcggcggctgcgtctccccg

SEQ ID NO: 1007431 - DNA, 120 bp, Artificial Sequence
  ENSG00000257599_2 (sequence is synthesized)
gaccccgccggccgccgcgtctcccgacccaagcctgccgggcctcgacgaaacccccgcagagtcgctgggacgcagcgcctttgggcggcgccgggcgtggtgggccggaaagtatgg

SEQ ID NO: 1007432 - DNA, 120 bp, Artificial Sequence
  ENSG00000257599_3 (sequence is synthesized)
atggcggccgcttgaacgccgcgcggcggaggccattaaggcgtggagggcccgggaaggcggcctagggacgcaagcaggctcggccacctctttaggccacggagccgcgcagatccg

SEQ ID NO: 1007433 - DNA, 120 bp, Artificial Sequence
  ENSG00000257599_4 (sequence is synthesized)
gttcccgggtgaccactctgtcgccattgggcgagaccgacctagtcctgacgacaacggacaaaggccttcaggggcctggaaggtgagtgaagtcccgaaagacgacgggtggaacgg

SEQ ID NO: 1007434 - DNA, 120 bp, Artificial Sequence
  ENSG00000257599_5 (sequence is synthesized)
ttagcggctatcgggcggttggtctttgttctaccagactttgctgtcagaagagagaaatggtagaatgacaggccacgtttggcccgttggaaatgcccaccaccctctgggaagatt

SEQ ID NO: 1007435 - DNA, 120 bp, Artificial Sequence
  ENSG00000257599_6 (sequence is synthesized)
tactggccgtttatgtaaggcctgtgtatataatatgaaaaagctgctctcaacttcaccccaaccttttaatagaaaacatttgtcacatctagcccttctagatggaaagaggttgcc

SEQ ID NO: 1007436 - DNA, 120 bp, Artificial Sequence
  ENSG00000257599_7 (sequence is synthesized)
gacatatgataaaatagaaagtcacacatcttgtaaattctcatttgtttaaaagaaatcatagaaaacacatgtcttctggagatgacttttagaaatggagttgttaagacggcctct

SEQ ID NO: 1007437 - DNA, 120 bp, Artificial Sequence
  ENSG00000257599_8 (sequence is synthesized)
ggaagcgatacgtccacgtttgttaagtgggttagatgacatggaggtggaagacctgagaaggaagagaagaaggttctgtgctagactggtcatatttagaagacattttcatattct

SEQ ID NO: 1007438 - DNA, 120 bp, Artificial Sequence
  ENSG00000257599_9 (sequence is synthesized)
atccattgttttgtgtgcattttattcttcactactgtgtatatagttgacaatgctaagcttttttgaaatgtctattctttttagatgttctgaagtgcctgatatgttaaaattaga

SEQ ID NO: 1007439 - DNA, 120 bp, Artificial Sequence
  ENSG00000257599_10 (sequence is synthesized)
ggtagcaaaatcacattttgtaaatacctttttgttacaaatcataggaaatgttttttggggggaatggccaaatcacctgttgagtaatgctcattgtgcagtgtggttcaggggaag

SEQ ID NO: 1007440 - DNA, 120 bp, Artificial Sequence
  ENSG00000257599_11 (sequence is synthesized)
agagaggagggggaggtgcagagagctctatgacatcctgtttacagcgaggcaagatgaatcattatctctgtgcgttttgttttacttatctgtgtatatagtgtacataaaggacag

SEQ ID NO: 1007441 - DNA, 120 bp, Artificial Sequence
  ENSG00000257599_12 (sequence is synthesized)
acgaatcctaattgacaacatctagtctttctggatgttaaagaggttgccagtgtatgacaaaagtagagttagtaaactaatatattttgtacattttgttttacaagtcctaggaaa

SEQ ID NO: 1007442 - DNA, 120 bp, Artificial Sequence
  ENSG00000257599_13 (sequence is synthesized)
gattgtcttctgaaaatttgatgtattctgggttgatggaaatgggaagggttctaggccagaatgttcacatttggaagactctttcaaattataactgtttttacatgtttgcagttt

SEQ ID NO: 1007443 - DNA, 120 bp, Artificial Sequence
  ENSG00000257599_14 (sequence is synthesized)
attcaagactgctgtatacatagtagacaaattaactccttacttgaaacatctagtctatctagatgtttagaagtgcccaatgtatgttaaatgtagaggtagtaaaataccactttg

SEQ ID NO: 1007444 - DNA, 120 bp, Artificial Sequence
  ENSG00000257599_15 (sequence is synthesized)
taaatatctttttgctaaaattcataggaaatacttctggaaattgaattgtgaagccacctttgtgagcagtatagtaatgtctatacttgttcaatggtttagaggaagtgggaggga

SEQ ID NO: 1007445 - DNA, 120 bp, Artificial Sequence
  ENSG00000257599_16 (sequence is synthesized)
agaaattgcaaaaggtaatatactagtgtgttcatacttggacgttttcagacaccatttttctatatgttttgtgcattttgttttgctctgtatatagtgtatataatggacaaatag

SEQ ID NO: 1007446 - DNA, 120 bp, Artificial Sequence
  ENSG00000257599_17 (sequence is synthesized)
tcctaatttttcaacatctagtctctagatgttaaagaggttgccagtgtatgacaatgtagtaaaattagcatattttgtactctttgtgttgaaattcatacgaaaacttgtcttctg

SEQ ID NO: 1007447 - DNA, 120 bp, Artificial Sequence
  ENSG00000257599_18 (sequence is synthesized)
taaatgacttttgcataggaatttggtcaaccatctctaagcattacatgtgcctgtacttgtccactggattgaaggcagagaaggaagggaggggggaatgattcaaggccaaaatgg

SEQ ID NO: 1007448 - DNA, 120 bp, Artificial Sequence
  ENSG00000257599_19 (sequence is synthesized)
ccacatttagaagatacctcagatgataaccattgttatgtgtgtgcaattttatttaacagtgctgtgtacgtggtggacaagttatatgaaatatctagtctttctagatatttggaa

SEQ ID NO: 1007449 - DNA, 120 bp, Artificial Sequence
  ENSG00000257599_20 (sequence is synthesized)
gtgcttgatgtatttaaaagtggtagtagaataacactttgtaaatagcttttaaaaactgatgggaaatgctgtttggaagtggaattgttgaaccacctgggaggtgggagggaagaa

SEQ ID NO: 1007450 - DNA, 120 bp, Artificial Sequence
  ENSG00000257599_21 (sequence is synthesized)
attgcaaatggtgttttgacattgtttattaacaaatttcagcttaatccattgcctatatgttacatgcatttcatttaactttgctatactgtgtatataatggacaaatgagtcccg

SEQ ID NO: 1007451 - DNA, 120 bp, Artificial Sequence
  ENSG00000257599_22 (sequence is synthesized)
attttataatatctagtctctagatactaaagaggttgccaatgtatgacagaagtagagttagtaaactaacacattttgtacactttgttaaaatttgtagaaaagctgtcttgtgaa

SEQ ID NO: 1007452 - DNA, 120 bp, Artificial Sequence
  ENSG00000257599_23 (sequence is synthesized)
tggaagtgagataacatcagctctaagtgacacgtgcctatatccaccaggttggtggtggagaggagttggaaggaatgaagggttctagaccagaatgttcctatttagaagacactt

SEQ ID NO: 1007453 - DNA, 120 bp, Artificial Sequence
  ENSG00000257599_24 (sequence is synthesized)
tcagatatacccattgttacatgtgtgtagtttattcaacactactgtgtatatagcggacaaacttaagtccttatttgaaacatctagtctttctagatgtttagaagtgcacaaagt

SEQ ID NO: 1007454 - DNA, 120 bp, Artificial Sequence
  ENSG00000257599_25 (sequence is synthesized)
atgttaaaagtagaggtagtaaataacacattttgtagctatccttttgatatgaaatattgtcttggaaattgatcaattctctgagcagtacacattttgatatttgtgctggttcag

SEQ ID NO: 1007455 - DNA, 120 bp, Artificial Sequence
  ENSG00000257599_26 (sequence is synthesized)
ggggaaggaggagcacaaagtgcaaagggctttctaccagtgtccagtgtgtttatgaggaggcacattgaccattgtcccttatgtctgcattttcatttactgtgctgtgtatatagt

SEQ ID NO: 1007456 - DNA, 120 bp, Artificial Sequence
  ENSG00000257599_27 (sequence is synthesized)
gtatataagtggacaaaggagtcctaatttacatccagtcgacgttaaaaaggttgccagtatatgacaaaagtagaattagtaaactactacattgagtacactttgtgttaaaattca

SEQ ID NO: 1007457 - DNA, 120 bp, Artificial Sequence
  ENSG00000257599_28 (sequence is synthesized)
taggaaagacttcttaaaaacagaagtgagattgttaaaatcccccctaagcattacagatggcttatagctgtccacggggttggtagaggtgggaaagggaagggttctaggccagaa

SEQ ID NO: 1007458 - DNA, 120 bp, Artificial Sequence
  ENSG00000257599_29 (sequence is synthesized)
tgttcctatttagaagacactcaaattacagtctgtgttatgtatgtataccatttattcaatgctactgtgtatataatgaaaaacttaagtccagtttgaaacatctagtctttctag

SEQ ID NO: 1007459 - DNA, 66 bp, Artificial Sequence
  ENSG00000257599_30 (sequence is synthesized)
gaaaaacttaagtccagtttgaaacatctagtctttctaggtgtttaaaagtgtacaacggcctgt

SEQ ID NO: 1007460 - DNA, 120 bp, Artificial Sequence
  ENSG00000257599_31 (sequence is synthesized)
agagcgagactccgtttcaaaaaaaaaaagtgcacaatgtaggttaaaagtagagggcttaagtaacacccctctaagcatttgttttcagtacttcctaggagtggttgcatttgggaa

SEQ ID NO: 1007461 - DNA, 120 bp, Artificial Sequence
  ENSG00000257599_32 (sequence is synthesized)
tttgttttcagtacttcctaggagtggttgcatttgggaatggaattgttaaaaggtgatgcttaggagcgaatgcagactattcattaggtggttggggcgggggaagcgggggtgggc

SEQ ID NO: 1007462 - DNA, 120 bp, Artificial Sequence
  ENSG00000257599_33 (sequence is synthesized)
agaggaggtatgcagggagaagggttctgtgctcctgagattagttcagatggtctaaacattgttctatatgtgcattttagttaatattgtgtattaaaggataagtcttaatgctca

SEQ ID NO: 1007463 - DNA, 120 bp, Artificial Sequence
  ENSG00000257599_34 (sequence is synthesized)
aagtatgttaaaaatagatgtagtaaatcagtccctttgtgaatgtccttttgttagtttttaggaaggcctgtcttctgggagtgacctttattagtccacctcttggagctagacatc

SEQ ID NO: 1007464 - DNA, 120 bp, Artificial Sequence
  ENSG00000257599_35 (sequence is synthesized)
ctatacttagtcactgggatggtggaagagggagaagaggaagggtgaagggaagggctctttgctagtatctccatatctagacgatggttttagatgataaccacaggtctatatgag

SEQ ID NO: 1007465 - DNA, 120 bp, Artificial Sequence
  ENSG00000257599_36 (sequence is synthesized)
catttttaataaagtgcctctgttcattgtggacaaagttattgttttgcaacatctaagctttacgaatggggtgacaacttacgataaaaactagagctagttaattagcctatttgt

SEQ ID NO: 1007466 - DNA, 120 bp, Artificial Sequence
  ENSG00000257599_37 (sequence is synthesized)
aaatacctagcctatttgtaatataattacaaattatgtaattagcctatttgtaaatataattgatagaaaagatgcatcttggacatggaattgttaagccacctctgagcagtatat

SEQ ID NO: 1007467 - DNA, 120 bp, Artificial Sequence
  ENSG00000257599_38 (sequence is synthesized)
gtcaggacttgttcattaggttggcagcagaggggcagaaggaattatacaggcagagatgtatgcagatgtgtccatatatgtccatatttacattttgatagccattgatgtatgcat

SEQ ID NO: 1007468 - DNA, 120 bp, Artificial Sequence
  ENSG00000257599_39 (sequence is synthesized)
ctcttttggctgtactataagaacacattaagtaattcaagggaaatacactttgctaatattttaatggtgtagctctgctaatgcattctcttaaaaacatacttagtgtattctgtt

SEQ ID NO: 1007469 - DNA, 120 bp, Artificial Sequence
  ENSG00000257599_40 (sequence is synthesized)
gctgtgtgtttcattttaaattgagcattaagggaatgcagcatttaaatcggaactctgccaatgcttttatctagaggcgtgttgccatttttgtcttctatgagatgtttgtcccaa

SEQ ID NO: 1007470 - DNA, 120 bp, Artificial Sequence
  ENSG00000257599_41 (sequence is synthesized)
gaaaggcaggattactttttttttttttttttagcagtttgagttggtgtagtgtattcttggttatcaaaatactcatatagctttgggattttgaattggtaaatattcatgatgtgt

SEQ ID NO: 1007471 - DNA, 120 bp, Artificial Sequence
  ENSG00000257599_42 (sequence is synthesized)
gaaaaatcatgatacatactgtacaatctcagtcccatgaaattggatgttgtgcctactcacaggatctagaagcatatgtcaaactataaactgcttgtgattgtgaatgactttgtt

SEQ ID NO: 1007472 - DNA, 120 bp, Artificial Sequence
  ENSG00000257599_43 (sequence is synthesized)
ctttgcttcttgtgttttttggtttcctataatggacatattaacttttaaaaaataaaggttattttaaaaggctgaaaaaaaaatctaacttcagtgttgaactaaaaaagtgaaata

SEQ ID NO: 1007473 - DNA, 120 bp, Artificial Sequence
  ENSG00000257599_44 (sequence is synthesized)
atttccatcccagacatgtgatatgtcccaaaagcaatttttatatcttgtaaaaaaatacacaagcagctaaataacataaataataggccctcagaggtcaaacattttgactaaaaa

SEQ ID NO: 1007474 - DNA, 120 bp, Artificial Sequence
  ENSG00000257599_45 (sequence is synthesized)
gctcattatgctctttggatgcactccagtttgccaacgttccttaaatttgtgtttgaccaagggggatattcaaaatatttagtaaccagattgcacaccaacaagtaaagaacttgt

SEQ ID NO: 1007475 - DNA, 120 bp, Artificial Sequence
  ENSG00000257599_46 (sequence is synthesized)
gagactcagctagtactatggtgatcaaaatggaacacaattgctaccagaagagaactgctcccctgcagtggagcagtgaagaggccttttacatctaagaccaaaggagagtctgtg

SEQ ID NO: 1007476 - DNA, 120 bp, Artificial Sequence
  ENSG00000257599_47 (sequence is synthesized)
gcagtctgaggaagtgctggcctgtggtaggatccacagcaccacttctaaaagccctgtcaggtggctgcccttggactgccatgagaaagcgatggaggatggagagagcactatgtt

SEQ ID NO: 1007477 - DNA, 120 bp, Artificial Sequence
  ENSG00000257599_48 (sequence is synthesized)
ttaaaaaatgtgtggtttctgcattcaactgcttgttcctgaaagctgtgttctctcaggcttctttcattctgcagacgacaggtttggtatctccaggcccacattttcctaatctag

SEQ ID NO: 1007478 - DNA, 120 bp, Artificial Sequence
  ENSG00000257599_49 (sequence is synthesized)
attttagtgtcacagagccaaattaactctccaaggcctccctcattttttcactgttgccaaggaagttaacaaggttgaacaggcaaagtgggagatgagtgatttatttttggtatt

SEQ ID NO: 1007479 - DNA, 120 bp, Artificial Sequence
  ENSG00000257599_50 (sequence is synthesized)
cttaagtagtacagagaaaaatcatgccaactgaaaaaatgaagaaagaatcccctgatgagtctattctcaaggtctattaataaaatctcgtaaatgcaaaaaggcatctcatgaaaa

SEQ ID NO: 1007480 - DNA, 120 bp, Artificial Sequence
  ENSG00000257599_51 (sequence is synthesized)
caagttggtgatttcagcaatggtttctcctgtctatagaaactcttcagcagatggcaattttccaccttcctgtataaaaccagaatcctctcacctggcagaaatctttctctccag

SEQ ID NO: 1007481 - DNA, 120 bp, Artificial Sequence
  ENSG00000257599_52 (sequence is synthesized)
cctattttcaaaaataacaactggcattaatgtttatgcaacaaaaatatgcttacctgcactgatgcttccccatccggtcacagcacagatctccgaggaaaatagaggctctgcgct

SEQ ID NO: 1007482 - DNA, 120 bp, Artificial Sequence
  ENSG00000257599_53 (sequence is synthesized)
gtgtgggagacatactggcctcaccaccgagttgtactccagaggagagcttagttgtattagggcaatgtcagagtcataacttagtgtgttaaagtcttcatgcactattatgtgttt

SEQ ID NO: 1007483 - DNA, 120 bp, Artificial Sequence
  ENSG00000257599_54 (sequence is synthesized)
ggcccttctcacctgtatcggtggcaagtaagcaaattacaacgtaagaaagtcaaagaatccagcaacttccttgttgatggtccaaaataatcctaaatttctgcacttacatacata

SEQ ID NO: 1007484 - DNA, 120 bp, Artificial Sequence
  ENSG00000257599_55 (sequence is synthesized)
aacaatgcagaagactttctattaaatttaaaagagcaatattggtttacaatttgcagggggctatgaaccaccttctggataaaggtggtgctggagaaataaagctttgaaaacctg

SEQ ID NO: 1007485 - DNA, 120 bp, Artificial Sequence
  ENSG00000257596_0 (sequence is synthesized)
aggagcagcagtaagaaatgagaaatgcactcagacatcggaggggacataattctcttttagacagtgtgacccggagtattagggtcaaatgaaacacaaagccagtcaaacaattta

SEQ ID NO: 1007486 - DNA, 120 bp, Artificial Sequence
  ENSG00000257596_1 (sequence is synthesized)
agggctagagcctagaccagataaagcatcaagactggtggttcacactgagcttaggaggagggagctttccagcatgagaaatgagacatggctggcaggatgatggagtgattaaga

SEQ ID NO: 1007487 - DNA, 120 bp, Artificial Sequence
  ENSG00000257596_2 (sequence is synthesized)
tagaatcccaataccatgacagaggaaaagaagatgagcctctgaacacaaccttatccttgtggaaatctccaagggaaaggatcctggaataagcagagtgggcattaccaaaaggag

SEQ ID NO: 1007488 - DNA, 120 bp, Artificial Sequence
  ENSG00000257596_3 (sequence is synthesized)
aacacacttcgaaggaaatctaattaaaaggcaaggaataatccaggtgatggatgaatcttctgtccccagaaccctaaatattaccctctttgtttcttttttattccaaagtcagat

SEQ ID NO: 1007489 - DNA, 120 bp, Artificial Sequence
  ENSG00000257596_4 (sequence is synthesized)
atcctcaaaggaacagcaaaaagagggactttaggatatcttcaatggtgtaaagaaaagaaatatatgaaagttcccgggagaaagagactaaaataaaagcactgggcacatggatta

SEQ ID NO: 1007490 - DNA, 120 bp, Artificial Sequence
  ENSG00000257596_5 (sequence is synthesized)
cataaaacagaaaaggggttgtaagtatgtgattatgactagaaacacaaaacaatcgacttcattttttatttaattttaatcacaaattattaaccttgcaaagttttaaacattaaa

SEQ ID NO: 1007491 - DNA, 120 bp, Artificial Sequence
  ENSG00000257595_0 (sequence is synthesized)
cccagttccctagcccagaaaagcggattggagcccgggaagctcattgcgattccaaaggtcacgctgatgcaagagatgggttcccatgatcttgggcagctccactcctgtggcttt

SEQ ID NO: 1007492 - DNA, 120 bp, Artificial Sequence
  ENSG00000257595_1 (sequence is synthesized)
cgacgacgacctcgctgtgttcgtggcagcggcactctcaaatctgggcacggtgatgggaaggttatttgttggaatccctttgcctttccaagggaaaataaacacaaaaagtgagaa

SEQ ID NO: 1007493 - DNA, 120 bp, Artificial Sequence
  ENSG00000287639_0 (sequence is synthesized)
gactgtggccctgaagagaggaagggcctcctggggctggaccaccccctggtgggctcaagaagacagagggggccttggactggggacagccagcaagcctggtatgcccctgctggg

SEQ ID NO: 1007494 - DNA, 120 bp, Artificial Sequence
  ENSG00000287639_1 (sequence is synthesized)
actgccctgctgagtctattgttagggtgccctttgtttgcctgaccacgggaggcctgcaggacaggatggtctggggacaacctcagaacaggaggtctgggctccttctctgcttcc

SEQ ID NO: 1007495 - DNA, 120 bp, Artificial Sequence
  ENSG00000287639_2 (sequence is synthesized)
ttccttggagtttcttgtgtgagagaggaaagggctgcccaggccgcaccacaggaatcgtgagaccataactggggctgttttaagcctgcaggggtgtggaagttgtggtgcagggac

SEQ ID NO: 1007496 - DNA, 120 bp, Artificial Sequence
  ENSG00000287639_3 (sequence is synthesized)
agaacccagaccagcctctgggagagaggatggggagctccctgggccctctcctgtccctacagttcacagcccatgcaccagaactggtcacagggcacaggcacaaccccctgcagg

SEQ ID NO: 1007497 - DNA, 120 bp, Artificial Sequence
  ENSG00000287639_4 (sequence is synthesized)
gatcaggggccccggggagtgcacaggcccttggggaggaccaaggcctcctctgctgccattgggatggcacaggttctgaagggcaggtgtagcccctgcagggtacaagcagagggt

SEQ ID NO: 1007498 - DNA, 120 bp, Artificial Sequence
  ENSG00000287639_5 (sequence is synthesized)
gcctggatgcaggcagcagcctggggtgtgtcctgcaagaccacaaggagaggccatgggtgcggaagaggatcccagggtgaatctcaggaaagcagcactgggacacgtctgccgcta

SEQ ID NO: 1007499 - DNA, 120 bp, Artificial Sequence
  ENSG00000287639_6 (sequence is synthesized)
aggttattctaaaggcagaagcacagggacttcctgaaaggctgcgtagaagcgagaggcttgggctcggctgcctggaagaagggaggcgccctgttcttggaggccagaggatgagag

SEQ ID NO: 1007500 - DNA, 120 bp, Artificial Sequence
  ENSG00000287639_7 (sequence is synthesized)
cgaggcaggctaaggaagaaatcatggcccagcctgggcctggggcaggggcctggctggggaaactcctggctcaggagcagagcacgggaggagaagcacagctggcccctgctctcc

SEQ ID NO: 1007501 - DNA, 120 bp, Artificial Sequence
  ENSG00000287639_8 (sequence is synthesized)
aggcctctgggaggttgggaagtgcatgaaagcacctctgagtcttgggttctccatctgcacagtgggcaggatgatgacgggcccttcttccctagaaggaactttttaggcacaaat

SEQ ID NO: 1007502 - DNA, 120 bp, Artificial Sequence
  ENSG00000287639_9 (sequence is synthesized)
gaggaaataacatggaaagacttggaggcttcgcccacataaggcaggagatcactccaaggaaatggacctccctgatggtggcttcccccgttccctgtaactgcctgtgactgatga

SEQ ID NO: 1007503 - DNA, 120 bp, Artificial Sequence
  ENSG00000287639_10 (sequence is synthesized)
gccatcagcagggatgggagggatggagcctcggacatcatttactcacttctgcttgttaaataactcaggacctggggccgcttctcagggctggggctgagtctccgtgcccaccgt

SEQ ID NO: 1007504 - DNA, 120 bp, Artificial Sequence
  ENSG00000287636_0 (sequence is synthesized)
gcagtgtacttattacactgtattggaatcgcttcttttctctttctctgtgaatttcttgagagcacagactacattctgcttaactttttatccccagctttcagcacagtgcctggc

SEQ ID NO: 1007505 - DNA, 120 bp, Artificial Sequence
  ENSG00000287636_1 (sequence is synthesized)
tgtctttacacgagatgtagagaagtctccaggactataggaaagacacacaagcccaaccttcatctggagaaaaggaactgggtttggccaggctaaaccccacgtggcttgaagtct

SEQ ID NO: 1007506 - DNA, 120 bp, Artificial Sequence
  ENSG00000287636_2 (sequence is synthesized)
tggtgtcccgttcgtgatgttattccatactgaataagccagatgctgagaagtctgatacatgctgaactactgtgttttgatgtgaatgtcttgttgaaatcctatggtcagacggca

SEQ ID NO: 1007507 - DNA, 120 bp, Artificial Sequence
  ENSG00000287636_3 (sequence is synthesized)
ctattggcaggaattgggaatttttcccagagagagtggatattcccaccatcaaagatcttgagaagatcaataatcccaggatggggaatgaggcctggggaagtggcctttggcctg

SEQ ID NO: 1007508 - DNA, 120 bp, Artificial Sequence
  ENSG00000287636_4 (sequence is synthesized)
ggagagggcatggagaaactgccctttctccgggcctcatgggccagaagggaccctgttgaatggtccgtgccttacaaattctgaaagcagtcttatctagaattcagttttaaagaa

SEQ ID NO: 1007509 - DNA, 120 bp, Artificial Sequence
  ENSG00000287636_5 (sequence is synthesized)
tttctgtattgcaattatttcctattatccccaagagtagtggacatttgtttttgccctcctaatgttcaactcacccttttttggtaatagcaccttcaattttcctggggaagattg

SEQ ID NO: 1007510 - DNA, 120 bp, Artificial Sequence
  ENSG00000287636_6 (sequence is synthesized)
cgatgtgagtactgtgcaccgctggccatggtgactggttcatggctgagcatgtgaccccagctgggccaatcagagccaggcttgggtcttgctaggactgtcggggagagtcatcct

SEQ ID NO: 1007511 - DNA, 120 bp, Artificial Sequence
  ENSG00000287636_7 (sequence is synthesized)
cttacctttggaaggaacaagcctagagcttccggggaccaccacttggagaataaagtacacagagcgcaacagagccaagaaagagaacttgaatcctgaagacgtgcagccatgtct

SEQ ID NO: 1007512 - DNA, 120 bp, Artificial Sequence
  ENSG00000287636_8 (sequence is synthesized)
tcagagtgaagacctgaagccatatcttcagactgaagacctgagcctctgaatccagccatgcccaaattaagaatatgcctgtactttttcagctttgtgaactgaagaactctctct

SEQ ID NO: 1007513 - DNA, 120 bp, Artificial Sequence
  ENSG00000287636_9 (sequence is synthesized)
ttttggctggagtcagtttcgattggagtttctgtcattttcttctaaagctatcttattaaatgtataagctatgtctcatctatcaccatgggaagttcatgaggggtccttgcccat

SEQ ID NO: 1007514 - DNA, 120 bp, Artificial Sequence
  ENSG00000287636_10 (sequence is synthesized)
gcttgactaaagcgcactgtgtgagaacagcaacagcttcagaagctgatgcagaccctacaggaagtcatctgcagcggggaggtggacagcggcagtctgaggactgataccaccaaa

SEQ ID NO: 1007515 - DNA, 120 bp, Artificial Sequence
  ENSG00000287636_11 (sequence is synthesized)
ggccgcaagctttccaccggacggatgtgtggagcatgtcattttatttgtagatcctcagaaatacctgggaaaggcatctagttaagaggctctggatgtcataataatttgggcatt

SEQ ID NO: 1007516 - DNA, 120 bp, Artificial Sequence
  ENSG00000287636_12 (sequence is synthesized)
aaaagctaatgtttatacccatgttcaaatcagcattatggacaataaccaaaaggtagaagcaatgcaagtgttcacacacagatgaataaataaacaaaatgtgttctagccatacaa

SEQ ID NO: 1007517 - DNA, 120 bp, Artificial Sequence
  ENSG00000287637_0 (sequence is synthesized)
atggggctttttattattattcgggcgggaagcgaaagggtttaaaaaaaaaccaaccaacaaaatggcgacggaccgacccggtcgctatagcaactgtcaatcaaaacgcaaaacccc

SEQ ID NO: 1007518 - DNA, 120 bp, Artificial Sequence
  ENSG00000287637_1 (sequence is synthesized)
ggctgacgtgctgacgtcctcctcccgccccccagccccgagccggcgggcggggcctgttgctcaggttccaggattctaccctgagcacaggaaacaactagagtccatcccccaccg

SEQ ID NO: 1007519 - DNA, 120 bp, Artificial Sequence
  ENSG00000287637_2 (sequence is synthesized)
cgcctccgcactactccccgggtattaaaaattctgagccagtcacagacctttaacaaggtcaagagcactaaatgccttatctttatgagggcaacacattcctaaattgacatgaaa

SEQ ID NO: 1007520 - DNA, 120 bp, Artificial Sequence
  ENSG00000287637_3 (sequence is synthesized)
gacctggctgtgtttggccggcactggtgtttatggagacacaactgccattcaagcatgcgaggaatgatacgtcataccaagaccgtcctacaaggatccctaagcagtgcatggatg

SEQ ID NO: 1007521 - DNA, 120 bp, Artificial Sequence
  ENSG00000287637_4 (sequence is synthesized)
gtggagaagggagttgccccagggtgaaggcttccctgggctctgacaggggttactggatgactctgcaaatattaaatatagctgcatgaatcacactacaaaattccaggcctgaaa

SEQ ID NO: 1007522 - DNA, 120 bp, Artificial Sequence
  ENSG00000287637_5 (sequence is synthesized)
tctggtgtcaggcataacaatttgttctccctcccttgctcatgaatagcaaagaatcaattgaagaaattttggtctgtttagagagcactcgtgttttgttcctccctctggaacaca

SEQ ID NO: 1007523 - DNA, 120 bp, Artificial Sequence
  ENSG00000287637_6 (sequence is synthesized)
cgttctgcatttgacatgacacatgcttctcaagtgttattttgtgtttattaatctttgaactgaattgccagtccttcaactagaaagacattttcccagaaccctcctgactcatgc

SEQ ID NO: 1007524 - DNA, 120 bp, Artificial Sequence
  ENSG00000287637_7 (sequence is synthesized)
taagggtacacaacagctgataaactccagtgacctcagaggagacagatgggccatgtggcttctaacacccacgtggctgtctggaccatggatgacagcatagcccaggttaagctg

SEQ ID NO: 1007525 - DNA, 120 bp, Artificial Sequence
  ENSG00000287637_8 (sequence is synthesized)
gttggcagaaatgctcaggacttttccacatttaccaagctgaaaatagtggttatgtcacctgctcttccattctgtcacatcactttccgtattatcaccttctttaccactatccct

SEQ ID NO: 1007526 - DNA, 120 bp, Artificial Sequence
  ENSG00000287637_9 (sequence is synthesized)
tggtgaactctgctaaaagcttaaaagtatgaattcgttcatcttcagcaattctgtgggataggtattttgatctccatgttgcaaataagaaaagcttgaccatgaagggctcagaaa

SEQ ID NO: 1007527 - DNA, 120 bp, Artificial Sequence
  ENSG00000287637_10 (sequence is synthesized)
gtttatcacccaaccatcctttctgaaaatatttccttcgggggggaaaaagtaattcaagaaagataattaaattcaaaacatgaaaaagtggtaacaaatataaataaactgataaaa

SEQ ID NO: 1007528 - DNA, 120 bp, Artificial Sequence
  ENSG00000287637_11 (sequence is synthesized)
tttatactgagatcttaagattaagacatttaagaaactattttaaagagaaagagaaatgtagaaagaattttattgctcaattggaactgaaattttagattattcctacaaagcatg

SEQ ID NO: 1007529 - DNA, 120 bp, Artificial Sequence
  ENSG00000287637_12 (sequence is synthesized)
agatgtttaagatcttatcttattccagagggaaaaattatggatactgattcattctaaatgtttatggagaaagatgtttaaaaggtcttattaaattaaaggccatctcctctaaac

SEQ ID NO: 1007530 - DNA, 120 bp, Artificial Sequence
  ENSG00000287637_13 (sequence is synthesized)
tgccaaggtcatcgaaacaaagaaactgtcatagccaacaagaacctaagggagacaggaggctgatgtcgtgtggtatgttgacacagattgtaaaattttgacaaaaacctgggaaat

SEQ ID NO: 1007531 - DNA, 120 bp, Artificial Sequence
  ENSG00000287637_14 (sequence is synthesized)
gtgcataaactacagattttagctaataaaatgtgtcactattggttcattaattttggcaagcataccatatccatggaagctatgaatactaaaggaaactgggtgtactaggtgtag

SEQ ID NO: 1007532 - DNA, 120 bp, Artificial Sequence
  ENSG00000287637_15 (sequence is synthesized)
agtaaacagaaactctctgtactgcctacagcactttcctttttctttttagaatctaagtcctaaaaacattactctaaagtaaaaatatttattctaaataattctaagttaattcta

SEQ ID NO: 1007533 - DNA, 120 bp, Artificial Sequence
  ENSG00000287637_16 (sequence is synthesized)
atttaaaattaatttattctaaaatataaagtttatttttaaaaataggagcaacctcatagggctgtcgtaaggattaaatgagatcatcaatataaaaaggtctgcataggggctgga

SEQ ID NO: 1007534 - DNA, 120 bp, Artificial Sequence
  ENSG00000287637_17 (sequence is synthesized)
acatagcaggtgttcaaggaacatgagcctttacctgaaaatagacaaataggaagaaagcccagctccgtggggtgcacctgtagtctcagctactctggaggctgacggagtaggatc

SEQ ID NO: 1007535 - DNA, 120 bp, Artificial Sequence
  ENSG00000287634_0 (sequence is synthesized)
ggagctcacagccaggaagaaagatgttgtttcaagcaacgggcagtgagttctgacagagacagctggaaaaatatgaaaaagaccatgcttttctgtgtgatggtattaaaaggtggt

SEQ ID NO: 1007536 - DNA, 120 bp, Artificial Sequence
  ENSG00000287634_1 (sequence is synthesized)
gcctttgggaggtaatttgatcttcaggatggagccctcataaatgggattagcacccttgtaaatggaacctcagagagctctcctgtcctcttctaccatgtaaggatacatcaagaa

SEQ ID NO: 1007537 - DNA, 120 bp, Artificial Sequence
  ENSG00000287634_2 (sequence is synthesized)
caagaagtaactttttattctttataaatcacccagcttgtgctaatttgttagagcagacttaactattctttcccccactgaattgcctttgtacctctatcagcaattagttgtgta

SEQ ID NO: 1007538 - DNA, 120 bp, Artificial Sequence
  ENSG00000287634_3 (sequence is synthesized)
tatatgtgttggtctatttctgggcactttattctattccattgatctgtttgtctgtattaatgacaatatctcactgtcctgatttctgtaactttataattaaagtcttgacaccaa

SEQ ID NO: 1007539 - DNA, 120 bp, Artificial Sequence
  ENSG00000287634_4 (sequence is synthesized)
gtagtgtcagtcctctatattgtttttttctcaaaattattttggctattctaagtcctttgcatttccgtatgattatttatttatttgctttccaccttggttgaatgccatccatat

SEQ ID NO: 1007540 - DNA, 120 bp, Artificial Sequence
  ENSG00000287635_0 (sequence is synthesized)
gctcttgctcggtgtctctcgcctgccgccatgattgtcggttttctgaggcctccccagccatgagaaactgggaagccagttgccaggttgcaaactgccttatggagagacccacat

SEQ ID NO: 1007541 - DNA, 120 bp, Artificial Sequence
  ENSG00000287635_1 (sequence is synthesized)
ggcaaagaacagaagccctcagtccaatacttcacgaggaactggagaagccagctgccatgtcatgaaggcattcaggcaacttaggagaggaccacagagcagaaaatggaaatctct

SEQ ID NO: 1007542 - DNA, 120 bp, Artificial Sequence
  ENSG00000287635_2 (sequence is synthesized)
gttaacagccaatgggcacctgaggctgaccaacaaccacatgaatgagcttggaagcagatctcccagtcaagccttctgatgaaactgtggcccaggtctgactaaacctcaagagag

SEQ ID NO: 1007543 - DNA, 120 bp, Artificial Sequence
  ENSG00000287635_3 (sequence is synthesized)
accttgagtcagaatcacctacccaagctgctcctagatttctgcccacagaaacagaaatatttgttgttttaagctgctaaattttggtatgatgagttatatagcaagaacagatat

SEQ ID NO: 1007544 - DNA, 120 bp, Artificial Sequence
  ENSG00000287635_4 (sequence is synthesized)
aaaatataatcattgatcaagagttttttttcaatattatgcaaacgccaattgtacatctttaggaatcctttttattgttatgaaccttttctgcctgccatagtaggtggtggagtc

SEQ ID NO: 1007545 - DNA, 120 bp, Artificial Sequence
  ENSG00000287635_5 (sequence is synthesized)
taagtgttctaagatgtggaatgtaaattaacaatattgtaagatatggagtctgcatgatcaagattatttgtttttacagtgtgtggcaaaatgtcttcttccctttatgcctctgat

SEQ ID NO: 1007546 - DNA, 120 bp, Artificial Sequence
  ENSG00000287635_6 (sequence is synthesized)
atttaagccttaggactactttattcaaacctatctctataaaatcttgtggagatgtgacccagatcaataactgcctttctggccaattaaaatactcatgcatgtatccagtgaact

SEQ ID NO: 1007547 - DNA, 120 bp, Artificial Sequence
  ENSG00000287635_7 (sequence is synthesized)
tacaagttgaatgagaacaggacaaactacaagatattcattgataccagttcactagtttcctaccacattttgaaaatcagggcattggacccatatgcaacaagaggcagtgctaaa

SEQ ID NO: 1007548 - DNA, 120 bp, Artificial Sequence
  ENSG00000287635_8 (sequence is synthesized)
aggaaaacatgcttgtaagtggaatgcttggtattagtcaagacactatttttccttttaaattctctaaaaatgacaacatgacaaatatttacaaacaaattaaaaacatacaactga

SEQ ID NO: 1007549 - DNA, 120 bp, Artificial Sequence
  ENSG00000287632_0 (sequence is synthesized)
ggtccctgagtgtggagttcgctgagcggggagtggctgtgatgtttaagaaagaccaaagggaccagcttggctgggggagtgaaggaggagagaggaagccagagatgggatcagaca

SEQ ID NO: 1007550 - DNA, 120 bp, Artificial Sequence
  ENSG00000287632_1 (sequence is synthesized)
aaggaggagagaggaagccagagatgggatcagacaggtaacagaacaaagcatctggctgtgtaggtcaaggctgtatgggaagcatggcggtatctgctcggcttctggggaggcctc

SEQ ID NO: 1007551 - DNA, 120 bp, Artificial Sequence
  ENSG00000287632_2 (sequence is synthesized)
gccagcacttcacatggccaggagcagcaggaagtggaagaggtgctacacacttttaaacagccacatctcatgagaactcactatctccacaacagcaccaagagggatggtgttaaa

SEQ ID NO: 1007552 - DNA, 120 bp, Artificial Sequence
  ENSG00000287632_3 (sequence is synthesized)
ccatgagaaaccagccccatgatccaatcacctcctaccaagctccatcttcaacaatgggaattacagttcaacgtgaaatttgagcaaagacacagattgaaaccataccagccatag

SEQ ID NO: 1007553 - DNA, 120 bp, Artificial Sequence
  ENSG00000287632_4 (sequence is synthesized)
gccaattaatactttctaatataatttaataaacccttaactttgtgagtggccaaatggctactactactcagttttcaagactcagttccaatatgcagataaagttgtgaaagaatg

SEQ ID NO: 1007554 - DNA, 120 bp, Artificial Sequence
  ENSG00000287632_5 (sequence is synthesized)
gagaaaactgttaagattagttatctctgggaaaggagagtaggtaggggtgatcatgagagggacttttcactgtataacctcctatgctatttgaatatctcacaatattagtgtatt

SEQ ID NO: 1007555 - DNA, 120 bp, Artificial Sequence
  ENSG00000287632_6 (sequence is synthesized)
atttttataattggattttcaaaagttagagaaatgggggtgccgtctttgttttttttggtttaaaaatgacctaaaatgtcttgtaaagaaggcgcaaaagccatatgggaaacaata

SEQ ID NO: 1007556 - DNA, 120 bp, Artificial Sequence
  ENSG00000287632_7 (sequence is synthesized)
agtaaaaataccttaagtagtttttaaaaattattgtcttaaacatcattgagagctgttgtctcatttaaaatgtactcattaacacgccaaaggataaaataaataagtaaataagga

SEQ ID NO: 1007557 - DNA, 120 bp, Artificial Sequence
  ENSG00000287630_0 (sequence is synthesized)
tagactgcagaaccaattggctgactttggggcgaccatcttgcccagacaccacatgctgaaacacttggtcggaaggatcattccaccccactttgagtggatcaaagatgacaaggc

SEQ ID NO: 1007558 - DNA, 120 bp, Artificial Sequence
  ENSG00000287630_1 (sequence is synthesized)
ccaagtaggggcaagtttgagcctggccagttcaatattgggtgctaactggagtggctaatgtctatgttttgtcacacgtattttgctctgctcagaatggaagaagatggttttcct

SEQ ID NO: 1007559 - DNA, 120 bp, Artificial Sequence
  ENSG00000287630_2 (sequence is synthesized)
ttgtgttgcggtttggcccccagggctgtggtgtggcgagccaagtcactagggctgcccaaggaaagggaacacagaagcctggcgtgctggcaaaagggtgggaatttcttaccagtc

SEQ ID NO: 1007560 - DNA, 120 bp, Artificial Sequence
  ENSG00000287630_3 (sequence is synthesized)
aggctttgggcctccctgtgtgcataactggttgaataaatggcaaaaataactgttcatcccctctgtaaagttttgattaatgggaaaagaatttgtgaggtacgtctgaagctgtag

SEQ ID NO: 1007561 - DNA, 120 bp, Artificial Sequence
  ENSG00000287630_4 (sequence is synthesized)
caaatctggtgtactttgtgctataaatttatcttcctgtattgtactgccataaagaggagtaccttaggatagaacatgggcttaggaccccataagcccactgttaaagccagcctg

SEQ ID NO: 1007562 - DNA, 120 bp, Artificial Sequence
  ENSG00000287630_5 (sequence is synthesized)
gcaagttggtcagtaacaaactttgctgcaggtccctgaaacaaacaagcaaaaacaactgaatgaagtttccttctcgtcttgttttatgtccttggaagcttgagcttgtgaccatat

SEQ ID NO: 1007563 - DNA, 120 bp, Artificial Sequence
  ENSG00000287630_6 (sequence is synthesized)
ggcagtactttcttttagtctctgcttatccagaggacaggaatttaggggttcatgttgtagttagccccaaaaattacctcaagcagttaaaagcctttgcaagctcaaaattggctg

SEQ ID NO: 1007564 - DNA, 120 bp, Artificial Sequence
  ENSG00000287630_7 (sequence is synthesized)
ctctagactccctctgggaagagcaatggaaattgcccagtgctgtggcttagtagctaaggctttgtcttttcacaatgacggcctgggttcagggttcaattcccagcttagggaatg

SEQ ID NO: 1007565 - DNA, 120 bp, Artificial Sequence
  ENSG00000287630_8 (sequence is synthesized)
ggtcctttctggcttaatatctgtgtgacctttaccatttgttgattctcttctcctccatgaactacttctggcttcatttcttgaatcttcctttctctgagctacctgtggagattc

SEQ ID NO: 1007566 - DNA, 120 bp, Artificial Sequence
  ENSG00000287630_9 (sequence is synthesized)
cctgtgagtttatttttggtaaagtttaaaagccagaaatattggctgttttgcccagctaaagtagggtgtatttgtctggttttacactgatataaagaacttccctgagactgggta

SEQ ID NO: 1007567 - DNA, 74 bp, Artificial Sequence
  ENSG00000287630_10 (sequence is synthesized)
cttccaaggaaccttcttcacatggcagcaggagagaatgcaggaggaactgccaaacacttttaaagcatcag

SEQ ID NO: 1007568 - DNA, 120 bp, Artificial Sequence
  ENSG00000287630_11 (sequence is synthesized)
agaatgcaggaggaactgccaaacacttttaaagcatcagatcttgtgagaacttaccgtcatgagaacagcatgatccaatcacccaccactaggtccctcactcaacacatggggatt

SEQ ID NO: 1007569 - DNA, 120 bp, Artificial Sequence
  ENSG00000287630_12 (sequence is synthesized)
aaaattcaagatgagaattgggtggcaacatagagccaaaacatctcataggatagtaataagagatttaaaaggattttattttttaaggagtactacggttaaaagtcagctcaatta

SEQ ID NO: 1007570 - DNA, 120 bp, Artificial Sequence
  ENSG00000287630_13 (sequence is synthesized)
aaagcagatattcaagctataggtatattttaaaggcctttatgttttattctcttcttggattgtgtttttctggaaaaaaggtttttttcttttcttctcagtagacttaattgtttt

SEQ ID NO: 1007571 - DNA, 120 bp, Artificial Sequence
  ENSG00000287630_14 (sequence is synthesized)
tctccattttgtcttcttgctactcttgatgcacacatgagaggacctaagataatacaacctgggactccttgggaaaaacagaagaggggccacagactgcgttttgggaaaaacgtc

SEQ ID NO: 1007572 - DNA, 120 bp, Artificial Sequence
  ENSG00000287630_15 (sequence is synthesized)
tattttcctcatgaaaccccagggattaaaagcagacagatccctcttaaaatctaaggctctgttctgttttgctttgctttatctgacgttttttgactttttaggggtatcagaaat

SEQ ID NO: 1007573 - DNA, 120 bp, Artificial Sequence
  ENSG00000287630_16 (sequence is synthesized)
tacttcgcagtatgtgagaattttgatttataataactaggtaggaaatatacttttaggggtggctaatggcagtcatgagaggatacttggctctttgcacatttggattgggagaag

SEQ ID NO: 1007574 - DNA, 120 bp, Artificial Sequence
  ENSG00000287630_17 (sequence is synthesized)
catgctcttggccatctggaaggtatggaaaagtctccacccctccactgagagataaggctcccatcagggtgggctaatcacaaaatgagttgattggttttgggttgccttgcaata

SEQ ID NO: 1007575 - DNA, 120 bp, Artificial Sequence
  ENSG00000287630_18 (sequence is synthesized)
aaatgcatggtaaaatctttgcattgtcttgttctgtagtgtccttttgggattcaagatgtaatataaaaatgggatccttaattttgggagatctgttttgtcttccagctgtgccac

SEQ ID NO: 1007576 - DNA, 120 bp, Artificial Sequence
  ENSG00000287631_0 (sequence is synthesized)
gagcaaacacaggcggggagaggagctggaggcagaggaagcctggagttccctgcacattcagcaggggaacaggacagattgaacagagtaggcaatatggaaaagctggaagatcca

SEQ ID NO: 1007577 - DNA, 120 bp, Artificial Sequence
  ENSG00000287631_1 (sequence is synthesized)
ggctgagaggaagcaggtaaagagcaggaaaagcttaataacaccaggaaaggcaggcagagggcacagatgggcactccagaaaagagattcttgaatgtttgtgctggaacctggagt

SEQ ID NO: 1007578 - DNA, 120 bp, Artificial Sequence
  ENSG00000287631_2 (sequence is synthesized)
gtcttgggctatgaggcaacctttgggacagaagccagcatcagggctggtgaatcagaaagatatagaaatctctactgaagaggaaaaggatactggagatctaaaagatagctctct

SEQ ID NO: 1007579 - DNA, 120 bp, Artificial Sequence
  ENSG00000287631_3 (sequence is synthesized)
cttgaaaacaaaaaggaaacataagaaaaaacataaagagagacataaaatgggagaagaaattataccattaagagtactatcaaagtaagtctgtggtttaaattctgtcattggctt

SEQ ID NO: 1007580 - DNA, 120 bp, Artificial Sequence
  ENSG00000287631_4 (sequence is synthesized)
aacaatccacctcaatggaaacatttcacgtgttaaacaactcctcattcctgtgtccccacccttctacccctctactttctgtctccatgagtttgactaaatacttcatattagctg

SEQ ID NO: 1007581 - DNA, 120 bp, Artificial Sequence
  ENSG00000251182_0 (sequence is synthesized)
aggtacaggtctgcttaccattgaaagaatcactgtttactaatacgtcattgatttcggttctggattcagtttaaaaaaatattacacacgcagatatatgtgtggaaagaaagaatg

SEQ ID NO: 1007582 - DNA, 120 bp, Artificial Sequence
  ENSG00000251182_1 (sequence is synthesized)
ggagaaaaagtgaataaaaacaccatggaaaaattaatttggtaatacgaagcatgggctacatttcctgatttcattttgtgatttgatgttagtcagtaaacctgtgattatatgcta

SEQ ID NO: 1007583 - DNA, 120 bp, Artificial Sequence
  ENSG00000251182_2 (sequence is synthesized)
ctaagctcatgaagctaggatttgccatggggaacctagagagcaagaggattgctcacttaaggggaaactaactaccacgttatgcagctctactgtaaaaatgcacagggctcttcg

SEQ ID NO: 1007584 - DNA, 120 bp, Artificial Sequence
  ENSG00000251182_3 (sequence is synthesized)
aaagactgaaaaaattgacaggaccagagagagtccatctagaagaatgtcaaacaaaccactgaagtaacgtgttgacaaaataacagctctaataaattgcaatttgactataaataa

SEQ ID NO: 1007585 - DNA, 120 bp, Artificial Sequence; identical to SEQ ID NO: 823333
  ENSG00000230663_0 (sequence is synthesized)

SEQ ID NO: 1007586 - DNA, 120 bp, Artificial Sequence
  ENSG00000230663_1 (sequence is synthesized)
gtgtgcccctgcggttcctgtccgagtagtgttcacgcgtgcccagtggtggccgatggggtcacggcccctctccccaccccaggcgcgcggcgatgggatatgaaccagtcactgcct

SEQ ID NO: 1007587 - DNA, 120 bp, Artificial Sequence
  ENSG00000230663_2 (sequence is synthesized)
ttgtgctttcctcctctctccgctgccccggtcaaccagcggagagtggggaactgcgggcaggtcggcggagttagatggcagcaaaggtgggccggcttggtgtgataaagttccaac

SEQ ID NO: 1007588 - DNA, 120 bp, Artificial Sequence
  ENSG00000230663_3 (sequence is synthesized)
tgggtccttccgcgagccctgggtccataagatgtcatcggcgagcgctggacttgaccgtcaacttgggattgttaaggtaaatggtgtctccttctgtcgccaaggcggtggcatggt

SEQ ID NO: 1007589 - DNA, 120 bp, Artificial Sequence
  ENSG00000230663_4 (sequence is synthesized)
tctcctgcctcagccccccgagtagcagaaattacaggatttgtcgctgatgccttacttcattcactttgtgaggtcatgttttcctggatggtgacaatgctagcagatgttcttcag

SEQ ID NO: 1007590 - DNA, 120 bp, Artificial Sequence
  ENSG00000230663_5 (sequence is synthesized)
gttttcctggatggtgacaatgctagcagatgttcttcagtgtctggacattaaaactttggcatgcagcaccacataagatgtgaaaaaaagattttttttaaaaaaaagatgagcatt

SEQ ID NO: 1007591 - DNA, 120 bp, Artificial Sequence
  ENSG00000230663_6 (sequence is synthesized)
aattgtagacttcactgtgtggggttattcgtagctatctttcttgggaaggatttccacatatttgaaaagaacccagagttgatctctgcaccacgccatcactgctggtggtgagga

SEQ ID NO: 1007592 - DNA, 120 bp, Artificial Sequence
  ENSG00000230663_7 (sequence is synthesized)
ttcagtgatatgaagttaaaaccaggagggaagatcagtggagccttctttctgccatcttgtgttacctttgcagccaagaatcagaatgaagaactttcaataagaaaagctttcaga

SEQ ID NO: 1007593 - DNA, 120 bp, Artificial Sequence; identical to SEQ ID NO: 823341
  ENSG00000230663_8 (sequence is synthesized)

SEQ ID NO: 1007594 - DNA, 120 bp, Artificial Sequence; identical to SEQ ID NO: 823342
  ENSG00000230663_9 (sequence is synthesized)

SEQ ID NO: 1007595 - DNA, 120 bp, Artificial Sequence; identical to SEQ ID NO: 823343
  ENSG00000230663_10 (sequence is synthesized)

SEQ ID NO: 1007596 - DNA, 120 bp, Artificial Sequence; identical to SEQ ID NO: 823344
  ENSG00000230663_11 (sequence is synthesized)

SEQ ID NO: 1007597 - DNA, 120 bp, Artificial Sequence; identical to SEQ ID NO: 823345
  ENSG00000230663_12 (sequence is synthesized)

SEQ ID NO: 1007598 - DNA, 79 bp, Artificial Sequence; identical to SEQ ID NO: 823346
  ENSG00000230663_13 (sequence is synthesized)

SEQ ID NO: 1007599 - DNA, 79 bp, Artificial Sequence; identical to SEQ ID NO: 823347
  ENSG00000230663_14 (sequence is synthesized)

SEQ ID NO: 1007600 - DNA, 120 bp, Artificial Sequence
  ENSG00000285679_0 (sequence is synthesized)
aatctttcagctgatgtggccaccctggttgctgtgggacacctgtctcctcctgccgtccaaaagagcaagaagcactaaactctgtcttcggtcagcatgactctcagcccatgtaag

SEQ ID NO: 1007601 - DNA, 120 bp, Artificial Sequence
  ENSG00000285679_1 (sequence is synthesized)
gatgtgacgattagggaagatgtttttaattcacataactattctttagagaaaattgatcctgaaacaccttattgccttatcgtagaatgactgcattactcagaattctttacctct

SEQ ID NO: 1007602 - DNA, 120 bp, Artificial Sequence
  ENSG00000285679_2 (sequence is synthesized)
accggaatttagtgaagggaaggcacaacgtacattaggaaaatacaggacacactccagtccttaaaccttccacaatcttctagctctttaaggtcgagtgtgatcctccccagaact

SEQ ID NO: 1007603 - DNA, 120 bp, Artificial Sequence
  ENSG00000285679_3 (sequence is synthesized)
gcatcttccaggaagctcatgagaaaggaaggatcccaggtcccatctctgatctgagtcggcatctgcgttttaacagaatcctgaagcagtggtctaactcctttggtggtgttattg

SEQ ID NO: 1007604 - DNA, 120 bp, Artificial Sequence
  ENSG00000285679_4 (sequence is synthesized)
tttgcatgtatacctccaaaattcacatattgaaatactaacccccaaggtgatagtattaggaggtggggcctttgggaggtaattaagtcatgagggtgaagccctcatgaatgggat

SEQ ID NO: 1007605 - DNA, 120 bp, Artificial Sequence
  ENSG00000285679_5 (sequence is synthesized)
tagtactcttagaaaagggaccccagagaggtctctttccaccatgtaaggataaaagtacacggagaagatggcaatctgcaaactggaaaagggccctcctcagaacctgaccatctt

SEQ ID NO: 1007606 - DNA, 120 bp, Artificial Sequence
  ENSG00000285679_6 (sequence is synthesized)
cctgaatggattaagacaggtggtctggtttaaagtgatgtggtggcatcagaagtttaaggagagactggatttacagaaccagaatctgggatgctgtttacagagcaagttatttcc

SEQ ID NO: 1007607 - DNA, 120 bp, Artificial Sequence
  ENSG00000285679_7 (sequence is synthesized)
tgcatttggacactgtcagcaggtcgattcaggagacaggtgaaaactttatcaccgggcagcctggatgaacaccacaactttgatatctttcacttaaaggaaagataagggcatcca

SEQ ID NO: 1007608 - DNA, 120 bp, Artificial Sequence
  ENSG00000285679_8 (sequence is synthesized)
ctatttctacacctggctggcagagtgagagctcaccaaagcacttacaaattcatggactattatgaagacaagttaagagattgtgtcctccaaactcatcatttttcagacaaataa

SEQ ID NO: 1007609 - DNA, 120 bp, Artificial Sequence
  ENSG00000285679_9 (sequence is synthesized)
taattgcacatattcattgggtacatagtgatgtatgccaagaagtgaatttcaaaattcttaagaagaagaatagcaatgaaaaagacaaggaattttgagctgattcaaataacagag

SEQ ID NO: 1007610 - DNA, 120 bp, Artificial Sequence
  ENSG00000285679_10 (sequence is synthesized)
gagaagaaaataacctgtgagtgcaatctgatgaagcattgccgcatcctgcattcaacaaataaaaataatcttgtcgtacctttgtatcttcagaaaaactagcaagcaacttcaaaa

SEQ ID NO: 1007611 - DNA, 120 bp, Artificial Sequence
  ENSG00000285679_11 (sequence is synthesized)
agagaatgaagaggaaatggcaggaacaggctgctagatctgagcatggagcttatcctcagccctggggaactggtgccagtggatgagactgtccagttgcaggaaaacaagctcagg

SEQ ID NO: 1007612 - DNA, 120 bp, Artificial Sequence
  ENSG00000285679_12 (sequence is synthesized)
gagccactgtgcctggccaattcacttacaaattcatggactattatgaagacaagttaagagattgtgtcctccaaactcatcatttttcaggttttaccaaatgggctcctgttctac

SEQ ID NO: 1007613 - DNA, 120 bp, Artificial Sequence
  ENSG00000285679_13 (sequence is synthesized)
attgtgtgatcatagatatttgtacttcttggatcagcaaaagatgggcatttacaggaaccaccattgaggcaaataatgtctgatgtggagagaatacaatgccaagtattgtaattg

SEQ ID NO: 1007614 - DNA, 120 bp, Artificial Sequence
  ENSG00000285679_14 (sequence is synthesized)
gtttattttttgttattttttatatattttcttataagaatataaggcaaaatgtgtctctatatttagttggagatgtgtatacagcagtaagacacatacatagttgctgattctact

SEQ ID NO: 1007615 - DNA, 120 bp, Artificial Sequence
  ENSG00000285679_15 (sequence is synthesized)
agatttattttattttaaaaagatacacagacttcagtatattgtagtaaacaaaagtagaaaaattaaggcagcaattggagaaataattacatattctttccctgggatgtaagcatg

SEQ ID NO: 1007616 - DNA, 120 bp, Artificial Sequence
  ENSG00000285679_16 (sequence is synthesized)
caaaatacatgaagatatatgcttttcattcgaaataaggaaaataaaagactctgcctcatgatgctcatgaaaacaatcattttttactttttggcaatggctttggagtggaagcac

SEQ ID NO: 1007617 - DNA, 120 bp, Artificial Sequence
  ENSG00000285679_17 (sequence is synthesized)
attactgtcatctcctgaaagaattaaatataaagtggaaacccagtgaagaggaagaaaatgccatataaatttcaaatgaagatttggaaccagattatgatgaacaatgttgctaaa

SEQ ID NO: 1007618 - DNA, 120 bp, Artificial Sequence
  ENSG00000285679_18 (sequence is synthesized)
ccttgtgatctctaccttctttagtccctccttgggaatagcataacagtggacccagccatctaggattatttgaagtaactttgggtggtacagttcagaagaatcaaccctagagag

SEQ ID NO: 1007619 - DNA, 120 bp, Artificial Sequence
  ENSG00000285679_19 (sequence is synthesized)
ccttaaataacaataccgaaatgggacatattgccattaaatctgtccctaacttaaaaatgtttaactagatgctacaaaaaaaaaaagtaatactttgctaatactttccagaaagaa

SEQ ID NO: 1007620 - DNA, 120 bp, Artificial Sequence
  ENSG00000285679_20 (sequence is synthesized)
ctatttctacacctggctggcagagtgagagctcaccaaaggtggccaccctggttgctgtgggacacctgtctcctcctgccgtccaaaagagcaagaagcactaaactctgtcttcgg

SEQ ID NO: 1007621 - DNA, 120 bp, Artificial Sequence
  ENSG00000285679_21 (sequence is synthesized)
tcagcatgactctcagcccatgtaagctcaccttggctgtaccccgaggagggagatcaaagtatatgttcctactgtcagctttactcacatccacatcttctccctgcatgtccttgg

SEQ ID NO: 1007622 - DNA, 120 bp, Artificial Sequence
  ENSG00000285679_22 (sequence is synthesized)
gttggaaggaacagcttattttttgtcctacatcagtggttcttaaactttactgtaccaagaaagcttttaaaaaatgctgatgattggggcctgcagattctcagtcactgatctgga

SEQ ID NO: 1007623 - DNA, 120 bp, Artificial Sequence
  ENSG00000285679_23 (sequence is synthesized)
tatgtcctgcatgtaagagtgttttgcaaatcgtttctaatgtgcaaccaggattacaaaacgttatcttgtatcctgagttctctctactcttggcataaaattaaaatctgttatatc

SEQ ID NO: 1007624 - DNA, 87 bp, Artificial Sequence
  ENSG00000285670_0 (sequence is synthesized)
aggagagccaggctgcaatgagctatgatcacaccattgtactccagctggggcaacagagtgagaccttgtctctatccagaactc

SEQ ID NO: 1007625 - DNA, 120 bp, Artificial Sequence
  ENSG00000285670_1 (sequence is synthesized)
tgactttaactcacaggaaagcaagtaattagaatacgaggtgaggctctctagaaacctcaactcagaaacatcactcttttttgagacaatgtcttgtcttgctctgtcacccaggct

SEQ ID NO: 1007626 - DNA, 120 bp, Artificial Sequence
  ENSG00000285670_2 (sequence is synthesized)
ggagtgcagtggcaccgtcatacctcactgcagcctttaattcctgggctcaagcaatcctcctccctcagcctctcaaatagctgcatctacaggcgagcaccaccatcatgcttggtg

SEQ ID NO: 1007627 - DNA, 120 bp, Artificial Sequence
  ENSG00000285670_3 (sequence is synthesized)
ctgtacatatgagccaacacagttacatgactggatgcctcctccacatcatgttctcttgcctgctaactgggagaaaactgaagaagactccaggatcctgggagatagaggtggagc

SEQ ID NO: 1007628 - DNA, 120 bp, Artificial Sequence
  ENSG00000285670_4 (sequence is synthesized)
ccacagatggaataaaaccaagtcctggattcactgtatggaagaaatatacgcattaaccaggaacatctacagtagataattagaggagagtgatgatccacggagattaggcgggtt

SEQ ID NO: 1007629 - DNA, 120 bp, Artificial Sequence
  ENSG00000285670_5 (sequence is synthesized)
tatttgttatagcagctagtgttaccctattacagagtcagaggaaataatgtatataaaataagcccagtgtctcgcagataaccacgttcaataaatgtttttgtttgtccctttgaa

SEQ ID NO: 1007630 - DNA, 120 bp, Artificial Sequence
  ENSG00000285671_0 (sequence is synthesized)
ggagagtcaatgcctccaacccgctgcaaacaagcccgaagcaccattgtccctctgcatgaggcagtgaggtccctgcaagtcacggctgctgcaggagtgcacacaggatggtgaggt

SEQ ID NO: 1007631 - DNA, 120 bp, Artificial Sequence
  ENSG00000285671_1 (sequence is synthesized)
agtctggcccatgacccagggcctggtacagcagggtcttcgtttctccctggccatctgcactttcctgtccatgggctggaacagtgacagacagaagctgcctttccggacctcagc

SEQ ID NO: 1007632 - DNA, 120 bp, Artificial Sequence
  ENSG00000285671_2 (sequence is synthesized)
aaatgtgctggggcaaggccatggactagggcaccaggatccttctgtgcccccaacagattcctttcatgagctcagtgtctctgccacctgtctgagcagctcctaaattagcagctc

SEQ ID NO: 1007633 - DNA, 120 bp, Artificial Sequence
  ENSG00000285671_3 (sequence is synthesized)
aaacctcctccaccacacaaaagccagtctgtgcatcctgttcagacagtggctctttcccgaccatccttcttaaaaaaggcaccactaatccccatctcattggaaactttacctccc

SEQ ID NO: 1007634 - DNA, 120 bp, Artificial Sequence
  ENSG00000285671_4 (sequence is synthesized)
tctgctttttctccaaaattctcagcacagtctacgtaaactgttcattttatatatttatgtctccatcatcccctccccacactagactgggagctctgtgggggcacagacgtatct

SEQ ID NO: 1007635 - DNA, 120 bp, Artificial Sequence
  ENSG00000285671_5 (sequence is synthesized)
gttttgattaccaccatatcccacacatctaaagcagcgccagggcacacagtaggctcctgaatatctgctgaatgaatgaacacagaaatgaggaaggtatttcctgcaagcaacctc

SEQ ID NO: 1007636 - DNA, 120 bp, Artificial Sequence
  ENSG00000285671_6 (sequence is synthesized)
atctcagtcgtcacagaagaagctgtcgttgtgtagaaacccacgcacaagaaggtgctatcactgccccacccctgtccgtccctgctaccatcgagggtgtctttcattgttgcattt

SEQ ID NO: 1007637 - DNA, 120 bp, Artificial Sequence
  ENSG00000285671_7 (sequence is synthesized)
taaatgagaaaagacagtgtctaacatgaacagaaggagctctatcgtggatattttaggtcagggtgggtgggggagatcattttgagcagagagctttcctgagtgtccaggggccca

SEQ ID NO: 1007638 - DNA, 120 bp, Artificial Sequence
  ENSG00000285671_8 (sequence is synthesized)
cctccatcatctgccccagcctctagcagtaacagtgtgaaagagctctcacaggctctgttgcatgccagtatagaagtcatggggctgcatcgcacacctagaggtaaactcatttgc

SEQ ID NO: 1007639 - DNA, 120 bp, Artificial Sequence
  ENSG00000285671_9 (sequence is synthesized)
tgggtgtgatcagagcacctggccactgcagctcaacagatcccctgtcttgatgaaccagctctgaacccactgggcagttacattgttggctatttgcatgtgctttcttaggatttc

SEQ ID NO: 1007640 - DNA, 120 bp, Artificial Sequence
  ENSG00000285671_10 (sequence is synthesized)
tcctgccgctggtacctcatctacatacatctagaatgatcttcctataggacaaatgggatcacttcaatcatcttagttcactttaatgcttattgagcaaggtctggtggatataaa

SEQ ID NO: 1007641 - DNA, 85 bp, Artificial Sequence
  ENSG00000285671_11 (sequence is synthesized)
agggtgggggtgggggaaccagagacatccctattgtgatggttaatttgagtgtcatcttgattggattgaaggatacaaagta

SEQ ID NO: 1007642 - DNA, 80 bp, Artificial Sequence
  ENSG00000285671_12 (sequence is synthesized)
gggtgtgtctgactgggagaggcagatccaccttcaatccgggagggcaccatcgaatcagctgccagcacagctaggat

SEQ ID NO: 1007643 - DNA, 120 bp, Artificial Sequence
  ENSG00000285671_13 (sequence is synthesized)
atccgggagggcaccatcgaatcagctgccagcacagctaggataaaagcggacagaggaacgtggaagcactagactggctgagtcttccagtcttcatctttctcctgtgctggatgc

SEQ ID NO: 1007644 - DNA, 82 bp, Artificial Sequence
  ENSG00000285671_14 (sequence is synthesized)
cttccttgctcctcagcttgcagatggtctattgtgggacttcaccttgtgatcacgcatttatactattagtcctgtccct

SEQ ID NO: 1007645 - DNA, 120 bp, Artificial Sequence
  ENSG00000285671_15 (sequence is synthesized)
atgcatttatactattagtcctgtccctctagagaatcctaatacacctgtcttcaaaaaaagcagctctagaagtttgatgactccccacaattgcaggctcctcagtctgcaaacatg

SEQ ID NO: 1007646 - DNA, 120 bp, Artificial Sequence
  ENSG00000285671_16 (sequence is synthesized)
ctctttcaccggctgcccctgcttgtttctccagctcgtttccagccattttctcatgtgcattctccaccccagccatgcctgctaccaggaccactggaatattctgaacctcttccc

SEQ ID NO: 1007647 - DNA, 120 bp, Artificial Sequence
  ENSG00000285671_17 (sequence is synthesized)
cctcgcttcctgtttatctgtaatgtctcaatccaaacttcttctcctggctgcactgaatttttagtccggaataagttacattccttctctgatgtacagttgtcctggacaaaatgc

SEQ ID NO: 1007648 - DNA, 120 bp, Artificial Sequence
  ENSG00000285672_0 (sequence is synthesized)
ctgagtagctgaggcgagaagatccctttagccaaggcgttagaggccgtagtgagctatgatcatgccactgcactgtagcctaggtgacagagtgtgacctcatctcaaaaaaaagaa

SEQ ID NO: 1007649 - DNA, 120 bp, Artificial Sequence
  ENSG00000285672_1 (sequence is synthesized)
gaaaagatccagacatttaaggaaatttctgtcaggttacaggctgaccagagacaataaaaagaccaagaacctcaggaatacagacttcgcaaaaataacttggaaaattcactacac

SEQ ID NO: 1007650 - DNA, 120 bp, Artificial Sequence
  ENSG00000285672_2 (sequence is synthesized)
aaatgaactgcagccctcaacaagtaacagaagcaatccctgaggagagggataatctgatttccagagctactgcagtgtcatattcaaactgtacagtcctcaacacaaaattacaaa

SEQ ID NO: 1007651 - DNA, 120 bp, Artificial Sequence
  ENSG00000285672_3 (sequence is synthesized)
gcacacaaataaaatggaaaatatggctgacttatgggaagaaaagaatatgacagaaactgtcactgagggaccccagatattagaattactagtcaaagatgttcatcaactgtatta

SEQ ID NO: 1007652 - DNA, 120 bp, Artificial Sequence
  ENSG00000285672_4 (sequence is synthesized)
atgctcagagggctagcggaaaccacggaaaacggactaaaagaactaggagagcgatgtatgaacaaacagaaactgtcaacagagatagaaatgataacaaggaaccaaatagaaact

SEQ ID NO: 1007653 - DNA, 120 bp, Artificial Sequence
  ENSG00000285672_5 (sequence is synthesized)
cgggaactgaaaaacacaatagctgaaattaaagcattcactggaaggattcagcagcagacttgagcaggcagaattagcaaaggtgaagagaaggcagttgaacttatccagtctgag

SEQ ID NO: 1007654 - DNA, 120 bp, Artificial Sequence
  ENSG00000285672_6 (sequence is synthesized)
gagcacaagtaagaaaagaacagaacctacgggacccatgggacaccatcagaaataccaatgcacgcatataggaatcccaacaagagagaaaaagggaaaacaaaacaaaacaaaaaa

SEQ ID NO: 1007655 - DNA, 120 bp, Artificial Sequence
  ENSG00000285672_7 (sequence is synthesized)
acaaacaaaaaaccctaaagaaataatggccgggaaatgaggaagcacatcaaaagccaaaatgggccaaatgccaggcctcttgcaccaaacagttggccaagttgtgaatgcaaagga

SEQ ID NO: 1007656 - DNA, 120 bp, Artificial Sequence
  ENSG00000285672_8 (sequence is synthesized)
aaagttattgaaggaaattaaaagagcttctccattaaacacacacaaaaaagtgaaacagccttattgcggcggatagggagaaggtttgagtgatctggatacgagatcaaatgagat

SEQ ID NO: 1007657 - DNA, 120 bp, Artificial Sequence
  ENSG00000285675_0 (sequence is synthesized)
agaggtggtgaggcctacgtggtgaaggtctgaggcctcctgccaacagctgatgactgagctgctgcggaagctgaccctccacactccctaggctcggtggccagcccctttgctggg

SEQ ID NO: 1007658 - DNA, 120 bp, Artificial Sequence
  ENSG00000285675_1 (sequence is synthesized)
gtcagagccacattcccatcttgctccaggatggatcgccggttccttgaatccaacacatgcaacactgagcatgtcacatcctccaggcctgctccttctcatctactctggctcaaa

SEQ ID NO: 1007659 - DNA, 120 bp, Artificial Sequence
  ENSG00000285675_2 (sequence is synthesized)
cctgaggacccgtcagaccctctctcccactcgtgccacatccagacagcaccgggccctgctgacattctgctctctgtgtcccttacatttgtcacctgatttcgactctcactgcaa

SEQ ID NO: 1007660 - DNA, 120 bp, Artificial Sequence
  ENSG00000285675_3 (sequence is synthesized)
ccggcactcatctgtacctgggaagggccacctcgcctctgccggtaacccaacaaggccccagctggcgtcccagcttccagaaaccatctaccacagggcaaggctgtgctttaatca

SEQ ID NO: 1007661 - DNA, 120 bp, Artificial Sequence
  ENSG00000285675_4 (sequence is synthesized)
tcttggtaacccaagtgctgatcagcgaaccaaatacacacagaaataccttgcgccctggttgcttttctgtgctagaatcactccagacttcaatcatcagcctgctacaagccactc

SEQ ID NO: 1007662 - DNA, 120 bp, Artificial Sequence
  ENSG00000285675_5 (sequence is synthesized)
ccaagcctgggacttaatcgccagcagaaagcacgtccacatgtcctctgttacctcctctagatgctaaggaatgtgactccaagaagattcaaatagcaggatcctacagcgttctgc

SEQ ID NO: 1007663 - DNA, 120 bp, Artificial Sequence
  ENSG00000285675_6 (sequence is synthesized)
catcatcttattcaacaaaagtcttctgtcggacaaagacccattcatatttcattatgaagataagcattttatggacaaattatacagcaatattaaaatatacctgaaacaatatcc

SEQ ID NO: 1007664 - DNA, 120 bp, Artificial Sequence
  ENSG00000285675_7 (sequence is synthesized)
cagataatggagttaatggctttaattcgctatcacatgtttagagagttcttgtgtagacacaagctatgaactatgagaaggcagaagaaaagtctatgcagatatacagaaggctaa

SEQ ID NO: 1007665 - DNA, 120 bp, Artificial Sequence
  ENSG00000285675_8 (sequence is synthesized)
agacataccctagatccatcctgctcacaggggattccacgtcccagggaaggcggggaggggtccctcctcctaagtctccagaacctgccttcatgaacgctgagatcatctggaggg

SEQ ID NO: 1007666 - DNA, 120 bp, Artificial Sequence
  ENSG00000285675_9 (sequence is synthesized)
gaccagaccagcccgggctggaccaggaaagccaagaattgttgccttcccatattccacattcccatatgccttcccaatgtcctcttcccaaagaacccctgtatcctacatgttcta

SEQ ID NO: 1007667 - DNA, 120 bp, Artificial Sequence
  ENSG00000285675_10 (sequence is synthesized)
gcacaagcctagagacaaattctgccttgggtgggaattggggtagcttagaaaagagtgccacattggaggtaacagaggagctggttttgagggacgtgtagaagtccaccagctgtt

SEQ ID NO: 1007668 - DNA, 120 bp, Artificial Sequence
  ENSG00000285675_11 (sequence is synthesized)
gaagatgaggccaggcgtcctcagaggagagaacagaaagtgccaaggccaggggcagcggtaaggagcacacggcacactggggaagagtcaaatgctggagcccagggtgtgggcgga

SEQ ID NO: 1007669 - DNA, 120 bp, Artificial Sequence
  ENSG00000285675_12 (sequence is synthesized)
gcggtgggagatgaggacacccagatggcttggggtcaggttctgaagaatgttgggtactaggctcgagtttggactctatggtgggggaaatagagagcccctgacagtctttaaaga

SEQ ID NO: 1007670 - DNA, 120 bp, Artificial Sequence
  ENSG00000285675_13 (sequence is synthesized)
ggggagagatggatcaggcctgtagcatttcctcagggaggttataaagcagatacagaggtacagacacatcttctgtgcttatttatgtcatggggcctttgcacatagttggagcca

SEQ ID NO: 1007671 - DNA, 120 bp, Artificial Sequence
  ENSG00000285675_14 (sequence is synthesized)
tgatttacatagctgtgcttccccatagcacttcccatggttcactgcacgcagctaacactcagcctatgtttgtggaataaatgaatgaaagagtcattattatcaagtctctcctac

SEQ ID NO: 1007672 - DNA, 120 bp, Artificial Sequence
  ENSG00000285675_15 (sequence is synthesized)
aatcaaggatatactccagtgactgattatagctgccaaggctatatgggcaatgaactaaaaacattactccaacatgagaaagaggaatcagaaaagccacggtgaatgctccagctc

SEQ ID NO: 1007673 - DNA, 120 bp, Artificial Sequence
  ENSG00000285675_16 (sequence is synthesized)
tgccaaccaccatcagcccaaggggagaatgaacacccagggaaaagaaaatcgccaaaaccttacagtgaaatcctatcaacacctttgatttggtgtctgtatctttcctgactgatg

SEQ ID NO: 1007674 - DNA, 120 bp, Artificial Sequence
  ENSG00000285676_0 (sequence is synthesized)
agtctggtcagaggctcagggagtggggctggcaggctttggtctctgctggtctcccagcctgcggctgatgcacgtctgttgaattttgcaacagtccccatccctcaaggaggtgaa

SEQ ID NO: 1007675 - DNA, 120 bp, Artificial Sequence
  ENSG00000285676_1 (sequence is synthesized)
caagctgttgttgctgtttatcaagggagagcagatacatcagtgtcttctgacagaaaaagtgatcgccatcaggatggtgatgaccacgatgatccctaggatgacgagcaggatgcg

SEQ ID NO: 1007676 - DNA, 120 bp, Artificial Sequence
  ENSG00000285676_2 (sequence is synthesized)
gttctggatgattctaggagacagcaaaggagaaaaaacacacacagataagtggaaggccttcccacaaacgccgtccgaggccaggtttttgcctcttggttttcaaaagctgggaac

SEQ ID NO: 1007677 - DNA, 120 bp, Artificial Sequence
  ENSG00000285676_3 (sequence is synthesized)
ctcttctgacctcttggtcacaacacttttcactgaagaatcaggagcttcttccagccaatgctcctgtgtattgatgactgatgatatcatgcgtgaggcctcaccaggcctagccag

SEQ ID NO: 1007678 - DNA, 120 bp, Artificial Sequence
  ENSG00000285676_4 (sequence is synthesized)
gcatccgcttcctgtgtacagcagatctacagtggctgcgttcgtttccctattccaaacagctgatgctaccccagctccaggggtacagctgtgactgaggctgagatggtcagtaca

SEQ ID NO: 1007679 - DNA, 120 bp, Artificial Sequence
  ENSG00000285676_5 (sequence is synthesized)
cttgtgacttaagtccatccaacagagtggatctcagcaactttgcttgaaatgcggggtcacctggacagtttggtgtgtggatgtcaggctggatccactgcaggccttttgattcat

SEQ ID NO: 1007680 - DNA, 120 bp, Artificial Sequence
  ENSG00000285676_6 (sequence is synthesized)
aggccttttgattcattgagggaagccaacctaagaaagaagctgacccacagtgggcagagaaatagaaccccagtcctgaagacagagaactttaatttttaactttttttttttttt

SEQ ID NO: 1007681 - DNA, 120 bp, Artificial Sequence
  ENSG00000285676_7 (sequence is synthesized)
gattacaagtgtgagccaccatgccaggccgacagtgaacatttttttttttttaaatcaaaccaccctttctttggactttaacttatatgagaaaataaactgactttattttccaaa

SEQ ID NO: 1007682 - DNA, 120 bp, Artificial Sequence
  ENSG00000285677_0 (sequence is synthesized)
gcttccgggttgtctcctgagaggcattatcatctgtacttagttcctgaatttcaaggcatccccagccccctaatctaaccacacacccctctactaagtcagccacaggcatctcag

SEQ ID NO: 1007683 - DNA, 120 bp, Artificial Sequence
  ENSG00000285677_1 (sequence is synthesized)
acactctccctaaatcatccccatgtccttgatgtactaggttcgtaagtcagtcaggaattttgctgctctgggcttccaagtgtgaccaccttttttttttttttaattggttagtaa

SEQ ID NO: 1007684 - DNA, 120 bp, Artificial Sequence
  ENSG00000285677_2 (sequence is synthesized)
agtgaacttagggaccctgccctcttcctttctgctggacctgtagctatatgcttattctatcaggggcttgggacccagactagccctttatttatggcggatagagaagaaaagggt

SEQ ID NO: 1007685 - DNA, 120 bp, Artificial Sequence
  ENSG00000285677_3 (sequence is synthesized)
caagaccaaccagtcttcttctacctcctgccagtttcctgggcatgtgttctgggtgctatgccagatgggtgtggcaagagagggtctgagggtaaggacccaggaaagggaagaggg

SEQ ID NO: 1007686 - DNA, 120 bp, Artificial Sequence
  ENSG00000285677_4 (sequence is synthesized)
aaactcaccagaactgggagatatcccaaagatgggggacctgtttctgctgtcagttggtgacttcagtgtgggaaaaagtcctgcttcaggtggcccctttaagaacccagtccagca

SEQ ID NO: 1007687 - DNA, 120 bp, Artificial Sequence
  ENSG00000285677_5 (sequence is synthesized)
ctttggtgggggtcccctctctcttggtccttttaagggagctgttcatggtccagaagtttgcataagagaaaggggggactcattccagtccagatcagctgcctcttcatccactgt

SEQ ID NO: 1007688 - DNA, 120 bp, Artificial Sequence
  ENSG00000285677_6 (sequence is synthesized)
gcattccttgaacacagggtggctacaaaattcagacttgtgtagaaacaggtacaagaagccatgctggggtcaccctgaggagagagtatgtgggaacctgacaccccagggaacgtt

SEQ ID NO: 1007689 - DNA, 120 bp, Artificial Sequence
  ENSG00000285677_7 (sequence is synthesized)
tacccttcctccaacagggtcagggagaaactgaggaggggagaaagcggacatctctgggaaagaaacagctgcagctggaaacctacttcacagcagggtcctcagagagatgacagg

SEQ ID NO: 1007690 - DNA, 120 bp, Artificial Sequence
  ENSG00000285677_8 (sequence is synthesized)
aggacagccacacatatccagcctatttgaagtacccctgctgctttgcaggcaaggctctccctgccccccgacccttcatcaccaagtgccaagaggatacggggcaatccggtccca

SEQ ID NO: 1007691 - DNA, 120 bp, Artificial Sequence
  ENSG00000285677_9 (sequence is synthesized)
tttgacattgagcattccagacacaatgccaaagtcttctggagggaaggaatcatcagatagttccacgtctaatgcagcactagaaaatggatgaaacaaaaaggatatcatactctg

SEQ ID NO: 1007692 - DNA, 120 bp, Artificial Sequence
  ENSG00000285677_10 (sequence is synthesized)
aagatggaatggcgacgtcagtgaggaggccagaaacaggggtctcctcgacctcacccaagaggcagcagcaggaagaagtagggctccaactaaaagcgggaaagtagccgggcacgg

SEQ ID NO: 1007693 - DNA, 120 bp, Artificial Sequence
  ENSG00000285677_11 (sequence is synthesized)
tggctcacacctgtaatctcagcacattgagaggctgaggaagaagatcccagccttgttcagacgaagaggcggaagcagaacaaggtttgcattctccagatgaggaaaaatgaggtg

SEQ ID NO: 1007694 - DNA, 120 bp, Artificial Sequence
  ENSG00000285677_12 (sequence is synthesized)
ggacacgaggctctcgcctctcccgttcggacgccctaagcctccggacttaccgttggcatcccaaacgcctttccggagccacaaagacaggaagagagcgtcagcatccgaaagacc

SEQ ID NO: 1007695 - DNA, 120 bp, Artificial Sequence
  ENSG00000285677_13 (sequence is synthesized)
ggaaataagcactggccggaaaccgtggtgttccgcccaatgccttgtgggagttgtagttcttggagaagccccacctttccctttgtagtgcccgcctgcctgagaggctgtgagcgc

SEQ ID NO: 1007696 - DNA, 120 bp, Artificial Sequence
  ENSG00000285677_14 (sequence is synthesized)
tcctaagaggaagaagatcccagccttgttcagacgaagaggcggaagcagaacaaggtttgcattctccagatgaggaaaaatgaggtgaaagaggaagacaaggaggacaaggaggat

SEQ ID NO: 1007697 - DNA, 120 bp, Artificial Sequence
  ENSG00000285677_15 (sequence is synthesized)
caatcacctaggacaggacagaggcaatgcccgtactcaagaatccgccaagtgaggcacaaggagcacctgagcatcttggaaagtggcttgagcttatccaccaatgaaaccaagttg

SEQ ID NO: 1007698 - DNA, 120 bp, Artificial Sequence
  ENSG00000285677_16 (sequence is synthesized)
tctgtccatgtttttgccaatacttatgtagctgctgccacaggaagcagaagtcagtggaggaaaacaaggcatccgactctggagcaaggaggagcccgggtgagactgactcagctg

SEQ ID NO: 1007699 - DNA, 120 bp, Artificial Sequence
  ENSG00000285677_17 (sequence is synthesized)
tgagcttcactaatgggtgatggtccagatctccacggggctccaaggaaagctctgggcagaagccagaagagcagagtgtaatccttccgcttagaaataaagcacattttatttttg

SEQ ID NO: 1007700 - DNA, 120 bp, Artificial Sequence
  ENSG00000285677_18 (sequence is synthesized)
gaagcttggggggcttcaggggaagaaaatccctcctttaacaaatttgctgtatccttgacatccatcaacagcttcattgatgacttgggctaccaagggagtcaggagctgaccagt

SEQ ID NO: 1007701 - DNA, 120 bp, Artificial Sequence
  ENSG00000256643_0 (sequence is synthesized)
aattgaaacacttttagcttagaaaagagcagagcagagggtaactagctcagaatttttagttggtggcatgtatttatgagatggaaaagtctatgtctgagaggggacagaggctta

SEQ ID NO: 1007702 - DNA, 120 bp, Artificial Sequence
  ENSG00000256643_1 (sequence is synthesized)
tcttctagcgtggaaaggagaaggggatggaagaatcactgaagaggagaatacagaccaatctcactcccgtgaccccacccagaagtgattcaatgcaagaggacagcttggatctcc

SEQ ID NO: 1007703 - DNA, 120 bp, Artificial Sequence
  ENSG00000256643_2 (sequence is synthesized)
cactgtctttgaaaagctcctgcttatgagccttggatgagactgatttgagtgttaactccacctcccacgtggcgtggctggcctcctgtctgtgaaactctttctttattgcagtgt

SEQ ID NO: 1007704 - DNA, 120 bp, Artificial Sequence
  ENSG00000256643_3 (sequence is synthesized)
tgtggtctttatttgcgcagtgggcaggaagaaccccttgggtagttacaaaaggtcacctggaaatgaagtgacaactaattagaattgaagaagtgtgggtctgctgtctcattatgg

SEQ ID NO: 1007705 - DNA, 120 bp, Artificial Sequence
  ENSG00000263708_0 (sequence is synthesized)
ggacaattagaaattacttttcttaaactaaagggttttttcctttctataaatattcaaccttctgtgtttgaaatagaattctcaggcaaggagaggtggctaaactatgatgttgcg

SEQ ID NO: 1007706 - DNA, 120 bp, Artificial Sequence
  ENSG00000263708_1 (sequence is synthesized)
gcattctcaattaatggtattttcaacccacgatggatttattgggatgtaactgcattgtaagttgaggagcacctctatatgcacttgatttgcttgtatggtgatgtatgcgtagtg

SEQ ID NO: 1007707 - DNA, 120 bp, Artificial Sequence
  ENSG00000263709_0 (sequence is synthesized)
cagccctagttggagccagcagcccggaggacttcgggtatcagaaccaggctcaggggctgacagggagcagtgttcatcaaggtgtcctgacgtcccaccctgattgcaacaaggctc

SEQ ID NO: 1007708 - DNA, 120 bp, Artificial Sequence
  ENSG00000263709_1 (sequence is synthesized)
gccggggcagcctcagtcctgctgccagagaagagctccatgggaagaacctgccgccctgtgtggaccctgcttgccccagggcctggcagtgagaggtgctggggagggagggaggaa

SEQ ID NO: 1007709 - DNA, 120 bp, Artificial Sequence
  ENSG00000274825_0 (sequence is synthesized)
tggcagagtttttcaaagtgagatctgaggaccacctgcatcagtcttggggtgcttgggtgcttccatttaaaatgctgattactggtttcactcccaggggagcggggtatgagtgtg

SEQ ID NO: 1007710 - DNA, 120 bp, Artificial Sequence
  ENSG00000274825_1 (sequence is synthesized)
gcagcctatgtagttcaaaaatatttgttattcctccctgggagaaaattatatccctctgtctactgtcagatttggccatcgcagacttagctgtgaatatttcagcatatatatcta

SEQ ID NO: 1007711 - DNA, 120 bp, Artificial Sequence
  ENSG00000274825_2 (sequence is synthesized)
ccatcctgggtgacagtgagactctgtttcaaaacaacaacaaaaaagaaaaccactttaccactgtcacacctaaacaactttgatacaaacttatcaaataaatattcagtgtttaaa

SEQ ID NO: 1007712 - DNA, 120 bp, Artificial Sequence
  ENSG00000274827_0 (sequence is synthesized)
ctgatacacagacactaaaaagggaaagggtttagatgagaagctctgctgtgcaatcaagaatctcagccactcatttctgtaggggctgcaggagctccctgtaaagagaggttatgg

SEQ ID NO: 1007713 - DNA, 120 bp, Artificial Sequence
  ENSG00000274827_1 (sequence is synthesized)
accactgatccacttccagtcactatccatgagtttttatttccaaatacatgaaatcatatgaatttctggtttttcctgttggagcccaaggagcaagggcagaatgaggaacatgat

SEQ ID NO: 1007714 - DNA, 85 bp, Artificial Sequence
  ENSG00000274827_2 (sequence is synthesized)
ccacctctgcaggggtgcgtctggaggaggtggaccagccaccaaccttacccagtcaaggaagtggatggccatgttcccacaa

SEQ ID NO: 1007715 - DNA, 120 bp, Artificial Sequence
  ENSG00000274827_3 (sequence is synthesized)
aggccttaggaaaagcagatggcccttggccctacctttttgttagaagaactgatgttccatgtcctgcagcgagtgaggttggtggctgtgcccccagctcctggcacaccctcgcag

SEQ ID NO: 1007716 - DNA, 120 bp, Artificial Sequence
  ENSG00000274827_4 (sequence is synthesized)
aggtgactggttgctctttgagccctcttagccttgcccagcatgcacaagcctcagtgctactactgtgctacaagtggagccatataggggaaacgagcagccatctcaggagcaagg

SEQ ID NO: 1007717 - DNA, 120 bp, Artificial Sequence
  ENSG00000274827_5 (sequence is synthesized)
tgtatgctgcctttgggggctccagtccttgcctcaagggtcttatgtcactgtgggcttcttggttgccaagaggcagaccataggccgtcttgagaaggactttatgttcaagtgcag

SEQ ID NO: 1007718 - DNA, 120 bp, Artificial Sequence
  ENSG00000274827_6 (sequence is synthesized)
aaagcagccaggattaccaccctcgggactctgccttctgtggccctggccaaacttagaatttggccgtagacaggacaagctcacttggagtagcgtgtctgtagctggggtctgtgc

SEQ ID NO: 1007719 - DNA, 120 bp, Artificial Sequence
  ENSG00000274827_7 (sequence is synthesized)
aaccagccacctctgcaagggtgcacctagagcaggtggagcagccaccagctcacccactccaggaagccggggtagccaggttcccaaagcctgagtgggtgccacctaatggctgaa

SEQ ID NO: 1007720 - DNA, 120 bp, Artificial Sequence
  ENSG00000274827_8 (sequence is synthesized)
aaagcctgagtgggtgccacctaatggctgaagaaacagaggccttaggaaaaccagatggcactgtggccctacctttatggtagaagagctgatttagcctgactggcagcgtgtgag

SEQ ID NO: 1007721 - DNA, 120 bp, Artificial Sequence
  ENSG00000274827_9 (sequence is synthesized)
gttgatggctggtctgcctgctgctggcacatccgtgcaaagatagctggttgccctttgagccagcttgcccttgcccagcatgcacaagcctcagtgcaacaactgtgctgcaaatgg

SEQ ID NO: 1007722 - DNA, 120 bp, Artificial Sequence
  ENSG00000274827_10 (sequence is synthesized)
ggccatatagaggaaaggagcagctggctctggaacatggtgtgcactccctttgggccttcagtccatgtctcatgggtcgtatgacactgcgggcttgttggttgccaagaggcagac

SEQ ID NO: 1007723 - DNA, 120 bp, Artificial Sequence
  ENSG00000274827_11 (sequence is synthesized)
cacaggtcatcttgaggaggactttatgttccagtccagaaagcagccagtggtaccacccaggggacttgtgcttctgtggcccaggccagacgtagaatttgacaaagtcaggacggt

SEQ ID NO: 1007724 - DNA, 120 bp, Artificial Sequence
  ENSG00000274827_12 (sequence is synthesized)
gcatgccaggcaaggccaagctggcttaaagagcaagcagccacctctgttaagggtgtgcctggagcaggtggagcagccaccaacctcacccactgaaagaagcagggatggccaggt

SEQ ID NO: 1007725 - DNA, 120 bp, Artificial Sequence
  ENSG00000274827_13 (sequence is synthesized)
gttaagggtgtgcctggagcaggtggagcagccaccaacctcacccactgaaagaagcagggatggccaggttccaacatcctgggtggctgccagctgatggagcagaggcctgaggaa

SEQ ID NO: 1007726 - DNA, 83 bp, Artificial Sequence
  ENSG00000274827_14 (sequence is synthesized)
ggaaaagcagatggcactgctttgtggtgctcttctttgtctctcttgatctttttcagttaatcttttttgctttccatttg

SEQ ID NO: 1007727 - DNA, 120 bp, Artificial Sequence
  ENSG00000274827_15 (sequence is synthesized)
tagtattgctacaggtgaaatttatcctgtcatgatgttgctagctttttatttttcccattagtttgcagtttctttatagtgtcaatggtctttacaattcgatatgtttttgtagtg

SEQ ID NO: 1007728 - DNA, 120 bp, Artificial Sequence
  ENSG00000274827_16 (sequence is synthesized)
gctggtactggtttttcctttctacgtttagtgtctccttcaggagctcttgtaacacaagaatgtggatttatttcttgtaaggtaaatatgtggatttatttcttgggactgtattct

SEQ ID NO: 1007729 - DNA, 89 bp, Artificial Sequence
  ENSG00000274827_17 (sequence is synthesized)
ggaaaggcttgtggcattagaatccttatttataggattattttgtgtttttttgagatatggtctttgtcatcgaggcagaagtgccg

SEQ ID NO: 1007730 - DNA, 120 bp, Artificial Sequence
  ENSG00000274827_18 (sequence is synthesized)
atcgaggcagaagtgccgtggtttgatcataattcaccacagccctgaactcttgagtgcaagccatccttttgccttaatctcccaaccagttggatctacaagcataaggcatcatgc

SEQ ID NO: 1007731 - DNA, 120 bp, Artificial Sequence
  ENSG00000274827_19 (sequence is synthesized)
tttttttttttttttttttttttgtcgagattatggtatcactatgttgctctggctgatctcaaatgtttgacctcaagggatctttctgccacagcctccttaagtgctaggattata

SEQ ID NO: 1007732 - DNA, 120 bp, Artificial Sequence
  ENSG00000274827_20 (sequence is synthesized)
ccttaagtgctaggattatatgcatgatacaccatgcctattgtagagtattacattattttcaaagtcttattgtaagagccatttattgcctttggcctaaataactcaatataatat

SEQ ID NO: 1007733 - DNA, 120 bp, Artificial Sequence
  ENSG00000274827_21 (sequence is synthesized)
ctctgaaacttttttttgacaaattttggggcatgatgatgagagaagggggtttgaaactttctaataagagttaacttagagccatttaagaaaggaaaaaacacaaattatcagaaa

SEQ ID NO: 1007734 - DNA, 120 bp, Artificial Sequence
  ENSG00000274827_22 (sequence is synthesized)
aacaaaagtaagatcaagtgcaaaagttctgtggcaaagatgatgagagtaaagaatatatgtttgtgactcatggtggcttttactttgttcttgcatttctgagtacgggttaacatt

SEQ ID NO: 1007735 - DNA, 120 bp, Artificial Sequence
  ENSG00000274827_23 (sequence is synthesized)
gcaagtaaatgtatttcaaaatttgttattggttttgtatgagattattctcagcctacttcattatcaagctatattattttattaatgtagttcgatgatcttacagcaaagctgaaa

SEQ ID NO: 1007736 - DNA, 120 bp, Artificial Sequence
  ENSG00000274827_24 (sequence is synthesized)
tgtagttcgatgatcttacagcaaagctgaaagctgtatcttcaaaatatgtctatttgactaaaaagaagttattcaacaggagttattatctatgaaaaaaatacaacaggaatataa

SEQ ID NO: 1007737 - DNA, 120 bp, Artificial Sequence
  ENSG00000274827_25 (sequence is synthesized)
aaaatacaacaggaatataaaaaacttgaagaggataagaagatgttggaaaaagtaatattaaatcttaaaaaacatatggaaagtacacattggtgaagacacattggtgaagtacaa

SEQ ID NO: 1007738 - DNA, 120 bp, Artificial Sequence
  ENSG00000274827_26 (sequence is synthesized)
gatctagaagaaagggcaattcaggcaatagaaaaattagtagaaatccctttaaaggttagtttgtaaaatcaggtaagtttatttataatttgctttcatttatttcactgcaaatta

SEQ ID NO: 1007739 - DNA, 120 bp, Artificial Sequence
  ENSG00000274827_27 (sequence is synthesized)
atatatatatatattgtgcttcctctgcctgtcttacagcaatttgccttgcagagttctaggaaaaaggtggcatgtgtttttactttcaaatatttaaatttccatcattctaacaaa

SEQ ID NO: 1007740 - DNA, 120 bp, Artificial Sequence
  ENSG00000274827_28 (sequence is synthesized)
atcaatttttcagagtaatgattctcactgtggagtcatttgattattaagacccgttggcataagattacatcctctgactataaaaatcctggaagaaaacctaggaaatattcgtct

SEQ ID NO: 1007741 - DNA, 120 bp, Artificial Sequence
  ENSG00000274827_29 (sequence is synthesized)
ggactttgcacttggcaatgaatttatgggtaaccactgatccacttccagtcactatccatgagtttttatttccaaatacatgaaatcatatgagttgaaactttcttttgattgagc

SEQ ID NO: 1007742 - DNA, 120 bp, Artificial Sequence
  ENSG00000274827_30 (sequence is synthesized)
aatctgcaagtggatatttggaaccctttgaggcctatgctgaaaaaagaaatatcttcactacatgatgaccaccagcagcagctggggaaaccagcaccctgtggaattccatacggt

SEQ ID NO: 1007743 - DNA, 120 bp, Artificial Sequence
  ENSG00000274827_31 (sequence is synthesized)
gcaccctgtggaattccatacggtgcatagaatacatcctcccttcagtcggcttgggtcaacttaggtcatgggccacctggctgatagcagtttccacagaaatgcttcaagatgaaa

SEQ ID NO: 1007744 - DNA, 120 bp, Artificial Sequence
  ENSG00000274827_32 (sequence is synthesized)
gtggatgaccgggccaccctccaccactgccctgtaagaccatgggacacacaggccaccagttcttttcatgtggtcatcccctgttagatgggagaaaatacacctgcctcatttttg

SEQ ID NO: 1007745 - DNA, 120 bp, Artificial Sequence
  ENSG00000274827_33 (sequence is synthesized)
taccttctgtgtgaacattccacggcagagcttcactaaatgtgtgatgaagaattgaatgaatgaatgaatatgagagaaaatgaataaatggttcagatcctgggctggaaggctgtg

SEQ ID NO: 1007746 - DNA, 120 bp, Artificial Sequence
  ENSG00000274827_34 (sequence is synthesized)
tatgaggatggtgggtagaggagggtctgtttttcttgcctttaagtcactaattgtcactttggggcaggagcacaggctttgaatgcagaccgactggactttaattctggctttact

SEQ ID NO: 1007747 - DNA, 72 bp, Artificial Sequence
  ENSG00000274827_35 (sequence is synthesized)
tttgaatgcagaccgactggactttaattctggctttactagttgtgattgtgtgaccttgtgcaaataaga

SEQ ID NO: 1007748 - DNA, 120 bp, Artificial Sequence
  ENSG00000274828_0 (sequence is synthesized)
atgccttgcgcgccgcgggcccagagacgtgaggctgtcggcgtcctggtggccccgcctcgtgtccccccccggaccccacgccgcgggagcttgggggttgcggtcttctcttcctcc

SEQ ID NO: 1007749 - DNA, 120 bp, Artificial Sequence
  ENSG00000274828_1 (sequence is synthesized)
gacctcaccttcgatgcggaagcgcaggggcaggtgcgccgccctcggcccgcgcaggcggtgggcccgtctggggcaaggcgcccggaagcgcctggttggttcagaaaatcggaccgc

SEQ ID NO: 1007750 - DNA, 120 bp, Artificial Sequence
  ENSG00000274828_2 (sequence is synthesized)
agcgggagggcgggcaccggcgcgtggtctcagtggccccaggcgaaccctgatgagcagcagccgcaagtggcttactaaaggagccactttctacgtttgtctggaatttacgtgaat

SEQ ID NO: 1007751 - DNA, 120 bp, Artificial Sequence
  ENSG00000274828_3 (sequence is synthesized)
taagctggcgggcgggcggccaggcctgtagtctcagcactttgggaggctcagcacttcgggaggctgtggcgggcggatcacctgagcctgggagttggagaccagcctgcgcaacgt

SEQ ID NO: 1007752 - DNA, 120 bp, Artificial Sequence
  ENSG00000274828_4 (sequence is synthesized)
agcaagaccctatctctaaaacagattcattaatacttagccaggcgcggtggctgaggtcccagctactcggcaggcccaggctggcctgagccagaccgctctggactgttttaattt

SEQ ID NO: 1007753 - DNA, 120 bp, Artificial Sequence
  ENSG00000274828_5 (sequence is synthesized)
tttcagccttaatacctgccagaattttttttttactatgtatctttgtccttacgtatataaattttatatacaattgagattatcctgtatttgcttttcccccctcacttttatatg

SEQ ID NO: 1007754 - DNA, 120 bp, Artificial Sequence
  ENSG00000274828_6 (sequence is synthesized)
gtgacttttctcatgttaggctgaatactaacattttggaaactgtcggcctgaaaacgagcggagacacagtttctctaagtagagagtttatttgggccacacttgagcacaaattca

SEQ ID NO: 1007755 - DNA, 120 bp, Artificial Sequence
  ENSG00000274828_7 (sequence is synthesized)
aggcgccctgaatgtgtactccgattagcagttaacagtggattttaaaggcaaaaaagggggccagggagtggactaataggaacttgtttgtgaggaattctcactggtttacagaaa

SEQ ID NO: 1007756 - DNA, 120 bp, Artificial Sequence
  ENSG00000274828_8 (sequence is synthesized)
cagctattgagtgtgggtatagtgtccattgtggcgtcattaggttaatttatagctgtttgtggcgctgttgccaccagtagcagtttaaagaggtgaacacaggtcaaggggtagtag

SEQ ID NO: 1007757 - DNA, 120 bp, Artificial Sequence
  ENSG00000274828_9 (sequence is synthesized)
ggcgcgattgtcgcctcatttgaatgtctctctcggcctgataattaaaagaactcgcgttcctcagataaaaattctcttttctcaaaaccatttaaatgtggtaattagaatggccca

SEQ ID NO: 1007758 - DNA, 120 bp, Artificial Sequence
  ENSG00000274828_10 (sequence is synthesized)
gaaggggcacagtgccttttagccctcgccattacttgctcttaggagtgcattttttgtagctgtgggtttttgactatctctgctgctttctccagcccctaccctcgtgactacaag

SEQ ID NO: 1007759 - DNA, 120 bp, Artificial Sequence
  ENSG00000274828_11 (sequence is synthesized)
ggaaaacgtgcggtgctcacgagagagcctttatgggatttttaaaaaatggggattgtgggaaaatggctccagcagtcacagtttttcagtttctcacaatcccataaaaacagagca

SEQ ID NO: 1007760 - DNA, 120 bp, Artificial Sequence
  ENSG00000274828_12 (sequence is synthesized)
accaggtaacaaaactaaagcatgggcaacatttacagaccactggatggtgaagaattcccatgaacccctggttcacactgtaaggacacactactcagcatgggcaacatttacaga

SEQ ID NO: 1007761 - DNA, 120 bp, Artificial Sequence
  ENSG00000274828_13 (sequence is synthesized)
ctactggatggtgaagaattcccatgaacccctggttcacactgtaaggacagactactcagcatgggcaacatttacagaccactggatgatgaagaattcccatgaactcctggttcc

SEQ ID NO: 1007762 - DNA, 120 bp, Artificial Sequence
  ENSG00000274828_14 (sequence is synthesized)
aactgtaaggacacactactcagctgtagcctgaagccgcctccttacatactgtaagtttagcctataggtttctccatacgtagtgaacagtcatctaattggatgtgtggacactgt

SEQ ID NO: 1007763 - DNA, 120 bp, Artificial Sequence
  ENSG00000274828_15 (sequence is synthesized)
aacctactcttgaatcagtcacaggcagcagcacttcaaactctgtttcaataagccagacacgagctgtagccaccctgctgtttgcaggcctcacctctgccttctgtgcctcactcc

SEQ ID NO: 1007764 - DNA, 120 bp, Artificial Sequence
  ENSG00000274828_16 (sequence is synthesized)
cttttctgtccgtaagtctttggccacacagtggcactggagtctctctgagcctattctggtttgaggggttccctgattcctgaatcattctttgctcaattaaactctgtaaaattt

SEQ ID NO: 1007765 - DNA, 120 bp, Artificial Sequence
  ENSG00000237837_0 (sequence is synthesized)
aatttaaaataaaagtttaaaaaaaaacaaagtatttcaagataaatgtgttcttattgaataaacaataattttgtgaaaaaagaggctcaattgaaggtggcagaagagctcccaaat

SEQ ID NO: 1007766 - DNA, 120 bp, Artificial Sequence
  ENSG00000237837_1 (sequence is synthesized)
agcagtcacctaaacaagttagtatacttcttgctcacacaaaattagacagaggcttggccatccgggtttggtgtggcagctgtgcctcatgagccactgggactccacactccccca

SEQ ID NO: 1007767 - DNA, 120 bp, Artificial Sequence
  ENSG00000237837_2 (sequence is synthesized)
ttataaaggagaggaagggggtggagtgtgaggttggtaaaagcagcggaagctggcttggcatcctggaggagcaggaagagagttcatgttccaccttcccctcttccccgctattcc

SEQ ID NO: 1007768 - DNA, 120 bp, Artificial Sequence
  ENSG00000237837_3 (sequence is synthesized)
acagggtctggaggagaagagcagaggggtctctggttcccaggaaagggcctgggccagactttctgatggagacagctgggtggtgagtgtccacgcagacaggactgaggcttgcct

SEQ ID NO: 1007769 - DNA, 120 bp, Artificial Sequence
  ENSG00000237836_0 (sequence is synthesized)
cccttttgcaacaaggaagcagaaaagacaaaagctatttgccagcctggtgcgggaatcaacagaatagagagatggttctgctgcaatttccatcaagggtggccaagcctccagtct

SEQ ID NO: 1007770 - DNA, 120 bp, Artificial Sequence
  ENSG00000237836_1 (sequence is synthesized)
tcttgtccagaagtaagtggcatcaaccaactctgccaaactgcatttcctgcctcctgatctggggtcttttccttttcttttttcacacagggagtatttccatcctctctgtccagg

SEQ ID NO: 1007771 - DNA, 120 bp, Artificial Sequence
  ENSG00000237836_2 (sequence is synthesized)
tggagccccacccctcgagtccctgggcctgtggaagagtccgtgagaccagatgctacagcaaatgttccagagaaatgaacctagaaaatgatcccggggtgctccttgcgggggaac

SEQ ID NO: 1007772 - DNA, 120 bp, Artificial Sequence
  ENSG00000237836_3 (sequence is synthesized)
acaggactcctcagctctatctctgtggctttaacatacatcagtttcaggaatctccagcctcaacagagataaatgccagccaacccagctccctggcacccccacctggtcctgcaa

SEQ ID NO: 1007773 - DNA, 120 bp, Artificial Sequence
  ENSG00000237836_4 (sequence is synthesized)
gaacagctgactggccatctgcacgatctggtccacgtggatgatgcccccgatgctggtcatctccgtgtccgagagcagcgtcagcaccatgatggcttccaccagcagctgccggta

SEQ ID NO: 1007774 - DNA, 120 bp, Artificial Sequence
  ENSG00000237836_5 (sequence is synthesized)
ggacatgcctgttcacttccatggcactgctgacttgtgctcaccctatgacgcctcgcccagagcacaggaggacagtatccactgcggggcgttcaccccacgcgagcggggacaaca

SEQ ID NO: 1007775 - DNA, 120 bp, Artificial Sequence
  ENSG00000237836_6 (sequence is synthesized)
ggtctagccctaaacaactgcttgcctggctataagaggagccttgtctttttttttttttttttctagattccagaagatgcagtatttttcctaaggcaggagaaaaccctagttcat

SEQ ID NO: 1007776 - DNA, 120 bp, Artificial Sequence
  ENSG00000237836_7 (sequence is synthesized)
agacagccaggataaaaaccctggaagaccatgagccaaggtgaacgaagaggaattttctaaatcttggggacagagaattatgttacatcaaggcagccatgccaataaaatggaagg

SEQ ID NO: 1007777 - DNA, 120 bp, Artificial Sequence
  ENSG00000237836_8 (sequence is synthesized)
ctatgaaagcaagcaaggcacaagaaaacccccattccacagagagacacaagtgttctatttggtgaagagtttggtgcacagacagactgcatcctgtgaagaggtggcccttgtcaa

SEQ ID NO: 1007778 - DNA, 120 bp, Artificial Sequence
  ENSG00000237836_9 (sequence is synthesized)
ggctactgccgccaggaggatctttgcatctttaggatgtgtcactagctcatcgaaactatttctgtaactctctgcaagagccaatttaagctggcgtctcagttccctctgcactca

SEQ ID NO: 1007779 - DNA, 120 bp, Artificial Sequence
  ENSG00000237836_10 (sequence is synthesized)
gacagcaaacttgatctcatgcggggtcatctaccaaagggacaggcaggcaaccaccagtgagaggacagatgcagccctatcaatcaatcaccgagtaaccaagggtgaccgtagcag

SEQ ID NO: 1007780 - DNA, 120 bp, Artificial Sequence
  ENSG00000237836_11 (sequence is synthesized)
tgcctgggctcggggctcagcgccactgctgccccttttctggccactccctggatcctgctggcagtggccctcagagcaggaggctggagtatgcctccaggagccagcctgtcctcg

SEQ ID NO: 1007781 - DNA, 120 bp, Artificial Sequence
  ENSG00000237836_12 (sequence is synthesized)
cctgatttatctacccttccccccatcgactacagcttccagggagcagggaccatttctggtttctctttcctcttcattattccttccagcatgaagcatggtgctttgggtggggta

SEQ ID NO: 1007782 - DNA, 120 bp, Artificial Sequence
  ENSG00000237836_13 (sequence is synthesized)
aaactaaaaaaaaatccatgttaaaaagaatgacaaatcacctagggacgattactgtttttagttggagaaaagggccgagaaggctgcccatggggcaggccagggtggcatggagat

SEQ ID NO: 1007783 - DNA, 120 bp, Artificial Sequence
  ENSG00000237836_14 (sequence is synthesized)
tggctcctttctttcaccagggttctaaggggtgtctggcaaatgcaaagagcttgctagcccagaaatgctgagtctcaggtgaagaaaaaggctgatgccaataaatgctggaaagac

SEQ ID NO: 1007784 - DNA, 120 bp, Artificial Sequence
  ENSG00000237836_15 (sequence is synthesized)
tttttttttttttttttctagattccagaagatgcagtatttttcctaaggcaggagaaaaccctagttcatagacagccaggataaaaaccctggaagaccatgagccaagagtccgtg

SEQ ID NO: 1007785 - DNA, 120 bp, Artificial Sequence
  ENSG00000237832_0 (sequence is synthesized)
attctgagatgctactactagacttgaggaccactgtgttgaatgatggaaccagaattcaagaagaccttaacaggcttgagcaatgtgccaaaaaagacaagatacatttagaatctt

SEQ ID NO: 1007786 - DNA, 120 bp, Artificial Sequence
  ENSG00000237832_1 (sequence is synthesized)
tccccatttttcaccctgctccatggctggaggctgatctttatggatttcatcaatggtgtccctcaccctctggtatccagtaggccaaggaagagtcccctcaggagagtggaggaa

SEQ ID NO: 1007787 - DNA, 120 bp, Artificial Sequence
  ENSG00000237832_2 (sequence is synthesized)
gagaaaagagagcactctgggtaatgatgattgaatgagttatcacctataaagagcatccctagaacaaaataagtatgttttaaataaatacaaataaaaattccaatcctcactgta

SEQ ID NO: 1007788 - DNA, 75 bp, Artificial Sequence
  ENSG00000251185_0 (sequence is synthesized)
atcaagcctacctccggttgttttgtcacgtggtgttccaggtctgctggattttgctgggggtccactccagaa

SEQ ID NO: 1007789 - DNA, 120 bp, Artificial Sequence
  ENSG00000251185_1 (sequence is synthesized)
tcagggacccatttgaggaggaatctagagaggcagtctgtctacagcggttttgtcaaaactccttattgtttaactaagaaaaaaaaatcccccaaacagtttctgacttttgtttcc

SEQ ID NO: 1007790 - DNA, 120 bp, Artificial Sequence
  ENSG00000251185_2 (sequence is synthesized)
ttggttcatcttcctctcattgtatcacagggctacttgattgtatttcagtattcaatttatatatttcatattctgctgaatgcatagaatataaattaaaaattctttttctcaagc

SEQ ID NO: 1007791 - DNA, 120 bp, Artificial Sequence
  ENSG00000285094_0 (sequence is synthesized)
ctggccccagccaggacattgtctgtgtcactcagcagcagactgactggcgcctgctgcctggccagcaatgctgacccctctgcctgccctagccaatatttgaggtcaggaggcaag

SEQ ID NO: 1007792 - DNA, 120 bp, Artificial Sequence
  ENSG00000285094_1 (sequence is synthesized)
tacagcatctgtgggcagacgacagggccaatggggttctcctccaggccttctgctgccactctgcttcctgaagccaggaggcccagttcaggtgctccgccagggctcccgtggtcc

SEQ ID NO: 1007793 - DNA, 120 bp, Artificial Sequence
  ENSG00000285094_2 (sequence is synthesized)
tgcctgcaggggcgaggtagcaggacccccttgtttagcctctgctgcatccttagctgcagcagggagcctgccaggcaggtgtgcggcaggacagcgatgtcttcctgcatgacagaa

SEQ ID NO: 1007794 - DNA, 120 bp, Artificial Sequence
  ENSG00000285094_3 (sequence is synthesized)
ggggaaactgaggcccagagtgatgcagcccgggacctcccaggacaaggtccaagctcttacctcaggtccctacacgggtcaagatgggagccgccttagagatctctattctgcaga

SEQ ID NO: 1007795 - DNA, 120 bp, Artificial Sequence
  ENSG00000285094_4 (sequence is synthesized)
ggaggaaactgaggcacagacatggatggagggaatttggccaaggccctttggccttctgggccaggactccagccccagcccagtggcaggaagagggtctcatgccacccctcaacc

SEQ ID NO: 1007796 - DNA, 120 bp, Artificial Sequence
  ENSG00000285094_5 (sequence is synthesized)
ctgataatcctgcatgcacggcacaggcctcgaacctcctctcccctggcctggtcccaccctagtgggcccggcagtggggccttccatcctgcctctgtcactgccacaaaagaacat

SEQ ID NO: 1007797 - DNA, 120 bp, Artificial Sequence
  ENSG00000285094_6 (sequence is synthesized)
catgatgcatcccaggcctctgtccttcaggccatggggggcttccctgagcacagccactcaccacatgcctgagtctggatctcatgcgagaactggcctggacccctggaccaggat

SEQ ID NO: 1007798 - DNA, 120 bp, Artificial Sequence
  ENSG00000285094_7 (sequence is synthesized)
acaaactcatctggaagcattaaaacaatggaagcaggtgagagcagagagatcccgagcgcaggtgaggtggggtccctgaggcgggctcaaaagctgcttcccaaggcaggggggccc

SEQ ID NO: 1007799 - DNA, 120 bp, Artificial Sequence
  ENSG00000285094_8 (sequence is synthesized)
ctatgtgccctctgagagcacagcctgcagacagagtccagacgtctcaggcaggcctttgaggccttcgtgtcaaagcccagttctaccacatcctagggttatactttcggcctggtg

SEQ ID NO: 1007800 - DNA, 120 bp, Artificial Sequence
  ENSG00000285094_9 (sequence is synthesized)
ggagtcgctggtccccagttgacagtgtcattgggaaagtccagtggtagaccccggcacagcaggcgctcagcagtgcagcagtatcattgcttagccccacctccctttccagactct

SEQ ID NO: 1007801 - DNA, 120 bp, Artificial Sequence
  ENSG00000285094_10 (sequence is synthesized)
gcacccctcctcaggctcagagcaagggcctgcccctgcccctccaccgccccctcctcacttacccctgcgactctgcccaagcaagacctccccctggaattcattcatttatcaact

SEQ ID NO: 1007802 - DNA, 120 bp, Artificial Sequence
  ENSG00000285094_11 (sequence is synthesized)
cattatgcagccagccagccatcgtttcttttttatccactttttctgagggcctgctgtgcgccagctgctggagacatgaagacatcgaagaccccaggccttgacctccaagagccc

SEQ ID NO: 1007803 - DNA, 120 bp, Artificial Sequence
  ENSG00000285094_12 (sequence is synthesized)
ccagtttggtggaagaaacaaacaaggagactgcaaaacacaccctgtgatggggagggttgagcaggtgctcggtcagtgcagccacgaccatcccgtcctgcatccccaccatgaact

SEQ ID NO: 1007804 - DNA, 120 bp, Artificial Sequence
  ENSG00000285094_13 (sequence is synthesized)
tggaccttctggaaggaccttgcttatcccagcatccacacatccttgaccagacctggtcaacatttgcttacctctgccagcctcctctcacccattcctgcatgtgccgcaccaatc

SEQ ID NO: 1007805 - DNA, 120 bp, Artificial Sequence
  ENSG00000285094_14 (sequence is synthesized)
tgtgtggagcgcccactccagccaggccctgctctatcagcaaactcagcaggcagaacccctgccccatggcgctgcttcagcgtggtgagacaggaaccgcctggctgctgggatgag

SEQ ID NO: 1007806 - DNA, 120 bp, Artificial Sequence
  ENSG00000285094_15 (sequence is synthesized)
aagagactggagagagaccacgatggaagccaggaggccaacgaggagttggggtagtcctccagggagacatgatgtggcttcagccccagtggtgatggcggggtagagccagcaggg

SEQ ID NO: 1007807 - DNA, 120 bp, Artificial Sequence
  ENSG00000285094_16 (sequence is synthesized)
ttctgaactgagtggatgtgaaatgagggaaagagggatgctgcggtcggcagaatcgtgcctcccgcaaagatgccccatcctaacccgtcacccttgacagtgagacctccaccacaa

SEQ ID NO: 1007808 - DNA, 120 bp, Artificial Sequence
  ENSG00000285094_17 (sequence is synthesized)
aggggactttgcaggcatgaaggttaaggaccctgagaggaggagatggccctggactgtctggcgggcccagcatcatcacaagggtgcttataagtggaggaggaggcagggggagcc

SEQ ID NO: 1007809 - DNA, 120 bp, Artificial Sequence
  ENSG00000285094_18 (sequence is synthesized)
gagcagatgtgaggatagaagcagaggtcggagggacgtgctgttggcttgagatggaggaggacctatgagccaaggagcatgggcggcctctggaagccagaaagggcaaggcctctt

SEQ ID NO: 1007810 - DNA, 120 bp, Artificial Sequence
  ENSG00000285094_19 (sequence is synthesized)
tcccgacctccagaaccgtgagataacacgtgtgctgttttaagccactgcaattgtggtatttgtcacagcagccataggaaactgtacgggggttaaagaggacctgctgacctctga

SEQ ID NO: 1007811 - DNA, 120 bp, Artificial Sequence
  ENSG00000285094_20 (sequence is synthesized)
gctcacactgaagcctcctggaatgctgtgggttgtgagctgggatgagaacgcagcatggagatgaaagacgcatccacccaggaaggcccactggcatcgcaatctcagggaagattc

SEQ ID NO: 1007812 - DNA, 120 bp, Artificial Sequence
  ENSG00000285094_21 (sequence is synthesized)
ccaggctgaaaaaagagaaagtggctggggtggcactgaatgccccacgtcaaagaaatggcacccaagccgtccgtcagtccctcacctgccacacagacagcaccttggacccagcaa

SEQ ID NO: 1007813 - DNA, 120 bp, Artificial Sequence
  ENSG00000285094_22 (sequence is synthesized)
gatgtcactcaccacattgatgctgtccacaggcatcgccttgcttttgcagctctgtgtgagatttgtcagcttggtttgggtctggggctgtattagagctgtcagcctaggagccta

SEQ ID NO: 1007814 - DNA, 120 bp, Artificial Sequence
  ENSG00000285094_23 (sequence is synthesized)
ccctagttttgtgtctgcactatttccaaagcactggaataaaaggcattttaaccaacaccaggaacccacgggaatcttttcaaaggatctgcatcagatcagcctaaggaacactgc

SEQ ID NO: 1007815 - DNA, 120 bp, Artificial Sequence
  ENSG00000285094_24 (sequence is synthesized)
tgtcggtgatgaaatctgttgaggattcgaagctggcgtgtggtgcacgcaaattccttttttcttttttaatcaatgattagatgattccttagagcagttttaggttcactgcaaaac

SEQ ID NO: 1007816 - DNA, 120 bp, Artificial Sequence
  ENSG00000285094_25 (sequence is synthesized)
tgaacagaaagtgcagaattcccatatcccaccttcccaaacacacacacagtttcctctgtgactaacatcttgcatcttgtggtacatttgttacaattgaggaaccaatattgaccc

SEQ ID NO: 1007817 - DNA, 120 bp, Artificial Sequence
  ENSG00000285094_26 (sequence is synthesized)
attattataaagtcagtaggtgacataagcagtcactgttggtgtggtgattctgtggctttggataaatgtataatgacatatatccgccattacagtatcacgcagaatagcttcact

SEQ ID NO: 1007818 - DNA, 120 bp, Artificial Sequence
  ENSG00000285094_27 (sequence is synthesized)
gcccccaatgtcctccgtcctccatccactcactccttacctcccccagcccctggcaaccactgatcctttcctgtctccacagttttgccttttccgtatgtcacagggttggagtca

SEQ ID NO: 1007819 - DNA, 120 bp, Artificial Sequence
  ENSG00000285094_28 (sequence is synthesized)
tacagcttgtagccttttcagatcggcttctttcactgagtaatgtgtagttactcttcctgtctttcagcgacttaagagctcatttctccttagcactgaataataatattccgctat

SEQ ID NO: 1007820 - DNA, 120 bp, Artificial Sequence
  ENSG00000285094_29 (sequence is synthesized)
ctggacgtaccgcagtttatttatcatccgctttgtgaagggcacctgggttgcttccaagtttgggcagttatgaagaaagcgacgaaaacatgccgaaaacctggctcacgcactgtg

SEQ ID NO: 1007821 - DNA, 120 bp, Artificial Sequence
  ENSG00000285094_30 (sequence is synthesized)
ttcatggcgtgtggagggggcgcttcgaccatcaaaggaagtttggaaggaggcagagttcggtggccttggggcccctggggcggcatgactccagggggtgggagagctttctggaag

SEQ ID NO: 1007822 - DNA, 120 bp, Artificial Sequence
  ENSG00000285094_31 (sequence is synthesized)
gtgagctgtccagcagcgtggggactagggcggctaggacatctcaagaaatccttccctgacacatcgcctcccccgccaggtctaagcagaggccaggaagacctgacagggatgtgt

SEQ ID NO: 1007823 - DNA, 120 bp, Artificial Sequence
  ENSG00000285094_32 (sequence is synthesized)
tctgctctgcgagaagactgggcactgctacatcctgggactctaggcctgggcagctcttcccttggcagagggcactgctctcctgctgctgccgtcacctgcttgccatcaccacga

SEQ ID NO: 1007824 - DNA, 120 bp, Artificial Sequence
  ENSG00000285094_33 (sequence is synthesized)
ggggcagcccgagggcagggcgtgagaacctttcatctctatccctgctccccatctcaggacctccaggtgcccccagccacacctgagccatgaaggctttgccatctgacccctgct

SEQ ID NO: 1007825 - DNA, 120 bp, Artificial Sequence
  ENSG00000285094_34 (sequence is synthesized)
ctgcacaggaagaagcaggagatggcacagatgggcatagagccagagccaccccagccctgctgcaggaccagccctcagccgcgttatcagtgcccatctgagtcaactgtgcacaaa

SEQ ID NO: 1007826 - DNA, 120 bp, Artificial Sequence
  ENSG00000285094_35 (sequence is synthesized)
aacaggaagactgggacaagatctttcaccttccttcgattgtcatcatccaattgttcttcccgcggtgacgccatccggcagcttcaccgatattcctctctggcatgacagggccag

SEQ ID NO: 1007827 - DNA, 120 bp, Artificial Sequence
  ENSG00000285094_36 (sequence is synthesized)
gcccaccccccacagaggagacaaggaggcggagaagccagcctttctgcagggcataggcacagggctatgtggttgccagatgcacagaaagaccctcaaccacaacctgggctttca

SEQ ID NO: 1007828 - DNA, 120 bp, Artificial Sequence
  ENSG00000285094_37 (sequence is synthesized)
gggcaaacccaaggggcttttcgtgactatgccgggggcgtggaaatgactcctcaaaatgcagcacttgcggcaacaggggagcagccctgccagagaggcccaaatcctggactcaag

SEQ ID NO: 1007829 - DNA, 120 bp, Artificial Sequence
  ENSG00000285094_38 (sequence is synthesized)
tgtggggcagagggcagcctgagcatctgcaaacagagtggctcacagagaggacacctgccctgaggacacctgcaggagatccctacagaggaagggctagaccaggctccatccagc

SEQ ID NO: 1007830 - DNA, 120 bp, Artificial Sequence
  ENSG00000285094_39 (sequence is synthesized)
tggaagaaacaaacaaggagactgcaaaacacaccctgtgatggggagggttgaggtggccagtgggagaggcgagctggcagggctcagtggtgaggtgaaggtgtgggagcagggaca

SEQ ID NO: 1007831 - DNA, 120 bp, Artificial Sequence
  ENSG00000285094_40 (sequence is synthesized)
cagcatgaaggagtagatggccaggttgagctttgcaggctccagggggaggataaagagctgacacctggaacgtgcttggaacagcaggtgctcggtcagtgcagccacgaccatccc

SEQ ID NO: 1007832 - DNA, 120 bp, Artificial Sequence
  ENSG00000285095_0 (sequence is synthesized)
gcgccccagctgggactcaccgttgtccaggcgcgcgatctggggcagccggttaaacaacttcttattccacaactatctagaagtaaaaattactataaattgaatgatgaaaacttc

SEQ ID NO: 1007833 - DNA, 120 bp, Artificial Sequence
  ENSG00000285095_1 (sequence is synthesized)
aggtcattcctttcaaagtcctttccagtgctgcatggagaaaaaacgcaatctacaaccacaacaataaatgaggtatgagatttaattctggatattacagggaggcttaatgaagca

SEQ ID NO: 1007834 - DNA, 120 bp, Artificial Sequence
  ENSG00000285095_2 (sequence is synthesized)
gagaagtggatttccggagaaggagagattaaagtctggaaaagaagtatacctgtctggggattaaaaaacaaacaactttgaacggtcaaggaacctggaaaccaagctcataaaagg

SEQ ID NO: 1007835 - DNA, 120 bp, Artificial Sequence
  ENSG00000285095_3 (sequence is synthesized)
ttgaacggtcaaggaacctggaaaccaagctcataaaagggatcttctcactttgttggatatctgaaatgtgtatatgttttttttggaagcagagtctcactctgttgcccaggctgg

SEQ ID NO: 1007836 - DNA, 78 bp, Artificial Sequence
  ENSG00000285095_4 (sequence is synthesized)
taatttttgagggagacagagtctcactatgttactctggctggttgcgaactcctggcctcaagtgaactgccttgg

SEQ ID NO: 1007837 - DNA, 79 bp, Artificial Sequence
  ENSG00000285095_5 (sequence is synthesized)
tttaatttttgagggagacagagtctcactatgttactctggctggttgcgaactcctggcctcaagtgaactgtggcc

SEQ ID NO: 1007838 - DNA, 120 bp, Artificial Sequence
  ENSG00000285095_6 (sequence is synthesized)
ctcctgcctcagcctccaaagcattatgattatagacatgagccactgtgcccagctgaggttattttctatgtaaatctcgatgttctggaattgggaacagaaatgaactgaaatcaa

SEQ ID NO: 1007839 - DNA, 120 bp, Artificial Sequence
  ENSG00000285095_7 (sequence is synthesized)
gaaacagaagggccaaggaaagaagtccatttgaatgtatcaacatgcaggtttattaattattccctgaataatcaacaactaaaccattctgcattgcttggctattgaatatgatca

SEQ ID NO: 1007840 - DNA, 120 bp, Artificial Sequence
  ENSG00000285095_8 (sequence is synthesized)
aacctatatttatcatttggaactgaagttcaatgtcttatacaagctttgtttgctcatgactattccgtcaccatttatagaaagtatagtttttcaaaagtgtgaagaatccaccag

SEQ ID NO: 1007841 - DNA, 120 bp, Artificial Sequence
  ENSG00000285095_9 (sequence is synthesized)
ctttctgatctttgtgactcctcttaaagaaataaataacaaccagacacaggacccctcctatctggatgggatcaagttaaatgtcatccgtgggtcagaggagacaacctaggaaac

SEQ ID NO: 1007842 - DNA, 120 bp, Artificial Sequence
  ENSG00000285095_10 (sequence is synthesized)
caccacccaacagtttcctttattttccatgactgaacactagaaaattcccaaatccttccactacaaagagaaaagagttgtaaatcaacagaacggaagagaaacaaaaaggcattt

SEQ ID NO: 1007843 - DNA, 120 bp, Artificial Sequence
  ENSG00000285095_11 (sequence is synthesized)
cctctatctttaacaaagggaacttagagttatcaagagaaggaacacgactttctacttagctccataattttcattctaatgttattaaaaagaagtcatcattggtacatggaagga

SEQ ID NO: 1007844 - DNA, 120 bp, Artificial Sequence
  ENSG00000285095_12 (sequence is synthesized)
taaatctatattttaaagtccctcttttctgttgttggtcacaaaaggcaacaaagaagcatctaataaatagaatctcttatttgaaacattggaaaaaggatgccagctcctggaaaa

SEQ ID NO: 1007845 - DNA, 120 bp, Artificial Sequence
  ENSG00000285095_13 (sequence is synthesized)
taccttgcccatcagtaaagaaatcggtccacagggaataaaaatggaatggagagctctccaatgctgccctatggggagaaataaaaggggtctccacatgtggacttcataaaaact

SEQ ID NO: 1007846 - DNA, 120 bp, Artificial Sequence
  ENSG00000285095_14 (sequence is synthesized)
ttgatataaaagaaatctattatcaaaagtacacggtaaccccagcaagtgttctgtttaatctttgcacagaggatttagggcctgcaaagtgcaagaggcatgatgcattggccattt

SEQ ID NO: 1007847 - DNA, 120 bp, Artificial Sequence
  ENSG00000285095_15 (sequence is synthesized)
tagtattcatgtctcctgtactgctttctaataagttaagatgaaacgggagactgcgtgcaggagtgagagatgcaagaaaagcagtactgagaaataaagatgaacaaaagtgcatct

SEQ ID NO: 1007848 - DNA, 120 bp, Artificial Sequence
  ENSG00000285095_16 (sequence is synthesized)
tgacttcccttttattattaacaggcgagagaacaacaatgccaaacttataatgttattacttaacacttcacatttacaaaaagacgttgcagtcatttttacatgttatttctcaat

SEQ ID NO: 1007849 - DNA, 120 bp, Artificial Sequence
  ENSG00000285095_17 (sequence is synthesized)
atttttctgatagaggcttttcttataatcagtttttatgatgatatatgaaatgatttttccaaaaaggaagataaacatgcagtctgtgccagcatgttaccaaaacaatctttttgc

SEQ ID NO: 1007850 - DNA, 120 bp, Artificial Sequence
  ENSG00000285095_18 (sequence is synthesized)
gcattggtgtccagggagctttcttgttgcagttcctggacaatgctactgcaggtttcactgggggatgccagctccaaaatgtattatttcaagcaccaccacacatgtctctgctcc

SEQ ID NO: 1007851 - DNA, 120 bp, Artificial Sequence
  ENSG00000285095_19 (sequence is synthesized)
tctactgcttttatggggggcaaccactgaaaggagtgactacccacccatcaagagctggcaattcgctgctattaaccgtgactgtgattcccagtccgcctggcagttcctgagaaa

SEQ ID NO: 1007852 - DNA, 120 bp, Artificial Sequence
  ENSG00000285095_20 (sequence is synthesized)
tggattgagcacacttgcgattgaagcagggagaggaggcccagacccctacaaagggcctgctgatttaacagtcgctttacatgtaattgaacttttcatgtacctgaaaggctcaag

SEQ ID NO: 1007853 - DNA, 120 bp, Artificial Sequence
  ENSG00000285095_21 (sequence is synthesized)
gtgatggtggaagaaacggaacaacaatgattgaaggaaaaaagtcaataaatacaaaaggattcctcttagtgatgatcacaagcccacggcgtggctctgaatctatgattacatatt

SEQ ID NO: 1007854 - DNA, 120 bp, Artificial Sequence
  ENSG00000285095_22 (sequence is synthesized)
cagctcgttctgattcaagaatgcttggcgaagtatgcccttgtggagaagcattgtttgttggttaagaacctaacattcggagagttaacttaatacagttaatgacatctccatgtg

SEQ ID NO: 1007855 - DNA, 120 bp, Artificial Sequence
  ENSG00000285095_23 (sequence is synthesized)
gaaggaagggaacaagagaattcctttgatgaaactctggtgccattgaatgcattattatgcctcagtgggaaaaataccttctggagaattgtccatagtagacactcatagatagag

SEQ ID NO: 1007856 - DNA, 120 bp, Artificial Sequence
  ENSG00000285095_24 (sequence is synthesized)
ggagctgtacttacagaggaatgagtaatgtgatggcagcttgcagtgttaattttgccactctgtggatatagttgagccaaaaggaaaacaaacaaacccaaactctgaatttgaagt

SEQ ID NO: 1007857 - DNA, 120 bp, Artificial Sequence
  ENSG00000285095_25 (sequence is synthesized)
accttcaaacagtacccatatgctttatagactagtagttggcaaatagaatacaacagcaaagagcccccatacttggaggatttcagtgattggggtgtttttgcaagaggggttaag

SEQ ID NO: 1007858 - DNA, 120 bp, Artificial Sequence
  ENSG00000285095_26 (sequence is synthesized)
aaaaatcagtgcagtctgtacctttctttcacttggaaaacatacatacataattcacatgctatataatctcctagatgcatggccacagagctgatatatgaccatttttttcttatt

SEQ ID NO: 1007859 - DNA, 120 bp, Artificial Sequence
  ENSG00000285095_27 (sequence is synthesized)
gtagtttttagcccaaataaccactctgtgtgtgtaagagaagtcaagatgaaaacaaatactctttttaggttgctgcaaatgaccatgtgtagacagacctgttcaactggaagtcac

SEQ ID NO: 1007860 - DNA, 120 bp, Artificial Sequence
  ENSG00000285095_28 (sequence is synthesized)
gattctgtgactgtcctaacatcactcgtccacatgccgccagactgcagttgggggtagatcagtatcaacaggatagacacagaggaaagaactcatggaagtggcggttgtgacaaa

SEQ ID NO: 1007861 - DNA, 120 bp, Artificial Sequence
  ENSG00000285095_29 (sequence is synthesized)
aactcatggaagtggcggttgtgacaaaagcaacataattaaatatattttagtatataaacaaattaactgcttaaaacatgtatttaatggggcccggcgtggtggctcatgcctgta

SEQ ID NO: 1007862 - DNA, 89 bp, Artificial Sequence
  ENSG00000285095_30 (sequence is synthesized)
cagaggttgcagtggacaaaaagagcgaaactccatgtcaaaaaaaaaaaaaaaaattagctaggtgtggtggcacatgcttgtaatcc

SEQ ID NO: 1007863 - DNA, 120 bp, Artificial Sequence
  ENSG00000285095_31 (sequence is synthesized)
gaacaaaactccatctcaaaaaaaaaatgtgtttaatggatggcaaagggagatgaatgcatggctcacacatgtttgtaaggtcatttcattcattgataagaggaacttccctagaca

SEQ ID NO: 1007864 - DNA, 120 bp, Artificial Sequence
  ENSG00000285095_32 (sequence is synthesized)
aagaggaacttccctagacaagttacactggtgattctccaccctgatttagatggaccatctctgctgataaggagaggatctagtgtctttgttctcttgcccaaattgccagccatt

SEQ ID NO: 1007865 - DNA, 120 bp, Artificial Sequence
  ENSG00000285095_33 (sequence is synthesized)
gccatctgtcctctaagaagtggactgactaccaatacaaaagccagtgaacagtgggcaaacggtaacaccctccacccctgccaacagtgacatgattcaagggctagctagcaaaga

SEQ ID NO: 1007866 - DNA, 120 bp, Artificial Sequence
  ENSG00000285095_34 (sequence is synthesized)
gcaatgaaagattccacacaactaaggtaaatctctaagcgactcaggcctctgcagagactgtaataaagaattatgtggaggaaaaggaaatcctacttaccctcaatggctgtgtgt

SEQ ID NO: 1007867 - DNA, 120 bp, Artificial Sequence
  ENSG00000285095_35 (sequence is synthesized)
tttctacaaaggggcagtgctttgaagccatgatgtatggctttcttagtgaatcaagatgccttccaaatcttttgcattgttgtatttacatcatcattcattcaatttgtcatgaca

SEQ ID NO: 1007868 - DNA, 120 bp, Artificial Sequence
  ENSG00000285095_36 (sequence is synthesized)
ttttacttagagtattttttctctaaatcttgtgttattcagttttccaagccagtatcaatattatttaattctaaataaaacttgaagctctactttgtgaagatgaaccaaattgaa

SEQ ID NO: 1007869 - DNA, 120 bp, Artificial Sequence
  ENSG00000285095_37 (sequence is synthesized)
acccaaaataggataaaacatgtaagaagttggatcatacagaggaaagaacacatcaagtaacaaaacacatttgagtggttttctcactattttctccattgactctcaaaacagctc

SEQ ID NO: 1007870 - DNA, 120 bp, Artificial Sequence
  ENSG00000285095_38 (sequence is synthesized)
aacgtggtaggtataactctccattttacagagaggagagaaagttcccatagctgttataagaaggtacacatttggacattacagaaaactatgaagatttctgaatccgaataaaga

SEQ ID NO: 1007871 - DNA, 120 bp, Artificial Sequence
  ENSG00000285095_39 (sequence is synthesized)
gttatatagacccactttttcactcctactcccctccactccattcaactcactattacttaagtgtaccccttacatcgtatttctgaaatataaataacataataggataagatctaa

SEQ ID NO: 1007872 - DNA, 120 bp, Artificial Sequence
  ENSG00000285095_40 (sequence is synthesized)
agaaaactagccttcctcttaattcttctgtgatataaggtgtgtaaatggagtggcacccatgagtgagtatctgtgcacctgcctgtaggctggcctctttctaagaggagcatgtct

SEQ ID NO: 1007873 - DNA, 120 bp, Artificial Sequence
  ENSG00000285095_41 (sequence is synthesized)
gtgaggcacactgagaaatgtttgctcaacataagtgggcaaagtatgctgagattcagaaactccatctacctcatgttttaggtgtctgctagttagtttgcatggagaaagtcattc

SEQ ID NO: 1007874 - DNA, 120 bp, Artificial Sequence
  ENSG00000285095_42 (sequence is synthesized)
aataaataagtagaccccaaaccaggggactgtctcctacctttaactgtcatcctcacctccatgacaaactagtttggtatttcttctggggcaaaagaatggcagtggaaagttctc

SEQ ID NO: 1007875 - DNA, 120 bp, Artificial Sequence
  ENSG00000285095_43 (sequence is synthesized)
caatcccttaggctttattagatttgggaagaatctgggattctgatgagaaagatttcttcatttattattagatggcccaaagcatagcaatctgtcagttgcctctttctgttttgc

SEQ ID NO: 1007876 - DNA, 120 bp, Artificial Sequence
  ENSG00000285095_44 (sequence is synthesized)
agcccataggagagatggagctgcaagattgacggggcatttgtgagatctgccttttcccactcagcgctgacaatagcaagtcactggagagttttgagcaagtgaaaaacagtccaa

SEQ ID NO: 1007877 - DNA, 120 bp, Artificial Sequence
  ENSG00000285090_0 (sequence is synthesized)
agcatttggtgggaggccctggacctagaaacaaaaaatgaaagtggagaaaaccaaacaagaatctttctttcttaaagtaaacatcggactgacatctcctttcaaacattcattgag

SEQ ID NO: 1007878 - DNA, 120 bp, Artificial Sequence
  ENSG00000285090_1 (sequence is synthesized)
gatctactctgtgagaagaagcaataccatgttatctcattctagttccagttctagttgacttgattgtcaaacgactgctaagaagtagagaggaggcttcaccatgtttgccaggct

SEQ ID NO: 1007879 - DNA, 75 bp, Artificial Sequence
  ENSG00000285090_2 (sequence is synthesized)
tgtttctgtgtcacgttttgatacttgaataaaaatgacactttggagccttgaaaaatggactttccttctgaa

SEQ ID NO: 1007880 - DNA, 120 bp, Artificial Sequence
  ENSG00000285090_3 (sequence is synthesized)
tgacactttggagccttgaaaaatggactttccttctgaagtacccaggagagtaggatggacttcttcctctctccctacactatcccttggagaaaaccttttatcaagaagatacca

SEQ ID NO: 1007881 - DNA, 120 bp, Artificial Sequence
  ENSG00000285090_4 (sequence is synthesized)
cttcgtggacatggaggctggtgaaatagaggagatgacatgaatgagggactacattggaatgaagaagaacctggaggaggtaaaaaaactgaaggctccggatgtcggacgatggaa

SEQ ID NO: 1007882 - DNA, 120 bp, Artificial Sequence
  ENSG00000285090_5 (sequence is synthesized)
aataaaaacaacaagcaagtgaaactccctgacttatcaaccttactcaagaaatgggaatttctgccctagagaggtcttggaaactttctcaccagaagagcacaacttgatggcagg

SEQ ID NO: 1007883 - DNA, 120 bp, Artificial Sequence
  ENSG00000285090_6 (sequence is synthesized)
aagctcctgatggaggcctgaaaatggccctgaaagggatgccaggggaccagggctccactattatcagcgtgtgactttggacaaggatgttaatggctctgtgactcagttacctct

SEQ ID NO: 1007884 - DNA, 120 bp, Artificial Sequence
  ENSG00000285090_7 (sequence is synthesized)
ttacctcttctgtactttgcttaggggtctattgctttccattttgtctttttcatttgttaaatccaatgatgtcactgacagtaaaaactagtaaatagtaaaaaaaaaaaaaaaaaa

SEQ ID NO: 1007885 - DNA, 120 bp, Artificial Sequence
  ENSG00000285091_0 (sequence is synthesized)
gcctggaggaagggcagggccgcgggctcggcactgggaacaaaggggaccggcggaaggaacgcccccagtcgatcccggagcgatgcccgggtggaccaggggcttagctccggagag

SEQ ID NO: 1007886 - DNA, 120 bp, Artificial Sequence
  ENSG00000285091_1 (sequence is synthesized)
aggtttcccactggattcgtgcacagcccctcccctgcggcgccggctctgcgagccccagtttcctcatctggcagctggaaacaaatccttccggaagtgtccaggacccacgaaagt

SEQ ID NO: 1007887 - DNA, 82 bp, Artificial Sequence
  ENSG00000285091_2 (sequence is synthesized)
gaaacaaatccttccggaagtgtccaggacccacgaaagtgttttaatttcttttagttttggtaaaaagtactaaacgcga

SEQ ID NO: 1007888 - DNA, 62 bp, Artificial Sequence
  ENSG00000285091_3 (sequence is synthesized)
cctatctcaaataaataaatacatacataaaaagggcagggcacggtggctcacgcctgtaa

SEQ ID NO: 1007889 - DNA, 67 bp, Artificial Sequence
  ENSG00000285091_4 (sequence is synthesized)
acatggtaaaaccccttctctactaatagaggctgagtcacgagaaccgcttgaacccaggaggtgg

SEQ ID NO: 1007890 - DNA, 120 bp, Artificial Sequence
  ENSG00000285091_5 (sequence is synthesized)
aaaaagaaaaagaaaaagaaagaaagaagaaagaaagaaaagaaaagaaaaaagaaaagagaagaaaaagtactgaatgcagtggaaagtagcatttttaattttttataaagtggaaga

SEQ ID NO: 1007891 - DNA, 120 bp, Artificial Sequence
  ENSG00000285091_6 (sequence is synthesized)
aaagtagcatttttaattttttataaagtggaagataggcccacaaagcaaaagtgcccagagctgacaaaaatctctggagaaaggacctctctggtcgttgccaaagggagcagctga

SEQ ID NO: 1007892 - DNA, 120 bp, Artificial Sequence
  ENSG00000285091_7 (sequence is synthesized)
cgctgttgtaaagcccgcagctcgattcccagcgtgaagtagggggcggactttgtctacacaccagggaagatggcttcaggcagtccacatactcccatgcctatgacacaaagtttg

SEQ ID NO: 1007893 - DNA, 120 bp, Artificial Sequence
  ENSG00000285091_8 (sequence is synthesized)
cgtcaaatgccgaatgaccgtagaaaggtggacgttgagttcttcagcagcttctggtgtagttgtaagaggaccagcttccgtgattgctctcagttggtggttgtcaacttccgacga

SEQ ID NO: 1007894 - DNA, 120 bp, Artificial Sequence
  ENSG00000285091_9 (sequence is synthesized)
ctggccgctacgctcctcatcttcaaggctctcctctcttttgcaaaacttcttgaacccccactgcacggtaactgtggccacgtggaccaagccaacgccggctcctctcattcccat

SEQ ID NO: 1007895 - DNA, 120 bp, Artificial Sequence
  ENSG00000285091_10 (sequence is synthesized)
tgagatcagcaaggcaactccagcctgtaccaccaatatccccaggccaggagaacagccagtgaaagcccatttgaaagactgccatattcctcaccaatccgtttctcaaggccaaga

SEQ ID NO: 1007896 - DNA, 86 bp, Artificial Sequence
  ENSG00000285091_11 (sequence is synthesized)
actgccatattcctcaccaatccgtttctcaaggccaagatgttccgtcaaggtgcatacaacaggaaattataaatccctctcaa

SEQ ID NO: 1007897 - DNA, 120 bp, Artificial Sequence
  ENSG00000237838_0 (sequence is synthesized)
aagcaagagctgctctcctcagcattttgcccagagagaatttggaagggttactggacaggattactacttaaaagaggaatgtctcaaacagtgggggtatgaagaacatatataaga

SEQ ID NO: 1007898 - DNA, 120 bp, Artificial Sequence
  ENSG00000237838_1 (sequence is synthesized)
tggatctactagtgtggcttctgcctccaccgcttatgaaaacaacttctcttgacgtcagcagtgactactgagcagcgatctgcactcttactcaacttcttgaagcattggacagag

SEQ ID NO: 1007899 - DNA, 120 bp, Artificial Sequence
  ENSG00000237838_2 (sequence is synthesized)
gataaaacagagtactgcagagatgaagtaacttgccctaagacccatacctgaattaacagctctgaaatttgaaggtgctagtgtctcactggtcttaaactgcgaagctgaacgacg

SEQ ID NO: 1007900 - DNA, 120 bp, Artificial Sequence
  ENSG00000237838_3 (sequence is synthesized)
aaagcatccttcctgtaatcagtgtagcaaaatgacaggcagagaaaccatgctgggaagaagcaaggtcatcagttgaaccatcttgactttggcccagaacacagctcagcctcaact

SEQ ID NO: 1007901 - DNA, 120 bp, Artificial Sequence
  ENSG00000231781_0 (sequence is synthesized)
atatgatggcttagcttgggctcagaggctggacaggtttattcaaaattatgagggattcatttaatatctgaattgttcaagataatgattggtgtgacaatgagtgaccaaatttct

SEQ ID NO: 1007902 - DNA, 120 bp, Artificial Sequence
  ENSG00000231781_1 (sequence is synthesized)
tgattggtgtgacaatgagtgaccaaatttctcaaagtaagatgaattttcctgcaaggatgaaagcttggaatatggcttctgaccaaatactgtgtctagaattggtgggttcttggt

SEQ ID NO: 1007903 - DNA, 120 bp, Artificial Sequence
  ENSG00000231781_2 (sequence is synthesized)
cttaaagaatgaagccgcagaccctcacagtattacagttcttaaagatggtgtgtcccgagtctgttccttcagatgttcagatgtatccacagtttcttctttctggtgggttcgtgg

SEQ ID NO: 1007904 - DNA, 84 bp, Artificial Sequence
  ENSG00000231781_3 (sequence is synthesized)
tgtttcacttgttgatgcccctcacagcaactgccacattgtaaatatggaatctgatgtatgtttgacttcagtcaaaaatgt

SEQ ID NO: 1007905 - DNA, 120 bp, Artificial Sequence
  ENSG00000179141_0 (sequence is synthesized)
ggagctacggtacacaagcacaggttcacatttatgaagcagccaataagaattcccagcctgagaggaccttggaaccagaaggaattggaggagatttaaacaagctgacccaaggaa

SEQ ID NO: 1007906 - DNA, 120 bp, Artificial Sequence
  ENSG00000179141_1 (sequence is synthesized)
agcacaagatctttctatgcattgaagatcaccaaatcaaagataaaagtgctcgaccattatggcctatggcaaactcgggctggctgaagcatccttctcttccatttagaaccctgg

SEQ ID NO: 1007907 - DNA, 120 bp, Artificial Sequence
  ENSG00000179141_2 (sequence is synthesized)
tgaggccccttagaccaccactgggctgtcctcctccctcctcagagacagagttctgggctgggccatggaggtgtctgtcaacacggcagtagtcctcgttctatggaaaaccagctg

SEQ ID NO: 1007908 - DNA, 120 bp, Artificial Sequence
  ENSG00000179141_3 (sequence is synthesized)
ttccctgtgacacgactccattcccgcagctgcctgctattcagctgggctgacggacagcagagcacagggttggaagaccaccctctcagacagtttgaaatctctaaaaggccgccg

SEQ ID NO: 1007909 - DNA, 120 bp, Artificial Sequence
  ENSG00000179141_4 (sequence is synthesized)
agcgaggcgtcctggcccctgagtggagatgctcccctcagccgtgcctcagctccagggcaccatcacgagaggcttcgttcagggtctcctgcctgcggaccacctcttacgtctcct

SEQ ID NO: 1007910 - DNA, 120 bp, Artificial Sequence
  ENSG00000179141_5 (sequence is synthesized)
cctcaccttctggtgtcgtctcaaccaactcagaccttcagatcagaggcctttggtttaccaagaagctcactgagaggcgacacaaacggccaagaacatgaaaagacggtcagtgcc

SEQ ID NO: 1007911 - DNA, 120 bp, Artificial Sequence
  ENSG00000179141_6 (sequence is synthesized)
cttgcagatggaagcaggcaatcatttttcacctgcaaggctgataaagatgaaatgttctgataatacaggaagagtataaggaaactgtcactcgatggactccaggtgaaatataac

SEQ ID NO: 1007912 - DNA, 120 bp, Artificial Sequence
  ENSG00000179141_7 (sequence is synthesized)
taatccagctgccttggagggaaaagatatctttcaaaattgaaatgacaggaatggcagcattatgggtgggagataaagaatctgggtttctttcaggggtgatgaaaatgttctaaa

SEQ ID NO: 1007913 - DNA, 120 bp, Artificial Sequence
  ENSG00000179141_8 (sequence is synthesized)
acggattgtggtgacagttttccacaactcggaatatactgaaaaccaccacattgtatacttaaatgggtgggttgtatggtatgtgaattatatctcaataaaatttttaccaaaaga

SEQ ID NO: 1007914 - DNA, 120 bp, Artificial Sequence
  ENSG00000179141_9 (sequence is synthesized)
aaactccaaaggctgagctctgctgctccctatggaggaggaatctctgctgagacttgatggagcagaatcatcatgcatccagactggcagtccctgaagtgagtggctctggagcaa

SEQ ID NO: 1007915 - DNA, 120 bp, Artificial Sequence
  ENSG00000179141_10 (sequence is synthesized)
gttgtggagtaagacaaacttagggtcttggaggaatgggtcaaaggtcacaagcctgatctttgcatgccaggctctgtggctgcctatgtgtggggacagccaaaggcagcccagaaa

SEQ ID NO: 1007916 - DNA, 120 bp, Artificial Sequence
  ENSG00000179141_11 (sequence is synthesized)
ccataataataaattttttagctaccattacctacacgcacatggccttgacatcatttataattcaaagacctggaatgtggtgtctgagtgagacttcgttagtcagaaaaatccacc

SEQ ID NO: 1007917 - DNA, 120 bp, Artificial Sequence
  ENSG00000179141_12 (sequence is synthesized)
agatttatgtgaaaatccagaaagaaaaggcaacaccatggctcactgcaccatttccactcacgttctttcttgtgagaccagcttcctctagtgacagatttcagggcgttttcaaag

SEQ ID NO: 1007918 - DNA, 120 bp, Artificial Sequence
  ENSG00000179141_13 (sequence is synthesized)
gatcccaatgccccaagggaaaagaagaggcagtatccattctgaagatgacataaaccattgctaactgtgtcttcatcatgtatttctttatttcaagctcatgacactgtctcacgc

SEQ ID NO: 1007919 - DNA, 120 bp, Artificial Sequence
  ENSG00000179141_14 (sequence is synthesized)
ttaatacggtgtttaacacaatggtcctcaagttttcctgcgtattagaatcacctagggagttttaaagccttctgatgcctgggctgcaccccagagcaattaaattggaatatcaga

SEQ ID NO: 1007920 - DNA, 120 bp, Artificial Sequence
  ENSG00000179141_15 (sequence is synthesized)
ggagccaacaggaaaaaatgcaccaggagggaaagacaggaaaggagggacaagagaggaaggggggctccacacatctgcagcaggaaaggctcggattgcaccacccacccctgcctg

SEQ ID NO: 1007921 - DNA, 120 bp, Artificial Sequence
  ENSG00000179141_16 (sequence is synthesized)
ctgcacacgaggctgggagctaccttggactttgtggtcgtggtcatcctgcaggattgtgatggcaactgtgtggttattttccatctctaggagagcagcatcatggctggcggtgag

SEQ ID NO: 1007922 - DNA, 120 bp, Artificial Sequence
  ENSG00000179141_17 (sequence is synthesized)
atcttccacctggaggagagtcgcagttactggttagacagagagctgcttggagaacagaagtggaattccgtgagtggaaaaggtccgtgacccaaaacatcaatgacaagtcacagc

SEQ ID NO: 1007923 - DNA, 120 bp, Artificial Sequence
  ENSG00000179141_18 (sequence is synthesized)
cttgtgccgaagcaggagagctggactttggtggtgatgtggcagccctcggaatcacggggaggtcactgccacaacctggctctttgtaggggggtccaactccaggcaggggatcac

SEQ ID NO: 1007924 - DNA, 120 bp, Artificial Sequence
  ENSG00000255209_0 (sequence is synthesized)
atcctagcagctgagctctgccttcctggggaagtgaagatgagcaaaccattctcacttgcccctttgggtatggactagggaagtagggagagctggccagtcagcacaagggaagac

SEQ ID NO: 1007925 - DNA, 120 bp, Artificial Sequence
  ENSG00000255209_1 (sequence is synthesized)
tgaagcaggcaagctgagagcatggaagtctccacaaaagagaaacaaaaagtcagaatgcctactccctgcagccacctttatttctgccagcttctggctccatttcaggtcatgcat

SEQ ID NO: 1007926 - DNA, 120 bp, Artificial Sequence
  ENSG00000255209_2 (sequence is synthesized)
agcacatgggtttatgcacaaagacctatttttggtatcttccttaaagcaatcaagcaagctgatcccagtaaaggggtaaacccagcaactaagttcacttcttgaccgctccatttt

SEQ ID NO: 1007927 - DNA, 120 bp, Artificial Sequence
  ENSG00000255209_3 (sequence is synthesized)
tgctcttctgtgccctgcagttttcctcccacactctgcctcagcatcaatctcgttggcagcacagcccaccctctgggcgagcccaaggcctcttccaccctccagagaagagccctg

SEQ ID NO: 1007928 - DNA, 120 bp, Artificial Sequence
  ENSG00000255209_4 (sequence is synthesized)
aaatgacccacgcaggcacatacaatcaggggtctggaaacaagaccaagacggacgcacatctatttgcccaaataaattaagtagcattctgaacatgatgaatagtttggcaggaaa

SEQ ID NO: 1007929 - DNA, 120 bp, Artificial Sequence
  ENSG00000255209_5 (sequence is synthesized)
aaaacgttccagtaaatgcacgggctgacccaaaatggtccctccactggaatatggaaaatgaaaaaagatattgttttggctctagcctataaggcattaataaacaattggcatcta

SEQ ID NO: 1007930 - DNA, 120 bp, Artificial Sequence
  ENSG00000255206_0 (sequence is synthesized)
cacagctcggtgctcagcactcttccagacatcgccctatttatctcttcatcaggcttttcacttcttatcctttataataaaccagtgattccaattaactcagaaagtgtcaacttc

SEQ ID NO: 1007931 - DNA, 120 bp, Artificial Sequence
  ENSG00000255206_1 (sequence is synthesized)
tgtatctacatcaatgacacccaaatatgtatctctagcctgacatagctcaagcggctccagtgcaggagacagagggagcctggaatccaaagaagagagctccaaccagcatagagt

SEQ ID NO: 1007932 - DNA, 120 bp, Artificial Sequence
  ENSG00000255206_2 (sequence is synthesized)
tgtcaacagtgcaagctgctgaaaagaggacaaggaagatattatccctccacgccaaccagcatgcacttctcaaccagccttactgcctataaactaccgctgttttgactgtcagct

SEQ ID NO: 1007933 - DNA, 120 bp, Artificial Sequence
  ENSG00000255206_3 (sequence is synthesized)
tgtgctctaagaccatcctctgaaaatgcctgggagaaactatttccttctcattgacaattactaaaaatggtcattcgttggccaggtccactaaacagtgcatacgttgatcagagt

SEQ ID NO: 1007934 - DNA, 120 bp, Artificial Sequence
  ENSG00000255206_4 (sequence is synthesized)
tattttgtttgaaattagtgtgctgtacagaaagctttgtcttgcatgaacctgtgttttgataaaacagagaccttgggcattagcagataggaggatgggtgacagtttaccactaac

SEQ ID NO: 1007935 - DNA, 120 bp, Artificial Sequence
  ENSG00000255206_5 (sequence is synthesized)
tttaaacaggttcaaaggtaaataccatattttgttaattttcatattcattaaagatctaaatattgagaagtttgcttgaggattaagtatcttccaaccaggggcaccaaggtgagg

SEQ ID NO: 1007936 - DNA, 120 bp, Artificial Sequence
  ENSG00000255201_0 (sequence is synthesized)
tttcttaagtgaagcacctccatctctttgtcggtggtattaactccagcagtctagaagagacaacggaagcaaaatggacaagcacaggacatgagacctctaagagacgcagagcaa

SEQ ID NO: 1007937 - DNA, 120 bp, Artificial Sequence
  ENSG00000255201_1 (sequence is synthesized)
gggaaggagacagaaagaagggggactagaggaagaaatgctccctgacatcttctttgcaacaaggaacaaacgaaaaccaccaggcagcaaaacctgttagaggaagagggtgagacc

SEQ ID NO: 1007938 - DNA, 120 bp, Artificial Sequence
  ENSG00000255201_2 (sequence is synthesized)
accagatgctggcagccactggcccatccgagcatgcgggcggtgagcggcatggagaaatggggccggcgggcaggggctgtttggtttcagataagaaaagtgaggctcaaaagggag

SEQ ID NO: 1007939 - DNA, 120 bp, Artificial Sequence
  ENSG00000255201_3 (sequence is synthesized)
aagtgacctgctcaaggtgacaaagccaagaagtgccaatcgctatcctgactctgcccctaagaaacctggacaccccggctgtgttctccaagcctggctcttcccactaaactcatt

SEQ ID NO: 1007940 - DNA, 120 bp, Artificial Sequence
  ENSG00000255202_0 (sequence is synthesized)
atggggagaacaggaggaacctgcaaaggagaatgaaaaggagtggagtcaggtgtctcggcagccaaaggaggaagtggtcgcctctgacagactgtgccgacaggccaagtaaggcac

SEQ ID NO: 1007941 - DNA, 120 bp, Artificial Sequence
  ENSG00000255202_1 (sequence is synthesized)
agctaaagaaatgtgttactgacaagcctgcaggccacatggcgagatggaaagcaagcagtaaagaccaaagaaactcgttgaggacaatggaagatgggctcagaagaaaatggatac

SEQ ID NO: 1007942 - DNA, 120 bp, Artificial Sequence
  ENSG00000255202_2 (sequence is synthesized)
tccaacagataccaagtccataaaagccctggggctcagtcagagcagggcagaagagagagagactatgggacaaccagcagcagagaggaactaccctccctgctgagagcttcagag

SEQ ID NO: 1007943 - DNA, 120 bp, Artificial Sequence
  ENSG00000255202_3 (sequence is synthesized)
acatgcagagatgtctgaacaagttgctgcggagaggagccacgctctccagggcctcctctctgctgagagcagcagacagtggaatgagcagtgggcagagaggagccaccctcccca

SEQ ID NO: 1007944 - DNA, 120 bp, Artificial Sequence
  ENSG00000255202_4 (sequence is synthesized)
gggccacctctttgctgaaagctgaacactccatgggatgacctgcctacagagagaagctacccactgtgggtctcctctgagctgttctaacactaaataaacctccttttcaccttc

SEQ ID NO: 1007945 - DNA, 120 bp, Artificial Sequence
  ENSG00000253699_0 (sequence is synthesized)
gaatcatgagagggcacctgccttccttctacatcctagatgaactggtctgagcacgttcttctgtgaggtttataattgagatgtgtggacactaagctcataaagaatcagggctaa

SEQ ID NO: 1007946 - DNA, 120 bp, Artificial Sequence
  ENSG00000253699_1 (sequence is synthesized)
gactatgatgggtcatatgcaagctgatgctgaggaagcccaccataagaacggagaatggagcattctgcagagagcagaggcagctgtggatccaggagaccaggagacccaggagat

SEQ ID NO: 1007947 - DNA, 120 bp, Artificial Sequence
  ENSG00000253699_2 (sequence is synthesized)
tgaacttgagagttcattagagagaagactcctactgtttagagaacagagatttcaaggaaggattaaggctggcatcctgatagcaaaggtggagacaaaggaaagcattccagataa

SEQ ID NO: 1007948 - DNA, 120 bp, Artificial Sequence
  ENSG00000253699_3 (sequence is synthesized)
ctttcaaaagaaactcaaacattcggaaatcattttcactaccaagaaaggaagttaagaaaaatagttatttccaaggtctccagaatctgaagctctgctcctgagtttataaaatgt

SEQ ID NO: 1007949 - DNA, 120 bp, Artificial Sequence
  ENSG00000253698_0 (sequence is synthesized)
gatcttcacttttaacaaaccgaggtgcagaatggcctgacagcagctatctatccaacagtcatgtcccaggccggaatcctcccaaccagggagggaccacttcctacctgacatcaa

SEQ ID NO: 1007950 - DNA, 120 bp, Artificial Sequence
  ENSG00000253698_1 (sequence is synthesized)
ggacagggccagcgggggtggtctcctggggttgccgaccctgagaaggccaaagccccggggctgctcaggcaggaaagtcacgcttcgcagctccactgactgtccccgcggggtggc

SEQ ID NO: 1007951 - DNA, 120 bp, Artificial Sequence
  ENSG00000253698_2 (sequence is synthesized)
gaggtgcagctgcaactggctctggaggtaagaaaacagcagctgcctacaagccaggaagagaggcctcgccggaaatcaactctaatgacaccttggtcttggatgtccagcctccag

SEQ ID NO: 1007952 - DNA, 120 bp, Artificial Sequence
  ENSG00000253698_3 (sequence is synthesized)
aacttcgagaaaataactttctgttgttgaaaccacccggtctgtgggattttgttgtggcagccctagcagactaaggcacaggccctaagctagatactttcatcctggcttctctac

SEQ ID NO: 1007953 - DNA, 120 bp, Artificial Sequence
  ENSG00000253698_4 (sequence is synthesized)
tcagctctcgggcggccctgtgaggggggcatcgtcctcgctgtcctggtctcaccaagaaggtgcaagacttcaagaagctgcaggcggttctgtgactggatcaagtttgcagagcta

SEQ ID NO: 1007954 - DNA, 120 bp, Artificial Sequence
  ENSG00000253691_0 (sequence is synthesized)
tcagctcctggggctgctaatgctctgggtctctggatccagtggggacattgtgatgacccagactccactctccctgcctgtcactcctggagagccagcctccatctcctgcagatc

SEQ ID NO: 1007955 - DNA, 120 bp, Artificial Sequence
  ENSG00000253691_1 (sequence is synthesized)
ctgcagatctagtgagagcctcttggatactgatgatgaatacacctatttgaattggtacctgcagaagccaggccagtctccacagctcctgatctatgaggtttccaaccgggcctc

SEQ ID NO: 1007956 - DNA, 120 bp, Artificial Sequence
  ENSG00000253691_2 (sequence is synthesized)
tggagttccagacaggttcagtggcagtgggtcaggcactgatttcactctgaaaatcagtagggtggaggcttaggatgttggggtttattactgcatgcaagctctacaaactccgcc

SEQ ID NO: 1007957 - DNA, 120 bp, Artificial Sequence
  ENSG00000253690_0 (sequence is synthesized)
gccaggctcgggctcttcctgctcctggaacaagctccggactcggggcattcgccgcagatgctgcatctccgaagctctcggctggtagagagcagccgccacatgctctggggcggc

SEQ ID NO: 1007958 - DNA, 120 bp, Artificial Sequence
  ENSG00000253690_1 (sequence is synthesized)
agggctgagctgccaagagctcctggccatgaccttggtgcatggagtccagagggggctggggaagaccttctcttcacactcgaggatgcacacctgcaaagatacgggtttcgaggt

SEQ ID NO: 1007959 - DNA, 120 bp, Artificial Sequence
  ENSG00000253690_2 (sequence is synthesized)
gggactaacccaggaagatgctaccaacgtaagatggtcaactgtggtgtctctcacttgagagtccaagggtatcagctggcagaagcacacccaatggcatggaaacttccagcaact

SEQ ID NO: 1007960 - DNA, 120 bp, Artificial Sequence
  ENSG00000253690_3 (sequence is synthesized)
tgtgaattttgtgtttgttactccctatgtacatgtatcgtaaataccattttgcttggttgatatttatatttgctattttaagcttcataaatcacaggcagcaagcctgcctgtcca

SEQ ID NO: 1007961 - DNA, 120 bp, Artificial Sequence
  ENSG00000253690_4 (sequence is synthesized)
ttccagaaggagacatggtcttcatgatactgcacagcatgcgcacctgacttgctctggaaggagatactctgtctaccacaggttttcaccgtacagacatccttgaaaagatacccc

SEQ ID NO: 1007962 - DNA, 120 bp, Artificial Sequence
  ENSG00000253690_5 (sequence is synthesized)
ggaagtaagggctctttctcaagatgtgcaggacttgagcagctcatgggtaagtgtctgtcaacaggaattcatcagcgagctacacaggcccgacctcttctgctctctgcaagctga

SEQ ID NO: 1007963 - DNA, 120 bp, Artificial Sequence
  ENSG00000253690_6 (sequence is synthesized)
cattttagttggggagaccggactttgcataaacaaactcaacagactgtctttagtgcactgaaggagttaacaaaagcatcaatgtgagactttttcaggaaaacatgactaagatgg

SEQ ID NO: 1007964 - DNA, 120 bp, Artificial Sequence
  ENSG00000253693_0 (sequence is synthesized)
aaaacttgatctttaccagaggtgagaagttgctgttgaagccacactgctgatgaggactcaggcaggtgtcccgagaaatcgcccagtcgtgagaggaaccataagaactttgtaagg

SEQ ID NO: 1007965 - DNA, 120 bp, Artificial Sequence
  ENSG00000253693_1 (sequence is synthesized)
taaatacttttcttaactttttaaaatctgggcaagacacaaggtcaatgtttaaaataattactgttggattttctttataagaagaataacgctaattcacatttttagcccgatttc

SEQ ID NO: 1007966 - DNA, 120 bp, Artificial Sequence
  ENSG00000253693_2 (sequence is synthesized)
tttaattcatatttggcgatagagctattaccatttattagattttgtatcacattctgtataacatacacaaaatgcgtatacatgtacatatatacgaatctacacacgtttaccact

SEQ ID NO: 1007967 - DNA, 120 bp, Artificial Sequence
  ENSG00000253693_3 (sequence is synthesized)
gttatcgaaagtctttatctgcctagattgccaagtagaaagtgtgaccactttttgaaaaatatgaatacactgaatcattgaaatatcttggtgtcccagagagtagaaccaggatag

SEQ ID NO: 1007968 - DNA, 120 bp, Artificial Sequence
  ENSG00000253693_4 (sequence is synthesized)
tctaaagcgtgcaaatattaaattgtgtgaagcattttggttctaaatttcagttaagagagaggctatttcacagttggcctacttcctacaggaaaccacagtgatgttttattaagt

SEQ ID NO: 1007969 - DNA, 120 bp, Artificial Sequence
  ENSG00000253693_5 (sequence is synthesized)
aatggaatatagtttgtctcttcatttacctgtaagaaatgtggcagggagagacttgaaactaggacttaaagagtgacaagtaccaggcatgagaaacacagctcccttaaagaaaaa

SEQ ID NO: 1007970 - DNA, 120 bp, Artificial Sequence
  ENSG00000253692_0 (sequence is synthesized)
aacccgagaggggtgagcgcctacctaagccggcccagcccgttcgacctgttcatccgcaagtcgcccacgatcacctgtctggtggtggacctggcacccagcaagtggaccgtgaac

SEQ ID NO: 1007971 - DNA, 120 bp, Artificial Sequence
  ENSG00000253692_1 (sequence is synthesized)
ctgacctggtcccgggccagtgggaagcctgtgaaccactccaccagaaaggaggagaagcagcgcaatggcacgttaaccgtcacgtccaccctgccggtgggcacccgagactggatc

SEQ ID NO: 1007972 - DNA, 120 bp, Artificial Sequence
  ENSG00000253692_2 (sequence is synthesized)
ctcgtgcggtccacgaccaagaccagcggcccgcgtgctgccccggaagtctatgcgtttgcgacgccggagtggctggggagccgggacaagcgcaccctcacctgcctgatccagaac

SEQ ID NO: 1007973 - DNA, 120 bp, Artificial Sequence
  ENSG00000253692_3 (sequence is synthesized)
ttcatgcctgaggacatctcggtgcagtggctgcacaacgaggtgcagctcccggacgcccggcacagcacgacgcagccccgcaagaccaagggctccggcttcttcatcttcagccgc

SEQ ID NO: 1007974 - DNA, 120 bp, Artificial Sequence
  ENSG00000253692_4 (sequence is synthesized)
ctggaggtgaccagggccgagtgggagcagaaagatgagttcatctgccgtgcagtccatgaggcagcgagcccctcacagaccgtccagcgagcggtgtctgtaaatcccggtaaatga

SEQ ID NO: 1007975 - DNA, 120 bp, Artificial Sequence
  ENSG00000253695_0 (sequence is synthesized)
gttgcctttattatatccatttctgtattcgtaccagcacctcgcaaaataattgtctcagcagactcccttgggcaatacttcacagacatgactgtgcacgccagtcacccagagatc

SEQ ID NO: 1007976 - DNA, 120 bp, Artificial Sequence
  ENSG00000253695_1 (sequence is synthesized)
atgttaaaatgcacatctggttcagcaggcctaggtttctgtatgttatagaagttcaaagaagacaaactctagccaagagcagtgtgaagaaaagaagacgctatattaatcacagtc

SEQ ID NO: 1007977 - DNA, 120 bp, Artificial Sequence
  ENSG00000253695_2 (sequence is synthesized)
cagggatgccttctggcttcctggcagcaattccggcctgagattccttctctgtgcatacttcctgtcaacattgtgtgatgtcaagctgtggccgtcacaaaagtactgtgaacacct

SEQ ID NO: 1007978 - DNA, 120 bp, Artificial Sequence
  ENSG00000253695_3 (sequence is synthesized)
gtaaatcccaactatcaaaaatcacacccaggaatccaaattagcattattatgtcaaaagaaaaacctgatttcttcactgtctgataactgctttctttattgtcctaaactagcatt

SEQ ID NO: 1007979 - DNA, 120 bp, Artificial Sequence
  ENSG00000253695_4 (sequence is synthesized)
ccctaacctttgagtgagatagtgacactttagtttcttatattctaaaatgttttcaggggcagctggtggcagaggagagggcagtggggatagggcagggagacagatacctgcaca

SEQ ID NO: 1007980 - DNA, 120 bp, Artificial Sequence
  ENSG00000253695_5 (sequence is synthesized)
aggaaggtatggggatgaggtgggagtcaagatgatgaacggagagagggatggtaaccgatttagtcacccatttgagagggtctccagacttgcactgctggctaaagactcctgtcc

SEQ ID NO: 1007981 - DNA, 120 bp, Artificial Sequence
  ENSG00000253695_6 (sequence is synthesized)
ctgttggctctccctgaccccttctaaagctttctttctagcttctgctgccctccaggtaagcactccacagcctgtggagctctgtgggtatagtctgtccttcccataatgatttgc

SEQ ID NO: 1007982 - DNA, 120 bp, Artificial Sequence
  ENSG00000253695_7 (sequence is synthesized)
ctcgctgcagtaattaacagaatgacttccaaaattaagggttcaaatctggctgtgacacctacaattatgtcccctctctgattcctcacctgctaatccatggggttgctgtgagca

SEQ ID NO: 1007983 - DNA, 120 bp, Artificial Sequence
  ENSG00000253695_8 (sequence is synthesized)
catgggatgcctcatgatactgcaagtggccactgccagttgccttgagaattacaagcagctcttggtgcctaatctgctccatctcttattcttcatattctatgtatgtcttcctct

SEQ ID NO: 1007984 - DNA, 120 bp, Artificial Sequence
  ENSG00000253695_9 (sequence is synthesized)
gccacttaccagctgttgaccttgggcaggttactaaatttcctatgctttcttttccccatttatgtaagaatagcaatgatacctacctcaaaggtactgtagatgctatagatggaa

SEQ ID NO: 1007985 - DNA, 120 bp, Artificial Sequence
  ENSG00000253695_10 (sequence is synthesized)
cattggtttcctccttaaaatttacatattgaaatcttaacccccaatgtgagagtatttgcaggtgggaccttgagaggtgattagttcactagggtggagcccacatgaatgggatta

SEQ ID NO: 1007986 - DNA, 120 bp, Artificial Sequence
  ENSG00000253695_11 (sequence is synthesized)
atgcccttataaaagagatcctggagagtcttgtcccttccaccctgtgaggacatggtgagaagtggcccctcaccagacaccaattctgccagcaccttgatcttggacttcccagcc

SEQ ID NO: 1007987 - DNA, 120 bp, Artificial Sequence
  ENSG00000253696_0 (sequence is synthesized)
tgtttgctaagtcaccgcgcaggaggagacagaatcagaggtgacgaatgtaagtccacccattggcttaagatccagtatcctgagtgagttgcacagatcctctccttcagtcctctc

SEQ ID NO: 1007988 - DNA, 120 bp, Artificial Sequence
  ENSG00000253696_1 (sequence is synthesized)
aggaactctagaggtccctgcagttatgaagaactaattaaaggcatgaaatgttcctctgcaagtttcattgaccatattgggcctacagtccatttccaaataaatatctaaggtagc

SEQ ID NO: 1007989 - DNA, 120 bp, Artificial Sequence
  ENSG00000253696_2 (sequence is synthesized)
aaccttggcagtgggagcccagcaggtcccgtctttgtccctgtgctgatacagagagactctccgtgctgtggacgcctccatctgggcacatgtttcagttgttttctaaataccaag

SEQ ID NO: 1007990 - DNA, 120 bp, Artificial Sequence
  ENSG00000253696_3 (sequence is synthesized)
tcaaggaggactggtgtctgagtgggcttgagaagggcccggagaacagcgggtttcctgatcacaaatcagcctgtcattcagcatgtgttcccttggtgactcagggcgatatctgcc

SEQ ID NO: 1007991 - DNA, 120 bp, Artificial Sequence
  ENSG00000253696_4 (sequence is synthesized)
cttctccggaggtcaagggctcatcgtgtcaattgtggtcttgagtttgttttttttttcctcttgaaatcattgtaattaagctaaaagtatagtgttggtatccagcacatgtttgca

SEQ ID NO: 1007992 - DNA, 120 bp, Artificial Sequence
  ENSG00000253696_5 (sequence is synthesized)
aagtatttaacaatgagcaaaaactttaagaataaattaaagcatctagtttactttttgccaacagccaggttcctgctagaaatgattttgaaataaatgttgtcttggaaatagaaa

SEQ ID NO: 1007993 - DNA, 120 bp, Artificial Sequence
  ENSG00000237781_0 (sequence is synthesized)
ccaggagatgttgcgttgagtgcagagttcaggacccagggggatccacagcccagttcccattgatgatggaccggcccccagggccacgaagtgctgcgggtcagagactccacagcc

SEQ ID NO: 1007994 - DNA, 120 bp, Artificial Sequence
  ENSG00000237781_1 (sequence is synthesized)
atcaggacgcctgccagagccaaggatcccatcacagccggggctctggagagagtgagtgagagcacaaaaacagccccaccatccccagccagacccagggacatggacaggtgcccg

SEQ ID NO: 1007995 - DNA, 120 bp, Artificial Sequence
  ENSG00000237781_2 (sequence is synthesized)
caggggagtccggacaaagcgtgtctcccacacctcctcctcccaccccgacccttctgcagaccactcaccacctgtgctgtctcctgacccagccccagggagaagaaagaaggcatg

SEQ ID NO: 1007996 - DNA, 120 bp, Artificial Sequence
  ENSG00000237781_3 (sequence is synthesized)
gcgcaggggaagcagaggggctggaagtcattcagggctgggagtaagcagtaaggttttacactcgggactcagcgaaaggacagcgtgctgacttctgagtcagactgatctggattt

SEQ ID NO: 1007997 - DNA, 120 bp, Artificial Sequence
  ENSG00000237781_4 (sequence is synthesized)
gaacctcagctccagctcttgccagctatgtggtcttcgacgaatacttccacccctgtgtggtgcagtttgctcatctgcaaaatgggactaatctaatatatatgatgggcttggata

SEQ ID NO: 1007998 - DNA, 120 bp, Artificial Sequence
  ENSG00000237787_0 (sequence is synthesized)
aaaggactgtggaacatctcagagcctctcagtaggagcagaaaagttactggggagtacagatgcatgtatgtgatctgcagaagctggtcaggatccaacttgcatttactacatttc

SEQ ID NO: 1007999 - DNA, 120 bp, Artificial Sequence
  ENSG00000237787_1 (sequence is synthesized)
catggatgttcagttgccatcttctgcctactcctgagctttcatccaagagaaatcagtgtttgctttacaagacttccggttgtctaacccaaatgccaattttatatgggcaccctg

SEQ ID NO: 1008000 - DNA, 120 bp, Artificial Sequence
  ENSG00000237787_2 (sequence is synthesized)
tcaaacagatgccagtcacttgtaacatctgccctaccattggaataacataatgagaggcctgggcaacccagagagaagtgtaaatgacatcagttactaataagaacactgctgaat

SEQ ID NO: 1008001 - DNA, 120 bp, Artificial Sequence
  ENSG00000237787_3 (sequence is synthesized)
tttgaaaaacttttgcatgctttaatttctccatattttaagtaattatactaattatgagagtgctgtgtattattagttgtttggtcacaaataaaaacaaaattcatttcaaatata

SEQ ID NO: 1008002 - DNA, 120 bp, Artificial Sequence
  ENSG00000237787_4 (sequence is synthesized)
ggcacatattaagcctagaatgtgctagccaatgtggtactggactgacgtggctcatggatctcatggtgggaactacatagagtggacttatgagaaaagccagctggggctccagga

SEQ ID NO: 1008003 - DNA, 120 bp, Artificial Sequence
  ENSG00000237787_5 (sequence is synthesized)
gcatcacggagcaaagagagataaggcccgaagatccagactgatgataagcctaaagctggtggaggacaatcactactggattctaccacagaaggctgcaaacacggctgaggattt

SEQ ID NO: 1008004 - DNA, 120 bp, Artificial Sequence
  ENSG00000237787_6 (sequence is synthesized)
aatccacctgccatggtgagtagcactacaagagaggcccatgcagcaaagaattgaaacctctaaacaatagccatgtaagtaagtttggaaatggattcttagcctaaccttaggata

SEQ ID NO: 1008005 - DNA, 120 bp, Artificial Sequence
  ENSG00000237787_7 (sequence is synthesized)
actgtggccccaggcaatagctggactggaatcttatagagattttgcaccaaaaccgcttagctcatctgctaccagattccaggcccacagaagccctgagattaaaaaaatgtttga

SEQ ID NO: 1008006 - DNA, 120 bp, Artificial Sequence
  ENSG00000237787_8 (sequence is synthesized)
gttctggggaatccacctgccatggtgagtagcactacaagagaggcccatgcagcaaagaattgaaacctctaaacaatagccatatgcatgtatgtgatctgcagaagctggtcagga

SEQ ID NO: 1008007 - DNA, 120 bp, Artificial Sequence
  ENSG00000237787_9 (sequence is synthesized)
attctggtcaacgagatttaagcaaagtgttttgtgggactttaggaaagcctccttaaatgggaaaaggaaagaagattcaaggaggaactgaaatacagagaggctcctttgcaaacc

SEQ ID NO: 1008008 - DNA, 120 bp, Artificial Sequence
  ENSG00000237786_0 (sequence is synthesized)
ggagtaactttcctcttctcgcggagcaccctatcccctattatcggcatctgatcttcctagttcggatccccggaacacacgccttctccagcctgcaatctacacacgtggggaagc

SEQ ID NO: 1008009 - DNA, 120 bp, Artificial Sequence
  ENSG00000237786_1 (sequence is synthesized)
ctagtgtagaaggggacactcatctccttggccagctcctccgcttcttcctgcgtgcggccccacagcgccttcaccgcgaagccctcgtctttcagcagcgggatgatgacacgggcc

SEQ ID NO: 1008010 - DNA, 120 bp, Artificial Sequence
  ENSG00000287850_0 (sequence is synthesized)
ggtgtttagcgggggcccaacacacctcggtctcctcacccacctaagcggggagagtggcgcacaacgtggcctgactccatcctctggtatctcgtgcctcagtttcccatctgtaaa

SEQ ID NO: 1008011 - DNA, 120 bp, Artificial Sequence
  ENSG00000287850_1 (sequence is synthesized)
tggaacacacgcgatttcagccgccgttcaacctttctaaaagctttcacatccattatctgactggtgtctcaaactgctactgaggcttcagctctgatctggaccagtgctctccag

SEQ ID NO: 1008012 - DNA, 120 bp, Artificial Sequence
  ENSG00000287850_2 (sequence is synthesized)
gcctactgcacagctgtcatactgaactttcctatatcctacacctggttgggattccctgtgccctggaccttgtgtctcaaacttctagattgtggatttactctgtcatctctgtgc

SEQ ID NO: 1008013 - DNA, 120 bp, Artificial Sequence
  ENSG00000287850_3 (sequence is synthesized)
gtagattcctgagaaaggttgcaaagaagcaaatatatttagtccttgtatgtctaaatatgcatttatactgttttcacacttgattaatagtttagcagggtatagaaatctaggctg

SEQ ID NO: 1008014 - DNA, 61 bp, Artificial Sequence
  ENSG00000287850_4 (sequence is synthesized)
acttgattaatagtttagcagggtatagaaatctaggctgaaggccaggcgccatgagtgt

SEQ ID NO: 1008015 - DNA, 120 bp, Artificial Sequence
  ENSG00000249966_0 (sequence is synthesized)
gggagcgcgggtcttgagccacagcagagggcatcagcctcagcaagcccagacccgcccggaggctccgcttctgcaaactcagccggacttgggagggccgcccagagagaaggggaa

SEQ ID NO: 1008016 - DNA, 120 bp, Artificial Sequence
  ENSG00000249966_1 (sequence is synthesized)
ccccgtccgttcgtctttcacccccattccttgctactccaggggccgcgccagcagcattttcccaggcagccggtcgtcatcctcctccctgcagcctcctcctgcgccctctcacga

SEQ ID NO: 1008017 - DNA, 120 bp, Artificial Sequence
  ENSG00000249966_2 (sequence is synthesized)
ggcgctggggcctggtgcggaaggatttacagggaaggaatgtcgggctcctccggctgggagcgcacctgcgcagggagggtcctgtcccaccacacctggccccctggggaacagcgg

SEQ ID NO: 1008018 - DNA, 120 bp, Artificial Sequence
  ENSG00000230789_0 (sequence is synthesized)
cattttaaatggttatataagtagctaaataatattctcagttttgcctcttggcctgcaatgtctaaactatttactttatggccccttaagaaaaagtttgctgacttggagacccct

SEQ ID NO: 1008019 - DNA, 120 bp, Artificial Sequence
  ENSG00000230789_1 (sequence is synthesized)
cttggaacataaccaccgaggataagggggcactactttgttagactccacagatgaacaagggtcagttgtccacactgaccactgtggccagcctggatcacatgcctgccctgcagt

SEQ ID NO: 1008020 - DNA, 120 bp, Artificial Sequence
  ENSG00000230789_2 (sequence is synthesized)
gaaatcagcaggacactggactcacctgggtcacttaggatggaaaagaacttctccaagtgaaccagaagaaggggaatgcaaaaattctagaataaactgtaactacatattccagtc

SEQ ID NO: 1008021 - DNA, 120 bp, Artificial Sequence
  ENSG00000230782_0 (sequence is synthesized)
gagctttggcactggtccaagaaacaggataagctaaatctctgcatctattctggacaccagaatggcgcggggaccatttagaggtgagatgggcagatgaggagctgaagtttcaga

SEQ ID NO: 1008022 - DNA, 120 bp, Artificial Sequence
  ENSG00000230782_1 (sequence is synthesized)
gaggttaagcaatttgcctaggttcacacagcaaagatgatgaaacttacaaccacaaggtgagcccttcttactagaagttctcttcgtgtctcctggtgttcacatattggaagactt

SEQ ID NO: 1008023 - DNA, 120 bp, Artificial Sequence
  ENSG00000230782_2 (sequence is synthesized)
cctcctaggacctaccaatccagccttatcagacacctggcagagaaagtgatttctgaagcaggagaaaacccaggaagattgctcagttcctgtgcaagctgcttcccagctggagat

SEQ ID NO: 1008024 - DNA, 120 bp, Artificial Sequence
  ENSG00000230782_3 (sequence is synthesized)
gacagttaatcttgaaaatcaattcagtgcctgctctcactgcagacactcctcagggcaggccacggctcctctcaccaccgttaaacagaataaaaagtggggaattgagcagcataa

SEQ ID NO: 1008025 - DNA, 120 bp, Artificial Sequence
  ENSG00000230782_4 (sequence is synthesized)
ttaagcaatttgcctaggttcacacagcaaagatgatgaaacttacaaccacaagcaatccccagaagcagccctttcacagagaggaagctgaggcttagagggtgtcaatggatgatc

SEQ ID NO: 1008026 - DNA, 120 bp, Artificial Sequence
  ENSG00000230782_5 (sequence is synthesized)
cagtgctgcagagccagaagggccaccataacaatgaaatggaggcagcatacattggtaatggaaagagcatgggagtttggaagtcaaaagagatggatgttttctgaccttgataag

SEQ ID NO: 1008027 - DNA, 120 bp, Artificial Sequence
  ENSG00000230782_6 (sequence is synthesized)
gactctgaaaatgatccttacaagtaaacagaagagaccacaaataaccagtgacaggtaatgtgatgagacatgggatcaaaggactgcgattgactgcttaccagttgggtgactttg

SEQ ID NO: 1008028 - DNA, 120 bp, Artificial Sequence
  ENSG00000230782_7 (sequence is synthesized)
agtgagtgattccagctctcatgtgccctgcaaaacttactattgtatttatgatgggcacaatatgcactacgtcacacactgtgcccttcaggaaaacctgctagacaaattcctcta

SEQ ID NO: 1008029 - DNA, 120 bp, Artificial Sequence
  ENSG00000230782_8 (sequence is synthesized)
ggtttcagtgtctaggattcctgaaaatttcctgaatgacagttcaaaaaagtctaacaagcagttgaaatctggttgcttctgtgggtttcttttctaccatggtaggcaaggaatctc

SEQ ID NO: 1008030 - DNA, 120 bp, Artificial Sequence
  ENSG00000230782_9 (sequence is synthesized)
agggcgaaatctgcagcccactgtgaacaagggcatggcacctcatggtatccactgggtatccaaactctcagctagctttttcatacttagaggtgaactttccactagtttcttctt

SEQ ID NO: 1008031 - DNA, 120 bp, Artificial Sequence
  ENSG00000230782_10 (sequence is synthesized)
attttgcatttaccccaatttccttatttgtttttaaacctatagttcggcacacacgtctttaagatatcttaaaacctttgtgaaatgaagtagatggcaaataagtacattaaatta

SEQ ID NO: 1008032 - DNA, 120 bp, Artificial Sequence
  ENSG00000230782_11 (sequence is synthesized)
gttgagggtagaatgctatgggagtatttgtggtcgtagtgtttaatctctctttgcttccccctttcttgtgttctcagctcagggagggaaagtcattgagcttgttaggcatcaaag

SEQ ID NO: 1008033 - DNA, 120 bp, Artificial Sequence
  ENSG00000230782_12 (sequence is synthesized)
ctctgttcctgccaggcagcaatatgggaaaagaagggaaccaaccacagaaagtgaagactcgccatgtctgctcggcagcagccctgctgatggccccttaccaagctgtgatagggc

SEQ ID NO: 1008034 - DNA, 120 bp, Artificial Sequence
  ENSG00000230782_13 (sequence is synthesized)
acagagccaccgcaacacatgggctgggggaccggaagccaggtgactgaggcggaacaccaggcgggaccactcgggccaagaattcctgcctaaatgttcctatgatacttctcccag

SEQ ID NO: 1008035 - DNA, 120 bp, Artificial Sequence
  ENSG00000230782_14 (sequence is synthesized)
cttgcaggtggacatcctagccagcaacgatctcatgtctcattagagtgcaagggggaggagggaaatctgtgcatgttaaatgtccagccttccattgagtttgcatgaacatgggtg

SEQ ID NO: 1008036 - DNA, 120 bp, Artificial Sequence
  ENSG00000230782_15 (sequence is synthesized)
agtatgtcacaaatgtattggccaaaggcaatggctcaggggcaatgtgaggtgtgttgccaatggcccccaaatactcagcatttcagagtgagtgacatcccagcaagacaacagatg

SEQ ID NO: 1008037 - DNA, 120 bp, Artificial Sequence
  ENSG00000230782_16 (sequence is synthesized)
acactcattgcttttgaggcatatgtgacaaatattggaaggctttctaaggtcagaggcgaaggaatgaagataggagggaagaggatgaaaagaagggatggagagaaagaatgaagt

SEQ ID NO: 1008038 - DNA, 120 bp, Artificial Sequence
  ENSG00000230782_17 (sequence is synthesized)
agatggaaagatcagtagaaacaccaatcaagactggcaatgagtactccagtaatctttttctatccacctgtagcttgaatcttttcaggacgaaacagattctacatatttttcctt

SEQ ID NO: 1008039 - DNA, 120 bp, Artificial Sequence
  ENSG00000230782_18 (sequence is synthesized)
ccaatgcagaggaaggctgttgtttaacagtgttttaattggccaagggtaaatgcaactcaaagaaagaccgaagtggacttaaaagaagtatcactgtttatcagcaggaaccaacat

SEQ ID NO: 1008040 - DNA, 120 bp, Artificial Sequence
  ENSG00000230782_19 (sequence is synthesized)
ttattgagcagtcattatgcatccattatgaaaaaccactggacactttacccattatctcataggtacaatcatctcttttaatggatggagaggttaaacacagtgggctctaaaacc

SEQ ID NO: 1008041 - DNA, 120 bp, Artificial Sequence
  ENSG00000253963_0 (sequence is synthesized)
aagccaggtcaggtccctgtgctggtaatttatggtgacagcaaccagccctcagtgattcctgagcaattttctgactgcatatcagaggacatggccaccttgattattaatggggca

SEQ ID NO: 1008042 - DNA, 120 bp, Artificial Sequence
  ENSG00000253961_0 (sequence is synthesized)
gagccgcttcatcctctactcggtgtaactatctctgagattccacatcctttgagattaaaaacactttacatcttctgggtctgttgacgggtccttccaccaatcacatcgctgtgc

SEQ ID NO: 1008043 - DNA, 120 bp, Artificial Sequence
  ENSG00000253961_1 (sequence is synthesized)
ttaacaacttgaacagatctcttcagaaccgggaaaacatctccttttgttgacatcacatgaaggttgaagtccgctgtcaggaccatgtttaaggatctcaattgccatgtggataag

SEQ ID NO: 1008044 - DNA, 120 bp, Artificial Sequence
  ENSG00000253961_2 (sequence is synthesized)
ttggttacaaagttacattcctacgcagaagcaaccagagatactttcaattttccatgtgccacgcagaaagttctaggaagtcagtgtgaatcggccttagtttccttgcctccagac

SEQ ID NO: 1008045 - DNA, 120 bp, Artificial Sequence
  ENSG00000253961_3 (sequence is synthesized)
cagggaagagaaaatcaaaagaacggatgagacttatatacactgttccttgtagattctggatattgggcctttgtcagatgcatagattgcaaaaattttctcccactctgccaaaag

SEQ ID NO: 1008046 - DNA, 120 bp, Artificial Sequence
  ENSG00000253961_4 (sequence is synthesized)
aggagtacatctgaacagcaatagagcagaggaagaaaccctaagtcatgttgtagcctaataccatggagtagcacagactttgaaaccaggcagaaccaggtttgaactttaattgag

SEQ ID NO: 1008047 - DNA, 120 bp, Artificial Sequence
  ENSG00000253960_0 (sequence is synthesized)
agaaaagcagtccaaaatcatccacaagctgagaaatcggctcctggacattagagaaaatgcctgtcaatgtatagaaaggatttagttaattaattacatgtatgtgagcatcttgaa

SEQ ID NO: 1008048 - DNA, 120 bp, Artificial Sequence
  ENSG00000253960_1 (sequence is synthesized)
catagccagcaacaaatacctgctaaccggttataaatgacattgatgaatattcagacaaaaatttcaacagcctttctctctgtagaggaattctccagattgtgacctgaggcacaa

SEQ ID NO: 1008049 - DNA, 120 bp, Artificial Sequence
  ENSG00000253960_2 (sequence is synthesized)
atctggtgcatggaatctaggtgaataccagtgggtactgtgagtcctgtctttatcatcctctggatgcttgcccaaaattcattctggcaacaaatactggagattttacctgtccct

SEQ ID NO: 1008050 - DNA, 120 bp, Artificial Sequence
  ENSG00000253960_3 (sequence is synthesized)
atttttagaatgtacctagccccttttctccatttctgctgccttttaaaagatcactactttaaaagatcactacttgcctccttaatgttattaaaaaaatctcctaactggtcttgt

SEQ ID NO: 1008051 - DNA, 60 bp, Artificial Sequence
  ENSG00000253967_0 (sequence is synthesized)
ttttctaagacctccctggcccgccatacgccgatcctgaacctacgaaaacccaagact

SEQ ID NO: 1008052 - DNA, 80 bp, Artificial Sequence
  ENSG00000253967_1 (sequence is synthesized)
ccgaggcgggcagatcacgaggtcaagaagtcgagaccagccttgctaacatggcgaaaccctgtgcgcgcctgtagtcc

SEQ ID NO: 1008053 - DNA, 120 bp, Artificial Sequence
  ENSG00000253967_2 (sequence is synthesized)
tgaggtaggagaatcgcttcaatccgggaggtggaggttgcggtaagcagagattgcgccactgcactctagcctggcgacagagactccttcaaaaacaacaacaacaacaacaacaac

SEQ ID NO: 1008054 - DNA, 120 bp, Artificial Sequence
  ENSG00000253967_3 (sequence is synthesized)
aacaaaacaaaacctcccaagaccctagtgggcagacacacagccagccagacatggagaggagcacattagcagaagaagacgcaagtggctggtcctcgagaggacgttgagaggagc

SEQ ID NO: 1008055 - DNA, 120 bp, Artificial Sequence
  ENSG00000253967_4 (sequence is synthesized)
atgccagcagaagagcacacaacgacaggcaccgacacaccaccggcaggccatgcaccagcagaatgatgcggagtttgacggggcagtcagagaagagcctgggccgccaaggggccc

SEQ ID NO: 1008056 - DNA, 63 bp, Artificial Sequence
  ENSG00000253967_5 (sequence is synthesized)
aatccgattcttcagtgtcacctcccaaatgtggaaatgcattgtctttcttctttcctagac

SEQ ID NO: 1008057 - DNA, 120 bp, Artificial Sequence
  ENSG00000253967_6 (sequence is synthesized)
cccaaatgtggaaatgcattgtctttcttctttcctagaccagtggtcctcaaacttgagcaggtttaagcatggtcatagcagaatcaatgtgctcaccccatcatgaaaaaaaaaatg

SEQ ID NO: 1008058 - DNA, 120 bp, Artificial Sequence
  ENSG00000253967_7 (sequence is synthesized)
tgttaatgaattgattactactttgagtgtgccatattttaaagacgaagagaaactaatcaagttagtttttatttggtcagaggcttgtttgtgcctgcttatctaaagttataaagg

SEQ ID NO: 1008059 - DNA, 120 bp, Artificial Sequence
  ENSG00000253967_8 (sequence is synthesized)
ccccaaatatggctccgtgttgcagagggactgtctcttcttatatcgacagagcccatattcacaatgtatcacacttacctcgatgtattgtctggagtttcctaggctgtgtccttt

SEQ ID NO: 1008060 - DNA, 89 bp, Artificial Sequence
  ENSG00000253967_9 (sequence is synthesized)
ccagcactttgagaggccaaggtgggagtatcgtttgagcccaggagttcaagacaaccaaagaaaagaaaagaaaagaaaagaaacag

SEQ ID NO: 1008061 - DNA, 120 bp, Artificial Sequence
  ENSG00000253967_10 (sequence is synthesized)
agaaaagaaaagaaaagaaaagaaacagccactttctcttccatgagccagtttatgttttcttcacggcatttgttacaaatcacaaatgtggaggaaaaatgaaggcaaagcaaaata

SEQ ID NO: 1008062 - DNA, 120 bp, Artificial Sequence
  ENSG00000253967_11 (sequence is synthesized)
acaggcaagtctgaaaacaaaagtgttgccagtcacgctaagcctcaggcacgcattctgaatgaagctaaagtttaaagtcccctctgatagatttgtgacttaaatgtccacactagc

SEQ ID NO: 1008063 - DNA, 120 bp, Artificial Sequence
  ENSG00000253967_12 (sequence is synthesized)
aagtgtgtttctcacatggagaagtagcacgattttatgtcaggaaagggatgagaacatgcttcttgaacacatacaatgctgaagacatttcctggaaaaccattggcctttgcttag

SEQ ID NO: 1008064 - DNA, 120 bp, Artificial Sequence
  ENSG00000253967_13 (sequence is synthesized)
gacagttgcatcacacagagatgtttgtggttcagatttataagaaacatgggaactgaagccaaagcactacttttgctcagtataaccaggtgccagatctaaagtgttaggcaggtt

SEQ ID NO: 1008065 - DNA, 120 bp, Artificial Sequence
  ENSG00000253967_14 (sequence is synthesized)
cctatatgtatgttagaaaaaagttgcccaagttttggacaattccttttccatctctcttacaagtcaacaaatcgaagcaataaactattctctgaagaaaacaaatttatttggttg

SEQ ID NO: 1008066 - DNA, 120 bp, Artificial Sequence
  ENSG00000253967_15 (sequence is synthesized)
attcaaacttttaatgagactattactcccctgtgtgcctttcctttctctggttctagaaatacatctagaaagggggaaaatgttaatatattttctactgactttatatcacaaatg

SEQ ID NO: 1008067 - DNA, 120 bp, Artificial Sequence
  ENSG00000253967_16 (sequence is synthesized)
cttagcttagagggtggactctgaggaacagtgtcctttccaaatattataaaactttgtgttcattctggaaaaacaaacaaaattaatcacaatgatttcctgctttggagcaatgag

SEQ ID NO: 1008068 - DNA, 120 bp, Artificial Sequence
  ENSG00000253967_17 (sequence is synthesized)
aaatgggagggaaacttcaccttttcatagcttttgatgtttgcaccatgtgaattacccacccccaaatttaaaatacgaatttttgaaaaagtgtttacctctgagaagagaaactag

SEQ ID NO: 1008069 - DNA, 120 bp, Artificial Sequence
  ENSG00000253967_18 (sequence is synthesized)
tagtgaagaatgaggagctgtagatttttaacgattctgatgtatttgcatttttcccaatgttcatgaataaataaatgtgcattcataattaaaaagaataaacaacctggaaaaaac

SEQ ID NO: 1008070 - DNA, 120 bp, Artificial Sequence
  ENSG00000253965_0 (sequence is synthesized)
ttgctagggccgctcccttaggcccagtggctgcagacctgccggggcgcagagatggagatgcccagatggcagggagagatcctaaaccctcagccttgccctggcccaccgcggaat

SEQ ID NO: 1008071 - DNA, 120 bp, Artificial Sequence
  ENSG00000253965_1 (sequence is synthesized)
ggcccggagagatggggggttggggaagaacaacaggatggggaagggagggccaatcaggctcatctgaatgtaggtcagccacaccccacatattgaataccaagaatccatcccctg

SEQ ID NO: 1008072 - DNA, 120 bp, Artificial Sequence
  ENSG00000253965_2 (sequence is synthesized)
ttccagttggggaggggtgctgagtctgagtgaggaggtggtttcagtgccaggaggaatagaaactggcctgcggactgaatgggccttgaacccctgtgaccactcccttcaagaatg

SEQ ID NO: 1008073 - DNA, 120 bp, Artificial Sequence
  ENSG00000253965_3 (sequence is synthesized)
tgccccaaccttacggacaagtgactcaaaggagcctgagggggatgggagcaaggatttggcgcccttcctgtaaaacctggctgacacacaaacctagctggggtgaggctccaggtg

SEQ ID NO: 1008074 - DNA, 120 bp, Artificial Sequence
  ENSG00000253968_0 (sequence is synthesized)
ggaattacagccttttaatttacaacttgggttcttgaagagaagtcctctgaccagcagcctgatcacctggaaatttgttagaaatgtaggttcctgggcctcccgagactgactgct

SEQ ID NO: 1008075 - DNA, 120 bp, Artificial Sequence
  ENSG00000253968_1 (sequence is synthesized)
cagaagttctggagatgtcactgccactctccccagctccatcttcatcccgccgagtcccatcttccttctcaccagcctggtatttttgaacgtacatttgaattgcaacagtcggca

SEQ ID NO: 1008076 - DNA, 120 bp, Artificial Sequence
  ENSG00000253968_2 (sequence is synthesized)
tcaagatggtgggaaatagcagttgagatttctcaactagaagattgaaaagtctaaggctggacaaacaatcaaacaatgagaggttaagcctgagtttggtcttctgttacttggaac

SEQ ID NO: 1008077 - DNA, 120 bp, Artificial Sequence
  ENSG00000253968_3 (sequence is synthesized)
tgaaataatgtgcattgacacacctaacaagtcaaagtattgtcttttgctggtctgctctggtcctggaaacatccactgatagaatcactggtctgggacaaattgtggtacccaaag

SEQ ID NO: 1008078 - DNA, 120 bp, Artificial Sequence
  ENSG00000253968_4 (sequence is synthesized)
acctcaggaagcacttagaagcattactcctgaagtcccattcgtcccaagaagagttgctggctggaggagacaatatgtaaacatgtcatgacaagatggtgtggatttgtgaggcat

SEQ ID NO: 1008079 - DNA, 120 bp, Artificial Sequence
  ENSG00000253968_5 (sequence is synthesized)
tctgttatggcaacgtaagaagctaatacaagatgcaggagtgaagcagcgaggtctggaaaaaagctattgcaaaaatacagtctcagcaaggggatagaaggagccctgcattctctc

SEQ ID NO: 1008080 - DNA, 120 bp, Artificial Sequence
  ENSG00000253968_6 (sequence is synthesized)
ctgacacgcttgacaaaaacaaacccaactagaggtcgccagcaacggaggggcatcctgtgtaaggacttggaagaggagttgtattgtcaccccctggccactagaggacttcatcct

SEQ ID NO: 1008081 - DNA, 120 bp, Artificial Sequence
  ENSG00000253968_7 (sequence is synthesized)
atttcagtggaggaaggcctgttaggggcctctctatactggtggaggtttggtcgtcttcccttcacttgatttctgccagtggccttatgtgaggatgcttcatgagatgtcaagtat

SEQ ID NO: 1008082 - DNA, 120 bp, Artificial Sequence
  ENSG00000253968_8 (sequence is synthesized)
ccgaggagtctgtgacacaaccatccagtggtgaattgctaaggagctcctctccagcctgcttgactctgaggttaaaagagtcttcatgttgagcacaagtcatctctttgcactttc

SEQ ID NO: 1008083 - DNA, 120 bp, Artificial Sequence
  ENSG00000253968_9 (sequence is synthesized)
accagttgtgtccatctgaaaaacacagaggtctgtctcacttctgcatcacagtcccttccaagaagctccacaatgggtaaggcacaataaaatggcttatattcaacaaacacataa

SEQ ID NO: 1008084 - DNA, 120 bp, Artificial Sequence
  ENSG00000253968_10 (sequence is synthesized)
caggacgaacccctccctcttcttcagcctacttgatgtgaaggtgatgaagacctttgtgatgatccacttccacttaaaaaacagttaagcctgagtttggtcttctgttacttggaa

SEQ ID NO: 1008085 - DNA, 88 bp, Artificial Sequence
  ENSG00000253968_11 (sequence is synthesized)
attgaaaagtctaaggctggacaaacaatcaaacaatgagaggctgtacaagaagcatggcaccagcaactgctcggcttctggggaa

SEQ ID NO: 1008086 - DNA, 120 bp, Artificial Sequence
  ENSG00000272282_0 (sequence is synthesized)
gcgaaccccaaatgtgtgcgctgagccgaggcctctaagcggtaggagagaatctgacctccgacattcttttcaagacacgcgccggtggaccgggtcctgggattggcttactcccgg

SEQ ID NO: 1008087 - DNA, 120 bp, Artificial Sequence
  ENSG00000272282_1 (sequence is synthesized)
gctggaccttggggttcgcatatttgaaagcgtaaacttgaggaatgacggcggggtgatgggtattttatagagtgggactcaatcgtgctcagcaacagatttctccaaattcccttt

SEQ ID NO: 1008088 - DNA, 120 bp, Artificial Sequence
  ENSG00000272282_2 (sequence is synthesized)
taaaaagagcctcccagagctgtcgaaatctccgcggggtgaaagctaaacttttggagtcgctgtgtagccgggtagaggacacggcggcgcgagccggaaagataagtgtccaggcga

SEQ ID NO: 1008089 - DNA, 120 bp, Artificial Sequence
  ENSG00000272282_3 (sequence is synthesized)
atgggaaaggaaagatcttaatttttgttcctactgttagctgaatgtccataaaaatcaaagggaatgcggggaagtttttattccagagcgtttccatgacacccgcagagatttaaa

SEQ ID NO: 1008090 - DNA, 120 bp, Artificial Sequence
  ENSG00000272282_4 (sequence is synthesized)
cctacgcaggtttaattcggaaagaagagactgcagaggagagggaagaccgtgagtctgctttcacctaggtttaaagcgaatcaaagacggctgtaaaaagggaaaccgggaccaaaa

SEQ ID NO: 1008091 - DNA, 120 bp, Artificial Sequence
  ENSG00000272282_5 (sequence is synthesized)
acagatttggagcctcgaaactctccattgaaggtttggaagatacgttgctgcagacttgaaaccggctccaaatccggcccaaacatgggctgaaaatatggcgcgctaatctgctgc

SEQ ID NO: 1008092 - DNA, 120 bp, Artificial Sequence
  ENSG00000272282_6 (sequence is synthesized)
ttcccctcctcctcaagttctttctgactcttcccacctttcccagtttcccttccagacgtctgcggctccccactccacccccaggatagctactctacatcccgacaattcccagct

SEQ ID NO: 1008093 - DNA, 120 bp, Artificial Sequence
  ENSG00000272282_7 (sequence is synthesized)
tctacacccaggaggaggaattctggaaccacccagagcgaactcgtgccggggcggggtggggaccggaggaaggtcctgctccgaattctctccagagcagaaaagaattctagaggc

SEQ ID NO: 1008094 - DNA, 120 bp, Artificial Sequence
  ENSG00000272282_8 (sequence is synthesized)
tacatgtgggctgctttccccccttcttccttttttccctcgcaaaccaacaaccaaaaagtgtttggtgatggaaagaacaccagtggaaaacggcaaataacagtatttccaactccg

SEQ ID NO: 1008095 - DNA, 120 bp, Artificial Sequence
  ENSG00000272288_0 (sequence is synthesized)
aaactcgtgacgtccccgcgtgacctcaccgctgcggggcgatggagcgaaaagtgaggaaactgaagtcccgggagagacagtggcaaggtcaagtagcaaagtgcactcagccctccc

SEQ ID NO: 1008096 - DNA, 120 bp, Artificial Sequence
  ENSG00000272288_1 (sequence is synthesized)
ggagtctgccactcgcgcttgaaggacgtgtttgaagagctgctttcccagtgggatgctgccttaaagtcttgattccctggcactctttcctattactacattttatcggtgctgttt

SEQ ID NO: 1008097 - DNA, 120 bp, Artificial Sequence
  ENSG00000272288_2 (sequence is synthesized)
gtgttatgcaacggtagcatcgtgtctccggaagataaaaaaggtctcgatacaaacatccataaccttccacccactccgtcaggaacaacccaatcaaaataaagtcatgagaattta

SEQ ID NO: 1008098 - DNA, 120 bp, Artificial Sequence
  ENSG00000272288_3 (sequence is synthesized)
ccccgtcccgggaaggggtggccctcagtacccgcctggctcgccctgccgccaagctcaagtgtcccttcccttcccctcggggcccccgaggccgctgccagcgctggcactgcgggg

SEQ ID NO: 1008099 - DNA, 120 bp, Artificial Sequence
  ENSG00000272288_4 (sequence is synthesized)
ccggctcaccagttggtcatgtccaggaagaaggcgcaaccggcaggattgagctggaagccgagcagcctctggaactcggagatgagcacgtccttgtcggtggtgcccaggcagctg

SEQ ID NO: 1008100 - DNA, 120 bp, Artificial Sequence
  ENSG00000275063_0 (sequence is synthesized)
atgaagcacctgtggtttttcctcctgctggtggcagctcccagatgggtcctgtcccaggtgcagctgcaggagtcgggcccaggactggtgaagccttcggagaccctgtccctcacc

SEQ ID NO: 1008101 - DNA, 120 bp, Artificial Sequence
  ENSG00000275063_1 (sequence is synthesized)
tactacaacccgtccctcaagagtcgagtcaccatatcagtagacacgtccaagaaccagttctccctgaagctgagctctgtgaccgccgcagacacggccgtgtattactgtgcgaga

SEQ ID NO: 1008102 - DNA, 120 bp, Artificial Sequence
  ENSG00000271958_0 (sequence is synthesized)
caggcaaaattgcctccaagatccttttctgttcgaatattcattgagccaaagaaggttaagaacacatataaattgagaattctgtaattttaagattcatctggaaaaatggcaccc

SEQ ID NO: 1008103 - DNA, 120 bp, Artificial Sequence
  ENSG00000271958_1 (sequence is synthesized)
gactaagagggagagtttgcagtcaaatgaaattaaggttgaacccagttctgccagttccttgctccataacccctagaaaattacttctgtctgagccttgggattctctgtctctta

SEQ ID NO: 1008104 - DNA, 120 bp, Artificial Sequence
  ENSG00000271959_0 (sequence is synthesized)
gcttactgcggaacagcaggttggtgtccacagcattcagcatctggaacacggcctgggggtggtagcagatggtgtggcctgtgtaacagacgggcagctggtggctcagggctccct

SEQ ID NO: 1008105 - DNA, 120 bp, Artificial Sequence
  ENSG00000271959_1 (sequence is synthesized)
gtctcctggggggctgtagcccacccctgcccctcttcagccccaagctcctcctcatccaccccctttcctctcttgtgggtggtgagtcagggagggtcaagggtgcttgggtggggg

SEQ ID NO: 1008106 - DNA, 120 bp, Artificial Sequence
  ENSG00000271959_2 (sequence is synthesized)
caggcctgggggtctttaagcccggcctcgccctcccacctatgaagagtgtcacccaggtcttgatgtggcaggagtggctgtgcaggtagctgagggcctgtgacaagtggatgctga

SEQ ID NO: 1008107 - DNA, 120 bp, Artificial Sequence
  ENSG00000271959_3 (sequence is synthesized)
attcctcctggctgcgggtcatctggccggaggagagcacacctggctgggacgggctgggggccctgggcataccagggtcctccagccccagtttgccttgcccagcccctggagctg

SEQ ID NO: 1008108 - DNA, 120 bp, Artificial Sequence
  ENSG00000271959_4 (sequence is synthesized)
ctatagcagctgtgtgtgagacgggagtgaatgggggagccgcaagcctggtctcccccactccctggccctgttcctccccaccgatcccaggcctctcaccaggcaggtccagaggaa

SEQ ID NO: 1008109 - DNA, 120 bp, Artificial Sequence
  ENSG00000271959_5 (sequence is synthesized)
gtggcgggcgctgaggcccctctcccaggccagcgtgcagaagagggtgtgcagtagccgccagcggagcagcacagcacagcggtagaaggtgaacttggcctgctgcagggacaggcg

SEQ ID NO: 1008110 - DNA, 120 bp, Artificial Sequence
  ENSG00000271959_6 (sequence is synthesized)
tggagggtcacccaccgcctatgtctgagccctttcccctagaggccacaggcctccatgggcactggaggcagcctgctgtgcgggtgttccctggttctgtcctgcttgtgcccctcg

SEQ ID NO: 1008111 - DNA, 120 bp, Artificial Sequence
  ENSG00000271959_7 (sequence is synthesized)
gcaagcctccccgaccctggcaacagcacctggccccccggagcccaggctggtctgcccgcggccctggccctgccccttccacggttgccccgtatccttttccccatggcagggaga

SEQ ID NO: 1008112 - DNA, 120 bp, Artificial Sequence
  ENSG00000271959_8 (sequence is synthesized)
cccgcgaggccaagctctgacttcgtgggctgtgcacagggcatgtgctgccacggcaggcagggcacagtccatattcacacaagctctgtgagctgctggaccccctgccccgttaca

SEQ ID NO: 1008113 - DNA, 120 bp, Artificial Sequence
  ENSG00000271959_9 (sequence is synthesized)
gggactgggggcacagcagtgagcagaaaagaccgggtcctgccgcatcgacggcaagtctcgctcgcatgcgtgtgcgcagtgggggagcgggcaggccaactgtggtcacagaaacca

SEQ ID NO: 1008114 - DNA, 120 bp, Artificial Sequence
  ENSG00000271959_10 (sequence is synthesized)
gtgcagatggccagaccctctgcccgccacttgctgccccgtgggagctcccccaactctcaggcagtgctgctgccatccgtctgccccgtaccctggcctcctgtgggtcccagccct

SEQ ID NO: 1008115 - DNA, 120 bp, Artificial Sequence
  ENSG00000271959_11 (sequence is synthesized)
ggccaaggtgaaggcctatcacctgcctttcctggggtgggcactgaccgtggcgacagctgggcattggtccttcaggtgtaggagcaggggcaccatgctctggtgcacctgggtccg

SEQ ID NO: 1008116 - DNA, 120 bp, Artificial Sequence
  ENSG00000271959_12 (sequence is synthesized)
ctcctgcaaggcagaggctcagaggcacggccagacctgtccaggggtcccagctttggtccaagttgggaccccacaccttgtaggggtacaactcagttctttctgcaggattccttc

SEQ ID NO: 1008117 - DNA, 120 bp, Artificial Sequence
  ENSG00000271959_13 (sequence is synthesized)
acccaggctctcggctcccggggaagggaagggctggggctcccccctcacacagggctctctggtgtccctgaggatgtaagaatcacatctcccttctacccacaactgcatcctggc

SEQ ID NO: 1008118 - DNA, 120 bp, Artificial Sequence
  ENSG00000271959_14 (sequence is synthesized)
agcccaggcctcatgaatgcatttgaggggcgcctatcccccagattccccagtgaaggaaaaacagccacgctaaccgtgctgacatgtcagaaagcaaatctgggtaggctgtcgtgg

SEQ ID NO: 1008119 - DNA, 120 bp, Artificial Sequence
  ENSG00000271959_15 (sequence is synthesized)
ggccggagaccactgcacttggagactgaacgtgagaactagttcagccctgtggagaaggggtgagcgccaggggcccacccagcccacctgctcagcgcccacctcaaccgagggcca

SEQ ID NO: 1008120 - DNA, 120 bp, Artificial Sequence
  ENSG00000271959_16 (sequence is synthesized)
caagcgggcagctccccagggcctgggcctccctgcttgcagcttggggttccccctttggcagaggaagggagctgggttgggaggagggtcctggagggcgtgagcaggaggtagccc

SEQ ID NO: 1008121 - DNA, 120 bp, Artificial Sequence
  ENSG00000271959_17 (sequence is synthesized)
cgccctgccccagtgctcacgtcattaaagaaggagcgtgtgctgatggcaacgccgaggctctgactccctgtgccctgcgcgcccaggcggtgcagcgtgtctgacacggtgcccatg

SEQ ID NO: 1008122 - DNA, 120 bp, Artificial Sequence
  ENSG00000271959_18 (sequence is synthesized)
atgcacacgatcacctggtcgctgctctggaagaagccgtcgagcaagggccgcagctgtccctggagcaggcttccctgggggtggtggcggctggtgggcggagagcactaggacccg

SEQ ID NO: 1008123 - DNA, 120 bp, Artificial Sequence
  ENSG00000271959_19 (sequence is synthesized)
ctggccccatgcccccgcctcgttctcccacttgaccccctcaccccatctgcactgggtgggggggtggggggtggtgattcagagctgtgggtcccggcctggcccttcccgccatgg

SEQ ID NO: 1008124 - DNA, 120 bp, Artificial Sequence
  ENSG00000271959_20 (sequence is synthesized)
ggagctgtgggtcccggcctggccctgcccgccgtggggactgtgcccctaactgggctttgtccaccaggagctgcgtggtctggacagggtggcctcttttcttttttgagacagggt

SEQ ID NO: 1008125 - DNA, 77 bp, Artificial Sequence
  ENSG00000271959_21 (sequence is synthesized)
taacataacctcctgagtagctgggtctacagccagttccgtcttctccacttgattgcgtgtttgcagtgatttcc

SEQ ID NO: 1008126 - DNA, 120 bp, Artificial Sequence
  ENSG00000271959_22 (sequence is synthesized)
tccgtcttctccacttgattgcgtgtttgcagtgatttcctgagttatcgggatgaatggtcagaaagcagtgtgcccaccaatggatgtttcctgccattgggccccttagcagtgact

SEQ ID NO: 1008127 - DNA, 120 bp, Artificial Sequence
  ENSG00000271959_23 (sequence is synthesized)
tgggtgcaaaccagggtgatttttacaacttttaaacaagtttaaagcagctttgttggctttcttagctgtttgctttgaaaatattaaattcattttcagcaagtgagtcattcaaca

SEQ ID NO: 1008128 - DNA, 120 bp, Artificial Sequence
  ENSG00000271955_0 (sequence is synthesized)
aacggtgccaccaggctctctgggagcaatccgcttggctgtctccagcctcaggaaggacttttaaactcgatgaaaataacctaagaggccacgttttgatggtaactgaagtgaaga

SEQ ID NO: 1008129 - DNA, 120 bp, Artificial Sequence
  ENSG00000271955_1 (sequence is synthesized)
ggacgccagaactccaggttctctggcttttggactcaggacttgcacctgagtccagaaagcagcctccccggtgtcaggctctcagacgttcgttctgagcccttcgcacttggactg

SEQ ID NO: 1008130 - DNA, 120 bp, Artificial Sequence
  ENSG00000271955_2 (sequence is synthesized)
atccacaccaccggtatccctggttctctgacttacagatgacctatcatgggacttctcagcctccataatagaaacaagtcttctgggcatcagagaaactcaaaaccactgtgtgag

SEQ ID NO: 1008131 - DNA, 120 bp, Artificial Sequence
  ENSG00000271955_3 (sequence is synthesized)
acctctggcccttttaaattgaccagatctattatcttcaaagggaaaagtcagggcaggcagtgacctaggccaggggagattctgcctcatttctacaaaataagtttaaacagaaaa

SEQ ID NO: 1008132 - DNA, 120 bp, Artificial Sequence
  ENSG00000271955_4 (sequence is synthesized)
acctgattccactattcatctgccctgcagtgggtgtggactgtcccaggctttccttcagtgatgttttcctcctcctgcgagtctgcaaggtccaagccaggtctgcacagagcaggg

SEQ ID NO: 1008133 - DNA, 120 bp, Artificial Sequence
  ENSG00000271955_5 (sequence is synthesized)
gactggacaggttggggcatctccccttgacagaactcataagaagctgtcaattagcagaacttcaggagaagaccctggggccatgtgtctgaggggcagcctgcgtgtgttgggagg

SEQ ID NO: 1008134 - DNA, 120 bp, Artificial Sequence
  ENSG00000271955_6 (sequence is synthesized)
acccatcgtgtgatgagagaagtgaagaagattggaaaaagtttcatattcaaaatagaacaacatgatggagtagggaaaagagcacagcttttggaatgtgatgacccagttctgata

SEQ ID NO: 1008135 - DNA, 120 bp, Artificial Sequence
  ENSG00000271955_7 (sequence is synthesized)
cttagtataaacaaccttgagcaggtctgcatgcagaaaccctgctaatttcaaagaggatttcctttactatggaaaggaggattgagaggaaaattagaaaaggattcccatgtagac

SEQ ID NO: 1008136 - DNA, 120 bp, Artificial Sequence
  ENSG00000271955_8 (sequence is synthesized)
ctagggaagatttcacctgtgaattaatttacttcgtgcagtgcttggattaagctggcagaacatgagaaccacatcagcatgatcaaaggcaggcaaggataaaacatgtgatgaccc

SEQ ID NO: 1008137 - DNA, 120 bp, Artificial Sequence
  ENSG00000271955_9 (sequence is synthesized)
caactttctatggcttccccccaacacaacttgggtggcaggacatagtgtcaaattgccaccatgtattttaagaaaggactcatatcttttgttaaagagtctgtatcgaaacataaa

SEQ ID NO: 1008138 - DNA, 120 bp, Artificial Sequence
  ENSG00000271952_0 (sequence is synthesized)
ccctcgtcatagacagcccctggagagtcataatgtttatcgatgagaaaacagaaatttgaagaggcaaagcaagttgcccaaggccaagggagaaggtcagcgtgaactgctaccgcc

SEQ ID NO: 1008139 - DNA, 120 bp, Artificial Sequence
  ENSG00000271952_1 (sequence is synthesized)
atgttgaagttcatcttctcttcactgcgagaagctgcctggacaccagggtggaggagctgtcagggccctcactgtggaaggaaggtccacagaaaacatcctggggtcctgagctga

SEQ ID NO: 1008140 - DNA, 120 bp, Artificial Sequence
  ENSG00000271952_2 (sequence is synthesized)
gtgatgggaggagtcctctgtatctcagtctgatcctggtctccctctcggccatggtctcacactagtgctgctgggaaaccatccctcacatccagtcctggcatcgggcagtgactc

SEQ ID NO: 1008141 - DNA, 120 bp, Artificial Sequence
  ENSG00000271952_3 (sequence is synthesized)
tggtccaactgttgtccaactcaagggtttagctgcttagattttcctaaaacttgaatttcattttcctctagccatggaatacagattaatcctttacaattaaaatccaagttcaga

SEQ ID NO: 1008142 - DNA, 120 bp, Artificial Sequence
  ENSG00000271952_4 (sequence is synthesized)
agaattccacttgtcacaaacacgctcacaggaattgaggagcctcttctgtggatactatctaggcacagtgatcgaacgtgctttggaccggggcttgggagatgcaacttctggcct

SEQ ID NO: 1008143 - DNA, 120 bp, Artificial Sequence
  ENSG00000271952_5 (sequence is synthesized)
tagctttgccagagacttgctgggagacaagggcatgcatttgcccttctcaggggtgttaagagctctgtagtctgcagaatgcacgggtgggctgggtgatatgagacagccagattg

SEQ ID NO: 1008144 - DNA, 120 bp, Artificial Sequence
  ENSG00000271952_6 (sequence is synthesized)
ggtgtaagtgtcatccagatttggaagaaggcaggtttggggtggaatcttatttatgccacttacaagttgcgtgacttgagatgatcactcgacctctttaaggctcgatttcctcat

SEQ ID NO: 1008145 - DNA, 120 bp, Artificial Sequence
  ENSG00000230437_0 (sequence is synthesized)
ctcgttcttattctccctttgtttaaaaccaacactcctggtaatcaaagcctgtttcataaccaaccagcttatgtctaatattcattagccactcaactaaaatatacatagaaattg

SEQ ID NO: 1008146 - DNA, 120 bp, Artificial Sequence
  ENSG00000230437_1 (sequence is synthesized)
aacaacttggataaacctcaagaaaattatgctgaatgaaaattaccagtatgaaagaaatatatgctgcatgattccatgtatatagaattcctgaaatgacacagttagagtgacagt

SEQ ID NO: 1008147 - DNA, 120 bp, Artificial Sequence
  ENSG00000230437_2 (sequence is synthesized)
gaacagcgtgggagccagttgggattctttaaaaggcctgctgtgttgctgagtgtcctagaagaatgtagcattgcagtggttccggctgaaccaataaatcatgacctgaaaacacca

SEQ ID NO: 1008148 - DNA, 120 bp, Artificial Sequence
  ENSG00000230434_0 (sequence is synthesized)
tgattctatcattcactcctatttgctgagcatctattatgggcttagtattttgcagctataatgagaagaggaattattttttaaaaaaatgactatagcactctcacattgtagagg

SEQ ID NO: 1008149 - DNA, 120 bp, Artificial Sequence
  ENSG00000230434_1 (sequence is synthesized)
gacaggattcatatttagatatctaggtgaatttttcatttctgcaaagatggactccagaacctagtgtgaaatgggaatattgagtatgctatgtaatcaaggaatgaaggagaatgg

SEQ ID NO: 1008150 - DNA, 120 bp, Artificial Sequence
  ENSG00000230434_2 (sequence is synthesized)
ctagatctgtaacaggagctacagaaaacaagatggcaaacaaggtcccagcagaacccagagtcgaaaacaagagaaccaggcgaatgtgagcacccaccagacccacccacagagaat

SEQ ID NO: 1008151 - DNA, 120 bp, Artificial Sequence
  ENSG00000230434_3 (sequence is synthesized)
cctagcgactgaagtcattttatgtttgccttcaacttgagataagtcccagaaaattggaggatgtggagaccaggatgcctcattgcacaactccaggaggcacattacagtaggtgt

SEQ ID NO: 1008152 - DNA, 120 bp, Artificial Sequence
  ENSG00000230434_4 (sequence is synthesized)
gcaagagggcatgacactcaagttacaaacacatcatttcatttaatcttcacaacactcctggaaaaaaggcattattatccttgtcttacagataaagaaactgagactccaagaata

SEQ ID NO: 1008153 - DNA, 120 bp, Artificial Sequence
  ENSG00000230434_5 (sequence is synthesized)
atttaaccaaagaccgaaggaagggatagagtccacctcagtgtcccaagctcaaatcatgctcagaacatgttcagaccagttctaagtctgtttggccttctggatctgtggtccaga

SEQ ID NO: 1008154 - DNA, 120 bp, Artificial Sequence
  ENSG00000230434_6 (sequence is synthesized)
atacttgcagaattttccttatttctagccttttgtgccatatgtgggataattcgctgaatatcatccgtgccatggataactcatacaaaggcacaaacccaagccatgtgaatggcc

SEQ ID NO: 1008155 - DNA, 120 bp, Artificial Sequence
  ENSG00000230434_7 (sequence is synthesized)
tatttgaaaacttttttttttactgaggcaactgggacagtagctgttgaatgaactcctcttctaccaacgccagaatccagtgacgtttcaccagtatgaagatgggaaccacatgct

SEQ ID NO: 1008156 - DNA, 120 bp, Artificial Sequence
  ENSG00000230434_8 (sequence is synthesized)
ctcttgccaccaagcatttcagactaggataatggcactctcctccatcatcaaaaccctcagtaaaatctgctgtgtacaacaactttcctattgtctttagggaatgaaggagaatgg

SEQ ID NO: 1008157 - DNA, 120 bp, Artificial Sequence
  ENSG00000230435_0 (sequence is synthesized)
aggcttcactgggcagggtttggactggtccatcagggaagggcatggtcttccatcaccttgaaagggctgggtcactgttcgtcttcggatcatttttccttgaagagatacaaagtg

SEQ ID NO: 1008158 - DNA, 120 bp, Artificial Sequence
  ENSG00000230435_1 (sequence is synthesized)
atgcacctttaatatatgttatggttttgcaagcatatatctcattgggagaaggcatcacagtgatatctcctgaggcaatccaggaacaaatctattgaggctcctacttatcttggt

SEQ ID NO: 1008159 - DNA, 120 bp, Artificial Sequence
  ENSG00000230435_2 (sequence is synthesized)
gttcctgtgcgcccctcagaagaattcagcctgcaggaggacagctttgacccctgtgatttcatctctgccccaaccaatcagcagcaagcacccattccctggcagtcccaccccttc

SEQ ID NO: 1008160 - DNA, 120 bp, Artificial Sequence
  ENSG00000230435_3 (sequence is synthesized)
ccccaaactgcctttgaaaaacccctacctaggagccttagacaatattgatttgagtactaactccatcttccatgtggcatggctggccttatgtctattaaactctttctttactgc

SEQ ID NO: 1008161 - DNA, 120 bp, Artificial Sequence
  ENSG00000230432_0 (sequence is synthesized)
atcagccctctggggacttggactgattctccagttagcgcatacctgtcccactcctgtctgcaagatttggagccctgtctgtgcttccagttcagacttcaccagccctgcagggag

SEQ ID NO: 1008162 - DNA, 120 bp, Artificial Sequence
  ENSG00000230432_1 (sequence is synthesized)
gccagaccacctgggtttgaatcctgcctttgctactgatgaattatgtaaccttgggcaagttgctgaacctctccaagcctcaattccctcatcaataaaatggggatttatacctcc

SEQ ID NO: 1008163 - DNA, 120 bp, Artificial Sequence
  ENSG00000230433_0 (sequence is synthesized)
aggacatttacgtatggggaagaaccaccagactcggcaatgactgtaattacgtagaggtgtcatcttgtgaagaggtcagcatggctcctgcctctggtcgtcccatgactaccaaac

SEQ ID NO: 1008164 - DNA, 120 bp, Artificial Sequence
  ENSG00000230433_1 (sequence is synthesized)
accacggcacatctgtatctatattcaagtttccatcgagtgtttctttggctgcatccctctgtgccttctgcaggagtgctgggcacctgctgcagtcgtggatggccctcagatctg

SEQ ID NO: 1008165 - DNA, 120 bp, Artificial Sequence
  ENSG00000230433_2 (sequence is synthesized)
gctggtgcaagctcccctcctgcaagggttcaagcgccccctccagtctgtcggcttttgacggctctccagtgcttctcacagctgggtttctatattctgtgcagagttcaattttta

SEQ ID NO: 1008166 - DNA, 120 bp, Artificial Sequence
  ENSG00000230433_3 (sequence is synthesized)
gttagtctgataagttcttcctctattactgaaaccaaaattcctctgaagcttgcactttttattctgtggtagttctaattaagaaagcatgctacattttatcattaattttaggat

SEQ ID NO: 1008167 - DNA, 120 bp, Artificial Sequence
  ENSG00000230433_4 (sequence is synthesized)
agttccatcacaggcttacataaaggcattgtaaaaactttctaagtgtaagatagtgctactactaagctaactttactaggtttttcttcacaaatttacccaaagtggaatttattc

SEQ ID NO: 1008168 - DNA, 120 bp, Artificial Sequence
  ENSG00000230433_5 (sequence is synthesized)
cattttcaaatgtctaataaaatgttgaacattgttcaatgagtgttcttgcaatgactagaggctttcctctagactgacatgaagacatgatggcaataagtcagcaactaggactcc

SEQ ID NO: 1008169 - DNA, 120 bp, Artificial Sequence
  ENSG00000230433_6 (sequence is synthesized)
tgaaaatatcaggaaaaactgtcaaatgacttgcagaaacctaaattcaccatgtatgccatttctctatcaaatcaagtgtgtgtccaagaagaaaacaagttagtactgcatgtgcct

SEQ ID NO: 1008170 - DNA, 120 bp, Artificial Sequence
  ENSG00000273888_0 (sequence is synthesized)
gagctcgcggcagtacggggagcgcccgcccgccccgccctggacccaaccaagcgtcccgcggaggggtgcggccacttgggggcaggagaaagcggagtacgccacccctctagggac

SEQ ID NO: 1008171 - DNA, 120 bp, Artificial Sequence
  ENSG00000273888_1 (sequence is synthesized)
ccaggaagcgaggcgagcctcaggtggacgcggtggtgtggaccacggcgatcagggcctttccccctgctgtggagacggaggtgcgaggggacgccggcggctccccaccttctggcc

SEQ ID NO: 1008172 - DNA, 120 bp, Artificial Sequence
  ENSG00000273888_2 (sequence is synthesized)
gagtggccttctccgcctccggctggactccctcggggcgctccctccagagccgagtcgggctggccgggggcggctgtttggcctgagtgtcgtcttactaaagcggaacgccggagg

SEQ ID NO: 1008173 - DNA, 120 bp, Artificial Sequence
  ENSG00000273888_3 (sequence is synthesized)
ggaggccactccgagagaaggcggtccccggcggaggtggcttcgtgaatcctgcagccccctgcccgcccgccactcgagacgccgcgcctcgtgggtttcacgctggatggagggggc

SEQ ID NO: 1008174 - DNA, 120 bp, Artificial Sequence
  ENSG00000273888_4 (sequence is synthesized)
gccgccgaggatgcccagcctccccctctaattctacctctccagttcctcaggtagacacagcctctgtctgctgtggttttagtgcccatggcccctcagaaattatttttgtcccct

SEQ ID NO: 1008175 - DNA, 120 bp, Artificial Sequence
  ENSG00000273888_5 (sequence is synthesized)
cccgatagtggctttgggggatggagggcgagagatgcaaagggccagtggaagattttttatagcacaaggaatcaagccaggagatggaggtttcattgccacctcggggtctgggga

SEQ ID NO: 1008176 - DNA, 120 bp, Artificial Sequence
  ENSG00000273888_6 (sequence is synthesized)
gggggcgagccacacctctccggtcagtctgcgcccaccaggacctgctgctgggaaccgcacacgaaaggagagacacccagcacctggcccctagacccgcagggcgtcaacctcctg

SEQ ID NO: 1008177 - DNA, 120 bp, Artificial Sequence
  ENSG00000273888_7 (sequence is synthesized)
ggcttctgcctttctaggtttcctctgactttgctgacccaatgacccctggccacgggtggcaaaaacgccctcactgagcccttcgctaaaggagtgccggggtttatgtgtctggct

SEQ ID NO: 1008178 - DNA, 120 bp, Artificial Sequence
  ENSG00000273888_8 (sequence is synthesized)
tttaaaatgggatgaggagacaaggaaacaggacctgagaaaggacactatccaaaatctgatgctctcagaagtcaactttaaaactgccctgctccgcggtggctcacgcctgtaatc

SEQ ID NO: 1008179 - DNA, 74 bp, Artificial Sequence
  ENSG00000273888_9 (sequence is synthesized)
gccctgctcttttcatccaaagatgaatatatgaagccagctgttactggttgaaagtgtgcctcttgtttgca

SEQ ID NO: 1008180 - DNA, 120 bp, Artificial Sequence
  ENSG00000273888_10 (sequence is synthesized)
agccagctgttactggttgaaagtgtgcctcttgtttgcatggcaaaggaattcagttttgtgtttatttacagctgaagctctcttgaaataattgtctcagtcacagcttttacattt

SEQ ID NO: 1008181 - DNA, 120 bp, Artificial Sequence
  ENSG00000273888_11 (sequence is synthesized)
tggggaaccatgccattagaactgaatattaggaactgtgatcttttgtcttttcacaattgacaatacattcagaacttatttctgataaaactgggcagtttctaaggatactgtact

SEQ ID NO: 1008182 - DNA, 120 bp, Artificial Sequence
  ENSG00000273888_12 (sequence is synthesized)
tatgatttaaagtcataactccatgatgcaaaagagaacaagaaatatgtttcaatgactgccttttaaattagcggtactccagcactttgggaggccgaggtgacaggatcgtttgag

SEQ ID NO: 1008183 - DNA, 120 bp, Artificial Sequence
  ENSG00000273888_13 (sequence is synthesized)
tgaggccgggagttcaagacagcctgggcatcatagccagaccttgtttctactaaaaataaaaaataaataaattttccgggcatggtggcccatgcctgtagccccagctactcagga

SEQ ID NO: 1008184 - DNA, 85 bp, Artificial Sequence
  ENSG00000273888_14 (sequence is synthesized)
aggaggctgaggtgggaggatggcttgggcctaggaggttgaggccacagtgaattatgattacaccacgggaaaaagaaaaaaa

SEQ ID NO: 1008185 - DNA, 120 bp, Artificial Sequence
  ENSG00000273888_15 (sequence is synthesized)
gctgtacttaatgtactaaagttaaaaattggataacaatagttgaggacagtgtaggcatttaaaggtagaggattgcactttttttctcatttttgtcttttatatgcatcagaatga

SEQ ID NO: 1008186 - DNA, 120 bp, Artificial Sequence
  ENSG00000273888_16 (sequence is synthesized)
gtgcatattgtatactacttggtaaggtcttaaattaatttggtacctactgagataatccggcatttcatgtgtaaagataaattagataaatgaataatatatcactatcttggaaaa

SEQ ID NO: 1008187 - DNA, 120 bp, Artificial Sequence
  ENSG00000176349_0 (sequence is synthesized)
aatgtgggagaggccggcggctctgaccttggtgtgttacagcccttgccacctccctccgctgccctgcatggggactcaaaccacaaacagcagctcggaaacaagcagacacgcgtc

SEQ ID NO: 1008188 - DNA, 120 bp, Artificial Sequence
  ENSG00000176349_1 (sequence is synthesized)
ggactctggttcacggggaagagcgctgtttaggagatggacgtgctccacgcagagacgcgtcgggctctgattcatggggaagagctctgtttaggagatggacgtgctccacgcaga

SEQ ID NO: 1008189 - DNA, 120 bp, Artificial Sequence
  ENSG00000176349_2 (sequence is synthesized)
cacgcgtccggctctggttcacggggaagagcgctgtttaggagacggacgtgctccacgcagacatgcgtccggctctggttcacggggaagagcgctgtttaggagacggacgtgctc

SEQ ID NO: 1008190 - DNA, 120 bp, Artificial Sequence
  ENSG00000176349_3 (sequence is synthesized)
cacgcagacacgcgtcccgctctggttcacggggaagagcgctgtttaggagatggacacgctccacgcagacacgcgtcgggttccggctcacggggaggagcgcgctgtttaggagat

SEQ ID NO: 1008191 - DNA, 120 bp, Artificial Sequence
  ENSG00000176349_4 (sequence is synthesized)
ggacacgctccacaccacctctggcgtcctctctgccctcaggctcttgggcattcagagccaggagctgtttctggggaggcagagatccctccaagccccaggaaaggcctcctgctg

SEQ ID NO: 1008192 - DNA, 120 bp, Artificial Sequence
  ENSG00000176349_5 (sequence is synthesized)
cctcggggacaaagctgtgtcaggctcttctctccacgctccccaagggaggggaggtgctcagaaacagaccaagagactcagttggtgccaggatggtgcccgtgaccagggagatgt

SEQ ID NO: 1008193 - DNA, 120 bp, Artificial Sequence
  ENSG00000176349_6 (sequence is synthesized)
gcacatgcgttcagcgtcactggggaagggacagccacacaggcagtctcaggctgtagctgaaaccccaggcatttccctaaagcaccagcgtccagaactgaagaagggaccagcccc

SEQ ID NO: 1008194 - DNA, 120 bp, Artificial Sequence
  ENSG00000176349_7 (sequence is synthesized)
atccggccccagaccacagtggggaaccttccagggccagtctccccctgctgcccttcccgcagggccaggggctggtcagcagcacaggccgcccccggcgctgcagtcctggacgtc

SEQ ID NO: 1008195 - DNA, 120 bp, Artificial Sequence
  ENSG00000176349_8 (sequence is synthesized)
catggctgacagctcctgggcctggaacactgccctttcctccagctctgcaaagacacttgaggttccagccaggacacgggacataaagggggtcagccctcacggacagtgtttcca

SEQ ID NO: 1008196 - DNA, 120 bp, Artificial Sequence
  ENSG00000176349_9 (sequence is synthesized)
tagagggttcaggaggtttataaacaccagcaggatggatgacaccacagccaccacaggagccagcatccaagagaccccgtgagatgccaagggtcactcgtgcccgaggtgccctcc

SEQ ID NO: 1008197 - DNA, 120 bp, Artificial Sequence
  ENSG00000176349_10 (sequence is synthesized)
ggaaccggagactacagataccaggggatgcttgggccaagtgtgtccagccacgaaggttactgcccggccctgggaggtcactgggaccaggagctgcccccacaaggaatgggcgga

SEQ ID NO: 1008198 - DNA, 120 bp, Artificial Sequence
  ENSG00000176349_11 (sequence is synthesized)
aggaaagggtgaccgagtgcccggccccgtgcccgtggctcaggaagacatgctgtgtttgcatttctgttgttcccagagcgaggggatgagaagcctgaggccggcccgtccctgctc

SEQ ID NO: 1008199 - DNA, 120 bp, Artificial Sequence
  ENSG00000176349_12 (sequence is synthesized)
cagacgcccccccaccgctccccctcataggagccaaggaggaggaagtgcttcattctttgcaaagaatactccgcctgatgcaatttgcgtgtgcaagatgtgtgaagtgccttttcc

SEQ ID NO: 1008200 - DNA, 120 bp, Artificial Sequence
  ENSG00000176349_13 (sequence is synthesized)
atttcatcagcacccgcagcctgtatgaagctgctgtttgctctctgccagctcgtggggcttgaatggtatcacgggaggttcttcatcttgcggtgggacggtcgcctcctgctgatg

SEQ ID NO: 1008201 - DNA, 120 bp, Artificial Sequence
  ENSG00000176349_14 (sequence is synthesized)
gctccgcgttttcattgaccacattcattacaaagagacatttcaaaacatgttctgcagctgatttgctccttggccccaagaatggaatacagataatctgctcacatccatcaggaa

SEQ ID NO: 1008202 - DNA, 120 bp, Artificial Sequence
  ENSG00000176349_15 (sequence is synthesized)
gcactggttttctttcgggacacaaccgaacgtgccaggactgcaggagccgctggattacagagcagcaaaccaggcatggcaggcggtgctcgcggaggtaccacggggcggaccagg

SEQ ID NO: 1008203 - DNA, 120 bp, Artificial Sequence
  ENSG00000176349_16 (sequence is synthesized)
gtgtgcagcgttacgtgacttgggaagatgtggggggcccgatgtatctaccaggagacagtggagacctctaccctttagctgtcctctgtcccacacaacccagcccccactgggcgg

SEQ ID NO: 1008204 - DNA, 120 bp, Artificial Sequence
  ENSG00000176349_17 (sequence is synthesized)
ccactgcaggggaagctcagctggaaggttccatgggagagaccagaccagtcctggcactgtccagcagctgccttcggcccatgttctgaaaccgggatgcacacagcatggagatct

SEQ ID NO: 1008205 - DNA, 120 bp, Artificial Sequence
  ENSG00000176349_18 (sequence is synthesized)
gcccatctcccaaagcctggacgcatacactggggagacctcagctctgggcaggcctgggttcccatcgcttcggcgtccctgggcccgggacacggaacacacttgctgcgtgctgtg

SEQ ID NO: 1008206 - DNA, 120 bp, Artificial Sequence
  ENSG00000176349_19 (sequence is synthesized)
tacaagaatgaacgaatcggcctgcctagcaccccttggccggctccaggcctccacttgctgtgtcaagtgaggctcccacgtgctgaggggacagagggtccctgtgacctgcaatgc

SEQ ID NO: 1008207 - DNA, 120 bp, Artificial Sequence
  ENSG00000176349_20 (sequence is synthesized)
tcccactctcacccacgcagctgctcacctacacagccggtttctccagggctaacaggccacccagatgcaagccagtctcagcccctgaccacactggttttcaaatgaactgtggac

SEQ ID NO: 1008208 - DNA, 120 bp, Artificial Sequence
  ENSG00000176349_21 (sequence is synthesized)
tctcatgacagagaagcggctgggagtcccagcgtgggatgtggtgggacggggctggggtgtgcagagacgatgatggaggagctcctgggggcacacagacctagtgtcgctctcagg

SEQ ID NO: 1008209 - DNA, 120 bp, Artificial Sequence
  ENSG00000176349_22 (sequence is synthesized)
gctgggtccgcaggccactctccctccctcaacaacactcacgcctgctgcagccccaggaagggtcaggactcacagatgccaacaagcaagcagcccgtgctggaagcatcaccacca

SEQ ID NO: 1008210 - DNA, 120 bp, Artificial Sequence
  ENSG00000176349_23 (sequence is synthesized)
ccggccccagcaaaggcttcctggtgtgtgcggctgaccatcggccactcgggtagacagaagtgtgggtgggctgtgtgcatgccagggcagacggacagcccggggtctcaggccaat

SEQ ID NO: 1008211 - DNA, 120 bp, Artificial Sequence
  ENSG00000176349_24 (sequence is synthesized)
ggaaacaggaagtttccggctccatttgaatactggtggaaatgccgggccctcatgctgaataggacactccatccaagcttgccgcctcctcggaggcttgggccagtcaccgggccc

SEQ ID NO: 1008212 - DNA, 120 bp, Artificial Sequence
  ENSG00000176349_25 (sequence is synthesized)
ggctgtgctttcacagctgcttttcttatgggagagcaagatctcctgggattcaagaccctaccaggagtagaagacaagggtcatgggaaggctgtgtgagccctcaaggggcaccat

SEQ ID NO: 1008213 - DNA, 120 bp, Artificial Sequence
  ENSG00000176349_26 (sequence is synthesized)
ggaccccgagcaccagcgatttgcgctcctggttccgagagcccagcgctgaatcctggcagatggggaagctgagctctgtctgacctgctctggaaaacaactggtccagagaaggac

SEQ ID NO: 1008214 - DNA, 120 bp, Artificial Sequence
  ENSG00000176349_27 (sequence is synthesized)
gaagatgtcacttaattctgagttgctgaggataagccaggggccctggaggtgactgtgctgcccacagcatcccaagggatgccacatccccacaggggcagcccaggtcccccagag

SEQ ID NO: 1008215 - DNA, 120 bp, Artificial Sequence
  ENSG00000176349_28 (sequence is synthesized)
gattgtgtgccccccaccaccaaggtccttgcccactggtctgtgcctcaataggacagcctccttctcacactattttgaaatataaaaataacactcatcacccatcacccagtcact

SEQ ID NO: 1008216 - DNA, 120 bp, Artificial Sequence
  ENSG00000176349_29 (sequence is synthesized)
ctcatcacccatcacccagtcactcagaatcacaccagcgggggcacagaggcgacggcatgtagttctccagcctgtttgtgagcacgggtgtacatgtacacacacacacacacacac

SEQ ID NO: 1008217 - DNA, 120 bp, Artificial Sequence
  ENSG00000176349_30 (sequence is synthesized)
acatgcacacacacatacacgtgcacacacagacatgcacacacacgtacacacatgcacacacacacacgtacgcacatgcggggtcagggagctgatgctgtgcgaggctgtcgaggg

SEQ ID NO: 1008218 - DNA, 120 bp, Artificial Sequence
  ENSG00000176349_31 (sequence is synthesized)
cttcttcactcagcggcacttgggaagcgctgctctgtgggaggcccctcatccatgtcctcgttattggcagcacaaatctccaagtgaggaggggccatgtttaccagccgtccttcc

SEQ ID NO: 1008219 - DNA, 120 bp, Artificial Sequence
  ENSG00000176349_32 (sequence is synthesized)
agcccacgtctcctacggttccttattttcacaggtactgttttgcagacacagagcccccaagcagcccacacgtcttagccgggtgaagctttgctttatgaagtgctgcctggaccc

SEQ ID NO: 1008220 - DNA, 120 bp, Artificial Sequence
  ENSG00000176349_33 (sequence is synthesized)
ctgatggtcggccctccccgtcgagacagtggcaggcaggcgggggtgctcagggctgtctgcagggggcagccaggacctcactgaggtggccgactgggtccacgccctcctcagcct

SEQ ID NO: 1008221 - DNA, 120 bp, Artificial Sequence
  ENSG00000176349_34 (sequence is synthesized)
gcactgctggacaggccccaagaagtcgtgctcggcgtggcccaagaacgggaagcggcagcgtcctggcgtcctaggtgagacttcaagacggctccctgctcccacctgggctaaagg

SEQ ID NO: 1008222 - DNA, 120 bp, Artificial Sequence
  ENSG00000176349_35 (sequence is synthesized)
tggaaccccaggtgtaaagagccccctggggtacaggggaggctggatcagcagacgccggctctgggagggccctgaggggctgtggagggaaggtgaccccgcagtggcagcggcagc

SEQ ID NO: 1008223 - DNA, 120 bp, Artificial Sequence
  ENSG00000176349_36 (sequence is synthesized)
ggaagcaggacggcgcggtgcccgacacctgaggccactctccctggacggggggcgggcggcactgagaggcggccataaaaaccggagtttatttaataaaacaagagcccacgcggc

SEQ ID NO: 1008224 - DNA, 120 bp, Artificial Sequence
  ENSG00000176349_37 (sequence is synthesized)
actcgccgctgagcccatctccctgcaacactgcaggtagcggagtctagagacaacacagacagcggctgccgacggctgggactgggagaggatggctatggggcacgtttccttcca

SEQ ID NO: 1008225 - DNA, 120 bp, Artificial Sequence
  ENSG00000176349_38 (sequence is synthesized)
gggtgataaaggcattcattccaagatagactgtgatgatggctgcacgctctgtagatgacatctcaatcaagctgcttcatgagaaaggcccagccactgaccacggggtgaacgtcc

SEQ ID NO: 1008226 - DNA, 120 bp, Artificial Sequence
  ENSG00000243953_0 (sequence is synthesized)
ggggtcagccaagccagtgggaagcctacgacattcccctgggtcacttagtgaactcctactctttcatcaggcctcacttgaacatgacttcctccagaagccttcccagacatcttt

SEQ ID NO: 1008227 - DNA, 120 bp, Artificial Sequence
  ENSG00000243953_1 (sequence is synthesized)
gagctagaaagtcagaagagtagaattggaacccagctcagtctgatgccacatcctttgttgtttccattaaatcagagaatttcttagtgctgagaaactattctggaacttacaaca

SEQ ID NO: 1008228 - DNA, 120 bp, Artificial Sequence
  ENSG00000243953_2 (sequence is synthesized)
agatgcctttttcatttagtttatttttcatttttatctgttgctttgctcttatcaaatacagataaatagcagctgctactggtgctgttgattgcgatttctgtttgaaaatggaat

SEQ ID NO: 1008229 - DNA, 120 bp, Artificial Sequence
  ENSG00000243953_3 (sequence is synthesized)
cttgagcatctgttctctccttttatattttactgtgagagaaaatctatttttttcaaaaggtaattcatacacatggtaaaaatttaaacaatataaaaacctatttttaaaaaacat

SEQ ID NO: 1008230 - DNA, 120 bp, Artificial Sequence
  ENSG00000230438_0 (sequence is synthesized)
agactggaaaagaatggcccagatcctctggactcctcagatgagcggattcagagagaagcttttgagagcgtgctggcggagacatttttcacaaaagagcccttgcggtgctggtgt

SEQ ID NO: 1008231 - DNA, 120 bp, Artificial Sequence
  ENSG00000230438_1 (sequence is synthesized)
ccgtggcgtgcctggaccctccaccatgagcgccctctctgaagcaaatggctccagccatcatcttttaaaggagccatacgaagaaaacccttcatgcaatgtgcttttgtctgtccc

SEQ ID NO: 1008232 - DNA, 120 bp, Artificial Sequence
  ENSG00000230438_2 (sequence is synthesized)
aagtgtctcctctgctctggccatgctcttcctgggagtggaaggaaatgtggctgcccaaatggcccaagcaaggagacctccactgcataaggaggaggaattgtttgtagccattag

SEQ ID NO: 1008233 - DNA, 120 bp, Artificial Sequence
  ENSG00000230438_3 (sequence is synthesized)
agttgtttgccagaaatttctggatttcctcccttccagcacatggaaggcccaccaacgctggccggcctccaagcacccgggcctctgctcatgtacagctcctgaactgccctgcct

SEQ ID NO: 1008234 - DNA, 120 bp, Artificial Sequence
  ENSG00000230438_4 (sequence is synthesized)
ctgagttactgtggaaaatgagcttatatatgaagaagtcagcgagtggacaaagccaggcgcaatggatagcaaagatgtggaagtctcctcgattcaagttacaagaaaaccgcagca

SEQ ID NO: 1008235 - DNA, 120 bp, Artificial Sequence
  ENSG00000230438_5 (sequence is synthesized)
tggagtctgctctcagctgttggggaattaccgatgcctttgactaagtcaagactgacttttccagaatatcacccaagagatagagccgtccctgtccaagtttgtgcgctagccctt

SEQ ID NO: 1008236 - DNA, 120 bp, Artificial Sequence
  ENSG00000230438_6 (sequence is synthesized)
gtcacagtgtcagaacgcacaagccccataaagaggtttcacgcaggccacccatcccttttcattctccagcagaacaggacagagagcgttctgttctgcggaaggtcttccactcta

SEQ ID NO: 1008237 - DNA, 120 bp, Artificial Sequence
  ENSG00000230438_7 (sequence is synthesized)
caaggcaatccctccagctgctttgctgtattgtgctgtctcctgtcacactatgaatgcagtgacctcagccagcaacagggagaacccccctgcctcccgaacaaaggacctcacgtg

SEQ ID NO: 1008238 - DNA, 120 bp, Artificial Sequence
  ENSG00000230438_8 (sequence is synthesized)
aaatcctgagctcagagcttacagatatgtgtgcgctttcactttacatcggccgtgacttccaaacaacttcaggaaactttaggatctctgaggtatactggagatgacagcagcgta

SEQ ID NO: 1008239 - DNA, 120 bp, Artificial Sequence
  ENSG00000230438_9 (sequence is synthesized)
gaatgttcatttggatttagaacagaaatgcttattttatatttggctgctcccaaactgtccccagacttcctctccagtggttaccctccactgccctggatgtcccacgtttacact

SEQ ID NO: 1008240 - DNA, 120 bp, Artificial Sequence
  ENSG00000230438_10 (sequence is synthesized)
ccacactcacacctccaccttaacaaagtcctccactgggtcaaaccatacatcgcttcgtctctgtagtgatgacttcctgtcctctgctctgtggataaagaccccagataaagatgc

SEQ ID NO: 1008241 - DNA, 120 bp, Artificial Sequence
  ENSG00000230438_11 (sequence is synthesized)
ctgtgttgctcaactcttgtaaatactcttgagacattttgaaagcagaaggaaaggagacagacggggaaaataaaagggatggtctgcttgtgcggaaacgttttgagaatgcccttc

SEQ ID NO: 1008242 - DNA, 120 bp, Artificial Sequence
  ENSG00000230438_12 (sequence is synthesized)
cctaagagagaacagtaaaagtgagcaatacttcctgagctgtgggttcatatggctggactgtgctgtttctcacgggagaagttctcgtctcccctgcgtgtacatccctgtttgcca

SEQ ID NO: 1008243 - DNA, 120 bp, Artificial Sequence
  ENSG00000230438_13 (sequence is synthesized)
attccttctccctgtggagttttaccccctgctcctcaggccaccctcccaaaggatccctgtggtgccagacaggaatgggctgctaggggacccagcaagctcccagggccttactgc

SEQ ID NO: 1008244 - DNA, 120 bp, Artificial Sequence
  ENSG00000230438_14 (sequence is synthesized)
gtttcctttaaggcacaggatcttccctttaaggcacaaacacccccttgacacaaagtaagggacaagggaactttaaaccatttggaaacccaagcacaataggctgtaggttgtaaa

SEQ ID NO: 1008245 - DNA, 120 bp, Artificial Sequence
  ENSG00000230438_15 (sequence is synthesized)
aagaaattacaaaggtaattttatccagaagagggagcagtttaacttctgcagggtaagattcagattcacttttgtaactgaacagggaattttctaaatattttgaaaatgccgaaa

SEQ ID NO: 1008246 - DNA, 120 bp, Artificial Sequence
  ENSG00000230438_16 (sequence is synthesized)
caaagcctggacttcggtgtggtgatatcatggtgcattcccaggagggaagtgcttggtcaagacttctgcttgggttcgactgtcggttctggtttcacatgcactgtgtgaacacgc

SEQ ID NO: 1008247 - DNA, 120 bp, Artificial Sequence
  ENSG00000230438_17 (sequence is synthesized)
ctgtactgcaccaggtgaacacacttcatacagagagtcagcaccgcaccgtgtgaacatgcttcatacagagagtcagcaccgcactgtgtgaacacgcttcatacagagagtcagcac

SEQ ID NO: 1008248 - DNA, 120 bp, Artificial Sequence
  ENSG00000230438_18 (sequence is synthesized)
cgcaccgtgtgaacacacttcatacagagagtcagtactgcaccgtgtgaacatgcttcatacagaagatcagcacctcactgtgtgaacacacttcatacagaaggtcagcaatgcacc

SEQ ID NO: 1008249 - DNA, 120 bp, Artificial Sequence
  ENSG00000230438_19 (sequence is synthesized)
gtgtgaacacacttcatacagagagtcagcactgcactgtgtgaacatgcttcatacagaagatcagcacctcactgcgtgaacatgtgttatacagagagtcagcaccgcaccgcgtga

SEQ ID NO: 1008250 - DNA, 120 bp, Artificial Sequence
  ENSG00000230438_20 (sequence is synthesized)
acatccttcatacaggtcagcactgcaccatgtgaacacacttcaaacagagagtcagtactgcaccatgtgaacatgcttcatacagaagatcagcacctcactctgtgaacatgtgtc

SEQ ID NO: 1008251 - DNA, 120 bp, Artificial Sequence
  ENSG00000230438_21 (sequence is synthesized)
atacagaaggtcagcactgcactgtgtgaacacgcttcatacagaaggtcagcaccgcattgtgtgaacatgtgtcatacagagagtcagcaccgcaccgtgtgaacacgcttcatacag

SEQ ID NO: 1008252 - DNA, 120 bp, Artificial Sequence
  ENSG00000230438_22 (sequence is synthesized)
agggtcagcaccgcattgtgtgaacatgcttcatacatgaggtcagcacctcattgtgtgaacacacttcatacagagtcagcactgcactacgtgaacatgcttcatacagagggtcag

SEQ ID NO: 1008253 - DNA, 120 bp, Artificial Sequence
  ENSG00000230438_23 (sequence is synthesized)
cacctcactgtgtgaacatgtgtcatacagagagtcagcactgcaccgtgtgaacatgcttcatacagagggtcgggtcagcaccgcactgtgtgaacatgcttcatgcagagagtctgt

SEQ ID NO: 1008254 - DNA, 120 bp, Artificial Sequence
  ENSG00000230438_24 (sequence is synthesized)
cctgcaccaggtgaacacgcttcatacagagagtcagcaccgcaccgtgtgaacacgcttcatacagagggtcagcaccgcactgtgtgaacacacttcacacagagggtctgtaccaca

SEQ ID NO: 1008255 - DNA, 120 bp, Artificial Sequence
  ENSG00000230438_25 (sequence is synthesized)
ttccgtcaacatgtgtcagcaccataccatgtgaacacgcttggtacagtgatatacatgcatgtggcagagctgtgaaattatgacctgctgcagacagactttgtacactgtgctatc

SEQ ID NO: 1008256 - DNA, 120 bp, Artificial Sequence
  ENSG00000230438_26 (sequence is synthesized)
agccaactgggcaaatgtggacaagagtccctgcatgtctctattcaccaggtgtctgtcaaatgaaatgggctgaactggataatggcaggtctgacccatgattactgcctgtaagag

SEQ ID NO: 1008257 - DNA, 120 bp, Artificial Sequence
  ENSG00000230438_27 (sequence is synthesized)
ttactgcctgtaagagctgagttatcccagagtgtaggcgtgggatattaaaatatatatatatgcaaatatatttgggctgggtttggtgggtcatgcctgtaatccagcactttggga

SEQ ID NO: 1008258 - DNA, 90 bp, Artificial Sequence
  ENSG00000230438_28 (sequence is synthesized)
caggagtttgagaccaggctggccaacatatagtgaaaccccaactctactaaaaaaatacaaaaattaactgggagtggtggcaaacgt

SEQ ID NO: 1008259 - DNA, 84 bp, Artificial Sequence
  ENSG00000230438_29 (sequence is synthesized)
tcccgccactccactccagcctgggtgacagatcaagactccatctctcaaaaaaacaagaacaaaaacaaaaaacaacaactt

SEQ ID NO: 1008260 - DNA, 86 bp, Artificial Sequence
  ENSG00000230438_30 (sequence is synthesized)
gccactccactccagcctgggtgacagatcaagactccatctctcaaaaaaacaagaacaaaaacaaaaaacaacaacttagccgg

SEQ ID NO: 1008261 - DNA, 120 bp, Artificial Sequence
  ENSG00000230438_31 (sequence is synthesized)
actcgaggctcactgtacagctgtcgcttgccaggcagcccgagagagttctggcgagggctgcgggaaggaaagggggcggcgtccttcacagggagggtgcagctgacctccctcccc

SEQ ID NO: 1008262 - DNA, 120 bp, Artificial Sequence
  ENSG00000177699_0 (sequence is synthesized)
gtgctgcagggagcaggggaatgtgggagagacacttacacgggcccacaggccacctgaaagagggaagacggtcagggtggggactcagacagaatggggggccccagaggcagtgga

SEQ ID NO: 1008263 - DNA, 120 bp, Artificial Sequence
  ENSG00000177699_1 (sequence is synthesized)
ggcagcggtggtggcggcggcagacgaggaagccagccatgtgaggaggtggatggagtggtgccccgggggcggacggacggacaagttggtgaatgcacggagggggcagctccccac

SEQ ID NO: 1008264 - DNA, 120 bp, Artificial Sequence
  ENSG00000177699_2 (sequence is synthesized)
aagcacagtccacaggggctctcgggagcccaggcagaagagagacggctggacagcacagatgggtgcaacatctgtctgaggacacaaacaaagtggagatggtcaaggcgatggcac

SEQ ID NO: 1008265 - DNA, 120 bp, Artificial Sequence
  ENSG00000177699_3 (sequence is synthesized)
acagagctggcaaaggacagaccaaatgcggcaggaagaaaacgcaaagaggaggcagacgaggctggcagaggggttcatgttctgagtgaagagggattgagcacacatttaaggtga

SEQ ID NO: 1008266 - DNA, 120 bp, Artificial Sequence
  ENSG00000177699_4 (sequence is synthesized)
tcaactagccaacacgttccaggaagcagctaactctctgtggccagaagcgcaggtgaaattagaatcctgggaaggggcttgcaggatcatctgacggaagtgtcctctgacggaagg

SEQ ID NO: 1008267 - DNA, 120 bp, Artificial Sequence
  ENSG00000177699_5 (sequence is synthesized)
gtcctccgatggaagggtcctctgatggaagggtcatctgaccactgtctcagctgccctgcagatccccataaagccaccactcttgccccaactccagaagaaaaatgttgggaccaa

SEQ ID NO: 1008268 - DNA, 120 bp, Artificial Sequence
  ENSG00000177699_6 (sequence is synthesized)
taatcaccatcatattctttccactttgaggtattaattactcaagtggggattacagtccaggtctcactgccatatctgtgggcctgctatctggtcccaggtgatataggggaagct

SEQ ID NO: 1008269 - DNA, 120 bp, Artificial Sequence
  ENSG00000177699_7 (sequence is synthesized)
cagccccagggaggcagtggtgccagcctcctgcccgcacctgcttagagactttgagccacgtctttttgagccggaagattgcactgcggttcatggacgaggtgatctccagtacgg

SEQ ID NO: 1008270 - DNA, 120 bp, Artificial Sequence
  ENSG00000177699_8 (sequence is synthesized)
cattgtagttgtggaggcagcggcatatgtcagctacggccacccacttctcgatggcgctcaccctggcgttgatgtcctcattgcggatgatttctgaagcaatcaagttactgatct

SEQ ID NO: 1008271 - DNA, 120 bp, Artificial Sequence
  ENSG00000177699_9 (sequence is synthesized)
ttaagccgatgcaataagacagggaaaaagaggagtaagtattgcaaagatgataaatggtcactatttgcagatatgattgcctgcttgaaaatacaagaaggaattggaaaactacga

SEQ ID NO: 1008272 - DNA, 120 bp, Artificial Sequence
  ENSG00000177699_10 (sequence is synthesized)
gaacaactaacagagcttgctagggttgctggctaaaggttcaatatacaaaaatgaaaagtttatatatacattagcaataatcaattagaaaatacaacaaaaatacaaccttccaaa

SEQ ID NO: 1008273 - DNA, 120 bp, Artificial Sequence
  ENSG00000177699_11 (sequence is synthesized)
taacaatgggaatctgtaaatacctaggaacttaatgagaactatgtaggatggaaaaaacaggtcaccaaaggatataaaaggcttgaataacagagaaagagatcaaattcccaaatg

SEQ ID NO: 1008274 - DNA, 120 bp, Artificial Sequence
  ENSG00000177699_12 (sequence is synthesized)
acagagaaagagatcaaattcccaaatgggaatgtaaatatgtcatttttctgacaactaatacatgtgtttaatgtaatccaataaaacactcaggccaggcgcggtggctcacacctg

SEQ ID NO: 1008275 - DNA, 84 bp, Artificial Sequence
  ENSG00000177699_13 (sequence is synthesized)
cacacaaaaaaaattagctgggcgtgatggcgcatgcctgtaatctcagctacttgaaaaactgaggcaggaaaatcacttgaa

SEQ ID NO: 1008276 - DNA, 84 bp, Artificial Sequence
  ENSG00000177699_14 (sequence is synthesized)
caaaaaaaattagctgggcgtgatggcgcatgcctgtaatctcagctacttgaaaaatgtttcagtgagccaagattgcgctgc

SEQ ID NO: 1008277 - DNA, 120 bp, Artificial Sequence
  ENSG00000249388_0 (sequence is synthesized)
gtcagccccagaaagcgttaaaggtgcagcagctcgcgccagcctccgcagccgcctttgtacgcgtgatttatgacttcaatcttggttcaccgagagttcacacggctttcgctgctg

SEQ ID NO: 1008278 - DNA, 120 bp, Artificial Sequence
  ENSG00000249388_1 (sequence is synthesized)
ttgaagatcagagagatggcttctggattcatctttccctgcaatccagcttctcctcctggggccctcatactggagactgggatcatcatccaggcttttgcactgggccaggaattt

SEQ ID NO: 1008279 - DNA, 120 bp, Artificial Sequence
  ENSG00000249388_2 (sequence is synthesized)
accctgccctcacagggcgatcaccagtgacctgtggtgtggagtctccttttacctatgtctcctccttcccactgtcaccatccttggtcctcctctgtcacctggaatactccactt

SEQ ID NO: 1008280 - DNA, 120 bp, Artificial Sequence
  ENSG00000249388_3 (sequence is synthesized)
ggtaaccagcatgatcttataacgctagttttacccttgtcagcactttgccaaaaacctcaaataaagactttttttaaaatgtgcaatggaaaaataaagttataaattatatcataa

SEQ ID NO: 1008281 - DNA, 120 bp, Artificial Sequence
  ENSG00000249388_4 (sequence is synthesized)
ggtgcagcagctcgcgccagcctccgcagccgcctttgtacgcgtgatttatgacttcaatcttggttcaccgagagttcacacggctttcgctgctgttgaagcctctcaatcgagagg

SEQ ID NO: 1008282 - DNA, 120 bp, Artificial Sequence
  ENSG00000249388_5 (sequence is synthesized)
cacaggtttcaagacacatcatcccctccgatggttaggggtgggaaagtcagatctgccagttgtttcacatctgtaagaggcctggagagggagaaaattgctcctatcccatgagaa

SEQ ID NO: 1008283 - DNA, 120 bp, Artificial Sequence
  ENSG00000249388_6 (sequence is synthesized)
aaggagccctgcgtccctccctgaggccaaggggctgctctgaaaactgctctaagaacactaccactttctacaggacacctgagggcccagcccccatggatctctcagtgcctgtct

SEQ ID NO: 1008284 - DNA, 120 bp, Artificial Sequence
  ENSG00000249388_7 (sequence is synthesized)
ggtccagagggagccagtggctcttgccagcacatcaccattttgtgctccacgagggggtggtccatggagtcatctcatctttcagcccagacctcactcactctttctccaagccac

SEQ ID NO: 1008285 - DNA, 120 bp, Artificial Sequence
  ENSG00000249388_8 (sequence is synthesized)
gcagccgcctttgtacgcgtgatttatgacttcaatcttggttcaccgagagttcacacggctttcgctgctgttgaaggacacctgagggcccagcccccatggatctctcagtgcctg

SEQ ID NO: 1008286 - DNA, 120 bp, Artificial Sequence
  ENSG00000249388_9 (sequence is synthesized)
acacctgcgagatggcggagggactgcagacccgggtgcgggagaccagcgccggcgaagacaggcgggcgagggaggcccctccagcgtcctgctggggttgagttggggcggctcgtc

SEQ ID NO: 1008287 - DNA, 120 bp, Artificial Sequence
  ENSG00000249388_10 (sequence is synthesized)
ccgtggccgctgggtcgtctggtttccgctttccgaaagaaatgagaggagaggcaagtggagtcgctgaactttaattaaaccgtagagaagacagtggggggaggggaaaaaaaacga

SEQ ID NO: 1008288 - DNA, 120 bp, Artificial Sequence
  ENSG00000249388_11 (sequence is synthesized)
tcggagaaggaggagaaggcggccgagagatcgaggaaaggaagtcctggcggctcgggggaacttggagatctctccaaggggctgaaagctggaagttgtatgaaggtgttccttttc

SEQ ID NO: 1008289 - DNA, 120 bp, Artificial Sequence
  ENSG00000249388_12 (sequence is synthesized)
ctccgcagccgcctttgtacgcgtgatttatgacttcaatcttggttcaccgagagttcacacggctttcgctgctgttgaaggaaatacatgtacatggttcaaaactcaaaaggcacc

SEQ ID NO: 1008290 - DNA, 120 bp, Artificial Sequence
  ENSG00000249388_13 (sequence is synthesized)
gtacgcgtgatttatgacttcaatcttggttcaccgagagttcacacggctttcgctgctgttgaaggcaaagtggtgcctgaggatctaaccaatgaaaaagcctgggaaataggctgt

SEQ ID NO: 1008291 - DNA, 120 bp, Artificial Sequence
  ENSG00000249388_14 (sequence is synthesized)
ttctgcaccccctgacccttcatgcagagcaggatatcggcttcagcccaggagcaatgctagaagttgagaggaaatacatgtacatggttcaaaactcaaaaggcaccaaaagttata

SEQ ID NO: 1008292 - DNA, 120 bp, Artificial Sequence
  ENSG00000275390_0 (sequence is synthesized)
ttcatcatcctctccagcttccaggcttggccacgggaggcagctttgtggatcttcctgagatccccatggtgaatcacctctgatcctcaattttatatactacacctggtggtggct

SEQ ID NO: 1008293 - DNA, 120 bp, Artificial Sequence
  ENSG00000275390_1 (sequence is synthesized)
cagtgttcactccgaaaaatgaaaaattgcccatttttgtgaaaaagttctactgatatgtgaaggctgagttctattggaaccaccaagtcatgacaccagaagggaaaagaagtagtt

SEQ ID NO: 1008294 - DNA, 88 bp, Artificial Sequence
  ENSG00000275390_2 (sequence is synthesized)
catgaggtggaaatatctctctctgtggtccaatcaacctctacctcccgagttcaagcaaatctcctgcctcagcctcatgagtagc

SEQ ID NO: 1008295 - DNA, 120 bp, Artificial Sequence
  ENSG00000275390_3 (sequence is synthesized)
gagacggctaattttttctttgtatacttttatttaattcggcttaggttacttgtttattagtagtagttttgcatctatgggattgttgtataaaataaatggtttaaatatgtagaa

SEQ ID NO: 1008296 - DNA, 120 bp, Artificial Sequence
  ENSG00000275392_0 (sequence is synthesized)
atctgtaacataaggataatcatagtgcccacaattgttgggaggatttgttgagttaatccttgttatgcacctagtctagtgccaagttatcattattactattgtcattatttttaa

SEQ ID NO: 1008297 - DNA, 120 bp, Artificial Sequence
  ENSG00000275392_1 (sequence is synthesized)
ataataatataatgattttgttagaataagacaattttctatcaaattccataaaattattgaaataaatatacaaatccatagtatctacaatgttaacacctccctttaaggttggaa

SEQ ID NO: 1008298 - DNA, 120 bp, Artificial Sequence
  ENSG00000275392_2 (sequence is synthesized)
ggaatgtgcacagtcttgtggtatgtggcagttttgtgtgacaatatatgaccttgcagagtgcactaaaatcattcttctttccaacaagaaaaaaataaaggaaattattgatctaga

SEQ ID NO: 1008299 - DNA, 90 bp, Artificial Sequence
  ENSG00000249381_0 (sequence is synthesized)
agcttgcagacgacctcttctggaactgattgcaaggagtgaaatggactaattttagaataagcaactctactatggaacatctgaaaa

SEQ ID NO: 1008300 - DNA, 120 bp, Artificial Sequence
  ENSG00000249381_1 (sequence is synthesized)
aattttagaataagcaactctactatggaacatctgaaaaaaaaagagcactttttaaattacagcaaaatattttttgatataaatttgtgtctggcttccgcagaaaacagtagacac

SEQ ID NO: 1008301 - DNA, 120 bp, Artificial Sequence
  ENSG00000249381_2 (sequence is synthesized)
ggacatgtttttaaggcagttgtcagaggagaaagaggagaagcatgtggaaggagggcttcctgatgactaaattatatgtatgtttctgtatgtctcatttcatgggaactacctcta

SEQ ID NO: 1008302 - DNA, 120 bp, Artificial Sequence
  ENSG00000249381_3 (sequence is synthesized)
ctttcaaatgatcatttcttcccaacatttcaatctatatatcacttctctttgtaatgaaaagcatgttacttttctaacttttagcctaaatactaagaaataaaaatttatttaatg

SEQ ID NO: 1008303 - DNA, 120 bp, Artificial Sequence
  ENSG00000249382_0 (sequence is synthesized)
agcccggttccaaacccttgctggagaggtgatacagtcatttggaggaaagagggttgctgtggtatgctggggttccgcttcaatgcctagtcacctcagattttcctgtacctgcag

SEQ ID NO: 1008304 - DNA, 120 bp, Artificial Sequence
  ENSG00000249382_1 (sequence is synthesized)
gtatcaccagtgaagcctgcgaagcagcaaagatggcagtctgccccgtcttctaggagctctgtcacagggagggaatgatacaagcttgttgtgcaagccagaaatctgaatgtattc

SEQ ID NO: 1008305 - DNA, 120 bp, Artificial Sequence; identical to SEQ ID NO: 990225
  ENSG00000249382_2 (sequence is synthesized)

SEQ ID NO: 1008306 - DNA, 120 bp, Artificial Sequence; identical to SEQ ID NO: 990226
  ENSG00000249382_3 (sequence is synthesized)

SEQ ID NO: 1008307 - DNA, 120 bp, Artificial Sequence; identical to SEQ ID NO: 990227
  ENSG00000249382_4 (sequence is synthesized)

SEQ ID NO: 1008308 - DNA, 120 bp, Artificial Sequence
  ENSG00000249382_5 (sequence is synthesized)
taggaggtggctggagaccctggttgggaggtcttgcccttgtcaggaggaatgagaccaggaacctgctttaaaaagtgctttgaccgtgttttcatagacaagccgtgctgtgctggc

SEQ ID NO: 1008309 - DNA, 120 bp, Artificial Sequence
  ENSG00000249382_6 (sequence is synthesized)
ccacttcagctcatggtcacctcagacactctgaagcctgaaggctggaacaactaaattgcccaaacagcaaatatgacagcatctacagaaatcattttatttgagttatgtagcaag

SEQ ID NO: 1008310 - DNA, 120 bp, Artificial Sequence
  ENSG00000249382_7 (sequence is synthesized)
aacccaacttaagcaaatataaaatttacaactaagtcactatttggatattaatgtgtatgctaaactgatttgttcatgggctagtcagctattcatatgatctttacaattttctga

SEQ ID NO: 1008311 - DNA, 120 bp, Artificial Sequence
  ENSG00000249382_8 (sequence is synthesized)
attccattttttggttaaaaaaagaaaacaagctgatacttttatcactttctaagaaacatttgatttaaattcttatgccttcaatatctcatgtaaaatgctagtttcattactact

SEQ ID NO: 1008312 - DNA, 120 bp, Artificial Sequence
  ENSG00000249382_9 (sequence is synthesized)
gtaagtaaatatgtgtaaaacagaaagtatctgagacaagtctcaatcagttttgaagtttatttggccaaggttaaggatatgcccagaagaaataaacatgcaatcacagaaacagtc

SEQ ID NO: 1008313 - DNA, 120 bp, Artificial Sequence
  ENSG00000249382_10 (sequence is synthesized)
ggagaggtgatacagtcatttggaggaaagaggttactcttgctttttgagttttcagcattcttgtgctgattctttctcatcttgggttgctgtggtatgctggggttccgcttcaat

SEQ ID NO: 1008314 - DNA, 120 bp, Artificial Sequence
  ENSG00000249382_11 (sequence is synthesized)
gcctcagcctcagcccggttccaaacccttgctggagaggtgatacagtcatttggaggaaagaggtatcaccagtgaagcctgcgaagcagcaaagatggcagtctgccccgtcttcta

SEQ ID NO: 1008315 - DNA, 120 bp, Artificial Sequence
  ENSG00000249382_12 (sequence is synthesized)
agcccggttccaaacccttgctggagaggtgatacagtcatttggaggaaagagtctgtgcatttttctgtagggttgctgtggtatgctggggttccgcttcaatgcctagtcacctca

SEQ ID NO: 1008316 - DNA, 120 bp, Artificial Sequence
  ENSG00000249383_0 (sequence is synthesized)
ctctttctgccatgtgaggataagaagtcagcagtctgcaacccagaagagggccctaaccagaaagttgttgtggccctgatctgacttccagcctccagaactataagaagtcaatgt

SEQ ID NO: 1008317 - DNA, 120 bp, Artificial Sequence
  ENSG00000249383_1 (sequence is synthesized)
tccagaactataagaagtcaatgtctgttgtttacaagccactctgtcttgacttttgttacaggagcccaaattaactaagataaccctatctgagactgggcacagtggctcacgcct

SEQ ID NO: 1008318 - DNA, 73 bp, Artificial Sequence
  ENSG00000249383_2 (sequence is synthesized)
taattgcttgaacctgggaagcagaggctacagtgagccaagattgtgacactgcactccagcctgggcaaca

SEQ ID NO: 1008319 - DNA, 120 bp, Artificial Sequence
  ENSG00000249383_3 (sequence is synthesized)
aaaaaaaaaaaacccatctggagaaaactaaaaagctcagtctttcccctgggcccagaatgcccttcttcccctgccctaggaaagcccagtcacctctgaggaggcagcaacatcctg

SEQ ID NO: 1008320 - DNA, 120 bp, Artificial Sequence
  ENSG00000249383_4 (sequence is synthesized)
gctcctcccacttgctttcagtgcatccccacgtccattctctcatggaaccctgtgcacatctctatctgagcacccgtaagactgtgttctgctagctcatgtgttcatcatctccgt

SEQ ID NO: 1008321 - DNA, 120 bp, Artificial Sequence
  ENSG00000249383_5 (sequence is synthesized)
gttgactgtaaacttcactttgtaccttgtcccccagaatccagcaccgaatctggcacactgaatgaatgaatgagtgaatcaaagaatgagtgggcaagtgttgatccgaagcacatt

SEQ ID NO: 1008322 - DNA, 120 bp, Artificial Sequence
  ENSG00000249383_6 (sequence is synthesized)
ttctgggaaccctcatgctacaagtcattaggaacatggattttggacacttctaacaagcctgagttttagtcctggctcttgtacttacttgcactgtaacctagagaaaaattacct

SEQ ID NO: 1008323 - DNA, 120 bp, Artificial Sequence
  ENSG00000249383_7 (sequence is synthesized)
aacttctcagaggcttcatctgcaatagaaatgaattcattgagtcgtgggagttcaatgaaatgttgtttgaagcacatttagcacagcacccggtacactgataagtgctcactaaag

SEQ ID NO: 1008324 - DNA, 120 bp, Artificial Sequence
  ENSG00000249383_8 (sequence is synthesized)
gattacttgtatcatcatcaatattgcatggtccaaggcacatggcaaggctatggaacacacagaagccaactagattggctacaaggccagcctcaagagaggaagaaacagatatat

SEQ ID NO: 1008325 - DNA, 120 bp, Artificial Sequence
  ENSG00000249383_9 (sequence is synthesized)
acctgaggcccagagagacgttcagcaacttacccagcatcacccagtccacaagtgaaacaccccttcatttcagaagtgaatactccagagggtctcactctgtcacccaggctgaag

SEQ ID NO: 1008326 - DNA, 120 bp, Artificial Sequence
  ENSG00000249383_10 (sequence is synthesized)
tgcagtgacaggaccacggctcattgcatctttgacctcctgggctcagcctccagattaactgggtctcactctatcaccaaggctggaattcagcggcacaatctcagctcactacaa

SEQ ID NO: 1008327 - DNA, 120 bp, Artificial Sequence
  ENSG00000249383_11 (sequence is synthesized)
acgagcttccctggagtgatgacatagaattgtttcttaattattttataggtttctcctctttccagcttctatatcacaacaggatgattctaaagggccatcccagcttcagagttc

SEQ ID NO: 1008328 - DNA, 120 bp, Artificial Sequence
  ENSG00000233208_0 (sequence is synthesized)
agtctggcgggagccgtccctggatgggggtcactagcctccccattgtgactcgtttgagctcttagccaggcgtgtagtctggcgggagccgtcgcggctggctcggcagctccaggc

SEQ ID NO: 1008329 - DNA, 120 bp, Artificial Sequence
  ENSG00000233208_1 (sequence is synthesized)
tattccgaggaacagtcttcagagagcctggggtgctgatggggaaaagctgttgctgagatttgacaagtttggtcctgagatgtcagaaaggatttcagctcttctgccaccccaagg

SEQ ID NO: 1008330 - DNA, 120 bp, Artificial Sequence
  ENSG00000233208_2 (sequence is synthesized)
acggtggcgcgtaaatcacagtgagctggcttatgtcaggtcaactgtggaatttgatcctagcgcattgctccctcctcttccttgcctgcgtctctccctctctcagctctagtttga

SEQ ID NO: 1008331 - DNA, 120 bp, Artificial Sequence
  ENSG00000233208_3 (sequence is synthesized)
gatcagcacagattccctgggtgatttttgagaaaactgcctcctctttaggacttggcatcccctaacctgcatcaggaaagggtggcgacagatactctcacacccagggaggctgca

SEQ ID NO: 1008332 - DNA, 120 bp, Artificial Sequence
  ENSG00000233208_4 (sequence is synthesized)
aggcccaccctctaccctccacctgggttctctggcgtcgagacttgtgccctacagttctgggccgttggggtgatgtcccagtgggaccagggtgagggtgcaggtatctgagggagt

SEQ ID NO: 1008333 - DNA, 120 bp, Artificial Sequence
  ENSG00000233208_5 (sequence is synthesized)
gacccatatcccactaccttttggtgggtgctgcagaggacaatggagagagagtcaactctgaagagtggtcttgtggaagaggcagctggctggttcagtgtggcactggcagcctcc

SEQ ID NO: 1008334 - DNA, 120 bp, Artificial Sequence
  ENSG00000233208_6 (sequence is synthesized)
ctaaggttcccaggtagaagtttctgacaggtagatttcagctgtgtttaaggaagaactttgaagttgtcagaatgagcggtcttgtgatagtgagctccctgtctccagaggcatgca

SEQ ID NO: 1008335 - DNA, 120 bp, Artificial Sequence
  ENSG00000233208_7 (sequence is synthesized)
agcaggacactttcacatatgcattcaagatgacctatgcaaggcgttgtgctaagtgctaggagtgcagaggagaacgagacccagtggggaaacaggcacttgcaatgctgctaggac

SEQ ID NO: 1008336 - DNA, 120 bp, Artificial Sequence
  ENSG00000233208_8 (sequence is synthesized)
aatgaatccaggcagtgatccaccaatgataactaacatcataaaaagatacatggccggatatgatgttccttctgacggaagaccacaacacctgctgaaaaatcaaatctgaatcgg

SEQ ID NO: 1008337 - DNA, 120 bp, Artificial Sequence
  ENSG00000233208_9 (sequence is synthesized)
atcaagcctctagagactgaccctgcttatttctgtgaaccaaccagtgatctctggctactgctcagaagaaacagagggtttgacacagacaagcaaggtgaagatggtggagccaca

SEQ ID NO: 1008338 - DNA, 120 bp, Artificial Sequence
  ENSG00000233208_10 (sequence is synthesized)
atgtggaaggaggttggatccctgaatcaccactgggaagagagtcacctgctaatcaaaaacatggttttggattttacctgaaaacttataaacttctatcatatttgacccattgtc

SEQ ID NO: 1008339 - DNA, 120 bp, Artificial Sequence
  ENSG00000233208_11 (sequence is synthesized)
gaaacagagggatggtgtgggagaagcctgctgtgtgctagccagtggaatgtgaccagaatgatgtgtaccactttctgcataggcatcctgggaccacggagcagccaccaacgacta

SEQ ID NO: 1008340 - DNA, 120 bp, Artificial Sequence
  ENSG00000233208_12 (sequence is synthesized)
cagatgaaacacaagcctctccggtcactttttgctggccgttggaaggaggctgttgagtgggagtggaacctccaggtttcctggggcactattctggatcccctcatctcagctctg

SEQ ID NO: 1008341 - DNA, 120 bp, Artificial Sequence
  ENSG00000233208_13 (sequence is synthesized)
tgaggtcatggctaagcctgaaacaggtcccaactcattcaatcttgccataaacctatgaaatgggtgtcagccatgaggctttggttgcaaataacagaaaccccaacttaactgtca

SEQ ID NO: 1008342 - DNA, 120 bp, Artificial Sequence
  ENSG00000233208_14 (sequence is synthesized)
tatggaagcagagaagcaactgactctttgccagaggcttatgtcatgactccaagtagtgagggggtggctgttcaggtcaaaggattagcaacaatgactggcttaaacaacgaaaaa

SEQ ID NO: 1008343 - DNA, 120 bp, Artificial Sequence
  ENSG00000233208_15 (sequence is synthesized)
ggactactgtgtgcagtttggattcctccaggcttaaaatcggcttccatccccaactctccagctccccgtctccacccaggccatttgaacgatcttgttgaaaagcacagtggtttc

SEQ ID NO: 1008344 - DNA, 120 bp, Artificial Sequence
  ENSG00000233208_16 (sequence is synthesized)
caaagcaaatccaagtcttgtgcggctctgggctgagggtcccacgcttttcacccagacctataatcatcacagatgtttagaggaggtgaccaatgaccccctctgcgggagaacctg

SEQ ID NO: 1008345 - DNA, 120 bp, Artificial Sequence
  ENSG00000233208_17 (sequence is synthesized)
cggcgaaaggcagagccccagagcagggtctggagtggcaggaccggcagccaatgaaggtgaaggccgagcattacatcatcaccgtggtctcccattggtttacatcctgggcttcct

SEQ ID NO: 1008346 - DNA, 120 bp, Artificial Sequence
  ENSG00000233208_18 (sequence is synthesized)
gactccgcctcccagccttaacaatgggcctctctgctccccaggcttctgaccctggtgccagctttgcccagaaggccacagtcgggcagagtcctgggctaggcgggagcccgaggt

SEQ ID NO: 1008347 - DNA, 120 bp, Artificial Sequence
  ENSG00000233208_19 (sequence is synthesized)
ctgggctgagccactaactaggggtgaggcatagtgttgccaggtgtcatcttcctcacctgcaagaggagagggttccagctgttaatctcgggttctgccgcagttcacccaccacca

SEQ ID NO: 1008348 - DNA, 120 bp, Artificial Sequence
  ENSG00000233208_20 (sequence is synthesized)
cacactcgcccatgaacgtcctcctcgcagaccccggggaccctggccggccaggggtctggtctgccatgggctccctttcctccccagagcctggcaggaagtgaacatatggaatga

SEQ ID NO: 1008349 - DNA, 120 bp, Artificial Sequence
  ENSG00000233208_21 (sequence is synthesized)
tggttaatgttaactgatgttttctaaagagcacacactgggctaagccttatacattattttattcgtgtcctaaatattagccccccacgcagccctaattgttcagagacaagcact

SEQ ID NO: 1008350 - DNA, 120 bp, Artificial Sequence
  ENSG00000233208_22 (sequence is synthesized)
gactctgaggctgggccaggttgagtgatggccaaggccacggacctggtgagggggacagtcaggattcgaacccaggcggctggctccagagcccttcaaacgatgccatgggaatgg

SEQ ID NO: 1008351 - DNA, 120 bp, Artificial Sequence
  ENSG00000233208_23 (sequence is synthesized)
gatgaggatacagctcattgctgagccttatggtgaaccagaagtttaccaggcagacaggagctggggagagggctggcattcgtccattcaggttatgttttctgaattatatataga

SEQ ID NO: 1008352 - DNA, 120 bp, Artificial Sequence
  ENSG00000233208_24 (sequence is synthesized)
aggacatgttgcagaagaaatgcaagtacagtgaagaataagactggggaacttttacaattcagagtggccttcactgtgggcggtccgaattgatccctgtatacaggtgcttctggg

SEQ ID NO: 1008353 - DNA, 120 bp, Artificial Sequence
  ENSG00000233208_25 (sequence is synthesized)
gtgacattttccctgctccatggagctccgggaggagtgcggaccaaccccttctttgcaggcctgtctgtggggtgccactcctcctcccacctccccactgcacagacagcccatcag

SEQ ID NO: 1008354 - DNA, 120 bp, Artificial Sequence
  ENSG00000233208_26 (sequence is synthesized)
tgtccctgagctgctccagaaggatgcagctctgaggaggctctgggagcggtgtatcctagcaacctctgaggctggcatctgcagggctaggcccagactcaaggctctttctaattt

SEQ ID NO: 1008355 - DNA, 120 bp, Artificial Sequence
  ENSG00000233208_27 (sequence is synthesized)
gccagccttcccttaatgataagctttcccacacggatgtggagtggggaggaagaggggagaagtgggcaggaagtgttgcctccaaccccatcacagagtaggtcaagcctcgcccac

SEQ ID NO: 1008356 - DNA, 120 bp, Artificial Sequence
  ENSG00000233208_28 (sequence is synthesized)
ctcccagctataggaattagagaactggggggcatgttaatatgtcaaggtgtttaaccctcaccacagggaggcggccagatttcctctcaggaaaaaagttacaggtttcatcaacaa

SEQ ID NO: 1008357 - DNA, 120 bp, Artificial Sequence
  ENSG00000233208_29 (sequence is synthesized)
agagcccaggcctttgaaactgctatcacaaggctgcttccacttccccccgtggatcctggtggaagtttcttgatgttgagcaagaactcccagaaactcctggaacctgcttctcag

SEQ ID NO: 1008358 - DNA, 120 bp, Artificial Sequence
  ENSG00000233208_30 (sequence is synthesized)
ccatgcgcgccggcgcagccctgctgtgtggccttaggcgcccctctcctgcccccgggcctccctccactgcgtgaccggccacatggccatggctgctgctctgtgcctgtctcctca

SEQ ID NO: 1008359 - DNA, 120 bp, Artificial Sequence
  ENSG00000233208_31 (sequence is synthesized)
tggggcagaggcaggtcctggactgggatcccagcagtgagaagacctggacatcaaccctatttcattgtgcctctgcaaatctcccaacttttggagctgtagctgcaagctcagact

SEQ ID NO: 1008360 - DNA, 120 bp, Artificial Sequence
  ENSG00000233208_32 (sequence is synthesized)
tgtggtttcctgtacctggaggaggcccaggtcattctgttaagtcccttgtctatttcctgcttttatctggatgctgagttaattatttgatccaacaataaaactaacaaggtttta

SEQ ID NO: 1008361 - DNA, 120 bp, Artificial Sequence
  ENSG00000233208_33 (sequence is synthesized)
atgatgccaaagaccgcagtgctatcctgactcaaggaagaacatgtcatgggaagatggtagggagaggtgagatagggatgagcccaagggaaggccttggatgccagaagcaagagc

SEQ ID NO: 1008362 - DNA, 120 bp, Artificial Sequence
  ENSG00000233208_34 (sequence is synthesized)
ccagacttcaccaacatagattctaagaaaactgctagcagagaagggagctggtgggcatggaatgttaagaaggccaggggtcataatctcacccagccaccgcagcagctgtcacca

SEQ ID NO: 1008363 - DNA, 120 bp, Artificial Sequence
  ENSG00000233208_35 (sequence is synthesized)
taacattaggtatcaccagggaggaggacgccacctccctggtgatagctgattggaccagagggaagccccagtcccagggcagccaatcagcagcctgcaagcagccaatgagatggc

SEQ ID NO: 1008364 - DNA, 120 bp, Artificial Sequence
  ENSG00000233208_36 (sequence is synthesized)
ctggagggggagttctgcccaatcacaataccaataaataagaggtccaggctggatctctgtcttggagatttgagccggagatttgagcgagagatttggaagaaatgtggggcaatc

SEQ ID NO: 1008365 - DNA, 120 bp, Artificial Sequence
  ENSG00000233208_37 (sequence is synthesized)
tgtagaaggagcagaagacaaaaatcacactgaaggcagtgagtggaggagcttgtgctgcaggatacagaagccaggagagagtgaggcgcaggcagagccagcctggcgaggactaag

SEQ ID NO: 1008366 - DNA, 120 bp, Artificial Sequence
  ENSG00000233208_38 (sequence is synthesized)
ccatgtttaaagccatgaatggaaggttctctgtccccagaagtgaagcaggactttcccagtccccagtttgttctggtctttagaagctggcgagtggccagccatgaaggccatgcc

SEQ ID NO: 1008367 - DNA, 120 bp, Artificial Sequence
  ENSG00000233208_39 (sequence is synthesized)
aagtgactggcatggctgagttgctatccttatatgtggcctcccatctgcccctcgccttcactggagaggcagcaaggagggcattgaagcctgaaattctgaagaattttcttgcag

SEQ ID NO: 1008368 - DNA, 120 bp, Artificial Sequence
  ENSG00000233208_40 (sequence is synthesized)
atcaacaaagtggaaggaaaaggaataaaagaaaaaaaaaacaaaacataaggagaatttatagattaacagaagcttaagagaaatatcagccaattacaacatatggactttggattc

SEQ ID NO: 1008369 - DNA, 120 bp, Artificial Sequence
  ENSG00000233208_41 (sequence is synthesized)
tgattcttgcgaacaaactacactacagtgacaataaaaatgagacgtattcatgagacaattggggaaatttgaacactgaatggatacttaacatcaaggaattgtttttaatttttg

SEQ ID NO: 1008370 - DNA, 120 bp, Artificial Sequence
  ENSG00000233208_42 (sequence is synthesized)
tttgagcaatgtgaaaatcgtgtttgggattatgctttaaaagagtcctaattgttgagggattcatacagaaacatttatcgatgaattaatgaggccaggcacagtggctcatgcttg

SEQ ID NO: 1008371 - DNA, 73 bp, Artificial Sequence
  ENSG00000233208_43 (sequence is synthesized)
gccgaggcaggcagatcacctgaggccaagaattaaagaccagcttggtcaacacggcaacactcctgtagtc

SEQ ID NO: 1008372 - DNA, 79 bp, Artificial Sequence
  ENSG00000233208_44 (sequence is synthesized)
taataataataataataaagatgtctgggatgtgctttaaaataattcattgcagagagaagaaggaagtaaaagtttg

SEQ ID NO: 1008373 - DNA, 120 bp, Artificial Sequence
  ENSG00000233208_45 (sequence is synthesized)
aaataattcattgcagagagaagaaggaagtaaaagtttggatgaaacaaggaggcagcacccagggtcattcctggagcataaacgatccctgcagaacatgggctagaagaccccaca

SEQ ID NO: 1008374 - DNA, 120 bp, Artificial Sequence
  ENSG00000233200_0 (sequence is synthesized)
ttggctctcatatttaaaaatgaaattgtctgtaatactttcccactctccggcacctgagtccatggctttggcagccatagtgatcatgaacttccggctatgtcctagagtcattta

SEQ ID NO: 1008375 - DNA, 120 bp, Artificial Sequence
  ENSG00000233200_1 (sequence is synthesized)
aaccccaaaatgtcatcaagacactggctacaggtctaaactccaataaaatccagctgggttacatcaattcagacatctggataaaaggatgaatgaaaccatgtacataatacagaa

SEQ ID NO: 1008376 - DNA, 120 bp, Artificial Sequence
  ENSG00000233200_2 (sequence is synthesized)
ttatgcatgccaggaaaaaaaattatactgcctaaaagctgcaaccttcatgacatcaaatctattttaacactggctggttatgtgaggaaaaggctaataaaaaaaaattctggctga

SEQ ID NO: 1008377 - DNA, 120 bp, Artificial Sequence
  ENSG00000233203_0 (sequence is synthesized)
cctgggcagtggggagtggtgagctccattgtgtacacttggaagcagcccagaaaggtgaagacctgttcgtgaactccagaggccattggaagcatggaaggctatggctggcactct

SEQ ID NO: 1008378 - DNA, 120 bp, Artificial Sequence
  ENSG00000233203_1 (sequence is synthesized)
aggaaggcatttcagcccgagtaaactccccaggcccgctctgtgccaggcagtgttgcaagcctcgggtagggtgcttctagcacggtgctttgtgcacagtaaacactccagcggctg

SEQ ID NO: 1008379 - DNA, 120 bp, Artificial Sequence
  ENSG00000233203_2 (sequence is synthesized)
ttgaccaatgaatgaatgaagattgtaggctcaaatattcaagttatcaaagtgcaaagaatgagaggttgtttgcactggacttcaaaaataaatagcctggacctgtactgtcttaca

SEQ ID NO: 1008380 - DNA, 120 bp, Artificial Sequence
  ENSG00000233203_3 (sequence is synthesized)
gagtcagtcaccctttggccggacaggcggttcccgggcgcggaggatggaaacctggcggtaacctctgcaggtcgtgccactcggtgtgcgcaaggtctccagaggcatcttttcatt

SEQ ID NO: 1008381 - DNA, 120 bp, Artificial Sequence
  ENSG00000233203_4 (sequence is synthesized)
ctgggcagtggggagtggtgagctccattgtgtacacttggaagcagcccagaaagttcactgaggcagatgggaggcccggaggagaaagaatgaaggaaggcatttcagcccgagtaa

SEQ ID NO: 1008382 - DNA, 120 bp, Artificial Sequence
  ENSG00000233203_5 (sequence is synthesized)
cacactggatttcaaagacttagtacaaagaaaaaatgcaaaatagctcattagtaatttttatgttaatgacatgttgaaataacattttgatatattaagtaaaatatagtattagaa

SEQ ID NO: 1008383 - DNA, 120 bp, Artificial Sequence
  ENSG00000223823_0 (sequence is synthesized)
ctaacgacgcggcgcccaccgagagctgggggagcccagggcggggagggcgcggccggagcgagcgccgcccgggaaacccgagccccgccagaacccctggcagccacagagctcagg

SEQ ID NO: 1008384 - DNA, 120 bp, Artificial Sequence
  ENSG00000223823_1 (sequence is synthesized)
cttcaacgctggcccgacaccagggccaggccagaaatcagcctgggagaagctgggtccggctccgaggctggtgggcacggccccacccggctttgttcttcgcggcgctgaggcggt

SEQ ID NO: 1008385 - DNA, 120 bp, Artificial Sequence
  ENSG00000223823_2 (sequence is synthesized)
tagtttagcctcccacccaccagacaaaggtgcgggaaatgggaccggtttgacttgttcaggcacatggtcaccctgcacgtcaggggccggctcacccctgatattagcaaccccaag

SEQ ID NO: 1008386 - DNA, 120 bp, Artificial Sequence
  ENSG00000223823_3 (sequence is synthesized)
cgtcttggcgcagggagggatccccgtcagccaggtccccacgcagctccaggcagcgccagcgtccaccagggagcaggggcagcagagcccttctccccagacacccttgtgtcttcg

SEQ ID NO: 1008387 - DNA, 120 bp, Artificial Sequence
  ENSG00000223823_4 (sequence is synthesized)
gaaaatgccaggtccccccccagctgctgttctcgtctttggaggacccggctttactggtgccacatgcctgctgcgggctgtgccatggagggcggcacctgcctcttctcacgtggc

SEQ ID NO: 1008388 - DNA, 120 bp, Artificial Sequence
  ENSG00000223823_5 (sequence is synthesized)
agctctggcaccgggaacttcagagaccccagctgggctgagccaccccgggctgaggccttgtgggtcgcctcaaattcaagcctcatgggcccggcctcccgccctaacggtcgctga

SEQ ID NO: 1008389 - DNA, 120 bp, Artificial Sequence
  ENSG00000223823_6 (sequence is synthesized)
ccgcctccccgcgctgcctacctcaggcctgggggctcccccgacttgttctctattcccccagcccctcactgcctgggggctcccccgactcactctctaggcccccagccccacact

SEQ ID NO: 1008390 - DNA, 120 bp, Artificial Sequence
  ENSG00000223823_7 (sequence is synthesized)
gcctgggggctcccccgaccctctctctattctcccagccccgcactgcctgggggctcccccgaccctctctctattctcccagccctgcactgcctggggactcgcctgactcgctct

SEQ ID NO: 1008391 - DNA, 120 bp, Artificial Sequence
  ENSG00000223823_8 (sequence is synthesized)
ctattcccccagccccacactgcatctcgggagcagttccaggccgacctctgctctccacggccgggaggtgtccaggtgtggacagagccccggctctccatcagggcacccagccgc

SEQ ID NO: 1008392 - DNA, 120 bp, Artificial Sequence
  ENSG00000223823_9 (sequence is synthesized)
cccacgctcagccctgcgtggcttctcccgtccttcctgggcatcccctgagggtgtggccctgttgctgggccccctcctgcccccttgccctgccagttcctagagcctaggctgagg

SEQ ID NO: 1008393 - DNA, 120 bp, Artificial Sequence
  ENSG00000223823_10 (sequence is synthesized)
gcagggccattgctgtgaacaaactggacaggctccgcgggagctcagagctgccccgtgtctgagggcgcggctgtgtggagtggggtcccctcggccaggcgggaaaggccctggatc

SEQ ID NO: 1008394 - DNA, 120 bp, Artificial Sequence
  ENSG00000223823_11 (sequence is synthesized)
gtgtgtgtgaccctggtactgggcaacccctgggacaggcaagtccgtggagacagaacggggcggtggctgcagcctgggagctcggcctccctcggggtgacggaatgttctggacct

SEQ ID NO: 1008395 - DNA, 120 bp, Artificial Sequence
  ENSG00000223823_12 (sequence is synthesized)
tgatataggtggtggatactcagccctgtgagtgcaataaatgccaccaaattctcacttcaaaattattttatgctatgtgaattctgctccaattaaaacacaaactctcttgcaaaa

SEQ ID NO: 1008396 - DNA, 120 bp, Artificial Sequence
  ENSG00000248388_0 (sequence is synthesized)
cgactccattgaaaagaaacataatatatggaaaaattactagaaaatctaggaaaactgactgaatgctttggaaagacacagtcaagattaacatgctgagactcgggaggtggtgat

SEQ ID NO: 1008397 - DNA, 120 bp, Artificial Sequence
  ENSG00000248388_1 (sequence is synthesized)
caaagagaaatcagagactaaattctcaaaactggaagctccctacagcatccacactcttcagccttgtactatgtgatgtgtattacgaatggagccaccggcagtatttgtatgaac

SEQ ID NO: 1008398 - DNA, 120 bp, Artificial Sequence
  ENSG00000248388_2 (sequence is synthesized)
cgactccattgaaaagaaacataatatatggaaaaattactagaaaatctaggaaaactgactgaatgctttggaaagacacagtcaagattaaaaaaaatgtgtcacaagaaagtttac

SEQ ID NO: 1008399 - DNA, 120 bp, Artificial Sequence
  ENSG00000249036_0 (sequence is synthesized)
acacacaagcttgcagcctgcaagacagctttgcagagggaaatctactgccaagttttcagcttttccaggagctaggcggctttcttcaggaaaactctttgagccctctcaggatga

SEQ ID NO: 1008400 - DNA, 120 bp, Artificial Sequence
  ENSG00000249036_1 (sequence is synthesized)
agtccaacagggattggatctgcatcaagtagcatccaaacacaaggacttagagggtgtgaacaaagaaggtctgttggaagagaggaattgaaattgacaagatgaacacggatgctg

SEQ ID NO: 1008401 - DNA, 120 bp, Artificial Sequence
  ENSG00000249036_2 (sequence is synthesized)
acaaactgtatgggtgccccgaaggtgcgtgcaaccacggaatgggaaactggaggaacacttggttgcaaaacatgggcccggtccctctggtatgagccatgagccagctgagcctga

SEQ ID NO: 1008402 - DNA, 120 bp, Artificial Sequence
  ENSG00000249036_3 (sequence is synthesized)
gtgcaaagatggagagatggctgaccagagtcacaatgacatcaacccccataactgggggcaactcaagaaaaccacacaggaagctagaaaactatgggagcatcaaggccagacaaa

SEQ ID NO: 1008403 - DNA, 120 bp, Artificial Sequence
  ENSG00000249035_0 (sequence is synthesized)
tacggaaaccatccagatgcttccatgtgttgcagaggggatgttagctgagatctagaaaatacctctgttctgggtgttttcataatccagcaccccactgggggctcaagtcacata

SEQ ID NO: 1008404 - DNA, 120 bp, Artificial Sequence
  ENSG00000249035_1 (sequence is synthesized)
aaactgccaacggctaacagcaaagacagctgaatggttccagtctttcagtcctgctcctggccaacactggacctctcaaagtctagccaactcctcttccagcgccttgataaacaa

SEQ ID NO: 1008405 - DNA, 120 bp, Artificial Sequence
  ENSG00000249035_2 (sequence is synthesized)
ccccctcatgctgggaaccacagcagtgggctgtttttctccctcatgcaccccaggaagcctctcctctttgcctgggctttcttcccaaggccttagctgccaacccattttacaccc

SEQ ID NO: 1008406 - DNA, 120 bp, Artificial Sequence
  ENSG00000249035_3 (sequence is synthesized)
ggtgcactcctcgcagctgaagtcccactggggcacctctctccttcacaggatagagagctattctcctttctcttacttttgcctattacatctcagctcctaaacctacttcttgtg

SEQ ID NO: 1008407 - DNA, 120 bp, Artificial Sequence
  ENSG00000249035_4 (sequence is synthesized)
tttttagcaggaagaccttattttcaaaacaaattgttacacagaatttgccagtttacagaacagatgaataaagacatttatggcagacttgtttattgtagcacaacactggaaaga

SEQ ID NO: 1008408 - DNA, 120 bp, Artificial Sequence
  ENSG00000249035_5 (sequence is synthesized)
cacgaaaagtccatcagtaaggaacagatttaataagatgatggtgaagtcatacaatggaatactattctgctgtctaaaagcgtgaggcacctcccaacaataatagcacaagttctg

SEQ ID NO: 1008409 - DNA, 120 bp, Artificial Sequence
  ENSG00000249035_6 (sequence is synthesized)
agaaaatctttactttatatggacagtatttggttaacagttccattttagggcaaagaccaagattactacttgttttgttaaaatgtgccacctcctattcaaacttgtccaatgttt

SEQ ID NO: 1008410 - DNA, 120 bp, Artificial Sequence
  ENSG00000249035_7 (sequence is synthesized)
atttggaacttaaatatggtgaccaaatatcccagtttgcttagaactgaagggtttcctgggatataggactttaagtgctaaaacggaaaattccaggcaaaggaatgagttggtcac

SEQ ID NO: 1008411 - DNA, 120 bp, Artificial Sequence
  ENSG00000249035_8 (sequence is synthesized)
cctatacttaacagaagtcaacatgttattttagaaagaataggtagattattattactaattttagcccatgttaataagccaatatattcacaaataaaacaaccagtatttgtactt

SEQ ID NO: 1008412 - DNA, 120 bp, Artificial Sequence
  ENSG00000249035_9 (sequence is synthesized)
ggctgccagcaggacctgaagctgaggtcacttctctctctggaaagactctgaggatggaaaagtacagccagcccccagactgggaatcctggaagacataactcatcccagtgcccc

SEQ ID NO: 1008413 - DNA, 120 bp, Artificial Sequence
  ENSG00000249035_10 (sequence is synthesized)
ccttcccttggagtccttggagtccctttccctaaggaagtccacttgacagccagttcacggagccagtggcggcgaagaaagagatcaactgattgttcgtgcaaagtcccttttgga

SEQ ID NO: 1008414 - DNA, 120 bp, Artificial Sequence
  ENSG00000249035_11 (sequence is synthesized)
aaacagaacccctgaccgagatctggaggacagactccggttgctggccaggtccctgtggcagctgtgatgggatcagattcccaggaaaggaggaggctgccacatttgcaaagggag

SEQ ID NO: 1008415 - DNA, 120 bp, Artificial Sequence
  ENSG00000249035_12 (sequence is synthesized)
caaagaggacaggcaggcagcctctgaaaccagagacagacacagagaaaaacagagagtgagaaaatgctcccccgaagacatagtgagattattttctgtaaacctgtaagggaagac

SEQ ID NO: 1008416 - DNA, 120 bp, Artificial Sequence
  ENSG00000249035_13 (sequence is synthesized)
aaagttacacagtgagtccaccttctgaaaagcaacaggcagacaggaccgagggccatgctcttaaggggagccgtgatggagccgggaggagaggcgcatcctcagcagagcttccct

SEQ ID NO: 1008417 - DNA, 120 bp, Artificial Sequence
  ENSG00000249035_14 (sequence is synthesized)
cccttgcacacgagctgacggcgtgaacgggggtgtcggggttggtgcaactatagaagggaaaggctgggcgggggtcacacatacctcagtggcaggcaggcaggcggcaggcagagc

SEQ ID NO: 1008418 - DNA, 120 bp, Artificial Sequence
  ENSG00000249035_15 (sequence is synthesized)
ggcaacaggaaaccactcagagctctgggctgggtctatctcccctccaccccgtggtccctcctcctcctgtctcctccttcccccggcctcctccttctcccatagccaaagctgtct

SEQ ID NO: 1008419 - DNA, 120 bp, Artificial Sequence
  ENSG00000249035_16 (sequence is synthesized)
ctgtctttcatttctttcctcctctttttgcggtgggctgtcctgaccaaacgtcccaaccctgcctgcctcatctgttccggggctgctgcctaaaccgactcacagagtgccagggct

SEQ ID NO: 1008420 - DNA, 120 bp, Artificial Sequence
  ENSG00000249035_17 (sequence is synthesized)
ggacaggcctggagggatgacccagaacagcctctttcttgttcagagggcaagtgaggcctggagactgcaaggaattacccaatggcccccaggggcagaaccaggcccaagtgtctt

SEQ ID NO: 1008421 - DNA, 120 bp, Artificial Sequence
  ENSG00000249035_18 (sequence is synthesized)
gatcttctaaccagtgagctttacaggagtcctccctaatattaggcaatgctgagaagggccaagcaattcaagggggttgtatttgccacaaaggcaaggccaggacttaccactgta

SEQ ID NO: 1008422 - DNA, 120 bp, Artificial Sequence
  ENSG00000249035_19 (sequence is synthesized)
cagacaagacaagctgctactagtggtatcatccttgatgatttggaactggtcttaaaaaaaaaaatcccactcaaactccacttgtaccactaatagacacataagggattagacatc

SEQ ID NO: 1008423 - DNA, 120 bp, Artificial Sequence
  ENSG00000249035_20 (sequence is synthesized)
tagctggtggacctgtgccaccagtattgaacagataaggtaattgatgatattgatgataatcataggagtaacaatagccaaagtttactgaggatttaataatcttcacagcaaccc

SEQ ID NO: 1008424 - DNA, 120 bp, Artificial Sequence
  ENSG00000249035_21 (sequence is synthesized)
cttatcttaggcattgtaattatgaccattttaataataaggaaacatagatgctaagtaacttgcctatgatcacctggcaaaaagtggtatgagagggctgattctacgtttcaactt

SEQ ID NO: 1008425 - DNA, 120 bp, Artificial Sequence
  ENSG00000249035_22 (sequence is synthesized)
gggtcactcctgttatatatgaactgctcagtgcaacaggtcttggttgaatgtttattttgtgcctaacactctgggaggtatgagaattaataaatacctggtccttgtcctcaaaaa

SEQ ID NO: 1008426 - DNA, 120 bp, Artificial Sequence
  ENSG00000273006_0 (sequence is synthesized)
ccaatggctttcccaagtcatttaccagggtagcacaagatgccttacaaattaccagagtaaagtaatggccccaacaggtatgcttttgaggccacatgaggagatacacagctgcag

SEQ ID NO: 1008427 - DNA, 120 bp, Artificial Sequence
  ENSG00000273006_1 (sequence is synthesized)
aaaggagaaactaagtgggtgtagcacaatcaatcactttgcatttcaaggtgaacttgcagctcttatggggagggaattctctatgtcattttccacgtaaataaagtaatgagacca

SEQ ID NO: 1008428 - DNA, 120 bp, Artificial Sequence
  ENSG00000272758_0 (sequence is synthesized)
tttttcgccccgcccttcaaatgcgaaagcgactgccttcttgggatatggttttcgattactaagtattcgaaatcctcataccagcaacagaaatgaaccacttccaaattctaagac

SEQ ID NO: 1008429 - DNA, 120 bp, Artificial Sequence
  ENSG00000272758_1 (sequence is synthesized)
acaaaagaccaaagagaagcaaaagcgatacaaattaatatgtgcccctctcctttctgctctaagggaatctacaaaccagtatcacatttaggagtcaaagtgttaattcttcagcat

SEQ ID NO: 1008430 - DNA, 120 bp, Artificial Sequence
  ENSG00000272758_2 (sequence is synthesized)
tcctgacaactagaaagcacattcactgaaggctgaaggtgagggagtggatggtttaactttaatatctgaagaatggcgccaatagaggaaagaaaaccatccaatctcagtaaggat

SEQ ID NO: 1008431 - DNA, 120 bp, Artificial Sequence
  ENSG00000272758_3 (sequence is synthesized)
taatgcaaatctggctagaaaaagccaccaggtaatccaagggttcactgtggaagaactcatgaaaagtactctgaagtatacacaacaggtctaaacatctcccttgtcgtaagtagt

SEQ ID NO: 1008432 - DNA, 120 bp, Artificial Sequence
  ENSG00000272758_4 (sequence is synthesized)
aggaggagtcctcttttattcccccacaagaaaaagggagccacattaatatgtgtatattcccataactctaatgtaagtgcggatctccaaagcctagggatttttccgtaaaagaga

SEQ ID NO: 1008433 - DNA, 120 bp, Artificial Sequence
  ENSG00000272758_5 (sequence is synthesized)
gtgggccgttctggttacccttttattagaagggtattccaccacagagagccggaggttttccagatgtgtgtaagagagcaggtgcgcaaggcaagcaaatgagcgcaaacagtatta

SEQ ID NO: 1008434 - DNA, 120 bp, Artificial Sequence
  ENSG00000272758_6 (sequence is synthesized)
tggaaaacatttgagaagttagctccatgaggactgtgggctccacaagaggactcgactgggtagcctggtctgacacaggtacgtgaaagcagagtattgcttcaaagctggaaacct

SEQ ID NO: 1008435 - DNA, 120 bp, Artificial Sequence
  ENSG00000272758_7 (sequence is synthesized)
tccataggagcctcacactgttggaagatgtactgctgctggttaaggtcaacctggggtgcaatgctgctgtcttcatcttcggtcccgaagtaatgctcaataagatcaaaggccttt

SEQ ID NO: 1008436 - DNA, 120 bp, Artificial Sequence
  ENSG00000272758_8 (sequence is synthesized)
tggtagatctcctggttttcatgactctgtaagaactcaattttatccagacctaaaatgaagaataaaggaaaatctttattgaaaacttcaataaatattggaaattccataactata

SEQ ID NO: 1008437 - DNA, 71 bp, Artificial Sequence
  ENSG00000272758_9 (sequence is synthesized)
gccccgcccttcaaatgcgaaagcgactgccttcttggtagacagggtgtcgccatgtttttcccaaagtg

SEQ ID NO: 1008438 - DNA, 120 bp, Artificial Sequence
  ENSG00000272758_10 (sequence is synthesized)
tgttttgcctcaaatgttctttgttttcagaataaaatacttggtcagtggaatctcttcaacaaaatagaagagaagcagtcatggagtgaagaaataaatcatctttgtttctactca

SEQ ID NO: 1008439 - DNA, 120 bp, Artificial Sequence
  ENSG00000272758_11 (sequence is synthesized)
tctgtcacttatgcaatacatacaatatgtaaaaaggaaaaatccctgtgtaatagcctaaggcaaccagcagcttccacgtcggttggatattaataaatttttttctttactgtaaaa

SEQ ID NO: 1008440 - DNA, 120 bp, Artificial Sequence
  ENSG00000272758_12 (sequence is synthesized)
cccttcaaatgcgaaagcgactgccttcttggaacactcaaaactagcatctgatgaatgcctacattcagtccacaaagcaacaatcttataagctgctcgtcgggcatgatggctcac

SEQ ID NO: 1008441 - DNA, 74 bp, Artificial Sequence
  ENSG00000272758_13 (sequence is synthesized)
gccggagctccggaattcaagatcagcctggccaacaggggaaaactccgtttctactaaaaatacaaaaatta

SEQ ID NO: 1008442 - DNA, 120 bp, Artificial Sequence
  ENSG00000272758_14 (sequence is synthesized)
cctgggcaacagagagactccatctcaatcagtcaatcactaagctgctaccaagggagccatttaagtcttgagctgctacagctcctccctttaacaagaataccatagtactttaga

SEQ ID NO: 1008443 - DNA, 120 bp, Artificial Sequence
  ENSG00000272758_15 (sequence is synthesized)
tttaacaagaataccatagtactttagaagatacctgcctctactaaatttggcacttcattctcagacataccactctttcaattctgatccaattctactattaagacatctaaacta

SEQ ID NO: 1008444 - DNA, 120 bp, Artificial Sequence
  ENSG00000272758_16 (sequence is synthesized)
aaatgcgaaagcgactgccttcttggtccaagcacaaatgtggatcactgaacacagtactggaagcgccatttgcagataaggatgctacattaaaggaatcgtgtgcagcatgaaaag

SEQ ID NO: 1008445 - DNA, 120 bp, Artificial Sequence
  ENSG00000272758_17 (sequence is synthesized)
attagaatcgagctgcacctaagaaaaaaatcccaaagttactttcaaaagtatgtgttatctgccagtcacagaggggaaaagcacctagggtgaactccaattttttaatgaggacct

SEQ ID NO: 1008446 - DNA, 120 bp, Artificial Sequence
  ENSG00000272758_18 (sequence is synthesized)
tttttcgccccgcccttcaaatgcgaaagcgactgccttcttggaacactcaaaactagcatctgatgaatgcctacattcagtccacaaagcaacaatggtcctatttttccctccact

SEQ ID NO: 1008447 - DNA, 120 bp, Artificial Sequence
  ENSG00000272758_19 (sequence is synthesized)
ttaatgagaccgatcactcttctaaaaactaagccagttccttcaaatttaacatgtgatgattaaaaagaaatggctgggttccgttccaagatagctgaataggaacagctctggtct

SEQ ID NO: 1008448 - DNA, 89 bp, Artificial Sequence
  ENSG00000272758_20 (sequence is synthesized)
agtgggtgcagcccacggagggcaaggtgaagcatgacagggcgtcgcctcacccaggaagcacaatgggtcgggggatttttgtacat

SEQ ID NO: 1008449 - DNA, 120 bp, Artificial Sequence
  ENSG00000272758_21 (sequence is synthesized)
gtgacagactgtacatggaaaatcagtacaccccgcccaaacactgtgcttttcccacagtcttagcaaatggcagacgaggagattgctctcccatgcctggctcagcgggtcccatgc

SEQ ID NO: 1008450 - DNA, 120 bp, Artificial Sequence
  ENSG00000272755_0 (sequence is synthesized)
aaaagaaaaaagaagaaaagaaaaaaaggactggaaagacattggtgaatagaaagatgaaaagggtgaagaaaaaaatgatgatggtcaatagggtggttttaaaagaggcttttgttt

SEQ ID NO: 1008451 - DNA, 120 bp, Artificial Sequence
  ENSG00000272755_1 (sequence is synthesized)
tattaatttgtttttgtgtgagtgtgtgtgtatgtgtttgttttttgcctaaaagtatttaactccgcattacaccactgatttcaaagaaaaaaagctgaaatgtaagatcatatgatt

SEQ ID NO: 1008452 - DNA, 120 bp, Artificial Sequence
  ENSG00000272755_2 (sequence is synthesized)
ttaatgatattttcaatagccactaaccttgcctggtactgtttcggggtttaaactagaacagaaatttaaggcaggctttattagtgcatagtacaaatcaattacatatatatggag

SEQ ID NO: 1008453 - DNA, 120 bp, Artificial Sequence
  ENSG00000272755_3 (sequence is synthesized)
atattatttttccctcttcaattgtttttcgtgcagcttacccaatataattgttctgttagttgtacactactctgtgatagcaaataataataataaaataattatgatgatattgcc

SEQ ID NO: 1008454 - DNA, 120 bp, Artificial Sequence
  ENSG00000272754_0 (sequence is synthesized)
ttatggttttaatgtccccaattaccaatgaattggagcatcttttttaaaattattattttaaaaaatgttttttcgagactgggtctcattctggtttgcccaagctggagcacagtg

SEQ ID NO: 1008455 - DNA, 120 bp, Artificial Sequence
  ENSG00000272754_1 (sequence is synthesized)
gcgtgtgtacacacctgacacacctgacagcaacagcttgactgaagcataccctgagaatgaccctgtatggcagaagcgcctggcagcaataacaacctaagaaattagggttgctat

SEQ ID NO: 1008456 - DNA, 120 bp, Artificial Sequence
  ENSG00000272754_2 (sequence is synthesized)
gtggaggttgctggggtggagggtgctaagcgaaggtgctatataaactgcatgctttttacaagcagtagcaattctcctgtccagcccactgccgctgcactgtccctgtatgaaagt

SEQ ID NO: 1008457 - DNA, 120 bp, Artificial Sequence
  ENSG00000272754_3 (sequence is synthesized)
tccccctggttaaaccctatgtctcccttgctggctctaggtctctttttcagcctcttgacccttgtgccatccctactggagtcaataggggtccagcaggacagcatgatcatagct

SEQ ID NO: 1008458 - DNA, 120 bp, Artificial Sequence
  ENSG00000272754_4 (sequence is synthesized)
cagcaggacagcatgatcatagctcaccgcactatgggctcaagcagtcatcccgcctcagcctcctacgtagctgggactatagactcataccaccatgcccagctaattttttttatt

SEQ ID NO: 1008459 - DNA, 76 bp, Artificial Sequence
  ENSG00000272754_5 (sequence is synthesized)
ctcactatgttgcttaggctggtttctaactcctgggctcaaatgagcctcctgcatcagccttccaaagtactgg

SEQ ID NO: 1008460 - DNA, 61 bp, Artificial Sequence
  ENSG00000272754_6 (sequence is synthesized)
atcaaagtactgggattacaggcaagaaccaccatgcccggccacatgaattttttcattt

SEQ ID NO: 1008461 - DNA, 120 bp, Artificial Sequence
  ENSG00000272754_7 (sequence is synthesized)
gattacaggcaagaaccaccatgcccggccacatgaattttttcattttcatgataccattcccaaagttaagaacatgtgtcttaggccatgtgcagtggttcacacctgtaatcccag

SEQ ID NO: 1008462 - DNA, 120 bp, Artificial Sequence
  ENSG00000277504_0 (sequence is synthesized)
caagacacatgtcctgtgtcccggggagccaggccaggccttggcacaaacaagcaccttcggcgggagaggaagacaccgggcaggggagcagctggggctgagcccatctaagcctac

SEQ ID NO: 1008463 - DNA, 120 bp, Artificial Sequence
  ENSG00000277504_1 (sequence is synthesized)
ccgctctggaggacacatctgctgccaggactgcccagccatccacgcaccccctccccacgatgccagtatcaggcccggcgagactcaccgttttcccggtgctggaaggaaggggag

SEQ ID NO: 1008464 - DNA, 120 bp, Artificial Sequence
  ENSG00000277504_2 (sequence is synthesized)
tgctgtgagggctgcctcggcctttgcccgagagtgggaggtcctgggggagacagggaggagcgtgagggggggcagggggcacaggtgacaggggtctgggttgaggtactctgccaa

SEQ ID NO: 1008465 - DNA, 120 bp, Artificial Sequence
  ENSG00000277504_3 (sequence is synthesized)
ccccccaacaacgggctgggctaagacaagatgctggcaccccatgtttaccctcagacttctggatcttgttcgttcattcattcattcattcaataaacatcactgagcatcaaccaa

SEQ ID NO: 1008466 - DNA, 120 bp, Artificial Sequence
  ENSG00000272750_0 (sequence is synthesized)
ctattgaccagaagccttaccaataacataaacagttaacacatattctgtatatatattgtatactgtattctttaataaagtaagctaaagaaaatgttattgaaatcataaggaaga

SEQ ID NO: 1008467 - DNA, 120 bp, Artificial Sequence
  ENSG00000272750_1 (sequence is synthesized)
ggaaatgtatttataacactgtattgtatttgtactgtacgtgtacatggtctgtttacaagatgaatcgtctgactgaaatgactgctgctgcacactccaaactatggtatatatcaa

SEQ ID NO: 1008468 - DNA, 120 bp, Artificial Sequence
  ENSG00000272750_2 (sequence is synthesized)
agcaattcaactttttctagtagtgtcatgactttgcttcttgagaatacttccagcatcactagtggcattttatatgggtcccatggtgttattcaaggtttatgttattgcactaaa

SEQ ID NO: 1008469 - DNA, 120 bp, Artificial Sequence
  ENSG00000272750_3 (sequence is synthesized)
catgaaaaatacacaagaaccatgagagattatgtttactgtgatacacaatttactggagagatgaactgcccacatgcagattaacatcacacggtgttttaagcggatactcacaac

SEQ ID NO: 1008470 - DNA, 120 bp, Artificial Sequence
  ENSG00000272750_4 (sequence is synthesized)
acttgagctcactgcaatagcaacaggaggtggttatgaaattattgtagtactacagtatgtactacagctaatcttatgcatttatgatttaaaactgcatctttacatgtgtttact

SEQ ID NO: 1008471 - DNA, 120 bp, Artificial Sequence
  ENSG00000272750_5 (sequence is synthesized)
ttttcccaattgtgaatggtgtcatgtacatctgtgcttgtgcaagttttgataaattttaactttttaaaatagatctttgtatattttccaatagtttataacacaaactagtatcta

SEQ ID NO: 1008472 - DNA, 120 bp, Artificial Sequence
  ENSG00000272750_6 (sequence is synthesized)
catatattttatgcattcacgacatacataaatttttcttaatttttttatatttctaggctatgtggttcatctgcaagttctttcaaattattgcaaagctccaaaaaatttcccaaa

SEQ ID NO: 1008473 - DNA, 120 bp, Artificial Sequence
  ENSG00000272750_7 (sequence is synthesized)
atattttttgaaaaaaatctgcatagaagtggacctgcacagaccaaacttgtgttgttcaagggtcagctgtatttgggagaggaatcccacagaactttaattgaaagataagggctt

SEQ ID NO: 1008474 - DNA, 120 bp, Artificial Sequence
  ENSG00000272750_8 (sequence is synthesized)
acacttcagagtaaaaaattaaagagaaacaaaacaataaaggaaaataataaatgccttctgttctaaagcaaatcttgcagttgaatacttgcagttgaatccaccaagacaaattaa

SEQ ID NO: 1008475 - DNA, 120 bp, Artificial Sequence
  ENSG00000272750_9 (sequence is synthesized)
gaaattttcttttctatactggacagacccgaattctaaagtgtttgcattagaattctcaaataaaagggaaaaagccacccaaaagagtattgcaaggaaacatgtgaatgctcacca

SEQ ID NO: 1008476 - DNA, 120 bp, Artificial Sequence
  ENSG00000272750_10 (sequence is synthesized)
aattcacttctaggcatatctcttcgattgagagtagcagagagaggtctcacgggtggctccactgtcaatggaggggagcattctccaccactcacaggggatgggccaaaagagcca

SEQ ID NO: 1008477 - DNA, 120 bp, Artificial Sequence
  ENSG00000272750_11 (sequence is synthesized)
ctcagaggacctaaagatgacagcatcttgttagcattttaagacagcctttttttctttattcagttcttgggattattcctagggtaccataaccattacacacagaaacaaaaagtc

SEQ ID NO: 1008478 - DNA, 120 bp, Artificial Sequence
  ENSG00000272750_12 (sequence is synthesized)
acttatatacattttacatcaaaaaacagattgttgccctttacaaggtagctcccttacctctccgtggagggttttgtgtatttggttttcctggcattggttttacaatcacaggtt

SEQ ID NO: 1008479 - DNA, 120 bp, Artificial Sequence
  ENSG00000272750_13 (sequence is synthesized)
cttcttgcagcattgccatcttttgtgttaattctaataatcttgaatatagagaaagaatatttaagaaagagttaaatatgaaatagaaaccaattccttaagagaacacgcgctgaa

SEQ ID NO: 1008480 - DNA, 120 bp, Artificial Sequence
  ENSG00000272750_14 (sequence is synthesized)
aatatagccatcaaaatccacatacttgtgtctcaaattggcagcttcccttttctcttcagctatagctctttctgcagcacgagctttgagctattgaagaaaaatatccaaattcag

SEQ ID NO: 1008481 - DNA, 120 bp, Artificial Sequence
  ENSG00000272750_15 (sequence is synthesized)
ttgtgggagactatgcacaaaataagggaaagaaaaaaagaaatcttacccagttttcatgagctttcttctcatgggtagcgatctgaaaaagataatacatcacaaaatatgcataca

SEQ ID NO: 1008482 - DNA, 120 bp, Artificial Sequence
  ENSG00000272750_16 (sequence is synthesized)
gattcattataatagcctctattagttatcaaagaattccgggcactatatagtagggcactagaattattacctggtttttaaatgaccgctctgtcttctgtaattcatcctccattt

SEQ ID NO: 1008483 - DNA, 120 bp, Artificial Sequence
  ENSG00000272750_17 (sequence is synthesized)
cttcaattctccgcctaagaattacacttggctttatcatttaaagcacaactgaataaaaacccaaacaatctgactatgttaaccgttaccctaacaactgtaccctaatagagctta

SEQ ID NO: 1008484 - DNA, 120 bp, Artificial Sequence
  ENSG00000272750_18 (sequence is synthesized)
tccagaaatataaagcatattttacatggttggttataacaaaagtacaatatgatgaaaactaatgatacataatttcctttaacagctggagattgagttgatatattacaattcctt

SEQ ID NO: 1008485 - DNA, 120 bp, Artificial Sequence
  ENSG00000272750_19 (sequence is synthesized)
taactgttcctaaatatgttctcaaataatcctattattaatatcttccactataaaccttttttcatcctttaattacatcataaaaattttcccaaagttaggactactgggtctatc

SEQ ID NO: 1008486 - DNA, 120 bp, Artificial Sequence
  ENSG00000272750_20 (sequence is synthesized)
aaatggcaaaatcactttaatggcttttgatacatcatataacaaactgctcccaccccctccaacccccagaactgtttgcacgaatcaagttcccttacagttttgccagcactgggt

SEQ ID NO: 1008487 - DNA, 120 bp, Artificial Sequence
  ENSG00000272750_21 (sequence is synthesized)
atttgttaatatttttccatttgttaacttaaaatttagtttttcttttgtgtgaattgatgtattcatgtcctctaaccacttatttatgcttttgtgctaataaaaaaagccaacact

SEQ ID NO: 1008488 - DNA, 120 bp, Artificial Sequence
  ENSG00000277501_0 (sequence is synthesized)
aagccaaacttggggagactatagtaagagaatctgttttctccatctttggttgtttctgttttcgaaattcctttcctctaggttcggagaaaaagttccttttgaaaggaggattcc

SEQ ID NO: 1008489 - DNA, 120 bp, Artificial Sequence
  ENSG00000277501_1 (sequence is synthesized)
aactttgctttgaataagagggaggaaagagggtttccgtgccaggcccaactaggtctacaacaggatagttaaagagcttattcaaaaggcttgaaccgagcagccgtgcaggcaagc

SEQ ID NO: 1008490 - DNA, 120 bp, Artificial Sequence
  ENSG00000277501_2 (sequence is synthesized)
agggtggcgagagccaggccacgggtgtccaagtgcgccggcctcccccagcagcgggttcattcccgggctcctgctccttctcagttactcggccctcggtcccttgggcacagtacc

SEQ ID NO: 1008491 - DNA, 120 bp, Artificial Sequence
  ENSG00000277501_3 (sequence is synthesized)
tggaatcgagctgcgtctgccgagaagcgtctcgtgtcgaatttggcccccgcgccgagccggcgaaagagatcgtggacgtccatctttacccagaaagcgccacagttctacggcgcc

SEQ ID NO: 1008492 - DNA, 120 bp, Artificial Sequence
  ENSG00000277501_4 (sequence is synthesized)
tgcgcagactacttcccaggccccgggcagcgtcggaagagggcgtgagcataattggctcctgtaggcggagcctggctgggcctctccttcctgactcagccttggtttaccactgag

SEQ ID NO: 1008493 - DNA, 120 bp, Artificial Sequence
  ENSG00000277501_5 (sequence is synthesized)
agaaagcgccacagttctacggcgcctgcgcagactacttcccaggccccgggcagcgtcggaagagggcgtgagcataattggctcctgtaggcggagcctggctgggagagacagggt

SEQ ID NO: 1008494 - DNA, 60 bp, Artificial Sequence
  ENSG00000277501_6 (sequence is synthesized)
ttggctcctgtaggcggagcctggctgggagagacagggtttcgccgtgttgtccaggcc

SEQ ID NO: 1008495 - DNA, 120 bp, Artificial Sequence
  ENSG00000277501_7 (sequence is synthesized)
ctgcccttaaaggaaaattcagctgaatttggaatgaatgaggttgtacagctaatcatgtttagagtcaccttcctatgacattaaggcctccaggagagtcattgaaaagtctgtgag

SEQ ID NO: 1008496 - DNA, 120 bp, Artificial Sequence
  ENSG00000277501_8 (sequence is synthesized)
gtctgctaattctattgagagtgaggaatgtgtttattcttccaaggggcaaagatcccccactcaaaatgacgctgccacattgtgtaaccaggaacgtgggttgttgctgatgtaaac

SEQ ID NO: 1008497 - DNA, 120 bp, Artificial Sequence
  ENSG00000271228_0 (sequence is synthesized)
ctgtgtgaccatggacatctagtaatttaaccttttctagcctcagtgttatctgtcaaatgcaaacaggagtaatagctaactcatatgcttgctgtgagaattattaaggtatgttaa

SEQ ID NO: 1008498 - DNA, 120 bp, Artificial Sequence
  ENSG00000271228_1 (sequence is synthesized)
taagtctcattccaaactagtaatctaatttaaaattcagctttctccctattaaaatgctctactgaaattttcttgctggtcaaactgaataaagatcacaatgcaattgaactgaaa

SEQ ID NO: 1008499 - DNA, 120 bp, Artificial Sequence
  ENSG00000236498_0 (sequence is synthesized)
gcttcttttattagtttttattagtttttcaaaagtatcagaaataacagaatgttgggagaagataaatctgccttttgaaaccaaatatttaatattttcattaaattgtttcaatac

SEQ ID NO: 1008500 - DNA, 120 bp, Artificial Sequence
  ENSG00000236498_1 (sequence is synthesized)
aacttcaggcaaatgccaactggaagaccaagcccagaaattcagaggaaataatcttccaaacaaggaacaccaaggtgatcttcttccattccagccacaatactggtgatcataatg

SEQ ID NO: 1008501 - DNA, 120 bp, Artificial Sequence
  ENSG00000236498_2 (sequence is synthesized)
gtgctagtcagttatccagattatcgagtgtttacctgataagagaaaaacttagatttcaaaacctgtaatgacagaattttaaagctggaaaatgtttaaggcaattaataaaaggaa

SEQ ID NO: 1008502 - DNA, 120 bp, Artificial Sequence
  ENSG00000236498_3 (sequence is synthesized)
atcagcttatggcagaatacattttgaggattcatctcatcttccttcagatgtcaaaatggtacaatctagttaggagctctgagaattgctatttcctccattcctaaaacaggacaa

SEQ ID NO: 1008503 - DNA, 120 bp, Artificial Sequence
  ENSG00000236498_4 (sequence is synthesized)
gcagcaacagaactgtctagatctaaaatactgatggaggagtatcctttttccaaaatgattaggaccagaagtgttttgaattttggagtatttcaaattaggaatgctcaatttaca

SEQ ID NO: 1008504 - DNA, 120 bp, Artificial Sequence
  ENSG00000236498_5 (sequence is synthesized)
gataattcacttatttgtttactctgtctagtatgtaatctctgagagcaaagacttttgttcactaatgtgaacatggtagataggtggcccgccaacaccgccaaaagggcaaaccac

SEQ ID NO: 1008505 - DNA, 120 bp, Artificial Sequence
  ENSG00000236499_0 (sequence is synthesized)
ttgaggaaaggagaggctaaaaattctgccttctctcctaaagccagccgggctctttatggtgggggaaggaaggatttgtttatttgcactcttctgaaataaaagttctctatcctc

SEQ ID NO: 1008506 - DNA, 120 bp, Artificial Sequence
  ENSG00000236499_1 (sequence is synthesized)
cctcctggctggagttgggagggccccatgggtgggctctgagatgtggcacacggtacccagggcagggctgggaagggtggggtgcaggggcctccctggctgcagggcccacccacc

SEQ ID NO: 1008507 - DNA, 120 bp, Artificial Sequence
  ENSG00000236499_2 (sequence is synthesized)
tgggcttgctgcactgagcaggcatgggctctggcccccctcactgtcccttccaggcccagcctgtgttcagggcccaggacagggtctggccagcaggccccaggcctccaagatgtt

SEQ ID NO: 1008508 - DNA, 120 bp, Artificial Sequence
  ENSG00000236499_3 (sequence is synthesized)
ctcagcctctggagtgtgtgtgatgatgagcactcatggagcttcctgtatgctgggccctgggcttctgagagggccaccgggtggcgactgagtcacgaggtggagggccagtcccag

SEQ ID NO: 1008509 - DNA, 120 bp, Artificial Sequence
  ENSG00000236499_4 (sequence is synthesized)
ggactccaggtgacctcgtgtcggcaccacgcccttctcccatgggcagtcctgggcgccccttcctggccttgggcccagtggcctgtggcctgaccccgtccactcctgcttggttgt

SEQ ID NO: 1008510 - DNA, 120 bp, Artificial Sequence
  ENSG00000236499_5 (sequence is synthesized)
acttcctttccgtatcaacaggaggccagggactggctggacccctaggagccaggtcctacggataggtgagccggccccccagggcaaacacctccactgggcagacctgactgccca

SEQ ID NO: 1008511 - DNA, 120 bp, Artificial Sequence
  ENSG00000236499_6 (sequence is synthesized)
gcccggctgactcagatgatcccccaagtttcttttcaatgaacacttgtttagtgcagtttttcctcctcaaatccccctcacacaggcagacaccctcttggcccagggtaatctgct

SEQ ID NO: 1008512 - DNA, 120 bp, Artificial Sequence
  ENSG00000236499_7 (sequence is synthesized)
ggcctcagatgagcccccatcaccccagacccatgcaggaagagccaggcagggtggggccctggggccacctggtgggctcagggccagggcatcgcgatgtccccatccttcacacta

SEQ ID NO: 1008513 - DNA, 120 bp, Artificial Sequence
  ENSG00000236499_8 (sequence is synthesized)
cggggcttcctggctgcagagttggggactcagctgggaatgctggccatagaggcagagagcccccatcctgctgggccagccctgacctggcttctccagggtggcccagtgtcccct

SEQ ID NO: 1008514 - DNA, 120 bp, Artificial Sequence
  ENSG00000236499_9 (sequence is synthesized)
tctgcccttcccctggctcccaccgtccacatccctctatctgcccaccctggacaacaaccagcacagtgcagtgtggccctgcagtgacaccacctgcagagaggtcaggcccagcct

SEQ ID NO: 1008515 - DNA, 120 bp, Artificial Sequence
  ENSG00000236499_10 (sequence is synthesized)
cccccgtctcctaaaaggccagcaggtcccaggagctgggggtggggcctggctgtggggcctccatgccccaggggccagggcagaccctccttagccggcaaccactgcagattcctc

SEQ ID NO: 1008516 - DNA, 120 bp, Artificial Sequence
  ENSG00000236499_11 (sequence is synthesized)
ccctggccagcactcggggacctccctgcccctgccccgtccccctaccttgcctgctgagacatagggctccacgggtctctctcctggggccgggctgactgtggcctgcgaggggca

SEQ ID NO: 1008517 - DNA, 120 bp, Artificial Sequence
  ENSG00000236499_12 (sequence is synthesized)
gtcatcgtgttgggttttcctgccagaggcagaaaccacaaaattacctggaacatacacgccccaagtgacagattcaattcaattccacaaatattgacctcgcgtctaatccactcg

SEQ ID NO: 1008518 - DNA, 120 bp, Artificial Sequence
  ENSG00000236499_13 (sequence is synthesized)
tcctccagtgccagctcattcctgagaagcccagcctggcagccgcagatcccatttaatcccagccccacaatgtcaccagctcgcagcttgggagctgggctcatccaggccctggca

SEQ ID NO: 1008519 - DNA, 120 bp, Artificial Sequence
  ENSG00000236499_14 (sequence is synthesized)
ggtggggccagagctgggctctgacctctgtacccacacttaccaccatgtaaagtgctgggaagaggggtggggagtcacggcaagttgagggtccaggcttgccccagctcgccagat

SEQ ID NO: 1008520 - DNA, 120 bp, Artificial Sequence
  ENSG00000236499_15 (sequence is synthesized)
gctcgccctggctgccctgacctagcagctaatctctgcggggcactgcggctacatggtgactccagcacggggacatttatcagaaatggaactgatggattaaagtggaaccaagcg

SEQ ID NO: 1008521 - DNA, 120 bp, Artificial Sequence
  ENSG00000223734_0 (sequence is synthesized)
gccatcctcgcccctgtggcggaaatgggagggtgcctggaggagtggagggattggatttacaccctcttttccctccgaagcctccttggtgggggcgaagaaagaccatccaaccct

SEQ ID NO: 1008522 - DNA, 120 bp, Artificial Sequence
  ENSG00000223734_1 (sequence is synthesized)
gccaaaggcaaaaggattaaggataaatgaaagcaagataatgtagaagaactacttagctgctgggtttttggagatgagtgatttttttttgtagggagaaattatgaaacacattga

SEQ ID NO: 1008523 - DNA, 120 bp, Artificial Sequence
  ENSG00000223734_2 (sequence is synthesized)
ttttctttgtggtgctctgcacaactcggcagttgcggttttcctgcccttgggacgtgcaattatgttgtccagcccgctgccagaggacagcaggaagggagatgtgttgtccacccc

SEQ ID NO: 1008524 - DNA, 120 bp, Artificial Sequence
  ENSG00000223734_3 (sequence is synthesized)
actgccactggaccacttctatacatagctggttcttctgtccagcccgctgccactggactctttcccctctgtcaccactggactgtaagctcctaatacaaacccatgtctcattta

SEQ ID NO: 1008525 - DNA, 120 bp, Artificial Sequence
  ENSG00000236497_0 (sequence is synthesized)
gattttacctggccacatcaagcagctcctgtgctcttcatttatgacttctaatgctcccctgtgttcttgctgaactttctacttctaattttctgtggaacaggaaaccacagggct

SEQ ID NO: 1008526 - DNA, 120 bp, Artificial Sequence
  ENSG00000236497_1 (sequence is synthesized)
atgcatattacaaaaatatatactgtggataattgccactaagactgggggctaaaagaagaagagtgtggcttggtgaagtgtctttctgtaaactgtttcagaatagagtgatctgtg

SEQ ID NO: 1008527 - DNA, 120 bp, Artificial Sequence
  ENSG00000236497_2 (sequence is synthesized)
atatcttcccactaatcccaagtcaggagagagagagaatgaagatccattgctgtagaggaacaaactgaacgtgttgaaggtcccgcaaggccaatgtggctggaatgcagacacaaa

SEQ ID NO: 1008528 - DNA, 120 bp, Artificial Sequence
  ENSG00000236497_3 (sequence is synthesized)
gccaggaggaacaagagatggggctgacaagagaggcaggagtcagatctcatgggaactgtcacctgcagtgttgcagacctctttgaatacaccatgagcactgtggattctcgcctc

SEQ ID NO: 1008529 - DNA, 120 bp, Artificial Sequence
  ENSG00000236497_4 (sequence is synthesized)
tggagaataaaaatcacatacagaaaagttcagacaactttaaggagtttgaagaatccctgctagtcgtggacccatctggggttggtggattcctcaccatgactctttggattcaga

SEQ ID NO: 1008530 - DNA, 120 bp, Artificial Sequence
  ENSG00000236497_5 (sequence is synthesized)
agtcatataagatgcagtttaacaaatattggaagtcaaatgagcattctgcggaaaaacagcttcttccatacatcatcttctggaatatcccagatctggaagaggtcacaggaatgt

SEQ ID NO: 1008531 - DNA, 120 bp, Artificial Sequence
  ENSG00000236497_6 (sequence is synthesized)
ccattcatagggagctctacctggagctcagagatgattgagagagggtattcatcatggatgtgtccaagtgaaggtagtttggaaagaaacaaagttacccttttttctcactaaaca

SEQ ID NO: 1008532 - DNA, 120 bp, Artificial Sequence
  ENSG00000236497_7 (sequence is synthesized)
agaacctaggcatcagccatacatacagaggacactcatttggccagaatttgggctttgactttaattaaattcccttgctcccaataagacctctcttaatctgaaaacaatttgtca

SEQ ID NO: 1008533 - DNA, 120 bp, Artificial Sequence
  ENSG00000236497_8 (sequence is synthesized)
taagtgatgtacctgccaagacctcatggcaaagaggcagggggtacctagtaaatgttgctgacaaactccagcatgactctaaagggacagtggcttcctttggatggtcatgtgctg

SEQ ID NO: 1008534 - DNA, 120 bp, Artificial Sequence
  ENSG00000236497_9 (sequence is synthesized)
ctgctggacatagcaatcagaaggacagtggtgaacacccaggagtgaaccaagatgcaaagttcaagtccgagggaagaagggtgcagtgcggaagaagggaaggcagatgctgcagcc

SEQ ID NO: 1008535 - DNA, 120 bp, Artificial Sequence
  ENSG00000236497_10 (sequence is synthesized)
ctgcctacaagcaaggagggagccattaagagccccaagctggccaggcgcagtggcttgcgcctgtattcctaatcccggcactttgggaagccaaggtggacggatcacctgaggtca

SEQ ID NO: 1008536 - DNA, 120 bp, Artificial Sequence
  ENSG00000236497_11 (sequence is synthesized)
gaaactccatctcaaaaaaacaaaaaagccccaagcctactttatcagacagaggaatcaagttgtatttccttctcaccaagagacgctggaaagctgtaatcttacaccagtggagaa

SEQ ID NO: 1008537 - DNA, 120 bp, Artificial Sequence
  ENSG00000236497_12 (sequence is synthesized)
aagagacgctggaaagctgtaatcttacaccagtggagaaagtgagaggaaaataaaccctttctaaggatgaatcctgaaagcctttcacagacaatgctgcttctataagaatgacct

SEQ ID NO: 1008538 - DNA, 120 bp, Artificial Sequence
  ENSG00000236497_13 (sequence is synthesized)
gtgatggctaagccatcacagtcttcattccaattgacattctaggtaaacctgcgcacaactttttctgtgtattttccaaaaaaggatcattttataaaggctcaagttatttacaaa

SEQ ID NO: 1008539 - DNA, 120 bp, Artificial Sequence
  ENSG00000236497_14 (sequence is synthesized)
agggctttgaagtggaaagggagtgggtggtgggggggtgtgtggctttagggtctctggcttaggaagctgagtctccgtagtgccattcatacagatggaatgagggaagaagcagtt

SEQ ID NO: 1008540 - DNA, 120 bp, Artificial Sequence
  ENSG00000236497_15 (sequence is synthesized)
tcatgggaaagtagtaaatttgattgagtaacaagagcttgggggatccagaagagagctaggtttgcagttcaggagtccaggagagagtcagactgaaaacataagcccatggatagt

SEQ ID NO: 1008541 - DNA, 120 bp, Artificial Sequence
  ENSG00000236497_16 (sequence is synthesized)
cagtcattgaagccatgggaatgaagatcacctatgggaaacacagatagaagcgaatgttaccacaatgaagtgtggtctatacaattaattgctgcaaagaggtcagggcaccacaat

SEQ ID NO: 1008542 - DNA, 120 bp, Artificial Sequence
  ENSG00000236494_0 (sequence is synthesized)
aagatatcccccatggcagagaaaaaaaaaagtttcttctgggatgcagacaatccaggaatcagtgataatccactgacctttctaggaagtaagagcaaagaacaaacaggttagatt

SEQ ID NO: 1008543 - DNA, 120 bp, Artificial Sequence
  ENSG00000236494_1 (sequence is synthesized)
ctgagaagctgtttctaagtttgatggttttttttttcctaagcctgaggcactgagaagggttcaagcttgtattctccagatgcaagatttactgttacagcacactgaagtcctgag

SEQ ID NO: 1008544 - DNA, 120 bp, Artificial Sequence
  ENSG00000236494_2 (sequence is synthesized)
ccctccgccacccgcaaggccttcctcggagacagggacctatccagagatgtctctgtcactgtcaggatgcgctgcaagtggacaaagggtttccttcgtgttgaccctaagaagacc

SEQ ID NO: 1008545 - DNA, 120 bp, Artificial Sequence
  ENSG00000236494_3 (sequence is synthesized)
tcgacttgatcaaggaagaactgagcatggcttgcagtagagacagtcacacacagcttcccatgaataggtgtgggcctgatcatcttagcaccttctctagccttcaagaagctctca

SEQ ID NO: 1008546 - DNA, 120 bp, Artificial Sequence
  ENSG00000236494_4 (sequence is synthesized)
aaatcagggccatcttggtatttcactagctgcttctttctttttttgatattttaagagacagggacttgctatgttgcccaggttggacttgtattcctgggctcaagccattatcct

SEQ ID NO: 1008547 - DNA, 120 bp, Artificial Sequence
  ENSG00000236494_5 (sequence is synthesized)
gtagctgggactacaggcctgtgccacctcacccaccctcgctgtttatttcaatgaactgcaggttgatgatgatcaatcttctttcctaatctcctggttgaaattagggatattcag

SEQ ID NO: 1008548 - DNA, 120 bp, Artificial Sequence
  ENSG00000236494_6 (sequence is synthesized)
ggagactatcagggtgttagaagacctagttctgaacctgctctctgctaacttaccatacgactttaggcaagttgctgccccactaagaacttcagtcttatctgtgaaatcaaggga

SEQ ID NO: 1008549 - DNA, 120 bp, Artificial Sequence
  ENSG00000236494_7 (sequence is synthesized)
ctggactaagtggtctccgagatcccctccagctgaaaccatctcctgtactgtccactattatagcaaataaccacacatggctgattaaatctaaattaatgaaataaaagtcagaat

SEQ ID NO: 1008550 - DNA, 120 bp, Artificial Sequence
  ENSG00000236494_8 (sequence is synthesized)
gtagttcctcaatctcactaatcatatgtcaagggctttaatagccatgtgtggccagtggctgccaggttgaacagtgtagttctcctgctctcattttattgatgatcatggtttcat

SEQ ID NO: 1008551 - DNA, 120 bp, Artificial Sequence
  ENSG00000236494_9 (sequence is synthesized)
aacaaaacctgccagttgaagaccactttcacgtgtatggtgcattttaatacacgcttacatttaactacccaaaataggcaagagagatattctaatatctgccttatcagatgagga

SEQ ID NO: 1008552 - DNA, 120 bp, Artificial Sequence
  ENSG00000236494_10 (sequence is synthesized)
cactaactcaaagagtaaattacttgctatagggtcataccactaatgactaaatgtagtttccaagcccaggactctctaacacatggtacaaagtcatgacgagaagacatgtgcccc

SEQ ID NO: 1008553 - DNA, 120 bp, Artificial Sequence
  ENSG00000236494_11 (sequence is synthesized)
ctggccaaaactattcaacccatggtagcaccagaactgagatccagggattaagggctgatctggagaccctgtgccttggtgtagaccttagctcagcacatcctagctgtgtgacca

SEQ ID NO: 1008554 - DNA, 120 bp, Artificial Sequence
  ENSG00000236494_12 (sequence is synthesized)
tgggcaagttatttaatatctctgggctcctttctagtcctctgttaaatgggaatgaccacaggatccactgcttatgagaactgcacaagtagatgcaaataaaatgctttgcatggg

SEQ ID NO: 1008555 - DNA, 120 bp, Artificial Sequence
  ENSG00000236494_13 (sequence is synthesized)
ggttcaagcttgtattctccagatgcaagggtgcaaataaagcccgatttccactggcagctattataaccaggagaggatcctgcctttggctaaggccagcggaaaggaaggcaaatg

SEQ ID NO: 1008556 - DNA, 120 bp, Artificial Sequence
  ENSG00000236494_14 (sequence is synthesized)
gagagacacaaagagcctgaatctttgagccatcactcagttgcgatcaaactgcctggaacccaccccaccccgatcgcctgctcggacaaaaataactgaagctcccattgttcaaac

SEQ ID NO: 1008557 - DNA, 120 bp, Artificial Sequence
  ENSG00000236494_15 (sequence is synthesized)
cagatgcaagccaacctattgctgcaactgacaaatgagtataatactgacacaaatgtgggctgtttttgtttgtgtgtgaagacatatgtcagaactccactcatctgtcaatgatgg

SEQ ID NO: 1008558 - DNA, 120 bp, Artificial Sequence
  ENSG00000236494_16 (sequence is synthesized)
ctaattgtaggcttttgaagttagggtcggtcagtatttttagatagaatctttcaaaactcaggagagagactcagcttatttcatgtgtatgatgaggatgtctcctttattcttttt

SEQ ID NO: 1008559 - DNA, 120 bp, Artificial Sequence
  ENSG00000236494_17 (sequence is synthesized)
cctgctatcacacttatgccaggctttctttcaaaacttaactcacccagctccttgtctttgaagccttcttttaattcttctcccacattccccaaaaccaagtcaattctctccctc

SEQ ID NO: 1008560 - DNA, 120 bp, Artificial Sequence
  ENSG00000236494_18 (sequence is synthesized)
agtgccctcatgtgtataaattgcatatcatatggcatttttttcatgtctgtaagactcccaatttcccaaaggcgaggttactgtcattttcttctgtatctacagtgaccatcacat

SEQ ID NO: 1008561 - DNA, 120 bp, Artificial Sequence
  ENSG00000236494_19 (sequence is synthesized)
gaaaagtactccataaaggtgttaaggatggaattgtgtccccaaccccaaaattcatgtgttgaagccctcaccctcgatgtgaccatatttggagatagatagggcctttaaagaggt

SEQ ID NO: 1008562 - DNA, 120 bp, Artificial Sequence
  ENSG00000236494_20 (sequence is synthesized)
aattaagttaaatgaagtcaaaatagtggggcctagtatcatatgaccgatgtccttataggaagaggagagacaccagggatgtgcacacacagaggggagtccatgggaggacggggc

SEQ ID NO: 1008563 - DNA, 120 bp, Artificial Sequence
  ENSG00000236494_21 (sequence is synthesized)
aagaaggtggctgtcctcgagccagagagaggcctcagaagaaacccaacttgctggcaccttgatcttgaactttcggcctccagaactgtgagaaaataaattcctgttgtttaagcc

SEQ ID NO: 1008564 - DNA, 120 bp, Artificial Sequence
  ENSG00000236495_0 (sequence is synthesized)
agtatcaagggtagcgtggataccagacgttttgtgttcagttgtgagaaaagactatttaagcaatgaccccacacgatcttacctgctcctcagaccacagccaaggaagagatttct

SEQ ID NO: 1008565 - DNA, 120 bp, Artificial Sequence
  ENSG00000236495_1 (sequence is synthesized)
gacaaacaagcaaaaacacaacactgtccacacaactgtaaatatgcaaggaagagtttcttcttgcctgaaaactgctgtacaagcatggcaccagcatctgaggcaaaaggggagctg

SEQ ID NO: 1008566 - DNA, 120 bp, Artificial Sequence
  ENSG00000236495_2 (sequence is synthesized)
gcatgtgcagagattacatggcaagagaggatgcaagagagagagaacgaggtgccagattctttaaccgtcagatctcatgggaaataaggatacaaattctggagcagcaactgattt

SEQ ID NO: 1008567 - DNA, 120 bp, Artificial Sequence
  ENSG00000236495_3 (sequence is synthesized)
accaggaaacactgaggagtagagcaaggtaaagaattttaactgtttggggttcgttacttcacacttaagaaatctacaaaccacaggaaatgaaacttgactaaatgcagatgacac

SEQ ID NO: 1008568 - DNA, 120 bp, Artificial Sequence
  ENSG00000236495_4 (sequence is synthesized)
tgaaaccctttgaccataaccaacagcctccaacttacaggattctcccctcgtatgaccaagtggtgtaatctttgaggtcctggcagcacaggttgagtgcaacctaaaagagaatga

SEQ ID NO: 1008569 - DNA, 120 bp, Artificial Sequence
  ENSG00000236495_5 (sequence is synthesized)
ggattccacaaggtcttctggaatggtacacttattggaaacttgtttcagcattcaaaaaaacctggcctgtttctaaagcaatgcatggtttaagaggaatggcaaattgaagccaac

SEQ ID NO: 1008570 - DNA, 120 bp, Artificial Sequence
  ENSG00000236495_6 (sequence is synthesized)
gtttttcaaacacatttcacttaaaaaaaaatggccactagaaagaatgcaacttattttcaaaaagaattatctcaagaaagcatggttggcccattcatccatctccctgcccacaag

SEQ ID NO: 1008571 - DNA, 120 bp, Artificial Sequence
  ENSG00000236495_7 (sequence is synthesized)
ggaatgaatgaatgaagacaagatgtgccacctctgaaagactgttaatctccctctctctataaaagtggtactatgtaatttctactcatttggttacaaataaaattagtaagtgaa

SEQ ID NO: 1008572 - DNA, 120 bp, Artificial Sequence
  ENSG00000236495_8 (sequence is synthesized)
actatttaaggtaatacgctcctgaatgtgctaaaatcaaataccgcagctggaccagattaactcaggacaccaccagtggactagaattgcaatgaccccacacgatcttacctgctc

SEQ ID NO: 1008573 - DNA, 120 bp, Artificial Sequence
  ENSG00000236495_9 (sequence is synthesized)
ggactagaatttcaccactggggctcttggatctcgagtctgtagagggcagatcgtgggatttttcagcctccaaaatcatgtgagccaattcctcataataaatctccttctatatct

SEQ ID NO: 1008574 - DNA, 120 bp, Artificial Sequence
  ENSG00000232557_0 (sequence is synthesized)
tacaggcgtgagctaccgtacccagcttccttgtatttttgatatcagtttcttatgctgtctttaatcattggctcagtaagggtataaattaaatgatatcagattaagagcaaaaac

SEQ ID NO: 1008575 - DNA, 120 bp, Artificial Sequence
  ENSG00000232555_0 (sequence is synthesized)
aggtttgatctcagttactcccttacttgaagaaggcttcgatgattcctcatggagaaatcccagatacttctgcacatgattcagaggtcccttacaactggcttcagcctgccttcc

SEQ ID NO: 1008576 - DNA, 120 bp, Artificial Sequence
  ENSG00000232555_1 (sequence is synthesized)
acactgtgcttcagcgaggtaggaatgcttgtgattcaccttccaggtcaagatgattggcccctcggccttcacatatgctgttccctctgctgttccccatgctgcccccagggagct

SEQ ID NO: 1008577 - DNA, 120 bp, Artificial Sequence
  ENSG00000232555_2 (sequence is synthesized)
gcccatcacccgccaggaccttcctgccctgggtgcacccatagtgctttgtgcctttctctttcttgccacttgccacattttactgtagttatttgtttataattacaaatataaacc

SEQ ID NO: 1008578 - DNA, 120 bp, Artificial Sequence
  ENSG00000232555_3 (sequence is synthesized)
tctatcggtgccattttcccaacaacatggattcacttcatgtctctgagtcacattttggtaattttctcaatattttgaacttttcattattattatatctattatggtgatctgtga

SEQ ID NO: 1008579 - DNA, 120 bp, Artificial Sequence
  ENSG00000232555_4 (sequence is synthesized)
ggcagtctgcggcttggcttgctagagttgtgagagacctaggcttcttgtactctgtggcttcaccatcctggggggtgtcgccttacccacaaactgctccatcacatccacattcta

SEQ ID NO: 1008580 - DNA, 120 bp, Artificial Sequence
  ENSG00000232555_5 (sequence is synthesized)
ggcaaaaagaagggggagaggaggaagggaaggacatgatccttgtagtaagagcacatcttggaggtgcacatatcccttctgctcacaccctgttagccagaacctagttgtgtggtt

SEQ ID NO: 1008581 - DNA, 120 bp, Artificial Sequence
  ENSG00000232555_6 (sequence is synthesized)
acgcctcactgcaaaggaagatgggagatgtgtagttttgttctggatggccagtatcaagtaaatgatccaagttatggattattccacggaaagggagaatagatatccgtgaacaac

SEQ ID NO: 1008582 - DNA, 120 bp, Artificial Sequence
  ENSG00000232555_7 (sequence is synthesized)
ttgccattcctaccacaggctgattttatctaatgtagttcagatgcatgtactcaagtaggcagagaggcagatagtctagtctggttgaatagaaaggatttacttgaacacatgttt

SEQ ID NO: 1008583 - DNA, 120 bp, Artificial Sequence
  ENSG00000232555_8 (sequence is synthesized)
cagtattggctaaaagccacagcctgcaatgcaccaaaagtagcattgtcttcaaatacaaagatcagtaactgttcttattagtttggtttggtcattacgaatcttctagcacctccc

SEQ ID NO: 1008584 - DNA, 90 bp, Artificial Sequence
  ENSG00000232555_9 (sequence is synthesized)
ggtgccattttcccaacaacatggattcacttcatgtctctgagtcacattttgggtctcgttctctcactcaggctggagtgtggcttc

SEQ ID NO: 1008585 - DNA, 73 bp, Artificial Sequence
  ENSG00000232555_10 (sequence is synthesized)
tgtattgtttttgtagaggcccaatctgacttacttttgtaaaatgcaataaaattaatgacctgggaaaata

SEQ ID NO: 1008586 - DNA, 120 bp, Artificial Sequence
  ENSG00000232555_11 (sequence is synthesized)
ctgacttacttttgtaaaatgcaataaaattaatgacctgggaaaataaaataggtaaaacaggtatataaagtacattcccaatttttaaattattagattcaataaacataaaattac

SEQ ID NO: 1008587 - DNA, 120 bp, Artificial Sequence
  ENSG00000232555_12 (sequence is synthesized)
atgctttggctgaccaggaccaggatgatgagatgtagacacacctcctcaaggagttttgcaagacgtcccacccacatcaacaggtggtgggccttttgatgacagctatggaaaagt

SEQ ID NO: 1008588 - DNA, 120 bp, Artificial Sequence
  ENSG00000232555_13 (sequence is synthesized)
ctttccagaaaaatgcacgtgcacataaaattagaatgtttccaagatacgcatggaccctgtgaaacccactgaagattccatggccccagtttcagagatgacaaggaaaatcttcat

SEQ ID NO: 1008589 - DNA, 120 bp, Artificial Sequence
  ENSG00000232555_14 (sequence is synthesized)
tattgacagaggaggtgtgatttgcaataacaatgctcttaaaaaggattaccatcatcatcatcaccatcatcatcttcatcatcatcatccttttgaagcaaaagaatccaaaaggag

SEQ ID NO: 1008590 - DNA, 120 bp, Artificial Sequence
  ENSG00000232555_15 (sequence is synthesized)
taacagggatgacatttaaggttcagaattctatagggatggtacagcccgggtcctaaagcaaggatattgtactattttatcatcttgtagggtgcaatgcatccagaagataaaggc

SEQ ID NO: 1008591 - DNA, 120 bp, Artificial Sequence
  ENSG00000232555_16 (sequence is synthesized)
caaagattatacatcagagaaccaccagaatctttctgttcttgcagggagcatctttactcacatggctatagtcaccgaaattccaaccgagtaataaactaaatgcctgggtgtggg

SEQ ID NO: 1008592 - DNA, 120 bp, Artificial Sequence
  ENSG00000232558_0 (sequence is synthesized)
ctggtttctctcaggcagaagaggccctccccctcttcctgccctgcttagctgcttgcccagaggacaggggacaggatctcacaaggctcaaaaaaccttcaaacaataatccactca

SEQ ID NO: 1008593 - DNA, 120 bp, Artificial Sequence
  ENSG00000232558_1 (sequence is synthesized)
catctaccttatatgaaccactctcctgagcactggagctacgctggtgaacagagaataaacagcctcatctctcataactatcgtgtttggagcaagtaccaaatgccaagcactgta

SEQ ID NO: 1008594 - DNA, 120 bp, Artificial Sequence
  ENSG00000232558_2 (sequence is synthesized)
ttatgcattctagaagccatctcatgcaatcctcacaaaaactcaaaaaggtggtgttttacagatgatgaaactgaggttaatcatttattcattcaataaaccgttattgagcaccta

SEQ ID NO: 1008595 - DNA, 120 bp, Artificial Sequence
  ENSG00000272650_0 (sequence is synthesized)
tactgaaaaaatttacatttcattaacattttaaattacaaaggcaggtctacaaataccgatttgtgtgtttgtgtgtgtgtgtgtgctcattgcattttccaagcaaacaagtgaata

SEQ ID NO: 1008596 - DNA, 120 bp, Artificial Sequence
  ENSG00000272650_1 (sequence is synthesized)
taagctgtgatgtgtagtgacattaattttagtaaaacctactttacgttctctatagataatatgcacataaagtctacataatgttttcttatgtaataaatgctttgggataatgaa

SEQ ID NO: 1008597 - DNA, 120 bp, Artificial Sequence
  ENSG00000272656_0 (sequence is synthesized)
ctaaatgtgttctgaagataacatagatgaaacttccatcaacactgccaatcgaaaaaaaaaaagcacatgccaacataatacaatttttcctcagaaggattttggtaatttgagaaa

SEQ ID NO: 1008598 - DNA, 120 bp, Artificial Sequence
  ENSG00000272656_1 (sequence is synthesized)
aaaattgaaactctgtgactcatgttcattatgtcaaatatacagatggctggtgttgaacatagctcaaatcgttttctaaccataatcatgtataataaaagattaatatggagtgaa

SEQ ID NO: 1008599 - DNA, 120 bp, Artificial Sequence
  ENSG00000285545_0 (sequence is synthesized)
ggggaatcctccctcgcctccgcccgcggcacgaggttgcgcggttacagccccggtgcctctcgcgagcggctctgcggtccaggactcggggcatcctctgggttcgcttagtaaatt

SEQ ID NO: 1008600 - DNA, 120 bp, Artificial Sequence
  ENSG00000285545_1 (sequence is synthesized)
gagaccgggatccaagtggcccggggcgctgctctaaggaagatgctgaccgcagtcggtgattgcgagagcaggtgcacgcgtccagagcgacatcttaccgttggcgcgataaactta

SEQ ID NO: 1008601 - DNA, 120 bp, Artificial Sequence
  ENSG00000285545_2 (sequence is synthesized)
cattactttaaaaaccaaaaacaacaaaaatttagcattaagtcgaaaggcaaattaaatccccaggacaattcagttaaacgcctgaaggtggcccttaatttcccatttctactaatc

SEQ ID NO: 1008602 - DNA, 120 bp, Artificial Sequence
  ENSG00000285545_3 (sequence is synthesized)
aagaagtggcttgcgacctcctgaagcaaacccaaatattctcattcggtgattaagttttaccacctctacaccagtttttaaatcaatttaaccgcaaagttcagaacccaagtggca

SEQ ID NO: 1008603 - DNA, 120 bp, Artificial Sequence
  ENSG00000285545_4 (sequence is synthesized)
tgcattctttccccagcaacctgcattccatttgtctcattgaccctactgcatttttccttcgcatcattaaaaaggatgtaatgtacagaaaagcacagacagacctaaactccaatg

SEQ ID NO: 1008604 - DNA, 120 bp, Artificial Sequence
  ENSG00000285545_5 (sequence is synthesized)
ccaaccatgccatctgctgattataagacagtggcaggatagcagatgtaatgcctagagcttgaggagacatcttgcaccacagtgtggaaaccatgcactaggacaaagggacagcaa

SEQ ID NO: 1008605 - DNA, 120 bp, Artificial Sequence
  ENSG00000285545_6 (sequence is synthesized)
aagagaagggttctgggtccctgatgactcgtgaaacctctaccagctttagaaggacacctctggacctgtggaacataagaaataaagtcagtaagctactcttatttaaaatgttct

SEQ ID NO: 1008606 - DNA, 120 bp, Artificial Sequence
  ENSG00000285545_7 (sequence is synthesized)
cattttcagcagaacctaatcctaatcactacaaatgagtaaaggagctgagcccattttgtttggagtagcctgggggtttaagaaatggtaccagtcttgtaagtctctgaaaagcta

SEQ ID NO: 1008607 - DNA, 120 bp, Artificial Sequence
  ENSG00000285545_8 (sequence is synthesized)
acacctgtgtatgtgagtacacatgttaggtgatgttcttgaaggcaaaagcaagttggagagagattttggctcagtataagaaaagctttctgctgggcgcggtggctcacacctgta

SEQ ID NO: 1008608 - DNA, 120 bp, Artificial Sequence
  ENSG00000285541_0 (sequence is synthesized)
acctgtggatgttcatctcccgtggagggcggtgggccttgtcgtaggagaccttggcgaagacgccggccacgatgacgaaggcgatcaccccgcaggtcatggttgatgcctgggagc

SEQ ID NO: 1008609 - DNA, 120 bp, Artificial Sequence
  ENSG00000285541_1 (sequence is synthesized)
ctcctggaactcacccctacagaccaaagtcacagaaatctcagcttctgctgtttcttccctgtgtggggcgtctattgtgatgatagaatcctaaaatgcttgaactgaaaggaaccc

SEQ ID NO: 1008610 - DNA, 120 bp, Artificial Sequence
  ENSG00000285541_2 (sequence is synthesized)
cggggatcaccactcgccctatttcttcgtgttatagatgatgaaactgacgcccagataaattagagtccagcaaaagttagtgacaaaattacgaagcaacctagcttagaatgcagg

SEQ ID NO: 1008611 - DNA, 120 bp, Artificial Sequence
  ENSG00000285541_3 (sequence is synthesized)
cagaagatgggaaggaggaggtggtattttttgaactcctactgtgtgccaggcttaaaacttgcaatcccatttaattttcaactgagggcttttcaaagcaagggcagtgatggtaca

SEQ ID NO: 1008612 - DNA, 83 bp, Artificial Sequence
  ENSG00000285541_4 (sequence is synthesized)
tcaactgagggcttttcaaagcaagggcagtgatggtacaggaaaggggtcccgatccagacatcaaaatgagtccatagagt

SEQ ID NO: 1008613 - DNA, 79 bp, Artificial Sequence
  ENSG00000285541_5 (sequence is synthesized)
gggtcatttttatgtttttttttttttgatggtatgctaaacaagaggtggactattcatgcctcccctttttagacca

SEQ ID NO: 1008614 - DNA, 120 bp, Artificial Sequence
  ENSG00000285541_6 (sequence is synthesized)
accatatagggtaacttcctgaccttaccatggcatttgtaaactgtcatcgtgctggtggaagtgtagcagtgaggagtgaggacggccagaggtcactcttgtcaccatcttggtttt

SEQ ID NO: 1008615 - DNA, 88 bp, Artificial Sequence
  ENSG00000285541_7 (sequence is synthesized)
tttacccaaacacctctgacagtgagtctctacgtggttgaaggacttggccaatgtcacaaagtgcccagtggaggagccagtaggg

SEQ ID NO: 1008616 - DNA, 120 bp, Artificial Sequence
  ENSG00000285541_8 (sequence is synthesized)
ggccaatgtcacaaagtgcccagtggaggagccagtagggaggaggctgtgtggcctccctctgaagccccagtttgttctttattctacagcctggtgaaatcttgaaagtggactcta

SEQ ID NO: 1008617 - DNA, 120 bp, Artificial Sequence
  ENSG00000285541_9 (sequence is synthesized)
tctgctctgaaagcactcagaaatggaagagaaagtaaggtcttccctcagtgacatggcctgcaccctctcaccttgcccagcaactgcttctgttctcttgctctgaattgtcctttg

SEQ ID NO: 1008618 - DNA, 120 bp, Artificial Sequence
  ENSG00000285541_10 (sequence is synthesized)
caacctactaaggcatgttgcctgcaaggatcatttagaatgttggacaaggctcctcgagatccctagcagctaggcccataatctcagcactgtgattcaactcaggtttagcatata

SEQ ID NO: 1008619 - DNA, 120 bp, Artificial Sequence
  ENSG00000285541_11 (sequence is synthesized)
catgcctatttttgtttcttcactagaaagctgtgttgctaaaggaggtgggaaattcacttgggtttaccaaataggaaatcagtctagaaccatctttgtgggctgggtcccacccca

SEQ ID NO: 1008620 - DNA, 120 bp, Artificial Sequence
  ENSG00000285541_12 (sequence is synthesized)
gagccctttccaaacacatgaggattgcaatagtggtattttcatttctgcctccacttctgtggcaaatgggatttcaaggtcacaaaaacaatctcattttttacgctccttgactct

SEQ ID NO: 1008621 - DNA, 120 bp, Artificial Sequence
  ENSG00000285541_13 (sequence is synthesized)
ttgtattcatggttcagtattaattttgtttattctagttggtattactcttcagctttctatgtgtctacatgtgtctggtacttgtacaatttgttataatcaacccagtaatgtgta

SEQ ID NO: 1008622 - DNA, 120 bp, Artificial Sequence
  ENSG00000285541_14 (sequence is synthesized)
taaacatcattttgataatatctgtcttcccccatcaaaatataagcaaaattgatgccaaaggttttcaccatgatactccaagcctctaatacagtgcctggtatatggcagatgctc

SEQ ID NO: 1008623 - DNA, 120 bp, Artificial Sequence
  ENSG00000273576_0 (sequence is synthesized)
taatgtggagaggcctggggcctttccctgaggactggatggctggagtttgggagcctgagttgacagaggaggctaagcccgggcagctactttgttccagaaatctaaggtccctgg

SEQ ID NO: 1008624 - DNA, 120 bp, Artificial Sequence
  ENSG00000273576_1 (sequence is synthesized)
agggaggctctgctttgggagggggaagggagctaacattgcagagcaccaactgtgaaccaggtacaatggcagagcctttccatacctgtactcacaactagcgggtgaggagtcaag

SEQ ID NO: 1008625 - DNA, 120 bp, Artificial Sequence
  ENSG00000273576_2 (sequence is synthesized)
ctcctcctttgattctctgatgtcactgccagttctcctcctattgctctgacctgtctttctctgtgtcctttgcaaactcattctcaactccttagactcagtcaagtcccccagtta

SEQ ID NO: 1008626 - DNA, 120 bp, Artificial Sequence
  ENSG00000273576_3 (sequence is synthesized)
cacacttccatggtactatatatcattccttcagagcacttaacacagttatttcctatgtatttgtccagtcatttgaataatgatcctagtttcattggatggaaagttccacaaggt

SEQ ID NO: 1008627 - DNA, 120 bp, Artificial Sequence
  ENSG00000273576_4 (sequence is synthesized)
cagtgaccatttctatctgtgttcaccaatgtgttcccagtgcccagaaacaatgcctagcataaagcagctgttttgtaaatacttgttcaatgaatgaataaatgacaaaagaacatc

SEQ ID NO: 1008628 - DNA, 120 bp, Artificial Sequence
  ENSG00000261219_0 (sequence is synthesized)
gacctgtctctaatcgacatcgcattctctggggagccaggctgtgagctaatgtggaaggtagtttgtgggattatctccctttcctataactgggaggttgaggtgatttgttcaagg

SEQ ID NO: 1008629 - DNA, 120 bp, Artificial Sequence
  ENSG00000261219_1 (sequence is synthesized)
tcgctcagaggcagccaagaaaagaacccagcactcaagattctaggcccttgactgcatggccttgcaggtgaataccacaaatcaaggctgcgttcaggtgttaacacgtgctaacgc

SEQ ID NO: 1008630 - DNA, 120 bp, Artificial Sequence
  ENSG00000261219_2 (sequence is synthesized)
tcaggtctccatgacattctacaagagagcttttttcttctgatgattttttttatttgcagtgtttcgtttttaatcatcttacggctgtgtgatcatttcagtcactgctggaatctt

SEQ ID NO: 1008631 - DNA, 120 bp, Artificial Sequence
  ENSG00000261219_3 (sequence is synthesized)
cactcctccctccttacttgatggtcagctgcataaaacttttcaggagaagagatataaggaaaagtaaagtgtcatgggctttactcagaggaccaggtcaatctggcagtttagcct

SEQ ID NO: 1008632 - DNA, 120 bp, Artificial Sequence
  ENSG00000261219_4 (sequence is synthesized)
tcccaggcttaatgacatagttcgtaacactaaaagtaaagttgttaggacaaaaataattctgtcgttgcacaaaaaaagttgggaatgcctgtgccaaataaaaggattatatatcca

SEQ ID NO: 1008633 - DNA, 120 bp, Artificial Sequence
  ENSG00000261211_0 (sequence is synthesized)
gtaggttgctgggacaaccctggcaagatcttcccccagacatccaccttggcggccgacttattaactcattggtctattgacttttgctccttgcctcgcccctgatccctgtgccct

SEQ ID NO: 1008634 - DNA, 120 bp, Artificial Sequence
  ENSG00000261211_1 (sequence is synthesized)
ctttctaataagctacctgctggtgaggctctgccttgggggaaacccaggctgaggcaggtgggatgttataaccagggaggcctgagtcctgggtctttgcctggggtccccaaatag

SEQ ID NO: 1008635 - DNA, 120 bp, Artificial Sequence
  ENSG00000261211_2 (sequence is synthesized)
gagagggattggaggaggtattgtgggggagagtgttgcaaaagcccagaggaaaggagtgctgttaccacaacagaggagacatgaacctgcacagaccaaaaacaggagagagagagg

SEQ ID NO: 1008636 - DNA, 120 bp, Artificial Sequence
  ENSG00000261211_3 (sequence is synthesized)
gaaagagaaagagaagggggagaaagaaagggagagacagaggaagggagagatggggaaagaggagaggagaaagggagggagagaaagaaaggagatggagagagaaaagggtgggga

SEQ ID NO: 1008637 - DNA, 120 bp, Artificial Sequence
  ENSG00000261211_4 (sequence is synthesized)
ggagagaaagaaaggagatggagagagaaaagggtggggagagagataaagagagaggtaaagagagagagagaatcatctactacatgatttcttttttttttttttctgagatggagt

SEQ ID NO: 1008638 - DNA, 120 bp, Artificial Sequence
  ENSG00000261211_5 (sequence is synthesized)
tttttttaacctataaaagccttgagtagtgatggacgcgattcctagtaatgtggtttactaaagggtcaggctgtcagttcaccacaaatacgccacagtagtgtttggtattctctc

SEQ ID NO: 1008639 - DNA, 120 bp, Artificial Sequence
  ENSG00000261211_6 (sequence is synthesized)
aatgttccacccaccagagcatacaaaacagccacattccccaaacacttaattctcaaaacatacttgtagaggagggaagcctattactcccattagaaagatggaaaaccaaggtga

SEQ ID NO: 1008640 - DNA, 120 bp, Artificial Sequence
  ENSG00000261211_7 (sequence is synthesized)
aatgattaactgagctaccagggcctcagaagaaagtcgctgctgagtttgggattgtgttttcaacttcctgcccactgtgggtgagctccaccttttactggaaccaactccaaggag

SEQ ID NO: 1008641 - DNA, 120 bp, Artificial Sequence
  ENSG00000261211_8 (sequence is synthesized)
gaagttttgctgggtttcctggaaggcagaggtttgcatctgcatgccctgcgtggaggcattgtatttgggggcaggcaggagaatactgtagctggtgtgcccacagaaagggaggga

SEQ ID NO: 1008642 - DNA, 120 bp, Artificial Sequence
  ENSG00000261211_9 (sequence is synthesized)
gagaagccactgggagtgagctgggcttgggatcgggctgtgtcctcaccaactgtctgcccaggcatgaacttgccactgctgtggaagagtctgactgcatccaagaatgccaaaggt

SEQ ID NO: 1008643 - DNA, 120 bp, Artificial Sequence
  ENSG00000261211_10 (sequence is synthesized)
tgtggctgaactcacttctcaacagacttggatcatgttcatatactattctttaaaagatcaccatttgtagtagaatgtcaaaaacccaaagatgttgctcccgatgttgagctgtaa

SEQ ID NO: 1008644 - DNA, 120 bp, Artificial Sequence
  ENSG00000261211_11 (sequence is synthesized)
ttttgtttctttgtttttgagtggttctgatttattttcagcttttgggtgatgtctggggctgtttattgaggacgggataaatgggggggggaccaaaatatatttggcatttattgg

SEQ ID NO: 1008645 - DNA, 120 bp, Artificial Sequence
  ENSG00000261211_12 (sequence is synthesized)
tggtgttttatatttgtgacttgatttacttcttatcacaacccagtgagacacgtactattatcatccttttaatagatgagcagcctggagcttagagaggttaggtagcatggacat

SEQ ID NO: 1008646 - DNA, 120 bp, Artificial Sequence
  ENSG00000261211_13 (sequence is synthesized)
catcaggcaagttaaatgagaaagccgccacccattcccagctggggctgaccccagcgcctgtgttatttctgttgccctgagcctccccaggcttcttaacccacatgtactcctagc

SEQ ID NO: 1008647 - DNA, 120 bp, Artificial Sequence
  ENSG00000261211_14 (sequence is synthesized)
ttccagcagtgctaatttacaccgtgtaccagctggagacattctggagtgtagactgacgcaataatccccaatgataggtttgccatgttttttttaaatgtgttttttcctactttt

SEQ ID NO: 1008648 - DNA, 120 bp, Artificial Sequence
  ENSG00000261211_15 (sequence is synthesized)
tattatagatgtcagaattttctccttccctgagttatctttggacttagatgtatataaatgtatctggttggaggtggggggaaaagtggaagtggaagaccacaaaagtaaaaatta

SEQ ID NO: 1008649 - DNA, 120 bp, Artificial Sequence
  ENSG00000261211_16 (sequence is synthesized)
catttgagtgtatttcaccgattctaagaggaatgctttcttctgctccaaccactctgaaatctccgggtcccatactcccatcgcagctgtgtgacatggttgccgtggcctttgtgt

SEQ ID NO: 1008650 - DNA, 120 bp, Artificial Sequence
  ENSG00000261211_17 (sequence is synthesized)
gaacatcaaagctcagaggatgggtgtcagaggcttagatgaaaatcctgaagacaattgtctggcacttttcaaagctatacggcctcaccaaaaccctcctggaagctcttgatggct

SEQ ID NO: 1008651 - DNA, 120 bp, Artificial Sequence
  ENSG00000261211_18 (sequence is synthesized)
cgaggttcaacagtgtctgggaagacatggatataaaagatccagaatcaaagagtgattccaaagagttagaggctgactgtgaagtcttaggcatactgtaacccagtgatttaccta

SEQ ID NO: 1008652 - DNA, 120 bp, Artificial Sequence
  ENSG00000261211_19 (sequence is synthesized)
tctttgcttttctgctcatgcagaagagtgatatatgatgaataaattctaagttcaattaggcctaaaagagctcttgtaatatgctttaaaaagtctaagtgataaaacattgtgaca

SEQ ID NO: 1008653 - DNA, 120 bp, Artificial Sequence
  ENSG00000261211_20 (sequence is synthesized)
gatagagttctgtcagtgtttatattttcttagtccttcattaaataacagtgtgtcttacaccaaggcagttttggattccataaaatatggtagtagttatgtttcatgtttcaatag

SEQ ID NO: 1008654 - DNA, 120 bp, Artificial Sequence
  ENSG00000261211_21 (sequence is synthesized)
tcatcaatctgtttttaatgtattcatggaaaaatatgtgggccatcttgctatttaactatttttgaaatctcatggaagcctgccaatgtttttgcaatttagctaagaagctgtctt

SEQ ID NO: 1008655 - DNA, 120 bp, Artificial Sequence
  ENSG00000261211_22 (sequence is synthesized)
gctttttgagaggggaagttccaatattgtaagcctaggtttctgaatatatttttgttttttaataaatgtagaaagaatgttttttgttaatcctggcatttgtctagagcaaaagca

SEQ ID NO: 1008656 - DNA, 120 bp, Artificial Sequence
  ENSG00000261211_23 (sequence is synthesized)
aaataaatgaaaagtgaggaaaattaaaaggctcacgttataacatgtgctgtctagagaataaaaactcatttgtgcaaagttggtatggcttttatgaaaatatttcagtccgagcac

SEQ ID NO: 1008657 - DNA, 120 bp, Artificial Sequence
  ENSG00000261211_24 (sequence is synthesized)
cttgcctgtttgctgcagtgctgactgactcatgattagggatctgtgttgcctttattgctctcggtttgccctatggcttgatttattaatatatttaaatatacaattttaacctta

SEQ ID NO: 1008658 - DNA, 120 bp, Artificial Sequence
  ENSG00000261213_0 (sequence is synthesized)
cttgccagtgctatttgatgccctgttgaactttagccaaacttcattttataatgttctctcagtcctgagcatatataatatattttaatgaaattacgcttctgtattgactggcag

SEQ ID NO: 1008659 - DNA, 120 bp, Artificial Sequence
  ENSG00000261213_1 (sequence is synthesized)
acatcagaaacacattcacataggtcaaaagcagttgagctaagtgttgggtgggaggaactattaaaacagtacaggaaaaatatttggaaacaaaacaaaactttaaaataaaataac

SEQ ID NO: 1008660 - DNA, 120 bp, Artificial Sequence
  ENSG00000261213_2 (sequence is synthesized)
ctctctcacacacacacacacacacacgcacacagaacttggatgtggctattgggagttaatgtataattctgataatttgtgtatttcttcattatattaaacttggaatttatattt

SEQ ID NO: 1008661 - DNA, 120 bp, Artificial Sequence
  ENSG00000261213_3 (sequence is synthesized)
taaacttggaatttatatttttgacattattccaaaggtgtaataattgacttttaaaatagaataacattgtaatgggatcatattaagcatatattaaatgtaacacaaataagcact

SEQ ID NO: 1008662 - DNA, 120 bp, Artificial Sequence
  ENSG00000261213_4 (sequence is synthesized)
taagcactgagtctacctaaagtggtatttttttttaattttgtggctactcaggggttttgcattatattatcaaaagctaacaaccttaaggccatttgtggtaattcaaaaaatgtt

SEQ ID NO: 1008663 - DNA, 120 bp, Artificial Sequence
  ENSG00000261213_5 (sequence is synthesized)
tatttcaaatatcttttctagaatggaacactttggttgatagattgacctattttgtttacatccaatatgtgtaccccagtataaaacttaaaaaatggcaatttctcatgatatttt

SEQ ID NO: 1008664 - DNA, 120 bp, Artificial Sequence
  ENSG00000261213_6 (sequence is synthesized)
agttataagtctagaaatatcaaccttgacatttggtttaataagcttctgccacttattcctagatcagtatttttcaattgacaaataagttttctttgcgatctaccaaaaccaggt

SEQ ID NO: 1008665 - DNA, 120 bp, Artificial Sequence
  ENSG00000261213_7 (sequence is synthesized)
tgtcacattcttttagttgttacctggacagactgcttttattgctcattaatcagatgctgtggttaaggtgtgtctattaaataactacttagggatgtatcgtcattctgtttgttt

SEQ ID NO: 1008666 - DNA, 120 bp, Artificial Sequence
  ENSG00000261213_8 (sequence is synthesized)
atttaagaaaacaaatttttgttttggtgtaatttctaaataaaatatattcatggtaatgtggataattgacattatttatacaaatcatttggaattgagtaccttgttaactgtgta

SEQ ID NO: 1008667 - DNA, 120 bp, Artificial Sequence
  ENSG00000261213_9 (sequence is synthesized)
ataagtatggttataaaaagagaatgagtatcataacatttttgcctatatacacttttaaatatttatcaggatctacatttttcttaaactgttaatttggatgtgttgaaatgtagc

SEQ ID NO: 1008668 - DNA, 120 bp, Artificial Sequence
  ENSG00000261213_10 (sequence is synthesized)
ctataaatttctttttaagtaattgttactaaaaaaccttatggatcttcacatgtctggttccaattaatctgcttagactaatggataaaataataaacctgatttagtcaatctgga

SEQ ID NO: 1008669 - DNA, 120 bp, Artificial Sequence
  ENSG00000261216_0 (sequence is synthesized)
ctccagcctgggcgacatagagagattcatctcaaaaacaaaaaagaaacaaaaaaccatttaaataacatttaaaatacacaaaccaaaaccatttcagataccctcaaaaaagtacaa

SEQ ID NO: 1008670 - DNA, 89 bp, Artificial Sequence
  ENSG00000269044_0 (sequence is synthesized)
cgggctggactctttagccagccccaaatcccagccacatgactttggctgggtcactcctttgaggcacgaagaccacgtcacttggt

SEQ ID NO: 1008671 - DNA, 120 bp, Artificial Sequence
  ENSG00000269044_1 (sequence is synthesized)
tgggtcactcctttgaggcacgaagaccacgtcacttggttgcatgcttgggtgcccagtgggacaggtatgagaagacccactcaagagtggtgagaaagaaggctggctaggaaccca

SEQ ID NO: 1008672 - DNA, 120 bp, Artificial Sequence
  ENSG00000269044_2 (sequence is synthesized)
ggtggggcaggttgtctgcacgttatggctattatgagcagtgctgctatggacatttacatgtacgcacgtctttctgtgagtatatgttttcagttttcttgcctttttttttttttt

SEQ ID NO: 1008673 - DNA, 62 bp, Artificial Sequence
  ENSG00000269044_3 (sequence is synthesized)
gttctcctacctcagcctcccaaatagctgagactccaggcatccaccaccacacctcccta

SEQ ID NO: 1008674 - DNA, 77 bp, Artificial Sequence
  ENSG00000269044_4 (sequence is synthesized)
acctcctggattcaagtggttctcctacctcagcctcccaaatagctgagactccaggcatccaccaccacacctcc

SEQ ID NO: 1008675 - DNA, 120 bp, Artificial Sequence
  ENSG00000269044_5 (sequence is synthesized)
gtgtgagccactgcacgcagccatgttttcagttttcttgagggagattcctaggagtagaattgctgggctgtgtggtaacttccaggcctccttaaagctttagcctggactgggtag

SEQ ID NO: 1008676 - DNA, 120 bp, Artificial Sequence
  ENSG00000269044_6 (sequence is synthesized)
agcatggtttccactgcattctcttagtcacagtgagttgcaggttcaccccagcgtcagtggcgggcgggaagtggggatgacacaaggacctgagtgtccaagggggcttcatggagc

SEQ ID NO: 1008677 - DNA, 120 bp, Artificial Sequence
  ENSG00000269044_7 (sequence is synthesized)
cctcatgtgaagtccccagcatggaccctgacacatcgtaggtcctcaacaaatgtcactccctgttgtcactctgtttagtactaagaataatgatataaaactgggacagtaaggaaa

SEQ ID NO: 1008678 - DNA, 120 bp, Artificial Sequence
  ENSG00000269044_8 (sequence is synthesized)
acacaaactgttgggacctatatctgaatctattagtctgcctaatagaaaagccaccatcaggattttggagattacaagctcactttagattagccatactggagtcagccctggagg

SEQ ID NO: 1008679 - DNA, 120 bp, Artificial Sequence
  ENSG00000269044_9 (sequence is synthesized)
ctcccagagatcagaacaatcccagcgcttgacaggatggctgggaaacaatacatatgaatgccggaaaatgcagaactaatctaggaaaaagtgtaagaagaaaataaacatcatctg

SEQ ID NO: 1008680 - DNA, 120 bp, Artificial Sequence
  ENSG00000269044_10 (sequence is synthesized)
tcattctatctatcagagataactgctgtcaatattttggtttccttccaatattttttctattcactctgtgcataagtatgtatattttaataaaagtataattaagatcacaatgta

SEQ ID NO: 1008681 - DNA, 120 bp, Artificial Sequence
  ENSG00000269043_0 (sequence is synthesized)
atatgagagggtctctctcttccctcaccagagggggccaaagttttatgagacatctcctcatctgtgcacagatgggtggcggactctggagtccaggctgttgcttcccattctagt

SEQ ID NO: 1008682 - DNA, 120 bp, Artificial Sequence
  ENSG00000269043_1 (sequence is synthesized)
ctgttgcttcccattctagtggtgaatcttccatagtctggtattgttgtctctaacccagacctgatcacctggctacagcaaggaaaagaaactttgaccatgaagagacaggtgatg

SEQ ID NO: 1008683 - DNA, 120 bp, Artificial Sequence
  ENSG00000269043_2 (sequence is synthesized)
attgccaaacacacaggtattgttgtctccaagccagacctgatcatctgtctggagcaaggaaaaatcctttgagtatgaggagacatgagatgattgccaaacacccaggtgggtgca

SEQ ID NO: 1008684 - DNA, 120 bp, Artificial Sequence
  ENSG00000269043_3 (sequence is synthesized)
caattttcctgcctcagcctcccaagtaggtgggagtacaggcgcctgcaaccacacccaggtaattttttctattttaagtagaaatggggtttgaccatgatggccaggctggtcttg

SEQ ID NO: 1008685 - DNA, 87 bp, Artificial Sequence
  ENSG00000269043_4 (sequence is synthesized)
ctacctgcctcggcatcaatccagccttgtgtattttggagatagtgtctcactctgtcaaccaggctgatttgctcggttcactgc

SEQ ID NO: 1008686 - DNA, 120 bp, Artificial Sequence
  ENSG00000269043_5 (sequence is synthesized)
tctcactctgtcaaccaggctgatttgctcggttcactgctgcctgaatctcccaaactcagatgatcctctcatatcagcctctcaagtagctgcattacaagtatgtaacatcacacc

SEQ ID NO: 1008687 - DNA, 120 bp, Artificial Sequence
  ENSG00000269043_6 (sequence is synthesized)
caatcaggcacacagctgtagcgaacagcacggcttccgggtttggcggggcctttgtgtctctctgcagcctgagctccaggtctcttcttcactgctctgtgtcctctgcccctagag

SEQ ID NO: 1008688 - DNA, 120 bp, Artificial Sequence
  ENSG00000269043_7 (sequence is synthesized)
cacctgtgtctttgtgtctgaggccaagaataaattcatcaactttttagccaccgctgcaacagaagccaaccacaatcaatgttggctatacgtcgagttgcaggaggatgccaaaaa

SEQ ID NO: 1008689 - DNA, 120 bp, Artificial Sequence
  ENSG00000269043_8 (sequence is synthesized)
tggctaccttggagaatcatccctgacaacatttctgaatggctatattgttaccaatgggccacaacaacaacacttgcaatccaacctgggcttcctttgaccacactaagcgatcta

SEQ ID NO: 1008690 - DNA, 120 bp, Artificial Sequence
  ENSG00000269043_9 (sequence is synthesized)
tctttgccaagtcagacaaaaggcgaactcctccctcaccttgcatcaaaagccttggtattctgcccaatattcctggaatggtatatactacaaacctgctgtgctggtggctggatt

SEQ ID NO: 1008691 - DNA, 120 bp, Artificial Sequence
  ENSG00000269043_10 (sequence is synthesized)
ctctggggtttctccagtcacgtgtcaacacatactccaaatcaacaacattatgcccaatgaaacacaatctctttcctatgttaataagagattagtacactatgattacagtagctc

SEQ ID NO: 1008692 - DNA, 120 bp, Artificial Sequence
  ENSG00000269043_11 (sequence is synthesized)
cattgctgtcccctggggggccctctgggtatgcagatcctatgggtggcgatacgtgcccctactttggatggggagatgcacttgggggtggacattaattccattcactatccggga

SEQ ID NO: 1008693 - DNA, 120 bp, Artificial Sequence
  ENSG00000269043_12 (sequence is synthesized)
aaatactcccctctccagtaatctagatgcttagaaacattgctagttacaaatgtgctggactccctggtggtggtaccctatcacagtattctcccctgccactggtacaatcttgct

SEQ ID NO: 1008694 - DNA, 120 bp, Artificial Sequence
  ENSG00000269043_13 (sequence is synthesized)
tcaccaacaaattataatacttagcttacctgtagaaaatgctcttaatgctagtagcactcgacttatgttgttaccagatgaatttgctcagctgcatactgttgtgttgcaaaatca

SEQ ID NO: 1008695 - DNA, 120 bp, Artificial Sequence
  ENSG00000269043_14 (sequence is synthesized)
aatggcattagatatgcttaccacagcccaaggaggggtttgcgccttactgcatactggatgttgtgtgtatattcctggcaagtctcacaatattactctgtttgcaatgccatgttg

SEQ ID NO: 1008696 - DNA, 120 bp, Artificial Sequence
  ENSG00000269043_15 (sequence is synthesized)
ggtctaatttttattaattgtgcttctaattctcctgtgcttaccctgtatctgtaatctatatcaactataccttcccgatgtatctgtgagggtattttaatacaattgagtatccaa

SEQ ID NO: 1008697 - DNA, 120 bp, Artificial Sequence
  ENSG00000267322_0 (sequence is synthesized)
agaggcttgggccgccgagctggacccggaccggttttggtgttctgagtcatgaagccctgcagagggagaggcgtgcactactgagttctctggtctgctgggcccagcacaacttcc

SEQ ID NO: 1008698 - DNA, 120 bp, Artificial Sequence
  ENSG00000267322_1 (sequence is synthesized)
agggctctgcaggccatcaaatgaagtgctggttcttaggagagagatggcgtcaagccaactgcaaagaagcttttctaccagttctttaaggtcctggaagcagaggaagcagtgtga

SEQ ID NO: 1008699 - DNA, 120 bp, Artificial Sequence
  ENSG00000267322_2 (sequence is synthesized)
gaacagacatcagcccggcctgggatggtgggggtaaaatcctgcttgcagttggaggtgaccagtgcggcccatgggcagccgtcagaaatgcgccagtcagggacgctgccaggagag

SEQ ID NO: 1008700 - DNA, 120 bp, Artificial Sequence
  ENSG00000267322_3 (sequence is synthesized)
ctgctcttcacaggctgttgccacctgctctggaactcaggaagtgggagatgatgagtcagagtccattctctcaaggcaagactcctcccaggtcaggctctctggcgccttgctgaa

SEQ ID NO: 1008701 - DNA, 120 bp, Artificial Sequence
  ENSG00000267322_4 (sequence is synthesized)
tcccaagcctccccaagccaagcctcctccggttgccatgccaaccccccaggagacacactcagcctaggagtcccagggtggggcgggcagcgccctgggaaggaacggacaggtgtg

SEQ ID NO: 1008702 - DNA, 120 bp, Artificial Sequence
  ENSG00000267322_5 (sequence is synthesized)
agaatgcagggggcagggaggttggaagagcaagtgggcaagtgagattatccagggcccagcggcaaaacaggacactggtgtggccccagaccctagcagctgttgccactggaagcc

SEQ ID NO: 1008703 - DNA, 120 bp, Artificial Sequence
  ENSG00000267322_6 (sequence is synthesized)
ttaatgtcacctccatcccagctgagcagtggtcctctgtggccagggacacaaagaggagaagaggagccctgctccatccaccactagagccggcttcggtgactagagagtgacagg

SEQ ID NO: 1008704 - DNA, 120 bp, Artificial Sequence
  ENSG00000267322_7 (sequence is synthesized)
aagacagaagcgagtattccatggtggagcctctacaaacacattgggtgacaactttttaagatcagcctgttgacaggagttggcccagtcccagggatgtggccatcccaagctaca

SEQ ID NO: 1008705 - DNA, 120 bp, Artificial Sequence
  ENSG00000267322_8 (sequence is synthesized)
cacctagttatagatgttgttaggaactttattcatcttgataaagaagcaaatctttaaaaatacttcttaaattgagaggcatctaaaaacccagcttaaatgacaggagaggcggca

SEQ ID NO: 1008706 - DNA, 120 bp, Artificial Sequence
  ENSG00000267322_9 (sequence is synthesized)
gaccgtaaaaccttattcagtgacctaagagtggcctctgcgtgagaggccagttggtagaaaggacccaggtgtctagagaaaattgagccaggaatctctgtggctaccgaaggtctc

SEQ ID NO: 1008707 - DNA, 120 bp, Artificial Sequence
  ENSG00000267322_10 (sequence is synthesized)
ctgtgaaccctgagttctactcagactccgtctcccctgttaggtgccttgccaagcagcaccaaagcatgtgattccctggctccccagctccgctgcactgccacccctgcctcgtgt

SEQ ID NO: 1008708 - DNA, 120 bp, Artificial Sequence
  ENSG00000267322_11 (sequence is synthesized)
tcatataaccctgtccagatccaaccccactgaatcctcggctacaactctgactcttgcaaaggattaaccaactcttggggccacaagacttggccagcccagtgaatggggagccca

SEQ ID NO: 1008709 - DNA, 120 bp, Artificial Sequence
  ENSG00000267322_12 (sequence is synthesized)
gggctgctccagactggatcgggaccaggacgctggtactatgaccaccatcagtccgaagctcctctgtacaatattatcaaatccacaagataaagcatttcttatgtcttttccacc

SEQ ID NO: 1008710 - DNA, 120 bp, Artificial Sequence
  ENSG00000267322_13 (sequence is synthesized)
agaggcttgggccgccgagctggacccggaccggttttgggtactgtactgggggcagggcagagaggtgggcggcagttggggtgcggtgattgtagtaggctagggcgctttcgggtc

SEQ ID NO: 1008711 - DNA, 120 bp, Artificial Sequence
  ENSG00000267322_14 (sequence is synthesized)
gcggcgccgcttgcccggagcctgagaggattatgaaaacgtggcgagcgaaatggggccaggggacctggagcaggggcgtgaggagagtaggcagcgggtgaggctggacgggaggga

SEQ ID NO: 1008712 - DNA, 120 bp, Artificial Sequence
  ENSG00000267322_15 (sequence is synthesized)
ggtctagggaggcctctgccgcgggcactgtgagtcctggccgatgatgacgagaccactgcgcaatctgagttctgggaaccaggtgatggagtatgttctgagaacagactgaggccg

SEQ ID NO: 1008713 - DNA, 120 bp, Artificial Sequence
  ENSG00000267322_16 (sequence is synthesized)
agggctcatgtgaccaatgtccttttcattcaggcctagggaaaccagtatctgccaaaaagattagtgctcccaaaagggcaaccatcttcagcaaggcctgttgtactgtgtcaaata

SEQ ID NO: 1008714 - DNA, 120 bp, Artificial Sequence
  ENSG00000267322_17 (sequence is synthesized)
caaagccatcttaatatgaaaaaaagcaggcagaaaaggggataattgtaatgatgaagatagagtcaatcattcttccttgttatttggactacacggatctggtcatgctgtggttca

SEQ ID NO: 1008715 - DNA, 120 bp, Artificial Sequence
  ENSG00000267322_18 (sequence is synthesized)
tcctgccctagccttatataacctcccatttagaatgtgtataacattgggtaaagtgatggacctcaatgaaataacattacatgtagttctatgcttcaagtaaatgcttggatatta

SEQ ID NO: 1008716 - DNA, 120 bp, Artificial Sequence
  ENSG00000267322_19 (sequence is synthesized)
tgattttgtaacagaagtcatggggtttgaaatggctatttctttaacctttggcccatctcttttataataaaagcaggccatcaaatgaagtgctggttcttaggagagagatggcgt

SEQ ID NO: 1008717 - DNA, 120 bp, Artificial Sequence
  ENSG00000267322_20 (sequence is synthesized)
caagccaactgcaaagaaggtaagactgaaaggaagggcatatccttttactaacccagggagaagagtctgtcaaaattggttctggcacaaaagatggaataaagctttaaaaatggt

SEQ ID NO: 1008718 - DNA, 120 bp, Artificial Sequence
  ENSG00000267320_0 (sequence is synthesized)
tttctcaggcagctgtgaggttaaacaactgtcacttaccattttccacacccaccctggctgaagactttccctgaggagtttctggatcaggtttggtagccattgatttaaaagaca

SEQ ID NO: 1008719 - DNA, 120 bp, Artificial Sequence
  ENSG00000267320_1 (sequence is synthesized)
gcgccctggcctgggagctcagggtcttgggctcctgtcagggctctgtcagtgacttgcttcatgactttgcttattcctgaatgaggtgaaatgggccagcaggtgggaactatactg

SEQ ID NO: 1008720 - DNA, 120 bp, Artificial Sequence
  ENSG00000267320_2 (sequence is synthesized)
ataaggaatgtttctctatactaaagccctggcattgagttcagctggcttgtattgggtaatgtatgtatttctgggctttctggacatgtaaggagagaagaccccaccacatgggtg

SEQ ID NO: 1008721 - DNA, 120 bp, Artificial Sequence
  ENSG00000267320_3 (sequence is synthesized)
agaaggggagatgtggatcccaaaaagaaaatcaaagtgccctaatcaggctgaatgaccaaaacaagcagatgtcctccacagcagttaacaagaaatggcctgatggttggaaaggaa

SEQ ID NO: 1008722 - DNA, 120 bp, Artificial Sequence
  ENSG00000267320_4 (sequence is synthesized)
ccccggaggtgaatgtgtggagataaccagttaccacggggctctctagaaggggtccagcacacaggcagttggcagaacccgggaagtaccagctattgaaatgaactcaaactgcct

SEQ ID NO: 1008723 - DNA, 120 bp, Artificial Sequence
  ENSG00000267320_5 (sequence is synthesized)
tatctaaagactgtgaaaaaagaaatggttcgggtacaaagcttactgccaaggagtgctctgccacctctgcctgacagggacagaagggatcttgttggcaacacattcccagggttg

SEQ ID NO: 1008724 - DNA, 120 bp, Artificial Sequence
  ENSG00000267320_6 (sequence is synthesized)
gcatctgcttctatgagggcctcagatgaaaacagtggaagatggaggggaggtggtgtgtggagcgatcacatggtgagagaaggaagtaagagggctagcaggaggggccagctcttg

SEQ ID NO: 1008725 - DNA, 120 bp, Artificial Sequence
  ENSG00000267320_7 (sequence is synthesized)
tcaacaaccagtgctcttgggaatgaagagtgaggacccatttactcctgcaagaagggcatcaagccattcatgaggaatccatctccactgcccaaaccctcccaccaggcctcacct

SEQ ID NO: 1008726 - DNA, 120 bp, Artificial Sequence
  ENSG00000267321_0 (sequence is synthesized)
ggcggagaagcaaaggagagggaagctggaagcacctttggcccgggacagaaatctggagagcttggctacctccatcctcctcaggccggagcaggcttcctgagagagtccaggtcg

SEQ ID NO: 1008727 - DNA, 120 bp, Artificial Sequence
  ENSG00000267321_1 (sequence is synthesized)
taggagttttacgacttagaaaagcgggctgcagattccttcctgggtgtttggttcaagccttggctccagcctcactctcagtcttcccgggagttcgtgggatttggaccttagatt

SEQ ID NO: 1008728 - DNA, 120 bp, Artificial Sequence
  ENSG00000267321_2 (sequence is synthesized)
attagtattattttgagggcctcctgtgtgtaagcactggttgtgcgcagatggctgtgcagagggccatgaggtagaggctggggaaatgagggcttggaggtgcttgaggtatggtct

SEQ ID NO: 1008729 - DNA, 120 bp, Artificial Sequence
  ENSG00000267321_3 (sequence is synthesized)
ttacctacgtgaaatgttggaggttgagatgaaaactcttgctttgaattcttcatggaggactacatcatttcaatcctgaatctggctcaattctattattcacttattactgtatta

SEQ ID NO: 1008730 - DNA, 120 bp, Artificial Sequence
  ENSG00000267321_4 (sequence is synthesized)
ccgagatcacaccactgcactcaagccttggcatcagagtgagactctgtctcagtaaaaaaaaaataaataaataaaaatgtttaattaaccatgatatttgctttggtaaaacctttg

SEQ ID NO: 1008731 - DNA, 120 bp, Artificial Sequence
  ENSG00000267321_5 (sequence is synthesized)
atatttgctttggtaaaacctttgaggtttaatgagaattttaaaattcattatacttttcttatggcatataaaagttttaattttttttattgtctcaactaacatcataaatgtctt

SEQ ID NO: 1008732 - DNA, 120 bp, Artificial Sequence
  ENSG00000267321_6 (sequence is synthesized)
aatgttaaaatccatgggatattctatttaaaattttagctttatcacctttgtgctatcagagaatgtgctttgaactggtaaaatgagttaaagtattggaaaacacttatgtcagca

SEQ ID NO: 1008733 - DNA, 120 bp, Artificial Sequence
  ENSG00000267321_7 (sequence is synthesized)
gaggctcttaaaaatcattttcatccttcctcttctagtgatgatttttttttaacccatgttttcaccagtctaccaatccaatggcataaatgctcctacataggcaacttaagtgtt

SEQ ID NO: 1008734 - DNA, 120 bp, Artificial Sequence
  ENSG00000267321_8 (sequence is synthesized)
tcttaagttgatgcaaggtattttgcatgaggctgaattcttgttgtcggagcagaggatttttgttccaactactgaattggcaaaatgttaaatataaaaacacctcaaaaagtcaaa

SEQ ID NO: 1008735 - DNA, 120 bp, Artificial Sequence
  ENSG00000267327_0 (sequence is synthesized)
aatgcctaacgccaggagggagagacaaaggggcctcttctttaacactgtgaatagccccagagtgaatacagccttcgacagctgtggtttcattctcatcaccgctgggcgagttgg

SEQ ID NO: 1008736 - DNA, 120 bp, Artificial Sequence
  ENSG00000267327_1 (sequence is synthesized)
gggtgctaattgtgaagctggagagctgttaaaatcagaccagatttgttaaaggagaggagtaagatgatacttcagaccagtatctgcagtggcacaggcacaaaagccctatctcag

SEQ ID NO: 1008737 - DNA, 120 bp, Artificial Sequence
  ENSG00000267327_2 (sequence is synthesized)
aaggaaggcaaaaaggccgtgagaaaatgaaagaagctggttgattgacccctcctctgtgtcgcctcagcaacttgtccatatcattgttacagcacttaccacacagttgtaagacgg

SEQ ID NO: 1008738 - DNA, 120 bp, Artificial Sequence
  ENSG00000267327_3 (sequence is synthesized)
tactgcaagcttactttccaacgtggctgcatcgtttcacattcccaccagcagtatgaggtttccaatttctctgcatcctcatcaaaacttgttattatctgtcttttttattttaga

SEQ ID NO: 1008739 - DNA, 120 bp, Artificial Sequence
  ENSG00000267327_4 (sequence is synthesized)
ttgtatatcttctctggagaaatgtttattcaaatcctttgtccattttttaattggattgtctttttattgttgcatggtataagttctctatatattctggacacaagtctcttatta

SEQ ID NO: 1008740 - DNA, 120 bp, Artificial Sequence
  ENSG00000267327_5 (sequence is synthesized)
gttataccatttgcaaatattttctcccattctgtgcgttgtcttttaacctttctaatgtgtccattgaaacacaaaagtttttaattttcacaaagttcaatttatctacttttttct

SEQ ID NO: 1008741 - DNA, 120 bp, Artificial Sequence
  ENSG00000267327_6 (sequence is synthesized)
tttgtcacttatttgtatcatatctgagaaaccattacctaatccaaggtcaggaaggattactcctatgttctcttttgagagttttattgtttttactcttatatttaagttgaatat

SEQ ID NO: 1008742 - DNA, 120 bp, Artificial Sequence
  ENSG00000267327_7 (sequence is synthesized)
ccattttgagttagttaatttttgtatatagtatgacataggatcgagaggatcttgttaatcactttttcctgatatacatcagcttcaaatgtgaagctataaatctccctgtaggtt

SEQ ID NO: 1008743 - DNA, 120 bp, Artificial Sequence
  ENSG00000267327_8 (sequence is synthesized)
ggtttcctgaaagccctcattatataaagcaacttctgtgacaaatttgacttgattaattaattaattagagacacagtcttgctctgtcccccagactggagtgcagtggtgccatct

SEQ ID NO: 1008744 - DNA, 120 bp, Artificial Sequence
  ENSG00000267327_9 (sequence is synthesized)
tgccatcttggatcacagcaaccttcaactctcaggttcaagcaattctagtgcctcagcttcccaagtagctaggatcacaggtgtgcaccagcatgcctggctactttttgtattttt

SEQ ID NO: 1008745 - DNA, 120 bp, Artificial Sequence
  ENSG00000267327_10 (sequence is synthesized)
tttttgccatgttagccagactggtctctaactcctggcctcaagtcttcccctgccttggccaaccaaagtgctgggattactggtgtgaaccaccgtgcctagtcatgataatttatt

SEQ ID NO: 1008746 - DNA, 120 bp, Artificial Sequence
  ENSG00000267327_11 (sequence is synthesized)
gaaaaaaaaaaaaaaaaggaaagaaagcagcaaagagaattttttggcaagattatgagccaattttaagagcttttattacatttcaaatgtgattttaaattctcaaagttggacaga

SEQ ID NO: 1008747 - DNA, 120 bp, Artificial Sequence
  ENSG00000267327_12 (sequence is synthesized)
aatgtgattttaaattctcaaagttggacagatagcagggaaagaatggtcacagacttttccctaatattttaagttgcttcaaaccagttattaaatcttatatgtattttttaaaga

SEQ ID NO: 1008748 - DNA, 120 bp, Artificial Sequence
  ENSG00000267327_13 (sequence is synthesized)
cttattccacaggggtttgattaatttacacagacttcttccaaaactgtatctaaaccacattgttgatatctaagaaactctatgagcttcttcaaaagccctcttaaaaatacaaca

SEQ ID NO: 1008749 - DNA, 120 bp, Artificial Sequence
  ENSG00000267327_14 (sequence is synthesized)
aaatcatgttagcaactccagattccaagttgaaatcctcccgctttagtataagaaccatcagttttgaatgagtctggatacgaaaacctattttcccattttgaggagaaaatccct

SEQ ID NO: 1008750 - DNA, 120 bp, Artificial Sequence
  ENSG00000267327_15 (sequence is synthesized)
ttttagagactctttcttgaatggatatttgttataacatatttgggcttagggctaaaacctttggtttgtaagctgaggttttcatttgcacttaccatcaacagcgtataagttgaa

SEQ ID NO: 1008751 - DNA, 120 bp, Artificial Sequence
  ENSG00000267327_16 (sequence is synthesized)
aagaatctcaggtctggttgctgtcctgagctactgcaaagaagaaaccactgagaataagagcatttcaattattgtacatcacatttgctatttgctgccgttattcttctattaaag

SEQ ID NO: 1008752 - DNA, 120 bp, Artificial Sequence
  ENSG00000267327_17 (sequence is synthesized)
gaggataatcaactgatatgatattgtagatctcagtgcctagtgcattgtaggtcctcaatatatgttgattcttcttttctttacatatttttgaggtacagaaagaagttcttaaaa

SEQ ID NO: 1008753 - DNA, 120 bp, Artificial Sequence
  ENSG00000267327_18 (sequence is synthesized)
tggtttttaactgtaatcattttggaaaattagctatgaagatggaaatttgtgaacaaaggagaacttgcaaatgccattttactgagcatgttactgaatggttatataaggagtaaa

SEQ ID NO: 1008754 - DNA, 120 bp, Artificial Sequence
  ENSG00000267327_19 (sequence is synthesized)
tattctctcagccttagtaagtaaatatgaaccaataagaacacaggtgaggactcttttcctaaccagaatagatggctaaggtttacagggcaataaattagactatttgtatccaaa

SEQ ID NO: 1008755 - DNA, 120 bp, Artificial Sequence
  ENSG00000267327_20 (sequence is synthesized)
gcaatattgttgtcaccaccaattgtaataagcatttttataatttatgcctttaatgtgtttattatgaaaaagcttctaagtatattgcacaagtggtaatctgctccagaactggaa

SEQ ID NO: 1008756 - DNA, 120 bp, Artificial Sequence
  ENSG00000267327_21 (sequence is synthesized)
atttgggagacttggtttttggactcagcctattcactattatttggttgataggtttattattattattattattattttttaaaggcctgagacagtagagactttctaataaaatat

SEQ ID NO: 1008757 - DNA, 68 bp, Artificial Sequence
  ENSG00000267327_22 (sequence is synthesized)
tctttgactaggaaagggaactcccgcacggtgcgcgctcccactgacctgcgcccactgtctggcac

SEQ ID NO: 1008758 - DNA, 120 bp, Artificial Sequence
  ENSG00000267327_23 (sequence is synthesized)
cccccagcccacaacagcctatgaagaataactagaggtcttcatatcagaggcagaaggtactgcaagcttactttccaacgtggctgcatcgtttcacattcccaccagcagtatgag

SEQ ID NO: 1008759 - DNA, 120 bp, Artificial Sequence
  ENSG00000267325_0 (sequence is synthesized)
ggcacgggacccgcgctctaggagggcgcagcgagaggcgcactgcgcacccaggggctgcggtcccggccgccgtgcggtgacaagctgactccccgccgccgcccagccaagtccgcg

SEQ ID NO: 1008760 - DNA, 120 bp, Artificial Sequence
  ENSG00000267325_1 (sequence is synthesized)
cggggtgctggcggagatgtcgcatgggaggcttcttcaacgaggattagaacatccgacattaaaatgtctcagtgcagcagaatttcccagcgacttcggtggcgggagagcagcacc

SEQ ID NO: 1008761 - DNA, 120 bp, Artificial Sequence
  ENSG00000267325_2 (sequence is synthesized)
tctcaggcacagctgtgcgcatccctcgggccccaccgaccgcaccatctgaccgcgggaaacgaaatctgagctcaggaatttgaactgccccacgcacgttcgttcccggataaatct

SEQ ID NO: 1008762 - DNA, 120 bp, Artificial Sequence
  ENSG00000267325_3 (sequence is synthesized)
cctagaggaccgtgatttttccacttagagattatttagggagatgtcctggatgggacaagtagacaaatggcggcccgaggaaaatgcaggaaactctacattgtagacgcttaagca

SEQ ID NO: 1008763 - DNA, 120 bp, Artificial Sequence
  ENSG00000267325_4 (sequence is synthesized)
ccaactgtctgggccccggggcagggaacgggagacattatccaccggaaacatcacacccccggggctcctggcattttctacatcagtgaatgtgccagcgaagaagagtgtggggaa

SEQ ID NO: 1008764 - DNA, 120 bp, Artificial Sequence
  ENSG00000267325_5 (sequence is synthesized)
catattcctgaaacgttaagtcgtgaagtgggtgcttcagctgtcccccagctttaggattttaacccagctttggttttgatcaccgagagttattccttataatcaaatcagcaaaag

SEQ ID NO: 1008765 - DNA, 120 bp, Artificial Sequence
  ENSG00000267325_6 (sequence is synthesized)
cgttcaattacctattactggttgagaaagattccgttcccccagctcattgtatcggttcttggacccaagatgttaattatcggccaggcattcacagggggttaatatggcccccct

SEQ ID NO: 1008766 - DNA, 120 bp, Artificial Sequence
  ENSG00000267325_7 (sequence is synthesized)
cgacaccttgcctcgtaccagagacaccaaaagctgccgctgagggataatagagaatgggaaaagctggtcatgaaaaacctcttttattcttacttgcaagctacccttttgacattc

SEQ ID NO: 1008767 - DNA, 120 bp, Artificial Sequence
  ENSG00000267325_8 (sequence is synthesized)
tttttttaacactaaatggagattactgaattgataacttttgggttttctctgtcacactggggtttttttccccccgtttgtttgtaaggtttttttggttttggttttggttttggg

SEQ ID NO: 1008768 - DNA, 120 bp, Artificial Sequence
  ENSG00000267325_9 (sequence is synthesized)
gggaggggaagggggaagtggatagggagatggaagagtgttctgttactggttttatcaaatcctgttaggtcttgttcttcagtgtaatgtagaatggagaagttgcataagtacatg

SEQ ID NO: 1008769 - DNA, 120 bp, Artificial Sequence
  ENSG00000267325_10 (sequence is synthesized)
attgacaaacaaggtctcttagaagagagttaaggagtaggaaatataatgtgtcctggagaaaaagaaagagaaaacccttagtatgacacactggcctttaaatagaggacacatgaa

SEQ ID NO: 1008770 - DNA, 120 bp, Artificial Sequence
  ENSG00000267325_11 (sequence is synthesized)
aaacaaaggcaattcgttctgtaaaaatactctagattctttctgaggactgggcactacactgctcatagtgggcacctaaagtcagcattcagccaactcagcgggctttaagatgga

SEQ ID NO: 1008771 - DNA, 120 bp, Artificial Sequence
  ENSG00000267325_12 (sequence is synthesized)
gactcttaaacctcctgcatcaaaaagacataagggaatgtccctgagaagagcctgtgtctcctttgaagagagagagagagattgattctgcctccttgcaattcgaaccggcatttt

SEQ ID NO: 1008772 - DNA, 120 bp, Artificial Sequence
  ENSG00000267325_13 (sequence is synthesized)
ccagaacactccaatttgaatcacagtggagggtcatgggagggatttggcacaggggagtcttgggtctttggttttccacattgatcaatgggattgattttttctgtttttgttttt

SEQ ID NO: 1008773 - DNA, 120 bp, Artificial Sequence
  ENSG00000267325_14 (sequence is synthesized)
gttttaaaagaagagaattagttcctttttctgtctccaggattgaaaacatgaaggcaaagaagagaaactcacaatatgtcattaactttgggttatcaatattagtggaaagaatca

SEQ ID NO: 1008774 - DNA, 120 bp, Artificial Sequence
  ENSG00000267325_15 (sequence is synthesized)
atggtgcaaagaatcctaaaggactagataatccgcatattcgacttcctgattatgtgttactgacactaacatttcagagtgtggagaccctgccccatctggggagagggagagaca

SEQ ID NO: 1008775 - DNA, 120 bp, Artificial Sequence
  ENSG00000267325_16 (sequence is synthesized)
aagaccccctgcttctggtacttgattcacacataatgccctccatttactgctttcaagaaataacctgtttctaatcttaaatttcaatctactgatcacaaaatcatagagatctta

SEQ ID NO: 1008776 - DNA, 120 bp, Artificial Sequence
  ENSG00000267325_17 (sequence is synthesized)
aaggagaggcacgtgtgaaataaggtgtgccttgctgagccctcccgcccccaccccccatgtatcaagaactttacttacattatctcatctaattctacccacaacccaagaggaagg

SEQ ID NO: 1008777 - DNA, 120 bp, Artificial Sequence
  ENSG00000267325_18 (sequence is synthesized)
gcgatacttttaattcgggtttttacagacaagaaatttgtatctcagaggcccaaagtaaattgcctgagggcatatagctacttaggacagaattagaattgattaaagagtcaaaaa

SEQ ID NO: 1008778 - DNA, 120 bp, Artificial Sequence
  ENSG00000267325_19 (sequence is synthesized)
ttctttgagaattaatgttttaaactctcgattagttaccaagggaatctgagaaattaattaacttttggggggatctttagattagtggggaaattatgttaagcccaaagaaagaca

SEQ ID NO: 1008779 - DNA, 120 bp, Artificial Sequence
  ENSG00000267325_20 (sequence is synthesized)
agcccgtgaattttcttgttatctatgaagtggtttggtgaaaggtgtgacaatttgagaaaactgaaaagtgctgaaattcctttaataaggttctgtttaaactgatagagctaccag

SEQ ID NO: 1008780 - DNA, 120 bp, Artificial Sequence
  ENSG00000267325_21 (sequence is synthesized)
atataattaggcagatatccattttcttctggaagcttctattatttgagaagaaaactgaaaagctttagactgtttcaaattaaggacaatttgaattttagttggaaagcggataaa

SEQ ID NO: 1008781 - DNA, 120 bp, Artificial Sequence
  ENSG00000267325_22 (sequence is synthesized)
ctatctgtatgattgagtttaaaaggcatggaaagactattacgaagtattgatcccactcagtgagagcaagcacagctttcaaatgatacagatctggctatgaatttgaatggtgac

SEQ ID NO: 1008782 - DNA, 120 bp, Artificial Sequence
  ENSG00000267325_23 (sequence is synthesized)
tgtgcctagctgtgtgaccaagggcaactttcttaacctctctgggcctctgagtcctcgtctttaaaatgagacaaataagcccttgcaagacgcttgtgatgataaaataaaagagta

SEQ ID NO: 1008783 - DNA, 120 bp, Artificial Sequence
  ENSG00000267325_24 (sequence is synthesized)
agagcaggatagggagcaccactaacttcagctcttcaacaattttgcctggggctggctctggggaatagacttggattctcacgagtatgtgaatcttcagttacttccttgaaagga

SEQ ID NO: 1008784 - DNA, 120 bp, Artificial Sequence
  ENSG00000267325_25 (sequence is synthesized)
cagacagttataaaagcaagcagtgaagtctgggaaggtggaggagaatggttatggaaagttatccccacatcataagtcttcctgatcttgagatcaaacaacaacactttcagaaac

SEQ ID NO: 1008785 - DNA, 120 bp, Artificial Sequence
  ENSG00000267325_26 (sequence is synthesized)
agcaagaaattaaggctgaagcaaaataccccctgtataatttttaagtcagttaataatgaaggtgtaaataaaacagaaatgtctctgttcttacttaaatcttgaacaaataaggga

SEQ ID NO: 1008786 - DNA, 120 bp, Artificial Sequence
  ENSG00000267325_27 (sequence is synthesized)
tttttttctttagtgttttttaatagtttaatcattttttaagacacaatttttgcctagttactgtttactaactgccctgccaaaaattagttattacttcaggacttatgtttgaat

SEQ ID NO: 1008787 - DNA, 120 bp, Artificial Sequence
  ENSG00000267325_28 (sequence is synthesized)
agaactgcgaaatcctgctttaaaaagtactatgaaacaattcatcaaaatgttttcctctgatattttttaccaggtaaaggcaagattacttctggagattttctttgaaaataatga

SEQ ID NO: 1008788 - DNA, 120 bp, Artificial Sequence
  ENSG00000267325_29 (sequence is synthesized)
tttttttttcctgattatgaaagtaatacacgttcattatggacaatttagtataaaatgagagaacaagctataaaggagcaaacgagaacacccttattctcaccagtaagagttaac

SEQ ID NO: 1008789 - DNA, 120 bp, Artificial Sequence
  ENSG00000267325_30 (sequence is synthesized)
cacttttaatattttgatgatttctttcagtctttttaccctttatttttttagccttggtacgaacctatggagtataaaattgtgcattcttgtttttatatttattttctcccatgt

SEQ ID NO: 1008790 - DNA, 120 bp, Artificial Sequence
  ENSG00000267325_31 (sequence is synthesized)
aactaaaaaggatctgtaacatttttagtgactgtctaattttatatcataccaatatgatatattagtatcattttttaagaaacaatagagaattctctattgttgagtgtctgtgag

SEQ ID NO: 1008791 - DNA, 120 bp, Artificial Sequence
  ENSG00000267325_32 (sequence is synthesized)
tcccagtttttgctattgtaaattatgctaaacaaaaatctgtgtgcataaatctctgagtttaagattatttcgttaagatagacttctataacaagaattactaggttcatataatac

SEQ ID NO: 1008792 - DNA, 120 bp, Artificial Sequence
  ENSG00000267325_33 (sequence is synthesized)
ttctaatgcttttgaaatatattgtcgtattgattttagcagttttcagtccaagcagcaatagatgaagagagctgttctctcctaatgcctctagtcatagtgactgataccacagcc

SEQ ID NO: 1008793 - DNA, 120 bp, Artificial Sequence
  ENSG00000267328_0 (sequence is synthesized)
ttggcagagctctagcacatttattgggagagtaagcctgggaaagactaagggagtggtggcagggagaaaggctgtggggaatcagagcgggtgctcagttgggtcttgaaggagaag

SEQ ID NO: 1008794 - DNA, 120 bp, Artificial Sequence
  ENSG00000267328_1 (sequence is synthesized)
aggaggagggtgggaggtgggttgccgaggatatctggttgaagacttgggggtcaagacaaagggacttagggggatggggtctggttagagttggggagggggcctaggacatccgtg

SEQ ID NO: 1008795 - DNA, 120 bp, Artificial Sequence
  ENSG00000267328_2 (sequence is synthesized)
ggcctgggatggaaatgtagtacccggatgtctttgtagaggactcagaaggaagtagaggaggggtcttaagtggggctatatgccaagaaagtgggtcggtggggctgagactgtcgg

SEQ ID NO: 1008796 - DNA, 120 bp, Artificial Sequence
  ENSG00000267328_3 (sequence is synthesized)
ctgagggttagggtagtgctggtagggtctggaagccggggagttgtcggtgtggggtcggaaagctggagggggtgtgagagcgagggtgtcagtggaagggtctatgttatcaaggca

SEQ ID NO: 1008797 - DNA, 120 bp, Artificial Sequence
  ENSG00000267328_4 (sequence is synthesized)
gtgtccaggatggaggtcagggcagaatccaggagtgggtgagaggacagtccttggcgcactcgggacatctggctgggcggagtcagatcggctttaatagagggagcctgaggaggc

SEQ ID NO: 1008798 - DNA, 120 bp, Artificial Sequence
  ENSG00000224173_0 (sequence is synthesized)
agttgagaagcaatgctgtttcacctccctgagagaattgccttgtttgtgaaatactacagaaaaacctgtattttctccagaaaatgaaaggtcttggcctgagtaaatcaaggcaga

SEQ ID NO: 1008799 - DNA, 120 bp, Artificial Sequence
  ENSG00000224173_1 (sequence is synthesized)
aaactcacccccgtgaaagctgcagctctgagagtgtgtgggcagggcttcaacagaatacctgtggctgcacttacaaaaggcagccagaaggacccgtccattctggaaagtaccttt

SEQ ID NO: 1008800 - DNA, 120 bp, Artificial Sequence
  ENSG00000224173_2 (sequence is synthesized)
ggtgacaaatgtgcacccaacaccctacagaaaagaagaaccataaaataattaattattccattgtaactcctgcctggaaaacatctgaagtcactagattcagcccacattcaagat

SEQ ID NO: 1008801 - DNA, 120 bp, Artificial Sequence
  ENSG00000224173_3 (sequence is synthesized)
gagaaataccagaaggcagagaacactgaggctgttttagaggctgtcaaccccagggagacagacagcaaataagatgcttggatgttttcacaccactctgacacatggatggaaggt

SEQ ID NO: 1008802 - DNA, 120 bp, Artificial Sequence
  ENSG00000224173_4 (sequence is synthesized)
tagaagacaacaaaggaatgggctgggaaggactccaaaagcagaatcagagattatatcattccttggaaatggagaaaaggatcaaaaaagctgaataaaaggtagtcccagcaacaa

SEQ ID NO: 1008803 - DNA, 120 bp, Artificial Sequence
  ENSG00000224173_5 (sequence is synthesized)
ggagacctttttccaaagtcactcacacagcctcaggtgtttacaggcctcaggtccttgctggctgttggccagaggcctcagttccttgccacaagggcctccccataggttactcac

SEQ ID NO: 1008804 - DNA, 120 bp, Artificial Sequence
  ENSG00000224173_6 (sequence is synthesized)
aacataacagtttgcagcccccagaacaaggaccccagagacagagtgagagagggcaagagaaggcaagatgcaagtcacactctttttgtaacctaatcccatcacatttcctgaatt

SEQ ID NO: 1008805 - DNA, 120 bp, Artificial Sequence
  ENSG00000224173_7 (sequence is synthesized)
ggaaagcgatgccaacttaaatctttgctttgttggtctggtttttatttctttcttttcattttcccataattaaatgtgccatagtacaggttttacttccccatgtcaatcgcgagc

SEQ ID NO: 1008806 - DNA, 120 bp, Artificial Sequence
  ENSG00000224173_8 (sequence is synthesized)
agctgaataaaaggcaaacatggaggaacagagtttggagcaataccctgacttacattcagtactgttaatggctccagcatcttgaaacaaaccaattttggattttcagccgctgtc

SEQ ID NO: 1008807 - DNA, 120 bp, Artificial Sequence
  ENSG00000224173_9 (sequence is synthesized)
caagatgacgtgaactccaggctattgactttcctctaccttcaatggaaattgtcatggagaattaagtttttgacaaatctacagcctatgtgcagggcttcttcctgggtgtaacaa

SEQ ID NO: 1008808 - DNA, 120 bp, Artificial Sequence
  ENSG00000224173_10 (sequence is synthesized)
taaggaatttggaaactgtctctagttttggcctggagtcacactgcagcttgagaccctgtcatttccatcaagcttgaaaatatacatcttaataaactgcaatacttcttaaacctt

SEQ ID NO: 1008809 - DNA, 120 bp, Artificial Sequence
  ENSG00000224173_11 (sequence is synthesized)
ccattcaaaaggcaaagtgagcagtctattctcactcctggattcttcattaaaatattatattcccagcatttctgtgtcaaaagtattgactttgtgcactacagagaccagcactac

SEQ ID NO: 1008810 - DNA, 120 bp, Artificial Sequence
  ENSG00000224173_12 (sequence is synthesized)
tggcatgctgcagcatgtgattaccacgttgacttccagagccacatccagctgggaactcagaaggaactaggcgtggggatgaggaatctattctctgcaacaaaagcctagatcaac

SEQ ID NO: 1008811 - DNA, 120 bp, Artificial Sequence
  ENSG00000224173_13 (sequence is synthesized)
tctatcaatcattaataatagacaaaggatcatgttaacgaaggataacacagaactctaagaagtcacttggtgaatctcttctgatcctaaagaggactggatggaggaaccacctgg

SEQ ID NO: 1008812 - DNA, 120 bp, Artificial Sequence
  ENSG00000224173_14 (sequence is synthesized)
tggagtgagaagagaacagacattcatcttcttgccagcaaccttgccagtgaccttgaacaactgcattttaaatgattgttttaagaataaaatgagacagtccaggtaaaacaccaa

SEQ ID NO: 1008813 - DNA, 120 bp, Artificial Sequence
  ENSG00000224173_15 (sequence is synthesized)
gccaaaagtgaacaatgatctcagtaactgaggcctcagagacaagatgatccattccacagctggatattgtaaaacttgggtaccagtggtgcgcagatctgaccattaaaactatgt

SEQ ID NO: 1008814 - DNA, 120 bp, Artificial Sequence
  ENSG00000224173_16 (sequence is synthesized)
acttcttgagtcacaaaccagtgtgtgtgactggttaaaacccagtcacaacctggaaaaagttgtggaaagcacctggggactgaggagaagcaaacttccttaggtttacacagtatg

SEQ ID NO: 1008815 - DNA, 120 bp, Artificial Sequence
  ENSG00000224173_17 (sequence is synthesized)
gctggcaccttaagcaagttaaaatcggtctcaattccctgcagaataagggcaacaccaattatgctacctacttcatgcaagaacctaaaatgaaaaataaaattgcttttaaaatgt

SEQ ID NO: 1008816 - DNA, 120 bp, Artificial Sequence
  ENSG00000224173_18 (sequence is synthesized)
agacagcaaataagtaagcaaataaataaaaatggaaggtgataataagtgcaatgaaaagaaatgaagcagagtaaagaatcaagagtagcagttgaggggatgcttggatgttttcac

SEQ ID NO: 1008817 - DNA, 120 bp, Artificial Sequence
  ENSG00000224173_19 (sequence is synthesized)
aatgtctctatggacaccaaggtcataataactccacttctcccatccccctcacaccctttggcagcctcatatattctcattatagtaaactcaattcaccagaaaatttcaagaaaa

SEQ ID NO: 1008818 - DNA, 120 bp, Artificial Sequence
  ENSG00000224173_20 (sequence is synthesized)
agtctgaaaggtacaaatcagaactttcaccacattccatctggcactcactggtggtgccaacacctcaaaaaccctgccggggccatttgtcaccatgtggacacagacagaccacca

SEQ ID NO: 1008819 - DNA, 120 bp, Artificial Sequence
  ENSG00000224173_21 (sequence is synthesized)
gtgaaagtggaatttttgaatgagcttgaatgacctgcctatatgtgtagacagccatggtcactttttctccgtaggattagatgtgctgattctaatgtggttcacattaggctattt

SEQ ID NO: 1008820 - DNA, 120 bp, Artificial Sequence
  ENSG00000224173_22 (sequence is synthesized)
tcttttaaaagtgaaatttcttttggaagcctggacatttctaagacgacttcacatctattcactcatcttgccttccaaaacagctgctcacaatctgaatattagactacaaatagc

SEQ ID NO: 1008821 - DNA, 120 bp, Artificial Sequence
  ENSG00000224173_23 (sequence is synthesized)
aaaaacaaacctctgttgttattattactatattattagggtttttttagaatcccaaggaattctttatataatgtagagtaagctattagaaggaaatcattattttcaatgtggttc

SEQ ID NO: 1008822 - DNA, 120 bp, Artificial Sequence
  ENSG00000224177_0 (sequence is synthesized)
cggaagagtgggacgttatggaaccttctcagcttattcagagaggcttcttcttcctatttagtctccctctggctttccctgctgggatctgggtggtagaagcagcagggggatcaa

SEQ ID NO: 1008823 - DNA, 120 bp, Artificial Sequence
  ENSG00000224177_1 (sequence is synthesized)
cgaacaggctgagcgccaagaagcctgaagattccagaatctagcgggaaaagcattcagagtcagaatgagccacttccagcatcgatggtgtcaggtcaggtcctctgggtagaagaa

SEQ ID NO: 1008824 - DNA, 120 bp, Artificial Sequence
  ENSG00000224177_2 (sequence is synthesized)
atggagtcagttaggagtgctggagactgagtaagaggtggcagctgaggcttactaccccaggaaagggatgccaccagagaaggcagacaaccaagatggcgactctcaatttttgag

SEQ ID NO: 1008825 - DNA, 120 bp, Artificial Sequence
  ENSG00000224177_3 (sequence is synthesized)
ctcctaattttctcatgtcagacataagaaaaaaaaatattttttaaagaaaaagctttaggttgcaaaaatctaggcctttcaactttaaaatcctattcttgcaagccttggagaata

SEQ ID NO: 1008826 - DNA, 120 bp, Artificial Sequence
  ENSG00000224177_4 (sequence is synthesized)
aagcttatgcataaacagtagatttggaaacagaaatatgcctaattacccagagccattctttcaatacgccagtgattgtttaaagattctataggctggagtcaatggcaggaggcg

SEQ ID NO: 1008827 - DNA, 120 bp, Artificial Sequence
  ENSG00000224177_5 (sequence is synthesized)
gagtcaagagggaggagagaagaagcaagagggttgggtagatattgtcacatgaccctgagaggaggattctgggtcaaacccctagggggttgtgtgtaatggagactccagatccat

SEQ ID NO: 1008828 - DNA, 120 bp, Artificial Sequence
  ENSG00000224177_6 (sequence is synthesized)
ttgggaatctggctccaaagaagacttcaccttgccttctgagtggagccctgaagtggcaagactcatagaattcccccacgggtccacacaagagagaatgaatagagaaggctgcgt

SEQ ID NO: 1008829 - DNA, 120 bp, Artificial Sequence
  ENSG00000224177_7 (sequence is synthesized)
gctggctggaccaaggcagcctcgggtgacaccaccaccaccaccgccgctgccgccatcgccatcaccactgccgctgccatcaccgccaccaccaccaccatcaccaccaccatcacc

SEQ ID NO: 1008830 - DNA, 120 bp, Artificial Sequence
  ENSG00000224177_8 (sequence is synthesized)
acattatggacaatagcccaatgtttcctgagttccctagagggttgaaagagaataggacctagagagatcacatagttgggacaggcactcattaatttgatccaatgacaagagacc

SEQ ID NO: 1008831 - DNA, 120 bp, Artificial Sequence
  ENSG00000224177_9 (sequence is synthesized)
agatgggaagaaggatgccttgagagatgtcagtgtgcacccatggatagaagcagctggtgactgggtacttgggaagccacatggacacacacaaagctcctggaagacgttttcaag

SEQ ID NO: 1008832 - DNA, 120 bp, Artificial Sequence
  ENSG00000224177_10 (sequence is synthesized)
gagttgggctgtgctgggatccagaactggctgaagaaaccatgagctgacataaaatttctgccacctagcagaatggaggctccatttggaaattaaattatatacttaaaaaaacta

SEQ ID NO: 1008833 - DNA, 120 bp, Artificial Sequence
  ENSG00000224177_11 (sequence is synthesized)
actccagccttgccagttgttacaatgggtgtgaccttctggctcccggcgattaagcacttaccatgtgcctctcctgcttcagggcaccacgccagcctataagcagccgcaggggtt

SEQ ID NO: 1008834 - DNA, 120 bp, Artificial Sequence
  ENSG00000224177_12 (sequence is synthesized)
gagccctgcagagccccagaggcagagctgcccaaggctttgggagcccacctcttgcatcactgtgccctggatgtgagacgtggaatcaaggagattattttggagctttaagacgta

SEQ ID NO: 1008835 - DNA, 120 bp, Artificial Sequence
  ENSG00000224177_13 (sequence is synthesized)
atggcaccctgctgggtttcagacttgagtggagcctgcagcctttctttcggccggtttctcccttttggaacgggagtatttacccaatgcctgtacccccatggccacttccagcat

SEQ ID NO: 1008836 - DNA, 120 bp, Artificial Sequence
  ENSG00000224177_14 (sequence is synthesized)
ggcagtacagcagggagaggtgagaacgcgcctccaggaaccaggactggaaattcccactctgctgaggaatgcagaggcattcctggagctgcacagaagtacattgtcgaagccggg

SEQ ID NO: 1008837 - DNA, 120 bp, Artificial Sequence
  ENSG00000224174_0 (sequence is synthesized)
cgcactcactgaacttcctccgttccgtctattctcagggcccaccgggcaggaccactgagcaaggccttggaaaaccagagagattagagcgaatggggaaatggagagagaacctga

SEQ ID NO: 1008838 - DNA, 120 bp, Artificial Sequence
  ENSG00000224174_1 (sequence is synthesized)
gaaatccttggaggagtagcatcatcatgaccctctgtgttccttttggcaaaggacttgctcccattgtttgcttgttcaattgtctgtccgttaaataaataaaacccttttcctata

SEQ ID NO: 1008839 - DNA, 120 bp, Artificial Sequence
  ENSG00000264595_0 (sequence is synthesized)
ataaagacatgatcatctggaaacatctgcaagaaaatctaccaaaatgaagacacactcacaaaatgaccttcctcctacatcccagctcttgtcatcttaaaggcattcactccatgg

SEQ ID NO: 1008840 - DNA, 120 bp, Artificial Sequence
  ENSG00000264595_1 (sequence is synthesized)
aggccccaggaggcgaatggcttctctcatcttgggctgcagctttgctgatgacttctggctcctcatggaaaacagaagtgcagggcatgcttttccattaagctctttctgctaaag

SEQ ID NO: 1008841 - DNA, 120 bp, Artificial Sequence
  ENSG00000264595_2 (sequence is synthesized)
aatcttcagatgactcatattcctgggcatttgatcttttgtgataagaagaaccagcctggctcactgactgagtgaacacttcagtggtctgtagtccctcagttgcactggacacag

SEQ ID NO: 1008842 - DNA, 120 bp, Artificial Sequence
  ENSG00000264595_3 (sequence is synthesized)
ttgaggccctcaggagccacgcggggtcagcggtggtggcattgggcagagcagctcaccgagttccagaagctgcatgccacccattccgagtctgtgaccctccacagcctggcccac

SEQ ID NO: 1008843 - DNA, 120 bp, Artificial Sequence
  ENSG00000264596_0 (sequence is synthesized)
tatacaacttgtgaggttatacttgttttcagctacttttctatagggattgtgggagatgggtgctgagaggggtgtttgcctgtgctgtggggatccccgttcttccagggtcttggc

SEQ ID NO: 1008844 - DNA, 120 bp, Artificial Sequence
  ENSG00000264596_1 (sequence is synthesized)
agcctcctgcaacaaacttgctggggcctgctgtgtgtacacactgtatcaggctgggtgtacctcgttaagcacataggtggtaaaataagtaccacggtaaaattatggcttagggct

SEQ ID NO: 1008845 - DNA, 120 bp, Artificial Sequence
  ENSG00000264596_2 (sequence is synthesized)
cagggtaaaattataaaaaaggaacagattacatcccactgtgggcaataagaaacactttctgcaggattctgagatgggcctggaagaatggatgatatttcaacagggggtaatgag

SEQ ID NO: 1008846 - DNA, 120 bp, Artificial Sequence
  ENSG00000264596_3 (sequence is synthesized)
gaaatgcagtttcggtgtgggcacctgaacggacaaaaggacaggtgtcatggaaaacaggttctgggaaacctgcatcacctaattcactggagagggataatagtgatgctataaata

SEQ ID NO: 1008847 - DNA, 120 bp, Artificial Sequence
  ENSG00000264596_4 (sequence is synthesized)
gcaaatgaagtcagttgggctcttatatgtgttgagcaccaccatccatctgaatagttgcttaagccagaaactggggagtggccccagctgcttcttccttcccttcatccagaaagt

SEQ ID NO: 1008848 - DNA, 120 bp, Artificial Sequence
  ENSG00000264596_5 (sequence is synthesized)
tagcagttcctggattttcctcctctagaatgtccctcaaacctgtcctcttttgtcttttctcatgtctgccacacttgtcttagtcattagcgaaatatccacattttatacttctgt

SEQ ID NO: 1008849 - DNA, 120 bp, Artificial Sequence
  ENSG00000264596_6 (sequence is synthesized)
taagtacagaaatttaccctcccagtcttaaatcttgagaaagttacatttatcttatctgagttcctttttcaggaaaccaatcatcagtcctcccagtcttaaatcttgagaaagtta

SEQ ID NO: 1008850 - DNA, 120 bp, Artificial Sequence
  ENSG00000264596_7 (sequence is synthesized)
catttatcttatctgagttcctttttcaggaaaccaaccatcagtcctcccagatagtatcaaggaactgaaactttccagatcacagcatcaggacagtgagacaccacacccctcacc

SEQ ID NO: 1008851 - DNA, 120 bp, Artificial Sequence
  ENSG00000264596_8 (sequence is synthesized)
caacatgattgcctagcccaccacctactgcctgttggctaactcctcttccttaccctttcctggtcttgttttcccacatgtcattacgtttctttcctgctgtgtaaatccttaatt

SEQ ID NO: 1008852 - DNA, 120 bp, Artificial Sequence
  ENSG00000264596_9 (sequence is synthesized)
ttagttggcttaggagatggatttgagactgatctcccattctcctctgccgcagtacccgaataaagcctggcaatactctttgtcctagtaattggcctcctgtgcggcagcagtgac

SEQ ID NO: 1008853 - DNA, 120 bp, Artificial Sequence
  ENSG00000264596_10 (sequence is synthesized)
acctatctgtaccatacctttgacgctttgggggcagttctgtgaaggtgggaaaattgattgtggaataaagtgatacatttggtttggggcatgtttctatcttattaatagtatatt

SEQ ID NO: 1008854 - DNA, 120 bp, Artificial Sequence
  ENSG00000264596_11 (sequence is synthesized)
tttcctcatagagatgtctactacacagttagaaataaaggcctaagctgggcatcattgcccttgcctgcaatcccagctactaggtaggttgaggtggaaagatcgctcgaggccagg

SEQ ID NO: 1008855 - DNA, 120 bp, Artificial Sequence
  ENSG00000264596_12 (sequence is synthesized)
attttgagactgtagtgtgcaatgagcatgcctgtgaatagccactgcgctctagccgggcaataataatattaatatatagatgccctgtctttaaaaaaatatagaaaagaaaagaaa

SEQ ID NO: 1008856 - DNA, 120 bp, Artificial Sequence
  ENSG00000248816_0 (sequence is synthesized)
ctctatcacaatgtcgtctcttggagatttagaaaaaaaaagaaaaaaaaaaaggtgttttttccccccagtagaaaaaactgatgaaaggagctcagaaccagacacttcgttctccaa

SEQ ID NO: 1008857 - DNA, 120 bp, Artificial Sequence
  ENSG00000248816_1 (sequence is synthesized)
agccaccaggcagttccaccttcttttacatggcttctacatggattccgtaggaaagcacaaggcagatctacagattactctaaatgccaaggctaattcttggccttaactgttttt

SEQ ID NO: 1008858 - DNA, 120 bp, Artificial Sequence
  ENSG00000248816_2 (sequence is synthesized)
acaaatgaggctgtggaacactgagcgaaagacgaatttggctcagagtgcagatctgccattgctctcaatgctggctgcaaggaagcggaacccaaggctccatgtcctttttttgat

SEQ ID NO: 1008859 - DNA, 120 bp, Artificial Sequence
  ENSG00000248816_3 (sequence is synthesized)
gaaattggtgtatgtaaagacaagcaaatacgaaagaagaatttgaaggacagacaaactgcaacatcaacatagattacaacatcaaaataaacattatctttgtagtagttttaaaaa

SEQ ID NO: 1008860 - DNA, 120 bp, Artificial Sequence
  ENSG00000248813_0 (sequence is synthesized)
tgtgcaaactcaacaaaaccatccacatcaagctcagcccacgtgcttccaagaggcaacctttaccttacactttgccaagaattatttcacctgtgttgtttcacttttcgcaataac

SEQ ID NO: 1008861 - DNA, 120 bp, Artificial Sequence
  ENSG00000248813_1 (sequence is synthesized)
cccgtgaagaaagtaggatgacttcttatgtgtggctacagaatccatgaaggattagaagactaatgtaatagaagactgcaatgacagggttaagtcccatttagaaaagataattga

SEQ ID NO: 1008862 - DNA, 120 bp, Artificial Sequence
  ENSG00000248813_2 (sequence is synthesized)
tcataagaagagggcctcaattcaaagtccccaaagtggggaagcaatcaaggctggactttagttccaccacattggtcagagacctccactatgcagttttctggaggaaaggctgcc

SEQ ID NO: 1008863 - DNA, 120 bp, Artificial Sequence
  ENSG00000248813_3 (sequence is synthesized)
ctttgatttacaggttgtttccttttccctagaaaatgaagccatctctaggcagggtcctgggttaagatttcactagtcaatgcaccttgtacttatgaatatgtgtttgaaggaatg

SEQ ID NO: 1008864 - DNA, 84 bp, Artificial Sequence
  ENSG00000248810_0 (sequence is synthesized)
ggcaacccgctccggtgtccttccatgctgtggaggctctgttgtttcgctctttctactgcttactcttcctgaaggtttgca

SEQ ID NO: 1008865 - DNA, 75 bp, Artificial Sequence
  ENSG00000248810_1 (sequence is synthesized)
ctgcttttatgagctgtaacactcaccctgaaggtttgcaacttgactcctgaagccagcaagaccacgagcccc

SEQ ID NO: 1008866 - DNA, 120 bp, Artificial Sequence
  ENSG00000248810_2 (sequence is synthesized)
ttttgaagtcagtgagaccaagaaccaaccaattcgggacacaataccaactctttcatgccaggagaagcctccttaaaaaatttcggtgattaacagcagcacatgggtcaaaatctc

SEQ ID NO: 1008867 - DNA, 120 bp, Artificial Sequence
  ENSG00000248810_3 (sequence is synthesized)
tgatatagcaggggttacctggccaagaaggaacacagaggagaacaaagaaaattcaaggaactaaattccttctccacctcaaccaccagcattgatactccatcacttatgtactgc

SEQ ID NO: 1008868 - DNA, 120 bp, Artificial Sequence
  ENSG00000248810_4 (sequence is synthesized)
atcaagccgtcctcagaggtgaggaaggtgctgtcaagactagaagcatgtgtccctctctccattgcaagatgggacatagagaggagaaaagtggcagacagaagtcttaggtatgtc

SEQ ID NO: 1008869 - DNA, 120 bp, Artificial Sequence
  ENSG00000248810_5 (sequence is synthesized)
tcagcagcatgaaaatggactaatacagggaccaatgattgcatctacctcatggactttttatgagaattgactgatttaataaatgtaaaagacttagaacactgcctcatctattgt

SEQ ID NO: 1008870 - DNA, 120 bp, Artificial Sequence
  ENSG00000248810_6 (sequence is synthesized)
ttgtaaacagtcaataaatattagtatcaattttcattgaatcctaatcagtataactataatgttacattcatgaataagacaaaggctgggacaaaataaatgagacacttcactcag

SEQ ID NO: 1008871 - DNA, 120 bp, Artificial Sequence
  ENSG00000248810_7 (sequence is synthesized)
agttccaagctttggagtaactgcctcaggcaagtcttgatcaccactatctcccaaagaagtgggtggctggctcaccagaatgttcattgtattacttcattcatgagttggaagtaa

SEQ ID NO: 1008872 - DNA, 120 bp, Artificial Sequence
  ENSG00000248810_8 (sequence is synthesized)
aggcttcctcttatctctcaccagcttctaaacaagatggccaaacgctgtttaagggacctctttcttcctcagggctgctcccagcgtttgcttcaatgcctctcggtttatagcctc

SEQ ID NO: 1008873 - DNA, 120 bp, Artificial Sequence
  ENSG00000248810_9 (sequence is synthesized)
aaactgttaggcctagattttgctttctccttcttgctttaagcctctatctagtttcccaaatcctgctgcttttgcgtcaatggtaggaaaatattagccatgataacccttcaaaca

SEQ ID NO: 1008874 - DNA, 120 bp, Artificial Sequence
  ENSG00000248810_10 (sequence is synthesized)
cccttataaggctgtgaattgaatgtaccaagggaggtaactttattggagttgtctctgataagggacaactccaataaaattaagtaaaaatattaagattattgttgatcttgagcc

SEQ ID NO: 1008875 - DNA, 120 bp, Artificial Sequence
  ENSG00000248810_11 (sequence is synthesized)
aagaaaatgcaggggaaacaatggaaaaatacctttaaataatgaaaacaaaaataaaataagagctggtctactcactacttcatcccatctcgtctgtaaaataataccatcagaaaa

SEQ ID NO: 1008876 - DNA, 120 bp, Artificial Sequence
  ENSG00000248810_12 (sequence is synthesized)
gtgttcaaaattctctgtagtcaaggacttctcctgctggttagaatgcaaaataatatgaaagacttttgatcctctagtaatatacaagtgtatatatattttttgagacagggtctt

SEQ ID NO: 1008877 - DNA, 120 bp, Artificial Sequence
  ENSG00000248810_13 (sequence is synthesized)
agtgctgggattacaagcatgagccagcacactcagcctacatttttcaatatgcatgaaattatatggtttggatgtgctcattttactatattaaagtatatttcaataaaaagccag

SEQ ID NO: 1008878 - DNA, 120 bp, Artificial Sequence
  ENSG00000248810_14 (sequence is synthesized)
aaagccagtaggcatgaaaacataatattctttcatttttgtcttcatctgaagtttcaagttaaaaagcaggttattcagtaaaagaaaattgcaatgttcttctccagtgccaattaa

SEQ ID NO: 1008879 - DNA, 120 bp, Artificial Sequence
  ENSG00000248810_15 (sequence is synthesized)
ccaatctcctcagacagaaatatcttcagatggtgctaatgcaaatctcaatttaaaatcattttagaagactgagaccatgcccacaaatgcttcagaatgggaggtgccaagactttc

SEQ ID NO: 1008880 - DNA, 120 bp, Artificial Sequence
  ENSG00000248810_16 (sequence is synthesized)
aatcacacaaaaccctggcacttactttgttgtgttataatccagtctttctgcacctaagcttccttcataaaagacaatccagcatcatggttaaaacacagactttctaccactact

SEQ ID NO: 1008881 - DNA, 120 bp, Artificial Sequence
  ENSG00000248810_17 (sequence is synthesized)
acttacattcttggtgacagtgggcaatttagcagacttctctgtgttttagtttcctcaactttaaaatgggcactgttataggtataattgtgtcctacaaaaagatgttgaagtcct

SEQ ID NO: 1008882 - DNA, 120 bp, Artificial Sequence
  ENSG00000248810_18 (sequence is synthesized)
aacctccaatacatgtgaatatgaccttatttagaaatagagtctttacagatgatcaatttaagatgcggtcattagggcaggtcctaatccaatatgactagtgtccttataataagg

SEQ ID NO: 1008883 - DNA, 120 bp, Artificial Sequence
  ENSG00000248810_19 (sequence is synthesized)
gaaatttggactccagagatagatatataccaatgagagacaatgtgacacagggaccacacctacaaatcaaggaacatctgaggctaccagaagttaggagagaggtccagaacagtg

SEQ ID NO: 1008884 - DNA, 120 bp, Artificial Sequence
  ENSG00000248810_20 (sequence is synthesized)
ccacatagccctcagaaggaatcaactctaccagcaccttgattttgggcttttagcctccagaactgtgaggcaataaatttccgttctttaagccacccagttgttggtactttatta

SEQ ID NO: 1008885 - DNA, 65 bp, Artificial Sequence
  ENSG00000248810_21 (sequence is synthesized)
tttccgttctttaagccacccagttgttggtactttattatggcagccctaggaaattaacatag

SEQ ID NO: 1008886 - DNA, 120 bp, Artificial Sequence
  ENSG00000248810_22 (sequence is synthesized)
ctcgtggtagtgaataagtctcacaaggtctgatggttttataaggggaaacacctttggcttagctctctgattctctcttgctgcctccatgtaagaaatgtctttcaccttccacca

SEQ ID NO: 1008887 - DNA, 87 bp, Artificial Sequence
  ENSG00000248810_23 (sequence is synthesized)
agtgtatatatattttttgagacagggtcttgctttgttgtctaaactggaatgcagtggtatgatattgtctcactgcagtctctg

SEQ ID NO: 1008888 - DNA, 120 bp, Artificial Sequence
  ENSG00000248810_24 (sequence is synthesized)
agatcagcagcaacacctagccaacccacagcttacttacagcagacatgtgaatcaatctagccaagactaaaagaatcactaaaccaatatgtcatcctatgaataatagtaaacgtt

SEQ ID NO: 1008889 - DNA, 120 bp, Artificial Sequence
  ENSG00000248810_25 (sequence is synthesized)
tgtcttaaactatcatattataggaaaaaaacctgatatatgaaattaccctgtgagtttatattaaagatacacttaccttctccaacaagagttgtaacaatttttttcttattgcaa

SEQ ID NO: 1008890 - DNA, 120 bp, Artificial Sequence
  ENSG00000248810_26 (sequence is synthesized)
acaatgctatggggatacttatagtagcatttctgctcaacgtaatattttattgtagcactgtttgcaataagaaaataattggaaactgcagaaacgatcactaatgaggtatgggtt

SEQ ID NO: 1008891 - DNA, 120 bp, Artificial Sequence
  ENSG00000248810_27 (sequence is synthesized)
aaaaatcttttaagttgaaagcaacaaatgtgacaattaaaaggcataaattagacatatattttacattatcacaacttgtattactaaatgataaaaatgagttgcaaaataatatat

SEQ ID NO: 1008892 - DNA, 120 bp, Artificial Sequence
  ENSG00000248810_28 (sequence is synthesized)
agaactttatattttataaatatgcacatgaaaaaatgtttgtaagtatgcacaaactgttaacagttattacttcagaggagtgaaaaataggttgaaaatgagaatgactttcatttt

SEQ ID NO: 1008893 - DNA, 120 bp, Artificial Sequence
  ENSG00000248810_29 (sequence is synthesized)
tagtatacttaagtacattttcaattttcaattatatgcagtgattttgtcctttaaaaaataggatggacttttttaaatataaggaagacattttctgtgaaacaataaattactcag

SEQ ID NO: 1008894 - DNA, 120 bp, Artificial Sequence
  ENSG00000248810_30 (sequence is synthesized)
tatatacttaatgtgcatgaagtatgaggtaggaatacatccactgacattcttgcatttgcataccacttccccaaatatgaactcacttctctgactttgctagggctgaggaatcat

SEQ ID NO: 1008895 - DNA, 120 bp, Artificial Sequence
  ENSG00000248810_31 (sequence is synthesized)
cattacaatatctgtaaaactggatttattaagtgcatccatattgtttatgagtcatagaaaatatgttcattttcctatccatgttaaaggctgcttggaggattgacggagcattgc

SEQ ID NO: 1008896 - DNA, 120 bp, Artificial Sequence
  ENSG00000248810_32 (sequence is synthesized)
ttagaaaatgttctggaattcagatgaagctgtgttagtataaatcattactggttaccatatactcacacatacttaggggataaagatcagaaattacttaaatgtactttgtcttct

SEQ ID NO: 1008897 - DNA, 120 bp, Artificial Sequence
  ENSG00000248810_33 (sequence is synthesized)
tcaatctttccgtagcagcacatgggtcaaaatctcctgaaagttgagcaggggagctgtagaagaattcctccttttctcgcagatgaaatcttatgatatagcaggggttacctggcc

SEQ ID NO: 1008898 - DNA, 120 bp, Artificial Sequence
  ENSG00000248810_34 (sequence is synthesized)
aagaaggtaagtctgtcatccagcagtgcttgcagagggactaaaatgaattaggatgttcagagttgtatgttaggtgctgcagaaaggaagaaaagatctcatccataaaggggtctt

SEQ ID NO: 1008899 - DNA, 120 bp, Artificial Sequence
  ENSG00000248810_35 (sequence is synthesized)
cccaaactttctttgccatgtcttttgtaagacttctacttattactatgtatcatcatcttttggtaaatataaattctggctaggagaactaggacagacaggggagctgtctgcaca

SEQ ID NO: 1008900 - DNA, 120 bp, Artificial Sequence
  ENSG00000248810_36 (sequence is synthesized)
ctgtgattaggcatgcatcaattcagagctccatgctgctagctcctgtattctgctgagctcccagggaggaaataggaaaagggaggagaactcacctgtccaattacaacctactct

SEQ ID NO: 1008901 - DNA, 120 bp, Artificial Sequence
  ENSG00000248810_37 (sequence is synthesized)
gcagtacaaagtactgcaaattccacacagtggatctctgtgattgaaggagcacttgtaaaatctgagacatcctagtttttgatttggtatccaaaacaaatctgaacttttaattaa

SEQ ID NO: 1008902 - DNA, 120 bp, Artificial Sequence
  ENSG00000248810_38 (sequence is synthesized)
atattgttctttttccttcttgtttccaaatgaatagttacaccagcaaacttattggctgaaaagttgtttcctacatttgcactttgaagtgcatcagacagtggtgtgtttggatgt

SEQ ID NO: 1008903 - DNA, 120 bp, Artificial Sequence
  ENSG00000248810_39 (sequence is synthesized)
gggtcttgttgagtttggttagtgagttattattggttgggattgcagtggtcctgccaatggaagagaagtaggtgtgccgagtactgtcatgttcacctccgcctttcacagaggcat

SEQ ID NO: 1008904 - DNA, 120 bp, Artificial Sequence
  ENSG00000248810_40 (sequence is synthesized)
atttagccctcagttggtaagtgaactttttgacaaaggtttaagaggtcgtagagtctgtgtaaaagacaaaagtccaaaagtgaagcagaaggaatccagcttcttatttatgtctgg

SEQ ID NO: 1008905 - DNA, 120 bp, Artificial Sequence
  ENSG00000248810_41 (sequence is synthesized)
catgggaagcttctggatttgatagtgggtgcaccgaaatttgcatcccaagtcatagcctttgctctgccctaccttctggtatgttgtttttcaagttacttaacctctcagggctgc

SEQ ID NO: 1008906 - DNA, 120 bp, Artificial Sequence
  ENSG00000248810_42 (sequence is synthesized)
aacttacttatttgaaaaatgaattctagaatcacagagttggatacaatcttaagggccaattagtcaaactttctttccagaggtattctgcatgatctgaaatgtgtctctgaacta

SEQ ID NO: 1008907 - DNA, 120 bp, Artificial Sequence
  ENSG00000248810_43 (sequence is synthesized)
gttgagtgggattgtgtccataaaataatgtatataaaatagacaagctctatagctcctttcaattatgaccttctctgattactattttgttgattgtcctcaaatattattaaataa

SEQ ID NO: 1008908 - DNA, 120 bp, Artificial Sequence
  ENSG00000248810_44 (sequence is synthesized)
tcatgccctgaccataataaagaagacttcatcattgctgaggatgaatttcacaccccagtctttaactctatgctctgctatctcttccatctaaaaatacaaaaactgattgttcag

SEQ ID NO: 1008909 - DNA, 120 bp, Artificial Sequence
  ENSG00000248810_45 (sequence is synthesized)
agggatacagagcatatgaaggatgcagagagtgggtcaaatggaaggaatgtagcaaaacatgtaaacttgagtaagtatttgatctctttgagcctatgtttttcaatatttggattc

SEQ ID NO: 1008910 - DNA, 120 bp, Artificial Sequence
  ENSG00000248810_46 (sequence is synthesized)
aaatcgctttgattgtaaacttgggcacattgaggatatttgaaggtcataaaagtttaacctgtaatataccataaaaaggagagatgggaataacttctggaaatattcctttaattt

SEQ ID NO: 1008911 - DNA, 120 bp, Artificial Sequence
  ENSG00000248810_47 (sequence is synthesized)
ttcagttctttatttcagtaaattttttgtgtactgctcttggtactcaaaatggtactcacagtagatgctcacaactgtttattaaattgaaaattactgcaaatattttaacagaaa

SEQ ID NO: 1008912 - DNA, 120 bp, Artificial Sequence
  ENSG00000248810_48 (sequence is synthesized)
cacatgattttgcatttacctatataatttgaaaaaatttgctacttattttccctcaaggtttaacttagacattttcaatatctctcttaataaaagattgtatttttctagcaataa

SEQ ID NO: 1008913 - DNA, 120 bp, Artificial Sequence
  ENSG00000248810_49 (sequence is synthesized)
ctcttgatgactattacgaaggtatatgaagaggcaggtgccttgggaagctagtgaagccaaaatcccagagcttctcgcttgcgtagactcctgtgagggctgggaatttctgtcatg

SEQ ID NO: 1008914 - DNA, 120 bp, Artificial Sequence
  ENSG00000248810_50 (sequence is synthesized)
gaatgttccagatgaggaggggaagcccagctgcactcaggacacacttctatgtaagcaattctagtacattgtgcagaaatatctagaaacaaggcacccaaatctcccagcttccaa

SEQ ID NO: 1008915 - DNA, 120 bp, Artificial Sequence
  ENSG00000248810_51 (sequence is synthesized)
taatttatcagaatttttcttctgatggtgagtatttactcttgtccccaattttgtatttgtagtttttaaattcatttttctaaaaggggcctgtgttatatacagtttttatgtggc

SEQ ID NO: 1008916 - DNA, 120 bp, Artificial Sequence
  ENSG00000248810_52 (sequence is synthesized)
agttgatcttgccgtctcactaaagttggaaagtcctttgggactgagattgtgttttatactttctctgtttcccatgcctgggatacaactgagctcatggaggaagccaagctaatg

SEQ ID NO: 1008917 - DNA, 120 bp, Artificial Sequence
  ENSG00000248810_53 (sequence is synthesized)
ttctggccttcagttccctgcatggatcaaaactggtttgggaggttgtaaagctttttgggaaattacttgtcccttgtggtacttgaggatttagagtgccataccaaacatactgct

SEQ ID NO: 1008918 - DNA, 120 bp, Artificial Sequence
  ENSG00000248810_54 (sequence is synthesized)
ttaaaactaaaagaaggtttttttctttcttaattgtcagtatttgcattataatatttattttgaaagattatgtacttttatttcaattaaggattaaaagtgtggttcttctgattc

SEQ ID NO: 1008919 - DNA, 120 bp, Artificial Sequence
  ENSG00000240012_0 (sequence is synthesized)
ccatcttggctcactacaacctctgcttcctggattcaggcaaagcgtgggaatggaggatgagagatagtcaattttcagaataagatgttctaccaagatgtaaagaggggaaaaaaa

SEQ ID NO: 1008920 - DNA, 120 bp, Artificial Sequence
  ENSG00000240012_1 (sequence is synthesized)
gtaactttcaacagctaggcaagaactgccacaagcagtagtcgaaaaaatcaacggcatggtttcctaatgtggtcttggattcagcaagaaaatactacagagagaaaactgcaggag

SEQ ID NO: 1008921 - DNA, 120 bp, Artificial Sequence
  ENSG00000240012_2 (sequence is synthesized)
gtggaagctgaaggactctgaagatggccaagttacagatctcttaaaaaatccaatatgatgatgcccatttacaaaattttatgatgagaaaattaactttaaaactcttttacaact

SEQ ID NO: 1008922 - DNA, 120 bp, Artificial Sequence
  ENSG00000240012_3 (sequence is synthesized)
ctaccaaatgtaagaaatatatgtccctaagaagacagaaaaagagaagcagatgaaaggaaatagaattttctattttctcctcaccatgtaagcctcaaataaaaagcatctaacaat

SEQ ID NO: 1008923 - DNA, 120 bp, Artificial Sequence
  ENSG00000230848_0 (sequence is synthesized)
caggaggctgtggctgcaattgctctgaaagaggcgggtgcgcaagttggagactgctgagctgtccccttaccttagtccatgaagacaacaggctacagtgaaagtaacagtgaagcc

SEQ ID NO: 1008924 - DNA, 120 bp, Artificial Sequence
  ENSG00000230848_1 (sequence is synthesized)
gctggcgtaaccaagaggagaaaacgccactccccttatgttccatttttttccccacaggacagcaccagacgagattttgccatgttgcttgggctggtctcaaactcctgggctcaa

SEQ ID NO: 1008925 - DNA, 120 bp, Artificial Sequence
  ENSG00000230848_2 (sequence is synthesized)
ttctcccacctcagcttctcaagtaccttcaattacagacaggagccatctcatccagcaatttcctttttatgtattcacaatgtatagtagatgataaaagcctatttaagtaagttt

SEQ ID NO: 1008926 - DNA, 120 bp, Artificial Sequence
  ENSG00000230846_0 (sequence is synthesized)
aagagatgttaacaggctgtatgatgttggccacagagtgcccccctaaagaggcctcagaagaatgaagggtaagaagctcctccatgaaatcagatggcacaaaattagaggaaaaag

SEQ ID NO: 1008927 - DNA, 120 bp, Artificial Sequence
  ENSG00000230846_1 (sequence is synthesized)
ctagagataacatttccggaaaagtcttcaagacgtaaaccaggcattacccaagtcccacttcgctgtttggagcccttaacttggaccccaccaactacactgccttgaaagcctgaa

SEQ ID NO: 1008928 - DNA, 120 bp, Artificial Sequence
  ENSG00000230846_2 (sequence is synthesized)
atactgcctggaatatttgttgtacccaggcttttctactctcaggatcacatatgtcctcaaatccgtcttatctacagtatgtttttgccttacataaatgcagatataaaacttaaa

SEQ ID NO: 1008929 - DNA, 120 bp, Artificial Sequence
  ENSG00000230844_0 (sequence is synthesized)
ggctttgaaggcggggcaacaaagcctgtggccgatgtggcgctcctcggcccgcgcttcagtggttatgacagtgttcgctctaaggggagaaggaatgtgtgaccatttccaacggtt

SEQ ID NO: 1008930 - DNA, 120 bp, Artificial Sequence
  ENSG00000230844_1 (sequence is synthesized)
aacttgcattccccagatagtttggatgagttacaacctaaatctgcaaactcaatacagccagaccctgggaagtgactctctccaagcctcctgtaacttcaccataataccggttaa

SEQ ID NO: 1008931 - DNA, 87 bp, Artificial Sequence
  ENSG00000230844_2 (sequence is synthesized)
tttttttttgagatggagttattggctcttgttgcccaggctagagtgcagcgtgggttcaggtaattctcctgcctcagcctcccg

SEQ ID NO: 1008932 - DNA, 120 bp, Artificial Sequence
  ENSG00000230844_3 (sequence is synthesized)
gagccactgcacccagccaaatattttcttatttatttatttattttagagacaggatgccattatgttgcctagtttggaatgcagtgtctatttagaggcgtgatcatggcatactat

SEQ ID NO: 1008933 - DNA, 120 bp, Artificial Sequence
  ENSG00000230844_4 (sequence is synthesized)
catgtgtatgtgttactgatggccaggtttagagataccaacctatttatttctagaggagaggtgatttgataaccttttcagatatcactatcagtaggcagaaaagggttaatagta

SEQ ID NO: 1008934 - DNA, 120 bp, Artificial Sequence
  ENSG00000230844_5 (sequence is synthesized)
tgatagggttaatatgtcctgaggagagtaaagaaattgcaaactgcagaagcacctgatctgtggccctggccagcatctctccatatcctgattctgtaagatcaagtgtttatgcag

SEQ ID NO: 1008935 - DNA, 120 bp, Artificial Sequence
  ENSG00000230844_6 (sequence is synthesized)
aaagagaagggactgatgatttgaatgtgaccagatgcagggcatgcccttattgccatgccagcatttgctattcatgatgttagtattcaaaaatcaagaaacacccttcctgggcca

SEQ ID NO: 1008936 - DNA, 120 bp, Artificial Sequence
  ENSG00000230844_7 (sequence is synthesized)
ttggtgtctactaatccattggaagaaaagactggaatccaccacttactagcttcttgggcctcagtcccctcttttctgccatagctaaggaccacctaacctagatggctgttgtta

SEQ ID NO: 1008937 - DNA, 120 bp, Artificial Sequence
  ENSG00000230844_8 (sequence is synthesized)
ttgttcaaagggacatctttagagcctcaagcccaggaatagcccgtggcaggcacctggtaaatgttagttttcattgtcctatcccaacactatgaaacatgcagcactctctgcaac

SEQ ID NO: 1008938 - DNA, 120 bp, Artificial Sequence
  ENSG00000230844_9 (sequence is synthesized)
tgcccctgtggatttccataggcaggagagtatccagtgttgagtggagctggtattctcagaaacgaagcccctttcctcattttgcgccaatctcttcagtcatttttaccctagtag

SEQ ID NO: 1008939 - DNA, 120 bp, Artificial Sequence
  ENSG00000230844_10 (sequence is synthesized)
tataatgctttgtcaaagtcactgtcatctgatgttaacagttgttttcgccagatgacttttcaaaaggtaacttcaccataataccggttaatgtgataaaaacactgcatgtagcca

SEQ ID NO: 1008940 - DNA, 120 bp, Artificial Sequence
  ENSG00000230844_11 (sequence is synthesized)
agaggcgtgatcatggcatactatagcctcggctcaaaggaccctggtctcaaaggaccctgccaccttagcctcctgagtagctgggacaagtgtgcgccaccacacctggctaatttt

SEQ ID NO: 1008941 - DNA, 120 bp, Artificial Sequence
  ENSG00000230844_12 (sequence is synthesized)
ctcgctatgttgcccacgctggtctggaattcctggactcaaggcctcttcctgccctcagacttccaaagtgttaggattacagggtgagtcaccacgcccagccagtgtgaattttct

SEQ ID NO: 1008942 - DNA, 120 bp, Artificial Sequence
  ENSG00000230844_13 (sequence is synthesized)
aatgctgagtaagttgtgatccagaagtaaatgtatctgcaagctgatttaaattgtagattttctcttcattgcatattttctgatgttgaataaagtctgagtattaactaaagtttt

SEQ ID NO: 1008943 - DNA, 120 bp, Artificial Sequence
  ENSG00000230844_14 (sequence is synthesized)
tgcttcttaaatatgtaagaattgtcctcaaaatctctattcttgagcacagtagtaaaaatatttttacatacattgtatttcaagggttctgcataagcaaccttgttttattgtgac

SEQ ID NO: 1008944 - DNA, 120 bp, Artificial Sequence
  ENSG00000230844_15 (sequence is synthesized)
aatttatttgggaattgtatcaaatatataatactgagatgttctcattccttttgtgaaaatacttttgtttaaaaaccactgccttcaaatgaaaaccactaggtttgttatgcttgc

SEQ ID NO: 1008945 - DNA, 120 bp, Artificial Sequence
  ENSG00000230844_16 (sequence is synthesized)
ctcatcttttctcggtgtttttctttcattttttaaaaatacatgtctttcttttttatacctaaaacagtgggtttttaaaatgtgatatgtgtatgcgttgtataatggttaccacaa

SEQ ID NO: 1008946 - DNA, 120 bp, Artificial Sequence
  ENSG00000230844_17 (sequence is synthesized)
tcaactaatacatccatcaccatccatactgtaccttagatctgcagaacttgttcatcgtagaatgtttttaccttttaggtcagacgtggtggctcacgtctgtaatccttgcacttt

SEQ ID NO: 1008947 - DNA, 88 bp, Artificial Sequence
  ENSG00000230844_18 (sequence is synthesized)
ggtcagacgtggtggctcacgtctgtaatccttagagctcgggagttcaagaccatcctgggaaacatagtgaaaccctgtctctact

SEQ ID NO: 1008948 - DNA, 120 bp, Artificial Sequence
  ENSG00000230843_0 (sequence is synthesized)
cagagggatttagagcaggcgttaagcttgaagctctgaagtctgctgtgagaatgaaatgagatagcaaagctgtgcctgaagtcatgtctaccctttggactttctcttcaatttaag

SEQ ID NO: 1008949 - DNA, 120 bp, Artificial Sequence
  ENSG00000230843_1 (sequence is synthesized)
aagaagagtatgtaccactgtcttcctggaggaagtgacacaggacctgagtcttgaaagcccagtaggacttagccagctcaagggattctgagcagagtgagccacataagaaattac

SEQ ID NO: 1008950 - DNA, 120 bp, Artificial Sequence
  ENSG00000230843_2 (sequence is synthesized)
gtaggagcatgacagtttgtgccgtgttttggagatcaatgcagttcattgttattggagtgaggttggcagtagtggaacattaggtggatgaataaatgtcactatctccgtccccaa

SEQ ID NO: 1008951 - DNA, 120 bp, Artificial Sequence
  ENSG00000189316_0 (sequence is synthesized)
cctcacagccctgagtgagggtgtgcagcctccttgggcaagaggatgcgggctctgggaggctgcgtcgcacatctccagtccccactgcagggcctctcaccggctggggcagtgacc

SEQ ID NO: 1008952 - DNA, 120 bp, Artificial Sequence
  ENSG00000189316_1 (sequence is synthesized)
cctggtcggaagcacctcagtgctgctcatgattgcagaggtggcctcaccagatagagggtcctggagggcgtgggggcttggtctctgactgccagcaaaagaagccgacatagaggc

SEQ ID NO: 1008953 - DNA, 120 bp, Artificial Sequence
  ENSG00000189316_2 (sequence is synthesized)
agcaggcgacaaacactgaggcaactgacttgcccgaatttaaccctcaggttttttaaataaaatgcaagtgcaggggcttgggctcgggactcctggagccccgtggggctgagcgtg

SEQ ID NO: 1008954 - DNA, 120 bp, Artificial Sequence
  ENSG00000189316_3 (sequence is synthesized)
gatggtgctcggtgtccagctacactcccaaaccgcatcccgagcgtttgcggggcggaggggccccagggcgacggttccagaacagacccaggcggctccggtcagcagcagccccgc

SEQ ID NO: 1008955 - DNA, 120 bp, Artificial Sequence
  ENSG00000189316_4 (sequence is synthesized)
caggaaccagggcgacctagaagaaaccgggaacctggcgtcccgcggggacgcagccccaggaaaggggctgccgccgccagcaagtgagctcagctcagcccgggcgtcccctccgca

SEQ ID NO: 1008956 - DNA, 120 bp, Artificial Sequence
  ENSG00000189316_5 (sequence is synthesized)
acgaggcccggatccctgcttggctcccggagcccggactgtgccttccgcaaaacggctgcgctctagaaagtggcctccacagtgcacttcccggcagcatggagtcggcagtggcag

SEQ ID NO: 1008957 - DNA, 120 bp, Artificial Sequence
  ENSG00000189316_6 (sequence is synthesized)
cgtttctatccggctctgcggggctgggtgtgaacgggactctcccatcccgctgtcctccaggagccggacctctcaccccgaagactttgccgaagacgcggccccctggtcaggggc

SEQ ID NO: 1008958 - DNA, 120 bp, Artificial Sequence
  ENSG00000189316_7 (sequence is synthesized)
agaaaacagatccaggccgccccgctcctgctgggtggtggagaaggtggagggcgggcaggtgctaagtgctactgtgaaaataaaaatcatcataataaagaacgaatgggtttcgta

SEQ ID NO: 1008959 - DNA, 120 bp, Artificial Sequence
  ENSG00000260671_0 (sequence is synthesized)
tctaggccgggaatgttaaccagtcaaatgaagagtctgctgtgggtggggagggtgcagacagattccctgccctgggcccacctgctggaggaggacatgaccatagccttacagtgg

SEQ ID NO: 1008960 - DNA, 120 bp, Artificial Sequence
  ENSG00000260671_1 (sequence is synthesized)
agagcattttcctttgacgaagaaagaaaaaccgtctttttagcagacaccccaccgtccccggtccctgctgtctgtgtctgtggatctgcctcttctgggtatttcataaaagcggaa

SEQ ID NO: 1008961 - DNA, 120 bp, Artificial Sequence
  ENSG00000260670_0 (sequence is synthesized)
gtgggttgcgtcagggagcagcagggcctatggcaaaagaaagtgcgagtgtcactgccaagagagacagggacatctcccagtttctgtcagtgtcagtgtgttgtcatgtgggagaca

SEQ ID NO: 1008962 - DNA, 120 bp, Artificial Sequence
  ENSG00000260670_1 (sequence is synthesized)
ggcccaggcttgcaagagcttctggttcattgagggaagccagaaatctgaattttcatgtgaaatttactgggatttttttgaggcagttcattcaaactttgcaaaagcactgtatgg

SEQ ID NO: 1008963 - DNA, 120 bp, Artificial Sequence
  ENSG00000260670_2 (sequence is synthesized)
gccaaataagccacctctgtgagctgaatgcagcccatgggcaatcagctggcaaactctggggtaagaggaacaaggaagaagctggggcagagccctggggccatggctgcagggttt

SEQ ID NO: 1008964 - DNA, 120 bp, Artificial Sequence
  ENSG00000260670_3 (sequence is synthesized)
gctctctgaaggaaatcacaggaggtaggaggttttgggagagagtgggttggagtgctgggtatcacagaaggccacgagtttgagaatggaaatttggcctacagagcaacacagaac

SEQ ID NO: 1008965 - DNA, 120 bp, Artificial Sequence
  ENSG00000260670_4 (sequence is synthesized)
aagtctgtgcaatggtaggggcagaagccatcttttcagagccatcagaaagtttccacctgctatggctgaatgtttgtgttcctcccaaattcaagtgctgaattcctaaccccgaag

SEQ ID NO: 1008966 - DNA, 120 bp, Artificial Sequence
  ENSG00000260670_5 (sequence is synthesized)
gtgatggttttaggaggtggtgtctttggggggtgattaggttaagggagtggagctccccatgactgggattagtgcccttataaaagaaagagaccccagagagctcccttgtccctt

SEQ ID NO: 1008967 - DNA, 120 bp, Artificial Sequence
  ENSG00000260670_6 (sequence is synthesized)
ccactctgtgaggacacagcaaaaaaaatgtcgtctatgaaccaggaagagagtcctcatcagacactggacctgtcaatgcctcgatcttggacttccagccgctggaactgtgagaaa

SEQ ID NO: 1008968 - DNA, 120 bp, Artificial Sequence
  ENSG00000260670_7 (sequence is synthesized)
caaatttctgttgttttcaagccacccagtctatggtattttgttatagcagcctaaacatactaagataccaccttatttacaagggacagtaaggaagaaggaaggaaagtgtctttg

SEQ ID NO: 1008969 - DNA, 120 bp, Artificial Sequence
  ENSG00000260670_8 (sequence is synthesized)
cttcagagcagagctaccctagaagggagtggttgaggactgctcagccagtgtgaggcccattccccaccaatcccatttgaagggagatggagctgctgacaccttccggtggcctcc

SEQ ID NO: 1008970 - DNA, 120 bp, Artificial Sequence
  ENSG00000260670_9 (sequence is synthesized)
tgcgatgttgtgaatcacagactttgtgaaatgaaaggttaatgatgttcaaaacagaagaataaggttcatcactcccacccccaactcctgttccaggtgcaaggcctggggtgagct

SEQ ID NO: 1008971 - DNA, 120 bp, Artificial Sequence
  ENSG00000260670_10 (sequence is synthesized)
ccttggtccgtccacctgagagcgactgtgagagctggaagcagcaccgcccagcagtgctttcctcatgcacagccaccttctccatctgtgccgcccagtacagtaaccacgtggctg

SEQ ID NO: 1008972 - DNA, 120 bp, Artificial Sequence
  ENSG00000260670_11 (sequence is synthesized)
ctgagcacgtgaaatgtggttactgtgaccgaggggctggatctgttattttattgaattttaactaaaatagcctcatgggactagcagctgccatattggattatgcaactctagagg

SEQ ID NO: 1008973 - DNA, 120 bp, Artificial Sequence
  ENSG00000260670_12 (sequence is synthesized)
tggtgtcctgggttgggtcactctgtattgataagaccctgtgagtgtggctcccttttctctctcttacctcccaggggctggatagcgaggctgaggtggggcctgtcttcttggggc

SEQ ID NO: 1008974 - DNA, 120 bp, Artificial Sequence
  ENSG00000260670_13 (sequence is synthesized)
tctcagggtcatcttgtcctctctctttcttgattcttataggcagctctggcactctggtcttatcaggcccagagagagctggacatagaccagggcttagtggactggacacaactc

SEQ ID NO: 1008975 - DNA, 120 bp, Artificial Sequence
  ENSG00000260670_14 (sequence is synthesized)
catgggttgtgggcctgagccttgagcttcagctcagtcacccacctacgggttctgcttgcctggcagctagccgggctcatcataaaaggaccacggttagtttccttcccctgatct

SEQ ID NO: 1008976 - DNA, 120 bp, Artificial Sequence
  ENSG00000260670_15 (sequence is synthesized)
ctcaggtgaggttgtctctcagaaggacttggtgggacaggagtaggggaggagtggccttggtttggcaggattcaagcattcttgagttcctaaaacatttgcatctaatagggtctc

SEQ ID NO: 1008977 - DNA, 120 bp, Artificial Sequence
  ENSG00000260670_16 (sequence is synthesized)
tctcaagcccctaacaatggtattttcttattttttattctggtattcaaataataatgataataataaaattaacttcacatataatatagaaacatattcccattgtaaaagatgaaa

SEQ ID NO: 1008978 - DNA, 120 bp, Artificial Sequence
  ENSG00000260670_17 (sequence is synthesized)
atagaaacatattcccattgtaaaagatgaaaataattcaggaagtcctccccatagataaaattgcctatagccctcctcccagtcttccttctgtacacacacacacacacacacaca

SEQ ID NO: 1008979 - DNA, 120 bp, Artificial Sequence
  ENSG00000260670_18 (sequence is synthesized)
ttaacccccactgccaaagattatactatatattctgtgacttgcttttctcacatatcatatcttgggggaatctttccatatcggttaatggaggtagatcccactccttttaaattg

SEQ ID NO: 1008980 - DNA, 120 bp, Artificial Sequence
  ENSG00000260670_19 (sequence is synthesized)
ctgcatagtattccattgtactcacgcagcgtggcttccttaatcactccctgtgaatggatatttgttttcccccctaaatttcgatatcaaaaactgtgttgcaatgagcaattttgt

SEQ ID NO: 1008981 - DNA, 120 bp, Artificial Sequence
  ENSG00000260670_20 (sequence is synthesized)
acatacctctttgtacatgtctgtgagcataagcagacacacacacaatagggaggtgtgtagactgtggttcagcaagtgttcactcctcccctaccccagcctccatgggaggggtgt

SEQ ID NO: 1008982 - DNA, 120 bp, Artificial Sequence
  ENSG00000260670_21 (sequence is synthesized)
acctcccatccagttgacatccagcttggccccgtgacttgctttgcccaacagaatgagggcaggagtgaggggcaccagttctgactttaggcctgaagaggccttgaaagttcccac

SEQ ID NO: 1008983 - DNA, 120 bp, Artificial Sequence
  ENSG00000260670_22 (sequence is synthesized)
ttgtccctctttggcttctactttcatcgcgagagtaacactccccagggagctattggtccaagaagcctgagagacacagtctggagcccagcccagccatgtccagcctagatcagc

SEQ ID NO: 1008984 - DNA, 120 bp, Artificial Sequence
  ENSG00000260670_23 (sequence is synthesized)
tgaaccccagccaaacagcaggcaagtaagtgagaaaataagtgcttgttgttctctccagctgagagttcaaggttgttacacagtaaaagtcgcctgacacaagtgaaaactggtaga

SEQ ID NO: 1008985 - DNA, 120 bp, Artificial Sequence
  ENSG00000260673_0 (sequence is synthesized)
agagcatccagtgccttgctgatggaaaagccaccgctgctgagaaaggcagctgtgcctgggccccgcaggtcacactggagtcctcacctccatctctgcattctggtgcatttggaa

SEQ ID NO: 1008986 - DNA, 120 bp, Artificial Sequence
  ENSG00000260673_1 (sequence is synthesized)
gaggatttctagaggtgggagaggagatgtaacttcccccacctccttcgcatcttctaacagttgcagcctcctctgctttgcgcattcacagggaggagcatgggcagcacctgcatg

SEQ ID NO: 1008987 - DNA, 120 bp, Artificial Sequence
  ENSG00000260673_2 (sequence is synthesized)
ctctgtctcaaacaaacaaacaaaaaacaaactccaaaaccaaaaaacaaacaaaaaacccaaaacaaaaaacaaaccgaaatgcaaatactaggatgtttatgtatcttaacatgttaa

SEQ ID NO: 1008988 - DNA, 120 bp, Artificial Sequence
  ENSG00000260673_3 (sequence is synthesized)
atttagtataagaaataattgtaaatcataatttgtgctggcatatagccctcttgtttgatatgagtgaaactaatcattgaataattaatttgaaaaattaaagtgggaaattactag

SEQ ID NO: 1008989 - DNA, 120 bp, Artificial Sequence
  ENSG00000260672_0 (sequence is synthesized)
ttcaagtttatttaggaccctggggcataatagcctgccatgccaaggcttgtcaaaacccaagcctcaagcctcctaactactgggatgggtgaacccctctgggtagggctggtctaa

SEQ ID NO: 1008990 - DNA, 120 bp, Artificial Sequence
  ENSG00000260672_1 (sequence is synthesized)
atgctccctccatgggcaggtgtcacgtgagttccacctggtttcgctttctgctgtgacagggcagcactgagttcaaggcagagtcccacagttgctgcattctccctcccccaggtg

SEQ ID NO: 1008991 - DNA, 120 bp, Artificial Sequence
  ENSG00000260672_2 (sequence is synthesized)
cacagattctcagcaccacagcgaccactgctgggggagggggaggggtgatattggtgtttcaaggctgtctctcctaccttttcagtgcctctttcagcgacatgaagttaaacccag

SEQ ID NO: 1008992 - DNA, 120 bp, Artificial Sequence
  ENSG00000260672_3 (sequence is synthesized)
gtactgtgagtcctcgcctaatttttggttcttatgatgatggttttctggtggaaacagttgttaaatttgattttcctgcagggggaatgattggtagagactactattcagccatct

SEQ ID NO: 1008993 - DNA, 120 bp, Artificial Sequence
  ENSG00000260672_4 (sequence is synthesized)
tgctctgctcctcctccctcccttcactttaattacctcctaatagccctatttttaaatacaatcatatagggggttagggctccaagtatgaattttgaggagacacaattcagtcta

SEQ ID NO: 1008994 - DNA, 120 bp, Artificial Sequence
  ENSG00000260672_5 (sequence is synthesized)
tagcatttggacttgggaagagggaggaaaagaacacgcacaggaaagtcacagtgtaagcaacagtatggaggtgggaaagttcagctcatggataggaaaaattgatccaagttggca

SEQ ID NO: 1008995 - DNA, 120 bp, Artificial Sequence
  ENSG00000260672_6 (sequence is synthesized)
gggcccacagggagatgtggtggggtggtgagtggcggccacatcaaaagaaccttgaatgccaggctgaggtgggaggcatttcctgttgtgtggaatgtgccatgaggtggtggggag

SEQ ID NO: 1008996 - DNA, 120 bp, Artificial Sequence
  ENSG00000260672_7 (sequence is synthesized)
ggtaacgtgatgaaaggacatttgggaggatggatctggcatcagtgatgggtgggggtaaggagtgaacaaagctggaggccaggaaaccggacacatggcccagagttcaggcatagg

SEQ ID NO: 1008997 - DNA, 120 bp, Artificial Sequence
  ENSG00000260672_8 (sequence is synthesized)
ctgttcaaaggcagtttccacactgagttccaatgtggatccaagcatgcagcggatatatttggaaaagcaaaagcattcccttcccattaccacacagtttcccagctgagttcatca

SEQ ID NO: 1008998 - DNA, 120 bp, Artificial Sequence
  ENSG00000260672_9 (sequence is synthesized)
ccagagtcctacacatcagacagtcaacctgccccaaactctgtccctagaagctgtggcccagagggagcccttgtccagctgtagcccggggacgctgcagcctgagcaggactgcac

SEQ ID NO: 1008999 - DNA, 120 bp, Artificial Sequence
  ENSG00000260672_10 (sequence is synthesized)
tggcttcagatgccctcagctttggcttcgaaatctgttgggtcagattcacgagagctctggccttctttgggttgggaattttaaatagttttttcaagcaggcagtagatcaactct

SEQ ID NO: 1009000 - DNA, 120 bp, Artificial Sequence
  ENSG00000260672_11 (sequence is synthesized)
acttgcttacttctgggtgcatctcctgttccccggccccagatcttctttttccttggtttatcctctcattgtgttgcagcacatcttccagtggcttccagagaaacagtgaatgga

SEQ ID NO: 1009001 - DNA, 120 bp, Artificial Sequence
  ENSG00000260672_12 (sequence is synthesized)
agccaagctttctgaccctcacatattttagaatgtcattgttctaccccaattcctgattactagtttggctggatgtaatgctctaatttaaacataacttctcttcacattgggaaa

SEQ ID NO: 1009002 - DNA, 120 bp, Artificial Sequence
  ENSG00000260672_13 (sequence is synthesized)
tattgctctattattttctagttcccagtgttgttgggaagaagtcagtgtcatgcggagtcttggctctttacatatgacctgtcttttctctctggaagattttaggattttctatct

SEQ ID NO: 1009003 - DNA, 120 bp, Artificial Sequence
  ENSG00000260672_14 (sequence is synthesized)
ttgggttcttggaatttctcagtgatgtaccttgttataggtctttctacctatactgtgctagtcacttggtagactcttgaactagaaaattatgtgcttctgtggggggaagccacc

SEQ ID NO: 1009004 - DNA, 120 bp, Artificial Sequence
  ENSG00000260672_15 (sequence is synthesized)
agcatgtttgggtcctggtttgggtcccaatggggcacatgtgggaaagaccatgaatgcccatgtctccgactagtttccccatcagaagtgttgttgcaccaatcatcctcctccatt

SEQ ID NO: 1009005 - DNA, 120 bp, Artificial Sequence
  ENSG00000260672_16 (sequence is synthesized)
aaaactggacagactaagggccactttcctaatggatgggtcttcttggttcatctcatgctcccaacagagctccctcccggggatgggaacgcgccatgccaggagagccctcttgat

SEQ ID NO: 1009006 - DNA, 120 bp, Artificial Sequence
  ENSG00000260672_17 (sequence is synthesized)
ccagcctccagccaaagccagtccccctgccaaacaggccctagagttacactggagggtgacaggcctaacctggaaatttcttgctgaaaattgtcagtttcccacacaagtacagcc

SEQ ID NO: 1009007 - DNA, 120 bp, Artificial Sequence
  ENSG00000260672_18 (sequence is synthesized)
tggcagttaattcaaattcaaaccagaagactgctgcttcagtctcgactgcttgaaaattaggttgtgtagagctttcatttgctggaaattgtgcagccagacattgtgcagattgac

SEQ ID NO: 1009008 - DNA, 120 bp, Artificial Sequence
  ENSG00000260672_19 (sequence is synthesized)
ccagtagctacagcaagtacacacatagggcgccaagcaaggacaagtgtgcacatgtgcgcacgcacacacacacacagcagaaaatctagaaataaactattttaatgtcagctgtca

SEQ ID NO: 1009009 - DNA, 120 bp, Artificial Sequence
  ENSG00000233365_0 (sequence is synthesized)
ccctcatgaggccctccatccctgggggaagactcctggaggaaatgcgtaggcggggattccacagggacgcagtgttcatgcagcgcctgtctggtgccagttctgaagcacacactg

SEQ ID NO: 1009010 - DNA, 120 bp, Artificial Sequence
  ENSG00000233365_1 (sequence is synthesized)
caaagattaagaagatgggtctcagctgattgggagtagagcacagcatcttcagagaaggccacggaagtcctcctcaaggtgtccaagtgtcctccaaacattagccactgttgttat

SEQ ID NO: 1009011 - DNA, 120 bp, Artificial Sequence
  ENSG00000233365_2 (sequence is synthesized)
taataaaggaatttaagaccgaaaagacctatggaggattcaggagtccaggggcctgtattacacagaagagttaagagggtgattcacacacccgtgaagatgagtctcctccctcat

SEQ ID NO: 1009012 - DNA, 120 bp, Artificial Sequence
  ENSG00000233365_3 (sequence is synthesized)
cctccccacactgggtccataagaggtgctcctgagcagtttcacctcataacccacaggcttagatttggtgctgaggtagccagggtcagccctagtgcagagtagagcagcttaatt

SEQ ID NO: 1009013 - DNA, 120 bp, Artificial Sequence
  ENSG00000233365_4 (sequence is synthesized)
tcagatgaatttttcagtggccattgctcactaggtgcctggacaggtcaaaccgttttccacttgtgaacaagcatctcaaagccagtccccccgcagctgactggcaggtgtgctctg

SEQ ID NO: 1009014 - DNA, 120 bp, Artificial Sequence
  ENSG00000233365_5 (sequence is synthesized)
ccgtctgcttttggaaacaagccctcaagtgaattatttaaagtcagacagcctactattagcagacctaaaggaggaactcctagcaattaattaaatcctgatatttaaccccctgag

SEQ ID NO: 1009015 - DNA, 120 bp, Artificial Sequence
  ENSG00000233365_6 (sequence is synthesized)
gttcagtaggtctggggtgggcctggaaatgtgcacttctagcaagtttcaggggcttctgctgaccctggatcagtgtatcacacaggaccgatagattattgtccctgattatggtga

SEQ ID NO: 1009016 - DNA, 120 bp, Artificial Sequence
  ENSG00000233365_7 (sequence is synthesized)
ataatatggcccaaaacacttaagaaacctccaattttctcaaactagcacatctgtgtacctaattatccatgtgtcgtctctctgtgtgtgaggccacgtgctctccacgaagacagg

SEQ ID NO: 1009017 - DNA, 120 bp, Artificial Sequence
  ENSG00000233365_8 (sequence is synthesized)
tgagtggagaccaagacacagaggtgctgctatgaccgcaactgcacccaccttgcagaaagcgcaaagcttcactttacagcaaaaataccagcaatctcctcccagactttcagagca

SEQ ID NO: 1009018 - DNA, 120 bp, Artificial Sequence
  ENSG00000233365_9 (sequence is synthesized)
gttcccaacaggtacaaggataaaatttaagaagagaggactacagatcactttaacgctaaagggaattgtagtgaagcatggatgttttcccattaaggacccatgactttacacttc

SEQ ID NO: 1009019 - DNA, 120 bp, Artificial Sequence
  ENSG00000233365_10 (sequence is synthesized)
aatatttctgcagggctcacagttcactgagaggctagagtgcagtgtcacgatcagagctcactgcagccatgaacccctaggctcctgggctcttggacttaagctgtcctcccacct

SEQ ID NO: 1009020 - DNA, 120 bp, Artificial Sequence
  ENSG00000233365_11 (sequence is synthesized)
catcctcctgagtagctggaactacagtcatgaagctttatgttaagtttcatctactaaattgtaacaactaaaacttgaggactaaaatatatggaaaaattactactacatgaaaaa

SEQ ID NO: 1009021 - DNA, 120 bp, Artificial Sequence
  ENSG00000260677_0 (sequence is synthesized)
taaaatcagattgagactcatcagtgctaagttagagagatgggattatatagtctgtaagtgcccttcaaatcttgagagctcctgtattttgtgtttttacagagtattttgtttaat

SEQ ID NO: 1009022 - DNA, 120 bp, Artificial Sequence
  ENSG00000260677_1 (sequence is synthesized)
ccctatttcaaccctataaggtagatactatccttgagttttcaaatgaaaaaaaaaacaaaaactgagattctacgatattcagtaatttccccaaaatcccacagcaaatgacagagc

SEQ ID NO: 1009023 - DNA, 120 bp, Artificial Sequence
  ENSG00000260677_2 (sequence is synthesized)
taggatgggaacccaggagtcagaaatcggaacttgtgttcctaatcacttaagctatatcacaaatgagagaggtggatgattctatgactgtagggctctaaaatgatgtgaaggaat

SEQ ID NO: 1009024 - DNA, 120 bp, Artificial Sequence
  ENSG00000260677_3 (sequence is synthesized)
gaaatgtcttcacatagacaagaaatgtctatgtcctaattcccagatcctgtgaacattactttatatggtgaacaacgtgattcagttaaagatcttgagataaggaacttatcctgt

SEQ ID NO: 1009025 - DNA, 120 bp, Artificial Sequence
  ENSG00000260677_4 (sequence is synthesized)
attacctgggtaggacctgcatcaatcacatgtattttttaaaagagggacgtttgacacagacagaagacacatagaagagaaggtgatatgaagacagaggcagagattggagtgatg

SEQ ID NO: 1009026 - DNA, 120 bp, Artificial Sequence
  ENSG00000260677_5 (sequence is synthesized)
cagccgcaagcaacggaatactggcagcaaccagaatctggaagaggcaaggaatggattctcctgctggagcctccggaggaagtacagccctgctggcaccttgatttgggacttccg

SEQ ID NO: 1009027 - DNA, 120 bp, Artificial Sequence
  ENSG00000260677_6 (sequence is synthesized)
tcctccagaaaagagagaatacatttctgtagtttcaagccaccaagtttgtggtaaagttttttacagcatccacaggaaactaataccagtggtaaagtgtactttacctccccgttt

SEQ ID NO: 1009028 - DNA, 120 bp, Artificial Sequence
  ENSG00000260677_7 (sequence is synthesized)
ctctgtgtcctcacccaaatctcatctccaattgtaatccccacatgtcaaaggcgggatctgatgggagacgactggattgtggcggcggatttcccccttactattctcgtgacagtg

SEQ ID NO: 1009029 - DNA, 120 bp, Artificial Sequence
  ENSG00000260677_8 (sequence is synthesized)
tgacagtgagtgagttctcacgtgatctggttgtttgataagtgtctggcactttcctctgcactgtctctctctcctgctgccatatgaagaaggtccttgcttcccctttgacttctg

SEQ ID NO: 1009030 - DNA, 63 bp, Artificial Sequence
  ENSG00000260677_9 (sequence is synthesized)
gttactagcagtgtgaaaacggactaatacaggcttgttaacatgattcttgcctttggatca

SEQ ID NO: 1009031 - DNA, 120 bp, Artificial Sequence
  ENSG00000260677_10 (sequence is synthesized)
ctaatacaggcttgttaacatgattcttgcctttggatcagcttggcatcaactgactctgaaacatcagtagaaaaaataaaatcaggtaaaaatgagagaaagaaaattatacaataa

SEQ ID NO: 1009032 - DNA, 120 bp, Artificial Sequence
  ENSG00000260677_11 (sequence is synthesized)
gcaagttatataataagcacctatattgttattattgcacttaagttttaccttgagcctccagacagctgaggcaaaacgaaaatcagggcggatgatataattttcactttctgataa

SEQ ID NO: 1009033 - DNA, 120 bp, Artificial Sequence
  ENSG00000260677_12 (sequence is synthesized)
aaaggaatcagttttgcttttcaagaaacacacatctttcctttatgttgtattctaggaataactgagcaagtatgtcttcacacagtggacactgaacaaggcaggagataaaatgct

SEQ ID NO: 1009034 - DNA, 120 bp, Artificial Sequence
  ENSG00000260677_13 (sequence is synthesized)
caacagtgactcagacaagatctagggctatcctcacgtggagggttctcatgttatcccttcataaacactacagcccaataaagaaacacagttcagcatcctgaccacccagactgg

SEQ ID NO: 1009035 - DNA, 120 bp, Artificial Sequence
  ENSG00000260676_0 (sequence is synthesized)
acagaaagagccaggatcccagactgtgctgaagcttcatgagacctctcctcgtctgtgcacgaaagaggagccggacacagagtgtccagccgactctggagcccaggctgttgcttc

SEQ ID NO: 1009036 - DNA, 120 bp, Artificial Sequence
  ENSG00000260676_1 (sequence is synthesized)
ccggtctggtggtgagtcctccattgtctgatgtgggtaagtccaagaccaaggagccagcagattcagagtccagggagggctgttcctgatttgcagatggcgccttctctttatgtc

SEQ ID NO: 1009037 - DNA, 120 bp, Artificial Sequence
  ENSG00000260676_2 (sequence is synthesized)
ttcacaagattgtgaagcctgtagcttggaagatacaggacataggtgaaagtgtttgtaccattcatttaaaggcataaatgtccaatgggtcataaaggtcaaagctaatagacaaaa

SEQ ID NO: 1009038 - DNA, 120 bp, Artificial Sequence
  ENSG00000260676_3 (sequence is synthesized)
aaagcttccagcatggatgatgagcaaattagatgcctctctgctcagcatgaggttttttcagctgcaaaagtaaaatgaatcaaccatggaattaccccaatgcactaatagctaccg

SEQ ID NO: 1009039 - DNA, 120 bp, Artificial Sequence
  ENSG00000260676_4 (sequence is synthesized)
ctgtagtggtagatcgttatatatctgggcaattaaattttaaatgctaactgtgagaccaagtcagcaaattctaattgagacacgttctacaaaacacctgaccactactcctgaaac

SEQ ID NO: 1009040 - DNA, 120 bp, Artificial Sequence
  ENSG00000260676_5 (sequence is synthesized)
agtcaaggtcttcagaaataaagaaggtttaaaaaaattattacagtcaagatacacggcaactaaatgtgatgtggtataccgtatgggatacagaaactgaaaaaggacattagggcc

SEQ ID NO: 1009041 - DNA, 120 bp, Artificial Sequence
  ENSG00000260676_6 (sequence is synthesized)
atcttgtgatacatgcactgtcacaggaaaagtttccaggaaaagtcaagccagggcttcacagaagatcaaaagaaagagacaaggagaagctaagtgtattagtcaggattctctaag

SEQ ID NO: 1009042 - DNA, 120 bp, Artificial Sequence
  ENSG00000260676_7 (sequence is synthesized)
attagtcaggattctctaagggacagaactaatagaatatatatacacacacaaacacacacacacacacatatatatacatataaataaaagggagtttattaaggagtattaactcac

SEQ ID NO: 1009043 - DNA, 120 bp, Artificial Sequence
  ENSG00000260676_8 (sequence is synthesized)
acaatcacaaggtcccacaacaggccgggccatctgtaagctgaggaacaaggaagccagtctgaatcccaaagatgacaaacttggagttcaatgttcaagggcaggaagcatccagca

SEQ ID NO: 1009044 - DNA, 120 bp, Artificial Sequence
  ENSG00000260676_9 (sequence is synthesized)
aagcatccagcacaggagatagatgtaggctgggaggctaagccagtcaagacttttcacgtttttctgcctgtttcatatcctagctgcaatggcagctgattagatggtgcccaccca

SEQ ID NO: 1009045 - DNA, 76 bp, Artificial Sequence
  ENSG00000260676_10 (sequence is synthesized)
ctcctttggcaacaccctcacagacacactcaggattaatattttgcttcagcttgttattttatagaaatgcttg

SEQ ID NO: 1009046 - DNA, 120 bp, Artificial Sequence
  ENSG00000260676_11 (sequence is synthesized)
tttatagaaatgcttgaaaaccagagataaatgcagctacaaatgaacgatgactctgcgttttccttgtatatataaagatcaacaataacacttaggtcatgaaacccacctacttta

SEQ ID NO: 1009047 - DNA, 120 bp, Artificial Sequence
  ENSG00000260676_12 (sequence is synthesized)
tataaaacatgattctgtgacagtaaacaatgtataacaaatcttacagaaatttatgtgattactaaaaaaaaatcaattcatcaattcaataaactgagtaccgtattacttttctat

SEQ ID NO: 1009048 - DNA, 120 bp, Artificial Sequence
  ENSG00000260676_13 (sequence is synthesized)
tgcttctttaccaaataaatacaagctttgcagtttaaaacaacagaaatttaattttttatagttctgagggtcagtaacctaaaactgatcttatgaaataaagttaaatcttgggga

SEQ ID NO: 1009049 - DNA, 120 bp, Artificial Sequence
  ENSG00000260676_14 (sequence is synthesized)
tatgggtgtggacagggctggtttcttctggggctctgatggtaaaatttgcttccttgccttttctccttctagggagcctgcattccctgcctcctagtggcttcctcccatcactcg

SEQ ID NO: 1009050 - DNA, 120 bp, Artificial Sequence
  ENSG00000260676_15 (sequence is synthesized)
aacctctgtttccagcctcaggattcctaatgtgactctgacgtttcatctcctgtttatgaggacgcttctgattgctaagatacatacggtgacactatggaagttaacttgaagatt

SEQ ID NO: 1009051 - DNA, 120 bp, Artificial Sequence
  ENSG00000260676_16 (sequence is synthesized)
aaaaccctgaaaaatagaaagaatcttctatggtatatcacagagattacaagggcctgaattagagtggtgacattttcatcccttgataatggattaaaaacaattgaatgaagcttt

SEQ ID NO: 1009052 - DNA, 120 bp, Artificial Sequence
  ENSG00000260676_17 (sequence is synthesized)
ggggtgaacttacaggactttatggcaaacttcatatgggagacttacatgaagggaggaagaaatgcgtatgtgtacaaaatcatgtggatagatgtgcatttgtgggtatctgtgaat

SEQ ID NO: 1009053 - DNA, 120 bp, Artificial Sequence
  ENSG00000260676_18 (sequence is synthesized)
acaaatacacaattttcagacagaagtagtataagaaaaggaaatcaaacaaagtcaaacattttaagtgtagctcttggtgcactttaaaaaattattaaattgaagctgtagtttatt

SEQ ID NO: 1009054 - DNA, 120 bp, Artificial Sequence
  ENSG00000260676_19 (sequence is synthesized)
ctcatcattgtcatcctatattagtgattttctttagcttttgaaattaaattcataatattacaattctgaattcctatgtatgtatatgttaagaatcctttaatgggactgactttc

SEQ ID NO: 1009055 - DNA, 120 bp, Artificial Sequence
  ENSG00000260676_20 (sequence is synthesized)
atatgtgtgtggctgcattctgaaatagttgtctagttgatacataaagcagtgagtgctatttgtaagatatatttatatttaaagtcttcatacagttattaactagctccaatatta

SEQ ID NO: 1009056 - DNA, 120 bp, Artificial Sequence
  ENSG00000260676_21 (sequence is synthesized)
ctgaaatgatttctccaaatatcctatatttaattatcatgctggcaaatttattataactttggtttgaaaaaatatattatgatacatatccactgactaatgccacctatctgcttt

SEQ ID NO: 1009057 - DNA, 120 bp, Artificial Sequence
  ENSG00000260676_22 (sequence is synthesized)
ctttcctgaattcaaagtttatgattatttccataaatgtatttatcagtataatcaaaaataaaaataacataaataaaatttctgtgagctttacacatctaatgtgcaatgattata

SEQ ID NO: 1009058 - DNA, 120 bp, Artificial Sequence
  ENSG00000260676_23 (sequence is synthesized)
tggtcttatacacatggtaaaaaacatttaagtcacaaaagtatacttcaggtttaagtataaatctgaaattaaattctcagatttaagtataatttttaaaagctttggtaattgtgt

SEQ ID NO: 1009059 - DNA, 120 bp, Artificial Sequence
  ENSG00000260676_24 (sequence is synthesized)
ccctactgttaaatttattgtatagttttcactatatcatctgaccttttaatgtttctagaaacttgtgtgaggtctcatacttcatggctaataaagtatttatttttctattcttga

SEQ ID NO: 1009060 - DNA, 120 bp, Artificial Sequence
  ENSG00000260679_0 (sequence is synthesized)
ggaagggacctcggctttccttaggacttctcttctgcggtcctgcgtctactctcctgcgtcctcctgcccgcccccagttggactgtgaagccagcgagagcatgggggcctggctgt

SEQ ID NO: 1009061 - DNA, 120 bp, Artificial Sequence
  ENSG00000260679_1 (sequence is synthesized)
ccacccacaagtggcgtgacgcaggcccagagccacaggctggacagctccactccccaggactcacgccgtggatgtcacgaagcttcacttgtctccacagaataaaatccagcccga

SEQ ID NO: 1009062 - DNA, 120 bp, Artificial Sequence
  ENSG00000265243_0 (sequence is synthesized)
ttctgctgcagcccagctcctggactggccccaggttctggccctaagggtttcgatccaagcatcattcactgtcgcacatgtttggcagcaagacccagcccactgtcttaggtaagc

SEQ ID NO: 1009063 - DNA, 120 bp, Artificial Sequence
  ENSG00000265243_1 (sequence is synthesized)
caccctagtgtgtctcatgaatgacttctacctgggcaccgtgacagtggcctggaaggcagacggcatcatcatcacccaggacgtggagaccactaagcctcccaaacagagcaagaa

SEQ ID NO: 1009064 - DNA, 120 bp, Artificial Sequence
  ENSG00000265243_2 (sequence is synthesized)
acaggccagcagctacctgagcctgatgcctgaacagtggagatcccgcagcagctacaactgctgggccatgcataaaaggagcaccctggagaagacaatggcccatacagaatgttc

SEQ ID NO: 1009065 - DNA, 120 bp, Artificial Sequence
  ENSG00000262292_0 (sequence is synthesized)
ggcagaaggggtcattctccctggagatgtggtcacgtcattaaccacactgggttagaatcatcagaagctgttcctgcctcttccgtcaagcaaggggctctggaggccagaaaatgc

SEQ ID NO: 1009066 - DNA, 120 bp, Artificial Sequence
  ENSG00000262292_1 (sequence is synthesized)
ctatgaatcatgcccacacccccagagcccagcatggggcgggctcaggttaggtcaatcgtgtttgaagactgaataaatgaatgtcttcatttgctaccctcagaagcccagtccgga

SEQ ID NO: 1009067 - DNA, 120 bp, Artificial Sequence
  ENSG00000262292_2 (sequence is synthesized)
aaaatattccagtgcaaggtttttggcttgaatgagatcccaagaatcaccttcaggttgtcaggaaaatgatacagggaagggaaggagccaacaaagggtatgggaatgagcacataa

SEQ ID NO: 1009068 - DNA, 120 bp, Artificial Sequence
  ENSG00000262292_3 (sequence is synthesized)
cactatggacagctggggaaccttgggcgatgatgcagaactgtttatcactaactctcaccaggtcagttgtgcatcaaggctactcgggggatagcactttacagcctactctagcac

SEQ ID NO: 1009069 - DNA, 120 bp, Artificial Sequence
  ENSG00000262292_4 (sequence is synthesized)
cacggtggccttctggggcaggggccagcaggctgcagctgctggatgaagcccccaggcagagtcgctggtcctcaggtgctcaagcttagctggaagccttcaggttgctgtgcaatg

SEQ ID NO: 1009070 - DNA, 120 bp, Artificial Sequence
  ENSG00000262292_5 (sequence is synthesized)
gaatagtgagtacccagaggatatgtgcgtgtgttacagtgagtgagtgaatgaacgaatgaatggagaatcaagaaaagagccgcgtatcttcagtcattgagcagacacgggccttct

SEQ ID NO: 1009071 - DNA, 120 bp, Artificial Sequence
  ENSG00000262292_6 (sequence is synthesized)
cctcttctataaagcaggaatgctagcccagcctcccaggagataaagggtgggaggtccccagagagtgagaagggttccacctgggctcccagactcaatctcagctccaggaagcag

SEQ ID NO: 1009072 - DNA, 120 bp, Artificial Sequence
  ENSG00000262292_7 (sequence is synthesized)
gacatggccccagtgagggttctctgtgggtgaagaagccacagaaggcaggcacagtgccctggttggaaccacaggggccccgaagcaaccacatcatggccaccacagcctccacca

SEQ ID NO: 1009073 - DNA, 120 bp, Artificial Sequence
  ENSG00000262292_8 (sequence is synthesized)
tcccacagcaatttccgctgctgcctctcccagggcaagatctcccaccagtggctggctgtcccctctgccagcacctgccccgggtgggccctgcagcatggccatggctgctgcaag

SEQ ID NO: 1009074 - DNA, 120 bp, Artificial Sequence
  ENSG00000262292_9 (sequence is synthesized)
gcaggctggcagctgctcctgtgtgcagcagcgtgtctgctttgaaaagccacagagactcctgtggttaggggctcatgttacagtagcacacgttcgaatcccagttctactacttgt

SEQ ID NO: 1009075 - DNA, 120 bp, Artificial Sequence
  ENSG00000262292_10 (sequence is synthesized)
gactgtgggaaagtaatttcaccccagtcctctctggtctcattgatcaaatggaactaacattctattgtcccctctggtggtctcaactccagcagtttgtgagatggttgccttcac

SEQ ID NO: 1009076 - DNA, 120 bp, Artificial Sequence
  ENSG00000262292_11 (sequence is synthesized)
tgttttccctactgcaaaacccataaggacacagttatcttgcctcctgccccaaccccagggtcttgaacacagtaagtgctcgataaatgcttggtaaatacatgaattattgtctga

SEQ ID NO: 1009077 - DNA, 120 bp, Artificial Sequence
  ENSG00000265246_0 (sequence is synthesized)
tgctgaaattacaggcatgagccaccctcacctggcctgagtgctgaaaaacagaaaagcctcagaggccaaagatgaagcactggatggaagttgacctccaagcagggagcaggcaac

SEQ ID NO: 1009078 - DNA, 120 bp, Artificial Sequence
  ENSG00000265246_1 (sequence is synthesized)
ccagcctaggctccacgtggggctgagagagggggaaggccaccgacagtccctgctccatggggaaggcagcctctgactctggctgacgggccggcagtcggataaggattggctggc

SEQ ID NO: 1009079 - DNA, 120 bp, Artificial Sequence
  ENSG00000265246_2 (sequence is synthesized)
aggaatgggcatccagctgcctctgctgctgctgtgagctgggaatgatggtgccagtcaagtctgcatggccaggtggccgggccggggtctctcagctccagtggctgaaacacacta

SEQ ID NO: 1009080 - DNA, 120 bp, Artificial Sequence
  ENSG00000265246_3 (sequence is synthesized)
cagaatcatcaaacctagtctgagatagtcatgaaagagatttagaaaaagacatagtgattttgttccccatttgctttttctaaaaacactcctctctaataaaatgtatgacagcaa

SEQ ID NO: 1009081 - DNA, 120 bp, Artificial Sequence
  ENSG00000262298_0 (sequence is synthesized)
atggtccagatgggtatcattaggctgctgatgcccttttgcgccgctctgtagttcttatcctacactacctaaaaacaggaactatttcacagcccaccaagagaaaaactctaaggc

SEQ ID NO: 1009082 - DNA, 120 bp, Artificial Sequence
  ENSG00000262298_1 (sequence is synthesized)
ttggtcctatgaatgaataatgagggccatctagtgtcaaaaaaggtaattacaggctttttgtttttgagatagggtatcacgtctatagtccaggctggaatgcagtggcattcagga

SEQ ID NO: 1009083 - DNA, 120 bp, Artificial Sequence
  ENSG00000262298_2 (sequence is synthesized)
aaaggtataaaccatatacttcccaaaatggcaatttaaggatttaaagaaagtcagaggatgagatcatcattttatgtcactcttcaaactgttgtgctattataagttggaactctc

SEQ ID NO: 1009084 - DNA, 120 bp, Artificial Sequence
  ENSG00000260589_0 (sequence is synthesized)
aaagcaggttgagttcgggtcgagctgtgcgccttttttcctctcgctctctcggttatcataaccttgtattccctctggaaggaaatggaaattcctttggatcatcttctaggtaaa

SEQ ID NO: 1009085 - DNA, 120 bp, Artificial Sequence
  ENSG00000260589_1 (sequence is synthesized)
cagtttaattagctgcgtgaggtgacaaacttgctcggatgaagtcatgggagctgaacgaattggcctgaatcccaagaggggagtgttcagggcgcgcgtgtccctcggagaggctga

SEQ ID NO: 1009086 - DNA, 120 bp, Artificial Sequence
  ENSG00000260589_2 (sequence is synthesized)
ggtaacgctggctccttcccgggagtccctgaacgcccggctttggaatctgcagacagctcttctagcagggcgttggcacctactgactaaccgtgcaatcactcagcagctgtgatg

SEQ ID NO: 1009087 - DNA, 120 bp, Artificial Sequence
  ENSG00000260589_3 (sequence is synthesized)
gttggtgacatgtctttcacagcccaagatagcctccctagactgagcaaaaaaaagaaaacagaaaaaaactggagctaaaagttgatcagtgagtgattcctagcaacccaaaatgtt

SEQ ID NO: 1009088 - DNA, 120 bp, Artificial Sequence
  ENSG00000260589_4 (sequence is synthesized)
ggtttatttattttacttataagtttagttaaccaataaaaattattctctgtgtgatggagaagttttaaggagcatctactagagatgttgcgtcccacttggaacaaacttagtaag

SEQ ID NO: 1009089 - DNA, 120 bp, Artificial Sequence
  ENSG00000260589_5 (sequence is synthesized)
cacatcttgtacgtaaatggaaattatcccgcaaattacggcatctccaaatgtagcgtggaaactaatattgacatgtcaacacaggattaatacatagtaatcaaagagtgcttaaaa

SEQ ID NO: 1009090 - DNA, 120 bp, Artificial Sequence
  ENSG00000260589_6 (sequence is synthesized)
attcattaaaaatgaagtcccacctctaaaagtgaaatgtgcaaattaaagtagcagttagataatgttttgtcatttaggtaaaaattacaaagaatcggccgggcgcggtggctcacg

SEQ ID NO: 1009091 - DNA, 120 bp, Artificial Sequence
  ENSG00000260589_7 (sequence is synthesized)
gtaatcccagctattcgggaggctgaggctgggaatcgtttgaacccgggagcgaaactccgtctcaaaaaaagaaaaaaattgcaaagaatcagggatgtgaggagtcagacactcaca

SEQ ID NO: 1009092 - DNA, 120 bp, Artificial Sequence
  ENSG00000260589_8 (sequence is synthesized)
gagtcagacactcacatactgttggatgaagtgtaaatactgtataatcttcctaagggaaatatttggaagcatgtaaaaaaatttttaaaaccttaggacccagcaattccatttcgg

SEQ ID NO: 1009093 - DNA, 120 bp, Artificial Sequence
  ENSG00000260589_9 (sequence is synthesized)
attgccagccattaaatgtcccacattgagtgattggacaaattgcttcacctcttggtgtctcagtttcctcatgtgtaagaaacaggaataatagggttgtgaggatcaaatgaatta

SEQ ID NO: 1009094 - DNA, 120 bp, Artificial Sequence
  ENSG00000260589_10 (sequence is synthesized)
gtacaagcaaaacgcttattacagtgcctggcatagagtaagcactaaataagtgtaactgatcactgtaatttacactggtcagttaaatcatagtacataagatgtgaaaactacaca

SEQ ID NO: 1009095 - DNA, 120 bp, Artificial Sequence
  ENSG00000260589_11 (sequence is synthesized)
gccatttaaggtgcataatacagattcatatttacatagacatctgaatacacaagttttcagaaggaagttacaaaccttataaaattacaaatgcccacaattttaaaaatctgaaag

SEQ ID NO: 1009096 - DNA, 120 bp, Artificial Sequence
  ENSG00000260589_12 (sequence is synthesized)
gaaatacatgagaatattatgacatgattgtctctgagtggcaagattctagacaatgtttttgttctttgtgcattttattattcaaaatattttaatgatgagcgtgtattcctttca

SEQ ID NO: 1009097 - DNA, 120 bp, Artificial Sequence
  ENSG00000260589_13 (sequence is synthesized)
aaagcagaaaaaatgttaaaatacaacaatgtcaaaaatggtatgttggtaccaccagtttcttaatgttttgaagggccaataccaaaagcgtgcttgtgtttcattatgacaagtata

SEQ ID NO: 1009098 - DNA, 120 bp, Artificial Sequence
  ENSG00000260589_14 (sequence is synthesized)
gaattattcggaaatatcacgactgatacggaagtcagaacattccctctcaaaaatgtgctttgattgctgggctgacagaattaggtgacaacttgtttaccttaagatcctgagcag

SEQ ID NO: 1009099 - DNA, 120 bp, Artificial Sequence
  ENSG00000260589_15 (sequence is synthesized)
tgtcttgggccattatcataagtgcctgagccagatattggtggctcagactgggtgtatcagagccagatattgatgaaaatgcatttgtacatgttctgtactccggactgaattact

SEQ ID NO: 1009100 - DNA, 120 bp, Artificial Sequence
  ENSG00000260589_16 (sequence is synthesized)
ctgttgccagcaataagccagggcacaaactgttcaagccttgattatcaatatgtgtgcactgggagtaatacatactagtattgagagcagtatccgtgcattctgacctagaatgac

SEQ ID NO: 1009101 - DNA, 120 bp, Artificial Sequence
  ENSG00000260589_17 (sequence is synthesized)
tttagctgtgggggcaggggggtctcgatgattaatgtgctgtataaataataaacattttttaaatataaaatttttaatatttaacttaaaagacaaacataaaaagtgaaatgcttt

SEQ ID NO: 1009102 - DNA, 120 bp, Artificial Sequence
  ENSG00000260589_18 (sequence is synthesized)
gtattttgtggttaacgtcccttattatccctttaaaatactgaaattctatgagtttcacttttagtattaccacagtttttaaaacgttttgaagactacatatcaatggcatattaa

SEQ ID NO: 1009103 - DNA, 120 bp, Artificial Sequence
  ENSG00000260589_19 (sequence is synthesized)
aatgtttctgtaatgttgtatgtttaataaattctgtggttgtttgttaaatgttatatccctttattctcagtttgattttgaaaattcatctacattaaaaacaaaaatactggccaa

SEQ ID NO: 1009104 - DNA, 120 bp, Artificial Sequence
  ENSG00000260588_0 (sequence is synthesized)
ttacaggcatgaaccactgcgcccggcccagatttctttttaaaaggcagttagggatggcagtcttagacaatgagctcccctagtgcccttccaatggagaagcacaacgagaatcta

SEQ ID NO: 1009105 - DNA, 120 bp, Artificial Sequence
  ENSG00000260588_1 (sequence is synthesized)
aacgagaatctaatttgtaaataccaggtcttacacggtgagtgggactaggagaaggcatcgactgcacgctggggtcagttgcctgggagcgaatccagctccactccctgctgtggc

SEQ ID NO: 1009106 - DNA, 120 bp, Artificial Sequence
  ENSG00000260588_2 (sequence is synthesized)
cttgagcaagtagcacttaacctctctgagcctctttctgcatctgaaaaatgggattggtcataaggttgcgatgggcatgtgccccctgagaaacatcagtaaggtggcaagggtggc

SEQ ID NO: 1009107 - DNA, 120 bp, Artificial Sequence
  ENSG00000260588_3 (sequence is synthesized)
gaagacgctgttcctcgggttttgttccagcgacgaaagctaagttcatcaagccacaagaagaaatctcagattttttttccccctaggaaatgtgaaaattgaaggtttcctttgaag

SEQ ID NO: 1009108 - DNA, 120 bp, Artificial Sequence
  ENSG00000260588_4 (sequence is synthesized)
ccttgtggcagaagcttctgaaagccgagtcacagatcttgcacagtgctgtcccaaacgccgctgatgtgcaaacggtggcccccgtccccgtagggaggccagaatgggacagcagag

SEQ ID NO: 1009109 - DNA, 120 bp, Artificial Sequence
  ENSG00000260588_5 (sequence is synthesized)
cggtggaatcaagatggcctagagggcgccagggggcgctctggagaggacgggcggcagatccgaatgggccccgaggagggcggcgccccgggtcacgcgcgacttctgcggaacccg

SEQ ID NO: 1009110 - DNA, 120 bp, Artificial Sequence
  ENSG00000260588_6 (sequence is synthesized)
cctttgccgcgcagttttcgggattcgcgggaagaaggcgcagcctcccaggcccaactctctccccagcactttcgcgtggaaaatcttcaggaaaatgaaatgtagctccccgtatgc

SEQ ID NO: 1009111 - DNA, 120 bp, Artificial Sequence
  ENSG00000260588_7 (sequence is synthesized)
cctctccccaaagatgtaaaggactctggagcgggcgcgaggagcagttcctgtttcattacgagcgccccctctccagcccggtcattgtagtgcgaaccagaacaatcaaattaacag

SEQ ID NO: 1009112 - DNA, 120 bp, Artificial Sequence
  ENSG00000260588_8 (sequence is synthesized)
aggcactcaggagccttttagtgctactgttccaggaactgaagaggcctcggtatgggaatccccacagagtaataaacagcacgtggttggagcgccgaggaggagactcgctccacc

SEQ ID NO: 1009113 - DNA, 120 bp, Artificial Sequence
  ENSG00000260588_9 (sequence is synthesized)
tggtggcggtgatgtcctctcggaggaggtggcaggacacagaggctggcggccacagacgggatctgtaattcagtgcccgccatcacgtacctcggcctggccctgtgcagcttggaa

SEQ ID NO: 1009114 - DNA, 120 bp, Artificial Sequence
  ENSG00000260588_10 (sequence is synthesized)
gctggagacggagaaggtggaaaatgagagttcatggagtgtcgggcctaagctgaaggaggcggcgctgcacgcacagacgaaggaaggcggcccagggcggctgcttggtgtggaggc

SEQ ID NO: 1009115 - DNA, 120 bp, Artificial Sequence
  ENSG00000260588_11 (sequence is synthesized)
cacagcccagcacgggcggagcggggcggagcgggaggatgggcgggaacggcgctgggtgttcctgcttcctcctctagctcgcagcctttcataggaaattaaacattcagcactgga

SEQ ID NO: 1009116 - DNA, 120 bp, Artificial Sequence
  ENSG00000263164_0 (sequence is synthesized)
ttcacttgggtgcaagtgggctgagtcagagaaaggagtcagcgaagggtggtgggagtggaactggttctataggtttggggtaggtagtggaaagttacagttaggggcagttttttt

SEQ ID NO: 1009117 - DNA, 120 bp, Artificial Sequence
  ENSG00000263164_1 (sequence is synthesized)
agtggaaagttacagttaggggcagtttttttgggcaggggaagaatgttacaaggtgcatagtcacaaggtgggggaagtcataaggcacgatatcacaaggtggatggattagttggg

SEQ ID NO: 1009118 - DNA, 89 bp, Artificial Sequence
  ENSG00000263164_2 (sequence is synthesized)
gaacatatcacaaggtggatggattagttagggtagggcaggaacatgtcacagtggtggatggattagttagggtagggcaggaacat

SEQ ID NO: 1009119 - DNA, 120 bp, Artificial Sequence
  ENSG00000263165_0 (sequence is synthesized)
aattttacttcattttattataaggaattgttacagaaaatgcaaatatcagtatttgaaaaatacattccattacacagactccaaagaaacaatgctgataagcgccgtggtcctcta

SEQ ID NO: 1009120 - DNA, 120 bp, Artificial Sequence
  ENSG00000263165_1 (sequence is synthesized)
tgataccatcaccccacactgagcaccaccccgaaggggctggaagccaggtgatccacccaaatgtgtgcctgcagtttctgcccagctactgcccctcctctgggatcacacagggat

SEQ ID NO: 1009121 - DNA, 120 bp, Artificial Sequence
  ENSG00000263165_2 (sequence is synthesized)
aaagagcaagtcatcaaggcgagcagtctcgactcaagactccctagctgcagaaaaccaatgttgtcagttgtaacaggttaatatattatttatgccacacaaaaaaggaatagtaca

SEQ ID NO: 1009122 - DNA, 120 bp, Artificial Sequence
  ENSG00000263165_3 (sequence is synthesized)
ggcaatgatcttccaaagaaagtctttaaggcatctgtaacttctgggaatttcagggtttttatcttgccagtcaagctctcccctttcccaagacgttccctccactccgtgcccgtg

SEQ ID NO: 1009123 - DNA, 120 bp, Artificial Sequence
  ENSG00000263167_0 (sequence is synthesized)
ccccacacacgaggaagagggaaccaggacggcttggagtgaggaccagacagggccgtggggacaaggaggcagggggcggccagcaaagcaagacctgggtcaccggggaaggaaacc

SEQ ID NO: 1009124 - DNA, 120 bp, Artificial Sequence
  ENSG00000263167_1 (sequence is synthesized)
ctctgccgcatgtggagacgagccaacgggaacacaggcaggggctcacgaggcactcaacaggccccgccctccaaagcagccagcgctcttcggaactgcaagttgccatggtgccca

SEQ ID NO: 1009125 - DNA, 120 bp, Artificial Sequence
  ENSG00000263167_2 (sequence is synthesized)
tctcccaggctccatctggtgcccgcctggcatcagtccacacccctctaacaccttcgcccatgccctcctggcccctctcctggcgggcccttccctcatgggacacactggatgagt

SEQ ID NO: 1009126 - DNA, 120 bp, Artificial Sequence
  ENSG00000260583_0 (sequence is synthesized)
ttcgtgctttttgggcagctagcactgtttgaacacctgctttttggcaacttcccactctgtggatctcgccttacccagtagaagaatgaaatttaatctcctgcccttccttgcagc

SEQ ID NO: 1009127 - DNA, 120 bp, Artificial Sequence
  ENSG00000260583_1 (sequence is synthesized)
tgtggctcagacaggtagcatgggctcaccaattagacataactgtgtgaaatctggaagcaagtactttgcagacaagagtagtatgagatacattttgttgaacggagcagtgatgtg

SEQ ID NO: 1009128 - DNA, 120 bp, Artificial Sequence
  ENSG00000260583_2 (sequence is synthesized)
cagctgctccaaggtataaaaatgggcatttttgggggctccgtagtcctgacctccacgcctgtgacttgtgagccattttattctgtttgtttaaactagctagtgtagatcctgttg

SEQ ID NO: 1009129 - DNA, 120 bp, Artificial Sequence
  ENSG00000260583_3 (sequence is synthesized)
tttgtaaccaagagtgttgacatacagccactatttaattgtaaccactgtcaacctttttccttatttccttcagatccttttgtgtttaaataaaggaaaagctgcacatccattgaa

SEQ ID NO: 1009130 - DNA, 120 bp, Artificial Sequence
  ENSG00000260581_0 (sequence is synthesized)
gggcaggagctggagaagctcgacatcctgcagtgggtgagacagttgtgcacagtgaagaattgtctcacctcctgcatggctttccaataaacagatgatctgagcttggaacgaact

SEQ ID NO: 1009131 - DNA, 120 bp, Artificial Sequence
  ENSG00000260581_1 (sequence is synthesized)
cccctttacaaacatcaacaaagtggtttggagtagtatgaaatatttgtattcacttaaagtggaaagacaatctgcacacctggaggagatatttgcaacatttacaactggcaaagg

SEQ ID NO: 1009132 - DNA, 120 bp, Artificial Sequence
  ENSG00000260581_2 (sequence is synthesized)
tttattaccaagaatatataaagaagtcttataaatcaacaagaaagaagaaaaacaacagaaagaaatggacaaaagaaaaagcattttataaaagaagaaatgctcatggccagcaaa

SEQ ID NO: 1009133 - DNA, 120 bp, Artificial Sequence
  ENSG00000260581_3 (sequence is synthesized)
catatggagatgttcaaactcatgtgaaatgtaaatcaagacccaataagataagcttttatgtccactaaaatggcaaaatgttaatagctagacaatccaagtattggagaacataca

SEQ ID NO: 1009134 - DNA, 120 bp, Artificial Sequence
  ENSG00000260581_4 (sequence is synthesized)
gatccatgggatctcttacatatcgcttataagggtacgcattaggacataggacactcacttagaaaaagtgtggcattatcttgcaaaatcaaacactcacataggctgctgtgcagg

SEQ ID NO: 1009135 - DNA, 120 bp, Artificial Sequence
  ENSG00000260581_5 (sequence is synthesized)
tcctgagtctgtttgccctcagatccactctttgctatgcccttatgtcctcagttttccagcaggatctcggcagccatgtcatcttgcttccagttgggctcagttaataaaagagag

SEQ ID NO: 1009136 - DNA, 120 bp, Artificial Sequence
  ENSG00000260581_6 (sequence is synthesized)
aaggtggaaagaagggagaagccaaggtgtttctcaccagcaccctccccttctcctctcaggtaacatcccctgtggtggccacagctctccgatgggtccagttcccacaggaaagcc

SEQ ID NO: 1009137 - DNA, 120 bp, Artificial Sequence
  ENSG00000260581_7 (sequence is synthesized)
agccatgattctaacttctaccaggtgaccctggccctgggctctggtgacactaaccttttgtttctctagtcctggggaggggtagtaacagcttcctgctattattaatttatggat

SEQ ID NO: 1009138 - DNA, 120 bp, Artificial Sequence
  ENSG00000260581_8 (sequence is synthesized)
tgcctcattgcctcctgtgaggcttctcagctattgattaccatactactcagcaataaaaaggaaaaaactattgatacatgcaacaactttgtcggaccacaagagaattttaccaac

SEQ ID NO: 1009139 - DNA, 120 bp, Artificial Sequence
  ENSG00000260581_9 (sequence is synthesized)
taaaaaagccagtctcacattgttacatactatatgattccacttacataaccttctagaaatgacaaaattattgaggtgaagaacagattagtggttgccaagggttaaagacagggt

SEQ ID NO: 1009140 - DNA, 120 bp, Artificial Sequence
  ENSG00000260581_10 (sequence is synthesized)
tggggttggagaaagaaatcagtgtacctaaaaagaagcagccagagggatctttgtggtgacgggacagttctgtatcttgattgtggtggtggttatacaaatctacgtgtaataaag

SEQ ID NO: 1009141 - DNA, 120 bp, Artificial Sequence
  ENSG00000260581_11 (sequence is synthesized)
ttttatgtgtgcatagaactatgtacatactcaaacaaatgcatgtaaccctggtgaaatctgaataaggtctgtggattgtgccaataccagtgacctggttttgatactgtattatag

SEQ ID NO: 1009142 - DNA, 120 bp, Artificial Sequence
  ENSG00000260581_12 (sequence is synthesized)
ctatctaagacattattatcaggagaaaatgggggaaaggtacatgtacttttctgtactatttttgcaacttctcgtgaatctgttactatttcaaaattaaaagtatctgaaaatcca

SEQ ID NO: 1009143 - DNA, 64 bp, Artificial Sequence
  ENSG00000260580_0 (sequence is synthesized)
taaacttgcatgcggttaaggcactggattgtgagggctatttgttactgcaaagtaatacaac

SEQ ID NO: 1009144 - DNA, 120 bp, Artificial Sequence
  ENSG00000260580_1 (sequence is synthesized)
cagggcagcgcacagtgcatcgaccaccctttcctggttccacagacgctgggcatagagccagtcctctaagctttggcctccaccaagagttcaggcttttccagcacaaaagccaga

SEQ ID NO: 1009145 - DNA, 120 bp, Artificial Sequence
  ENSG00000260580_2 (sequence is synthesized)
gactagcaggttagttttggttgccaccctgcagaattaagcacagtactaaagtgggagttcgcttgctttctctctctctctctctcctcccctccttaattttgagaagtaaggtgg

SEQ ID NO: 1009146 - DNA, 120 bp, Artificial Sequence
  ENSG00000260580_3 (sequence is synthesized)
aggagggaagagaaataaagagagaaccaatggctaatagcttataaatattatcctgccacatgtgcagaatgctatggaaaggttcagaaggaatgagcacatcccatagaaaaatca

SEQ ID NO: 1009147 - DNA, 120 bp, Artificial Sequence
  ENSG00000260586_0 (sequence is synthesized)
gagtcccatgtctcccaggaataggtttgtctcagtacccctgctgggttccgctattgcctctggaatcagcccatgagaagtgcagtctggtgcccacacagctacagtgatggattt

SEQ ID NO: 1009148 - DNA, 120 bp, Artificial Sequence
  ENSG00000260586_1 (sequence is synthesized)
cagagcacagcagctggagccgttggtcaatttcattgcctgtagttggaggtctgcgaagagcattgattctcatgggtaccacaaatacctacactgccagacggctataaggataag

SEQ ID NO: 1009149 - DNA, 120 bp, Artificial Sequence
  ENSG00000260586_2 (sequence is synthesized)
agatgaatgtatggtcatccctgggaatctcagttccaggttgtcttttcggctcctcaatacccaacccttttgtagagcctcctcctccagaccagtgcttttcaaactttaatgtgc

SEQ ID NO: 1009150 - DNA, 120 bp, Artificial Sequence
  ENSG00000260586_3 (sequence is synthesized)
gttgttagaatgcaggttctgattcagtaggtccacatgaacctgcgattctgcattttaatgaacctcaattgatgctgttgttgctgctctgaggaccatgccaacaggccccgaatg

SEQ ID NO: 1009151 - DNA, 120 bp, Artificial Sequence
  ENSG00000260586_4 (sequence is synthesized)
tctgccatatggaagctcagaattgtcaacactccctctgcttttcctttgtcttccctcagaacacctgctcaccatgacctgtacatccaggaacatgctgaatgttcatttggaaag

SEQ ID NO: 1009152 - DNA, 120 bp, Artificial Sequence
  ENSG00000260586_5 (sequence is synthesized)
actgaagcttccaggaccgtcacttctggtgtcactattacgtgcagccctcagccaggttaaggtttgatgatggatccacaaagcaaacttctggctgaagacacatggccggagttt

SEQ ID NO: 1009153 - DNA, 120 bp, Artificial Sequence
  ENSG00000260586_6 (sequence is synthesized)
atccaaagccctgacggttgccagccattcttcctgagaagcagacatgtttgtttcccttgccaacaactttgtatggagataaattacaggatgtttcccacggtcatggccccataa

SEQ ID NO: 1009154 - DNA, 120 bp, Artificial Sequence
  ENSG00000260586_7 (sequence is synthesized)
gtagaagaaagaaatgggggcttgtgctgggcttgcactcttggtcctctgcctgcaggcacttggagatcctgaagtcagaggacagcctgaaaacaggagagaagaaacaacaggggt

SEQ ID NO: 1009155 - DNA, 120 bp, Artificial Sequence
  ENSG00000260586_8 (sequence is synthesized)
gcagtctcagcatgggagtccctcccttctctgacccccaccttgagctgatcgccatgcaggcagccgtgttggaggggatcccacctcagccatggacggtgcctgaagcggccctcc

SEQ ID NO: 1009156 - DNA, 120 bp, Artificial Sequence
  ENSG00000260585_0 (sequence is synthesized)
atttttatgggttgtcctacgtgttcatgcatattatttttcacatgaacaactccacaatagttggagaaaaaaaatcttcctggtattttattagagttgcattaaatttatgcataa

SEQ ID NO: 1009157 - DNA, 120 bp, Artificial Sequence
  ENSG00000260585_1 (sequence is synthesized)
actaagagataagagagacataacatcttgttgacattgacacatcataatcaagaacaagcaatgtcatttcatttttgcacatcttcctttttgtcttccaggagatgctaatcattt

SEQ ID NO: 1009158 - DNA, 120 bp, Artificial Sequence
  ENSG00000260585_2 (sequence is synthesized)
tccttatatagtttttaaatcgtcttcccttagtattacgtagattgtcattattttaaaggctaattctgacagcttcattatttggcatctttgtattgtgcatattttttcttgatt

SEQ ID NO: 1009159 - DNA, 120 bp, Artificial Sequence
  ENSG00000260585_3 (sequence is synthesized)
ttagatcatttgatcttgagtcctagtgtgttggttaattattttttacattcaatgtaagaagttactatgtgtgataaaatataaagaaagataacttgaagcttttgcatctgactt

SEQ ID NO: 1009160 - DNA, 120 bp, Artificial Sequence
  ENSG00000260585_4 (sequence is synthesized)
ataatctagggagagatccctttaattcagacacagtttgggcttattagaggcttaatttcagtctttcaggtggctggtccatctttggtgcattcctacaatactgtagattacaca

SEQ ID NO: 1009161 - DNA, 120 bp, Artificial Sequence
  ENSG00000260585_5 (sequence is synthesized)
cctgcaaagtagattattttactaaggccaaacatcttgactgactagtcctaaactccaatgtctgtccgtctcctttgcttcataagaatgctgaaagctctgctcatattcttagct

SEQ ID NO: 1009162 - DNA, 120 bp, Artificial Sequence
  ENSG00000260585_6 (sequence is synthesized)
ttctggccatcacttgtgaacttacaaatgcctatggaggaataattaatagtgccaaatgttggactcatttctttgtgtttctcttttctctgggattttgagccttcagattctaac

SEQ ID NO: 1009163 - DNA, 120 bp, Artificial Sequence
  ENSG00000260585_7 (sequence is synthesized)
tttatttatgactttcagttgccttcaaaaagatttttttcaaaacaccattgctttttgaaatacgtgtagtttcacaggatgttaccaaaatagtacagagaggtacagtatgccctt

SEQ ID NO: 1009164 - DNA, 120 bp, Artificial Sequence
  ENSG00000260585_8 (sequence is synthesized)
cacccaattttctgcaacatctacattttacatagttaaatgacaaaatcaaaatcaggatatgaacgttggtaaaagacgtgtgcatagttcttataccattgtgtccagtgtgtatat

SEQ ID NO: 1009165 - DNA, 120 bp, Artificial Sequence
  ENSG00000260585_9 (sequence is synthesized)
gcatgaaataccattgcaatcaaaatacagagttccatattttaaagaaactaccttaagtaccttatttggcttttccattggttcttagaagtaaggttgatctaatcccagctgtat

SEQ ID NO: 1009166 - DNA, 120 bp, Artificial Sequence
  ENSG00000260585_10 (sequence is synthesized)
catcatgggccaaagcagatcttctaaaattagctttataatttttattttttgtattttatattaggaaattttctgacatttttctaactctgagatgatgtatattgtgtaaaagtt

SEQ ID NO: 1009167 - DNA, 120 bp, Artificial Sequence
  ENSG00000260585_11 (sequence is synthesized)
taagatggagtttgaataattctcttttgcttccctatagtgcctagtggggagccggataagtagtaggaaggaaaaacataattatttaatgatatttaacagtaagcttctttctgt

SEQ ID NO: 1009168 - DNA, 120 bp, Artificial Sequence
  ENSG00000260585_12 (sequence is synthesized)
agtcatagctacaaaaaatgtctttatggcactgcatgtaagctgtaatcatcatttctagtttacctacacagcagaaatgtagtttaacttactgtgttggtagattcaagccaatga

SEQ ID NO: 1009169 - DNA, 120 bp, Artificial Sequence
  ENSG00000260585_13 (sequence is synthesized)
atcatgattggcttgttcttcaacaattttatatctccatatacacacacctaaagggtttcaaaatgtttctaaaaccaccaaatttaagtcacattgtggactaagctcctgtatcac

SEQ ID NO: 1009170 - DNA, 120 bp, Artificial Sequence
  ENSG00000260585_14 (sequence is synthesized)
tgtggaaaaacttaaatttcatcatgtgagcatttactggtgaatacatattagtggctactcagcagagcagtgctgcttattgaaacatactttaggaaacacatggtgttataagtg

SEQ ID NO: 1009171 - DNA, 120 bp, Artificial Sequence
  ENSG00000260585_15 (sequence is synthesized)
cacataatggttaaaatgtgaaaagtaatatttcaggtggaaaatgtcaccaatagccatgtggttagtccagggaaccagtttgttagaattgtctagctataagaatatttattagag

SEQ ID NO: 1009172 - DNA, 120 bp, Artificial Sequence
  ENSG00000260585_16 (sequence is synthesized)
tttaattccatgactttgtataatggaagggaagatagaaggagggggaaggcagaaagaaattagaaaaagcacagggtaagaaaatcagttcaaaggcatattatataatgtaccaag

SEQ ID NO: 1009173 - DNA, 120 bp, Artificial Sequence
  ENSG00000260585_17 (sequence is synthesized)
tcttgggctttcacatatttttaaatgggattatcaaataaagagaaatctggacttagataagaagaagctttattcagaagaaagactattgcaataggaataatactctgatgttag

SEQ ID NO: 1009174 - DNA, 120 bp, Artificial Sequence
  ENSG00000260585_18 (sequence is synthesized)
aaatctgcaagtgtcccaaaagcaaataattaatagaaaaggattttattttatagagaggggtaagcaataattatggggaagtcaggcaaatgagaggaaataatcagaggggtctga

SEQ ID NO: 1009175 - DNA, 120 bp, Artificial Sequence
  ENSG00000260585_19 (sequence is synthesized)
cagggagtgtgttctactgtagtcaactgctctcgggataatctgattgattaagggaatattttcagccttttagagttttctcaggctgagagcaagcagagttcaggagcctgtaag

SEQ ID NO: 1009176 - DNA, 120 bp, Artificial Sequence
  ENSG00000260585_20 (sequence is synthesized)
cagccaacagtacacaaggatgctctgttactaaaggctttctagtggacaataaatggcctcttgttagttatgctatggaagaaagttatttatttttaatatagtgataattttacc

SEQ ID NO: 1009177 - DNA, 120 bp, Artificial Sequence
  ENSG00000260585_21 (sequence is synthesized)
taggtgacttcaaaaatttattctaacttgaagaacaatttgttttatgattcagtaagggttagtatttctacaaaaaaagacaaagagtttgccttaatgtacattcccggacaataa

SEQ ID NO: 1009178 - DNA, 120 bp, Artificial Sequence
  ENSG00000260585_22 (sequence is synthesized)
gatttgctccatcatctaatcattttatatagcacctttcaataaaatttagtaaaattctttaaaagcaagctttgcaaccatcattttatagattttgtaaatgacttattcagagtt

SEQ ID NO: 1009179 - DNA, 120 bp, Artificial Sequence
  ENSG00000260585_23 (sequence is synthesized)
aggcatttcagaatatttattatttcagactgaacagaattgctgtctgtaggatatatacttcttccctaggaatgcaataataatagtgtggaaaagatgtgcagtagtaacatttag

SEQ ID NO: 1009180 - DNA, 120 bp, Artificial Sequence
  ENSG00000260585_24 (sequence is synthesized)
ataggtatcatgggaaaagtgaagcttaaaatttacccagtgaagaaaaaaagagaaaaggttttggttaaatcttatcagactcaccactagtccatcaattcagtcagcttgggagtg

SEQ ID NO: 1009181 - DNA, 120 bp, Artificial Sequence
  ENSG00000260585_25 (sequence is synthesized)
atgttacttttcaagctctcatgaaaagacttcctgatttgtaaaggaggcaaatttatttatgtaaattgtctatttggcagtacttctgcttcttttagtgtttagtcccacctctga

SEQ ID NO: 1009182 - DNA, 120 bp, Artificial Sequence
  ENSG00000260585_26 (sequence is synthesized)
taagacaggtctaatttcatttccattaaaatgcaatgaaagcacatttatgaatttaataatttcttgcctgagtttgataggagcattaaagttgttagctatggactgttgttaata

SEQ ID NO: 1009183 - DNA, 120 bp, Artificial Sequence
  ENSG00000260585_27 (sequence is synthesized)
aatattgcttttttaatttaattaaagtagactaagagttactggccaataatttttttctatagattatgaaaaaaaaaaaaagaattggtaaaagaaatagcaatttgcccaagggtt

SEQ ID NO: 1009184 - DNA, 120 bp, Artificial Sequence
  ENSG00000260585_28 (sequence is synthesized)
tgtttaattggacattcctgcttatctcattgtcaaattatttttaaacctaagcctttctatataatttaaatgttgctttactttgttttgcatagcttattcatcttcctaaaagga

SEQ ID NO: 1009185 - DNA, 120 bp, Artificial Sequence
  ENSG00000260585_29 (sequence is synthesized)
acgtgaagaaaatatgaatttaggccttgtaacacagcttggaaagagaaaactgacattaagaattttattttaatttttctttcagaagtctttcttaaacactttttttgctcataa

SEQ ID NO: 1009186 - DNA, 120 bp, Artificial Sequence
  ENSG00000260585_30 (sequence is synthesized)
ttttttacacttttatatgaactgcctatgtaaatatcaattaatatgaactgcctatgtaaatatcaatttatatgaactgcctatgtaaatatcaatgtttctgataacttagtatgc

SEQ ID NO: 1009187 - DNA, 120 bp, Artificial Sequence
  ENSG00000260585_31 (sequence is synthesized)
ctccagggtccatagccttcctgatgaagtagtatttagctgaagcttttttgcataatctgcctagtaaacaactatttgttcttcaacaaaaaaaaggaaaatatatgcgaaaattag

SEQ ID NO: 1009188 - DNA, 120 bp, Artificial Sequence
  ENSG00000260585_32 (sequence is synthesized)
aaaaaaaataaagaaatacaaaaggacttaaagattatgagaatcactggtaacagaactgattttgatttcctgttcctgcctaaattaagtttctgactcatcgttgttctgcaaaaa

SEQ ID NO: 1009189 - DNA, 120 bp, Artificial Sequence
  ENSG00000260585_33 (sequence is synthesized)
atgaatttacctttttttatcacttaaaatcacgattaaattgatagatcagatgagataaacaagttttgtggtataaagaggtgtatcttttggggcaaaatactgagaaaatttata

SEQ ID NO: 1009190 - DNA, 120 bp, Artificial Sequence
  ENSG00000260585_34 (sequence is synthesized)
tacaaaccagaaacagtgggttgcatgaatttaaagtgctaaaacaatatgtctgcaacttagagtttcttaggcataattacttaaaatatataaatcctgaatttacagtttcttaat

SEQ ID NO: 1009191 - DNA, 120 bp, Artificial Sequence
  ENSG00000260585_35 (sequence is synthesized)
ttccttgacagaatactgccacacctcttagtcaagtctagcacataccatatttaatggtcaacaatgaagtgtggattgcatgtaacaaacctgtacatgtaccccttgaatccaaat

SEQ ID NO: 1009192 - DNA, 120 bp, Artificial Sequence
  ENSG00000260585_36 (sequence is synthesized)
aatcgagttaaaaaaatacaattaaaaataatacaactatttacatgacatttacatctaataggtattataagtaattctagagatgttttaaagtaaagtagtgtgtacaggaggatg

SEQ ID NO: 1009193 - DNA, 120 bp, Artificial Sequence
  ENSG00000260585_37 (sequence is synthesized)
ggaggatgtggctcagttatgtgaaattaaataattcagatttaaagttgttggaatttaaattattctgaaccttcagaggaatgtggcaatgtagcctgagtcacttggcatgcagct

SEQ ID NO: 1009194 - DNA, 120 bp, Artificial Sequence
  ENSG00000260585_38 (sequence is synthesized)
gcaacttctgtaaataattaggaagaccaagtggcccaatcaaatcattgtaactggtcttgtatggaaaatataatcctgctaaacatttctgtctgtgtataactgataaatacctta

SEQ ID NO: 1009195 - DNA, 120 bp, Artificial Sequence
  ENSG00000260585_39 (sequence is synthesized)
acctctctaacttgtaacactgacctcattcatttggagtctgtgtttcctgggtgtctgtcctcaagctttgcaactcaaataaataagctatatgcataaaataaaaaaaaataaagg

SEQ ID NO: 1009196 - DNA, 120 bp, Artificial Sequence
  ENSG00000260585_40 (sequence is synthesized)
aatatggatgcgaatgtaaaatatcatctggtatcaaacaattctgaatgcctaaatatgactggaacttcttccagtttaattgaaatattttggatctattaataaatgtgtaaactt

SEQ ID NO: 1009197 - DNA, 64 bp, Artificial Sequence
  ENSG00000266538_0 (sequence is synthesized)
tggcaggttgaggccttgattgtgtcactgcactcctacttgggtgacacagtgagacaccctc

SEQ ID NO: 1009198 - DNA, 120 bp, Artificial Sequence
  ENSG00000266535_0 (sequence is synthesized)
agagtcaggcctgcaaccctccaccatcacccaatgcccggtccctgtgcccagctcacctgtctctccccagatgggcaggtactcatcctgctgaatgtccagcatgatctccagccc

SEQ ID NO: 1009199 - DNA, 120 bp, Artificial Sequence
  ENSG00000266535_1 (sequence is synthesized)
gttgcctgtcccccccttgaccgtggtgagcagaggtttgccatcctcgcctgagttaaacatgtaacacttcccatattttgtaaacacctgaaggagagaagagagagagagagagaa

SEQ ID NO: 1009200 - DNA, 120 bp, Artificial Sequence
  ENSG00000266535_2 (sequence is synthesized)
tgactgcatcactctggtttcctagctggacttcaggattccagatgaccttctccagcccatcctctaagctcctgtcacaccaagggtgtctaacagctgcgtgcagggtaaacagac

SEQ ID NO: 1009201 - DNA, 120 bp, Artificial Sequence
  ENSG00000266535_3 (sequence is synthesized)
agatgcatgagctatgtgtgaggacaggtgcttcatgctcctgggagtcctgtgaggctggaggaggtcattctctctggggcggcctgtcctctccaagaggaccatgagtggccattg

SEQ ID NO: 1009202 - DNA, 120 bp, Artificial Sequence
  ENSG00000266357_0 (sequence is synthesized)
ggtagcaacccgtttggttatctttctgtgctgtggaaggtttgttctttcactctgcactattttgcaataaatattgctattgctcactttgggtttatattgcctttatgagctgta

SEQ ID NO: 1009203 - DNA, 76 bp, Artificial Sequence
  ENSG00000266357_1 (sequence is synthesized)
tattgctcactttgggtttatatactcttgaagcttagcgagaccactaacccaccagaaggaagaaactccggac

SEQ ID NO: 1009204 - DNA, 120 bp, Artificial Sequence
  ENSG00000266357_2 (sequence is synthesized)
acggcttcattcttgagaaagacaacgaggagggagcagctagaggggtggaaatgggatcacgtgaccttgcgagaagcagggagagagaacactgcgtctgctcccttttagaacaga

SEQ ID NO: 1009205 - DNA, 120 bp, Artificial Sequence
  ENSG00000266357_3 (sequence is synthesized)
ccacgttctagaattgtagaatcctggcaagaaaaaggcagctcgtccagccttctgtccagtggaacagccccagccagagcaactgacagatgctcaatatagggaatccctaacaga

SEQ ID NO: 1009206 - DNA, 120 bp, Artificial Sequence
  ENSG00000266357_4 (sequence is synthesized)
ggacttccaggatatcctagggacagcagagcctcaagatccagggaggatcctggatacctgagtcaccacttggaggggaatctcctggaagaactgattgatcagcaacatctacat

SEQ ID NO: 1009207 - DNA, 120 bp, Artificial Sequence
  ENSG00000266357_5 (sequence is synthesized)
gacaggatggcacagagctttaagcaacagctctggcatctgacttccgtgtttgcatctggctttgagtgtgactttggacaagttccttagctggccagatactcttgtcctcatcca

SEQ ID NO: 1009208 - DNA, 120 bp, Artificial Sequence
  ENSG00000266357_6 (sequence is synthesized)
taagatggagcaacaacgaagcctttctcataggttattgtgaggattgaatgaattagtatatgccaagcatttgaagcagtgcctgacatgtagtagatgctgagtaacactggggat

SEQ ID NO: 1009209 - DNA, 120 bp, Artificial Sequence
  ENSG00000266357_7 (sequence is synthesized)
ctgccttttctttttcctctatgtgactggcagccttagccagaccacatcagctgagatgattttctctgtaagttaccaggatcacctagatctggccaaggacttgcccctgtaagg

SEQ ID NO: 1009210 - DNA, 120 bp, Artificial Sequence
  ENSG00000266357_8 (sequence is synthesized)
aaatttggaataagcaaaaaagatcactaggtgtcgccgatggaaaactaggttgttttgagcatacctttgcatgttatctgattttagcctttcagggtctttgagctattttatggc

SEQ ID NO: 1009211 - DNA, 120 bp, Artificial Sequence
  ENSG00000266357_9 (sequence is synthesized)
tctgtaggttgtacataactgatagcaatgcaaaataattcttgtctatagacatgcaaataaatcctgtccagcggttcaattgactaccctcttccctaaggaaaaagccagtttcag

SEQ ID NO: 1009212 - DNA, 120 bp, Artificial Sequence
  ENSG00000266357_10 (sequence is synthesized)
tctatttgtaaattcatttccactttccttactccctataaatttctgcttttcagatttctcctttgttaacgtctgcctggttccctcattaagtcaaataaaatctttaacacgtta

SEQ ID NO: 1009213 - DNA, 120 bp, Artificial Sequence
  ENSG00000266357_11 (sequence is synthesized)
aggcctcaggaagcttttactcatggtggaaggcaaagttggagaaggcatgtctcatggtgagaggggaacgagagagaggggaggagttccttaaacaaccagctctcctgtgaacta

SEQ ID NO: 1009214 - DNA, 120 bp, Artificial Sequence
  ENSG00000266357_12 (sequence is synthesized)
gtagaagaagaactcactcattaccacagagagggcaccaagccgttcaggaggcatctgcccccaggacccaaacaccttccattaggctccacctccaacattgtggatcacatttca

SEQ ID NO: 1009215 - DNA, 120 bp, Artificial Sequence
  ENSG00000266357_13 (sequence is synthesized)
ccatgagatttggagaggacaaacatccaaaccatgtcagcaaacccctcctctcccttcccaccctcccctggccttaccccacctgagtcaggcacggtgagcaggaccaaagcccaa

SEQ ID NO: 1009216 - DNA, 120 bp, Artificial Sequence
  ENSG00000266357_14 (sequence is synthesized)
gcagtcacaacaatgcgggaatgaacgttattatgcgctgtgacgatatttgatgaattcatatgcgcctaggggagcagactaagtaggtgaataaagtgagactattctctgtgacaa

SEQ ID NO: 1009217 - DNA, 120 bp, Artificial Sequence
  ENSG00000266357_15 (sequence is synthesized)
gatgagctgtaattgcaggcgttttccatggttattttttcccctggaaagataaagtgatacctgtaatttcccaaaagatacgctccaggctcccatccccaagcagaggctgagcgg

SEQ ID NO: 1009218 - DNA, 120 bp, Artificial Sequence
  ENSG00000266357_16 (sequence is synthesized)
ccttcattacccgagaaacaggagctttccttgcaccttcctgagacccggcccagctcagcagtgctcacaccagctccttcacggtttcctgtgacaactgcacatcaagactgtctc

SEQ ID NO: 1009219 - DNA, 120 bp, Artificial Sequence
  ENSG00000258776_0 (sequence is synthesized)
gttatgaacccaggtgacttgactcaagagttacaaccccactaatgagaagtgatttttggccatgttgaagtcatgaccggtttccctgggaagtcaacagaagtttggcaggtgcgt

SEQ ID NO: 1009220 - DNA, 120 bp, Artificial Sequence
  ENSG00000258776_1 (sequence is synthesized)
gagctctgcagggcagagagcaagaggagaggtgagctcagaaggtaatcgtaaaatttggacacctctctgcagctttaatgactcaaacctaaaatagtactcagggaaagacagagt

SEQ ID NO: 1009221 - DNA, 120 bp, Artificial Sequence
  ENSG00000258776_2 (sequence is synthesized)
aaacaggaattgtacacaaagcaggactcacataagagtgaagggatgtcctaccaatgcccacgatgacccactaacatccagatttctacagtggagttccctggcctttacatatca

SEQ ID NO: 1009222 - DNA, 120 bp, Artificial Sequence
  ENSG00000258776_3 (sequence is synthesized)
gtgggcaagtccatgagaaacaatgtggcaggtggactaaggaaaaatggaagcatgatgtggattttcttttctttgcatctctttgttttgaacatactgctctttatcaaaatgcct

SEQ ID NO: 1009223 - DNA, 120 bp, Artificial Sequence
  ENSG00000258776_4 (sequence is synthesized)
ttcttcaatttcctcagcccagcagtttgaatatttgcatgaagtaggcacatatcactacatatgaaccatgaaatgtatttgaaaataaatgttttaattaaaattgacatttctgag

SEQ ID NO: 1009224 - DNA, 120 bp, Artificial Sequence
  ENSG00000258776_5 (sequence is synthesized)
atagagtcggagcttcaggcttcagggagggacaattgccatcaaaagtcgtcatgcccgggagcaggtgttgctcagaattgtgaagacgttatgaacccaggtgacttgactcaagag

SEQ ID NO: 1009225 - DNA, 120 bp, Artificial Sequence
  ENSG00000258776_6 (sequence is synthesized)
ttacaaccccactaatgagaagcaatctgatggagggcaattttttaatctttcacatcatcactgtggacagtaaatgcaattctgtgcctacattttgttaagaaaggagccatctac

SEQ ID NO: 1009226 - DNA, 120 bp, Artificial Sequence
  ENSG00000258776_7 (sequence is synthesized)
agatccaggggaagactggcagcatccaaacagatgatgcatcatcttaaaacacgattgcttgccatccactgtggctctttttgtcgtgtataaagagctatatgctttcaggagaag

SEQ ID NO: 1009227 - DNA, 120 bp, Artificial Sequence
  ENSG00000258776_8 (sequence is synthesized)
aaacagcctcatggaaaatcaacggatccgcttcccagacaagaccattggaatgcctggagctccatgtaattttctgtgtcctgacaacctccccaacctgagtttccttcaagccca

SEQ ID NO: 1009228 - DNA, 120 bp, Artificial Sequence
  ENSG00000258776_9 (sequence is synthesized)
ccacctgagccatctgagcaagttgagctaggctgaagctccaatgctgtcacactttgtattgtatatagaacaagaatagatggacttccccttatgtgggtggtactagtcatcttt

SEQ ID NO: 1009229 - DNA, 120 bp, Artificial Sequence
  ENSG00000258776_10 (sequence is synthesized)
aattcttatgggtgagggaagttttcctttagtagaaacataaacacatagcaatgcccctttccccactcaggagatgtgcattcacttttaaaatagctgctgttatttagtattcat

SEQ ID NO: 1009230 - DNA, 120 bp, Artificial Sequence
  ENSG00000258776_11 (sequence is synthesized)
aacaacggggtgaaataggccttacttgcccccattttatagctgaggaaactgagtttcagagaggtcaagtaattcactcaggatcgtagagctgataaatgagagccaggttttaag

SEQ ID NO: 1009231 - DNA, 120 bp, Artificial Sequence
  ENSG00000258776_12 (sequence is synthesized)
cctgcctgtgtctctctaatccaaaatatatgtgctctccattgtacttcctatgccttagagagactgattagtgaaagggaaactaggaaatgcttgagtatttccagtcctaataat

SEQ ID NO: 1009232 - DNA, 120 bp, Artificial Sequence
  ENSG00000258776_13 (sequence is synthesized)
attcagttcaaattccaggaagggcagtgattttcaaccttcttaacttttctgttttaaatctgcaaaagaaaacctgccacagaccagaaaggagaaagttccccctaaattgtgtca

SEQ ID NO: 1009233 - DNA, 120 bp, Artificial Sequence
  ENSG00000258776_14 (sequence is synthesized)
ctcagaccccagcaatatctctccctggcactgcgcgcggctgatcaaagcgagaagctttgcgaactccccagagggtgcacgcctcccatctaacctttggtgaagggaagtgacggc

SEQ ID NO: 1009234 - DNA, 120 bp, Artificial Sequence
  ENSG00000258776_15 (sequence is synthesized)
aatagtgatgggggcgcccctttccccggctgtctgagccttagctgggagactgtgctggggaagaggcaggggcagagccagttccgaggggtgtaggaccccaagcaagaggggcct

SEQ ID NO: 1009235 - DNA, 120 bp, Artificial Sequence
  ENSG00000250126_0 (sequence is synthesized)
aaagtcatacttcaatcctccagaatagattacttctgatttgaaaggatacatttcttagggaaatcagtgcattggttacatgaaaaccgtgtgacaaccttggaagtctgaaagagc

SEQ ID NO: 1009236 - DNA, 120 bp, Artificial Sequence
  ENSG00000250126_1 (sequence is synthesized)
agagtctcaaggtgagaagaaacatcagaagcagttgagagaccaggacgtgggtcctcaaaggatgaacagaagttcttttggataacattttaaaatgtttcctccagagttatctgc

SEQ ID NO: 1009237 - DNA, 120 bp, Artificial Sequence
  ENSG00000250126_2 (sequence is synthesized)
ctcattaacaatggtttgagtctcaagagtctctcttcgattttacaaacatgatttgttgctctgctataaatgcatgctgctctagtccttcaataaacccacaacatgttttcacca

SEQ ID NO: 1009238 - DNA, 120 bp, Artificial Sequence
  ENSG00000250127_0 (sequence is synthesized)
ctcccaaagtgctgggattacaggatgtcaatgtgcaggagaacttgcaagaggaagtggctaacagagacaggagtcagctgggtcagagaatagaaggtgggactggaggtgcattct

SEQ ID NO: 1009239 - DNA, 120 bp, Artificial Sequence
  ENSG00000250127_1 (sequence is synthesized)
gagaatagaaggtgggactggaggtgcattctgctgagaggtgctcaagtgaggaaagctgacaagaactaggtgagcctggactaaaaagaatcctgtagggtggagccaaggtggccg

SEQ ID NO: 1009240 - DNA, 120 bp, Artificial Sequence
  ENSG00000250124_0 (sequence is synthesized)
gagtaaatttatttgctttgtattctgaaataattttgatgttgagtggaaatatgaaattttaatcggtatttccaaagaaaacaaatagaattgtgttgaggaaaatttcccccaaag

SEQ ID NO: 1009241 - DNA, 120 bp, Artificial Sequence
  ENSG00000250124_1 (sequence is synthesized)
tttgtgctcaacattttgtacatagacacaaaattatgagtaaaaattatggagtttttgcttaatatgtactgaatagaaagaattcactgtaaatgcagggcactggaatgaatttcc

SEQ ID NO: 1009242 - DNA, 120 bp, Artificial Sequence
  ENSG00000250124_2 (sequence is synthesized)
tactgagtgcttattatatgaaactctcagattctaaggaaaaagagacactcaatagagaagaaattcttctttttatagggtttatggtgaaaatctgaatgtcttaaatgaagatta

SEQ ID NO: 1009243 - DNA, 120 bp, Artificial Sequence
  ENSG00000250124_3 (sequence is synthesized)
agtcaaatataaagatacagctaatcagccagcatggtggtgcacatctgtagtcccagttacttgggaggggctgaggtgggacaatcgcttgagcccgggaagttgaggctgcagtca

SEQ ID NO: 1009244 - DNA, 90 bp, Artificial Sequence
  ENSG00000250124_4 (sequence is synthesized)
tgacaagagtaagcccctgtctccaaaaaataaataatcaaatcaaatgaagccaaatcaaataaagatgtagctaagaggaagagcttt

SEQ ID NO: 1009245 - DNA, 120 bp, Artificial Sequence
  ENSG00000250125_0 (sequence is synthesized)
gtcctcatttctcccagcatatgatgttctacagtgcttcagcacagtgactcagctggggactagggtataaaacccagagcaaagtgcttttggagtccctcagcagcagagttacat

SEQ ID NO: 1009246 - DNA, 120 bp, Artificial Sequence
  ENSG00000250125_1 (sequence is synthesized)
ggagcacatggtgatgagactccatctgccctgggcagttgtactgaaccttggagaactaactcactgtagacccaaggcttctgtgtatacctgctgcctatgtatgacttcgcctga

SEQ ID NO: 1009247 - DNA, 120 bp, Artificial Sequence
  ENSG00000250125_2 (sequence is synthesized)
cttatgagagtgttctttctgaccataccatacctaagaacctttgctatgttccttttggtaatgtatttatttgcttaccgcctccttcacaaaaaaagtttctaggcatcaactata

SEQ ID NO: 1009248 - DNA, 120 bp, Artificial Sequence
  ENSG00000250125_3 (sequence is synthesized)
tgccacacaggtttcaggtactagctgtttaacggtgagcaagatgacaatagcccctgcttttatggagattacggtcagtcaggaagcaaataaactaaaatgcataaatgctgtgac

SEQ ID NO: 1009249 - DNA, 120 bp, Artificial Sequence
  ENSG00000250125_4 (sequence is synthesized)
aggatagataatacaggtgaatacaataggacatatcttaacctagaagggcaaataaggcatcctgaaagaagtagccattaagttatgccagaaagatacctgagaattatctagact

SEQ ID NO: 1009250 - DNA, 120 bp, Artificial Sequence
  ENSG00000250125_5 (sequence is synthesized)
aaaaatagaaatgggaaatatttcaagaagaggtattagcatataagtcttggaggccaagaagaattagttggattcaagaaattaaaagagaaatcatgggaaaaactgcccatttct

SEQ ID NO: 1009251 - DNA, 120 bp, Artificial Sequence
  ENSG00000250125_6 (sequence is synthesized)
gagctatagtcattatcaccacatcccctggcatccaattccacattctacctcagaagttatttggaggaatccaaggacttagatattttaccaatgtctctggtgatttttatatcg

SEQ ID NO: 1009252 - DNA, 120 bp, Artificial Sequence
  ENSG00000250125_7 (sequence is synthesized)
gtggcccatgggtgttgacctatgaaactgctctgcagcagatattgagaaataggagttcagaccatcgaactccaagtacttcagatttggaactcggactgctttccttgctcctca

SEQ ID NO: 1009253 - DNA, 120 bp, Artificial Sequence
  ENSG00000250125_8 (sequence is synthesized)
gcagatggcctattgtgggaccttgtgattatgtagtgagacgagcatgagtggagcaggagacggctgtcccccacccacaaggaatatcagatgatggttcagcgatcatcacattgc

SEQ ID NO: 1009254 - DNA, 120 bp, Artificial Sequence
  ENSG00000250125_9 (sequence is synthesized)
ttgcctctctgaaagtgataaattggcagctggcaccagggagaggctatttcctgatggcccacacctgttgcactaagatgttaatcgaatgcagattccagggagaaacaacttcct

SEQ ID NO: 1009255 - DNA, 120 bp, Artificial Sequence
  ENSG00000250125_10 (sequence is synthesized)
gggcatgtgcgtaagagacaaaatggcaggtatgaccttctggggacactccaccagaaaagggaagaaaacctcagatgggcatgcatataacttcctaaacacactgctcacactctc

SEQ ID NO: 1009256 - DNA, 120 bp, Artificial Sequence
  ENSG00000250125_11 (sequence is synthesized)
ctcccaagggtaaggagggcactgcacatgcaggcagcccatcctaagggaagcatcctgggaaaggggtcagtctatatggttctgggatcaagattaaacaccacattagaccttcaa

SEQ ID NO: 1009257 - DNA, 120 bp, Artificial Sequence
  ENSG00000250125_12 (sequence is synthesized)
ctttgctgttggtgggggcagggagcatggtacaggggtgactgagttcctgctttgttagttcccactgaaactgattgacaaaaagggcctggcacctctctcttctctctctttctc

SEQ ID NO: 1009258 - DNA, 120 bp, Artificial Sequence
  ENSG00000250125_13 (sequence is synthesized)
tctctcaccatgtgatctatgcatgcctgttcccgtctgcttgcactaagaatggaaacagcctaagttcctcaccagaagcagaggctggcaccatgtttgttatgcagcctgcagaac

SEQ ID NO: 1009259 - DNA, 120 bp, Artificial Sequence
  ENSG00000250125_14 (sequence is synthesized)
cagaaatcatgggaaaaactgcccatttctgttttgtccactttgctttgggaagtgagagctatagtcattatcaccacatcccctggcatccaattccgattaataattcaattccag

SEQ ID NO: 1009260 - DNA, 120 bp, Artificial Sequence
  ENSG00000250125_15 (sequence is synthesized)
cgataaacaccttcttgcctacagcatgtgtgactgcaaacacattcccacttcaactaatccaagacgagaaggatgacaaaataagagaaatcatgggaaaaactgcccatttctgtt

SEQ ID NO: 1009261 - DNA, 120 bp, Artificial Sequence
  ENSG00000250125_16 (sequence is synthesized)
tctaaagcttttttaaataaacatacacatccctcctctgaaacttgccttggtctctttttctgccatatgcaactcagtcaaattatttcttctgaggaggaaaaaattgaggtagct

SEQ ID NO: 1009262 - DNA, 120 bp, Artificial Sequence
  ENSG00000250125_17 (sequence is synthesized)
gcattcccatacagattcaccatcggtaactcagataccttctactggccatatgtttggtgttctattcaagaaataattgctaaagccaatgtcttaaagtgtttttcttatgttttt

SEQ ID NO: 1009263 - DNA, 120 bp, Artificial Sequence
  ENSG00000250125_18 (sequence is synthesized)
cttctaagagttttacagtttcaggtcttacacttaagtatttaattaatttgagttgattttatgcatggtgtaggatgtgtgtaatattcagtttttctaacactatttgttgaagag

SEQ ID NO: 1009264 - DNA, 120 bp, Artificial Sequence
  ENSG00000250125_19 (sequence is synthesized)
actattctttttccactgtgtatccttagaagcattgctgaagtgttgttgaaggtcagtttattttatatatatgtttgtgtgtgtatatatatatgtatgtgtgtgtatatatttata

SEQ ID NO: 1009265 - DNA, 120 bp, Artificial Sequence
  ENSG00000250125_20 (sequence is synthesized)
taatacagattatgcagtgtcactccccagacatctataaagatttctactgaacaagtcagccatcgaagcagattattcaccatctgtggtcatcaattccaaaggaatttttgtttc

SEQ ID NO: 1009266 - DNA, 120 bp, Artificial Sequence
  ENSG00000250125_21 (sequence is synthesized)
tggtaatggccaaataagcatctatatgaatattttctacagataataaatataaactgtgaacaaatgtaaaaagaaaaaaaaaagaccagccaaaggcactggaaatgaccctaaaag

SEQ ID NO: 1009267 - DNA, 120 bp, Artificial Sequence
  ENSG00000250125_22 (sequence is synthesized)
agcatattctgaagagtagtctacaatagaaaagggaaaatgacactgactgagtctctcatttactttagctgttagactaaaggcagttctaaaccatgccatggatagtagccaaaa

SEQ ID NO: 1009268 - DNA, 120 bp, Artificial Sequence
  ENSG00000250125_23 (sequence is synthesized)
ctgcgatagaaagggcattgtctttctgattttaaaggtgtactagaagagagagtttgggacaaccatagctgctagtaagtgagaatacacactgcacaggaaaagagccagaaaaag

SEQ ID NO: 1009269 - DNA, 120 bp, Artificial Sequence
  ENSG00000250125_24 (sequence is synthesized)
agaaggtcgccaacttgaaattataaactgtgtccatgtttttagaataatgactttgtggatctgactccaagcaagtcacctaaggataaaataactgaagcaagacttcagctgcca

SEQ ID NO: 1009270 - DNA, 120 bp, Artificial Sequence
  ENSG00000250125_25 (sequence is synthesized)
cacaaagatagattttgcagaggtgtgatttcaaccaagtaaattacattacagactaaatagaaataaaagattcagaagaagattacaaaactcatgatctccaaaagataatattca

SEQ ID NO: 1009271 - DNA, 120 bp, Artificial Sequence
  ENSG00000250125_26 (sequence is synthesized)
taatttccaacatgcatcctaaattactccaaaacatgaataaagaagaatgttttttattctcaagataaatgaaaatcaacagagactgacagcaaaatgactcagatgttggaattg

SEQ ID NO: 1009272 - DNA, 120 bp, Artificial Sequence
  ENSG00000250125_27 (sequence is synthesized)
gcacaacaaagattttaaaggaattatgctgagtgatgtaaaggaaaatatgtttgaaatgaatgaaaaattaagaaatcacagcaaagagatagaaattataaaaaatgactacataaa

SEQ ID NO: 1009273 - DNA, 120 bp, Artificial Sequence
  ENSG00000250125_28 (sequence is synthesized)
gacagtaataaggtgtcttttcaatttatatggaagtacaaagttctagcatattcaaagcaattctgaaaaaaagcatagtttaaagcaattctaaaaaagaatagcatagtttaacta

SEQ ID NO: 1009274 - DNA, 120 bp, Artificial Sequence
  ENSG00000250125_29 (sequence is synthesized)
taataaatgttttcaagaatattataaagctataggaatcaaaataatatggcaatgatgtaaagattgattagcaaagccatagaataaaatttgaagcccagaaatagatttgcacat

SEQ ID NO: 1009275 - DNA, 120 bp, Artificial Sequence
  ENSG00000250125_30 (sequence is synthesized)
attgggggggttatttaactttttacgaatatattaaagcaattcaatgaatgtgcagggaaggagtaattcacatgcctgggttgctcaaaccctgtatatttcccataagcatctttc

SEQ ID NO: 1009276 - DNA, 120 bp, Artificial Sequence
  ENSG00000250125_31 (sequence is synthesized)
ttcagggtgggcccttggctggctcctcaaaaatgagctccgaggctctggaatattctgcctgagaagagtgcttctgtatgtctgacacctccgtccatgtggtaaaaataatgttca

SEQ ID NO: 1009277 - DNA, 120 bp, Artificial Sequence
  ENSG00000250125_32 (sequence is synthesized)
gtttttgttaacaatgagatttatggtaagtgtatgaggaactaaaatctcaacagctgaggacagttatacaggtgctgcatgcctacgtgactgacccctaataaaacctctgaagac

SEQ ID NO: 1009278 - DNA, 120 bp, Artificial Sequence
  ENSG00000250125_33 (sequence is synthesized)
caaggcaagattgagcttcctgactggaaatacatcacatgtattgccacacatcattgctgggataataaagcacatccataggactccactgtgggaggacacctagaagcccatgct

SEQ ID NO: 1009279 - DNA, 120 bp, Artificial Sequence
  ENSG00000250125_34 (sequence is synthesized)
tcatgtcttctagactttatcccatgtacctttacaatttgctaattttaatgtgtatcttttcattgtaaaagacactaaacatggagatagtaggtttttctgagtctagagaatctt

SEQ ID NO: 1009280 - DNA, 120 bp, Artificial Sequence
  ENSG00000250125_35 (sequence is synthesized)
cattctctagaatgaagtggtagtggtcatgaggagtctctacccataaataaaacatatttttaatgaatgatactgaaataactatatttatatggaaaaaatgaatctccacccata

SEQ ID NO: 1009281 - DNA, 120 bp, Artificial Sequence
  ENSG00000250125_36 (sequence is synthesized)
actcacaatatacctaaaaataattcaaaatgaattattgaccgaaacatagaagcttatacaaaagattttcagaataaaatatggaagaatgactatttgacatagagctaggcaaag

SEQ ID NO: 1009282 - DNA, 120 bp, Artificial Sequence
  ENSG00000250125_37 (sequence is synthesized)
ttttcttataggtagataagatacaggacaaatgatgacatatggaaaaaatgatatgtttgactttaccaaaaacaaatcatcagtgaatcaaaatactcacaaaatacaactcctaca

SEQ ID NO: 1009283 - DNA, 120 bp, Artificial Sequence
  ENSG00000250125_38 (sequence is synthesized)
gcaaaacattataaagacaaacaaccttttaaaatgggaaaaatgtttgaacacacattttatacattaagatgtataagtggataataaacacataaaaactgttcagcatcactaagt

SEQ ID NO: 1009284 - DNA, 120 bp, Artificial Sequence
  ENSG00000250125_39 (sequence is synthesized)
aagtagggaatggtacattaaagcaacattgtgatatcattacacaccctctaggaatggctaaaattaaaaagactgaaaacatcaaattttggcaaggttagggccaattaaaatttt

SEQ ID NO: 1009285 - DNA, 120 bp, Artificial Sequence
  ENSG00000250125_40 (sequence is synthesized)
catacattgctggtaaaaatgaaaatgtcacaaccactttggaaaaaatttttaaaattttttacaaaacttcatatagatccattatatgacccaaccattctactgctagacatacac

SEQ ID NO: 1009286 - DNA, 120 bp, Artificial Sequence
  ENSG00000250125_41 (sequence is synthesized)
tcaaaatgaagaaacacgtacaaaaagatttctacaagaatgattttagcagcttcacaacaaaccaggtgttggtcaataggaagatgaaaaatcaaaatatagtatagctataaaata

SEQ ID NO: 1009287 - DNA, 120 bp, Artificial Sequence
  ENSG00000250125_42 (sequence is synthesized)
caataatatttaggataaaaataataaatgcatgttataactaataatatcatgactgaatctcaaaaatattttgctgagttaaacaagctttgcacaaagtagtatattatgtatgat

SEQ ID NO: 1009288 - DNA, 120 bp, Artificial Sequence
  ENSG00000250125_43 (sequence is synthesized)
cccatgtatagaaatatctagaataaggaaaaacaaattatgatagaaaagatgttgcttctggtgattgggtggagctctgatggactgggaaggagcatgagggagctttgtgggttg

SEQ ID NO: 1009289 - DNA, 120 bp, Artificial Sequence
  ENSG00000250125_44 (sequence is synthesized)
atggtaatttatgtaccctgacaggggtttggtttacatagctgtattcatttgtcaaaacttatattaaatggtgcaattaatattgatgcatttcattgtatgtaaattttaccctaa

SEQ ID NO: 1009290 - DNA, 120 bp, Artificial Sequence
  ENSG00000250125_45 (sequence is synthesized)
aataattttagacaaattgtaaaacctagttaaagacatatatgctgatattttcagggttacctctcttgatgtctgcaacttactttgaaatgcttcaaaaggaaaataggataatgg

SEQ ID NO: 1009291 - DNA, 120 bp, Artificial Sequence
  ENSG00000250125_46 (sequence is synthesized)
atggaaatagggagagagaaatggatcgatgtgtaaataaaacaaatctatctaaatgttaaagcttaattgtagatgatgaatgtaggagtgttgaatgttaaattctttcaactttta

SEQ ID NO: 1009292 - DNA, 120 bp, Artificial Sequence
  ENSG00000250125_47 (sequence is synthesized)
attgagaaataggagttcaggattaataattcaattccagctttcctggaagccagaagtcaaaatatacttgggatttctataaatattttttaattatgaccatcgaactccaagtac

SEQ ID NO: 1009293 - DNA, 120 bp, Artificial Sequence
  ENSG00000250125_48 (sequence is synthesized)
gttgacctatgaaactgctctgcagcagatattgagaaataggagttcaggctcctaggaagaaggaacttgccttgtctcagatcagacttttggacttggacttttgagttaatgctg

SEQ ID NO: 1009294 - DNA, 120 bp, Artificial Sequence
  ENSG00000250125_49 (sequence is synthesized)
agggatgattggttttgaaatgtcaggacatgagctttgggagggatcggggcagaatgatttgtgtctccactcatatctcatcttgaattataatccccaggtgtggacagagagaac

SEQ ID NO: 1009295 - DNA, 120 bp, Artificial Sequence
  ENSG00000250125_50 (sequence is synthesized)
tggtgggaagtaattgaatcataggggcagttcctcccatgtgttcttgtgagagtgagttagttcttttgagatcaggtggtttaagccagtttttcctgccctctcttgcactcatgc

SEQ ID NO: 1009296 - DNA, 120 bp, Artificial Sequence
  ENSG00000250125_51 (sequence is synthesized)
actctctcttccctgccaccctgtaaaatatgcctgcttcctttctccatggttgtaagtttcctgagtccccccagccatgtaaaactgggggtcaattaaaccacttttcttcatcaa

SEQ ID NO: 1009297 - DNA, 87 bp, Artificial Sequence
  ENSG00000250122_0 (sequence is synthesized)
ccaggattgcagacggagtctcgttcaatcagtgctcaatgttgagctacaacctccccctcccagccgcctgccttggcctcccaa

SEQ ID NO: 1009298 - DNA, 120 bp, Artificial Sequence
  ENSG00000250122_1 (sequence is synthesized)
ctgcccggccacccatcatctgagatgtggggagcacctctgctctgccaccccatctgggatgtgaggagtgcctctgcccagccacgaccccgtctgggaggtgctgttttaggacgt

SEQ ID NO: 1009299 - DNA, 120 bp, Artificial Sequence
  ENSG00000250122_2 (sequence is synthesized)
gagagtacacccaaaacaaaaatggacagaaattccagtctcataaatgtgagagatccagaagatacttctacaatttcccttcagttacatatggacactttaataaaagaatattat

SEQ ID NO: 1009300 - DNA, 120 bp, Artificial Sequence
  ENSG00000227282_0 (sequence is synthesized)
tgtttcagccagtcttcactctggttgggagtcaagtcccgcctcctatatcgcattcatactcagcagctttaggcgctgagttggatagagggcgacagaagctcagagcagcacaca

SEQ ID NO: 1009301 - DNA, 120 bp, Artificial Sequence
  ENSG00000227282_1 (sequence is synthesized)
cactagggcagaggtgcagagagccattaatatagaatcactatggagcgatgactacataacatttccacgacttttggaaagttcccatgagtttggaaagagccacccaaggaatct

SEQ ID NO: 1009302 - DNA, 120 bp, Artificial Sequence
  ENSG00000227282_2 (sequence is synthesized)
gcctcggccgcagtctctccagccgccgccagagggaaacctgatcccatgcaggattcctaggggctcccagagaagccctaggctgtgctgctgcctgctggttctgggaatgggtga

SEQ ID NO: 1009303 - DNA, 120 bp, Artificial Sequence
  ENSG00000227282_3 (sequence is synthesized)
gccttgggagagcaaagagaatagaaagtaattctccatgtgtcttcctccagctccaatctagtttaaaaccatccccctatagcctgctttttttccttaaagaatcttcaagcaaat

SEQ ID NO: 1009304 - DNA, 120 bp, Artificial Sequence
  ENSG00000267666_0 (sequence is synthesized)
agtgcttccctacctcatcgccgtctcccctcacggtacttcagcccactgtccccaccgttcctggggctcgccaggcgccctctcccccgcccgctgcccggtgcagcgctctcccga

SEQ ID NO: 1009305 - DNA, 120 bp, Artificial Sequence
  ENSG00000267666_1 (sequence is synthesized)
cgcccgcgtggctttcttccaggtctttgctcaaatgtcagcttacaaggtcttctctgctgccctcctgctccgtggcactgattccctcccgatgcactgtcaggtcagctgcgcagc

SEQ ID NO: 1009306 - DNA, 120 bp, Artificial Sequence
  ENSG00000267666_2 (sequence is synthesized)
aaagggatttttggacccgcagcagcgcctgacacacagcaggcattccctcagcgctgcggaatacaggcagacccggggctcagggcgctgtctgggcctcactgggacccgtggggt

SEQ ID NO: 1009307 - DNA, 120 bp, Artificial Sequence
  ENSG00000267666_3 (sequence is synthesized)
cagacagaggctgaggtctgtgggttgtggccttgtttccaagatgctccacgggctgacggcccaggcgcctctcgggtgcggagaaggcaggaaacctaacccctgcttccaaattta

SEQ ID NO: 1009308 - DNA, 120 bp, Artificial Sequence
  ENSG00000267666_4 (sequence is synthesized)
cttccaaatttaatcagtagaaacggtatcatcacccagcacaggccaggatcatttctgaggttagttctggcccaatcatgcatgcatttcttttttctttttttttttgagacggag

SEQ ID NO: 1009309 - DNA, 90 bp, Artificial Sequence
  ENSG00000267666_5 (sequence is synthesized)
tcggctcactgcaacctccgcctgccgatcgagtagctaggactagaggcacccgccaccacaccggctaatttttgtatttttagtaga

SEQ ID NO: 1009310 - DNA, 120 bp, Artificial Sequence
  ENSG00000267666_6 (sequence is synthesized)
catgagccaccgcgcccggcctcatgcgtgtatttctttcttcactcaacactcattgagcaactactgcacaccagaccctatgctgaatgcacgcagatacccccagtcccatgagat

SEQ ID NO: 1009311 - DNA, 120 bp, Artificial Sequence
  ENSG00000267666_7 (sequence is synthesized)
tggacaggagcgtggaactcaagggtgactctggctctgcctggggaaagagagagagggcttccgaggggcagaccaagcccaggtggaccacgtcccaggcagaccaagcccaggtgg

SEQ ID NO: 1009312 - DNA, 87 bp, Artificial Sequence
  ENSG00000267666_8 (sequence is synthesized)
agcccaggcggaccacgtcccaggcggaccacgtcccaggcggaccacgtcccaggcgccacgtcccaggcggaccaagcccaggtg

SEQ ID NO: 1009313 - DNA, 120 bp, Artificial Sequence
  ENSG00000267666_9 (sequence is synthesized)
aggcggaccaagcccaggtggaccacgtcccaggcggaccacgtcccaggcggaccaagcccaggtggaccacgtcccaggcggaccatgtcccaggcagaccacgtcccaggcagacca

SEQ ID NO: 1009314 - DNA, 120 bp, Artificial Sequence
  ENSG00000267666_10 (sequence is synthesized)
agcccaggcggaccacgtcccaggcagaccacgtcccaggcggaccaagcccaggtggaccacgtcccaggcagaccaagcccaggcagaccacgtcccaggtagacctagtggttgtgt

SEQ ID NO: 1009315 - DNA, 120 bp, Artificial Sequence
  ENSG00000267666_11 (sequence is synthesized)
attcacttctcccaacccccctgggaagaaataactgcagctggccccattgcaccaatgaggaaactgaggcccagggaggaagccgattgcctgaggcggcagctttgggactggact

SEQ ID NO: 1009316 - DNA, 120 bp, Artificial Sequence
  ENSG00000267666_12 (sequence is synthesized)
agtgtcgtggagcctccgctctgtgccaggagcggggcctgtgccacaaacgtctgctgaaaccagccatccacccaacagtatcgagcaccatgatcggaagagtaaaggccccaaact

SEQ ID NO: 1009317 - DNA, 64 bp, Artificial Sequence
  ENSG00000267666_13 (sequence is synthesized)
gtatcgagcaccatgatcggaagagtaaaggccccaaactgggccaggggcggtggctcattcc

SEQ ID NO: 1009318 - DNA, 62 bp, Artificial Sequence
  ENSG00000267666_14 (sequence is synthesized)
ccctgtctctactaaaaatacaaagttaaccaggcatggttgggaggcagaagttgcagtga

SEQ ID NO: 1009319 - DNA, 120 bp, Artificial Sequence
  ENSG00000267666_15 (sequence is synthesized)
gcagaagttgcagtgagccaagatcttgccatttcactcctgcctaggcaacaagagcaaaactccatcttgttaaaaaaaaaaaactagccgggcatggtggtgcctgcctgtaatccc

SEQ ID NO: 1009320 - DNA, 90 bp, Artificial Sequence
  ENSG00000267666_16 (sequence is synthesized)
gggagcaccactccagcctgagagacagagtgagtgagagacttcacctcaaaataaataaataaagtccccaaacacacttgattttag

SEQ ID NO: 1009321 - DNA, 120 bp, Artificial Sequence
  ENSG00000267666_17 (sequence is synthesized)
agcctgagagacagagtgagtgagagacttcacctcaaaataaataaataaagtccccaaacacacttgattttagcccagcaagactcatgtctgttgcgggaagtcagggaccccgaa

SEQ ID NO: 1009322 - DNA, 85 bp, Artificial Sequence
  ENSG00000267666_18 (sequence is synthesized)
ggtcaggcaaaaaaggacatgcaagtagggaggatatcgctaaattcttttcctagcaagcaatattaatattaataccctggga

SEQ ID NO: 1009323 - DNA, 89 bp, Artificial Sequence
  ENSG00000267666_19 (sequence is synthesized)
ccctgggaaaggaatgcattcctggggagaggtctataaacagctgctctgggaatgtctgtcttacatctcctgcagtaccctcaggc

SEQ ID NO: 1009324 - DNA, 120 bp, Artificial Sequence
  ENSG00000267666_20 (sequence is synthesized)
atacgccctgatctcctgcagtaccctcaggcttactacggtggggaaaaactccaccctggtgaatttgtggtcagacgtttccctattttttgttcaagatgtttatcaagataatac

SEQ ID NO: 1009325 - DNA, 120 bp, Artificial Sequence
  ENSG00000267666_21 (sequence is synthesized)
gtgcaccgctgaacatggacccttatcagtagttctgtgttgccttttctcctgttccctcagaagcaagtgatctttgttctgttttttgccctttgaagcatgagctctactccatgt

SEQ ID NO: 1009326 - DNA, 89 bp, Artificial Sequence
  ENSG00000267666_22 (sequence is synthesized)
tctcacaccccctcccctcaaggctcagggggcagcacgatcctaccgacatgcgacgtcaccccccggcggcccagctgtaaaattcc

SEQ ID NO: 1009327 - DNA, 120 bp, Artificial Sequence
  ENSG00000267665_0 (sequence is synthesized)
actacagtgtgatggcttctccatgctaatcgccctatagaacaaggagaaaaggaaaggtgggcccttcacgtctccggtatgtcattatcagcagtgtgaaaatggactcactcccac

SEQ ID NO: 1009328 - DNA, 120 bp, Artificial Sequence
  ENSG00000267665_1 (sequence is synthesized)
cctgtctggatctggacaagagcccaccaccccgttggcagtagtcaggcagctctgcttctaagaacctgcagcttttggaagaaaggcaccctgtggtttcagaagcccaagagtccc

SEQ ID NO: 1009329 - DNA, 120 bp, Artificial Sequence
  ENSG00000267665_2 (sequence is synthesized)
agagggagcagaaaactgtgtattcttcagaacatcatgataacctggcactcatgggtctatggagagaattcagggggtctgggagcttggatggaataaatttgcatctttattttc

SEQ ID NO: 1009330 - DNA, 120 bp, Artificial Sequence
  ENSG00000267665_3 (sequence is synthesized)
aggaaagttttactgaagtttagcattttctttcattataaatggaatcagtataacccaatagtatgagcagttacttctccgcaacatcaaagtggctgcagatatctcaaaatagta

SEQ ID NO: 1009331 - DNA, 120 bp, Artificial Sequence
  ENSG00000267665_4 (sequence is synthesized)
tttacatttatcataacttagaaatttgggtggtaattaaaccagcaactattctttgtttaatgcattaagaaagaagtatgtatactatcatatctcaattaaaaatattttaagaac

SEQ ID NO: 1009332 - DNA, 120 bp, Artificial Sequence
  ENSG00000267665_5 (sequence is synthesized)
gaacgcgtccctggggccttcaccctgtcgtgaacaaagcacgactattttgtaaagggaagatcaaagagccagaagtcgcggatgagtgtgtggcaggtggggactcagagtgacagt

SEQ ID NO: 1009333 - DNA, 120 bp, Artificial Sequence
  ENSG00000267665_6 (sequence is synthesized)
ggccatgcggtgtgtcccgtggtcgccccagaggcggatgggccaggccgctgcacataccctgggaggaggcaggtggggagggaacccgaggaccctgcctatgttcacccctctgtt

SEQ ID NO: 1009334 - DNA, 120 bp, Artificial Sequence
  ENSG00000267665_7 (sequence is synthesized)
cctctctgggacccactatggctggaagggactttttccttctccccccacccctcccctcctcaccttccctccccctgctttttaatttcttcccttttgcaaggctttttgtccagc

SEQ ID NO: 1009335 - DNA, 120 bp, Artificial Sequence
  ENSG00000267665_8 (sequence is synthesized)
tggggctgggaagaagatgcccccgaccccctctcgtggtcgccagggtaggggtgggaggaatctggaagccacgtgcgatgctcggagctgcgtcctctgtcctggggcgtgggtccg

SEQ ID NO: 1009336 - DNA, 120 bp, Artificial Sequence
  ENSG00000267665_9 (sequence is synthesized)
cgagcgccgcgcagcctcccggaccgccctgagctgctgcgcccggcgctgctcctccttccccagctccgcgccttcccctcgcgatccccctcctgcctcttcggtcctggaagcgtc

SEQ ID NO: 1009337 - DNA, 120 bp, Artificial Sequence
  ENSG00000267665_10 (sequence is synthesized)
ccaagatggggtgggggcatggagggagagaggggaggagggagctgcccgggggcagtgccgccaggaagtgggacggggactctggcgcccctccaggctgctgcgcgcgggctgggg

SEQ ID NO: 1009338 - DNA, 120 bp, Artificial Sequence
  ENSG00000267665_11 (sequence is synthesized)
accgtgcaccgctttgcgcgccagacgatgcatcttctggaacggcagctgaggcaatgcggggtgtgaagtggcggcgggcagaggggctcgcaggggctgggatccgcgtgcccctct

SEQ ID NO: 1009339 - DNA, 120 bp, Artificial Sequence
  ENSG00000267665_12 (sequence is synthesized)
ctgcctcggtgcggagcacgatgtgcccgggcgggggcgaggacgtccgggaggggctgggctgcgcacgctcgcggggccgtcgcagatgggcggtttggaggcgctgcagtccctggg

SEQ ID NO: 1009340 - DNA, 120 bp, Artificial Sequence
  ENSG00000267665_13 (sequence is synthesized)
aaatgggagcctccgtcctgttctctctgctgcttggctgggctgggctgggcagggcaggaaagccagggtccccacccctcctggagcagagcactccgcgctggctgttccgggggc

SEQ ID NO: 1009341 - DNA, 120 bp, Artificial Sequence
  ENSG00000267665_14 (sequence is synthesized)
ccgggagggcagagctgtcagaaggtctgtctggcatcattaggggagctgtctgtctctctatccctggctggcgtggcccggcaggaggcgaggctgatattttcaggagacctggtg

SEQ ID NO: 1009342 - DNA, 120 bp, Artificial Sequence
  ENSG00000267665_15 (sequence is synthesized)
atttgacctgacacctgtcagtcaggtaagcgctggcctcctgcctgcatccccctggggaagagccggttctgctccctgaccgggaacgggtccctcagtgctgaggatggcagttaa

SEQ ID NO: 1009343 - DNA, 120 bp, Artificial Sequence
  ENSG00000267665_16 (sequence is synthesized)
tgagcccgccgaggggctgcccaccgggtgcacaggcaggagcagtgggcatatcccctgcttgccaggccctgcagaggggctgccttctcccccaatgccttctgcccccttctagtg

SEQ ID NO: 1009344 - DNA, 120 bp, Artificial Sequence
  ENSG00000267665_17 (sequence is synthesized)
tctccaacattgaccctggaaatcactttcttgcttctcttatcaggatagtcctacatgtctggaactttctgggatgttctctgtgccttggaagtgtttatttattactttaaaatc

SEQ ID NO: 1009345 - DNA, 120 bp, Artificial Sequence
  ENSG00000267665_18 (sequence is synthesized)
acctttagggtctttatccttaaagataaagccagtacctagaaccaggtgtccttcccgcagggctttaggccctacctgacttgggttctcagtcaaccctttccttccctgtgtaac

SEQ ID NO: 1009346 - DNA, 120 bp, Artificial Sequence
  ENSG00000267665_19 (sequence is synthesized)
gtgggttttggcttttgcggaagtaatctgttatggtctaaattgtgtcctccccaaatccatatattaaatccctaagcccctggctgggcgtggtggcgagcacctgtaatctcagca

SEQ ID NO: 1009347 - DNA, 61 bp, Artificial Sequence
  ENSG00000267665_20 (sequence is synthesized)
cctgggggacaacagcgacactctgtctcaaaaaaatagataaataaaataaaaataaaat

SEQ ID NO: 1009348 - DNA, 120 bp, Artificial Sequence
  ENSG00000267665_21 (sequence is synthesized)
tctgtctcaaaaaaatagataaataaaataaaaataaaataaatcccgaagccccagtatctcaggatatgattgtatttggagatacagccttctatgaccttctataacctcagtccc

SEQ ID NO: 1009349 - DNA, 120 bp, Artificial Sequence
  ENSG00000267665_22 (sequence is synthesized)
ttggcaccagggactggtttcgtggaaggcaatttttccacggacccgggtggggtggggggtggtttcgaggtgatgcaagcacgttacattgatcgtgcactttatttctgttgttat

SEQ ID NO: 1009350 - DNA, 83 bp, Artificial Sequence
  ENSG00000267665_23 (sequence is synthesized)
cgttacattgatcgtgcactttatttctgtttttcatcataatgtagaatcagagggaccctgagcttgttttcctgcaacta

SEQ ID NO: 1009351 - DNA, 120 bp, Artificial Sequence
  ENSG00000267665_24 (sequence is synthesized)
cagtgacagatcatcaggccttggattctcataagaagcacgcaacctagatccctcacatgtgccgttcacaacaggtttcatgctcttgtgcacatccaatggttcctaaagggccac

SEQ ID NO: 1009352 - DNA, 120 bp, Artificial Sequence
  ENSG00000267665_25 (sequence is synthesized)
agaccggtactggtccttggcccaggggttgaggacccctgttctataaggtcgggagagaggcctcagaagaaaccaaccctgccgagacaccttgatctcagacttcagcctccagaa

SEQ ID NO: 1009353 - DNA, 120 bp, Artificial Sequence
  ENSG00000267665_26 (sequence is synthesized)
ctgcgcggtgatgcgttcctgttgaaggcactctgaccgcagtggcttgccgtggcagccctcgacaacaaatacagggtctgttgaaccaaatgaatccaaaatgtatgcccaaagata

SEQ ID NO: 1009354 - DNA, 120 bp, Artificial Sequence
  ENSG00000267665_27 (sequence is synthesized)
gccgccaggtctatgaaaacacctgctctgatatgaggggacgtggaccacagaggtgagtgctggaattcaagttggtctccttagtcattctcctgccccacgccccctgcccctgta

SEQ ID NO: 1009355 - DNA, 120 bp, Artificial Sequence
  ENSG00000267665_28 (sequence is synthesized)
acagttacattgtcttaaatcgtactcgtttaaaaaggtatttacacaacagatcaacatttaagtacatgtttaaaagcaattatgaatgtgctcacctgtcagggcaggatggttttg

SEQ ID NO: 1009356 - DNA, 120 bp, Artificial Sequence
  ENSG00000267665_29 (sequence is synthesized)
ctcatgtgtttccagttggttgggtaaataatcagctcgggtgttgttttgttttacacctaccccctactgtaattgtgtgtttacttttatgataacgtcacatcactctcatattta

SEQ ID NO: 1009357 - DNA, 120 bp, Artificial Sequence
  ENSG00000267665_30 (sequence is synthesized)
actactagcagggattaagttattccaataaaagacagagaaataaatttcagaccctgtttcctgcctatccccacccccatcgttcaaaaattggacaattttccaagatgatcggaa

SEQ ID NO: 1009358 - DNA, 120 bp, Artificial Sequence
  ENSG00000267665_31 (sequence is synthesized)
gcagttttgagcatttggaagccatggatgccctggcccgtggcagtgtttttcaacagtaacccacttgccgataaggtctccctgtgtggggtcaaaggatgtggcccctgccatcct

SEQ ID NO: 1009359 - DNA, 120 bp, Artificial Sequence
  ENSG00000267665_32 (sequence is synthesized)
tgtggtcactagggagggtacaggcctgtgtgccacaccccagcctaactcctcctggggcctgggcagttttgatcactaagtcctgactctgccatggaagaggcatcttctgggcgg

SEQ ID NO: 1009360 - DNA, 120 bp, Artificial Sequence
  ENSG00000267665_33 (sequence is synthesized)
acactgatgttcagtggcctccaggggacttggcgggtccccttgacacactggaggctccctggctagattcccctcccagacaccctcattcctgtatctccaggactggagaggcct

SEQ ID NO: 1009361 - DNA, 120 bp, Artificial Sequence
  ENSG00000267665_34 (sequence is synthesized)
agaggcctgctggccatccaggaggatgtttctgttgtcgggcagatggtcagccccatgcagaggatgggaaagcttcacctgccacagttgtgattctctggcctcagcctcccgagt

SEQ ID NO: 1009362 - DNA, 71 bp, Artificial Sequence
  ENSG00000267665_35 (sequence is synthesized)
aagatgattcgcccaacacagcctctcaaagtgctgggattacagtctccggtatgtcattatcagcagtg

SEQ ID NO: 1009363 - DNA, 120 bp, Artificial Sequence
  ENSG00000267665_36 (sequence is synthesized)
gaagatggcggcctgaaccggagtccttcttcccctcctccctctccgctgctgcaatgcccaggccccccgcaacgttcctcgtctgtaatggtgccagaggctttaaatcttgcagaa

SEQ ID NO: 1009364 - DNA, 120 bp, Artificial Sequence
  ENSG00000267665_37 (sequence is synthesized)
agtacagcgtgggagcagactacacaggtgcgtgaatactaagaggtgaaggtcactggggatcatcctggaggccggctatcacaacctacctttttatctgtttatagatacaggtag

SEQ ID NO: 1009365 - DNA, 120 bp, Artificial Sequence
  ENSG00000267665_38 (sequence is synthesized)
aggtgagcatgtatgaagggccgctctcagatcctttcaaagagaagggtgtcatgcagatgccaacaggttgatcatcagaaccagagggtgctttaacatgcagattcccgggctctg

SEQ ID NO: 1009366 - DNA, 120 bp, Artificial Sequence
  ENSG00000267665_39 (sequence is synthesized)
ccaaggtgattcccaaggtgattcctgggtaggactgccaaggtgaggcccgggaagctgtttctaaaagttcctcttgtctctgatgcacaacttgggtgacagccacagctgattgcc

SEQ ID NO: 1009367 - DNA, 120 bp, Artificial Sequence
  ENSG00000267665_40 (sequence is synthesized)
agaaagttatggcgggagggggagatactgacaccaagccttgcctgggacccacccaagaggcgaagtgcctttctggcttgacagtcttggaaggaggggtcgggacgtctggcctgc

SEQ ID NO: 1009368 - DNA, 90 bp, Artificial Sequence
  ENSG00000267665_41 (sequence is synthesized)
ttgacagtcttggaaggaggggtcgggacgtctggcctgcatgggaaccctggagtttccatgcttctctcataggacaaaggcatggag

SEQ ID NO: 1009369 - DNA, 86 bp, Artificial Sequence
  ENSG00000267665_42 (sequence is synthesized)
ggcatggagttttatcagcaaagagtaaaccaaaatgtattctctgaacacaaaactggctgagagtgccaggctgaaagccgttg

SEQ ID NO: 1009370 - DNA, 120 bp, Artificial Sequence
  ENSG00000267665_43 (sequence is synthesized)
aacacaaaactggctgagagtgccaggctgaaagccgttgtgctgggagctgtgggtgctgacgtcatccccctccctgcccgatggctcctcttccagggtctgaaccagacagccagg

SEQ ID NO: 1009371 - DNA, 120 bp, Artificial Sequence
  ENSG00000267665_44 (sequence is synthesized)
aaaagtggcgttcagagcgctgggccttcaaggtgcccttggtctcttcggtagaaaacaaggaagcaacgtccttgtgtaggggtactgctctcctcctgggaggggaggaaatgagac

SEQ ID NO: 1009372 - DNA, 120 bp, Artificial Sequence
  ENSG00000267665_45 (sequence is synthesized)
gcagccacgtgtggtgtggggagtgcagtccgggcagagggtggtggctcctcaaatacccacccttggtttcctgcatacctaagggggtgtgtgactcaggggtccttcctgttgtct

SEQ ID NO: 1009373 - DNA, 120 bp, Artificial Sequence
  ENSG00000267665_46 (sequence is synthesized)
atggtgtctttacattcaccacctgaggggaagttttaatttgtaataaatctgtattacggtggatgtccaactgccccagtggctgtaaaaattaattccttatcctaaacattatta

SEQ ID NO: 1009374 - DNA, 120 bp, Artificial Sequence
  ENSG00000267665_47 (sequence is synthesized)
catagctttcgaaatgaatcgacttgtggttgggttcttggtttgggccattatttccaattagtataatcagatagcatcatccgtaatacttcccctcctatccccagccctccctgg

SEQ ID NO: 1009375 - DNA, 120 bp, Artificial Sequence
  ENSG00000267665_48 (sequence is synthesized)
gccccacaccctggtcttgtcgggaactggattcgatgaagtcatcagaattgtcaatggcatacagtgggtggagactgcctgctgattctgatggctgagaaagaggttttctttcca

SEQ ID NO: 1009376 - DNA, 120 bp, Artificial Sequence
  ENSG00000267665_49 (sequence is synthesized)
agagctggagagggagttttaagtggtttctgcaaaatattttggaggagaatgatctgcctttagtagtcaaggactcttcttgcaacactcaggctctgttttatggacagaaagagt

SEQ ID NO: 1009377 - DNA, 120 bp, Artificial Sequence
  ENSG00000267665_50 (sequence is synthesized)
ctgctgcctgcaggtaaacctccctggctgagcccactgcgcacgcctccacgttctggagccagaaacaatgagaagcacaattccggcagcatctctcctcccggtcatttgcatagc

SEQ ID NO: 1009378 - DNA, 120 bp, Artificial Sequence
  ENSG00000267665_51 (sequence is synthesized)
acaacctctccctccaccccctcctgtctcccacgtggatcttcatgtaattaattaatatcgcgttcatcagagcttaattcatgttcttgtaatatacaaggattaaaaaaaaatcct

SEQ ID NO: 1009379 - DNA, 120 bp, Artificial Sequence
  ENSG00000267665_52 (sequence is synthesized)
gggggctggaaacccaaggggccgatcaagggttcttgattcaaccaaacctcccccttgccatcctccatgcagaacgcgtccctggggccttcaccctgtcgtgaacaaagcacgact

SEQ ID NO: 1009380 - DNA, 120 bp, Artificial Sequence
  ENSG00000267665_53 (sequence is synthesized)
attttgtaaagggaagatcaaagagccagaagtcgcggatgagtgtgtggcaggaggcgaggctgatattttcaggagacctggtgatttgacctgacacctgtcagtcagtctccggta

SEQ ID NO: 1009381 - DNA, 120 bp, Artificial Sequence
  ENSG00000267665_54 (sequence is synthesized)
agtaacagccattctaactggtgtaagatggtatctcattgcggttttgattaacaacagacatttctaatctcacagttgatgtgggtcaggagctcagaagcagcttaactggatggc

SEQ ID NO: 1009382 - DNA, 120 bp, Artificial Sequence
  ENSG00000267665_55 (sequence is synthesized)
tctgactcagcgtctctcatgaggtggtcgaggtggaggctggggctgcagtcatccgaagatttgactggtgcaggaagatctgcttccaaggtgactcatatgtgtggctgttggcag

SEQ ID NO: 1009383 - DNA, 120 bp, Artificial Sequence
  ENSG00000267665_56 (sequence is synthesized)
gaggcttcagtccttgccatgtgagcctctcttcacatcataactggcttcttcaagaatgaatgatccaagagaaagaaagaaagagaagctgcagtgtcttttataacctaaccttgg

SEQ ID NO: 1009384 - DNA, 120 bp, Artificial Sequence
  ENSG00000267665_57 (sequence is synthesized)
cttgccatcctccatgcagaacgcgtccctggggccttcaccctgtcgtgaacaaagcacgactattttgtaaagggaagatcaaagagccagaagtcgcggatgagtgtgtggcagaga

SEQ ID NO: 1009385 - DNA, 120 bp, Artificial Sequence
  ENSG00000267662_0 (sequence is synthesized)
tgcttcccattccctctgcagccggagagctgaggagtagcgactggaatttgcaccatccaggtcagatggaaaatagaaggcgggaaaatctgacagtctcattgatttgctctcttt

SEQ ID NO: 1009386 - DNA, 120 bp, Artificial Sequence
  ENSG00000267662_1 (sequence is synthesized)
gccatcaccactcttgagaggaagaaatgtgacttcaaacttgcaattaggaaccagcctgctaaggagtcctctcgtgagctcctgtgctatgcggagcacaggcccatctcatctcat

SEQ ID NO: 1009387 - DNA, 120 bp, Artificial Sequence
  ENSG00000267662_2 (sequence is synthesized)
ttgaatggcctctagctgtgacccatcttgggacaagaaaataaactaaggagacgcaacacctgctgttagctgaacctgctgaccaggctccgtctcctcaaagttttgggggagcag

SEQ ID NO: 1009388 - DNA, 120 bp, Artificial Sequence
  ENSG00000267662_3 (sequence is synthesized)
agaagatggtatgagcagaacttctttctcttggatcagctcctaggtttgttctagtgcctgaagagaacaggttgcagtatctccaactgcaaagcaggtgcgtggagccacattcct

SEQ ID NO: 1009389 - DNA, 120 bp, Artificial Sequence
  ENSG00000268401_0 (sequence is synthesized)
gcttctcactctgactccaacagggtgagcttgctatccttgtggcacagggccttttgcattgtggatgatggagcggctcgtatagtccataagttttgtgcgtagctgtgtaccctg

SEQ ID NO: 1009390 - DNA, 120 bp, Artificial Sequence
  ENSG00000268401_1 (sequence is synthesized)
tcgtatagtccataagttttgtgcgtagctgtgtaccctgtccctgtgagctggttctgcccggcacctcggtgacctcgaggaaagaagctgagagacagagtcttgctttgtcaccca

SEQ ID NO: 1009391 - DNA, 120 bp, Artificial Sequence
  ENSG00000268401_2 (sequence is synthesized)
ccaaaaatggtgagattatggacatgagacactgcactgggcctattgtgtatcttgttggcctaaaattgaaacatgccttgtgagcgtttactgcaacttcaatgagtgattattatg

SEQ ID NO: 1009392 - DNA, 120 bp, Artificial Sequence
  ENSG00000268401_3 (sequence is synthesized)
ttgcctttaatcctgagagactgtattacttgtgcactttttttttttttggatagggggaaattagatttattccctatatgttttagaaaattgaagttttaaatatcagactcacta

SEQ ID NO: 1009393 - DNA, 120 bp, Artificial Sequence
  ENSG00000268401_4 (sequence is synthesized)
gtgagccatatttacttacttatttttacatacaggtgtgagccatatttacttatttttacatacaggtgtgagccatatttacttacttatttttacatacaatacaaacactttaaa

SEQ ID NO: 1009394 - DNA, 87 bp, Artificial Sequence
  ENSG00000268401_5 (sequence is synthesized)
atgttttagaaaattgaagttttaaatatcagactcactagctgccctgatttaatctgttacaattaagtcagttaaaaaactcct

SEQ ID NO: 1009395 - DNA, 120 bp, Artificial Sequence
  ENSG00000268401_6 (sequence is synthesized)
ctgggcaacagagccagaccctgtctaaaacaaaacaaaacaaaacaacaacaaaacccccaggacttcctgtacccacattctagtggggaagacaggaagcaaattaacaaacatcta

SEQ ID NO: 1009396 - DNA, 120 bp, Artificial Sequence
  ENSG00000268401_7 (sequence is synthesized)
aattaacaaacatctaataactatttttaaaagccagatatacgatatttcacgtggatgacccgattggcctgctgcgggtcagggaaacaggctcccaggtcgcatcctcagcttgtt

SEQ ID NO: 1009397 - DNA, 120 bp, Artificial Sequence
  ENSG00000268401_8 (sequence is synthesized)
cttggcgctggaaaaaagatgctacgcggttccctccttcagccaccagagggcgcgccctccccgtttgtcctctttcgcgcactttttctcccgcacctgtcagtcacagggcagccc

SEQ ID NO: 1009398 - DNA, 120 bp, Artificial Sequence
  ENSG00000268401_9 (sequence is synthesized)
tttagcggaacagggatcctgttctgtgattttcctgagggcctgcctctcccagggagtagcgggctcctacgaacagtaatagcaaccataatgtagagaccaagagcagagttactg

SEQ ID NO: 1009399 - DNA, 120 bp, Artificial Sequence
  ENSG00000268401_10 (sequence is synthesized)
tagagaccaagagcagagttactgagttttatgctgatgtccaaagtcacagggcatttcatttttcttcttttttcctttcctttaaaaaaatgggctgggcatggtggctcacgccta

SEQ ID NO: 1009400 - DNA, 62 bp, Artificial Sequence
  ENSG00000268401_11 (sequence is synthesized)
ctgggctcaagggatcctcctgcctcggcctccaaaaactcactgcaacctctgcctcccag

SEQ ID NO: 1009401 - DNA, 120 bp, Artificial Sequence
  ENSG00000268401_12 (sequence is synthesized)
ttggcctcccaaagtgctgtgattacacgtatgagccacagcgcccagcctatataacattcttacaatgagaacacaacagagatggagaacagattggtatttgcaaagggacagata

SEQ ID NO: 1009402 - DNA, 120 bp, Artificial Sequence
  ENSG00000268401_13 (sequence is synthesized)
ttggtatttgcaaagggacagatacagtgtgtttgtgtatgtgcatgtatatgtgtgtgtgcctgccactatagtggtaacacaaggggattcctttgtgggtctctatcttgattgtgg

SEQ ID NO: 1009403 - DNA, 120 bp, Artificial Sequence
  ENSG00000268401_14 (sequence is synthesized)
atttatatggatcagattgcatagaaacacacatgcacatgcgtgcacacacacacaggaatgcatgtgaaactggtgaatactgaataaggtcctctgtaatctagttaacagtaatgt

SEQ ID NO: 1009404 - DNA, 120 bp, Artificial Sequence
  ENSG00000268401_15 (sequence is synthesized)
acccatgtcactttcctggttttgatattatactatggttatgtaagatgttcccactgtgggaatactggatgaatgttacgtgggactgtatgtaccatgcaatttcctgtgagtctg

SEQ ID NO: 1009405 - DNA, 120 bp, Artificial Sequence
  ENSG00000268401_16 (sequence is synthesized)
taagagttcaacacaaaaagtaattacaaaagaagaaaagaaaaggtgctggtgatgacaaggttgttgggaaaagggcttgtgcggtgcctgcataaactggccgtaaaaaatatggga

SEQ ID NO: 1009406 - DNA, 120 bp, Artificial Sequence
  ENSG00000268401_17 (sequence is synthesized)
caataagttgtggaaagccacaggaggcctctgatgaggaaagccttctaattgccatcacgttcccatggccagagcgtgacctgctctcttatttacaagcactgtgctcaaggagaa

SEQ ID NO: 1009407 - DNA, 120 bp, Artificial Sequence
  ENSG00000268401_18 (sequence is synthesized)
agacactcctttgaagcattggaatgtggccagatatgccggctcctagttacgcccactccccacagctgctctccagtgagttaaagaataaatcagtagttaagtttatgctgcttc

SEQ ID NO: 1009408 - DNA, 120 bp, Artificial Sequence
  ENSG00000268401_19 (sequence is synthesized)
agcacaaagacaatttacctaaaccgccattgctatagattaggtgtatgacacaccgcccccctttcaccatttcacccctgaatatctgcttctcagatctaagtgattgtactcagt

SEQ ID NO: 1009409 - DNA, 120 bp, Artificial Sequence
  ENSG00000268401_20 (sequence is synthesized)
agtgtggagaccagagtttggcaccttttgcagcctccaaaagtgcagttggccccctggcaccccaccctttatgcactcttaacctgtctcttctcattccttcgtcgccaccggact

SEQ ID NO: 1009410 - DNA, 120 bp, Artificial Sequence
  ENSG00000268401_21 (sequence is synthesized)
ttgggtaccctacgggtggtgttgaggctggtccccaacacaaggtgacagcagccatcccactccattagcaactgtggtgataagcactggtttaaaatgggctgaattgaaaactgt

SEQ ID NO: 1009411 - DNA, 120 bp, Artificial Sequence
  ENSG00000268401_22 (sequence is synthesized)
tactcttgccttagtccagggattggcaaactttttctataagccccaggtagtaaatattttaggctttatggaccacatataatctctgttgcatattcgtttctctctctgtgtgtc

SEQ ID NO: 1009412 - DNA, 120 bp, Artificial Sequence
  ENSG00000287699_0 (sequence is synthesized)
gcccactgatgggattgtgacatatacctaggtccagctcacaggcatgatgataactgtcatacgtggacccagccaataagagatttttgctcttaggcttattacaacagaaggcgt

SEQ ID NO: 1009413 - DNA, 120 bp, Artificial Sequence
  ENSG00000287699_1 (sequence is synthesized)
agaagaatgttgacatattcctggcccagaattcaggttgtattgtgccatatacctgggaccaaattacaagcacaatgatgaatcttttacctggagtcaagacatgggcaggatgat

SEQ ID NO: 1009414 - DNA, 120 bp, Artificial Sequence
  ENSG00000287699_2 (sequence is synthesized)
ggaacttatcactggacctttccacagtgttattgtgacatatgcctttgcccaacatgtggtgatttgactccccagactgggtccagttcacaaataaaattgtgccgtatacttggc

SEQ ID NO: 1009415 - DNA, 120 bp, Artificial Sequence
  ENSG00000282849_0 (sequence is synthesized)
actaccgatgccaggacctcatgccagagattctgatggacttggaatggggtggagcctgaaggctggcctattctaaaggctcttcagggatttttaatatgcagctaggattgaaaa

SEQ ID NO: 1009416 - DNA, 120 bp, Artificial Sequence
  ENSG00000282849_1 (sequence is synthesized)
tcacttacgtagacatacagtttttatgttttaacaaatacttttaaggcaaacaaactactgggatgatctttggatgcaccacagaactttttcagaagcatttgggcgtcccaatga

SEQ ID NO: 1009417 - DNA, 120 bp, Artificial Sequence
  ENSG00000282849_2 (sequence is synthesized)
gattgagggcttactttgctgccttagtgttctctcctaaccagaagcctttctgttttggaatcatggagcacatcttttgtgggctgcgaaaagctctaggtggaagggaagagcatc

SEQ ID NO: 1009418 - DNA, 120 bp, Artificial Sequence
  ENSG00000282849_3 (sequence is synthesized)
aggtggtgaagctgaaccaggagagtctaaaaaccacgtggcctctcaggcacccttgagtctagagggagttccctgatcttacatttgagagtgattctaggggccaacaccttgagg

SEQ ID NO: 1009419 - DNA, 120 bp, Artificial Sequence
  ENSG00000282849_4 (sequence is synthesized)
ccagaggcaacagaaagaggattgagtgaagcaggaagcctgcaaagccctggattccaatccagctctagctgcgaggcgctgggcacgggtcactgctctgcggctctgcttgcttgt

SEQ ID NO: 1009420 - DNA, 120 bp, Artificial Sequence
  ENSG00000282843_0 (sequence is synthesized)
agcctgaaacggggccccatgcagggtagaggcctgccagctgcccggtgactaggggactgtaagacgaccccaggaagcccctggaacaacccaagaaaccactatagggaaggtggc

SEQ ID NO: 1009421 - DNA, 120 bp, Artificial Sequence
  ENSG00000282843_1 (sequence is synthesized)
tggtgctggggctacaatggccagggcttcattttccctgttcttcaacaattttttttgagcacctaaaatgtgccagacattattctggccctggggataccacagtgaacaagatag

SEQ ID NO: 1009422 - DNA, 120 bp, Artificial Sequence
  ENSG00000282843_2 (sequence is synthesized)
accaagcccctgccctcgtgggacatcgtggagagcagtgaggaaattaagtcaaaaaatgaaggaagaaagaaaaagacagaagcagctctgcccaatggacactctccatctagatct

SEQ ID NO: 1009423 - DNA, 120 bp, Artificial Sequence
  ENSG00000282843_3 (sequence is synthesized)
ggcccacccgctgtggttctcacgatccaggttgctggtgagacactgtctcgcaagaacttcatgggacagaagggctcagcacctttcccaaaatcactcgttgatgcagcagacatt

SEQ ID NO: 1009424 - DNA, 120 bp, Artificial Sequence
  ENSG00000282843_4 (sequence is synthesized)
tcttgggcccctagcatgggccaggcaatgaatagatgaagaggagctggtcgcagcctgccttatagaaagccctcccagatggctctggctcccagggaatgtgctgttctctaagca

SEQ ID NO: 1009425 - DNA, 120 bp, Artificial Sequence
  ENSG00000282843_5 (sequence is synthesized)
cacctgtttcaactctgttccccttgtcactctggaaccagtcccctgctggtggcatctccatctccccaccccctgctctccagcctggatgcccatatagaaccaacgagcagcagg

SEQ ID NO: 1009426 - DNA, 120 bp, Artificial Sequence
  ENSG00000282843_6 (sequence is synthesized)
gtggccatttgtacactccacacagtgacatcagcgaagcatgtcctcaggctccccccaaaagtcctaggccccctggagaaaaggagggaggaccagcacgctgactcacattgagtg

SEQ ID NO: 1009427 - DNA, 120 bp, Artificial Sequence
  ENSG00000282843_7 (sequence is synthesized)
gcagctcttggcacatgccttcgctcgccgtggcctcttgcatcccacaaggaagggacagttgaggaaagcgtggcttggagaggaagagagtcccacaggtcatccaggacagccacc

SEQ ID NO: 1009428 - DNA, 120 bp, Artificial Sequence
  ENSG00000282843_8 (sequence is synthesized)
cgaccctgagctcatgctcctgccattacccaggacccccagactattttcccatatgtcccggtcccatccctgtcctgagccaaagtgtgggctgcctcaccctgcagcccttcctcc

SEQ ID NO: 1009429 - DNA, 120 bp, Artificial Sequence
  ENSG00000282843_9 (sequence is synthesized)
tccacacttacgccctgtgtcctgggatacagcaggccgggaagagggggacacttcctggctgtgggacaagacaagacaaagatcctttttggccgtggtggtccggtctaggccaca

SEQ ID NO: 1009430 - DNA, 120 bp, Artificial Sequence
  ENSG00000282840_0 (sequence is synthesized)
gcttggagaacgcagcgctggagctggccccaggcgggcagtggcctcgggcgagggcagaagggcactccgggctgtgaatagaacacttgcttatcccttcagaggacaagccggtgg

SEQ ID NO: 1009431 - DNA, 120 bp, Artificial Sequence
  ENSG00000282840_1 (sequence is synthesized)
caggcctggagcccccagtgacgggttgagcagtgggcagcgaggcagatgggtccttaaagagtagctgacgtcttcagtgtcagcttctagcgtggcctgacagcccccagcatcccc

SEQ ID NO: 1009432 - DNA, 120 bp, Artificial Sequence
  ENSG00000282840_2 (sequence is synthesized)
ggaatgccccccacggtctatctgctccaatagactaaaaattccctaaatagaagcacccttgaggccgctatcaatatggtacctgcacagagtggatgttaagtaaatacttgatga

SEQ ID NO: 1009433 - DNA, 120 bp, Artificial Sequence
  ENSG00000282840_3 (sequence is synthesized)
gcgaatgacaagtgatgggagacttgaaggacaaacttccagggacaggaaggacagtgctgggctttttcttttgagttttggaaagccgttgggcagtgtaattactggattaggacc

SEQ ID NO: 1009434 - DNA, 120 bp, Artificial Sequence
  ENSG00000282840_4 (sequence is synthesized)
gggctggagaccagcttccaggctaatctctgcggacctggtgaacttccccttctctgttctagcctccagaaagttgcatttgcttcccctctgcacgcttccttcaccaggttcctg

SEQ ID NO: 1009435 - DNA, 120 bp, Artificial Sequence
  ENSG00000282840_5 (sequence is synthesized)
gtatacatccttcacatttcagcgtgggcatgccaacagaaaagccctcaggcttcccaagatgaatcataaagccctgaggtgttccctcccaggactctgcttaacccctttcttgca

SEQ ID NO: 1009436 - DNA, 120 bp, Artificial Sequence
  ENSG00000282840_6 (sequence is synthesized)
tgtaccactgtgctatagaatgggttgttcatttgcaaaatgacctcattaagacagtaagctctttgaagctgggggtaggggtcttatccaattcatcacggcgtattcgtggcacat

SEQ ID NO: 1009437 - DNA, 120 bp, Artificial Sequence
  ENSG00000282840_7 (sequence is synthesized)
agagacttccaggttttctggcccaaggaattgggtcacctacaggaattgcttctcttagcaagggacatcagtcatattggattaagagcccttcctactccagtcgacttcatctta

SEQ ID NO: 1009438 - DNA, 120 bp, Artificial Sequence
  ENSG00000282840_8 (sequence is synthesized)
actagtgacatctgcaaccaccctgtttccaaataaggtcacattctgaggagcttggagacagaacccggacttttatgggcaagtgagatgctgtgaactgtttacccactaagaaca

SEQ ID NO: 1009439 - DNA, 120 bp, Artificial Sequence
  ENSG00000282840_9 (sequence is synthesized)
tagaaatgatatcgggggatcatgatcagtttgagagacatgggcaggatgaaatgaaaatcaacaatgctaaaagttgggagccaatcagatagaagtctgaaatattatatgacactc

SEQ ID NO: 1009440 - DNA, 120 bp, Artificial Sequence
  ENSG00000282840_10 (sequence is synthesized)
aatcagaaagttcagtgtgatttgagactgtttaagcaatgggattatataacaaacaagagcaaaataggatgccctaacctggaatattggacctcaggactgaaaaacaaaagcaac

SEQ ID NO: 1009441 - DNA, 120 bp, Artificial Sequence
  ENSG00000282840_11 (sequence is synthesized)
tggagggagtccagaaaagatcatctacagtgatggttttaaagcaaaatatgaactttatagtgtagccaaaccacagagtcagacccaaagggcatgataaaaatctacaaatagctt

SEQ ID NO: 1009442 - DNA, 120 bp, Artificial Sequence
  ENSG00000282840_12 (sequence is synthesized)
tggggtctaaacaccaaggataaagaggaattttggctggagatatgaaaagcttcaagggataaagttaaggaaaaggaaatttaggttaagcatcagaatatatcctttgatagtaag

SEQ ID NO: 1009443 - DNA, 120 bp, Artificial Sequence
  ENSG00000282840_13 (sequence is synthesized)
atgtgtgtgtttgtagaacagtctctcaagggaatagaaagaatactgatgagttttctaggatctctgataagaggatagcttgatgtcagtccaaggattctagaacttccattggaa

SEQ ID NO: 1009444 - DNA, 120 bp, Artificial Sequence
  ENSG00000282840_14 (sequence is synthesized)
tattcttgtgccatgaccagatggaatagatagcataagatgttttttaaatcctagatgtctacaataattatcattgggaatgaatagtgaacagaatgttctgctctttaatgaaag

SEQ ID NO: 1009445 - DNA, 120 bp, Artificial Sequence
  ENSG00000228886_0 (sequence is synthesized)
tcattcagcaaatacatatgacgcaatcacgatgtatcaggttcactcctactagatgtacatgaacaaggcctttccctgaaggaaaagtggaatagacatgagattaagcatgcaaat

SEQ ID NO: 1009446 - DNA, 120 bp, Artificial Sequence
  ENSG00000228886_1 (sequence is synthesized)
ttcctctacagagtgttaaaagtttctcggctgggtgtgagccactgcacctggcagaggtcagagactctgtgagcaagtgacttcctaatactttataagacttaagcctaaaatgag

SEQ ID NO: 1009447 - DNA, 120 bp, Artificial Sequence
  ENSG00000228888_0 (sequence is synthesized)
cagaaacagaattccactcttaaccccctcagtttgcagaatgtctaagtgtagtgactctagactcaatgtgagatgaaaagggaaaaaagaaactgcgtataaatagtactagagatt

SEQ ID NO: 1009448 - DNA, 120 bp, Artificial Sequence
  ENSG00000228888_1 (sequence is synthesized)
tgggttataggattggtaattcagcgtgaagttcacggatgcctcttcaagaaacagaagcttcactcaatctggctttcaaaatggtgagaaaagaagtggactcacataattgaagag

SEQ ID NO: 1009449 - DNA, 120 bp, Artificial Sequence
  ENSG00000228888_2 (sequence is synthesized)
gcttgagttctggaagcttagaagtccatgactggggtcccagcatgcttggattcaggtggccttcagacacttcttccacaaggaaattgggcagcttcctgaaatgaacaacccgta

SEQ ID NO: 1009450 - DNA, 120 bp, Artificial Sequence
  ENSG00000228888_3 (sequence is synthesized)
tccgcttcatgactgcaagcctttgtgaaagtttctgacctctttatgcttcaggaatcttagcaatgaaacaaggataatggcacttgctgtgacgatcatgcttccaacagttcaaaa

SEQ ID NO: 1009451 - DNA, 120 bp, Artificial Sequence
  ENSG00000228888_4 (sequence is synthesized)
agccaagggaagatcagaagcttatcttccagccaactggggtgggttggtgggggttggtggaatttgacagaagcttgtaatcagccacattggaggatgaggggaaggcctgtcatc

SEQ ID NO: 1009452 - DNA, 120 bp, Artificial Sequence
  ENSG00000228888_5 (sequence is synthesized)
tgttttgaaacgtgttacgacaagatgttacatttctggaaacctgggtgcagaaaaagatgcacttttctgagagtttgtgcggattgagtgaatctgcttcatttcagcccgaagttg

SEQ ID NO: 1009453 - DNA, 120 bp, Artificial Sequence
  ENSG00000228888_6 (sequence is synthesized)
ctggagggtccttcgtcaggagacagtatatatagacttgccagaagtgcaataattattcagtctctttctcagtattaagccaatgtacaaaataattacacatctgcttctatagta

SEQ ID NO: 1009454 - DNA, 120 bp, Artificial Sequence
  ENSG00000228889_0 (sequence is synthesized)
gggaagtgcgtcggtaggggagggctcacctctccaggttgaaacgatggcggtcagaaccgcctgagctaaatgcaagatggtatggcatccagactctgctcataagtatctgcagtg

SEQ ID NO: 1009455 - DNA, 120 bp, Artificial Sequence
  ENSG00000228889_1 (sequence is synthesized)
atccataccttgattgtacatctactctgcatcctgaggacctgaacatgctaactggtggctgcagatttgtcttctaaggagcaagtgtggtctgtggacaggcagcttcagcctcac

SEQ ID NO: 1009456 - DNA, 120 bp, Artificial Sequence
  ENSG00000228889_2 (sequence is synthesized)
ctgggattttgtttgcactagaaagtgccaagccctaccctagacctattaaagcagaactggcgtttaacaagacaccccagaattatgaaaactaaagctatttacagcttttaacaa

SEQ ID NO: 1009457 - DNA, 120 bp, Artificial Sequence
  ENSG00000228889_3 (sequence is synthesized)
catatttgtttctctctacctggtttctccagaatttggaaactatttagtcactgaaaactaagctgtgttttcttaaaaccctgcaaactgaagccagacaacttgaacttcagaaga

SEQ ID NO: 1009458 - DNA, 120 bp, Artificial Sequence
  ENSG00000228889_4 (sequence is synthesized)
aaataacagcaacctatttacgtacataagccactttcatacctgcctactaatgtatggacttcagagtaatgtggcttatatcgatttttctaggattgttcttttgtttgttgttgt

SEQ ID NO: 1009459 - DNA, 120 bp, Artificial Sequence
  ENSG00000228889_5 (sequence is synthesized)
tttttctcccttcctccctgctattttctcttcacagaatgtgagacttcacaacctactaaaaatgagcttttgggacttacccatctaggaataaaccatcatagctatgagaaatca

SEQ ID NO: 1009460 - DNA, 120 bp, Artificial Sequence
  ENSG00000228889_6 (sequence is synthesized)
agtgcgtcggtaggggagggctcacctctccaggttgaaacgatggcggtcagaaccgcctgaggtaaaaacgggtggcactggggaagcggaggcgtagctcccgagagcctcacactt

SEQ ID NO: 1009461 - DNA, 120 bp, Artificial Sequence
  ENSG00000228889_7 (sequence is synthesized)
gtgctcagtgccgcctcacccctggtggatccgcgatggccgcggattcccctggattgccggcgctgggcaggagcgccacttctaatctctcccgagactggacgcccggcgccttcc

SEQ ID NO: 1009462 - DNA, 120 bp, Artificial Sequence
  ENSG00000228889_8 (sequence is synthesized)
acgcgcgttgtgtctttccgggcggtccctcgaagctggctaccccgcgggctgttgactgcagtgggatctggtcactcagatgcggatagagggctaaatgcaagatggtatggcatc

SEQ ID NO: 1009463 - DNA, 120 bp, Artificial Sequence
  ENSG00000228889_9 (sequence is synthesized)
gtgcaccttagagtctgagatgcactagtgtagtgattcgcagggggacaattttgacctccaggggacaatatctggagacatttttgggtgtcacaacgtgctggggagagggtgcta

SEQ ID NO: 1009464 - DNA, 120 bp, Artificial Sequence
  ENSG00000228889_10 (sequence is synthesized)
ctggcatctaatgggctgaggccaagggtgctgctaaacatctggcaataccgggccaacctcccccctcctcctgcccacagtaaagaattaccccgcctggattgtcagtagtgcaga

SEQ ID NO: 1009465 - DNA, 120 bp, Artificial Sequence
  ENSG00000228889_11 (sequence is synthesized)
ctggctgacatttccaccttttctcttttctagattttattacaagaactcaatctgttggtctctaggaatcacctattgccttgctatgttttgttgaacctgtttttgaatctgctt

SEQ ID NO: 1009466 - DNA, 120 bp, Artificial Sequence
  ENSG00000228889_12 (sequence is synthesized)
tctacattggggaaataggtatacgtttgtaaaccttaaaagctctgtatgctataaggaaatcaccagacacgtggataagctttgcagaggtgaagggctgtctccaccagagagacc

SEQ ID NO: 1009467 - DNA, 120 bp, Artificial Sequence
  ENSG00000228889_13 (sequence is synthesized)
cagaaggagtcagggtaagcctgactcatcatgagatcaggtatccccaatccacagcggacttccacagttcaccttcctaggtaaccgctctgccttcccaggtaaagtaggaataat

SEQ ID NO: 1009468 - DNA, 120 bp, Artificial Sequence
  ENSG00000228889_14 (sequence is synthesized)
atcagaacttacagcatattttgaggtcaaattgtagaatttggtgatttcatttttattattactcaaccttttatttacaaccaaattaataaggctacttacacataacaatgtgtg

SEQ ID NO: 1009469 - DNA, 120 bp, Artificial Sequence
  ENSG00000228889_15 (sequence is synthesized)
gacatacacattaagagaatcatttgctgcctagcactcctacctaggtactttaagaacatcattgagtggatactccctctgctgggtaaaatactttgccacaatatcagctgaaat

SEQ ID NO: 1009470 - DNA, 120 bp, Artificial Sequence
  ENSG00000228889_16 (sequence is synthesized)
gatacctcttccagactgtaatggcagaagtagttatcccctctttcgtgctgtcatcacacttgatgcatgcctactttataatacttatgccattgtctctgttattgggtttctgtc

SEQ ID NO: 1009471 - DNA, 120 bp, Artificial Sequence
  ENSG00000228889_17 (sequence is synthesized)
ttctactgtgaaagggtgagcccataaaaaacagggaatgtgtctttcaaaatgttgtatcctgctcattctgatgtgaagccattgtcctccttcaataaaataaaacagcatttctga

SEQ ID NO: 1009472 - DNA, 120 bp, Artificial Sequence
  ENSG00000256403_0 (sequence is synthesized)
gaagattaccacagaaggacaaatcagtcgggaaaaacatatcctgctcccatccatcagtgatcctggagagtccagcaggctaaagaccaaagaggtaacagctattaccactgattg

SEQ ID NO: 1009473 - DNA, 120 bp, Artificial Sequence
  ENSG00000256403_1 (sequence is synthesized)
gggaaggggcaatgaagcagtcaagctttctctttctgctgaccaatcaatacaaagcggccactgaacttcaatgacgcattgttccaactgatttccggatccttcacatgaaccagc

SEQ ID NO: 1009474 - DNA, 120 bp, Artificial Sequence
  ENSG00000256403_2 (sequence is synthesized)
ctggggaggggctgaagggtagggagccctatcccacctgcatcagaggcctggaagcactgagccatgcagacccaatcatgattgctatctgggcaacagggccctggctggagcctc

SEQ ID NO: 1009475 - DNA, 120 bp, Artificial Sequence
  ENSG00000256403_3 (sequence is synthesized)
acagaaggccctgtttacagtaataacagcaccaggccctgctgtctgagcagaggcaaggtgcctggggccagaatccccaggcagcctccatctgtgccttatctagcctgccagcca

SEQ ID NO: 1009476 - DNA, 120 bp, Artificial Sequence
  ENSG00000254934_0 (sequence is synthesized)
tcaggtcctcagaccgaccagcccaacgaacatctcaccaattttaaatcaggacctaccagtctgccctgctcatacttgatctggatgagactgataccctgcgagacgcaacagaat

SEQ ID NO: 1009477 - DNA, 120 bp, Artificial Sequence
  ENSG00000254934_1 (sequence is synthesized)
cctgcgagacgcaacagaatcagctcctgggattgtgttagcagaatgacgggagtgtgagatccaccacatggcgaggcaccccaggaacctgttttcttcttgaagagcaaccgagaa

SEQ ID NO: 1009478 - DNA, 120 bp, Artificial Sequence
  ENSG00000254934_2 (sequence is synthesized)
attcaggagaagatgtgtggaacacagcctggacatgccccaacctggttgatgaattccaccccaagtagtggaagaaacacacctacaacatgagcagagaagatttttcttctgtac

SEQ ID NO: 1009479 - DNA, 120 bp, Artificial Sequence
  ENSG00000254934_3 (sequence is synthesized)
tttccaggacttgaagctgctttgttttttggtcgctgggtggggaaggaggaacaatagtatagcttccagaagagagaagagagatatctcttgagtgtgaattaagcagtaccaaga

SEQ ID NO: 1009480 - DNA, 120 bp, Artificial Sequence
  ENSG00000254934_4 (sequence is synthesized)
ggcctcaagctagctctctctcctgctttaaattctactgttaagagtttttctttaagtttaaaaccttgaaagctccatgatgctcctgagtagaacaataaagccattagtagtcaa

SEQ ID NO: 1009481 - DNA, 120 bp, Artificial Sequence
  ENSG00000254934_5 (sequence is synthesized)
cctcagtctcctgagtagctgggactccaggcaatggtcaggtggagtaaaacataaggaagaacatctttttggttcaaagcatgaaaaaaattgggtaacacaccttccttacatcta

SEQ ID NO: 1009482 - DNA, 120 bp, Artificial Sequence
  ENSG00000254934_6 (sequence is synthesized)
ggtaacacaccttccttacatctagctgggccattgaaccagaatatgccaatgtttaaaacactgaaatgccagcttttctcttaaaggacagcatggaggtgtctgatttctgcttgg

SEQ ID NO: 1009483 - DNA, 120 bp, Artificial Sequence
  ENSG00000254936_0 (sequence is synthesized)
aaaacaaaaaccaccaaaaaaaaactgccaaagtataggttatagaagagcagacttacttggtgtttgcaagaaagacaaagagatttagagtttccatcaagtttgttgtgagttact

SEQ ID NO: 1009484 - DNA, 120 bp, Artificial Sequence
  ENSG00000254936_1 (sequence is synthesized)
aggaggtagtgccagagaagcaacatggcattaggctgcatgggtagaagtatagtactgagaacacgggagagcatcggttttgttgtacttgggactaaacattctgagggtcctgga

SEQ ID NO: 1009485 - DNA, 120 bp, Artificial Sequence
  ENSG00000254936_2 (sequence is synthesized)
cgttttatgagaggctttggtaaactgaagagtgatgtaggtacagatgcacagatgtagaacacccctgcgccagcccagcatcaatactttttttaaaaagtgccctgtattttcctc

SEQ ID NO: 1009486 - DNA, 120 bp, Artificial Sequence
  ENSG00000254936_3 (sequence is synthesized)
atgccctggagataatggagccgtcttttactcactgcccacttctcatctctgtctgctcctgcttcctcttgttggcttcctgtgcctccctccaaccttctcctacccccctgcagt

SEQ ID NO: 1009487 - DNA, 120 bp, Artificial Sequence
  ENSG00000254936_4 (sequence is synthesized)
gttttaaactctcttttcttcttaatttctgttcgcctcaaccaaccctaaagtgctcttgtactcacagttaggcttttataattgcttgatcagtttatcagtcaatttcagtatttt

SEQ ID NO: 1009488 - DNA, 120 bp, Artificial Sequence
  ENSG00000254936_5 (sequence is synthesized)
gttgagctttgacaaagatttttattctaattctatggagcccatgtaataattgttttttcagcttctgcttgtgacttctctacttcaaaaaatgtacgtgcttgtttctgccagtta

SEQ ID NO: 1009489 - DNA, 120 bp, Artificial Sequence
  ENSG00000254936_6 (sequence is synthesized)
catcccatgtttcattggatgtgtgtactgtgttcacatcgagttggccccaccgctgagtgggttattgatgatctcaagagtccagtagaaatgaagggtagaaacttagccacatcc

SEQ ID NO: 1009490 - DNA, 120 bp, Artificial Sequence
  ENSG00000254936_7 (sequence is synthesized)
gataatagaatagcattaaggttggcttttttctccctcaaatgattaaactgtagtttcatatgtaaatgccagtaaattagaatcattctagtagggaagataaagtaaataagtaaa

SEQ ID NO: 1009491 - DNA, 120 bp, Artificial Sequence
  ENSG00000254936_8 (sequence is synthesized)
aatatagtatgttagtaggaaatcgtgctagagagagagagctcaagcaggacaggaggggcctagagattgcttgggatttgatgaagagacaggactgttttagagaggctgctcacg

SEQ ID NO: 1009492 - DNA, 120 bp, Artificial Sequence
  ENSG00000254936_9 (sequence is synthesized)
gcagtgcctctgagcaggtagcactggagccgatcctctgctgcgatgaggtggcaagccaagaacatcatgagggagggaagggcagtcccagaagagagagcacagtgcaggtgccag

SEQ ID NO: 1009493 - DNA, 120 bp, Artificial Sequence
  ENSG00000254936_10 (sequence is synthesized)
tgcaggtgccaggtggggaccacgggacactggaactgccttggtgtgtttatttccaaatagtgtctggcattacactgagatgaggagacttttttgtttttcattttttgttttttt

SEQ ID NO: 1009494 - DNA, 120 bp, Artificial Sequence
  ENSG00000254936_11 (sequence is synthesized)
gggtgcatattggatttcttcaggagattcagcctcttgaaaaatatgaaatatagacaagtatatatacataaagatatatttgagtattttaaactttatatagccaagtatcttaaa

SEQ ID NO: 1009495 - DNA, 120 bp, Artificial Sequence
  ENSG00000254936_12 (sequence is synthesized)
ctctgcacacttgaatttttaatcctcgtgtatatccattatgattatttctattagttccagtttgaggttggtgatgatattgtcatagaagctttgtcaggcttcacattgtagcag

SEQ ID NO: 1009496 - DNA, 120 bp, Artificial Sequence
  ENSG00000254936_13 (sequence is synthesized)
ctggtcttgaaggtggggcatatccttgttcaatgtgactactttagttgcctgtccaatatgaagtagaaaagcagatttctggattacagtatttgtcaacatagaatttgccgattt

SEQ ID NO: 1009497 - DNA, 120 bp, Artificial Sequence
  ENSG00000254930_0 (sequence is synthesized)
ggtcatgggcctttttctttctttgtttgccatgttatctccaacatctggaacagagtctggcacaaagcttttttactgcagggcttccgtgaatttggagatttttctgagctggga

SEQ ID NO: 1009498 - DNA, 120 bp, Artificial Sequence
  ENSG00000254930_1 (sequence is synthesized)
tcatccagaatgtaccaggatggggcctagaagtcaacttcaaactttgatcttcaatcctacaaagaatgatcatctcagaaaacttagggcaaaagtaaatatgcatggatttacaaa

SEQ ID NO: 1009499 - DNA, 120 bp, Artificial Sequence
  ENSG00000254933_0 (sequence is synthesized)
ctttactgcagattcctcagagcctttcatatgttctagtgccttgtgaatcgccagagaatttcccaaatgcatgtgacgacagagctctttctctcgtaggagatcgggaccagcttt

SEQ ID NO: 1009500 - DNA, 120 bp, Artificial Sequence
  ENSG00000254933_1 (sequence is synthesized)
cgccagcaccgtctttgggaaatgctgcttgtgcagtcctcaccagccccacccatcacacggagcatcggaaaacttggcccccatgaggagcccgtagctgaggttgtccgcacatcc

SEQ ID NO: 1009501 - DNA, 120 bp, Artificial Sequence
  ENSG00000254933_2 (sequence is synthesized)
ccgggcccgggtggctcacctgggacggggccgcaggagcagccgggcaggtcgccggaggtgcaggcccgggcgatggcgtggctgatggcggcggccgacagcgcatacacgaaggcc

SEQ ID NO: 1009502 - DNA, 120 bp, Artificial Sequence
  ENSG00000254933_3 (sequence is synthesized)
gactcccgggtccctgagggtgggaggggaaggtcagccgacgctgatccagggctaggaccctgcccaggtcagaggtcctccaccttcgcccacaccctgctgtaaccaaggtgacgc

SEQ ID NO: 1009503 - DNA, 120 bp, Artificial Sequence
  ENSG00000254933_4 (sequence is synthesized)
cagcaggggtcggcactagggccattgagatgtcacccctgcttccccaattccttctgaatataccagctgacagccacactcaggaccccacacccacaggcatgccctcacccacgt

SEQ ID NO: 1009504 - DNA, 120 bp, Artificial Sequence
  ENSG00000254932_0 (sequence is synthesized)
agtcccgtcctgacctccagaccttgcatgtggattggttttgctgctgtaaggaaagggctcaaggacagcagctcagcatcctgtggctgcacacgcagagtgagagggacatggtgg

SEQ ID NO: 1009505 - DNA, 120 bp, Artificial Sequence
  ENSG00000254932_1 (sequence is synthesized)
cagggcctatcgagggtctgcgtggccaggaacgaggagtgtcatgaccgagaatgaatactctggatgtggtggctggctccttgtgaagaagaattcaatcagattccatttgattaa

SEQ ID NO: 1009506 - DNA, 120 bp, Artificial Sequence
  ENSG00000254932_2 (sequence is synthesized)
ttcactccctcttccatggcagaccatgatgaactagggtttgctgttttcacggcttctgtcactgttggagctgaggctgaggctgcagcaggagctcctctggccccgaggcaagag

SEQ ID NO: 1009507 - DNA, 120 bp, Artificial Sequence
  ENSG00000254932_3 (sequence is synthesized)
acatgttctctgcatccccaggggacccaaagcaacttctggtttgggttaaagaggacttgggtgaccccaccctgccagtcatccaccctctggcagccagggcggcagcaggggagg

SEQ ID NO: 1009508 - DNA, 120 bp, Artificial Sequence
  ENSG00000254932_4 (sequence is synthesized)
gggcagaaggctgccacagtgcttctctcccctgccatttcctctgcagctccctctctggccctgtttttcagacctctagtaataaaaacaagccaataaaatgaacatgaaaatata

SEQ ID NO: 1009509 - DNA, 120 bp, Artificial Sequence
  ENSG00000254938_0 (sequence is synthesized)
atggccttagaatgtaaaaatgaatggccacttccaggtatggctgagaagggtgaaaatgcatgcacccacagacacacacacacaccgtggaaatgaggaaaagttacttctctctgt

SEQ ID NO: 1009510 - DNA, 120 bp, Artificial Sequence
  ENSG00000254938_1 (sequence is synthesized)
tgtaaatttaaatgcagtccagagtagtgaaggccgtttgtaaggtctgctgagctaatggattcataatgacttttaaagcttcactcgggcaaacagagcactgacaccacctggcaa

SEQ ID NO: 1009511 - DNA, 120 bp, Artificial Sequence
  ENSG00000254938_2 (sequence is synthesized)
agtgcagtggggatcttcacattgagggagatttaactccacctttcgttcatcggttcaatgatttgatagcatgattatggtgctgagcatttatctttgtctaatcgatagatttct

SEQ ID NO: 1009512 - DNA, 120 bp, Artificial Sequence
  ENSG00000254938_3 (sequence is synthesized)
tgggatctaaagatgcatcttatggtgatatagacaaaagaggcatttatggagtcagccatgggagagcatatcagattgtgcaagagcaataatatatggaagtgagcagcatgagtt

SEQ ID NO: 1009513 - DNA, 120 bp, Artificial Sequence
  ENSG00000230404_0 (sequence is synthesized)
ccactaggcaagtgcaatgacaaaagaaacaagcgttaatcctgtctagccagagcactaaggaacctgcttattctgcgaatgcctcagcaaggtcctaaaggagagcttccactgcct

SEQ ID NO: 1009514 - DNA, 120 bp, Artificial Sequence
  ENSG00000230404_1 (sequence is synthesized)
ttctcatcggaatctcacaaccaccaaatacgaccaggcattattcatctgattttacagatgaggaaatcaagggtcagagaagtgatgtgacttgcccaaggcccacagatggtaggt

SEQ ID NO: 1009515 - DNA, 120 bp, Artificial Sequence
  ENSG00000230404_2 (sequence is synthesized)
ggcaaagccaggacttggaatccaagataaagaaaactcagtgggaaggagaagtttgtgattaaatccaattaaaggaatagagtaaaataaagaacacagtaaatttctcaccaggaa

SEQ ID NO: 1009516 - DNA, 90 bp, Artificial Sequence
  ENSG00000228262_0 (sequence is synthesized)
aatcctctttaaggtggaatataattgacaagccgacatcagtctccagagtgaatccaaggagtggacccaagacatttgtgttctgtg

SEQ ID NO: 1009517 - DNA, 120 bp, Artificial Sequence
  ENSG00000228262_1 (sequence is synthesized)
gtgaatccaaggagtggacccaagacatttgtgttctgtgatgtggtggcatgttacctgtcatctccgatgcataactcctaaagtgcgtctggggcagttgtacagattgcagaggat

SEQ ID NO: 1009518 - DNA, 120 bp, Artificial Sequence
  ENSG00000228262_2 (sequence is synthesized)
aatactcaagatgttctccaaggccaactagtcatcagtttattcatgtttctgggattggattcatgaactcatcctttgaactatttcaacaagctttttcatgtaactaatctgcgg

SEQ ID NO: 1009519 - DNA, 88 bp, Artificial Sequence
  ENSG00000228262_3 (sequence is synthesized)
gaactatttcaacaagctttttcatgtaactaatctgcggaaggtagaaaggggaaaactgttgggtgctaaaatgacaactggttca

SEQ ID NO: 1009520 - DNA, 120 bp, Artificial Sequence
  ENSG00000228262_4 (sequence is synthesized)
ggtctcatggattccaaggaatggaatcttgcgccatgtggagaagcgtcagataattaggcagcagtccaacaattaggttttgtggaacttttactatgtcatctatttattggaatt

SEQ ID NO: 1009521 - DNA, 120 bp, Artificial Sequence
  ENSG00000228262_5 (sequence is synthesized)
gatctatttattctatttatcaggcctataaaatcatgtaatggccatggcttcaactagactccacatcttgaatcacagaactcaacgaatggcatcaactacaagctggtattctgc

SEQ ID NO: 1009522 - DNA, 120 bp, Artificial Sequence
  ENSG00000228262_6 (sequence is synthesized)
tatacatttaagaggccattttaatattctattagtctagcagcttctaagtgatgagggatatggggggactggaggatcccgtgctcacttccttttctgtaaaaggagctctttgat

SEQ ID NO: 1009523 - DNA, 120 bp, Artificial Sequence
  ENSG00000228262_7 (sequence is synthesized)
ccaaggtgacatggtatgggatccaatgacaataaatcagttattctgtgaaccctgatcaaaacttgactaaacttttgacagttaggttttttcctgaccacagactcctcacctttc

SEQ ID NO: 1009524 - DNA, 120 bp, Artificial Sequence
  ENSG00000228262_8 (sequence is synthesized)
ttttcttagaaaatttacattggaaaacagatgtaaattttctccagcctcttgcaaggtttacagtccaggactttgaggtcctgggagtcatccttttgaaatacaatcatcaaagaa

SEQ ID NO: 1009525 - DNA, 120 bp, Artificial Sequence
  ENSG00000228262_9 (sequence is synthesized)
gatagtgctccaatctcctagtctctgtgggagggttggaacctaacttcagtaaactaatcaccaattagcaaacacagaggggctgatcatactgacccactttcccactaaaatgtc

SEQ ID NO: 1009526 - DNA, 120 bp, Artificial Sequence
  ENSG00000228262_10 (sequence is synthesized)
tagtactttccaccagctcaccacagtgcttaaaaactctcctgtcttttgttttactagagttgagtccaatctctttcatctattgcaatagtgttgaataaagtcttccttgcctaa

SEQ ID NO: 1009527 - DNA, 120 bp, Artificial Sequence
  ENSG00000228262_11 (sequence is synthesized)
tacccagggatcatctccattccttccaactgaaagggaaacaaacaaggaggagcacgcctggggaggttttcacaggccaggactggaaatgcacatttctcttttcctcacattcca

SEQ ID NO: 1009528 - DNA, 65 bp, Artificial Sequence
  ENSG00000228262_12 (sequence is synthesized)
ctagagaacacatgcaattttgttacatgggaatactgtgttgtgctgaggtctggagtatggat

SEQ ID NO: 1009529 - DNA, 120 bp, Artificial Sequence
  ENSG00000228262_13 (sequence is synthesized)
gattcctttttgtaagattagtctccagttttcatcaagcagtttagtggggtattttaggcccagttccctctccacagtccccaaaggtcttctgttaactttaaatccgcaaagaga

SEQ ID NO: 1009530 - DNA, 120 bp, Artificial Sequence
  ENSG00000228262_14 (sequence is synthesized)
gagatctctgccaagcagcaactgcaagagcatgtgggtcaatgttaccagcagacactcaaagcccattccctttacttcaacaccgctttataaattatcttagagacgttgtcaggt

SEQ ID NO: 1009531 - DNA, 120 bp, Artificial Sequence
  ENSG00000228262_15 (sequence is synthesized)
accgctttataaattatcttagagacgttgtcaggttggtattagaggtgagtggtcatgacttcacgatttctcatctttctgaatgcatagtggctgggagtggtggctcatgcctgt

SEQ ID NO: 1009532 - DNA, 120 bp, Artificial Sequence
  ENSG00000228262_16 (sequence is synthesized)
tttgcctcccaccattattctgaggcctcctcagccatgtggaactgatgacacatctagaagaccctcaccttatgcttatgctggccccttgatcttggcctccagaaataacccaga

SEQ ID NO: 1009533 - DNA, 120 bp, Artificial Sequence
  ENSG00000228262_17 (sequence is synthesized)
acagcaagattttaggaattattggaaaagcattttttgaactgtgtgttcatcttaaaagccaaattctccctcccttcaaaggacagcatgaggtataatgaagaatcttgaggtcct

SEQ ID NO: 1009534 - DNA, 120 bp, Artificial Sequence
  ENSG00000228262_18 (sequence is synthesized)
aagaggctggagtgatgcaaccatcagagagtgaaaatactcagttacctcctggtttatgaggcaatgaagtattccagcacataaatattgacgctgagacccatgggatgtaggagt

SEQ ID NO: 1009535 - DNA, 120 bp, Artificial Sequence
  ENSG00000228262_19 (sequence is synthesized)
gctgagcacatttgcaagacataaagaccgaagggaagtttaccaaccctggagaacatcagctctccctttcttccctctttgcaattgaatcttgaaagaagctaaacaaatggacat

SEQ ID NO: 1009536 - DNA, 120 bp, Artificial Sequence
  ENSG00000228262_20 (sequence is synthesized)
ggatgtgtttcaataaaactttatttacaaaaaccagctgcgggctagatttggcttagaggctttagtttgctgactcttctagagcagatgtgtgtggtatctagatgagatgcatgg

SEQ ID NO: 1009537 - DNA, 120 bp, Artificial Sequence
  ENSG00000228262_21 (sequence is synthesized)
ctgccctgttctgtttctctctgaccactggtgcatgcagcccctgtcacgtattccttgcttgctgaaatcaatcacaaccctttcatgtgaaatccttagtgttgtgagctcttaaaa

SEQ ID NO: 1009538 - DNA, 89 bp, Artificial Sequence
  ENSG00000228262_22 (sequence is synthesized)
attccttgcttgctgaaatcaatcacaaccctttcatgtgaaatccttagtgttgtgagcttgctcggattttaaggcagcagcttgcc

SEQ ID NO: 1009539 - DNA, 120 bp, Artificial Sequence
  ENSG00000228262_23 (sequence is synthesized)
cttggtgtctgagaggttttgtctgcggctcgtccttctacatttcttggtcccctgaccgggaatcgaggtaactgagggatggccgaggtagccccttaggcagcttaggcctgccct

SEQ ID NO: 1009540 - DNA, 120 bp, Artificial Sequence
  ENSG00000228262_24 (sequence is synthesized)
agcatccctgcaggggactctggccagcctgagtgacgtgatccaaagagcactcctgggtagaaaattgcctgggtggaacgcctcaccagaacagcacgtagcaggcccctgtggagg

SEQ ID NO: 1009541 - DNA, 120 bp, Artificial Sequence
  ENSG00000228262_25 (sequence is synthesized)
ttggagtccggacatctgaaacttggactgtgaatgcagcccgtgaaaaagagggttttcggaagcttgacatttatgagggtgaggaattgacaagccgacatcagtctccagagtgaa

SEQ ID NO: 1009542 - DNA, 120 bp, Artificial Sequence
  ENSG00000228262_26 (sequence is synthesized)
ctaagctttcatttcctcaactgcaagatgaagataatacaactgaattcctagatttgccttgaggatgaaatgaaatgggaaatataaagtacctagtacaggacctggagtgtagga

SEQ ID NO: 1009543 - DNA, 120 bp, Artificial Sequence
  ENSG00000228262_27 (sequence is synthesized)
ggcactaagtcattgataactattttaatctctgttatttgccatcttatccatgggcttcactttgatgagcgcagtatcttctgctgaatgactctacttttttgctatgatgcgcct

SEQ ID NO: 1009544 - DNA, 120 bp, Artificial Sequence
  ENSG00000228262_28 (sequence is synthesized)
actcttctactgtttctttaactgatattcctttcttccaaattattccatgtaaaaggtactcttccagagcctacattaaattgtttgatggtctataatgaagaattgacttttctt

SEQ ID NO: 1009545 - DNA, 120 bp, Artificial Sequence
  ENSG00000228262_29 (sequence is synthesized)
gtagacaggtcggtgtggatccttgctcagtccaatcagttgtggtcagggattggaatcatgtaatccagaggcagctcagcagggaatgtagataaggtcaatccactcctggaaatt

SEQ ID NO: 1009546 - DNA, 120 bp, Artificial Sequence
  ENSG00000228262_30 (sequence is synthesized)
accttcagctctctttgaaaatggcttcactgtcttcatttataaccccgtgtattttggactaccctcccatcttatgatgatactacctggaacacacagcctccaaggacacattgg

SEQ ID NO: 1009547 - DNA, 120 bp, Artificial Sequence
  ENSG00000228262_31 (sequence is synthesized)
cagaggaagaggaagatggcagagacacaaacagagattatcatggagttattatgatttccatctaatacttcctcatcttactggattattgaacaatcaatactgtttgtctacaga

SEQ ID NO: 1009548 - DNA, 120 bp, Artificial Sequence
  ENSG00000228262_32 (sequence is synthesized)
gcagaagccatctttatttctcttacctctttttggtaaaaacgaaggagggatcactcttgcactggaaaaccaacaaatcactgtggaaacacaagtaataacatcgtgttctgtgat

SEQ ID NO: 1009549 - DNA, 120 bp, Artificial Sequence
  ENSG00000228262_33 (sequence is synthesized)
gggaagggacaaataagggaataaaactggccaccccagccggcagtggcaacccacttgggtgccgtgaaagctttgttctttcggtcttcacagtagatcttgctgctgctcactttt

SEQ ID NO: 1009550 - DNA, 120 bp, Artificial Sequence
  ENSG00000228262_34 (sequence is synthesized)
tgggtctgtgccatctttaagagttgtaacactcacctcaaaggtctgcagctccattcttgaagtcaaggagaccacgaaccccccagaaggaaccaactctggacacaaaaggaaagg

SEQ ID NO: 1009551 - DNA, 120 bp, Artificial Sequence
  ENSG00000228262_35 (sequence is synthesized)
aatagcagttatgtctcagggttttttgaggatcaaactggaaaatgctgtcaactatagttattagtatacagtataatgaagaatcttgaggtcctcctggattaccaaagtgggccc

SEQ ID NO: 1009552 - DNA, 120 bp, Artificial Sequence
  ENSG00000228262_36 (sequence is synthesized)
ctcaatggattttaccatcctgttgtttttatttcctccgtctttataattggagacattctgccggcctgttgaaaacaccactagtatttctttctgaaagttagccaacctactaat

SEQ ID NO: 1009553 - DNA, 120 bp, Artificial Sequence
  ENSG00000228262_37 (sequence is synthesized)
tctccttaaaattctgattaggtgtttgcagctaaaatgaacacatcagagaaatgacagaatttttgagcgaaaaactgagaacaagaaaatgactaaataaaggcatttaaaaaataa

SEQ ID NO: 1009554 - DNA, 120 bp, Artificial Sequence
  ENSG00000228262_38 (sequence is synthesized)
caggtgccacagggtcttctaagccctggtgaatgctgtaaagcaaatacatctcatttatctctttgcatattccacaaattttaccatataacctatatgtaggaactctcattccat

SEQ ID NO: 1009555 - DNA, 120 bp, Artificial Sequence
  ENSG00000228262_39 (sequence is synthesized)
acttatctttagtctgtgtatagagacagaatattgaccgagaatagaaaaataaggctggttagattacctttgtcaagcttatgctacaccctaatggggttcaggacacactatccc

SEQ ID NO: 1009556 - DNA, 120 bp, Artificial Sequence
  ENSG00000228262_40 (sequence is synthesized)
aaaatgtagctagacaatgagttctctgagagcaggatccacctatttggttgtaatagttttgtttctataaatgttgaatgagtggatcgatttatcaaaatagagtttatgaacata

SEQ ID NO: 1009557 - DNA, 120 bp, Artificial Sequence
  ENSG00000228262_41 (sequence is synthesized)
aaaaattgccttatgcaaccaagtttgataataacaacatgaccttgatattaaactgaaaaaaggcatcttccagtctctactattaccacctctccccaactattatagccattcaaa

SEQ ID NO: 1009558 - DNA, 120 bp, Artificial Sequence
  ENSG00000228262_42 (sequence is synthesized)
tggtttaccatctgatgttaaggtataaagataagatttttttttttctgaattaaaaaaaatagtccaaagaagaaggaagaagaaaggggatataatgagaatgagaagcgtcagata

SEQ ID NO: 1009559 - DNA, 120 bp, Artificial Sequence
  ENSG00000228262_43 (sequence is synthesized)
atatttatgcttctgtgtctggcttaatagccacattttttcacaatagctgaaagatattcatcaacagatgaatggagaaacaaaaatgtggaatacgcacacaatggaatattattc

SEQ ID NO: 1009560 - DNA, 120 bp, Artificial Sequence
  ENSG00000228262_44 (sequence is synthesized)
aaagggaattaattctgatacatgctgcgcatgaatgaaactagaacacaaagcctctactttcaagaccattgtctcaccaaaggggtcaagaaaaccaactctgagactcaaaggaga

SEQ ID NO: 1009561 - DNA, 120 bp, Artificial Sequence
  ENSG00000228262_45 (sequence is synthesized)
tcagtggcctcattgtttactctttctttcactgggacaaataaaacttaatgacttaaattcagagagtgaagaaaatcaatatggtgcattttaatatttataaaatattatttttat

SEQ ID NO: 1009562 - DNA, 120 bp, Artificial Sequence
  ENSG00000228262_46 (sequence is synthesized)
tgcctcaatttaattcattagataagcagagttttaaaatggatgctaacgaaacctcttacagagtgcattaaaaagtgtgtgtgttggccaggcatggtggctcatgcttgtaatacc

SEQ ID NO: 1009563 - DNA, 87 bp, Artificial Sequence
  ENSG00000228262_47 (sequence is synthesized)
gaagtccaggagtttaagaccagcctgagcaacaaagtgagaccccatctctactttaaaaataaagtgtgtgtgccaagaaaaata

SEQ ID NO: 1009564 - DNA, 120 bp, Artificial Sequence
  ENSG00000228262_48 (sequence is synthesized)
agaggacatggagggacagaactgatgcactttcatgaccttgccacttttggagattacagaggtgaatcacttcaaagagaaggaccagattctcatggaccccactgccatgctggc

SEQ ID NO: 1009565 - DNA, 120 bp, Artificial Sequence
  ENSG00000228262_49 (sequence is synthesized)
cagacatcttgctgccattgttttcctgttatttactcccaaacagatggtctataatgaagaattgacttttctttgttctcaagcaaaggacctttgacctatgtttatgagaacaaa

SEQ ID NO: 1009566 - DNA, 90 bp, Artificial Sequence
  ENSG00000228262_50 (sequence is synthesized)
caaaaaaaaaaaaaaaaaatacaaaaattgtctgggtgtggtgtgcatgcctgtagtcccaagtcccagctactctgagcccaggaaggc

SEQ ID NO: 1009567 - DNA, 120 bp, Artificial Sequence
  ENSG00000228262_51 (sequence is synthesized)
gaggcagaaggatcacctgagcccaggaaggccaaggctgcagtgagccctgatggtgccactgcacttgaccttgggcaacagaatgagaatgagaccctgtcaaaaaaaaaaaaaaaa

SEQ ID NO: 1009568 - DNA, 120 bp, Artificial Sequence
  ENSG00000228262_52 (sequence is synthesized)
atcagtatagaataaattatttgacatggagttgctgcattttaaaaacagatattgccagattaccccatatgaagaatgcattggatttccgcttgtaccagcaatgtgtgagagtca

SEQ ID NO: 1009569 - DNA, 120 bp, Artificial Sequence
  ENSG00000228262_53 (sequence is synthesized)
ctgttcccctttcccttaaaagcatggagtgttatcaaacattttaatctttatcaatccgatagttgcaaaatagtataccagtacagttatctttaattataactaagatatattggt

SEQ ID NO: 1009570 - DNA, 120 bp, Artificial Sequence
  ENSG00000228262_54 (sequence is synthesized)
tgccaccacgtaagaagtgccttttgcctcccaccattattctgaggcctcctcagccatgtggaactgatgacacatctagaagaccctcaccttatgcttatgctggccccttgatct

SEQ ID NO: 1009571 - DNA, 120 bp, Artificial Sequence
  ENSG00000228262_55 (sequence is synthesized)
cttcaaagagaaggaccagattctcatggaccccactgccatgctggccagacatcttgctgccattgttttcctgttatttactcccaaacagatggagtgtcgctctgtcacccaggc

SEQ ID NO: 1009572 - DNA, 85 bp, Artificial Sequence
  ENSG00000228262_56 (sequence is synthesized)
acaggatgacacatctagaagaccctcaccttatgcttatgctggccccttgatcttggcctccagaacaggcttccccagccat

SEQ ID NO: 1009573 - DNA, 120 bp, Artificial Sequence
  ENSG00000228262_57 (sequence is synthesized)
gtggaactacgtatccagagtttcctccctctggtgggttcacggtctcgctgactccaggagtgaatctgcagatcttcactatgattgttacagttcataaaagcaatgcatccggag

SEQ ID NO: 1009574 - DNA, 120 bp, Artificial Sequence
  ENSG00000228262_58 (sequence is synthesized)
tttttttttttttgagaaaccaaatatagaatactaattgtatagttttttgataacaattaagttgttccatttggattataaaaatatataatagtacctatttgggctcatgtcata

SEQ ID NO: 1009575 - DNA, 120 bp, Artificial Sequence
  ENSG00000228262_59 (sequence is synthesized)
tgttttattaacatgtacttcctggtttatatcaaattacagaattttagagtttcagaataatttgaatttagaaagctattactgtaattatgtgggggcattaatggaggcttgtaa

SEQ ID NO: 1009576 - DNA, 120 bp, Artificial Sequence
  ENSG00000228262_60 (sequence is synthesized)
ttgtaatgctgaaaatataaattaattggcttgtaaatgagacaggtatagcaagtaaatgaggtcctgagggtatatttttattcagctactgagttgcaggataaagtcaaaatattt

SEQ ID NO: 1009577 - DNA, 120 bp, Artificial Sequence
  ENSG00000228262_61 (sequence is synthesized)
accgaggttaatggaataattatataggatttatctatactattaaaattacatttaaaatatagagctatattgcttaccttaaattataaaatgagctttctccaaattcaaaatgct

SEQ ID NO: 1009578 - DNA, 120 bp, Artificial Sequence
  ENSG00000228262_62 (sequence is synthesized)
ttcacagtcatttttggattactgtaaaaaggtaactaactgcctttttacaattaggaatttatttacaactttctcttccaatccattttctagtcttttatacaaaagactcatctg

SEQ ID NO: 1009579 - DNA, 120 bp, Artificial Sequence
  ENSG00000228262_63 (sequence is synthesized)
ctttcaaggttagttcatttaagtcataaggtagagagaagcaagtacagaatacaacacagaaccacagccataaggtagatttctcaagtactgtccctaatgttaccgggggtcctt

SEQ ID NO: 1009580 - DNA, 120 bp, Artificial Sequence
  ENSG00000228262_64 (sequence is synthesized)
tttggccatttatgtagcttcaagtagctgaaacagtattggctttggatacagatggacctgagttttactcttcattttgatttgtactacatttgctatcattgaaaattaagtaat

SEQ ID NO: 1009581 - DNA, 120 bp, Artificial Sequence
  ENSG00000228262_65 (sequence is synthesized)
ttctttgttctcaagcaaaggacctttgatttatttcaggcaagaaccctgaaacacacggtaggaacaaaagatagaaagaagagtcttggggggtggagccaagatggccgaatagga

SEQ ID NO: 1009582 - DNA, 120 bp, Artificial Sequence
  ENSG00000228262_66 (sequence is synthesized)
ggcgatgccagagaagacgatggcggcgatggcgtggtcgcgggaacggccgtgggacaggaactgcaagggtttaaaacatgtctctggggtctggcagacttatatttaaaatccagc

SEQ ID NO: 1009583 - DNA, 120 bp, Artificial Sequence
  ENSG00000228262_67 (sequence is synthesized)
gaggctaaaaactctggggatctcacgatgtgggtacatttctagagataatattttagatctctatagatattattttaatacatctttttctttttggtttgactgtgtatcatatgg

SEQ ID NO: 1009584 - DNA, 120 bp, Artificial Sequence
  ENSG00000228262_68 (sequence is synthesized)
cttttcttcttggaagttatcaaacttctccctaactaaggtccttgcatatgctgacctgtttgacatactcccactctggtctactcattcttcaggtatcattttcattcctgtcac

SEQ ID NO: 1009585 - DNA, 120 bp, Artificial Sequence
  ENSG00000228262_69 (sequence is synthesized)
taccccttaacccaacccagacaaggttattgtgcactgaatcatttcaaaatgccactttaaaaatgagtaaatatttatgtaattatgtgttgaatatacctcctctttacaagcata

SEQ ID NO: 1009586 - DNA, 120 bp, Artificial Sequence
  ENSG00000228262_70 (sequence is synthesized)
taagtctatgatacaagtctatgcttgtctcttctaattctggtacatcatgtgatatgagaaccatggtaggcaatcaataatgcagagacgaaatgtttttatcttagagagactctc

SEQ ID NO: 1009587 - DNA, 120 bp, Artificial Sequence
  ENSG00000228262_71 (sequence is synthesized)
acagaagtttctagtttagagatgcttcactgaagtttatggcctcaacttccttgggtcttgattactatcagtggatgcagtgatggagggtaggtaaaatccaatgttatctacaag

SEQ ID NO: 1009588 - DNA, 120 bp, Artificial Sequence
  ENSG00000228262_72 (sequence is synthesized)
ttctagactacagccaacaaactttttccaaaataggccagataataaatatattaggttttttgggccatgaagtctctgctgcaactactcagctccacatttgtagtggaaaagcag

SEQ ID NO: 1009589 - DNA, 120 bp, Artificial Sequence
  ENSG00000228262_73 (sequence is synthesized)
ttatagatgaaacataaaatgaattagtgtggctgtgttcaaaaaaagctattttcaaaaacagccagtgggaaagctttggtccttgagccatagtttgcaaaattttgttctaaacag

SEQ ID NO: 1009590 - DNA, 120 bp, Artificial Sequence
  ENSG00000228262_74 (sequence is synthesized)
ccaggttctagcaattaaagaagaagaaaaaacaagtggcctgaatttgaacaaagcaaatatgagatttgtggctattgcttgtaaaagggttgccttcacaaatagccttagagcaga

SEQ ID NO: 1009591 - DNA, 120 bp, Artificial Sequence
  ENSG00000228262_75 (sequence is synthesized)
ggattaagaatcacagaaaatgtacttgattgtgtatacttttgctgtgtgacctcatcagtttgtatatagacaaccagagctgagtcccttttcatatgctgctctctccattcagta

SEQ ID NO: 1009592 - DNA, 120 bp, Artificial Sequence
  ENSG00000228262_76 (sequence is synthesized)
cagtagatgttaaacattgtgtgtaggtatgcacatgtgtaggccgccatatgtgagcatgtgtgcagtttcatgtattcagtgtctgctgaagcagacttcgctaattactgtattacc

SEQ ID NO: 1009593 - DNA, 120 bp, Artificial Sequence
  ENSG00000228262_77 (sequence is synthesized)
cttctccttttgttcaagccaggaaaccagtttcaggaaccagtaagaaagacacaagaagatatgcccttcaggtccctccatatctgtaatgcttggttccttcatgcctctagaaaa

SEQ ID NO: 1009594 - DNA, 120 bp, Artificial Sequence
  ENSG00000228261_0 (sequence is synthesized)
ggtcactgggtggcctctaggattcctgagtctgcagtgcatggctgaatgtgagcagcacctaggctgagtctgcccctccctctggtctccttccaacccctcaagggactgatggaa

SEQ ID NO: 1009595 - DNA, 120 bp, Artificial Sequence
  ENSG00000228261_1 (sequence is synthesized)
aactgagtgggtcctgcctcttcccctgcctgggggtacctctgcagcatcattgtcagtggtgaccaccaaaattatccagttccagcatggtcaagaagctgaatgttctcctgcagc

SEQ ID NO: 1009596 - DNA, 120 bp, Artificial Sequence
  ENSG00000228261_2 (sequence is synthesized)
ccccagggtaccacgcacggggctgggcacactgcaggctcccaacatatggagaaggcagggaagccatcctctcccaggaaggacagagtgtccctccgtccagccactctgcctgcc

SEQ ID NO: 1009597 - DNA, 120 bp, Artificial Sequence
  ENSG00000228261_3 (sequence is synthesized)
agtagcagagacaaggagggggctcccctgcaacccctgagctctggcccacacctccttttctcccacgcgttccctccagggcatctcagatccattcaactgtgtgggttgaatggc

SEQ ID NO: 1009598 - DNA, 120 bp, Artificial Sequence
  ENSG00000228261_4 (sequence is synthesized)
agccctcaaaatatacgtcctcgcgctaatccccagcccctatgaatgggacctaaaagggtctttgcagatgtgattaaattaaagaacttgagatgagatcatcctggattacccggg

SEQ ID NO: 1009599 - DNA, 120 bp, Artificial Sequence
  ENSG00000228261_5 (sequence is synthesized)
tgggccttaaatccaatgacaagtatccttatgaagtgacacaaaagagagagacagaggagaggtgaggggagacggaggccaggatgggagtgacgctgccacagctgagcatcatct

SEQ ID NO: 1009600 - DNA, 120 bp, Artificial Sequence
  ENSG00000228261_6 (sequence is synthesized)
gagacaacaggagctggaagaggcaaagagggactctcctctagagtatctggagggagtgtggccctgataccttgatcctggtctccagaactgtgaaaataaatgcccactgtctta

SEQ ID NO: 1009601 - DNA, 120 bp, Artificial Sequence
  ENSG00000226904_0 (sequence is synthesized)
agctgggaaaacagcaatggattaataacaagaaattaatggtgaagtggtgacgaaaattctacattgcttagaaagcaaatagtgaaatgaacatttacattctggcaacctcagaag

SEQ ID NO: 1009602 - DNA, 120 bp, Artificial Sequence
  ENSG00000226904_1 (sequence is synthesized)
cattacttttctcttcaatgtttactgaggaagaacaagtagctcctcaggcaaatcaactgttaactttgcagtttttatttaatctcccaggaatgtaacccttaactttaaagaatg

SEQ ID NO: 1009603 - DNA, 120 bp, Artificial Sequence; identical to SEQ ID NO: 842473
  ENSG00000226906_0 (sequence is synthesized)

SEQ ID NO: 1009604 - DNA, 120 bp, Artificial Sequence; identical to SEQ ID NO: 842474
  ENSG00000226906_1 (sequence is synthesized)

SEQ ID NO: 1009605 - DNA, 120 bp, Artificial Sequence; identical to SEQ ID NO: 842475
  ENSG00000226906_2 (sequence is synthesized)

SEQ ID NO: 1009606 - DNA, 120 bp, Artificial Sequence; identical to SEQ ID NO: 842476
  ENSG00000226906_3 (sequence is synthesized)

SEQ ID NO: 1009607 - DNA, 120 bp, Artificial Sequence; identical to SEQ ID NO: 842477
  ENSG00000226906_4 (sequence is synthesized)

SEQ ID NO: 1009608 - DNA, 120 bp, Artificial Sequence; identical to SEQ ID NO: 842478
  ENSG00000226906_5 (sequence is synthesized)

SEQ ID NO: 1009609 - DNA, 120 bp, Artificial Sequence; identical to SEQ ID NO: 842479
  ENSG00000226906_6 (sequence is synthesized)

SEQ ID NO: 1009610 - DNA, 120 bp, Artificial Sequence; identical to SEQ ID NO: 842480
  ENSG00000226906_7 (sequence is synthesized)

SEQ ID NO: 1009611 - DNA, 120 bp, Artificial Sequence; identical to SEQ ID NO: 842481
  ENSG00000226906_8 (sequence is synthesized)

SEQ ID NO: 1009612 - DNA, 120 bp, Artificial Sequence; identical to SEQ ID NO: 842482
  ENSG00000226906_9 (sequence is synthesized)

SEQ ID NO: 1009613 - DNA, 120 bp, Artificial Sequence; identical to SEQ ID NO: 842483
  ENSG00000226906_10 (sequence is synthesized)

SEQ ID NO: 1009614 - DNA, 120 bp, Artificial Sequence
  ENSG00000226900_0 (sequence is synthesized)
agatggggatggggagtggccttcactagggtggtcctcctggctgagcagggccggcccaggggagggcggggccagcacgtccccagaacagtgcctgtccaggggcacaagggttca

SEQ ID NO: 1009615 - DNA, 120 bp, Artificial Sequence
  ENSG00000226900_1 (sequence is synthesized)
ctgaagactcaggagaggggtttagagcacagcctccctctccagggtcaggttcacgggagctgttgggggctccttccctcgcagcagtgaccactccaaggaccacggcctggacat

SEQ ID NO: 1009616 - DNA, 120 bp, Artificial Sequence
  ENSG00000226900_2 (sequence is synthesized)
gagcggcagcggagtctagatgaatataggcagcagccaaaggccacagtcacgacaaacctacacactctcaccactgtcatctcatattgtcctaaaatttccagccagtgcaaaaaa

SEQ ID NO: 1009617 - DNA, 120 bp, Artificial Sequence
  ENSG00000226900_3 (sequence is synthesized)
acatgaaaaagaaaaaatacagccattggaaaagaggaaaagtaattgttattagctgatgatgtgaatgtcttcctgaaaaccttaagagaaccaactggaaaacaaccagaaatgaga

SEQ ID NO: 1009618 - DNA, 120 bp, Artificial Sequence
  ENSG00000226900_4 (sequence is synthesized)
gcatggagttaggcaaccgccgatctgctttctgtcacttgggcgagtttttcccgtcctgggatttcatatctctggaatcctgcagtacgtagccctctgtctggcttcctcgctccg

SEQ ID NO: 1009619 - DNA, 120 bp, Artificial Sequence
  ENSG00000226900_5 (sequence is synthesized)
catgcagctgtgtatacctgcagtgattgtttctcttgttgaattgctgagaagggttccatcgtatgccttttccagtttatttgttcatctgttgttagacatttgagttatttccag

SEQ ID NO: 1009620 - DNA, 120 bp, Artificial Sequence
  ENSG00000226900_6 (sequence is synthesized)
cttgggactcttatgaacaaaactgctataaacatgcatattcaagtctttgtggatatgtgctttcttttgtcctggataaatgtctccacgtgggcttcctgggtctcacggacctca

SEQ ID NO: 1009621 - DNA, 120 bp, Artificial Sequence
  ENSG00000226900_7 (sequence is synthesized)
ccagctgacgtggccggccctggacttgccatggagaaggcagagcctgcctcccagtgggtccctgtgaggaacagcagtaccggcttgtcgtctttctgggaaatgcatttcgcctcc

SEQ ID NO: 1009622 - DNA, 120 bp, Artificial Sequence
  ENSG00000226900_8 (sequence is synthesized)
tctaggaacctcccggatgacccagagtgttctccacccacttttcctgccctgtgcggtcacctcatttctacaggcttggggaaacaaatgcaaagtgctttccagaacgtttttgtc

SEQ ID NO: 1009623 - DNA, 120 bp, Artificial Sequence
  ENSG00000226900_9 (sequence is synthesized)
ttacacatgacacttctatggaaaaaatgactttttttccattgttccttccagaacctgagcacatccctctgctgggaggacgctgtctgtccaaatgtcactgtcccccatttagga

SEQ ID NO: 1009624 - DNA, 120 bp, Artificial Sequence
  ENSG00000226900_10 (sequence is synthesized)
gcagcagcagggccttgcttcatgttcatatgggtgttgattgggatatgatggattcttctgtgtactttggaggattttctccttagtttgaatagtaaactgtaaactcagactcag

SEQ ID NO: 1009625 - DNA, 120 bp, Artificial Sequence
  ENSG00000226900_11 (sequence is synthesized)
cagcaactggtatggtctggatccttgtcctggcccaaatctcatgttcagttgtgatccccagtgttggaggtgggacctggtggaggtgacaggatcgtgggggtggatttccccctt

SEQ ID NO: 1009626 - DNA, 120 bp, Artificial Sequence
  ENSG00000226900_12 (sequence is synthesized)
ggctactgttgtcacaatagtgagttagttctcgtgagatcttgttgtttaaaagtgtgtagcgcctcccatccatctctcttcctcctcctctggccatgtgacgtgccggctccccct

SEQ ID NO: 1009627 - DNA, 89 bp, Artificial Sequence
  ENSG00000226900_13 (sequence is synthesized)
gtgacgtgccggctcccccgggcctccccagaagcagaagccactatgccttcccgcacagactgcagaaccgtgagccaattaaacct

SEQ ID NO: 1009628 - DNA, 120 bp, Artificial Sequence
  ENSG00000226900_14 (sequence is synthesized)
agtctcaggtatttcttcatagcagtgcaaggatgacagaatacagtatccttttgtgtgcttagccatttgtacatcgtttcttatagtttgtgtgttcaacgttttgtccatttatga

SEQ ID NO: 1009629 - DNA, 120 bp, Artificial Sequence
  ENSG00000226900_15 (sequence is synthesized)
aactagttgatttgctttcttattgagttgtaagtgttttttatgtattgcagggaaagtcctttgtcatttataggcattgcaattattttctcacagtctgtggcttgtcttttcatc

SEQ ID NO: 1009630 - DNA, 120 bp, Artificial Sequence
  ENSG00000226900_16 (sequence is synthesized)
gatttaatgatgtctttggaagacaaaaaaatttaatttttatgacatccaatttatcaacttttttatagtaactgccttttctgtcctaagaaatgtttgttaactcagaatcacaaa

SEQ ID NO: 1009631 - DNA, 120 bp, Artificial Sequence
  ENSG00000226900_17 (sequence is synthesized)
ggcctgaggggctggcttggatctcacccctaggcgtgccctggcacctgagagccctctttccaaccagcttggggccacctgcgccccccgccccactgtggccctggccagactagt

SEQ ID NO: 1009632 - DNA, 120 bp, Artificial Sequence
  ENSG00000226900_18 (sequence is synthesized)
gcctgcgtcttgccctgctactgagcgccccaaggtgccacgcggcaagtccccgggctggtctcgccccagcagccatttgtcgggtgcagcggtccgggggaacttgtctctgggacg

SEQ ID NO: 1009633 - DNA, 120 bp, Artificial Sequence
  ENSG00000226903_0 (sequence is synthesized)
gaggctggagcacggggacgccggcctggggtgtaggtctgggagcagtcggccgtcaggtggacatggactccatggaagcctgagctgccaggggcttccctggggcagcactgcttc

SEQ ID NO: 1009634 - DNA, 120 bp, Artificial Sequence
  ENSG00000226903_1 (sequence is synthesized)
gcgtaggctcacgagaaacttccagggttcctggcgccagcctttcaacagagcagcacattatgcctggataagactcaaagagcagcttaatatcaggttctctggggctgtaatcat

SEQ ID NO: 1009635 - DNA, 120 bp, Artificial Sequence
  ENSG00000226903_2 (sequence is synthesized)
cacttttgtgagttaaagctcaacttacacatctgcctgtatccataggaaatgaatgaaaataaacaaacaaattccttgcattcaacgcagcgtaagaaaaatcacatcctgttcccc

SEQ ID NO: 1009636 - DNA, 120 bp, Artificial Sequence
  ENSG00000226903_3 (sequence is synthesized)
agtagctgaggaaagccggctcacgagagtatacagggagaagaggccagcattgtgtggctgccagcaaagctcacttgtatgtcaaatgcagcgcttttcttagcccattatgtattt

SEQ ID NO: 1009637 - DNA, 120 bp, Artificial Sequence
  ENSG00000226903_4 (sequence is synthesized)
tttttttcttgaacactcctgtgtctactgggatctcctgtttttattgttttgggatgagattttaaaaacaccatttaatgtagcctgtgtgctcttgttcattaaaccaaaaagaaa

SEQ ID NO: 1009638 - DNA, 120 bp, Artificial Sequence
  ENSG00000226903_5 (sequence is synthesized)
aacgaccctcgtgacagccagagaatgtccgtttctcggagcgcagcacagcctgtcccatcgagaagcctcgggtggacatggactccatggaagcctgagctgccaggggcttccctg

SEQ ID NO: 1009639 - DNA, 120 bp, Artificial Sequence
  ENSG00000226903_6 (sequence is synthesized)
ggagcgcagcacagcctgtcccatcgagaagcctcgggtgaggggcccggtgggcgcccggaggccgctggagggctgtgggagggacggtggctccccactcccgtggcgaagggcagg

SEQ ID NO: 1009640 - DNA, 120 bp, Artificial Sequence
  ENSG00000226903_7 (sequence is synthesized)
aacttccagggttcctgggtaaggaagacacagcaagagctggcctctgccgcatctgcctttgtcaccagacgcccatctttagggcacctctctctccgctgcttgagttttagggtc

SEQ ID NO: 1009641 - DNA, 120 bp, Artificial Sequence
  ENSG00000226903_8 (sequence is synthesized)
ttgccataaaacttcattaaggcctcccaggcgaggctcaaagcaccctgccccgcgtaggaaaaggttcagagcacatagagaaaagagcaaggttgcaccccaaaagaatgacaggca

SEQ ID NO: 1009642 - DNA, 120 bp, Artificial Sequence
  ENSG00000226903_9 (sequence is synthesized)
gactccattccctggggggccgagagggatgtacgatgggtcttgtgagggtggagggtgcctgcctcgcccgagggatgctgtgcccatgcccctgctgccagttcacccaaagcagtt

SEQ ID NO: 1009643 - DNA, 120 bp, Artificial Sequence
  ENSG00000226903_10 (sequence is synthesized)
gacgtttttaaacgagcacaaagtctctgctcttcagagtgtgacgggctgcccctgtctgcaaaagctgtccccgaataggctttctctgagcttgttaccgtggagggctgggcccgg

SEQ ID NO: 1009644 - DNA, 120 bp, Artificial Sequence
  ENSG00000226903_11 (sequence is synthesized)
tttctaatcgcccccttcaccgggctgcctgccgctggctgcggaaagtgtgggtttggctgcatgatggcctcgtaatggctgtggtgacgccctctgcgtcttctcccagcgccagcc

SEQ ID NO: 1009645 - DNA, 120 bp, Artificial Sequence
  ENSG00000226903_12 (sequence is synthesized)
ggagcacggggacgccggcctggggtgtaggtctgggagcagtcggccgtcagcttcccagagaccgtgacaaaagacatcattctacgctgcacaaaagcagccagaggcggcctctcc

SEQ ID NO: 1009646 - DNA, 120 bp, Artificial Sequence
  ENSG00000226903_13 (sequence is synthesized)
cacgctccgggagcgaagggaatgatctggctagagagcagcactccagggtgactccgtcctgctgtctaaccggcctccggcagagtggcagatcatctgactctctgaaccactctg

SEQ ID NO: 1009647 - DNA, 120 bp, Artificial Sequence
  ENSG00000226903_14 (sequence is synthesized)
aacatcagtctcttcatctctaaatgagggtgctggccgtgtggatccgcaggggtatcctgaggtttgccacgtacaaaaagcttaggacagtaaatactaataggctggtgcaaaata

SEQ ID NO: 1009648 - DNA, 120 bp, Artificial Sequence
  ENSG00000226903_15 (sequence is synthesized)
aattgcgtttttgtcactaaaaaaaagtagcaaaacccgcaattattttccaccaacctaatattaaatgtgagtgactgggtcaacttgatgcagctttctgatccctgctcaacctgc

SEQ ID NO: 1009649 - DNA, 120 bp, Artificial Sequence
  ENSG00000226903_16 (sequence is synthesized)
gaccagcttctagaaggacaggagtggcctgtggccgtgggtcttaagggcaagagaacaacagagagatgtttctggcccctcttgtgtgaaatgaagactttttaatgtgaatgtaga

SEQ ID NO: 1009650 - DNA, 120 bp, Artificial Sequence
  ENSG00000226903_17 (sequence is synthesized)
atcagaccctggagaatggcagaaactccaaaggagttgaatgctggagaaccccaggcgaagttaaatcaactcgacagaagagcacagacatgtgatggggcaccaggtggacatgga

SEQ ID NO: 1009651 - DNA, 120 bp, Artificial Sequence
  ENSG00000226903_18 (sequence is synthesized)
atggggcaatgagcctgtttcctgaagtcccagtggccacacagctgaaccttgcaaacttcttatcaaactctcagcccaagaacaattagccaggatcaacaccccagcaaaggtcat

SEQ ID NO: 1009652 - DNA, 120 bp, Artificial Sequence
  ENSG00000226903_19 (sequence is synthesized)
ttgggtttggattacaaattgccatcacctcagagaagaggagaggggatctgtttgagaagaatgtttctctgcagctaaggattagcaggcatccacaagcccgccctgcagagatct

SEQ ID NO: 1009653 - DNA, 120 bp, Artificial Sequence
  ENSG00000251421_0 (sequence is synthesized)
gggaaagaagcacccagtggcactgagtatagtagtatctagtgtctggacccagctcactctgcttctcaaagcaagacccgaggagcagaggtatctgttctattcactttgtttttg

SEQ ID NO: 1009654 - DNA, 120 bp, Artificial Sequence
  ENSG00000251421_1 (sequence is synthesized)
cacttggattctgacaggaatttaagccactgggatcaggagtgcattagggcacagttatggcaagacacttgtctgggagtcactcattttcaaaagaaaactggacacatttccatc

SEQ ID NO: 1009655 - DNA, 120 bp, Artificial Sequence
  ENSG00000251421_2 (sequence is synthesized)
aggcagcaagtgaaaaatattcagagagatctattttgatatttaatctccaaatcttatatttgggattgaggtcaatatcctatttgatagtctcccagctaagaatctactttcatt

SEQ ID NO: 1009656 - DNA, 120 bp, Artificial Sequence
  ENSG00000251421_3 (sequence is synthesized)
cactttacgaaggacttcgcaggaccagaatgagcttgacacagagaaagagtctcactgtgttgccagtgttggtctgaaactcctatcttcaagtgatcctcctgcctcggcctccca

SEQ ID NO: 1009657 - DNA, 120 bp, Artificial Sequence
  ENSG00000251421_4 (sequence is synthesized)
aagctctggaattacaggcatgagccaccatacccagcccttgacagagtttaacgagtgacactgtcttgaatctgatgttggtgttctgaagtacaatccttcataaccctgccaaag

SEQ ID NO: 1009658 - DNA, 120 bp, Artificial Sequence
  ENSG00000251421_5 (sequence is synthesized)
atatgacaatgtagccagacccaggctaggtgctgccatcaaaaaacatggtcctaaaatcaaagtgtactttccaaataactcatgttagaaacctggacatctctaacgctatgaaga

SEQ ID NO: 1009659 - DNA, 120 bp, Artificial Sequence
  ENSG00000251421_6 (sequence is synthesized)
ggatacgtagtccatagctggatttctgagcaattcttcttccctttttttcattccctttgtttataccccagaattctctcctctaaactttgaaaaatcctcctgatttgaaacgaa

SEQ ID NO: 1009660 - DNA, 120 bp, Artificial Sequence
  ENSG00000247092_0 (sequence is synthesized)
tcaggaaaggtttgttgaatggggaactaagaagtgaattcgttcgttcgacaaacgtttcctgagcagccgctgggtgctaggcgcagtgccagcgcggaatgtccagggagacctggt

SEQ ID NO: 1009661 - DNA, 120 bp, Artificial Sequence
  ENSG00000247092_1 (sequence is synthesized)
gcccaaagcttggacccatcgtgagaaatgagaagcagatacaaagcagtgtgggagtgcagaggagacaaagcaagcctcatcaggcccattgcttgctctgctctcccttgtacttac

SEQ ID NO: 1009662 - DNA, 120 bp, Artificial Sequence
  ENSG00000247092_2 (sequence is synthesized)
cagtgcttgacaatatacagttatttactagcttggttattgacttcctacccagcactcagttttattcactgctgtatcctcagtgcctaggacgatgcttggaacgtggtaagtgct

SEQ ID NO: 1009663 - DNA, 120 bp, Artificial Sequence
  ENSG00000247092_3 (sequence is synthesized)
cctattggcgggaagaataaatccggaagagcaggaccagtggacttgctacataatctgtagtcttggagccgcacagggttggtggtaccctcgagcacaccagacttgcagaaaaag

SEQ ID NO: 1009664 - DNA, 120 bp, Artificial Sequence
  ENSG00000247092_4 (sequence is synthesized)
catactccagaggaagctgaggcatgcctgctcgagagccagctgttccatgtgcaattttcctctgatagtttctggtcactgttgccacggtgataatgactgggctatgtcattatc

SEQ ID NO: 1009665 - DNA, 120 bp, Artificial Sequence
  ENSG00000247092_5 (sequence is synthesized)
tatccgccaacagtaagagaagctttgcagtcgagatattgtttagcagatggagtgttttctgttgaacactaagtactgccacaagttacttttttttttttaaactttgagtatttt

SEQ ID NO: 1009666 - DNA, 120 bp, Artificial Sequence
  ENSG00000247092_6 (sequence is synthesized)
ggaggtgatctgtttatgctttgagagtgttcgaatttaaaatcagaaaatcatgtcagtgagtgagtctttcaaataatccttcggcatgaaacctgagcctagtaaactatgaaagta

SEQ ID NO: 1009667 - DNA, 120 bp, Artificial Sequence
  ENSG00000247092_7 (sequence is synthesized)
aactcggcacattacccgaaagtctcaatgtcatattttcacccccatcaatattattgatgattgctcattttctaatgtgggacctgaaatttaccaggtgcttaaagaatctttttg

SEQ ID NO: 1009668 - DNA, 120 bp, Artificial Sequence
  ENSG00000247092_8 (sequence is synthesized)
tttttcagattcattgattccaggtaaatcagaggaacaagcaacatgaacagaaatatgtagaaaaagctattatgcagaagcataattgttgtttcagaagtccagcatctggtgcac

SEQ ID NO: 1009669 - DNA, 120 bp, Artificial Sequence
  ENSG00000247092_9 (sequence is synthesized)
ttaacaatagagaatatattaaactctttccaaaataacctgttgttcctacctgtgttactgtaaatttcttgatggcaagaaccatgtaactggtttttgttagatttctgcaactca

SEQ ID NO: 1009670 - DNA, 120 bp, Artificial Sequence
  ENSG00000247092_10 (sequence is synthesized)
agacccaatcctgggcaactgttggacacttaaacatccttcatcactagctgcgttcatcactaggaaaaaccaaaaaccaggaacaacccggatgtccttcaacaagggaagggtgac

SEQ ID NO: 1009671 - DNA, 120 bp, Artificial Sequence
  ENSG00000247092_11 (sequence is synthesized)
ccagcccgtgatgcatccgtcacactgtggattgctgctcagcaacgaggaggcacagactcgatacgggagccagcctgggtgacgctccagagaactaccctgagtggagaagggcag

SEQ ID NO: 1009672 - DNA, 120 bp, Artificial Sequence
  ENSG00000247092_12 (sequence is synthesized)
tcccaccgtgtgattccattattatcacattcttgaaatgacagaattatagaaaggagaacagaggagtggctgccagagtttaaggagggaatggggaaagggggaagagcagcatgc

SEQ ID NO: 1009673 - DNA, 120 bp, Artificial Sequence
  ENSG00000247092_13 (sequence is synthesized)
agcctcatcctactgccttactattggtcgtcggcaaccgctttgttagttaattggagagactggatgtccatcagggtcacgcttgcagggcaacgagaggcaaaacaagagggaaga

SEQ ID NO: 1009674 - DNA, 120 bp, Artificial Sequence
  ENSG00000247092_14 (sequence is synthesized)
tatattaaactctttccaaaataacctgttgttcctacctgtgttctcttacagggaaaacaggaagaactggccccattttctaaatgtggagacaggaggaggtgagatggctcgcct

SEQ ID NO: 1009675 - DNA, 120 bp, Artificial Sequence
  ENSG00000247092_15 (sequence is synthesized)
ctgcccagccgactgggaaatgcagagctcagagagacagcaagtcaggagatgttgatccagggagcttttcactctgccacccaccccatcgatggaagcaccgacattatcaaggct

SEQ ID NO: 1009676 - DNA, 120 bp, Artificial Sequence
  ENSG00000247092_16 (sequence is synthesized)
gcatttagatttcaaaacaaaagcaagcaaacatgccgggctcgtggtatgctgttgttttaaccgaaatgatacagctgaaagggtgagcagccatcagtgctgtgagcgaagcgtgat

SEQ ID NO: 1009677 - DNA, 120 bp, Artificial Sequence
  ENSG00000247092_17 (sequence is synthesized)
cacacatcttgtatgtttagcaactcaggaggtagctgagcctggaagtgactttcctggtatgtagcaattcagagaatacaaaaccacattcattatctgaaatgggctcagctgctt

SEQ ID NO: 1009678 - DNA, 120 bp, Artificial Sequence
  ENSG00000247092_18 (sequence is synthesized)
ctgtgttttatcatatagagctgggaactttgatgtgtgtggtgtgtgcgtgttttgctgcatatacagataatcacacaactggaggcttcagccttgctgtttacacacacacacaca

SEQ ID NO: 1009679 - DNA, 120 bp, Artificial Sequence
  ENSG00000247092_19 (sequence is synthesized)
cacacaccccagcagatacatcacacacagacttctcacctgttacgttactaacagtggtgctggtttgtttgaacagtgtttgaacttatcaataaccttcctccagaaggctcagca

SEQ ID NO: 1009680 - DNA, 120 bp, Artificial Sequence
  ENSG00000247092_20 (sequence is synthesized)
tagctatagcatatgctgtgtgtggaaaatataacctaagaaacagaatggaattgaatcatgaccactattgctatgagacagaatccacagcgatggagtgggtgctggggtcagact

SEQ ID NO: 1009681 - DNA, 120 bp, Artificial Sequence
  ENSG00000247092_21 (sequence is synthesized)
aggtgagtcacataatagctgggtgaatggccaagttttcaccttttttccctcatttggaaaatgggatgataataggagctatcctgaagggtgatgatgagggttaaattaacaata

SEQ ID NO: 1009682 - DNA, 120 bp, Artificial Sequence
  ENSG00000247092_22 (sequence is synthesized)
taggtaaaggcttagaacagtgtgtggcagatggtaggtaagcccttaataaatataaaatatcattatttgtgtccatcatttgagatatatctcacatcttatccagaggactcccca

SEQ ID NO: 1009683 - DNA, 120 bp, Artificial Sequence
  ENSG00000247092_23 (sequence is synthesized)
aacactcgtgttgtcacttctctttcctgtctctgggttcctctacaagtcagttttgtaccatgcagtctcgcatttgatgacatgcagcattacttagttctgtgaatgattcgtgtg

SEQ ID NO: 1009684 - DNA, 120 bp, Artificial Sequence
  ENSG00000247092_24 (sequence is synthesized)
tccttcatcactagctgcgttcatcactaggaaaaagtaagagaaatctgatggtatgggattgtaagtgggtattagatccaacagctgaaacttaagatgtgaagatgtatattgaca

SEQ ID NO: 1009685 - DNA, 120 bp, Artificial Sequence
  ENSG00000247092_25 (sequence is synthesized)
tcgtgtgggtgtctgtcagtttcctagctgtgatactgtaccattgtcttgtaagatgctgccatcggtggaaactgggtaaagcatataggggacctctctgtatgatttcttacaact

SEQ ID NO: 1009686 - DNA, 120 bp, Artificial Sequence
  ENSG00000247092_26 (sequence is synthesized)
cgaacagagagaggctctctaaaagaaaatggcatttattcaggaatagagcactgcaatgagaaaatgcatgcgatagttaactgtgtgtatcctgggagatagaggaagacaaaggtc

SEQ ID NO: 1009687 - DNA, 120 bp, Artificial Sequence
  ENSG00000247092_27 (sequence is synthesized)
tttaaaggaaaaatgaggagggttacataattgttttgagataattatttttgactacaaggatcagtaacaaaggtgacaccagtcccaggttggacaggcaggtgctcggcaggcatt

SEQ ID NO: 1009688 - DNA, 120 bp, Artificial Sequence
  ENSG00000247092_28 (sequence is synthesized)
gcagaagtattttttgtgtaagattgagatggcctttgtgcaggattgtggttttggaatcttctgtgatcgtttttgctatcaggcatttatgcttgcgaactctttatggccttccct

SEQ ID NO: 1009689 - DNA, 120 bp, Artificial Sequence
  ENSG00000247092_29 (sequence is synthesized)
gtgtctattttgattccacctttctcattgcccactctaaactgtaattctgcttttatgttgactgagatcaggagaagaatttgcaaacttatatcctgagacagaacagtaatgagg

SEQ ID NO: 1009690 - DNA, 120 bp, Artificial Sequence
  ENSG00000247092_30 (sequence is synthesized)
agtatcgtgttccttacctaatgtataatattgggctcagaagcagttgtcttttttatttgttgaacgttgtattaagttgagaatgcagctgccattaaagattaagagtaatccttg

SEQ ID NO: 1009691 - DNA, 120 bp, Artificial Sequence
  ENSG00000247092_31 (sequence is synthesized)
agaaggaagagtacaaagcctgtgttttgctaaatcatagtgaagttgccgtgtttttgtagaatatgataagaacatacagtgtgtgaaatgctaaggatatggaaaagcatgttggtg

SEQ ID NO: 1009692 - DNA, 120 bp, Artificial Sequence
  ENSG00000247092_32 (sequence is synthesized)
ctctttcaaggagctattttgatagcatgagcaagggcaggaaacagatcatgtatctgaaccaaagaaattgaaacaatacatctaaatttaaatttttaataaaacaacccaaaatat

SEQ ID NO: 1009693 - DNA, 120 bp, Artificial Sequence
  ENSG00000247092_33 (sequence is synthesized)
caagaattatcatcaagagcagcaggttttataagatacatggacctatttggcatttaccagcccatgccgctaggatagagggacagggctgggccccaagtgtgggcttcccggaag

SEQ ID NO: 1009694 - DNA, 120 bp, Artificial Sequence
  ENSG00000247092_34 (sequence is synthesized)
agccaagcaccggctgctcatatgggatgggtgggggtggtgcaggtgccctgcatgggttccactgccctaaagagggtacaaaggccacacctccgtgtgtctgccagggctgggttc

SEQ ID NO: 1009695 - DNA, 120 bp, Artificial Sequence
  ENSG00000247092_35 (sequence is synthesized)
agagcctccctggcttcctgggcactctgcctatcacacagcgattccaatatgatcacatgttcagaacagccacacttgtcaaagcaaggagagaacacttcagcaacgttcaaaaac

SEQ ID NO: 1009696 - DNA, 120 bp, Artificial Sequence
  ENSG00000247092_36 (sequence is synthesized)
atgtctccagggattaaaaaaaaaacacggaaagcttcattttcctccctagtggggaagtcttccttactcacagcctcttcctgagttggtgtctgtcgtgaagcattctttggaagc

SEQ ID NO: 1009697 - DNA, 120 bp, Artificial Sequence
  ENSG00000247092_37 (sequence is synthesized)
atagtaagcggagggtttaatttaccatagtcgtacacatttgcacagaatctaaagtttgcagtgcgtttcatcatctttatgtgaatctcatgcagctcttacagggaaaacaggaag

SEQ ID NO: 1009698 - DNA, 120 bp, Artificial Sequence
  ENSG00000247092_38 (sequence is synthesized)
ccgttccgcggaacgccgggaaggggtcacctcctgatgaagtttccggttccggtgtcagcggcggttgaattgccatggcaatgcggtgggcgcgcgcttgtcgtgttggtctcttgg

SEQ ID NO: 1009699 - DNA, 120 bp, Artificial Sequence
  ENSG00000247092_39 (sequence is synthesized)
gaggtagcggggctaggccgggcgggtatccgcctctcccagcttaggtgagcgtccccgggcgcctccggagcgccgcggccgcatgcagttcgtcgtggcggggagccggagcctgac

SEQ ID NO: 1009700 - DNA, 120 bp, Artificial Sequence
  ENSG00000247092_40 (sequence is synthesized)
cggggttccagcgctcgggccgtagccttggctcctggactttccctggctccgccgccacgtgggagctgaggctctggggcttccgcctccggcgcgcgattatttctctagaacagt

SEQ ID NO: 1009701 - DNA, 120 bp, Artificial Sequence
  ENSG00000247092_41 (sequence is synthesized)
tttcatttttaaaatttgtaaagcgcttttgcctgtgtgatttcctctgggttttttttttttttcttcctttttgtagagacggaattggcggcgggggcggggggtcgatgtctcact

SEQ ID NO: 1009702 - DNA, 65 bp, Artificial Sequence
  ENSG00000247092_42 (sequence is synthesized)
tcctcccctctgagtttccagcctcgttggccctccagccttttaacctgttgggcctaggatca

SEQ ID NO: 1009703 - DNA, 120 bp, Artificial Sequence
  ENSG00000225643_0 (sequence is synthesized)
ctcgctcctctgacacatcgggagctcctgtgtgcagggccctgtctcccaccttgggctgaggcttctaacggcagggcgtctcttccctccaactagggcacctgaagggctaagtgt

SEQ ID NO: 1009704 - DNA, 120 bp, Artificial Sequence
  ENSG00000225643_1 (sequence is synthesized)
tccaagacagcagtgtcagcaaaggctgcgcagatttgaggagtgggaccggcagagctggatgaaacctgactatgctgaaggggaaatggagaccccgggaggggcagggacctgctg

SEQ ID NO: 1009705 - DNA, 120 bp, Artificial Sequence
  ENSG00000225643_2 (sequence is synthesized)
gcctcccccaggcagtagctgacctggaccgcatcccggtactcctgctgagagatcctgactaatacgccaaggcccagggctgcatgcccaggactcaggaagagtctcgaagaatcc

SEQ ID NO: 1009706 - DNA, 120 bp, Artificial Sequence
  ENSG00000225643_3 (sequence is synthesized)
tctgcacacaagaacactgctatccgccgaagctgatgtcagctattccctgcagactggcctggtccagcagagccagctctgctaaactaccacaggcaggaagaaaatgagccacca

SEQ ID NO: 1009707 - DNA, 120 bp, Artificial Sequence
  ENSG00000247095_0 (sequence is synthesized)
ggccggtcgggtcgggccggggggcgagagggtgccagcggccgcagctgaagttgggccgagagccggcgacggccccgcgccggggtcgcagggtaccagtgtgcggagttcctgttg

SEQ ID NO: 1009708 - DNA, 120 bp, Artificial Sequence
  ENSG00000247095_1 (sequence is synthesized)
gagttcctgttgccaagctgaaggtggccctgggcaggcacaggtgtggtcatatcttcagccaacaggaccatcctccggagggccacctctggggacttcctacgggaagagagtgac

SEQ ID NO: 1009709 - DNA, 120 bp, Artificial Sequence
  ENSG00000247095_2 (sequence is synthesized)
agatttggtgcttctgtgtgtttctgccgcttcagtggggccgctgcgggagacagcgggtggatcctccagcagcctgtctgctgagcctgccttctcaagtctactgttaaaatcagg

SEQ ID NO: 1009710 - DNA, 120 bp, Artificial Sequence
  ENSG00000247095_3 (sequence is synthesized)
tagtggacgcctggcatggactcggactggcctttggaagctccctgccctgacggggttgcctgtcaccactgcgaagtgaggcttggcaggacctgcacctgagaaaggctgtgtgtg

SEQ ID NO: 1009711 - DNA, 120 bp, Artificial Sequence
  ENSG00000247095_4 (sequence is synthesized)
gtcttggggtccacacctgcagagctaacttactgccagacggcgacttactgtgggccaccctcagtgaaccggggtgtcctcagctggccctacagagcacttctgtgctggggatga

SEQ ID NO: 1009712 - DNA, 120 bp, Artificial Sequence
  ENSG00000247095_5 (sequence is synthesized)
gtaggaactctgggcgaggagggtcccagcgccgcccctcgatacagcctggctctgccctctgcccgtacttacaccaggtgggatccctgccctgcattgcctggggattggctgggc

SEQ ID NO: 1009713 - DNA, 120 bp, Artificial Sequence
  ENSG00000247095_6 (sequence is synthesized)
gagagggtgccagcggccgcagctgaagttgggccgagagccggcgacggccccgcgccggggtcgcaggcctgcaggagttgagggctgcacctgctcgctggagagggagaggcagat

SEQ ID NO: 1009714 - DNA, 120 bp, Artificial Sequence
  ENSG00000247095_7 (sequence is synthesized)
caactcaaaggtttgctgagtgatctgaagcactctggccactttttggggccatgggatttggttcacctgaaacagccagtgagaggccgggtgtggtggctcacacccgtaatccca

SEQ ID NO: 1009715 - DNA, 70 bp, Artificial Sequence
  ENSG00000247095_8 (sequence is synthesized)
agtgagaggccgggtgtggtggctcacacccgtaatcccaacacttcaggaggcagacgcgggtgatcgc

SEQ ID NO: 1009716 - DNA, 81 bp, Artificial Sequence
  ENSG00000247095_9 (sequence is synthesized)
acgagattacgccgctgcactccagcctgggtgacgagagactctgcctcaaaaaaataaaaaaatgaaacagccagtgag

SEQ ID NO: 1009717 - DNA, 120 bp, Artificial Sequence
  ENSG00000247095_10 (sequence is synthesized)
aggctccccgccttccccccgccggaacatagccatagctgctgctgggacaccctcttggtggggaagaaggctggttagcttcatcagagccagcagcagcagaccagggacgggcac

SEQ ID NO: 1009718 - DNA, 120 bp, Artificial Sequence
  ENSG00000247095_11 (sequence is synthesized)
ctaggcagtggcctcagagtgaacaggagttcctcagaaacacacacagggacggcgtggcgcatgctctgccagctccatgcctccttcccattgtggggctggggtacgtagggcaga

SEQ ID NO: 1009719 - DNA, 120 bp, Artificial Sequence
  ENSG00000247095_12 (sequence is synthesized)
gctcatgacctccgggaggacatgggggtgggctctggatggcacctggcattgccccctgctggcctatgtgacggtgtggagggctggtcacagaggtacgaccatccctccagaatg

SEQ ID NO: 1009720 - DNA, 120 bp, Artificial Sequence
  ENSG00000247095_13 (sequence is synthesized)
tgggtcggggctgtggatggaggagtaggcccctcatatcccaggcctgctgcccaggcacaacccacttggcctatgcattccaggctccatcccatgtgactctgggcttagcccctt

SEQ ID NO: 1009721 - DNA, 120 bp, Artificial Sequence
  ENSG00000247095_14 (sequence is synthesized)
ctggggccacaggtcaggcaggtccaggccccaaggacctcccagtgacaggcgactgtgagctgggcagacaggagtgaagtcaggtgggggttctggcttgctgacaccagcgtttgg

SEQ ID NO: 1009722 - DNA, 120 bp, Artificial Sequence
  ENSG00000247095_15 (sequence is synthesized)
agcctcctgctgctgcctggcttccctgcattccctgttccctgcctcaggcaagaaataaccaagccgagttgcctctgcacagcagtgagctcctggtggccctggcttctggggagc

SEQ ID NO: 1009723 - DNA, 120 bp, Artificial Sequence
  ENSG00000247095_16 (sequence is synthesized)
cctgtggatggcttccttgcccaagtccaggccttcttgttccctttgtgtgctccagagaaagggggcagcaccagatccagatccagggccaaccaacagaaagctgagtccatccca

SEQ ID NO: 1009724 - DNA, 120 bp, Artificial Sequence
  ENSG00000247095_17 (sequence is synthesized)
aactcgcccattctcagagcacaaagaccccatgatctagggcaaacttgtccaactgttggcccatggaacagctttgaatgcagcccaacacaaatctataaattttcttaaacattg

SEQ ID NO: 1009725 - DNA, 120 bp, Artificial Sequence
  ENSG00000227848_0 (sequence is synthesized)
ggggcctcgggttaacactgcagccgctagaccagctccctggcgggcgcggagcaagctttgacctttggaactgggcaccgcagccccaatatctgccctgcggtcagagcaacctga

SEQ ID NO: 1009726 - DNA, 120 bp, Artificial Sequence
  ENSG00000227848_1 (sequence is synthesized)
acacttcctagtgaattgcaatgtaaaggtgaccagcgccgccacttgggtgatcttaacttctctcagcctcagttgcctcatctgtaaaatgtgtttcattcaagaaatgattaccca

SEQ ID NO: 1009727 - DNA, 120 bp, Artificial Sequence
  ENSG00000227848_2 (sequence is synthesized)
agagaagatggtcggtgtaacgcgcttgtgatgctcaaagagaagatggtcggtgtcatgcgcttctgatgctcaaagagatcggtgtcacgcgcatccgtgtgaagacaccgccaaaca

SEQ ID NO: 1009728 - DNA, 89 bp, Artificial Sequence
  ENSG00000227848_3 (sequence is synthesized)
atcggtgtcacgcgcatccgtgtgaagacaccgccaaacaggggacagaatctctctatgttgcccaggctggtctccaactcgtggga

SEQ ID NO: 1009729 - DNA, 120 bp, Artificial Sequence
  ENSG00000249145_0 (sequence is synthesized)
acatctaaaaataggtctgggagaggtgactgccgaggcggccatcctgcttggccagctgaaggtttgagactcaggatggggtcatggctgagactatgagggctgctcgtgcatgac

SEQ ID NO: 1009730 - DNA, 120 bp, Artificial Sequence
  ENSG00000249145_1 (sequence is synthesized)
cctgcctgctggcctccatgggcccactatctgaatgtggttacccttctccccaggaccaggtgccacctcctctgggaagctttccctgcccgtccacagggtatgcctccttgttcc

SEQ ID NO: 1009731 - DNA, 120 bp, Artificial Sequence
  ENSG00000249145_2 (sequence is synthesized)
tctcctgccatcggtttacgtgcctgtctccatcaacagaccaggagctcctgaggacagggactgagtctgcctgattcatctctgcattcctagcacttaccttggtgcttagtgaaa

SEQ ID NO: 1009732 - DNA, 120 bp, Artificial Sequence
  ENSG00000249145_3 (sequence is synthesized)
gctcgaacctgcctgggttcccaccttgtctctgctacccccagctctgtgaactcagagtcatttttctctccccgagtggcaccgggctcagcagacactctggccatgaaggcatct

SEQ ID NO: 1009733 - DNA, 120 bp, Artificial Sequence
  ENSG00000249145_4 (sequence is synthesized)
cagcagacactctggccatgaaggcatcttctgactcaagcaggtctagatgtctacccccaaggaatcccagaacagttgatctctctttttatttttttattttttgagatggagttt

SEQ ID NO: 1009734 - DNA, 62 bp, Artificial Sequence
  ENSG00000249145_5 (sequence is synthesized)
agccaactactaagcctgtagcagcctcccaaactgcccagtcttgttcagatgcacctcca

SEQ ID NO: 1009735 - DNA, 120 bp, Artificial Sequence
  ENSG00000249145_6 (sequence is synthesized)
agcctcccaaactgcccagtcttgttcagatgcacctccagaaacacaggggtccaaaatgccccttcccagacaccctgaggagtagaacagtgccagcaggctccagggatgagggac

SEQ ID NO: 1009736 - DNA, 120 bp, Artificial Sequence
  ENSG00000249145_7 (sequence is synthesized)
tagctaccacattccctttcccaagcctcagtttccccacctgtaagatgagggatatgggctctgactttctgagtttggaaaataaagtgctccccaaactgggctgctttctctgcc

SEQ ID NO: 1009737 - DNA, 120 bp, Artificial Sequence
  ENSG00000249145_8 (sequence is synthesized)
ggcatcccttccttctgggcaggtgttccatctctgcagatataaaacacagaggggcccagatctcaggccagcctgaactgagcttctctgcaggatgatctcctcaccagaacccct

SEQ ID NO: 1009738 - DNA, 120 bp, Artificial Sequence
  ENSG00000249145_9 (sequence is synthesized)
ggacaggagggtctgccagatcccaggaaggagatgtgtgaagccagccttggtgacactcctgggccccatccagtcagttatgaaaagtctctgctgctaaactcatctgcctcagcc

SEQ ID NO: 1009739 - DNA, 120 bp, Artificial Sequence
  ENSG00000249145_10 (sequence is synthesized)
tgtctctggcctgtcttctttctttctgcatttcttccttttaaaaaagtttattgctcttttctaatgttaaaagtaacacatactgattgcagaaaatccagaaaagcacaaagaaaa

SEQ ID NO: 1009740 - DNA, 120 bp, Artificial Sequence
  ENSG00000249145_11 (sequence is synthesized)
aaattaaaatcactcgtaatgtcaacatgcagtgacatctactgatgtttgagtgtgtgtccatatagtctttttgtaaggtcctggacagagcaagcaagcagtcttttttgatatcca

SEQ ID NO: 1009741 - DNA, 120 bp, Artificial Sequence
  ENSG00000249145_12 (sequence is synthesized)
cagaataacttgctagggtcttgattggaatggcatcgggtctataaagactgacatcttgatgatattgaatcttcctatccatgaacatgggatatctctctatttatttagttcttt

SEQ ID NO: 1009742 - DNA, 120 bp, Artificial Sequence
  ENSG00000249145_13 (sequence is synthesized)
gattttccagtcttttttctatgtctgaattttgttgactgaaaacaccctctaagtaggtttcagtcctgctttctcccttaatgttatgtcatgttaagcctctctctaagcagagat

SEQ ID NO: 1009743 - DNA, 120 bp, Artificial Sequence
  ENSG00000249145_14 (sequence is synthesized)
gttaattactgcctcattttccaatatgtggagacacagaaatgtgcctaaccattcaccattattgtacttctaggttgttttcaggtttgtcactaactataaaaacaataataaaat

SEQ ID NO: 1009744 - DNA, 120 bp, Artificial Sequence
  ENSG00000249145_15 (sequence is synthesized)
ctgggttcccaccttgtctctgctacccccagctctgtgaactcagctcctgcctctgtgagtcacccccccaagtgctctgcctgcagccacttgccctggcaggaagacccttgggca

SEQ ID NO: 1009745 - DNA, 120 bp, Artificial Sequence
  ENSG00000261159_0 (sequence is synthesized)
caaagctccaggacgattttgccacccatgttggcatgtgtaaccgccccccacagtcacgacactgaacatggccaccaccacaagtgcctagtgttgtgctacccttttacagccagc

SEQ ID NO: 1009746 - DNA, 120 bp, Artificial Sequence
  ENSG00000261159_1 (sequence is synthesized)
gcccctccctcctgcccggcccccctgcgttgtatttatggctgcattttgtcctgtcttgtggatgttccatggcggacagacaggctgaacaaacaaagggtgtgcaaagaagcccag

SEQ ID NO: 1009747 - DNA, 120 bp, Artificial Sequence
  ENSG00000261159_2 (sequence is synthesized)
agcaggagagaaggctccccagcctggctcttggtcagcacagtcacaggctggctctgcctctcttggctgcactgtcctgaagcaggaaatatgagaaaaacaagtaaagggaaaaca

SEQ ID NO: 1009748 - DNA, 120 bp, Artificial Sequence
  ENSG00000261159_3 (sequence is synthesized)
tcttagtctccccctggaattctttccccatgccatcattctttgttctgctcttataactatttttgtaactatttctgcaagtttgcaaggattttataagttcatgttttcccatct

SEQ ID NO: 1009749 - DNA, 120 bp, Artificial Sequence
  ENSG00000261159_4 (sequence is synthesized)
atgcaggatggcaaaggtcacaagacatgcctgaattgcaaaacctgtcacagtttgattaactgcctttgttctgcttctgtaagctcgctttccccaccccgcaagttttgcaccact

SEQ ID NO: 1009750 - DNA, 120 bp, Artificial Sequence
  ENSG00000261159_5 (sequence is synthesized)
ggctagccactccccttcagtcgcctgaataaaagtcaagcctgatctttgttcgttgctcagcctctggatattaatccgctgggccagtggccacctgaataaaatcctcctatttca

SEQ ID NO: 1009751 - DNA, 120 bp, Artificial Sequence
  ENSG00000261158_0 (sequence is synthesized)
cagagccccgcttgatggcaggtgctggacaataacaatgctgggatccccgcctctgctgccactttcctcaccagcatggatcctgccctctcctttgtgtcactcactaaaggctca

SEQ ID NO: 1009752 - DNA, 120 bp, Artificial Sequence
  ENSG00000261158_1 (sequence is synthesized)
aagtctggttcaaggtagaaacaattttacgtgtctcagaaagaacaaagagtttaagatggtgatgctgagattctggacaagatggacatggtgatctctactggaatccggggactg

SEQ ID NO: 1009753 - DNA, 120 bp, Artificial Sequence
  ENSG00000261158_2 (sequence is synthesized)
ctgtactacggtcatatactactgctgggggcctggtgttcccggggtgcactgggggccttgctgtactgatatggtcatatgctactgggggcctgctgttgctgaggtacattgtca

SEQ ID NO: 1009754 - DNA, 120 bp, Artificial Sequence
  ENSG00000261158_3 (sequence is synthesized)
ccctagatcagggactctggggacagtttttaatttactgataagtaaagttttaaaatgtgacatctttgagtactgctgccctagtctattaaacaaagagaagcaattcccaggcca

SEQ ID NO: 1009755 - DNA, 120 bp, Artificial Sequence
  ENSG00000261158_4 (sequence is synthesized)
ggatcatcctactaacccaaacctgataatgctgatgtggcccagggctggcaggatggcctggactgtaactaggcatcccctgcttccatttgcagacatgtggctttgccctgatgg

SEQ ID NO: 1009756 - DNA, 120 bp, Artificial Sequence
  ENSG00000261158_5 (sequence is synthesized)
agacatagtgacagatcattttgtactacgtaggtacagatccaaagggcatcttaggctggctgtcattaagttccagtgaggaacacctgtcttcttcagttcctgtttctccagttt

SEQ ID NO: 1009757 - DNA, 120 bp, Artificial Sequence
  ENSG00000261158_6 (sequence is synthesized)
gcatgcagcctcagcccatcagaaggcagcggataagagttcccccttggatggctttaagttggcaaacaggggtagaaaagaggccaagctgcgtggtggcaggcacctgtaatccca

SEQ ID NO: 1009758 - DNA, 120 bp, Artificial Sequence
  ENSG00000261156_0 (sequence is synthesized)
tgtgaagagaccaccaaacaggctttgtggatgatgcatctgagagctcaatgcatgtcggtgatgatgaaggtgaagatgctgtgagtgatgatgaggaggaggaggaggatgtaattg

SEQ ID NO: 1009759 - DNA, 120 bp, Artificial Sequence
  ENSG00000261156_1 (sequence is synthesized)
aggaggaggaggaggatgtaattgaaggagcttgggctttgccatcagtacagctgagttaaaatatggaggcgcatcacccaactggcaagtacccgcctaagggggggtccatctttt

SEQ ID NO: 1009760 - DNA, 120 bp, Artificial Sequence
  ENSG00000261156_2 (sequence is synthesized)
ccggaactgcaacatcccatctgttcacttttatgccttaatatccccaaagtcactcttgccaaacgctacagagcacatatttattgttttaattaaagtgaataggtttgaggattt

SEQ ID NO: 1009761 - DNA, 120 bp, Artificial Sequence
  ENSG00000261156_3 (sequence is synthesized)
taaaagagaactttgaagctatccaagggggttccaaaatcagagaagggaaagcttacaccagaatgcatcagagtgacatagctcatcccaggctccctgatttaggagaaagggagc

SEQ ID NO: 1009762 - DNA, 120 bp, Artificial Sequence
  ENSG00000261156_4 (sequence is synthesized)
aagaagaagaagaaaggaaaaactgaaaaaagaaacattgaggctcatgtcttgttttgtttctcaaaagattccattagactcaatatgtcattctaagtgcacctggatatagcgcag

SEQ ID NO: 1009763 - DNA, 120 bp, Artificial Sequence
  ENSG00000261156_5 (sequence is synthesized)
atttagataactgtctcctccccttctgacctttattacgactacaaaaattctgtgtgtgagggataaataatgcatgctctcagccaagaagggaaagaagacccaaggaaaaattgc

SEQ ID NO: 1009764 - DNA, 120 bp, Artificial Sequence
  ENSG00000261156_6 (sequence is synthesized)
agaatagaatggcaaaccaggaaaacagagctcagtacagaagggagttgggcagcctctgttcctgtttggctctgtccttgaagaaagtgataagaagtgcacagattttggaattaa

SEQ ID NO: 1009765 - DNA, 120 bp, Artificial Sequence
  ENSG00000261156_7 (sequence is synthesized)
acagaccatggtttgaagtctggatcttccagttgtaaccaggtggcattggggcctatggttcatcctgcaatatcagagaatacacaactgttggaagctcatttgtgcagaagcact

SEQ ID NO: 1009766 - DNA, 120 bp, Artificial Sequence
  ENSG00000261156_8 (sequence is synthesized)
agttagaccaagtcccaggatggtggggacttgaactgcctcatgcacattgtacccaagagcctggcccatgaaggtgaatcagtggatacttgaataaaaagaagaatatgcgctgaa

SEQ ID NO: 1009767 - DNA, 120 bp, Artificial Sequence
  ENSG00000261156_9 (sequence is synthesized)
tagtcttcccaacaatcctgcaagatatagaaccttgacatgtttctcaggctggtctgaaactcctggggctcaagcgatccacctgcctccacctctcaaagtgctgagattacaggg

SEQ ID NO: 1009768 - DNA, 120 bp, Artificial Sequence
  ENSG00000261156_10 (sequence is synthesized)
tggacgaagccattgggaatgcaggtggtgattgaaattattccagaggtgaaatccctgtgacttggtgattgactgggtgcagggcctatggttcatcctgcaatatcagagaataca

SEQ ID NO: 1009769 - DNA, 120 bp, Artificial Sequence
  ENSG00000261154_0 (sequence is synthesized)
caatatgccccatttcgctaacctccactgagccccaagctctgaagatcaaagtcaaagcacgaaatgaacgtgagagagctggaaagctaactacaaagcctctaaaagttacgtaac

SEQ ID NO: 1009770 - DNA, 120 bp, Artificial Sequence
  ENSG00000261154_1 (sequence is synthesized)
aacacacaaagcagctatttgaggactctgagaaggaaatggcagcacacagattgggggagaagaccagaatttgaaatgctgctgaaccacagtagagtgatacaagatgtgaccgtt

SEQ ID NO: 1009771 - DNA, 120 bp, Artificial Sequence
  ENSG00000261154_2 (sequence is synthesized)
gaagaatgctggatgaaaggcgactgccttcatggaacccgtatggactccgtgtatattttttgggtaatttcctatgactcagtaattatttcaaaataaaaatgtttaaaaagtgaa

SEQ ID NO: 1009772 - DNA, 120 bp, Artificial Sequence
  ENSG00000240373_0 (sequence is synthesized)
agtcatcaacctcttaacatacgagaagtaatttctaaggtaaataaattccaaagatctttccttcagtagtagtggttcttctggcgctagaaaatgattataggataactataaatt

SEQ ID NO: 1009773 - DNA, 120 bp, Artificial Sequence
  ENSG00000287693_0 (sequence is synthesized)
gcaactgaaccaatgccaggcacaatctacctctgggcttcttattacatgaaaaagataaacttttgtttgttttacccattttaagtgagggtttctattattgctgctgtttctgct

SEQ ID NO: 1009774 - DNA, 120 bp, Artificial Sequence
  ENSG00000287693_1 (sequence is synthesized)
gctccttaagctactgaccaactctgacacctgttctctgaatggcctttcttaatcttgaagagtggcagggaaacaggtgaatatttcttcaatgtcaactcaagcaaaattgggagc

SEQ ID NO: 1009775 - DNA, 120 bp, Artificial Sequence
  ENSG00000287693_2 (sequence is synthesized)
aagtgatacacacccatttaaaaaccaagctgagaatggagttttacctcttcccaaaatatcaaacagaggaaattagaaaggagactcttctgacagaacttacccctgagagtgatg

SEQ ID NO: 1009776 - DNA, 120 bp, Artificial Sequence
  ENSG00000287693_3 (sequence is synthesized)
tcgatgagctacaggagaagctggcagctttccccacagagttggacacacacaggctcaggactcagaagtgaagaaagattccgtggggttggaagagctgcaggcctggatgaagtc

SEQ ID NO: 1009777 - DNA, 120 bp, Artificial Sequence
  ENSG00000287693_4 (sequence is synthesized)
cccagaaacaagtgaccgtggaaacatcctgctgagatggagaaactgtgactcgctctgtctgcatccctgagctttcacctggaaaaggcactgaccttgtgtgtcgaagtctgcaga

SEQ ID NO: 1009778 - DNA, 120 bp, Artificial Sequence
  ENSG00000287693_5 (sequence is synthesized)
ctttcattttggagatatatttcactctgaatagtgaatcagagtggggtgaaacatctggcttataaaatgtttcaaacctcaaaccactttagatacttggaaatcatcttctccaca

SEQ ID NO: 1009779 - DNA, 120 bp, Artificial Sequence
  ENSG00000287693_6 (sequence is synthesized)
catttattataaaacaggaagagacccagaaaaaatgccactctgttttgaagatggaaagtaagtgtcattgatgtaaaattcttggatttcttttgtgtagttgtagactgtgattgc

SEQ ID NO: 1009780 - DNA, 120 bp, Artificial Sequence
  ENSG00000287693_7 (sequence is synthesized)
cagtatatggtccacaaagttgttggtcattttgtaaatttaaaatttgccagttaggcctaaaaatcatctcccacatgtgatggcaagcctagaggtggtcggcccatgcttgcccct

SEQ ID NO: 1009781 - DNA, 120 bp, Artificial Sequence
  ENSG00000287693_8 (sequence is synthesized)
tttgtctctctgctcagccagcttagtctgtgctgtccacccccatgctgatcaccaaatggtcactctgtggtgctccagttccacctctcagctgtgttccaggcaggaagaaagaca

SEQ ID NO: 1009782 - DNA, 120 bp, Artificial Sequence
  ENSG00000287693_9 (sequence is synthesized)
agagcaaaactgcattcagtagagcatgcccactttgagagagagctcgtgcagaagctggccagggcagcatcttgcctcttctttacattagatcactggctcccagcagcagcacca

SEQ ID NO: 1009783 - DNA, 120 bp, Artificial Sequence
  ENSG00000287693_10 (sequence is synthesized)
gctacagagcctcttgctcccttccttccttgttctcctctgtctctatgtgtatgtgtgtgcatacatatttatagacacacacacatacacacaaaatactatattatgtcatatagt

SEQ ID NO: 1009784 - DNA, 120 bp, Artificial Sequence
  ENSG00000287693_11 (sequence is synthesized)
tttctgaatgtgttggtaccctgaatgatatatgttggtaggaaaagaggaaagtgtagacatttatgggcagccgactttaccagttgggcctagactacctaaagattatcagtacaa

SEQ ID NO: 1009785 - DNA, 120 bp, Artificial Sequence
  ENSG00000287693_12 (sequence is synthesized)
tttatgctccaagaaagtagtgtgcatatcttcgttactgtagttcaaacacctaggagaatacctggcttatagttggtactaaggacatattttcgaagaaagaaagagtcagggaat

SEQ ID NO: 1009786 - DNA, 120 bp, Artificial Sequence
  ENSG00000287693_13 (sequence is synthesized)
gcatacttgttttaggaaagagtgctttcagcttctaacaaagcctaattcccttttccttcattgttcctctatttcttcgaaccaaacatattgtattgatcgacgatggatggtgac

SEQ ID NO: 1009787 - DNA, 120 bp, Artificial Sequence
  ENSG00000287693_14 (sequence is synthesized)
tatgagtttctgctttcactggaggtggggtgggaggtacacatccaaacatgcttagcctccctgggtgggtggatctgcggatgaatgtttccatatcaaaatctgaactgactactt

SEQ ID NO: 1009788 - DNA, 120 bp, Artificial Sequence
  ENSG00000287693_15 (sequence is synthesized)
tccctttgtagtttaaattatttcaaccacagagaggagctgaatattaagttaactgtgttcatctgccagaaaaattaaatatcagtgtagaaaataatcttagcgttcacttaaact

SEQ ID NO: 1009789 - DNA, 120 bp, Artificial Sequence
  ENSG00000287693_16 (sequence is synthesized)
gccttaacagttttaaaaaggcacttaaatgtagcaatcatatgttttggtttacctggaagtttctgtttgttgcttttgaagtagcttaattattcctgtctgaagagtcctggttgg

SEQ ID NO: 1009790 - DNA, 120 bp, Artificial Sequence
  ENSG00000287693_17 (sequence is synthesized)
tgtggtattcaatgctcatgctactccaagagggcctgctgatatttacagagtcacaaaagtcacccatgatctttgacacttggtttaatgatcttccctctatattgtactggcagt

SEQ ID NO: 1009791 - DNA, 120 bp, Artificial Sequence
  ENSG00000287693_18 (sequence is synthesized)
ctgcgtgcttccctaaatgactgtgcatgaaaatcatattcaattttttttattttaattgcttgggggacacttccataaaaatctggctcagtgtctggctggggcatttccagcaag

SEQ ID NO: 1009792 - DNA, 120 bp, Artificial Sequence
  ENSG00000287693_19 (sequence is synthesized)
aaccctgagtgattctggtgcaggtgatactgagatcacaaactgaataacactaaaataaatgaaacggggcttaaattttacagctcatggaagagctcatgaaaattcttaacaagt

SEQ ID NO: 1009793 - DNA, 120 bp, Artificial Sequence
  ENSG00000287693_20 (sequence is synthesized)
agaaacctagatgaaaatttactgcatgaagctaaagacaagtgttttcctgattaaaaaatcaaaagcacaacatttaagtaagaagtatcctgctaattctcaccatgatagtgcaca

SEQ ID NO: 1009794 - DNA, 120 bp, Artificial Sequence
  ENSG00000287693_21 (sequence is synthesized)
tgcctaatctactacattgaaacatacattttataaactctatgccacttgcatggataattgatgtaatcgaattgcactggaattggaattttcactgcagaataccagctgtggctg

SEQ ID NO: 1009795 - DNA, 120 bp, Artificial Sequence
  ENSG00000287693_22 (sequence is synthesized)
ctgtccaggggagaaccctgctccaagtgctcaacattggctgctgtagttcatggaatatttaattgtctgctgaaaaatgaattgcaattagcattaaccagcttttaaatatttgct

SEQ ID NO: 1009796 - DNA, 120 bp, Artificial Sequence
  ENSG00000287693_23 (sequence is synthesized)
ttgagagtaatacagacatgttgtccagaaccatgctagttgctttattttctctaatttttcagactaatgccatgggagataccctctccattatattaaatagaaaactgaaactca

SEQ ID NO: 1009797 - DNA, 120 bp, Artificial Sequence
  ENSG00000287693_24 (sequence is synthesized)
ggcagataaaataataaatccaagtccccattgaaagtaagaattgaaaaccaagactatctatggcaaaatgtgatcttctcaacacttacagtgtctttatatctttgacttctcttt

SEQ ID NO: 1009798 - DNA, 71 bp, Artificial Sequence
  ENSG00000287693_25 (sequence is synthesized)
ctcaacacttacagtgtctttatatctttgacttctctttttctgtctctctttatagatttataacctat

SEQ ID NO: 1009799 - DNA, 84 bp, Artificial Sequence
  ENSG00000287693_26 (sequence is synthesized)
catacatccatccatccatccatccaactatccatccatcccattgcatgttgtttcctatctacattcctaactctgcctatc

SEQ ID NO: 1009800 - DNA, 120 bp, Artificial Sequence
  ENSG00000287693_27 (sequence is synthesized)
tgcatgttgtttcctatctacattcctaactctgcctatcatacaattatttggcattatcctttaattggcaatagggttgccagcaggtgtcctgaaattttcctatgccaaaagttc

SEQ ID NO: 1009801 - DNA, 120 bp, Artificial Sequence
  ENSG00000287693_28 (sequence is synthesized)
tattctgtaaagagtaatagacttttaaggtgagaaggttattttgaagactgataaatatcttttctgttgtatgtgaggaaatttaggcccagggaaattaagcaacttatttacact

SEQ ID NO: 1009802 - DNA, 120 bp, Artificial Sequence
  ENSG00000287693_29 (sequence is synthesized)
ggcatattaagttattggcagagattaaatataattaagtcttttgactcataatttatttttccacctggaactttaggttaaaggctactagttaaatattgaataagctcaaatata

SEQ ID NO: 1009803 - DNA, 120 bp, Artificial Sequence
  ENSG00000287693_30 (sequence is synthesized)
acatttccaggtaaccaaaaaagggagaaaaaatctattcatagagtcgatttgttttataagttaatgcaaggattttaaaaatcacatggacttacaaattccaggataaataccttc

SEQ ID NO: 1009804 - DNA, 120 bp, Artificial Sequence
  ENSG00000287693_31 (sequence is synthesized)
ctttctagagactgacactgctgtgtagaacacaaggcagcatttctgaatgaaattggcctatttataaggtttgcctccagtagattctgctaaacctatggtgtcagccagatgcag

SEQ ID NO: 1009805 - DNA, 120 bp, Artificial Sequence
  ENSG00000287693_32 (sequence is synthesized)
tgactcatgcctataatcccagtacttcaggaggccgaggagggaggatcacttgaacccaggagttgaagatcagcctggacaacataaagacacttctctacaaaataacaataaaaa

SEQ ID NO: 1009806 - DNA, 120 bp, Artificial Sequence
  ENSG00000287693_33 (sequence is synthesized)
taataattttaaaagtaagtaaaataaaaccatggtttctctagtgttagatttggataaaccaacccaaataatatctagcagttcttagagctgtaacaatagactaaccattggtgt

SEQ ID NO: 1009807 - DNA, 120 bp, Artificial Sequence
  ENSG00000287693_34 (sequence is synthesized)
atcatagaccattcttaaaattttcaaatgtcagtactgaatggcatggaacaggaataatatttatcagagtatctactagtgccagtcaacatgaaaatgcttacatgtaatattaat

SEQ ID NO: 1009808 - DNA, 120 bp, Artificial Sequence
  ENSG00000287693_35 (sequence is synthesized)
tgcttacatgtaatattaatgccaatccttacaaccattttctaattaaacagatatcttagtaattatagaaatattttgttacttattttaaattagtgttgtcattttaccaatttt

SEQ ID NO: 1009809 - DNA, 120 bp, Artificial Sequence
  ENSG00000287693_36 (sequence is synthesized)
ttaacttccttaagctcacataaagaggattacatgaaatacattacctgaagaaaaatgtatttcattcttgtatgaatcacaatatagtagaatatggtagaaaacatacttatcaca

SEQ ID NO: 1009810 - DNA, 120 bp, Artificial Sequence
  ENSG00000287693_37 (sequence is synthesized)
caaaacagcatgtttgaaaaaaataaatgtaatggttcaggttgcagttaataattgacttagactagtttcacagatagtaaaatagttacgttaacaattttaaaaggatgggtatgt

SEQ ID NO: 1009811 - DNA, 120 bp, Artificial Sequence
  ENSG00000287693_38 (sequence is synthesized)
ttttgtttcttccagaaaatacttctctgtgattaaaatattcaactatattcaaaattcaaatatttaccaaacttctaaaatatcccactgtgtttagcaatataataactgctgtgg

SEQ ID NO: 1009812 - DNA, 120 bp, Artificial Sequence
  ENSG00000287693_39 (sequence is synthesized)
gttttaaaaaagaatcatgacttaggactttaattaagtttgaaaaatcagtggaatcatccatactaattttttttactcttaaaaactttcagaaaactgactttatatcaccatatt

SEQ ID NO: 1009813 - DNA, 120 bp, Artificial Sequence
  ENSG00000287693_40 (sequence is synthesized)
ttaaacaacatcttttagtgaaagcatgtctcattcagtgatctaaagcaaagtgcatatagatgaggtgtggaggcagattgcctgggttcagatcccagttccgccactattagtacc

SEQ ID NO: 1009814 - DNA, 120 bp, Artificial Sequence
  ENSG00000287693_41 (sequence is synthesized)
tacctttggggtttgttgacattaagtgagtttaatcatgaaaagcacttaacattttgcataagaaattggctagcgtgtaaatatgaaacaagtagtagtaattattagtcaacaaaa

SEQ ID NO: 1009815 - DNA, 120 bp, Artificial Sequence
  ENSG00000287693_42 (sequence is synthesized)
actttataattgcaagttctgaggactttttttggtggaaaagggagattttaataagtaaggatggtaaggaaaatgtcccatttattcttgtggtaatgtgtaatcttttcctaatta

SEQ ID NO: 1009816 - DNA, 120 bp, Artificial Sequence
  ENSG00000287693_43 (sequence is synthesized)
aaatgagtgtttatcatcagacaccaacttgacagacaaaccacagagtaacaggaaaacagctgagtgatgtaggaaagttaacttgcccctctgcctggaaacaaatacaacattgga

SEQ ID NO: 1009817 - DNA, 120 bp, Artificial Sequence
  ENSG00000287693_44 (sequence is synthesized)
catcagagagtgccagagagaccatcttcccatctcaggataggcacctaacccaagaaatagtttactattctagacagagaatctatcacctcccccgacaacttactccaacattta

SEQ ID NO: 1009818 - DNA, 120 bp, Artificial Sequence
  ENSG00000287693_45 (sequence is synthesized)
atcccctgactgtgggagtcaaaaattcaatttagaaacaaaaatttaatttaactctagaaagagaatttcacatttttgcctgaaacgcttagcaattgtgagatcaatgttttatga

SEQ ID NO: 1009819 - DNA, 120 bp, Artificial Sequence
  ENSG00000287693_46 (sequence is synthesized)
aggcaggattgtaatttataatttcataattataatttataatttcaacaaagtaggattaaagtagggtggtattatcaatatttaacgtagtttttaaaaatttaccacacttatcac

SEQ ID NO: 1009820 - DNA, 120 bp, Artificial Sequence
  ENSG00000205696_0 (sequence is synthesized)
ctcaccagatgcagatgctggtgccacgcttcctgtacagcctgcagagccatggctgcacaaacctttcttcctcataaatcacccagcctcgggtgttcctttctagcaacacacacg

SEQ ID NO: 1009821 - DNA, 120 bp, Artificial Sequence
  ENSG00000205696_1 (sequence is synthesized)
gactgagccggatgacatgaagcagctgttcccgcctcctcctggcacctccctgactcacgcacttggtgcgtggaggggtcgtgagcgggcacaggcagccacttcgctgcttgcctc

SEQ ID NO: 1009822 - DNA, 120 bp, Artificial Sequence
  ENSG00000205696_2 (sequence is synthesized)
ctgatgtctgttctcacatcacattgcgctccaagtaccccggctgcaaccagagctcagcaaaccgggaccagagggcacatccaccctgcctgcccatgtcaacagagttgtgtggga

SEQ ID NO: 1009823 - DNA, 120 bp, Artificial Sequence
  ENSG00000205696_3 (sequence is synthesized)
gccagccggcccccaggaagaccccagatcttcctgcccctgaccacagctctgtccctggaagcatatgctgcagacacttgctctgctgcagattttctgcacaacccctcctcatgg

SEQ ID NO: 1009824 - DNA, 120 bp, Artificial Sequence
  ENSG00000205696_4 (sequence is synthesized)
gggaaggtttggtacctgaatgaggcctcttttgacctctattcctatcactatttttggtgacctcaatatttatgaaggtaataacttggtctttaatccagacaattttcacctcca

SEQ ID NO: 1009825 - DNA, 120 bp, Artificial Sequence
  ENSG00000205696_5 (sequence is synthesized)
ctcacagttccccacagatgatccctgcattagttggcggagctgatggtgttccctgttttaccctgtggtctcatttccggatgctgctaccaatgcccgtctctatggctccctgcc

SEQ ID NO: 1009826 - DNA, 120 bp, Artificial Sequence
  ENSG00000205696_6 (sequence is synthesized)
gggaagtggctggagaggtgtccagatcattgtgaatgaagtcatctgtgaaaccatgggagagagatttgatatctgcttccctttcaaatgaaaggaaaagagtggggtgagagaggg

SEQ ID NO: 1009827 - DNA, 120 bp, Artificial Sequence
  ENSG00000205696_7 (sequence is synthesized)
cggcactccccagacaggccctgaccacaccctggccccacgcctcagcagaacaactctgaacctctatggactcacaggggcgaggtcggggcaaggagactcagggcctgcgctgct

SEQ ID NO: 1009828 - DNA, 120 bp, Artificial Sequence
  ENSG00000205696_8 (sequence is synthesized)
caccgggtgagaagtcacagctggttaggaggccacagacggcaatgtcgctgatggcgagattccgggccatccatttatcctgtgtggaggctgacagggacgcatgcctcatctgct

SEQ ID NO: 1009829 - DNA, 120 bp, Artificial Sequence
  ENSG00000255328_0 (sequence is synthesized)
attggggttcctggagaggaggccccctctccccaggtgggggctcctgtttcccctgctctgctctgaggtccccagggtccagtcccctccccaccctatcctggagcttgtcaaggc

SEQ ID NO: 1009830 - DNA, 120 bp, Artificial Sequence
  ENSG00000255328_1 (sequence is synthesized)
caccagagacctgctccctgtgccgtctcagactggactctggggtctccggtgcctcctctgattctgcacctcggtgcagcctctggcctggctgcgctctgaggagctccctgtggc

SEQ ID NO: 1009831 - DNA, 63 bp, Artificial Sequence
  ENSG00000255328_2 (sequence is synthesized)
ccaggctgaagtgcagtggcaccatcacagatcactgcagacccaagtaacacacacattagc

SEQ ID NO: 1009832 - DNA, 120 bp, Artificial Sequence
  ENSG00000255328_3 (sequence is synthesized)
ggtggctcactcctgtaatcccagcactgggaggccaaggcaagaggatcgcttgaggccgggtggttgaggctgccgtgagctgtaatggtgccactgccctccagcatggatgacaga

SEQ ID NO: 1009833 - DNA, 120 bp, Artificial Sequence
  ENSG00000255328_4 (sequence is synthesized)
gccactgccctccagcatggatgacagagaccccacctctaaaaacaattaattaattaaaattaaatcagtaaaaaatttttttaattaaaattttaaaaaatagattattaaaacaaa

SEQ ID NO: 1009834 - DNA, 120 bp, Artificial Sequence
  ENSG00000255328_5 (sequence is synthesized)
gggtcagcggctcctgtggcatctggccaaggacaatgtgctgagaagtttcccctgaaaaaatcagaaacaaaactcacctcaggagaggcccctgcaccctccaagaggaagtgggag

SEQ ID NO: 1009835 - DNA, 120 bp, Artificial Sequence
  ENSG00000255328_6 (sequence is synthesized)
aaaatttctttgtaaaatgtcagtatttcatcaatagtatattttgttgatgatatgttgagaaactattttggatatgtttgtttaagtagattgctggtgtgagccaccgcgcccggc

SEQ ID NO: 1009836 - DNA, 70 bp, Artificial Sequence
  ENSG00000255328_7 (sequence is synthesized)
ttgtttaagtagattgctggtgtgagccaccgcgcccggcctgtcttcttcttcctaagtaaaatcagct

SEQ ID NO: 1009837 - DNA, 120 bp, Artificial Sequence
  ENSG00000255328_8 (sequence is synthesized)
cctgcttggatagctgatgccttcttgtcagccttctccctccccttctccctccacttagttgcccttacccaaaccagggaagtttcgtctaagataaaagtttactagcctgcaaaa

SEQ ID NO: 1009838 - DNA, 120 bp, Artificial Sequence
  ENSG00000250945_0 (sequence is synthesized)
tgcagctcccagttgatcaatgcagaagttcgtaggtcttgagatcaagagcaaccccatgtggatccatggtagatcacaagatctggaagtttgtgcctaatgttgttatcagatgag

SEQ ID NO: 1009839 - DNA, 120 bp, Artificial Sequence
  ENSG00000250945_1 (sequence is synthesized)
ccttttggggatgtcctgaagggttccttgaggtgtgaccttagattgtctatttgtattcttcatccaaatacaagaagcaccaagaacacctgggaaattcaccgcaaaaacatcttt

SEQ ID NO: 1009840 - DNA, 120 bp, Artificial Sequence
  ENSG00000250945_2 (sequence is synthesized)
atcttaagagctgtgagacagaagtaccaggtaacctctaaaggaaaacctaaggtcagttttttttaagaaaagtaactttattgtggtataaagactacaaaatcaaggtgtcaaaaa

SEQ ID NO: 1009841 - DNA, 120 bp, Artificial Sequence
  ENSG00000250945_3 (sequence is synthesized)
ttaaattagatgcaaggtataaaaaattgctgttctgtaggtccaaatgaactttatgaaattcccatcttttaaaatcataaatggctgaaatttgtcaattttgtatggaactcacta

SEQ ID NO: 1009842 - DNA, 120 bp, Artificial Sequence
  ENSG00000250945_4 (sequence is synthesized)
ttatatatgggaatataatcagtgacttatactcagaggaaatcctttgacactgtatcaaagatctggtcatgaaatgcatatttagacattgcaagttataataaaatgttgaaaaca

SEQ ID NO: 1009843 - DNA, 120 bp, Artificial Sequence
  ENSG00000250947_0 (sequence is synthesized)
atgagctgggaggcaggaggataatctggcttcaggaaggaagaaaatgtttgtagttctgggaactccagctcatttttaccactgcctgacagcctccacagcagggtttgtttgaac

SEQ ID NO: 1009844 - DNA, 120 bp, Artificial Sequence
  ENSG00000250947_1 (sequence is synthesized)
aaaatccttgcattgcatagataacttcctgtaatcgttctaacagaatagagagaaatcagcggtatgtcacatggaggcccgcagattggcttgcccagcatagcagtgtcgatcagc

SEQ ID NO: 1009845 - DNA, 120 bp, Artificial Sequence
  ENSG00000250947_2 (sequence is synthesized)
aactgctcaccacatgtgaccttatggagcacattggatgcacttatggaacgcagcaggatgtgctgggtgcagaaggcggggcaatttctcttgacacgtgacctgaaggacattttc

SEQ ID NO: 1009846 - DNA, 120 bp, Artificial Sequence
  ENSG00000250947_3 (sequence is synthesized)
tctaggtcagcatgtgtgaaggtgtggtccatgggccacctgcatcagagtcaccttagctgcgtgctaaagttgcagattcccaggtcccaccctagacttactgagtcagaatacctg

SEQ ID NO: 1009847 - DNA, 120 bp, Artificial Sequence
  ENSG00000255323_0 (sequence is synthesized)
agacttcatcacagcaggagccgtgaggcaagaagctctgggatcaattaaaatgccaggcttttccaggctggtttccagcgcatctgtgcatgattccacataaatttagggaattag

SEQ ID NO: 1009848 - DNA, 120 bp, Artificial Sequence
  ENSG00000255323_1 (sequence is synthesized)
gacttccagatagatctctttggtcaaaaatgtgtcacagctccaactctttttttgtaagatggtgaacacaggcaggggccacatctgacttacctctagctccaggtactaaagagc

SEQ ID NO: 1009849 - DNA, 120 bp, Artificial Sequence
  ENSG00000255323_2 (sequence is synthesized)
cactggggagagctcagtcatgtaatccaatactatctaaacatgaactacggagtccccatccaaggcactgaatgagaacatctggaacactcaataaatatttcatcaacaaataaa

SEQ ID NO: 1009850 - DNA, 120 bp, Artificial Sequence
  ENSG00000255323_3 (sequence is synthesized)
attagcctatgaaaggactgtgtcttctatctcttggattgctcactctggagaagccagccatcatgctgaaggtccatgtgacaagggacagaggcctgacaaaatccatgtgagtga

SEQ ID NO: 1009851 - DNA, 120 bp, Artificial Sequence
  ENSG00000255323_4 (sequence is synthesized)
gcctgcaagagggtcctctgcaagataatccttcagatgacaccacagacgtagttgacaactggactgcaatctaataaaacaccttgagacagaggcactcagctaaacctaaccctg

SEQ ID NO: 1009852 - DNA, 120 bp, Artificial Sequence
  ENSG00000255323_5 (sequence is synthesized)
attcctgacacatggaagctgcaaaacatgaactacggagtccccatccaaggcactgaatgagaacatctggaacactcaataaatatttcatcaacaaataaatgagggctttaattt

SEQ ID NO: 1009853 - DNA, 120 bp, Artificial Sequence
  ENSG00000255323_6 (sequence is synthesized)
gtcacagctccaactctttttttgtaagacatgaactacggagtccccatccaaggcactgaatgagaacatctggaacactcaataaatatttcatcaacaaataaatgagggctttaa

SEQ ID NO: 1009854 - DNA, 120 bp, Artificial Sequence
  ENSG00000250949_0 (sequence is synthesized)
gttgaagttatgggctagtggctcttagttatgggactaaatggcttccagctactggctgtcaaacatttacatgactgttgatttgcggcccatggagaactcaccagcaaccaggac

SEQ ID NO: 1009855 - DNA, 120 bp, Artificial Sequence
  ENSG00000250949_1 (sequence is synthesized)
caacactcaaaatcttgcctccattttctgtgccagctgagaggtccattggtgaagagtcttctggatcagaactgtgactactgcctccactgtgtaaagcataggtctcctaaaaca

SEQ ID NO: 1009856 - DNA, 120 bp, Artificial Sequence
  ENSG00000250949_2 (sequence is synthesized)
tcagcccatctatgatctttctttatgccccacacgacttaatgaccccatgacttggcagagtcgtcagagacaaggccctgatttgaagcctgtttcttagcagtgaaccaaagaaat

SEQ ID NO: 1009857 - DNA, 120 bp, Artificial Sequence
  ENSG00000255321_0 (sequence is synthesized)
caaaaagcacagtgtgtagaacaggaaggccctcaaataaagctattatttttattaattgtatcatgctttataggctctcccataacagaacgtgacccccagctctattaggacaga

SEQ ID NO: 1009858 - DNA, 120 bp, Artificial Sequence
  ENSG00000255321_1 (sequence is synthesized)
aatcacttgcaagagtgtgtccctagcacacagcaggtacaaagcaagcctctgtctgtcctcatacccttcttactagaaaacttgtctaaattgttgactgataagagagagaaaatt

SEQ ID NO: 1009859 - DNA, 120 bp, Artificial Sequence
  ENSG00000255321_2 (sequence is synthesized)
atctttttggacataattttactatatgtacagagaatcagagaattgagccagacaatcatcaagtttctttctaactctactaattggccttgatgatttattatttagagctttaaa

SEQ ID NO: 1009860 - DNA, 120 bp, Artificial Sequence
  ENSG00000255321_3 (sequence is synthesized)
attttaataacgttttcttttcatggataaatttaacatctgagtatctgtttagaaatgtaaaacaatgaatccatcatatcacaaagtatagtaatacgaagaaaatatagagaattt

SEQ ID NO: 1009861 - DNA, 120 bp, Artificial Sequence
  ENSG00000255320_0 (sequence is synthesized)
gtcctcgtgggcacttcaccctgctctgcagccacactcacaccctagatccaggtcacactaggtatgatttgcttctcctggcctttcctctcaccagccccgctatcacctcattta

SEQ ID NO: 1009862 - DNA, 120 bp, Artificial Sequence
  ENSG00000255320_1 (sequence is synthesized)
cctggagcaggggagagaagctaagttctgacctttgatcagaagatggggaagccacactcaacacgtcactgccttgggaggtggatttggggatggtgggtcctggggaaaaacggg

SEQ ID NO: 1009863 - DNA, 120 bp, Artificial Sequence
  ENSG00000255320_2 (sequence is synthesized)
cttttggtgtggaaatgacatctttcctgtttccgacctctgcctgcctcatgccaggtgagacaccttcatgcctgtttccatgattgagaacatgggagtacgcttctttccacctac

SEQ ID NO: 1009864 - DNA, 120 bp, Artificial Sequence
  ENSG00000255327_0 (sequence is synthesized)
gccatagtagctctgggaactgaatctcgggcaccaggaacagtctcgcatgtcattgtaatctggattcatgagctctgactttccacagtctttgagtcactgagcactaggatcaac

SEQ ID NO: 1009865 - DNA, 120 bp, Artificial Sequence
  ENSG00000255327_1 (sequence is synthesized)
tttcacagaggatccagataatcagccagcttaagtcacactcctacagcttggctagggtagggattcctcaccaacagtcccataagatcttatccagtcaggaggggctggcccaat

SEQ ID NO: 1009866 - DNA, 120 bp, Artificial Sequence
  ENSG00000255327_2 (sequence is synthesized)
ctgaagtgcagccgagaccgggagccacagacctggaacctgtgtactcaaagagttgtccacatgccagcagcactggcccttccaggagctgttagaaatgtagaacctcagagccta

SEQ ID NO: 1009867 - DNA, 120 bp, Artificial Sequence
  ENSG00000255327_3 (sequence is synthesized)
agccatgagctaagctgatgccattcagctgggtagcatcgcagtcactgtgcaacttttaaacatacagctgcccaggcccactgcagacctgctaaattcaagctccttgtagtgggg

SEQ ID NO: 1009868 - DNA, 120 bp, Artificial Sequence
  ENSG00000255327_4 (sequence is synthesized)
ccagggccctgggacttcatacaaaactctgcaagtcatcactgatgagaaaaccaagactcgatgagagtctcctgagctcagaggaagaagctgcataaccagcacacttccagagag

SEQ ID NO: 1009869 - DNA, 120 bp, Artificial Sequence
  ENSG00000255327_5 (sequence is synthesized)
gaccgaggaagagagcgttgcttcagccagggtctgattagtcatgcctggcaggctctgctgagctgggtgctcatgggttttgcttgctgagctgaattaatatattagtggatttca

SEQ ID NO: 1009870 - DNA, 120 bp, Artificial Sequence
  ENSG00000255326_0 (sequence is synthesized)
agaccagccaccggggactccagagaggcctcggcccagctcccggaaagggtctcccagccaggccttctagcggcccaaagcggatggaaacttgacccagaatggacaagtgattct

SEQ ID NO: 1009871 - DNA, 120 bp, Artificial Sequence
  ENSG00000255326_1 (sequence is synthesized)
ccaggtccaggactaaaacatgggcctctcaacatctcagcaggcaggtggaagagatggagcaaactcacttggagcaaagatgggcaggaggggaacagcgaagcccaggccaacggc

SEQ ID NO: 1009872 - DNA, 120 bp, Artificial Sequence
  ENSG00000255326_2 (sequence is synthesized)
ctgttcccttgctgctgcctccatgggccccgtacatgtgctcatgattcttagacacaaacaaagctcccaacacagtgatggaaatgcagctgccaagggggattgccaaggaaacca

SEQ ID NO: 1009873 - DNA, 120 bp, Artificial Sequence
  ENSG00000255326_3 (sequence is synthesized)
tctttgaaaggctcattattcttatgaagaatctgcaggagacaggagttctcaaaacaactctcgctccgcctctatcctcaaccggactctgtgggagtgtctcttttagtaattatc

SEQ ID NO: 1009874 - DNA, 120 bp, Artificial Sequence
  ENSG00000255326_4 (sequence is synthesized)
ctgttctttggtaattatctgcctctcctgctagcctgtgggactgtgttttcttcatctttgcatcatgagtatctagcacagggtctggctcattgtagtacctggcagatattggtg

SEQ ID NO: 1009875 - DNA, 120 bp, Artificial Sequence
  ENSG00000255325_0 (sequence is synthesized)
ctgctgattaccatgaccgtgacatggctttgaaaagcacatctcatcgctgcctggtgactcctttcagaggctcccccagggcaggttgttttgcaaccagacaatgaaatccaaatt

SEQ ID NO: 1009876 - DNA, 120 bp, Artificial Sequence
  ENSG00000255325_1 (sequence is synthesized)
caaccagacaatgaaatccaaatttactaggtactttattttggaggttgagagggaaacaaaaattcttcaattaattgttcatcctaaaccatggacatggatgaagctggagaccat

SEQ ID NO: 1009877 - DNA, 120 bp, Artificial Sequence
  ENSG00000255325_2 (sequence is synthesized)
accattcttgctcatgcactagatagagggatagtgccaacccacatagacttagaagagagcaagctggagggccagtcttaacgtccttcacctcctccgttcctgagtgtgtctccc

SEQ ID NO: 1009878 - DNA, 120 bp, Artificial Sequence
  ENSG00000255325_3 (sequence is synthesized)
actggctgtactcagtagaagccagaaagccagggggcccactgatgtcatcaattcagggatttcaagacacatttgatatcttacagagctgatagctgccgtgcataggggaaataa

SEQ ID NO: 1009879 - DNA, 120 bp, Artificial Sequence
  ENSG00000255325_4 (sequence is synthesized)
atgagaggaatatgtctgcatagtgggggtgcagctagccttgggtagtgattcatttaatattcttttggctgcaagtaacagaatatccaaataaaattggtgctatgaaaaaaaaaa

SEQ ID NO: 1009880 - DNA, 120 bp, Artificial Sequence
  ENSG00000259905_0 (sequence is synthesized)
agacagggtctcactctgttgctcaggccggagtgcagtggcatgaacaaagctcgctgcagcctcgaactcctgggcttgaatgatcctccacctcatcctcttgagtagatgggacta

SEQ ID NO: 1009881 - DNA, 120 bp, Artificial Sequence
  ENSG00000259905_1 (sequence is synthesized)
actacaggcatgtgccaccacatctgggtgatttaattttacttgtacttttgtagaggcagagtctcacgacattgctcaggctggtctgtaagtcctggccccaagcgatcctctcac

SEQ ID NO: 1009882 - DNA, 120 bp, Artificial Sequence
  ENSG00000259905_2 (sequence is synthesized)
tacaggtgtgagccactgtgcccagctgctttatcatggttaatgttatttgatcacatggatgaggcagtttagctcagttttctccactataaaattaatattattccccttttcatg

SEQ ID NO: 1009883 - DNA, 120 bp, Artificial Sequence
  ENSG00000259905_3 (sequence is synthesized)
ttttctccactataaaattaatattattccccttttcatgttataccttttggaaaaaacatcactatgcacagcacatacataaaaagtggggaattatgcctctttcccctatggatg

SEQ ID NO: 1009884 - DNA, 120 bp, Artificial Sequence
  ENSG00000259905_4 (sequence is synthesized)
gaccttctataaatgtcatttgtgtttctgtaaaaaatatttaacattccttgggctgttctggatcaattgtgtttttctgtgcattttaggatcagtggtccaagaactgctaaaaat

SEQ ID NO: 1009885 - DNA, 120 bp, Artificial Sequence
  ENSG00000259905_5 (sequence is synthesized)
gagaaaaaattaaagttagaactttagtagggcttgtattgaatctgaagatgcatttagaaagtataagcatcttggttaatacttaataactttctaatcaatgaaaatgtagttcat

SEQ ID NO: 1009886 - DNA, 120 bp, Artificial Sequence
  ENSG00000259905_6 (sequence is synthesized)
ctttttgatgccatgttaaatgaaattattttctgagtttcattatttgattagtttctattgtataagaatgcaatttattacattgatcatgcatactgaatttttttttgttccaac

SEQ ID NO: 1009887 - DNA, 120 bp, Artificial Sequence
  ENSG00000259905_7 (sequence is synthesized)
cttattttagtgaattttttaggattttctatacattagattatgtcactggccaatagatgtttgacttcttccctttcaatttggaagtcttatatttatttttccagcctaatttta

SEQ ID NO: 1009888 - DNA, 120 bp, Artificial Sequence
  ENSG00000259905_8 (sequence is synthesized)
taaattacatcctcaagcataatgtttagttgaattagtggaatagataaccttttgtgtttataattttgggaaaattactgagacctacttgataccatgtgttgtcatatgaatttt

SEQ ID NO: 1009889 - DNA, 120 bp, Artificial Sequence
  ENSG00000259905_9 (sequence is synthesized)
tcataggtgcctgtgttagtaagaacattccctttatgcaaaatttgtttggtgtttttactgcgagtgggtttttgaattggaaagtgtttattccatatctttagatgtgataaagaa

SEQ ID NO: 1009890 - DNA, 120 bp, Artificial Sequence
  ENSG00000259905_10 (sequence is synthesized)
gatcctggataaataaataaataaataagttagtgtttaattatgttttacgatcctgatctttgttcagactgtttgctcgagaattattgcttgggtatccataaagcatattagttt

SEQ ID NO: 1009891 - DNA, 120 bp, Artificial Sequence
  ENSG00000259905_11 (sequence is synthesized)
atagttttacttttttggactgtctctgtttggttgtggcctcagaggaaactgcctcatagaatgtattgcacactgatctcttctctattattttattttttggagaacagttagtaa

SEQ ID NO: 1009892 - DNA, 120 bp, Artificial Sequence
  ENSG00000259905_12 (sequence is synthesized)
gaaattgctgttgatattttaaaggtttcgaataattcatcagtgaagtcttctcaaccaggtcaatcacgagaacttagaagatgattcctccccagctgatcctcaggtgagacctca

SEQ ID NO: 1009893 - DNA, 120 bp, Artificial Sequence
  ENSG00000259905_13 (sequence is synthesized)
gccttggccatcatctacatctggattcctgactcagagaaactgtgagtaatttgtatgtgcttttgagccactaagctatgtagttattcgctatgctgcaataaacaataatacact

SEQ ID NO: 1009894 - DNA, 120 bp, Artificial Sequence
  ENSG00000259905_14 (sequence is synthesized)
ttatgtaaacataatatgttatccttgattagatccaaaaaaaggaaaaatggcattagtggaaaaccttgtaaaatataaagacagtcagtactttggttaatagtttagtgcctttat

SEQ ID NO: 1009895 - DNA, 120 bp, Artificial Sequence
  ENSG00000259905_15 (sequence is synthesized)
cagtttctgagttttcatagatagtctgtggttctgtgtgtgatattaatataacaggaaattgaagggtatatacaactttatgtaagattttaacaactctctgttaatctaaaatta

SEQ ID NO: 1009896 - DNA, 120 bp, Artificial Sequence
  ENSG00000259905_16 (sequence is synthesized)
tttcaaaataaatagaagtgtagacatggctcatatatttgagatcaggtctccctgttaacttaattgagcctacatggaacctaaatctcatggtacaaatgcaataatattataaaa

SEQ ID NO: 1009897 - DNA, 120 bp, Artificial Sequence
  ENSG00000259905_17 (sequence is synthesized)
tataaatcagatgagtttctattttactctcttcttcagggaacactaaagcccattcttcctctcaagtaaccagaaataaagttgatccaagtaacaagtggacagcataaaagattg

SEQ ID NO: 1009898 - DNA, 120 bp, Artificial Sequence
  ENSG00000259905_18 (sequence is synthesized)
tatggaaactataatgcatctacatctgcagtaactaatcataaaatgatttgtatgatcattcttcacatgattatgatgactatgggaaagaagaaaaagaaatgcaactttcttgat

SEQ ID NO: 1009899 - DNA, 120 bp, Artificial Sequence
  ENSG00000259905_19 (sequence is synthesized)
ttaaaaattgtatctaaggggcatgaagcacctttctggggcaatggttagaaaatctgtaaggaaaatgcatagagaaggtacaaggccagtctctccaagggaattttattggctgta

SEQ ID NO: 1009900 - DNA, 120 bp, Artificial Sequence
  ENSG00000259905_20 (sequence is synthesized)
ttattcaacctaaatttctcaaagcaatctgctcatagatgaaaatatgctattccagcgaaagccttggcaaggtaactagtgtctccaattgtgtcccgatccaaaaaaaaaaaaaaa

SEQ ID NO: 1009901 - DNA, 120 bp, Artificial Sequence
  ENSG00000259905_21 (sequence is synthesized)
gaagtctgtcagcctcttcagatgtcacttgccctgtggtaaggaagtgtagtcagcacctggtgcagtggcaagaagagaaaggaagttccccaagacagaaacatctcagcagtgagt

SEQ ID NO: 1009902 - DNA, 120 bp, Artificial Sequence
  ENSG00000259905_22 (sequence is synthesized)
tcctgatgagggaagggaagtgaatcctaagaacaatcatgtgagtttggaaggagacccttccccagctgagcctcagcctgagccatcacctacatctagaccgaagacccagagaaa

SEQ ID NO: 1009903 - DNA, 120 bp, Artificial Sequence
  ENSG00000259905_23 (sequence is synthesized)
ccgcaacattcgaaacccaggtgccactccttcaggaaggtaccatcaagctccaaggactcttatcctctttctccttccccactacctagtcattagagcgtcagcatccacttcttg

SEQ ID NO: 1009904 - DNA, 120 bp, Artificial Sequence
  ENSG00000259905_24 (sequence is synthesized)
aaaggaagatgcctgtttttcacatatcccagaaaaccccattttaggacagcatttagcagagtatattcaggatcccactaacctttttggaagacatgacttccagatgatataagg

SEQ ID NO: 1009905 - DNA, 120 bp, Artificial Sequence
  ENSG00000259905_25 (sequence is synthesized)
gaacagaaatcatatttctgcattcaggatcatgttttcttggctccatcaggaactgtgcaggactgtgcactctgttgatactcacatggtggaattatattgcctttggccaaccct

SEQ ID NO: 1009906 - DNA, 120 bp, Artificial Sequence
  ENSG00000259905_26 (sequence is synthesized)
aaagccatcaagatagcaggcttagttttctaaagataattctgccttcaagccttgttggaattctgtgataatgtcttttcactccacgatctccatcaggaattttatggaaccttg

SEQ ID NO: 1009907 - DNA, 120 bp, Artificial Sequence
  ENSG00000259905_27 (sequence is synthesized)
tattctgttgaataccagaattacatcagcaatccccaagccccaaagtcaccggatgggcatcattatgacagcagggtctattgtctacaccatggtaatagtgacagtgagaaatga

SEQ ID NO: 1009908 - DNA, 120 bp, Artificial Sequence
  ENSG00000259905_28 (sequence is synthesized)
gctcctgtgacctagaaacttggaagagacattcagcttcatggaagtcattcctcattcttagatgaggataactgttacgtggtgttatttgagcatttgtaattcaagaaaactaac

SEQ ID NO: 1009909 - DNA, 120 bp, Artificial Sequence
  ENSG00000259905_29 (sequence is synthesized)
aggcctctctggatggtgactataacctatagccttgcccaatatgactcaggatttggtactggctgtgcctttcatgggatgcttacttatcctggtcgatggcctaaagcccaaccg

SEQ ID NO: 1009910 - DNA, 120 bp, Artificial Sequence
  ENSG00000259905_30 (sequence is synthesized)
tgcagtggcacaattatggctcactgtagcctcaccttcctgggatcaagcaatcttctttcttcagcctccagaggagctgggaccacagatcctttggcatttgagagttgctttgtg

SEQ ID NO: 1009911 - DNA, 120 bp, Artificial Sequence
  ENSG00000259905_31 (sequence is synthesized)
tgggaccacagatcctttggcatttgagagttgctttgtgtatacggtcctttaacggagcaaatggccagccaggaaaccaaagtatggacaaggggaaagaagcgtctgtggaggaag

SEQ ID NO: 1009912 - DNA, 120 bp, Artificial Sequence
  ENSG00000259905_32 (sequence is synthesized)
ttttacaagcgccctcctcatccatttgggtggtgttgcccatatgctacatgtctgtggaccactatgtgtgtttaaagctttttagtaaaacgttactaaaaactatgactcactgtg

SEQ ID NO: 1009913 - DNA, 120 bp, Artificial Sequence
  ENSG00000259905_33 (sequence is synthesized)
gtgaaaaaggtggcaaaacagtgacaacagtgagtttgctgctgttattatctatgtgagtggtcacgaaagcacaggtagcagctgaggcaaggggagggaagctaggaaaagaatcgc

SEQ ID NO: 1009914 - DNA, 120 bp, Artificial Sequence
  ENSG00000259905_34 (sequence is synthesized)
ccttgccactttgtgtggctgagagagagaaagctgtgccagctgaatgtgtggactgtctttgccagtgcaggctgggatgcaaatacctgtaattcttgggaaacaaccagtgagcca

SEQ ID NO: 1009915 - DNA, 120 bp, Artificial Sequence
  ENSG00000259905_35 (sequence is synthesized)
gatgatgacatagagtttaactcagaggaggaagatcattatccttcccatttgagagtgaaactgttcatgcagtggaaagcaaaattccaacacacagaggcctgggtaggattactg

SEQ ID NO: 1009916 - DNA, 120 bp, Artificial Sequence
  ENSG00000259905_36 (sequence is synthesized)
gatataataaaaactttaaaacagctgccaagagaaagccttatgtacatgaatggtgcagctatgggacaccagtagggatgatatctccctaaaagggaatgaacctgaaaaattgag

SEQ ID NO: 1009917 - DNA, 120 bp, Artificial Sequence
  ENSG00000259905_37 (sequence is synthesized)
acagaagtaccccggaagtgaaataacccccttatgggataagttatagggaaagccatttcagatttcctagaaactcaaaaggaaagagattaggtatgactggttgctaaaggaaaa

SEQ ID NO: 1009918 - DNA, 120 bp, Artificial Sequence
  ENSG00000259905_38 (sequence is synthesized)
tggaaaaagggagaaacaaagtctgctggactgaaaaaaggagtttaaaaaagacacaattaaggttactaggaaacaaatgtggtatgatctgatttcagctgggattgacaaagagaa

SEQ ID NO: 1009919 - DNA, 120 bp, Artificial Sequence
  ENSG00000259905_39 (sequence is synthesized)
ttatggaaccttgtattctgttgaataccagaattatatcagcaatccccaagtcaccaaatgggcatcatcatgacagcagatggaattcgctgtttcgcccaggctggagtgaagtgg

SEQ ID NO: 1009920 - DNA, 120 bp, Artificial Sequence
  ENSG00000259905_40 (sequence is synthesized)
agtcacagagaaaaagtttggaatagttcaccagtgaagtcatctcaaccagcacagggccttgactcctaacaacaatcacacgaacttggaagaggatccttccccagctgaaacttc

SEQ ID NO: 1009921 - DNA, 120 bp, Artificial Sequence
  ENSG00000259905_41 (sequence is synthesized)
acttgagaccttctcattggccatcatcgacatctggattcatgatacagagaaactgtgagtaagagccacttagtatgtgagaatttattattcagtaataaataatacacctggcag

SEQ ID NO: 1009922 - DNA, 120 bp, Artificial Sequence
  ENSG00000259905_42 (sequence is synthesized)
gtaatatacttgacagtaattgtaaggtggtattctggattaggtcctggaatagataagtatatgattattaaaaaacctggtaaaatatgaaggaagtttgtagatcagttaataatc

SEQ ID NO: 1009923 - DNA, 120 bp, Artificial Sequence
  ENSG00000259905_43 (sequence is synthesized)
tcgaaaaacagttaaattcttagttttcatgaatatgctatggttataatatatattaacattctagttagctgaatggtatatgaaactgtctgtacttacctatgtgcatttatgtaa

SEQ ID NO: 1009924 - DNA, 120 bp, Artificial Sequence
  ENSG00000259905_44 (sequence is synthesized)
atctgcagttatttcaaaataaatatgttttttaatattattattatttttttaagaaaagtaagcaagtaaagacatcagcaaaaaacttttgcctccagatacaagtgggcatgtagg

SEQ ID NO: 1009925 - DNA, 120 bp, Artificial Sequence
  ENSG00000259905_45 (sequence is synthesized)
agctccccacacaaatctacctaacaaagtcccgataaacagtctgttttctggagtctatcaatactgatgaggtcttgttcttttggccaggctggagtgcagtggtacagtcgtgac

SEQ ID NO: 1009926 - DNA, 120 bp, Artificial Sequence
  ENSG00000259905_46 (sequence is synthesized)
tcactgcagcttcaaacacctgggttccagcattcatcccacttcagcctcccgtgtagccgggactacaggtccctatcttttttgttggagaatgaaattaaaaaagatttggacact

SEQ ID NO: 1009927 - DNA, 120 bp, Artificial Sequence
  ENSG00000259905_47 (sequence is synthesized)
ggaattttatggaaccttgtattctgttgaataccagaattatatcagcaatccccaagtcaccaaatgggcatcatcatgacagcagatgaggataactgttacgtggtgttatttgag

SEQ ID NO: 1009928 - DNA, 120 bp, Artificial Sequence
  ENSG00000259905_48 (sequence is synthesized)
catttgtaattcaagaaaactaacttctttaggctcatactttattacttgagacatgacagcttcatttaaggttcctattttaaaacatgaccgtgatcatgggctacattctccata

SEQ ID NO: 1009929 - DNA, 120 bp, Artificial Sequence
  ENSG00000259905_49 (sequence is synthesized)
tgcaaagttcctatggatcacttggccagatgagccttcagttgagacctcagccttggacatcatctgcacctggattcctgacccagagcaactgcatgcatatgttatcccagcttc

SEQ ID NO: 1009930 - DNA, 120 bp, Artificial Sequence
  ENSG00000259905_50 (sequence is synthesized)
tggggaggctgacttgggaggattgcttgagcccaggagttccaaactgaagtgagccatgattgtgtcactgcactccagcttgggaaacagagggagaccaagactcaaaaaaaaaaa

SEQ ID NO: 1009931 - DNA, 120 bp, Artificial Sequence
  ENSG00000259905_51 (sequence is synthesized)
atagatgaaaatatgctattccagcgaaagccttggcaaggcattctgtggatgatattctggcttctgaagacttgtcattgctacagcaacaccgagatgcattggcactcttcaatc

SEQ ID NO: 1009932 - DNA, 120 bp, Artificial Sequence
  ENSG00000259905_52 (sequence is synthesized)
cagaggatgggccatcaacgcacaaaagtggaaggcttggactagctgcaaagttcctatggatcacttggcctgtccagggtaggaaatggaatcttaacaactatcacacgagctttg

SEQ ID NO: 1009933 - DNA, 120 bp, Artificial Sequence
  ENSG00000259905_53 (sequence is synthesized)
aggggatccttctccagatgagccttcagttgcgacctcagccttggacatcatctgcatctggattcctgacccagagcaactgaattttatggaaccttgtattctgttgaataccag

SEQ ID NO: 1009934 - DNA, 120 bp, Artificial Sequence
  ENSG00000259905_54 (sequence is synthesized)
tccccaagtcaccaaatgggcatcatcatgacagcaggtgggtggaatacaaaagaaaaaaatatatatatatgtatgtatgtgtgtctatatatatatgtatgtgtatatatatgtgtg

SEQ ID NO: 1009935 - DNA, 120 bp, Artificial Sequence
  ENSG00000259905_55 (sequence is synthesized)
tgtttgttaaaaaattgctgttgatattttaaaggtttcaaataattcatcagtgaattctcctcaacctggtcaatcatgtgaacttagaagatgattcctccccagctgatcctcagg

SEQ ID NO: 1009936 - DNA, 120 bp, Artificial Sequence
  ENSG00000259905_56 (sequence is synthesized)
tgagacctcagccttggccatcatctatatctggattcctgacccagagaaactggaacactaaggcccattcttcctctcaagtatccagaaataaagttgctccaagtaacaagtgga

SEQ ID NO: 1009937 - DNA, 120 bp, Artificial Sequence
  ENSG00000259905_57 (sequence is synthesized)
cagcataaaagattgtatggaaactataatgcatctacatctgcagtaactaatcataaaatgatttgtatgatcattcttcacatgattagaattactatgggaaagaagaaaaagaaa

SEQ ID NO: 1009938 - DNA, 120 bp, Artificial Sequence
  ENSG00000259905_58 (sequence is synthesized)
agttcaggggtattctggttgccttacccagctctgaagtctgtcagcctcttcagatgtcacttgccatgtggtaaggaagtgtagtcagcagctggtgcagtgggaagaagagaaagg

SEQ ID NO: 1009939 - DNA, 120 bp, Artificial Sequence
  ENSG00000259905_59 (sequence is synthesized)
aagttccccaagacaaaaacatctcggcagacttcatcatgaattcatggcatcacacagtcccctgatgctataacatcatggatttcttttgtccagtgagaggcccaaaagctgcag

SEQ ID NO: 1009940 - DNA, 120 bp, Artificial Sequence
  ENSG00000259905_60 (sequence is synthesized)
gagaaaataaattcctgcatccaggagatgtggagtaagagatacagctgcccttgaccatatttcttacttccgagaagatcgtagcagtaattcagaatctcatccaggatacctcat

SEQ ID NO: 1009941 - DNA, 120 bp, Artificial Sequence
  ENSG00000259905_61 (sequence is synthesized)
cacaggctggagtgcagtgtcatgagcttggctcactacagcctccatcttctgtgcttaaggatccttccctctcaacctccaaggtagctgagactacaggcaacattcgaaacccag

SEQ ID NO: 1009942 - DNA, 120 bp, Artificial Sequence
  ENSG00000259905_62 (sequence is synthesized)
ggtgacatcacagaacaggcagaggccgttcagggggtattctggttgccttacccagctctgaagtctgtcagcctcttcagatgtcacttgccctgtggtaaggaagtgtagttggca

SEQ ID NO: 1009943 - DNA, 120 bp, Artificial Sequence
  ENSG00000259905_63 (sequence is synthesized)
gtccagcctgcatggatgctgacatggatgctgtctcccattcttaccactggatgtcaagaactgctagatgcgatccagccagtctgtactcgactctcagttccatcttctcaactc

SEQ ID NO: 1009944 - DNA, 120 bp, Artificial Sequence
  ENSG00000259905_64 (sequence is synthesized)
ttgaatcctcccaagaatcccaggagcttggaaggggatccttccccagatgagccttcccttgaaatctctgccaggcatctgacccagagaaactagaggttaatcctaagaacagtt

SEQ ID NO: 1009945 - DNA, 120 bp, Artificial Sequence
  ENSG00000259905_65 (sequence is synthesized)
acataagcttggaaggagacctttccccagatgggccatagcctgggccatcacctacatctggactgaagaaccagagaaactactccatcaggaatcgtttgggaccgtgggttctgt

SEQ ID NO: 1009946 - DNA, 120 bp, Artificial Sequence
  ENSG00000259905_66 (sequence is synthesized)
atgattcctccccagctgatcctcagatcctttggcatttgagagttgctttgtgtatacggccctttaatggagcaaatggccagccaggaaaccaaagtatggacaaggggaaagaag

SEQ ID NO: 1009947 - DNA, 120 bp, Artificial Sequence
  ENSG00000259905_67 (sequence is synthesized)
catctgtggaggaagttttacaagcgaccctcctcatccatgtgggtggcgttcccatatgctacatgtctgtgggccactatgtgtgtttaaagctttttagtaaaacgttactaaaaa

SEQ ID NO: 1009948 - DNA, 120 bp, Artificial Sequence
  ENSG00000259905_68 (sequence is synthesized)
tgataccaggagtttgaggctatgtagtgtactatgattgtgttagtgaataaccagtgcattccagtctgggcaatgtagttaaaccccattaaataaataaataaataagttacagag

SEQ ID NO: 1009949 - DNA, 120 bp, Artificial Sequence
  ENSG00000259905_69 (sequence is synthesized)
caccgagatgcattggcactcttcaatccagaggatgggccatcaacgcacaaaagtggaaggcttggactagctgcaaagttcctatggatcacttggcctgaaacaggttctccctat

SEQ ID NO: 1009950 - DNA, 120 bp, Artificial Sequence
  ENSG00000259905_70 (sequence is synthesized)
gttgcccaagctggtcctgaacccctagcctcaagtaatcctcctgcttcaacctaccaaagcattgggattacaagtttgacccaccatggtcagtccagggtaggaaatggaatctta

SEQ ID NO: 1009951 - DNA, 120 bp, Artificial Sequence
  ENSG00000259905_71 (sequence is synthesized)
tgcatactacactcccaaggacatccacaaagtcaagactcttgcgttttcagactgtgatcatgggctacattctccataccatgttcatatctacagtgaaaaaacaaactcctgcat

SEQ ID NO: 1009952 - DNA, 120 bp, Artificial Sequence
  ENSG00000259905_72 (sequence is synthesized)
cctggagacctacaatgagagacacagctgaccttgaccatatttcttacttctcagaagactgtagcagtaattcaggtgctattatttggggcatttatatttcagtaaaccttctta

SEQ ID NO: 1009953 - DNA, 120 bp, Artificial Sequence
  ENSG00000259905_73 (sequence is synthesized)
cccctctaatcttacagttcaccccatcagaaaggatggtttcatttaaattggcaatcttaagtcatgggggtttgctctttttctttcattataacaggagtttctataaggtaagtg

SEQ ID NO: 1009954 - DNA, 120 bp, Artificial Sequence
  ENSG00000259905_74 (sequence is synthesized)
acttgtacaatcccattttcctcttcatttcaatgcatacatgtggtctattatgatgtgtactgtgaagatcatccatgagtaaattcttcagcaaaaaaaaaaaaaagaagaaagaaa

SEQ ID NO: 1009955 - DNA, 120 bp, Artificial Sequence
  ENSG00000259905_75 (sequence is synthesized)
tacagactctatcaggaatcacttgggactgtgcattctgttgacactcactttgtggaattaagttgcccactgccaaccctaaagccaccaaggtagcagatgaggtcttgttctttt

SEQ ID NO: 1009956 - DNA, 120 bp, Artificial Sequence
  ENSG00000259905_76 (sequence is synthesized)
ggtatgaaataatttcctattgaagtcatcttaacatggaaccagaattaaatcctaacaacaatcatgtgagcctggggaggatccttccccacgtgagccttcaggggagacttcagc

SEQ ID NO: 1009957 - DNA, 120 bp, Artificial Sequence
  ENSG00000259905_77 (sequence is synthesized)
cttggccatcttctacatctagattcctgaccaagagaagctgtttagaatagttcaccagtgaagtcatctcaaccagcacagggccttgactcctaacaacaatcacacgaacttgga

SEQ ID NO: 1009958 - DNA, 120 bp, Artificial Sequence
  ENSG00000259905_78 (sequence is synthesized)
agaggagccttccccaactgaaccttcgcttgagacctcgtccttggccatcctctacatctggattcatgatacagagaaacttgagtaatgatgacactagcagtccagcctgcatgg

SEQ ID NO: 1009959 - DNA, 120 bp, Artificial Sequence
  ENSG00000259905_79 (sequence is synthesized)
atgctgacatggatgctgtctcccattcttaccactggatgggaagaaatgctagatgcaatccagccagtctgtactcgactgtcagttccatcttctcaactcacagtgtcttccaaa

SEQ ID NO: 1009960 - DNA, 120 bp, Artificial Sequence
  ENSG00000259905_80 (sequence is synthesized)
gtccgtgccacaccacagcctggaacatctcccaaggtttcaaataattcatcagtgaattcttctcaacctggtcaatcatgtgaacttagaagatgattcctccccagctgatcctca

SEQ ID NO: 1009961 - DNA, 120 bp, Artificial Sequence
  ENSG00000259905_81 (sequence is synthesized)
ggtgagacatcagccttggccatcatctacatctggattcctgacccagagaaactggaacactaagacccattcttcttctcaagtatccaaaaataaagttgatccaagtaagaagtg

SEQ ID NO: 1009962 - DNA, 120 bp, Artificial Sequence
  ENSG00000259905_82 (sequence is synthesized)
gacagcataaaagattgtatggaagctataatgcatctacatctgcagtaactaatcataaaatgatttgtatgatcattcttcacatgattagaattactatgggaaagaagaaaaaga

SEQ ID NO: 1009963 - DNA, 120 bp, Artificial Sequence
  ENSG00000259905_83 (sequence is synthesized)
gactgtggttctcagtataagcttccagctacagagaaagttattcaaggatgctggtctccccttagaaatcagtttcttaaagtattgctgaaaggttggtcttctggagcctcccag

SEQ ID NO: 1009964 - DNA, 120 bp, Artificial Sequence
  ENSG00000259905_84 (sequence is synthesized)
tggacaaaattaatgaaggatcattattaagtttttaatgggtcaagagaaagttaccactgaggtcttctctacctgggcaacaattgactcctaacaaccactataagcttggaagat

SEQ ID NO: 1009965 - DNA, 120 bp, Artificial Sequence
  ENSG00000259905_85 (sequence is synthesized)
gatccctccccagctgatccttcaggtgaatttttcacagagccatagatatcttatcatcctctgtggcttgaagactaatggcaataaaacatttctcaataaaggaggctataccat

SEQ ID NO: 1009966 - DNA, 83 bp, Artificial Sequence
  ENSG00000259905_86 (sequence is synthesized)
atgcatttaagaagtggggagtcatgggctaagcacgatggctctcgcctgtaatcccagcactgttggtggctgagacaggc

SEQ ID NO: 1009967 - DNA, 120 bp, Artificial Sequence
  ENSG00000259905_87 (sequence is synthesized)
gcgcgcttgttcctgaggcggtgcctgcctgtgtcgtcgtccctgtttgttcttcttcaaacgtcaggatttctccgtgtttcccagaccgtaacgttccaaaggtggaaacacagatga

SEQ ID NO: 1009968 - DNA, 120 bp, Artificial Sequence
  ENSG00000259905_88 (sequence is synthesized)
cagatttttggtcttttcgtcatttcctatatatgtgttcaatatatgatgccagaataatttcactgcctagagcaaatctgctgtacctcaccagtttgacctgcctcttttccaagc

SEQ ID NO: 1009969 - DNA, 120 bp, Artificial Sequence
  ENSG00000259905_89 (sequence is synthesized)
tcccagtttggaatagttcaccagtgaagtcatctcaaccagcacagggccttgactcctaacaacaatcacacgaacttggaagaggagccttccccacctgaaccttcacttgagacc

SEQ ID NO: 1009970 - DNA, 120 bp, Artificial Sequence
  ENSG00000259905_90 (sequence is synthesized)
tcgtccttggccatcctctacatctggattcatgatacagagaaacttgagtaatgatgacaatagcagtccagtgtgcatggatgctgacgtggatgctgtctcccattcttaccactg

SEQ ID NO: 1009971 - DNA, 120 bp, Artificial Sequence
  ENSG00000259905_91 (sequence is synthesized)
ccacaccacagcctggaacatctcccaaagtggtatcttgatgcaatggtagagctcatgtcacagtattgtatgtctcaggtttgaataactcaccagtgaagtcatcttgacctggac

SEQ ID NO: 1009972 - DNA, 120 bp, Artificial Sequence
  ENSG00000259905_92 (sequence is synthesized)
agaaattgaatcctcccgagaatcccaggagctgggtaggtgatccttccccagatgagccttcccttgaaatctctgccaggcatctgacccagagaaactgtaagtactatgtagggc

SEQ ID NO: 1009973 - DNA, 120 bp, Artificial Sequence
  ENSG00000259905_93 (sequence is synthesized)
tgggttggaaagtctaaactatgtagtaatatgttatacaacaatcggtcagttatatgcctgacagtaaatgtaatgtggtatcttggattagatcctagaacagaaaaatgacactag

SEQ ID NO: 1009974 - DNA, 120 bp, Artificial Sequence
  ENSG00000259905_94 (sequence is synthesized)
tggaaaagctggtaaaatatgaagaaaatcttttccagttaatagttttgtaccactgtcaatttctgagttttcataaatatgctatggtgatataaggtgttaacatttcagaaagct

SEQ ID NO: 1009975 - DNA, 120 bp, Artificial Sequence
  ENSG00000259905_95 (sequence is synthesized)
agaaagctgtaggatatatgaaactctattatctttactactttctgtaaaactaaaactatgataaaataaaaatatttcttaaaatgtaatattcaggtaccagaaaataaaacaaca

SEQ ID NO: 1009976 - DNA, 120 bp, Artificial Sequence
  ENSG00000259905_96 (sequence is synthesized)
gtgtcttccaaagtccatgccacaccacagcctggaagatctcccaaggtggtatcttgaggcaatggtagagctcatgtcacagtattgtatgcctcaggtatcactgtccttcactct

SEQ ID NO: 1009977 - DNA, 120 bp, Artificial Sequence
  ENSG00000259905_97 (sequence is synthesized)
ttgatataatctctctacaaaccattgttccatacactttgccccttttgtgtttgtttatacatgtggtatggcatgtctaaacctcacagtgaggatattagaatagggttctgcata

SEQ ID NO: 1009978 - DNA, 120 bp, Artificial Sequence
  ENSG00000259905_98 (sequence is synthesized)
gtgtattcaggatcccactaaccttttcggaagacatgacttccagatgatataaggctccatcaggaactgtgcaggactgtgcactctgttgatactcacatggtggaattatattgc

SEQ ID NO: 1009979 - DNA, 120 bp, Artificial Sequence
  ENSG00000259905_99 (sequence is synthesized)
ccttggccaaccctaaagccatcaagatagcaggtttggaataattcactgtcgaagtcttcttgagctgagcagtcatgtgagcttggaagatgatccctctccagctgatccttcagc

SEQ ID NO: 1009980 - DNA, 120 bp, Artificial Sequence
  ENSG00000259905_100 (sequence is synthesized)
tcaggccatcatctacatctggattcctgacccggagaaactatgagtaatgtgtgctgcttttgagccactaagctacatggtaataggctatgcttcaataaacaataatacacttga

SEQ ID NO: 1009981 - DNA, 120 bp, Artificial Sequence
  ENSG00000259905_101 (sequence is synthesized)
ctatgttgcccaagctggtcctgaacccctagcctcaagtaatcctcctgcctcaacctaccaaagcattggtattacaagtttgacccaccgtgatcagtccagggtaggaaatggaat

SEQ ID NO: 1009982 - DNA, 120 bp, Artificial Sequence
  ENSG00000259905_102 (sequence is synthesized)
cttaacaactatcacatgaactttgaggggatccttctctggatgagccttcagttgagacctcagccttggacatcatctacatctggattcctgacccagagcaactgaattttatgg

SEQ ID NO: 1009983 - DNA, 120 bp, Artificial Sequence
  ENSG00000259905_103 (sequence is synthesized)
aaccttgtattctgttgagtaacagaattatatcagcaatcccaaagtcaccaaatgggcatcatcatgacagcaggctccatcaggaactgttcaggaccatgcactctgttgatactc

SEQ ID NO: 1009984 - DNA, 120 bp, Artificial Sequence
  ENSG00000259905_104 (sequence is synthesized)
ccagggataaactcagcctgcggggcctcaggaagaaggtcgtagccatttcattgagtccagggcagaaaagtggaagaaaaatgtgaatgtgttaatttgaggactttagctctgaga

SEQ ID NO: 1009985 - DNA, 120 bp, Artificial Sequence
  ENSG00000259905_105 (sequence is synthesized)
tgagatttttccttatctttggagagccaccactccagtgcaaactttcaaataatgccttgccatttttagtttccctccctaggactcctggaaccatagttcataaaattatctcac

SEQ ID NO: 1009986 - DNA, 120 bp, Artificial Sequence
  ENSG00000259905_106 (sequence is synthesized)
tcaaacaatcctcccaacttagcctcctaaagttctaggattacagacatgagccaccgtgcccagtgaggacattacaggcatgagtcactgtgtccaacgaggccattgttaaagata

SEQ ID NO: 1009987 - DNA, 120 bp, Artificial Sequence
  ENSG00000259905_107 (sequence is synthesized)
cagtcgacaaagaaatctggtcatttctgtggcacataacaattcaatgtaataatcataattattactgataacatatgctaagacctattagaattataggaaccatataattttgga

SEQ ID NO: 1009988 - DNA, 120 bp, Artificial Sequence
  ENSG00000259905_108 (sequence is synthesized)
atacatactaataacatatttgtataaatataacccaaagaaagttaaacatgattttgtatttgacagtgttttctgtaggttaatataccaaataagccaaacatatctcttttggac

SEQ ID NO: 1009989 - DNA, 120 bp, Artificial Sequence
  ENSG00000259905_109 (sequence is synthesized)
ttcaggggacctaatacttaaaaggctaatgagttaaaataaaaattcttagtttataattttatttttcaaagtgtgcaaatattaaaggtttaaaacacttcatatcacgaaatagaa

SEQ ID NO: 1009990 - DNA, 120 bp, Artificial Sequence
  ENSG00000259905_110 (sequence is synthesized)
tccccaagacagaaacatctcagcagactccatcatgaattcatggcaccacacagtcccctgatgctataacatcatggatttcttttgtccagtgagaggcccaaaagctgcagcaca

SEQ ID NO: 1009991 - DNA, 120 bp, Artificial Sequence
  ENSG00000259905_111 (sequence is synthesized)
gacaatatcatagtgtagaagtttaactagaccgtgatcatgggctacattctccataccagcttcatagctccagtgagaaaataaattcctgcacccaggagacgtggagtaagagat

SEQ ID NO: 1009992 - DNA, 120 bp, Artificial Sequence
  ENSG00000259905_112 (sequence is synthesized)
acagctgcccttgaccatatttcttacttccgagaagattgtagcagtaattcagaatctcatccaggatacctcatcacaggctggagtgcagtgtcatgagcttggctcactacagcc

SEQ ID NO: 1009993 - DNA, 120 bp, Artificial Sequence
  ENSG00000259905_113 (sequence is synthesized)
tggccatcatctatatctggattcctgacccagagaaactgaatacactttactgaatcatgaaaagctgtaaatagctgaaaagaaaaatgtggtcttgactctgaaaaacaacaaaaa

SEQ ID NO: 1009994 - DNA, 120 bp, Artificial Sequence
  ENSG00000259905_114 (sequence is synthesized)
ggatcagcaacatttcaagcaacaagtcataaaacgattactgtggtcttgtattagttcagtccatgcagtgaactttgtctgacattgggcctgcagtcctcataaacataccagcta

SEQ ID NO: 1009995 - DNA, 120 bp, Artificial Sequence
  ENSG00000259905_115 (sequence is synthesized)
aacagccagatgaggcagaaacccctacagacatccctatgtgcctcctgtgcaagtgcagttgccccttgaaggcagttctcctgctgcagaccacgcccaccaagggcagagtcacag

SEQ ID NO: 1009996 - DNA, 120 bp, Artificial Sequence
  ENSG00000259905_116 (sequence is synthesized)
ccactgcagctgagctcagagccttctgtggggtctgcaggggcaaggccagctgtcccctgggatagtttgaagaatgcagtttgtttgtataataaagatgtttctctacgtcattca

SEQ ID NO: 1009997 - DNA, 120 bp, Artificial Sequence
  ENSG00000259905_117 (sequence is synthesized)
agtggagttgacaagagtgacaagtggtcagagcaaagcatttcatgatgactgtaacgtgcctgtgtcagcagcgactgcttacagtgagattcacatgaccatcgtttatgacatagg

SEQ ID NO: 1009998 - DNA, 120 bp, Artificial Sequence
  ENSG00000259905_118 (sequence is synthesized)
aagaataaaaggagagagagagagaaagataggtagttgatcaaaatgaagaattggatttggaaagcaacttcgaatagtctctgcttatatttctgagattaaggcaaacagtctcaa

SEQ ID NO: 1009999 - DNA, 120 bp, Artificial Sequence
  ENSG00000259905_119 (sequence is synthesized)
ggcaagaagagaaaggaggttccccaagacagaaatatctcagcagaccgtgatcatgggctacattctccataccagcttcatagctccagtgagaaaataaattcctgcacccaggag

SEQ ID NO: 1010000 - DNA, 120 bp, Artificial Sequence
  ENSG00000259905_120 (sequence is synthesized)
acgtggagtaagagatacagctgaccttgaccacatttcttacttccaagaagattgtagcaataattcaggatttcatccaggatacctcatcacagcctggagtgcagtgtcatgagc

SEQ ID NO: 1010001 - DNA, 120 bp, Artificial Sequence
  ENSG00000259905_121 (sequence is synthesized)
ttggctcactacagcctccatcttctgagcttaaggatccttccctctcaacctccagggtagctgagactacaggcaacatttgaaacccaggagccactgcttcaggaaggtaccttc

SEQ ID NO: 1010002 - DNA, 120 bp, Artificial Sequence
  ENSG00000259905_122 (sequence is synthesized)
aagctccaaggactcttatcctctttctccttccccactacctagtcattagagtgtcagcatccacttcttgaaaggaagatgcctgtttttcacatatcccagaaagccccattttag

SEQ ID NO: 1010003 - DNA, 120 bp, Artificial Sequence
  ENSG00000259905_123 (sequence is synthesized)
tgtatctaaggggcatgaagcacctttctggggcaatggtaagattttttgaatcttgacagcagtgatgtttatattcctgtattcattgtccaaatgaataaaatagttcatgtaaaa

SEQ ID NO: 1010004 - DNA, 120 bp, Artificial Sequence
  ENSG00000259905_124 (sequence is synthesized)
cgaatgcatggatgtggaacctgtagatatgaaggaccaactgtaccacaaactgtatggtataaccaacataaattgattcttttacaattctggaggataaaagtctgaaaatcaata

SEQ ID NO: 1010005 - DNA, 120 bp, Artificial Sequence
  ENSG00000259905_125 (sequence is synthesized)
gagggccgcgggtggagggcgaggctgacagggagtgagggaggaaggtggagggcggtgatcagaaggcgcggctgacagggggagagggcggtgagatctacaggagaactcagggcg

SEQ ID NO: 1010006 - DNA, 120 bp, Artificial Sequence
  ENSG00000259905_126 (sequence is synthesized)
gatgtctgaggggtctgcgttgggctttctggtcgcttctctgcgaagcgcgcttgttcctgaggcggtgcctgcctgtgtcgtcgtccctgtttgttcttcttcaaacctcaggatttc

SEQ ID NO: 1010007 - DNA, 120 bp, Artificial Sequence
  ENSG00000259905_127 (sequence is synthesized)
tttctgtcttcagagagctacactccgctgcaaactttcaagtaacacttcaccatttctatcttccttctccatgggatctttgagccataatttataaaatcacctctacatctcttg

SEQ ID NO: 1010008 - DNA, 120 bp, Artificial Sequence
  ENSG00000259905_128 (sequence is synthesized)
tatttttgttatgtttaataaccacttgaggtctctctagggacagtgactataaattatcaccctgcccaacaggacttcaggaaactgtgtcctggatgtttacagtgtgcctttcat

SEQ ID NO: 1010009 - DNA, 120 bp, Artificial Sequence
  ENSG00000259905_129 (sequence is synthesized)
gggatacttatttatcctggtggataccccaaagcataagtgtacaatctttgacccagcatccttctcacaggatatttgtttataccgtcagacacccttgttgcacttgtcggacct

SEQ ID NO: 1010010 - DNA, 120 bp, Artificial Sequence
  ENSG00000259905_130 (sequence is synthesized)
caaggactcatcctctttctccttccccactacctagtcattagagcgtcagcatccacttcctgaaaggaagatgcctgtttttcacatatcccagaaagcctcattttaggacagcat

SEQ ID NO: 1010011 - DNA, 120 bp, Artificial Sequence
  ENSG00000259905_131 (sequence is synthesized)
tggccaaccctaaagccatcaagatagcagcaactactctatcattactgtaccaccacctgtatggatctcgttgcccatatgaaactgagtaaggaacaatgtgcatcacactcacag

SEQ ID NO: 1010012 - DNA, 120 bp, Artificial Sequence
  ENSG00000259905_132 (sequence is synthesized)
tatggctatctccttcagaaaaaacggatcagaagtttaccaggatatcactgctctcatttcatgtagctactcatttgggtgcctccttggactgctgaataccaatgacatataaac

SEQ ID NO: 1010013 - DNA, 120 bp, Artificial Sequence
  ENSG00000259905_133 (sequence is synthesized)
aactactacaataccaatgacataaaaacgactactacgaagaatcaagtattttttgagtcaagtaggactctgtcaaaacaaagagaagtaaagggaccccaaaatgactatgacttt

SEQ ID NO: 1010014 - DNA, 120 bp, Artificial Sequence
  ENSG00000259905_134 (sequence is synthesized)
ctcaaggggacacaattattttttgatagatctggaacaagaacctagatatcctcaatcccactttattgttctttcattgggttctgaacacagataaataaacagaaaataaaattc

SEQ ID NO: 1010015 - DNA, 120 bp, Artificial Sequence
  ENSG00000259905_135 (sequence is synthesized)
aaggcctctctggatggtgactataacctataaccttgcccaatacgactcagggtttggtactggctgtgcctttcatgggatgcttacttatcctggtcgatggcctaaagcccaacc

SEQ ID NO: 1010016 - DNA, 120 bp, Artificial Sequence
  ENSG00000259905_136 (sequence is synthesized)
actgtggtgaaaaaggtgggaaaacagtgacaacagtaagtttgctgctgttattatctatgtgagaagtgatctcttctccacttttactgttgtttaagtttttatgaagagtttgtg

SEQ ID NO: 1010017 - DNA, 120 bp, Artificial Sequence
  ENSG00000259905_137 (sequence is synthesized)
gccatcaactcacaaaagtacaaggcctggaaccagctgcaaagttcctatggatcacttggccagaaatagaatggaacacatgaaaaggagaaaaaatgtacattttttcaagataat

SEQ ID NO: 1010018 - DNA, 120 bp, Artificial Sequence
  ENSG00000259905_138 (sequence is synthesized)
tttcagactttgcaaacaattatattgtataagtgaataaaaccaaatcagagtaataaagatatgtaattgggctacatagatggagatttacaatacactggaaacggagagagaaag

SEQ ID NO: 1010019 - DNA, 120 bp, Artificial Sequence
  ENSG00000259905_139 (sequence is synthesized)
aaacaggttctaactatgttgcccaagctggtcctgaaccgctagcctcaaataatcctcctgcctgaacctaccaaagcattggtattacaagtttgacccaccgtgatctgtccagag

SEQ ID NO: 1010020 - DNA, 120 bp, Artificial Sequence
  ENSG00000259905_140 (sequence is synthesized)
ctccagtctgcagatttctcagtcttcacttattttttgtgaacttgacttttttgaaaagtacagaatctcatccaggatacctcatcacagtgtctcactctctcgcccaggctggag

SEQ ID NO: 1010021 - DNA, 120 bp, Artificial Sequence
  ENSG00000259905_141 (sequence is synthesized)
catgagcttggctcactacagcctccatcttctgtgcttaaggatccttccctctcagcctccagggtagctgagactgcaggtttagaatagttcaccagtgaagtcatctcaaccagc

SEQ ID NO: 1010022 - DNA, 120 bp, Artificial Sequence
  ENSG00000259905_142 (sequence is synthesized)
ggtggcaaaacagtgacaacaaaaacatcttgaatatggatgtcttcttaggatgcactttacaaacatctgtgggggaatctcacctatgacaaaggctgtattaagattggaggcaaa

SEQ ID NO: 1010023 - DNA, 120 bp, Artificial Sequence
  ENSG00000259905_143 (sequence is synthesized)
attagaagcaacacggagatgcattgacacccttcttcaatccagaggatgggccatcaactcacaaaagtacaaggcctggaaccagctgcaaagttcctatggatcacttggccaggt

SEQ ID NO: 1010024 - DNA, 120 bp, Artificial Sequence
  ENSG00000259905_144 (sequence is synthesized)
taaatgtaatgtggtatcttggattagaccctagaacagaaaaatgacactagtggaaaagctggtaaaatataaagaaaatcttttccagttaatagttttgtaccactgtcaatttct

SEQ ID NO: 1010025 - DNA, 120 bp, Artificial Sequence
  ENSG00000259905_145 (sequence is synthesized)
gagttttcataaatatgctatggtgatataaggtgttaacatttcaggaagctgtaggatatacgaaactctattatctttactactttctataaaactaaaactatgataaaataaaaa

SEQ ID NO: 1010026 - DNA, 120 bp, Artificial Sequence
  ENSG00000259905_146 (sequence is synthesized)
ggtccatttcggagtctgagctgactttctacaggacagggtttcatataaatcatcagtgaagtcttctcaaccaggtcaatcacgagaacttagaagatgattcctccccagctgatc

SEQ ID NO: 1010027 - DNA, 120 bp, Artificial Sequence
  ENSG00000259905_147 (sequence is synthesized)
gtgcagtggcacaattatggctcactgtagtctcaccttcctggaatcaagcaatcctctttcttcagcctccagaggagctgggaccacagaaggaatggtaccagttactccttgtac

SEQ ID NO: 1010028 - DNA, 120 bp, Artificial Sequence
  ENSG00000259905_148 (sequence is synthesized)
gcctcgcataccccagaaaggcccattttcagatatcatttaggaacatatctacgggttcccactgaacatattttggcagacaaagtttctggatgccaaagaccaagattgaggaat

SEQ ID NO: 1010029 - DNA, 120 bp, Artificial Sequence
  ENSG00000259905_149 (sequence is synthesized)
gttagtgacaagaaatgaattttatggaaccttgtattctgttgagtaacagaattatatcagcaatcccaaagtcaccaaatgggcatcatcatgacagcaggatttcatccaggatac

SEQ ID NO: 1010030 - DNA, 120 bp, Artificial Sequence
  ENSG00000259905_150 (sequence is synthesized)
agagaaactgtcagagaggttaatcctaagaacagttacatgagcttggaaggagacccttccccagctgagccttagcctggaccatcacctacatctggactgaagacctagagaaac

SEQ ID NO: 1010031 - DNA, 120 bp, Artificial Sequence
  ENSG00000259905_151 (sequence is synthesized)
tcccttccagtggccaggatggttaagccttggtgtgcttgtgtgtctgattgccccattcattggaaaccagaccgatggtttcaggaactctgagtgtgttgttcccctctatgtgtc

SEQ ID NO: 1010032 - DNA, 90 bp, Artificial Sequence
  ENSG00000259905_152 (sequence is synthesized)
tggaggtaaagaataatggactgcagctccattcatgtccctgcaaagacatcatctggttcttctttatagctgcgttgtattccatgg

SEQ ID NO: 1010033 - DNA, 84 bp, Artificial Sequence
  ENSG00000259905_153 (sequence is synthesized)
gaataatggactgcagctccattcatgtccctgcaaagacatcatctggttcttctttatagctgcgttacagtctattgttga

SEQ ID NO: 1010034 - DNA, 120 bp, Artificial Sequence
  ENSG00000259905_154 (sequence is synthesized)
gaatcaccacactgtcttccacagtggttaaactaatttacactcccaccaacattgtataagtgttcctttttctccacaatcttgccagtctctgttatttgtttgaccatttgttat

SEQ ID NO: 1010035 - DNA, 120 bp, Artificial Sequence
  ENSG00000259905_155 (sequence is synthesized)
tttgttatttcttatatttgactttttaatatagccattctggcgggtgttagattgtatttgatgttgtttttgatttgcattgctctagtaatgagtgacgttgagaagattcaaata

SEQ ID NO: 1010036 - DNA, 120 bp, Artificial Sequence
  ENSG00000259905_156 (sequence is synthesized)
aatgcaatcttggttttatttgataaaaccttgttgataaaaacaacaagggtgatattaccaccgaccccacagaaatataaacaaccatcagagaatgtaatgaacacctccatggac

SEQ ID NO: 1010037 - DNA, 120 bp, Artificial Sequence
  ENSG00000259905_157 (sequence is synthesized)
ataaactagaaaatctagaaagaatgaaaaattcctgcacaaatacaccctcccaagactgaaccagggaggaactgaatccctaaacagaccaagaatggctctgaaattgagtcagta

SEQ ID NO: 1010038 - DNA, 120 bp, Artificial Sequence
  ENSG00000259905_158 (sequence is synthesized)
ataaatagtctcagtgacaaatttttaaaatgccacttagaaaatgtacacataattttgttctattcagcaaatatatttgtaacaatcagttttaggaagggtgttaaaatattttat

SEQ ID NO: 1010039 - DNA, 120 bp, Artificial Sequence
  ENSG00000259905_159 (sequence is synthesized)
tattttttctcatttagcttaatattttaaaaatatttttctgctggcaactatttgtatctccattttcattgacatagtcagtatatacccaccttctattaaataatagtggatcaa

SEQ ID NO: 1010040 - DNA, 89 bp, Artificial Sequence
  ENSG00000259905_160 (sequence is synthesized)
catactgggattacaagtgtttcaaataattcatcagtgaattctcctcaacctggtcaatcatgtgaacttagaagatgattcctccc

SEQ ID NO: 1010041 - DNA, 120 bp, Artificial Sequence
  ENSG00000259905_161 (sequence is synthesized)
aacagtgacaacagtaagtttgctgctgttattatctatcaacatggatatgcattgacaccgttcttcaatccagaggatgggccatcaactcacaaaagtacaaggcctggaaccagc

SEQ ID NO: 1010042 - DNA, 120 bp, Artificial Sequence
  ENSG00000259905_162 (sequence is synthesized)
tgcaaagttcctatggatcacttggccaagtcagagaggttaatcctaagaacagttacatgagcttggaaggagacccttccccagctgagccttagcctggaccatcacctacatctg

SEQ ID NO: 1010043 - DNA, 120 bp, Artificial Sequence
  ENSG00000259905_163 (sequence is synthesized)
ttggccatcttctacatctagattcctgaccaagagaagctttggagtttgctgtttcgcccaggctggagtgaagtggcgagatctcccctcactgcaacctccgcccccggggttcaa

SEQ ID NO: 1010044 - DNA, 84 bp, Artificial Sequence
  ENSG00000259905_164 (sequence is synthesized)
gatttaaaaattgtatctaaggggcatgaagcacctttctggggcaatgggtctgaagccatgtagcctcaccttcctgggatc

SEQ ID NO: 1010045 - DNA, 120 bp, Artificial Sequence
  ENSG00000259905_165 (sequence is synthesized)
ccacaggacaaaatttgttcagaattaaatgctgaaaaaggaggctggagtgccgtggcacaattatggttcaccagcctcaacctcctgggatcaagcaatcgtctcacctcagcctcc

SEQ ID NO: 1010046 - DNA, 120 bp, Artificial Sequence
  ENSG00000259905_166 (sequence is synthesized)
tgagtagctggactgcaggtacccacaagtagggttgaccacagtaacaagtaagcaagcaaaacattttgtgaaaaccgtgaagcatcttcctctgcagtgacttatcaaaagggccct

SEQ ID NO: 1010047 - DNA, 120 bp, Artificial Sequence
  ENSG00000259905_167 (sequence is synthesized)
ttagcctatctactgtggtgttctaaaaggaagaaagaggctagtaaatcctggatactttgctcctacaccaatattcccagctgtaccttgaaataaaaggatttagaactttagaac

SEQ ID NO: 1010048 - DNA, 120 bp, Artificial Sequence
  ENSG00000259905_168 (sequence is synthesized)
tccagggactgtcatcctttttctccttctccattacccagtcagcagttggagtgtcagcaaccatctattcagaaaaagctgcctttccttcacatatcccagaaagccccatgtgta

SEQ ID NO: 1010049 - DNA, 120 bp, Artificial Sequence
  ENSG00000259905_169 (sequence is synthesized)
gacatcatttagcagtgtatattcaggatcccactgaagcatttttgggagatatgactctcagatattagaagccaggaataagaaatttcagtgacagggaacataaatcatatttct

SEQ ID NO: 1010050 - DNA, 120 bp, Artificial Sequence
  ENSG00000259905_170 (sequence is synthesized)
gcattcaggataatgttttcttggtacagggatttcttcttcaagtaatcaaaagacaactgtaccttcaaaccattcagaaaaatatgttctaatttagttcttttcattctacagact

SEQ ID NO: 1010051 - DNA, 120 bp, Artificial Sequence
  ENSG00000259905_171 (sequence is synthesized)
aaacaataatacacttgatggtaaacataatatgttatccttgattagatccaagaaaaggaaaaatggcattagtgaaaaacctggtaaaatataaagacagtcagtactttagttaat

SEQ ID NO: 1010052 - DNA, 120 bp, Artificial Sequence
  ENSG00000259905_172 (sequence is synthesized)
agttttgtgcctttatcagtttctgagttttcatagatagtctatggttatgtgtatgatattaatataacaggaaattgaaagctatatacaactttatgtaagattttaacaactctc

SEQ ID NO: 1010053 - DNA, 120 bp, Artificial Sequence
  ENSG00000259905_173 (sequence is synthesized)
tcaggtcatgcatgcacttccaatttatactaaccatggatggaaacagcctacacttcagaaaaaaagtgccactcaagtctttcacgatgtaccctaaggatccacagcaattactta

SEQ ID NO: 1010054 - DNA, 120 bp, Artificial Sequence
  ENSG00000259905_174 (sequence is synthesized)
gtcggcttatggccatgtggtgtctaaacatctgaaactgattgctgcctacgaggaagtgcaaataagcgggatctgcagctgcccaagacaggggacccaaagggagagagcagtgtg

SEQ ID NO: 1010055 - DNA, 120 bp, Artificial Sequence
  ENSG00000259905_175 (sequence is synthesized)
gcaagcaaaaggcatgctgaagaggcagtgagccaaggctcagactttgacagtcctctgatatactttatatgtaaatagatggctgagtgttctggctgatgaacatgggttacttaa

SEQ ID NO: 1010056 - DNA, 120 bp, Artificial Sequence
  ENSG00000259905_176 (sequence is synthesized)
ccagagttaagcgaggactttctcacctgaaaccaccaagagacacaaaagccagaaaaggacagaaattaattcaagggtcaacaaatagagtcggctttctttaagacctgaagtgta

SEQ ID NO: 1010057 - DNA, 120 bp, Artificial Sequence
  ENSG00000259905_177 (sequence is synthesized)
tcaaggacgtttaacagcttcagactttcctggtaatatttgttcttgcctttttttggcaaatatagttaacacttctatgcattttttacctcacataaacatcatctaaaaccattc

SEQ ID NO: 1010058 - DNA, 120 bp, Artificial Sequence
  ENSG00000225647_0 (sequence is synthesized)
gcattcagccagggatcactgagcattcaaaagtccatctgagacctgctttcattgcactgcctcgtgaggagctgtaggagaagatatcataactattccccacttctaattgttaga

SEQ ID NO: 1010059 - DNA, 120 bp, Artificial Sequence
  ENSG00000225647_1 (sequence is synthesized)
agcaacagctgtctatcaagaacaatctgaggattgtgcacaaattgatttggttctatcaagtgctggctttcgattccagtctgacttcactaccacaggagcttcttgctcaggctt

SEQ ID NO: 1010060 - DNA, 120 bp, Artificial Sequence
  ENSG00000225647_2 (sequence is synthesized)
agctgaggttcagagaggataaatgaactacctgatgtcgcccaaggaggagcacgtcaagattttcactaggttgtctttcatgccaaagtgtgtgctttgaactccaagttgccatgg

SEQ ID NO: 1010061 - DNA, 120 bp, Artificial Sequence
  ENSG00000225647_3 (sequence is synthesized)
tgtcaaaggagggaacatttgggctttcctatcagcttgcccacatggggcagtgggagaagaagtgatggtacttgaaagctgtcaacagtcaaacatcaaaaatggagtcaaactcta

SEQ ID NO: 1010062 - DNA, 120 bp, Artificial Sequence
  ENSG00000225647_4 (sequence is synthesized)
ttacaaacttgcagaccagagatgtctcttcatcagtgctcagcccagctaccctctaggttggtctttctgaggtggctgaaattcattaataaagtggtgctgaacctctatagaaaa

SEQ ID NO: 1010063 - DNA, 120 bp, Artificial Sequence
  ENSG00000225647_5 (sequence is synthesized)
agcaccatctcttcaatcagaaaacattcatgatctcattccacctgaagccagtgcctctgtaatgtgtagcagaatcctatggagaagttgtaaaaacacaaaatgttggccccaccc

SEQ ID NO: 1010064 - DNA, 120 bp, Artificial Sequence
  ENSG00000225647_6 (sequence is synthesized)
caagagtttctgattttgcaggtctggagagggcctgtgatacgtacttctaacaagctcccaggcgatgctaatgttgctggtctagaaacacactttgagagccactgttttacaatg

SEQ ID NO: 1010065 - DNA, 120 bp, Artificial Sequence
  ENSG00000225647_7 (sequence is synthesized)
tattcacccagcttatgcaatcaactactatcacagcaaagtccaaagaatgctccttatttgtttgttatactggagtttggcttggctaaatattatttgaaactgaatggctgttga

SEQ ID NO: 1010066 - DNA, 120 bp, Artificial Sequence
  ENSG00000225647_8 (sequence is synthesized)
gcagggattaccaatgagtcatgcttgatgttgtaaaaactattcagttgctttgcatgaaaatttgtggaactctcccaggttttctgtgttaaatgtcatcaacaataaagataaaga

SEQ ID NO: 1010067 - DNA, 77 bp, Artificial Sequence
  ENSG00000225647_9 (sequence is synthesized)
caatcagtgagttcatcctttcctccctcacttctattttcttgagaggaaataagcatttttttttctttttttag

SEQ ID NO: 1010068 - DNA, 85 bp, Artificial Sequence
  ENSG00000225647_10 (sequence is synthesized)
tggaaataagcatttaatacttatgtgtgatgcccagcagatgccaacagtattcatggagagtcccattcccaagctctacaaa

SEQ ID NO: 1010069 - DNA, 120 bp, Artificial Sequence
  ENSG00000225647_11 (sequence is synthesized)
aacagtattcatggagagtcccattcccaagctctacaaagtaggggtgaggtagagctaaccatcctgtttcacagagaagcagagggattcacagctgttctctgccagccctcatgt

SEQ ID NO: 1010070 - DNA, 120 bp, Artificial Sequence
  ENSG00000225647_12 (sequence is synthesized)
agagtcctctgaccctggaagctgctaattaaagtgccaccaagatgcttccagcgactctgagctagttacacgtacatattaaagagctgaccttcccccttcttgtctgtcgtaccc

SEQ ID NO: 1010071 - DNA, 120 bp, Artificial Sequence
  ENSG00000225647_13 (sequence is synthesized)
cactgtgagtgctgtgggtggtcagcaaataataacagttaataactttctcttattctttcaaagctcttcagaaatgcaaattgctgccttcagaaggaagcacacgggcctatgaat

SEQ ID NO: 1010072 - DNA, 120 bp, Artificial Sequence
  ENSG00000225647_14 (sequence is synthesized)
tttatatcagcagggattaccaatgagtcatgcttgatgttgtaaaaactattcaggtaggcaggcaggtgctgcaataagagaatagcatccctttcctgaatgttcagttattgaagt

SEQ ID NO: 1010073 - DNA, 120 bp, Artificial Sequence
  ENSG00000225647_15 (sequence is synthesized)
gcacgctcgcatgggtatacacacaaccacacatgcccaactcacaaaaatagacaattatataaaatatatgccaaaatctccacagaaaggaaagctaaactctttaaaaccaaatgc

SEQ ID NO: 1010074 - DNA, 120 bp, Artificial Sequence
  ENSG00000225647_16 (sequence is synthesized)
ttatcacgctgccgaagagaagtaaatctgtaaggtggtaagcagtgttaatatgtgggcgagtgccagaacacatgcagatgtgtgttatttatgcctttaattgttatttccagtagg

SEQ ID NO: 1010075 - DNA, 120 bp, Artificial Sequence
  ENSG00000225647_17 (sequence is synthesized)
tatctggctgtcagtgcacatgagttaagtaccgtaaaataacagatgtcacacatctcacaagaacaacagggagtcaatatacgcggcagagtaaatctgattaccttagatagtaag

SEQ ID NO: 1010076 - DNA, 120 bp, Artificial Sequence
  ENSG00000225647_18 (sequence is synthesized)
gaaaagagaaagaatgcaaaaccagatgagcctatggctgtaatttaaaaaacaaattattccatttgaatatgttctatagtaattatgcatttatactgagtacactaagagaaaagc

SEQ ID NO: 1010077 - DNA, 120 bp, Artificial Sequence
  ENSG00000225647_19 (sequence is synthesized)
catcttggaagaacagagccgatttgggtaattgcagtgaattcttataattttatgttgtcttggcatccattttgaatacaaatttaagtttgttataccagaagcggagctcgatca

SEQ ID NO: 1010078 - DNA, 120 bp, Artificial Sequence
  ENSG00000225647_20 (sequence is synthesized)
caccacagaccaagatagtttacaaaggcttaatggagctcagatatttgagaaaaaaaaaaaaaagattaaccatattcagctgagaaaagggaacacaaacacatctggggaaagtaa

SEQ ID NO: 1010079 - DNA, 120 bp, Artificial Sequence
  ENSG00000225647_21 (sequence is synthesized)
tcttaaataaagatactcagatggagaaaaacatgtgtcaagcctggacctggagtaaaagcagacagaaaaaatttgagttgcaagggattacaacagctcagaaaggaaaacattcat

SEQ ID NO: 1010080 - DNA, 120 bp, Artificial Sequence
  ENSG00000251383_0 (sequence is synthesized)
gaaggattgaaccaagagggtgactgggctgagtacacagaaccttcagtgactgattgattgaccagaacactgctgctcaagcatatgagaggatatagatctggctggacaagtttg

SEQ ID NO: 1010081 - DNA, 120 bp, Artificial Sequence
  ENSG00000251383_1 (sequence is synthesized)
ccagcccgactctagagaaatctcagctgagaaagtctgcaaagaaatttggctgtgtctaccttggtctttacctcattatcaatgagcaggggctaatttcttcacctgcaaccctat

SEQ ID NO: 1010082 - DNA, 120 bp, Artificial Sequence
  ENSG00000251383_2 (sequence is synthesized)
tgcacggtcattatcaggactgagtcaataactgcaaaacatttcaaatagagccacatgaagaggaactcaaacatcagatgaatggaatcacatattttatggaagtcagccaagcct

SEQ ID NO: 1010083 - DNA, 120 bp, Artificial Sequence
  ENSG00000251383_3 (sequence is synthesized)
caagagacccttgaaccaagcagctatggcagcagggatggcaggtctacacaggatcaacaacatagattcccttccaccaagtctaagccagcaactgccactgctgagtgctcaatc

SEQ ID NO: 1010084 - DNA, 120 bp, Artificial Sequence
  ENSG00000251383_4 (sequence is synthesized)
cttaaggggacagaagctcatctttatcagaatctatacctacttcatatcaccttccctgccttcattgcctctgccagctccagcaactgggagtttataggatgcctaatctcaaca

SEQ ID NO: 1010085 - DNA, 120 bp, Artificial Sequence
  ENSG00000251383_5 (sequence is synthesized)
tggcactctgcattatgtcttctcaaacctctcatcttaaggaggtacaagagtgggcccatgaccataggatttcctggtcctactatctaccccattaccagaaacagccagcctgac

SEQ ID NO: 1010086 - DNA, 120 bp, Artificial Sequence
  ENSG00000251383_6 (sequence is synthesized)
agaacagtggaggagcttactgaagactcagttgaagagtctgcatgggaataacattttatagggttggggcactgttctccaggatataatatagttgatccttgaacaatgtagggg

SEQ ID NO: 1010087 - DNA, 120 bp, Artificial Sequence
  ENSG00000251383_7 (sequence is synthesized)
ttaatggcactgacccctacacagttgaaaatttgtgaataacttttgactttccaaaaacttgactattaatgacctactcttgaccagaaaccttaccaataacataagcagtcaatt

SEQ ID NO: 1010088 - DNA, 120 bp, Artificial Sequence
  ENSG00000251383_8 (sequence is synthesized)
aagcagtcaattaacacatgtttttatgttatatgtattatatactctattggtacaataaaataagctagggagatgaaaatgttactaacaaaatcataaagaagagaaaatatattt

SEQ ID NO: 1010089 - DNA, 120 bp, Artificial Sequence
  ENSG00000225342_0 (sequence is synthesized)
ctcggcttcctcctcccccactcaggccccaaaaacgagctcaggggcctgccagaggctccgccgaggcgacgggccgcgcagaactctggcggcggccgtggggctgctggagccggg

SEQ ID NO: 1010090 - DNA, 120 bp, Artificial Sequence
  ENSG00000225342_1 (sequence is synthesized)
cctggctgggatgaccgtgaccgtggcccccacgcacgcctagaccggaccccgggcggacgccgcctcctgggaccagattccaccgcagcggcggcgcggccgggagtcgcgcgggaa

SEQ ID NO: 1010091 - DNA, 120 bp, Artificial Sequence
  ENSG00000225342_2 (sequence is synthesized)
gaaactgactcagcggactccgctgagtccacaggcccggagccccgcagcggaggcgcgcagtgcgcagcccggccggccaccctccgcgacccgccagccggggatcctgcggcccca

SEQ ID NO: 1010092 - DNA, 120 bp, Artificial Sequence
  ENSG00000225342_3 (sequence is synthesized)
cggaaggtctgggaactgggagcaggaaaaatgaaagccgcctatctccagatctaagaatagaaatcagggcgctgggaaaagaggacaccgcccagatggccccttttaggaatacat

SEQ ID NO: 1010093 - DNA, 120 bp, Artificial Sequence
  ENSG00000225342_4 (sequence is synthesized)
tgtctttagagttccacctatagggagatgagcaattttcccccaaaggatggaaagaggggttagccatcaaaactgcccccgctactcttttttatgattttttgtgactgttagtgg

SEQ ID NO: 1010094 - DNA, 120 bp, Artificial Sequence
  ENSG00000225342_5 (sequence is synthesized)
gagaggaaataaacattgtttccctgtgagttatctgaagctctggtcaccaaaaggccactaaattaacttttggaaatttgagttgcactaggcaggatcctgatacttgggacaccc

SEQ ID NO: 1010095 - DNA, 120 bp, Artificial Sequence
  ENSG00000225342_6 (sequence is synthesized)
gaaaagtaatcagctctcagagctattagagctgagacaaaggacagggtacatgaaatgaaaggtgaaaagttgagagaagcaaacctaaatactcttctcttggtattcagaaatact

SEQ ID NO: 1010096 - DNA, 120 bp, Artificial Sequence
  ENSG00000225342_7 (sequence is synthesized)
tgtcttttgattgtttgtttgtttgttctgttaagtacctaagtaatgtgtttttaggaaaagaaacctagcaagaacattgtagacaaggctaggcaaagatgatctatccttcaggtg

SEQ ID NO: 1010097 - DNA, 120 bp, Artificial Sequence
  ENSG00000225342_8 (sequence is synthesized)
atgtgtctgtcctcaagatcacttacaaagaagaggattggactggaagttactacttcacaattttagttttgttttcacatctgttacttcaatcctgatgacaattctgaaatggat

SEQ ID NO: 1010098 - DNA, 120 bp, Artificial Sequence
  ENSG00000225342_9 (sequence is synthesized)
acaactactactatgtatccttctttcactagtgaggaaattgagatttggaattgagaagtgaagagctttgctggagtcacacaggtgggaagttgagagccaggacttcaacccagc

SEQ ID NO: 1010099 - DNA, 120 bp, Artificial Sequence
  ENSG00000225342_10 (sequence is synthesized)
aaatctcctaactccaggtagaaggttcttcatgctctaccactttaataagaatgctctagactttgttaatacattagattagtaagatagcaaactcctactcaacctggatattgg

SEQ ID NO: 1010100 - DNA, 120 bp, Artificial Sequence
  ENSG00000225342_11 (sequence is synthesized)
gtctatgtcttgttgttatagagtctttaacttttacagagacatgctaaaatatttatagttgaaatggttaggatttctttcaaagtcatccagtggtggaggaaaagatgaaatgtg

SEQ ID NO: 1010101 - DNA, 120 bp, Artificial Sequence
  ENSG00000225342_12 (sequence is synthesized)
tggagatagagataacgataacaacttttgaattgataattgttgaagataatatgagatgggttcatgtggtctgttctactattgtatctatataaaattttccataatttaacaaaa

SEQ ID NO: 1010102 - DNA, 120 bp, Artificial Sequence
  ENSG00000225342_13 (sequence is synthesized)
aactcccaatcttacaatatttatcagacctacagtgtattattttctaagttgtttctaaacttgtttccatttctgatgacttaatcaatgtctcaaacatttctaggcattctccat

SEQ ID NO: 1010103 - DNA, 120 bp, Artificial Sequence
  ENSG00000225342_14 (sequence is synthesized)
ctcatgcattccttctgttcctctgcattagtttctcccttcctgttctactgaattacaaccttgcaagaaattaaaacctacctcccttccaaagaaaaataaatctaaattaaaaga

SEQ ID NO: 1010104 - DNA, 120 bp, Artificial Sequence
  ENSG00000225342_15 (sequence is synthesized)
gtgaacaaaatttggagcatatttttttctctctacctgatttctccaaaatttggaaactatttattcacctctaagaattttctttgaatgttcctgggatggatgaaatggggggag

SEQ ID NO: 1010105 - DNA, 120 bp, Artificial Sequence
  ENSG00000225342_16 (sequence is synthesized)
tgaagaagatttgtactacttctaaagcagagtttacaattcaagctctgaagaagaaaaaataaataaacttaagtaaatgtaaacacaagttgaggcacattcaataatgaactctaa

SEQ ID NO: 1010106 - DNA, 120 bp, Artificial Sequence
  ENSG00000225341_0 (sequence is synthesized)
gttatagggaaaggaaaacaaggggctgtgtctcccatggttacagctgctcgactcacattgatctggccagcacctggaccccttcagaaccccagcacagtactaaggaagtttgtg

SEQ ID NO: 1010107 - DNA, 120 bp, Artificial Sequence
  ENSG00000225341_1 (sequence is synthesized)
gccacagagctagctggatccccaggagctgagtgctgccaagagagctgacccaagtgaccgaggccacctgcagctgctctctccacttgccatgggagcctcagccgaagatgtggg

SEQ ID NO: 1010108 - DNA, 120 bp, Artificial Sequence
  ENSG00000225341_2 (sequence is synthesized)
aatgaagtagtcagggcatttgtttccatgaaaatcctctttgtgaggccgccttggctggctgtgtccctcggctgagtgtccctgctcctctcaggcaccctctccccacggctccta

SEQ ID NO: 1010109 - DNA, 120 bp, Artificial Sequence; identical to SEQ ID NO: 965879
  ENSG00000225341_3 (sequence is synthesized)

SEQ ID NO: 1010110 - DNA, 120 bp, Artificial Sequence
  ENSG00000225341_4 (sequence is synthesized)
aaatgctctacaaattaccccaactaaagtggacgggctccaaagtccacactgtgacagccatacctttaaagtaacgactggcttcctctttcatctgcattgaccctgtttgctcaa

SEQ ID NO: 1010111 - DNA, 120 bp, Artificial Sequence; identical to SEQ ID NO: 965881
  ENSG00000225341_5 (sequence is synthesized)

SEQ ID NO: 1010112 - DNA, 120 bp, Artificial Sequence
  ENSG00000282021_0 (sequence is synthesized)
ggaacactgaatgaaacccgggcggattcccagcttgctccgtctcagcttgggcactgctgtttacagcctgtgtactcccctcccgccctgccacccacaagtgtctcacctccttcc

SEQ ID NO: 1010113 - DNA, 120 bp, Artificial Sequence
  ENSG00000282021_1 (sequence is synthesized)
tcgacagatcgaatgacacaacaaacatttatcttgggtgcacagcgtgtcaggcgtcaggctaagcactttgataaactggttctttcaaacatcacaggtgtctgacgcaggcaccat

SEQ ID NO: 1010114 - DNA, 120 bp, Artificial Sequence
  ENSG00000282021_2 (sequence is synthesized)
tatccacgtcatagaaaaaaaacagtgttcagtgagcctgaggttagcaatgtgtgcacctccacacactgctaaatgacaaagctgaattttgaagtacgatgccatgaggtgtctgga

SEQ ID NO: 1010115 - DNA, 120 bp, Artificial Sequence
  ENSG00000282021_3 (sequence is synthesized)
gtagacaaccaaaatgacttaattgaggtgtcaggggactgtcttactttctggtcacacaagcaatatacgctcattgtgaggtttggttgttccattacaaaaaagactgttttaaaa

SEQ ID NO: 1010116 - DNA, 120 bp, Artificial Sequence
  ENSG00000282021_4 (sequence is synthesized)
gccattagcggagggatgggaggagttctcttctgcctgtttcttcctcctaaacagcaaaatgacggtgtcctcaaagggatgtataatgagcgagaggcgaaaaagaacgtctgtgat

SEQ ID NO: 1010117 - DNA, 120 bp, Artificial Sequence
  ENSG00000282021_5 (sequence is synthesized)
tttaaatccagtgtccttcaccagtgagcaatagtagttctgtgagtgggagagcaggaccgcggtgcttgcaaacaacactttaaaacactggaacccaagttcaggatctgctgacag

SEQ ID NO: 1010118 - DNA, 120 bp, Artificial Sequence
  ENSG00000282021_6 (sequence is synthesized)
cacatctgcaggaagcatgagggtctctggactcccgcagatcagctgctcagcttctcagcctcaatgtggcaaagactctacctgacctaactccaggcagggtcctcgaagccctca

SEQ ID NO: 1010119 - DNA, 120 bp, Artificial Sequence
  ENSG00000282021_7 (sequence is synthesized)
aggctctgacctggacccctgtcccctttcgtccaaaagaatcctgctgggtcaatgcagtgacagttccccgcccctgatatcatactcctcatccctcaccctcggtatcttatcacc

SEQ ID NO: 1010120 - DNA, 120 bp, Artificial Sequence
  ENSG00000282021_8 (sequence is synthesized)
tggcctgcctgtggcacgaatcctaccaagtggttctagcaagaacccccctggcctgatgtagcctcttcatagttttccgtccgttctcaccctctccgtggctgtacattcccgttt

SEQ ID NO: 1010121 - DNA, 120 bp, Artificial Sequence
  ENSG00000282021_9 (sequence is synthesized)
aaaaataaaattctagtcccccgccaaccccgttagccacgagctttccaaagtaaaccttagagactagttcagaccgtgatgggaagtgggggtgggacaggctccttatacccgcct

SEQ ID NO: 1010122 - DNA, 120 bp, Artificial Sequence
  ENSG00000282021_10 (sequence is synthesized)
tccgttgaaatccaggcacagctgacctgcattaacgtcaaagcagagatcttaaggttgacaaaacagactctgtagcaataagatactacattccaacctgactctagtatagcatca

SEQ ID NO: 1010123 - DNA, 120 bp, Artificial Sequence
  ENSG00000282021_11 (sequence is synthesized)
catgatagagagcaggccctggaagaaatcaagcattttaccccagaatatatttctttgacatattttgaaggggccccacacggctgtctcttgaggggaaaatccacatcctgccag

SEQ ID NO: 1010124 - DNA, 120 bp, Artificial Sequence
  ENSG00000282021_12 (sequence is synthesized)
aatccccttccctttccaggtcttttccctgatctaggagagatttaactaagagtctggcacctcttttaggtccaataagagctctgaagataaaaaaccttggtctccacaaccttt

SEQ ID NO: 1010125 - DNA, 120 bp, Artificial Sequence
  ENSG00000282021_13 (sequence is synthesized)
atcgtaacccagacaatcctttctattcattccaggtctctacaataataacttaactctttcaattaattgcccatcagaaaatcgttgaatccatctgtgacctggacaccttccacc

SEQ ID NO: 1010126 - DNA, 120 bp, Artificial Sequence
  ENSG00000282021_14 (sequence is synthesized)
tgcatccatggagttgtgtcacctttctggaccaaaccactggacaccttacatgtatcgattggcaacatgtacacctccacacactgctaaatgacaaagccgaattttgaaatacga

SEQ ID NO: 1010127 - DNA, 120 bp, Artificial Sequence
  ENSG00000282021_15 (sequence is synthesized)
tactgtgaggtgtttggagaagagaactgaaatgacgtcatggaggtggcaggggatcgtcttgcccttttcttattttctgcctgtaacttctgtccccctaaaatgcataaaatccag

SEQ ID NO: 1010128 - DNA, 120 bp, Artificial Sequence
  ENSG00000282021_16 (sequence is synthesized)
ctagaacccaaccaccttatgcagcagttcttaggacctcatggggctgtgtcatcaatcaaagtcctcatatttggctcagaataaatctcatcaactaatttacaaatttgactcttt

SEQ ID NO: 1010129 - DNA, 120 bp, Artificial Sequence
  ENSG00000282021_17 (sequence is synthesized)
gtgttgacaagtctgtcttaccgttctttaataagggccgtgtataatgttttctttagcaagtgtggcaaaattaaaccttagaaataaagagaaaaagaactcattatagaaaactgt

SEQ ID NO: 1010130 - DNA, 120 bp, Artificial Sequence
  ENSG00000282022_0 (sequence is synthesized)
aaatacactgggggaagggggtggatccagtggtgcgccgggaatgaactgacccaagtgagctgggacatgtgcatacagagagcagaggcagaagtcaaggaactggaggctgaggaa

SEQ ID NO: 1010131 - DNA, 120 bp, Artificial Sequence
  ENSG00000282022_1 (sequence is synthesized)
tcagaggcagctagggtgacggacagacagcatgaagcgcagcagaatgaatagccagaagactcggacaggcagagccgaaggaccgcagagctcagcgccggagacatgaaaactgag

SEQ ID NO: 1010132 - DNA, 120 bp, Artificial Sequence
  ENSG00000282022_2 (sequence is synthesized)
gcccagaccagctaagcattttgatcacggtcacccagagccacagtggagatcaggagaaaactgattcccaggccagtgctcttttgcttctactcggtcagaggtgtggggtccttc

SEQ ID NO: 1010133 - DNA, 90 bp, Artificial Sequence
  ENSG00000282024_0 (sequence is synthesized)
cgggaccccactggaaatcggactgtctaactcacctggcagccactcccagcgcccctggaatcatcttcttggcttagcggctgaaga

SEQ ID NO: 1010134 - DNA, 78 bp, Artificial Sequence
  ENSG00000282024_1 (sequence is synthesized)
ctacaagaccatcacggatgccgagcttcgcgtaactctcacagtggagggtacacatccagatggccggttcctgcc

SEQ ID NO: 1010135 - DNA, 69 bp, Artificial Sequence
  ENSG00000282024_2 (sequence is synthesized)
ctgttcctgccttaactgatgacattgccttgtgaaattccttctcctatgcccgccagagaacaaacc

SEQ ID NO: 1010136 - DNA, 77 bp, Artificial Sequence
  ENSG00000282024_3 (sequence is synthesized)
caatcccctgtcctcctgctctttgcgaaagatccacctacgacctcaggtcctcgctgcttgaccccaatacaaac

SEQ ID NO: 1010137 - DNA, 65 bp, Artificial Sequence
  ENSG00000282024_4 (sequence is synthesized)
tacagtctggcttacagtttcgttccgtgactagccctccccacctgcccagcaatttactctta

SEQ ID NO: 1010138 - DNA, 120 bp, Artificial Sequence
  ENSG00000270659_0 (sequence is synthesized)
gatatattggaaattaagtcatcaacagtaccttaagcaccactctgtaggtaattttggatagtgtcttttctttacattttgatatagggaaggaattaattcacatcgacacaaacg

SEQ ID NO: 1010139 - DNA, 120 bp, Artificial Sequence
  ENSG00000270659_1 (sequence is synthesized)
aagtaatggataccatataacttgtgtgatactgtagcttttataatgaattacttcttgaaagttttttttcctatacaatgtattattaaacaattgtaacgatagtctctttttgtt

SEQ ID NO: 1010140 - DNA, 120 bp, Artificial Sequence
  ENSG00000270659_2 (sequence is synthesized)
aacattatgatgattttaagaaaaattgcagttcctgtgagttatatattgataaggcagatttttaaacacttagttgctaaaattagttttcctaaagtcgtatttgggaaagtctga

SEQ ID NO: 1010141 - DNA, 120 bp, Artificial Sequence
  ENSG00000270659_3 (sequence is synthesized)
gtagagaaccagtaagtcactctaatcatcccaacagagagcaaatattttagtcttaaattacctcaaaaaatctgtatgtcgtttataatatgtaaatgcacaatatgtaaaggataa

SEQ ID NO: 1010142 - DNA, 120 bp, Artificial Sequence
  ENSG00000270659_4 (sequence is synthesized)
cataagttctcgaaattgtcataagtccttcctaaaaactgaacctaagtgtttaggtatctgtactgttacagagatccttgaaaatatgaaataaagataatcgaaattaagatgaaa

SEQ ID NO: 1010143 - DNA, 120 bp, Artificial Sequence
  ENSG00000268460_0 (sequence is synthesized)
aattgattcacaacctgagagtgtcacaatccccatgttggagatcactgctctaccctgcagcttcaggagaggggaggccagaaggcagaatgagaaatggggtcgggggtgtgagtg

SEQ ID NO: 1010144 - DNA, 120 bp, Artificial Sequence
  ENSG00000268460_1 (sequence is synthesized)
cttatctcatccacccatgacagcgagtgggcctgcaggactctggaaattgcatgagaatttctgctccatcagcttcctgcctggtctcatgctcccatctcaatcctctcacccacc

SEQ ID NO: 1010145 - DNA, 120 bp, Artificial Sequence
  ENSG00000268460_2 (sequence is synthesized)
ctcctcccagcagaaggacacacggattttcctgaatcacaatctgatcacttctatcccctgcttaagacctgtctgtagcttgagtacactgagaagaacagttctcaccaaggctca

SEQ ID NO: 1010146 - DNA, 120 bp, Artificial Sequence
  ENSG00000268460_3 (sequence is synthesized)
taaggggaggtggacaggggaagcgatggggatggtgggagcttccctggccttcctggacaccccatcctctcagcacctccacatgttcagcaactgggaagttcaactctagttttt

SEQ ID NO: 1010147 - DNA, 120 bp, Artificial Sequence
  ENSG00000268460_4 (sequence is synthesized)
caagagtttttataaagtttggtccttatctcctcgccattgccacttttcttggaagttggtgggtgatactgaaagtttctaccctctaatcctcaaatcttttggtctttgtgatga

SEQ ID NO: 1010148 - DNA, 84 bp, Artificial Sequence
  ENSG00000268460_5 (sequence is synthesized)
tctaccctctaatcctcaaatcttttggtctttgtgatgactggcatgatactgaggctacctggggacccttccctaattcac

SEQ ID NO: 1010149 - DNA, 60 bp, Artificial Sequence
  ENSG00000268460_6 (sequence is synthesized)
ctaaatcacatttttagcatgaactcagctggtgtgatctgaaagagtctcatctggaag

SEQ ID NO: 1010150 - DNA, 120 bp, Artificial Sequence
  ENSG00000268460_7 (sequence is synthesized)
gaactcagctggtgtgatctgaaagagtctcatctggaagaacaaaagacattcctatcactcaggaaattccaagtttagcttcatggtaggaacaagagtcaaagaacaaacattttc

SEQ ID NO: 1010151 - DNA, 120 bp, Artificial Sequence
  ENSG00000268460_8 (sequence is synthesized)
atgttatagcacacccagtaagccatgggttcatcagattggactctctttgctctgccaaattggcagcatttgtgagttaccaatcccaagggaggactcccactgcagggaggatgg

SEQ ID NO: 1010152 - DNA, 120 bp, Artificial Sequence
  ENSG00000268460_9 (sequence is synthesized)
caaaggtcaccactgcgctaaccacccggaataggggtctgaacacttcagccaccgcatcttgggctgcactctgactacactgagcgtggtgaacagaacacccacagccacagccag

SEQ ID NO: 1010153 - DNA, 120 bp, Artificial Sequence
  ENSG00000268460_10 (sequence is synthesized)
ttcgacaaagcaggttaattacttacagacaggcagcgagggacagcggaagcctaggctgcatgactgttcatctctctgtacgacaagaacattcaatttttggatattgtcagcttc

SEQ ID NO: 1010154 - DNA, 120 bp, Artificial Sequence
  ENSG00000268460_11 (sequence is synthesized)
ccagcccttcctcagtcacatccagtgcacatctgggcataccatgtgctttctgtcttggcagcagaaggacattcaaactggtctcccggggctcaggagcactgcccagggcagata

SEQ ID NO: 1010155 - DNA, 120 bp, Artificial Sequence
  ENSG00000268460_12 (sequence is synthesized)
ctctaggagggatgggaatgaggccagggctgtcctgggcagtttctctttagctcaaggtgttgcattctctcggaggaatagaaaccaagcttgggcactttcaggcagttcctcctt

SEQ ID NO: 1010156 - DNA, 120 bp, Artificial Sequence
  ENSG00000268460_13 (sequence is synthesized)
actcaggatggtgcattcttatataatttggctctgtcttgccacacaaatctcatctcacattgtaatccccatgtgtcaggggaaggatctggtaggtgattggatcatgggggcagt

SEQ ID NO: 1010157 - DNA, 120 bp, Artificial Sequence
  ENSG00000268460_14 (sequence is synthesized)
tttttccatgctgttctcctgatagtgggggagttctcaggagatctgatggtttaaaagtgtgtagaagttcccggctcgctctctttctctcctgccaccatggaaggcgtgccttgc

SEQ ID NO: 1010158 - DNA, 90 bp, Artificial Sequence
  ENSG00000268460_15 (sequence is synthesized)
gctctctttctctcctgccaccatggaaggcgtgccttgcttttccttcaccctccagcatgattgtacatttcctgaggccaccttggc

SEQ ID NO: 1010159 - DNA, 120 bp, Artificial Sequence
  ENSG00000268460_16 (sequence is synthesized)
agtgtgaaaatggactaatacacatttctactgtattctacagtgattctgggaactgtgggcaagaagagaggcgggaaagccagagccatccaatgcttgtcttctggtgccctcctc

SEQ ID NO: 1010160 - DNA, 120 bp, Artificial Sequence
  ENSG00000268460_17 (sequence is synthesized)
caggaagccattcctggtgccctgggcgctgctcccagccttgctcaccctgggtcatcaccgtttttggaggggtctgtgtcctccccagactataagacccagaaaagcagggcctgg

SEQ ID NO: 1010161 - DNA, 120 bp, Artificial Sequence
  ENSG00000268460_18 (sequence is synthesized)
agctaagtcacagtcgtgtccccagcatccactgacacagagtaagtgcatagtgtgtgctaaatgaatgaaagaaaagtgaaagcatgatgaaagccctgtgttcagggtgtgtctcac

SEQ ID NO: 1010162 - DNA, 120 bp, Artificial Sequence
  ENSG00000268460_19 (sequence is synthesized)
tcaacctgtctgtcctgtcatggtgacttggtgagaattgttgcctgaaggtctttaaagctctctcccttccagggcttccgcatggagctgcttctcagctgtgccctatggggtcag

SEQ ID NO: 1010163 - DNA, 120 bp, Artificial Sequence
  ENSG00000268460_20 (sequence is synthesized)
atgcactggggaagaactaaggctcttctccacagcccaccttttgtccccttagccctcccaacataggacacaccatgtccagggctgcaggagcccaggctgtcaacagcatcagca

SEQ ID NO: 1010164 - DNA, 120 bp, Artificial Sequence
  ENSG00000268460_21 (sequence is synthesized)
tcctgctagaagagggtagggatggctggtactcagaagagccttctagattcctaagtttattaatcctttcactgcaactactaagaaaaataggtgtgacattattactgggttaca

SEQ ID NO: 1010165 - DNA, 120 bp, Artificial Sequence
  ENSG00000268460_22 (sequence is synthesized)
cacagtcacacacacacacaaaaagcgaaagcaaaaattgtcaagaatatgtcagcttccctcaggggagtggcttcttcaactttgatcccaaatgacttatttcagaggaaacctctc

SEQ ID NO: 1010166 - DNA, 120 bp, Artificial Sequence
  ENSG00000268460_23 (sequence is synthesized)
ccctctcctcagaacaaacacattcacacaggaagggattaaattcctgcaaagaagaagaaggaaaaccttccactggtcctttggtcttaactatcctgggccataatgtatttgaga

SEQ ID NO: 1010167 - DNA, 120 bp, Artificial Sequence
  ENSG00000268460_24 (sequence is synthesized)
gtccagtaatgactgtggatttttttgctcaaaatatcacagatgattgccaaacattgtgaaatgccattgaattgcacacttgaaaacacacacatacacatgaaaacttaagtaaac

SEQ ID NO: 1010168 - DNA, 120 bp, Artificial Sequence
  ENSG00000268460_25 (sequence is synthesized)
gcatatacttaattgtgggggctgcagggggggagcggaaagaaacatccagacatctggtggtaaatattctgctctggttcagctaaaaataaagccctttatcagtttggtcactgg

SEQ ID NO: 1010169 - DNA, 120 bp, Artificial Sequence
  ENSG00000268460_26 (sequence is synthesized)
tgagtgggggaggcgatagaaggattatagggtgggagagtggaagctgaggaagaactgggacctcgcttggcctgattcctgtctgtcacctgggagaggctccctgaggccaggtgg

SEQ ID NO: 1010170 - DNA, 120 bp, Artificial Sequence
  ENSG00000268460_27 (sequence is synthesized)
aaatcatacccggatgccaccagaatgatgattcagccctttccgtgcttgttccagaggggaagcccatgaaaggaggacagccagtgctctcctgtgtgccacgttccagaagctcag

SEQ ID NO: 1010171 - DNA, 120 bp, Artificial Sequence
  ENSG00000268460_28 (sequence is synthesized)
tccactgacacagaaaaagccacaaagaaacatggtaagagcgtggcagataacatccacggtgctatcgggaggtgacaggtgactgacctcagccttggtgttcaagaagattccaga

SEQ ID NO: 1010172 - DNA, 120 bp, Artificial Sequence
  ENSG00000268460_29 (sequence is synthesized)
agcactgcatcaccagtgtctgacacaaagcctgggacatgtgggcttccaagtggacctctcctggataaatgaccattaatgaaacagagaaggagttgaagagcccccagaggagtg

SEQ ID NO: 1010173 - DNA, 120 bp, Artificial Sequence
  ENSG00000268460_30 (sequence is synthesized)
tgagtcccaggggtcccgccagctccactcccaccttccaaacctgtgaaagtcaggtgcctgagtcgcacagtctctcccacccgaatgccatgagctgcagctgtcttggccgctttc

SEQ ID NO: 1010174 - DNA, 120 bp, Artificial Sequence
  ENSG00000268460_31 (sequence is synthesized)
aaacggaaaactaaaaagttttaagtgactctaggagagcaggagagaggcaggtctcccagctcagaccccgccccgggacggccccacggaagatgcacatctggatgtaggcgctca

SEQ ID NO: 1010175 - DNA, 120 bp, Artificial Sequence
  ENSG00000268460_32 (sequence is synthesized)
aggcaccgcgcgtgcgccgagtggccttgctcagctccgtccttctgaaacccggaatcctcatgtgtctgggtcccgccccatcctggcctcctacaccactggtccagatcctccacc

SEQ ID NO: 1010176 - DNA, 120 bp, Artificial Sequence
  ENSG00000268460_33 (sequence is synthesized)
ttcccccaacgcgaggtattgacatcaaagcatcacctcatctggcacaagaatctgaaacacagaccgcaccttacaccaacgtagtgaatccctccttggacctgagttcaacaagcc

SEQ ID NO: 1010177 - DNA, 120 bp, Artificial Sequence
  ENSG00000268460_34 (sequence is synthesized)
cagagtcggggctctgggttcccgcccaaatgccacgcatgcacacagatggcacctggcgtctcctcaaagggacaggaatcccgggcttcccagaatcaccaggtcgatttaaatggc

SEQ ID NO: 1010178 - DNA, 120 bp, Artificial Sequence
  ENSG00000268460_35 (sequence is synthesized)
atcagatgaactggaaaagaatgaaagtgctattgcctaaagtgatgaaattttcagaggatgtatcggtcctgtctggtggacagacggccaccagagggaatgaaccagtcttctctg

SEQ ID NO: 1010179 - DNA, 120 bp, Artificial Sequence
  ENSG00000268460_36 (sequence is synthesized)
aacatccatgaggatgaagaacagtcactgaggtgacggtaccaagtcaccggccacctcccagggatcctctcatccggtcctcacagcagcgctgcatggtcggacctcatcacccac

SEQ ID NO: 1010180 - DNA, 120 bp, Artificial Sequence
  ENSG00000268460_37 (sequence is synthesized)
attccaccaagaggaagctgaagcccagggccttcatccactcatgtcctccagacccctggcacccatcctgggccccaccccatcatccaggccttgggccttcgacctggggagagt

SEQ ID NO: 1010181 - DNA, 120 bp, Artificial Sequence
  ENSG00000268460_38 (sequence is synthesized)
ccctgtctcctccatgagccgtccagggcctgaagaggtatccaataaacaagaaagcagaacacaaagagctgtgatggagtggatcttatgtagtaagaataaaattattttgagaaa

SEQ ID NO: 1010182 - DNA, 120 bp, Artificial Sequence
  ENSG00000268460_39 (sequence is synthesized)
gcactagagctgctttgttctcctgatttgaatttcagtggtttcttacagtttttgctgctgctgtagagcatttaagcaggaagggatccagttcagccatccagggactggcaccca

SEQ ID NO: 1010183 - DNA, 120 bp, Artificial Sequence
  ENSG00000268460_40 (sequence is synthesized)
agttcttgttgcaggtagcagggaccagcttgcaagcttgaagtgtgcagatggaacacagagcactccagccacccaggcagatatcagaggatgggccctcaggcactgattcctgtc

SEQ ID NO: 1010184 - DNA, 120 bp, Artificial Sequence
  ENSG00000268460_41 (sequence is synthesized)
tgctcttcccctggggaaggtgcgtgctgagcactctggtatttatcatgagatcatttctgctgcagcctcttcccttgtcgcctgcctccagagagaagcccctgtccatgctcccca

SEQ ID NO: 1010185 - DNA, 120 bp, Artificial Sequence
  ENSG00000268460_42 (sequence is synthesized)
gaaagatacaggatcttccacacacacagatctgaccacatacatcccctgctgggaataaccctggggagaatggcttgtccataccaggtgtggcctgtgaactcacaaactgaggaa

SEQ ID NO: 1010186 - DNA, 120 bp, Artificial Sequence
  ENSG00000268460_43 (sequence is synthesized)
atcctgcagaagctgggaggggcccacagaactgacccaagacagcttcttcccctctgttttttcgtcctgaccccaagatggctcttctgtggggaaatcacacacccgaccctctga

SEQ ID NO: 1010187 - DNA, 120 bp, Artificial Sequence
  ENSG00000268460_44 (sequence is synthesized)
gccttggtgttcaagaagattccagaagaagccaagatctgccagccctgcctgttctctcaccccgcttcctggatccaagcaagacacgggctgagcacgtcctaatctgtgtcctgg

SEQ ID NO: 1010188 - DNA, 120 bp, Artificial Sequence
  ENSG00000268460_45 (sequence is synthesized)
atcaccagctcctctaggaatatgggatacaaggagtggctgagatcggctgatcaccagctcactccgctgcagccgccccagagcaatggctccccgaagccgtgttctggctgtctt

SEQ ID NO: 1010189 - DNA, 120 bp, Artificial Sequence
  ENSG00000268460_46 (sequence is synthesized)
gagtcatcaaggcctgaggacaatctgtgttcccagtgatggcacatggcccgctattatgtctctgctgtgtcctctgcagcacgtcgggattcctgtctgtcacctgggagaggctcc

SEQ ID NO: 1010190 - DNA, 120 bp, Artificial Sequence
  ENSG00000268460_47 (sequence is synthesized)
gggattacaggtacctgccaccacactcagatgatgacgccacattaccagtgtcagcactccccaagaagaaggattgaggcttggtccagtgtgaagcaagtgggccgttaaacacgt

SEQ ID NO: 1010191 - DNA, 120 bp, Artificial Sequence
  ENSG00000268460_48 (sequence is synthesized)
ggctttggctagtttttgagcatggggctatggtgagggttgctgcctgtgggctggggcttgagtggtttgaacgtccttctgctgccaagacagaaagcacatggtgtgcccagatgt

SEQ ID NO: 1010192 - DNA, 120 bp, Artificial Sequence
  ENSG00000268460_49 (sequence is synthesized)
aatagcttatctgaccctttgagaaaatgtagagagaagagtccaacccagggctgtttgaccacaaagtctcaggattgctgagagagggactcttgcatccacagagccctggccctg

SEQ ID NO: 1010193 - DNA, 120 bp, Artificial Sequence
  ENSG00000268460_50 (sequence is synthesized)
ccccactgccctccctcgaacccagcttctgacaccccctgccccgtcatcatcacccactgctgttttctctacccagcctgactcagctgccctgacagatggggaccaaggccaagg

SEQ ID NO: 1010194 - DNA, 120 bp, Artificial Sequence
  ENSG00000268460_51 (sequence is synthesized)
agggccagctgggctcctctcttccaagagatggcaactccagccctgccctcaggaatgtgcttttctccctggcactggctgctctccaggcctaaattcaaccctgtttttagcaca

SEQ ID NO: 1010195 - DNA, 120 bp, Artificial Sequence
  ENSG00000268460_52 (sequence is synthesized)
gaaaaccaggccaaatgccacacccagtctcagcatacgaagcacctagaactgacactgtgagctctgaactctttgtgtgtgtggggcggggtgagggggagcaacatgcccggacag

SEQ ID NO: 1010196 - DNA, 120 bp, Artificial Sequence
  ENSG00000268460_53 (sequence is synthesized)
gtagtcagtgatttttaagaaagatggaggcgagcttatacccagaggatttttccttccagtgtttagtaactgtttggctgtgacttgctaggaagcactcatattacatcagtccaa

SEQ ID NO: 1010197 - DNA, 120 bp, Artificial Sequence
  ENSG00000268460_54 (sequence is synthesized)
aagaaagtttaattgaacactgatgaataagacactgtgccatgcacactcttctatttcttttgattctagttgaatgtataagatacccatgttgatgaataaattgattcacaacct

SEQ ID NO: 1010198 - DNA, 120 bp, Artificial Sequence
  ENSG00000263370_0 (sequence is synthesized)
acaagctgtaatcaatcagctgggtataagatggggttttcaccctttccaagctgcatgagctccagccacccctaggaggagacaacatatcacgcatctcaagacctggagggagaa

SEQ ID NO: 1010199 - DNA, 120 bp, Artificial Sequence
  ENSG00000263370_1 (sequence is synthesized)
gtgaaacactgctactccacgtgtcacttctcactcaggggtcccctcctcactcctccctactcaagggtaacctccatcctgaattttgtgcttatcattccctttttttttctttat

SEQ ID NO: 1010200 - DNA, 120 bp, Artificial Sequence
  ENSG00000284825_0 (sequence is synthesized)
ctgtagaagggctgcccataggaggaagaaacaggccaccagagagcctacgtgtgacggatcagtgaagaaatgccactgcgagcgtccagttcacaggagggagcacagaggagctcc

SEQ ID NO: 1010201 - DNA, 120 bp, Artificial Sequence
  ENSG00000284825_1 (sequence is synthesized)
tccacctccagcatcctggacttcaggctcttcgtgaaaggctgggactcagccaggaaggcgactcagatctgaccagccctcaggaacagcgcagaagtggagaggaatcagtgatgg

SEQ ID NO: 1010202 - DNA, 120 bp, Artificial Sequence
  ENSG00000284825_2 (sequence is synthesized)
atgatggacagctctcccgccacaggaggacgacaggactcaccctccacccaccgcgggaggggagggaaccctcacccacgggacgggtcatctcctgcagcattatcttcctggctc

SEQ ID NO: 1010203 - DNA, 120 bp, Artificial Sequence
  ENSG00000284825_3 (sequence is synthesized)
ttcctgttggactcccaggattagggggccaaccctcccagttttccagagacttcccggaaagtagaaacgtctgtgctaaaatcaggacagtgctgccacagcaggaagagcagccac

SEQ ID NO: 1010204 - DNA, 120 bp, Artificial Sequence
  ENSG00000284825_4 (sequence is synthesized)
tctgggcctaacggatgtgcaggcgtccgggactgggaggcggtcgcccttctcctctgcaatgttggaccctggagcttttcaagaaagaagacacaacaataacgcccatccacgcct

SEQ ID NO: 1010205 - DNA, 120 bp, Artificial Sequence
  ENSG00000284825_5 (sequence is synthesized)
gctggtgtgctccctcctggcggcagccacggcttcagaaatgaattccacctaaccagtagtcattcgctttataacgcctgcggatctttgaactaggaggaaaatggggagcttttc

SEQ ID NO: 1010206 - DNA, 120 bp, Artificial Sequence
  ENSG00000284825_6 (sequence is synthesized)
atagcatcccctttgaaaaatcttctttgaggtctcaaatttaaacttccaaccctgaccatgacattatagatacagcctcagttttgcaaaattttagcaataaaagtgagaaactga

SEQ ID NO: 1010207 - DNA, 120 bp, Artificial Sequence
  ENSG00000284825_7 (sequence is synthesized)
aattattaaaaaattctctttgtactttcatttaataacaaaataagttggttgcataatgaaacagaatttctaagaaaagcaaaaggactaattatagtgactattatggatatcact

SEQ ID NO: 1010208 - DNA, 120 bp, Artificial Sequence
  ENSG00000284825_8 (sequence is synthesized)
aattttcactgctggaaaaataacaccttctagacgtttccagataaactgttgtgtgagtgctgccatagtcacaatttctttctgtgttagtttccagaacagtggacaatactattt

SEQ ID NO: 1010209 - DNA, 120 bp, Artificial Sequence
  ENSG00000284825_9 (sequence is synthesized)
tgcttcaagtcagatacagaaaatggggaaaagacactaggtttttggacaaggcaccctgcttaaacaccaggaatgtggaaaaagaggtattgttgaaccaacaagatttttatgatg

SEQ ID NO: 1010210 - DNA, 120 bp, Artificial Sequence
  ENSG00000284825_10 (sequence is synthesized)
aatgaaatagctctcagcagctctaaaaccgacttccagcagaatcagttttcctctgacttacttaaaaatctcccaatcatattccgcaaaggcataattgactgccagaaaggacag

SEQ ID NO: 1010211 - DNA, 120 bp, Artificial Sequence
  ENSG00000284825_11 (sequence is synthesized)
gtctgctcacagaatgaggaccacagaaagcctctctcgcccttctgcaacatctagagggcgctgggcgctggggtctggctggcacactctctgacccagcagccaactgcggggtgg

SEQ ID NO: 1010212 - DNA, 120 bp, Artificial Sequence
  ENSG00000284825_12 (sequence is synthesized)
accagtgagacccccatccagtgtctgaggagtgggcagcacagcccccattagcccgccgctgtcttggcgatgtatgtcggaggagacagattctttacagaacctgaagactcattc

SEQ ID NO: 1010213 - DNA, 120 bp, Artificial Sequence
  ENSG00000284825_13 (sequence is synthesized)
tgacaaaaagaccaaaggaaaatgactgattttattacgtagtcatttaattacactcacaaggctgattttttgatttactaaaacatctgtttgtctaccagaaagagatctgaaagc

SEQ ID NO: 1010214 - DNA, 120 bp, Artificial Sequence
  ENSG00000255811_0 (sequence is synthesized)
aattctctgcaggaatagccagtgatgttctctggttactctgacctccaagccacccttggccaggcagccagaaccacccaggaagatgctggaatgcatgttggcaagtagaagact

SEQ ID NO: 1010215 - DNA, 120 bp, Artificial Sequence
  ENSG00000255811_1 (sequence is synthesized)
tcactgaggttgagcaggatgcagatggcagctgtggtcaccatgaagtaggtgaagaccttcttctccgtgggccgggagatgtaacagtccacagtgtgggggcaaggctccacggag

SEQ ID NO: 1010216 - DNA, 120 bp, Artificial Sequence
  ENSG00000255811_2 (sequence is synthesized)
gaagatgaggctcagcaagtacgtccaccacagtccgccccgcttcttgctcaggttgtcgtacagggacggggcattgggcccgtgtttcaggtggtgcttgcgctcgcgttcctcgcg

SEQ ID NO: 1010217 - DNA, 120 bp, Artificial Sequence
  ENSG00000255811_3 (sequence is synthesized)
gtaggccacgtgcatgaccacgagcagtgaggggcacgtgaccaggatgagctgtagggcccagaggcgcacgtgggacacggggaagaactcgtcatagcagacgttggggcagccggg

SEQ ID NO: 1010218 - DNA, 120 bp, Artificial Sequence
  ENSG00000255814_0 (sequence is synthesized)
ggagttctaatgtcactatggcaacaagggacatggatttggggctctgcaaagaggggagccgaatgtgagacttgaataaagtgaggtctctcaaagggaacagaagcagaaaggttt

SEQ ID NO: 1010219 - DNA, 120 bp, Artificial Sequence
  ENSG00000255814_1 (sequence is synthesized)
aagcacttaaggtaggctgaagccagcagttaatgcctgcaagttggtcaccatggaaacaacacaagaaaatctccctccactacctcattctttaatatctgaaattttaaatttaca

SEQ ID NO: 1010220 - DNA, 120 bp, Artificial Sequence
  ENSG00000255814_2 (sequence is synthesized)
aaattaagatacaaagaatcaatcatgaagttgaagtttatatgagtgctttctgctgttgcatgttgctcaaggtacagtaaaaccttaacatcgggttgacgactgtaactttaaaaa

SEQ ID NO: 1010221 - DNA, 120 bp, Artificial Sequence
  ENSG00000255814_3 (sequence is synthesized)
ttgcatgttgctcaaggcactattagaaagaactgtccctcatccctcagacaacacggtgggaagaactctgacaaccatcctatggctgcacaaaggagatcctggagcctgggaaga

SEQ ID NO: 1010222 - DNA, 120 bp, Artificial Sequence
  ENSG00000255814_4 (sequence is synthesized)
aacaaagtacctgaattcttggtgacatccattgtgctgctacaataaagccagcctgcatcttgatgcacctctggacttttcaattaccctaggcaataaattctcctgattgtttaa

SEQ ID NO: 1010223 - DNA, 120 bp, Artificial Sequence
  ENSG00000255817_0 (sequence is synthesized)
tatcttaaaccttgacacaaatcatctgagaatcccatccacattccagttctcaggatcgaagaacaaagacagaattcagatgggccttttgtcagagcattcaggtacttactgatt

SEQ ID NO: 1010224 - DNA, 120 bp, Artificial Sequence
  ENSG00000255817_1 (sequence is synthesized)
aaggaccgacctgggcaaagtcaggaggagtttgcggatgtgaagcgccctctcatagagattatctattcctacagacagaagatgacatggtcagagtcctttcacttgccacattta

SEQ ID NO: 1010225 - DNA, 120 bp, Artificial Sequence
  ENSG00000255817_2 (sequence is synthesized)
aaacagaacactgcagtacatgtattaccggtacacatctgaatataagcaacaccctgctcttgtgtgagatccaattgtaaccaaaacagcgaataaatgatcggcttgggtatacca

SEQ ID NO: 1010226 - DNA, 120 bp, Artificial Sequence
  ENSG00000196273_0 (sequence is synthesized)
gtacacagcaggaagctgtgctcttcctgatggacgtcagctcctatctctcctggggagtggaggctgctctggagtggggccaagatcgggaggcccaggagagaaaagggcctgcaa

SEQ ID NO: 1010227 - DNA, 120 bp, Artificial Sequence
  ENSG00000196273_1 (sequence is synthesized)
tctacctcccagtcaacaagatgctataataaaaacatagccaactgtcactcagcgtttattacggtgccagatgaggaaacaggtgcagaaccgtggagtaacctgcgcagggtctcc

SEQ ID NO: 1010228 - DNA, 120 bp, Artificial Sequence
  ENSG00000196273_2 (sequence is synthesized)
acggaaaccgaacctccagccagggggactgagggaaggcttcccagaggcggtgaccctgacattgggttcccaggagtgaagaacattttgacaatcagcaaggagagcgttccagac

SEQ ID NO: 1010229 - DNA, 120 bp, Artificial Sequence
  ENSG00000196273_3 (sequence is synthesized)
gaggaagctgcatgttgagggagagaaaggagaatattttgctcactttcaatcgttatcgactcatccccccaaagccggcaatatcgaccctgccttccaacacacttctggagcttg

SEQ ID NO: 1010230 - DNA, 120 bp, Artificial Sequence
  ENSG00000196273_4 (sequence is synthesized)
agtcggaggaaagagccttgaacagttgtgcgtgagagagaggcaagcgcccgaaattattttacgacaaaggcagctctctctgccacagaggcacagaggagaaaggagcccaggaaa

SEQ ID NO: 1010231 - DNA, 120 bp, Artificial Sequence
  ENSG00000196273_5 (sequence is synthesized)
cgggtcatttctttcgtggaaaaatggaaatgctctgaagcattttgggagacgtgctgtgaagcaggtgacaccagaagacaaggacactgggggctccctgccgggaggcgcaaaaag

SEQ ID NO: 1010232 - DNA, 120 bp, Artificial Sequence
  ENSG00000196273_6 (sequence is synthesized)
ccggaaaggccatgcccttaggagcacaggcaggtcccagctcaggtgaggaacgtgagcttggggaggcagaggacaaagcctggcctgcaagacactgagcttcacctcttccaggag

SEQ ID NO: 1010233 - DNA, 120 bp, Artificial Sequence
  ENSG00000196273_7 (sequence is synthesized)
gacgacatcatcaccatttctcagatgaggaaactgaggctcagagagatgcagtgacccaccaaggctgagtgcaggaatgttggccctcagcatccaccctgggccctgcattgccct

SEQ ID NO: 1010234 - DNA, 120 bp, Artificial Sequence
  ENSG00000196273_8 (sequence is synthesized)
ggttgtctatgtggccccagccctcctgggccattttgatctgttttgtgcatttggggcacgtgtatgagagcatgtttggagaactatgctttatagcaagaaggtttgaaatcacca

SEQ ID NO: 1010235 - DNA, 120 bp, Artificial Sequence
  ENSG00000196273_9 (sequence is synthesized)
gaaaccgaacggatcaagaggtctgctgtgtgaccttcttcaagttcctgaccctctctgggctgcagtcaccttattcagaaaatggagaggctagacaagaaaatgatgctaatctca

SEQ ID NO: 1010236 - DNA, 120 bp, Artificial Sequence
  ENSG00000196273_10 (sequence is synthesized)
cccttttctgggctggcattttattgagcacctactaggcgctgggcattttgctaggcccttcgtgcacactgccatgagaaatccacagcaaccccagagatgggttcatcaataact

SEQ ID NO: 1010237 - DNA, 120 bp, Artificial Sequence
  ENSG00000196273_11 (sequence is synthesized)
caccagcaaatacttcctgaggccccactgtgtgccgagcatgggcataggtactgggcacacctcgatgaacaagggaggtaaggatgtgactctcctagaactttctgtcgagaagag

SEQ ID NO: 1010238 - DNA, 120 bp, Artificial Sequence
  ENSG00000196273_12 (sequence is synthesized)
agatcattctggagaaaatgcaatcagatgatgtgctagatggtaacagagagaggtcgaatgagagagagggccgtgacagcctctctgagaagctgaaatccaagcagaacctgaaag

SEQ ID NO: 1010239 - DNA, 120 bp, Artificial Sequence
  ENSG00000196273_13 (sequence is synthesized)
acgaggagaaactcagatacataaagactgggaaaagcattcaagtagagggaacagtgcgtgcaaaggccctgaggtgggtgcagtagataccacaggccccctcactcgagaccactc

SEQ ID NO: 1010240 - DNA, 120 bp, Artificial Sequence
  ENSG00000196273_14 (sequence is synthesized)
caagcacctcctgccctcttgtgccacagagctcagaaagctaaagcaatgttccccagaggtcctgtggccaaggtcctgcatgggcctgggtgacccctgcagaagcttctgagcaag

SEQ ID NO: 1010241 - DNA, 120 bp, Artificial Sequence
  ENSG00000196273_15 (sequence is synthesized)
actgagcagggaaagaaaggccatgtcagaaaaccatcctccagcgagcatggaggcagagagtctcatcctggcatcccaggtgctgagcagagcagacagcagcagaggggctcccta

SEQ ID NO: 1010242 - DNA, 120 bp, Artificial Sequence
  ENSG00000196273_16 (sequence is synthesized)
gagcagctgggggccctgcctgtgccgtcgctctttcccctccctgccctctggtctgacatcccattggcatcacacacgatgcctcccggaggtgctcttgtgcacacagcaggtcaa

SEQ ID NO: 1010243 - DNA, 120 bp, Artificial Sequence
  ENSG00000196273_17 (sequence is synthesized)
agtgccagagaattagatcctgtcctcttgggaacagccctcagccagcagtgagcccttaggaggatgctccaagctctatcctccccgggtccagaggccctgggatggagcgccatt

SEQ ID NO: 1010244 - DNA, 120 bp, Artificial Sequence
  ENSG00000196273_18 (sequence is synthesized)
gtggaagcagtgacaacttgatgaagctccctgggctggccccttcctctctgccttgttccccgttccctgcagtcctgcaatcacctcccaaataaaccatgtgcccttgctggaata

SEQ ID NO: 1010245 - DNA, 120 bp, Artificial Sequence
  ENSG00000196273_19 (sequence is synthesized)
cccatcaggaggttccagtgggaggagctcaggtggggaggagtcggaagtcaggatttcatgcctccctcattggctctggggttccctttaaggtggacactcggtgtgggcagtggg

SEQ ID NO: 1010246 - DNA, 120 bp, Artificial Sequence
  ENSG00000196273_20 (sequence is synthesized)
aggcaagagtgaagcagaggagagcaagcgtggtggtttagcaaagtaaagcaaagtaaacctggagggagcaaatgactttgtcctgggtgtgaaagggtaaggccccattgtaggtca

SEQ ID NO: 1010247 - DNA, 120 bp, Artificial Sequence
  ENSG00000196273_21 (sequence is synthesized)
tttattcattcaacaaacacgggttgaactgtgtcttgggctggcctcagagaagctcaagaaaagaaagatgctgtcattgccccgaggagccactgtctggcatgcaggccaactgtg

SEQ ID NO: 1010248 - DNA, 120 bp, Artificial Sequence
  ENSG00000196273_22 (sequence is synthesized)
aagccacatttctaaaaagtacacaagaaaagtgaaattagtgttatattttctttaactcggtatatccaaaatagtatcatcttggcatgtaatcaacacgacatttattagatactt

SEQ ID NO: 1010249 - DNA, 120 bp, Artificial Sequence
  ENSG00000196273_23 (sequence is synthesized)
ggtcagatgaatttacccacttcggccaccaggggcgctgttggcacagcttgaactcgagaccagcgctgtccaacggaaaccgaacgtgaggaacgtgagcttggggaggcagaggac

SEQ ID NO: 1010250 - DNA, 120 bp, Artificial Sequence
  ENSG00000196273_24 (sequence is synthesized)
agaacatggatgtccatacggttattaagaaggggtggctgggcaccctgcccgaaatgtcctcggtcacccactcacgttccaggaggcaactgggccccgggaagcgaattctccagg

SEQ ID NO: 1010251 - DNA, 120 bp, Artificial Sequence
  ENSG00000279232_0 (sequence is synthesized)
ttttcctcgcttgtactactcaattataaaacaaattattaacgatagcttctgaatttggtacatggcatcataggtgaacaaaaaaagccacagttcagagctgatggtcagtccgtc

SEQ ID NO: 1010252 - DNA, 120 bp, Artificial Sequence
  ENSG00000279232_1 (sequence is synthesized)
tctagtccagcttctataaaaggaaggcgggtttaggtttcaactctctatagttgaatctccatgagtaagaaggagatgccttccttattttcccagactgcccaagattattctctc

SEQ ID NO: 1010253 - DNA, 120 bp, Artificial Sequence
  ENSG00000279232_2 (sequence is synthesized)
atcaacacaaggtagaggtttgccacctctacatgaattcacaactccactctgtgactgggtggcacatcagttcgctaagaagttaaactttacaaaatgacgtcctcttcctcttgc

SEQ ID NO: 1010254 - DNA, 120 bp, Artificial Sequence
  ENSG00000279232_3 (sequence is synthesized)
cggtatgggcctctggcagtgtcactgatcaataggacatggcaaaagtaactacctggagaactaaaactaagcataatcttggcctgaactactacggtaaagatagtatcttttatt

SEQ ID NO: 1010255 - DNA, 120 bp, Artificial Sequence
  ENSG00000279232_4 (sequence is synthesized)
tctgtttatgtaaacttatcaacaaattattaaagcagaaactctatcacttcttggaactaaagatttacatctagctataacaatagaaacctacctatcctggagttaactttctca

SEQ ID NO: 1010256 - DNA, 120 bp, Artificial Sequence
  ENSG00000279232_5 (sequence is synthesized)
gattactgctcctgacttttgctgttcttttccttttgcaagggggtgccaacaatggatggaagaggcaaggagatcttactttataggaatttctccaagttacaacgagcaactgac

SEQ ID NO: 1010257 - DNA, 120 bp, Artificial Sequence
  ENSG00000279232_6 (sequence is synthesized)
caaatcatattcaactacaggtgttgagagagagagtacctgacttcagaccacctgggaagcacaatgcttagttaacaagaatatctggattaagcagtgccgaagtggccgcacacc

SEQ ID NO: 1010258 - DNA, 120 bp, Artificial Sequence
  ENSG00000279232_7 (sequence is synthesized)
gagtcaggccaaggaagctcttctgtcattgccgcccaactctgttccactttgcatgcagacatatcaaagactgtgatgaagatcatggtggacaaggaagaatgaaaaactttgtga

SEQ ID NO: 1010259 - DNA, 120 bp, Artificial Sequence
  ENSG00000279232_8 (sequence is synthesized)
tgggatctgggcctctacattagagaaagaacctaacaaaccccagttctttggattcgtaaggtgaggctgaggagggcttactggagttggagacagggagagctgtgtttctgggct

SEQ ID NO: 1010260 - DNA, 120 bp, Artificial Sequence
  ENSG00000279232_9 (sequence is synthesized)
caaagccaagaaacggttaagaagaggggcttgcatcagtcatatagattaaaaagagcaaggcatgataattactaaatttatagtttcatgttttaacacagaagagtcagagggaaa

SEQ ID NO: 1010261 - DNA, 120 bp, Artificial Sequence
  ENSG00000279232_10 (sequence is synthesized)
actgacaatttaaaacggggcatgggatgagaaaaagtctaggagttactgagatgcctggtacttatctacaaaacttccatcactagacccttttgacctacgagaatagcagtttct

SEQ ID NO: 1010262 - DNA, 120 bp, Artificial Sequence
  ENSG00000279232_11 (sequence is synthesized)
atggttcaacctaatacactgtatgggctcaaatatataacaattagaattgagagtaatcagaataccaataatacccccccttctgaaaaagtaacagctcttagatgaagagagctt

SEQ ID NO: 1010263 - DNA, 120 bp, Artificial Sequence
  ENSG00000279232_12 (sequence is synthesized)
gcacctgtaagggagagttaacgaccctttcaaatcaagtgagggcagaagggtgagggcatagttcaaaggaacgaggcagctccaccggaaggtggcgagtaaaagctgcacaccgtg

SEQ ID NO: 1010264 - DNA, 120 bp, Artificial Sequence
  ENSG00000279232_13 (sequence is synthesized)
gcaaatcagtagcaatgggaaagggcaggaaggtacagccaagaatagctacaaacaactggtcaccttcaaaggaaacgctgcatatggatgtctgtgtatatgtactatacatatcaa

SEQ ID NO: 1010265 - DNA, 120 bp, Artificial Sequence
  ENSG00000279232_14 (sequence is synthesized)
ccaagcacacacataaatatttaatatataaaaaataaagtgctttctaacaggtccctgggcagggacattataaaacatttcacagaactgcaaaacaaaattgatacaatcaaagaa

SEQ ID NO: 1010266 - DNA, 120 bp, Artificial Sequence
  ENSG00000279232_15 (sequence is synthesized)
cactacatccaacatatgtgaaaacagccaaacacagtatgtacaatctggtgggtgtcccaggacaaacatcctgtcatatacatggtatatacatatatactcttttactcaatatat

SEQ ID NO: 1010267 - DNA, 120 bp, Artificial Sequence
  ENSG00000279232_16 (sequence is synthesized)
tatgacaatatatattttaaaattttgttatagacaaaaaataaaaaaccaaaacaaaagacaacccctacaaaaacacgataaggatcaagcaggtgagtcctagactgacagacaaat

SEQ ID NO: 1010268 - DNA, 120 bp, Artificial Sequence
  ENSG00000279232_17 (sequence is synthesized)
cactgcctccacggggagtcccattgccactgctggggaaaatgtgccagcgttccttccttgggtgcagggcctccacatcctccaaggcactgtgggctgcggcagtaaagttggcat

SEQ ID NO: 1010269 - DNA, 120 bp, Artificial Sequence
  ENSG00000279232_18 (sequence is synthesized)
caccagtggtgagcaggtcgaagacacaggactggaaatagatgtccttcactggcatcttctcatggcattgagtgttggcagtctccagtgtgtagccaggccaggcctgcaccaagg

SEQ ID NO: 1010270 - DNA, 120 bp, Artificial Sequence
  ENSG00000279232_19 (sequence is synthesized)
aggtgcgaggcaggctgtgtcccaggatggcagacacctggccctgcccgtcatcgatgcgttcactcagggggcagccgttcacgcacagctgcaggtcctggctctcctcgtaggaca

SEQ ID NO: 1010271 - DNA, 120 bp, Artificial Sequence
  ENSG00000279232_20 (sequence is synthesized)
tggccaggtcttcaggcatacggatggcaagggtcaggtagcgacccacctgccgcacaaacactgtggtccctatatagcgggcgtgcatctccacatagtggccactctccctttcca

SEQ ID NO: 1010272 - DNA, 120 bp, Artificial Sequence
  ENSG00000279232_21 (sequence is synthesized)
cgatacgcaggctcttggcatcgctgtccccaccactggtggtgccatccacaaaggcggccggcaggtcatctgtcacagcttggtagactttctgatctgtacactcatggtgggctt

SEQ ID NO: 1010273 - DNA, 120 bp, Artificial Sequence
  ENSG00000279232_22 (sequence is synthesized)
tgaagataatagtgatctgtgggaaggagcatgtacaaggtttaacagaatgggaaggaagcagaacggggtaaccctctgtagcaagagctccccgccattttgaagctgaatggctta

SEQ ID NO: 1010274 - DNA, 120 bp, Artificial Sequence
  ENSG00000279232_23 (sequence is synthesized)
aggcggaatctccaaaatggacccaactgcttgcacctcaaaaatggatatcactttcagaaaatattttttaaagtcctatatatttagaactaaagtttaaataaatctgtgcatcaa

SEQ ID NO: 1010275 - DNA, 120 bp, Artificial Sequence
  ENSG00000278722_0 (sequence is synthesized)
gtcgatgagcttgaccgtgactttgcagtgggctgggatagggttaggccccaggtctcgggcctgcacgtcaatctccagcatcccgttttcctcatagtccagattgcccttcacacg

SEQ ID NO: 1010276 - DNA, 120 bp, Artificial Sequence
  ENSG00000278722_1 (sequence is synthesized)
gattaggccggtcttggggtcgatggagaagagctcccgcacgcggtcaggcacgtagctgctgaaagagtagagcacttcaccattgggaccttcatcggcgtcggtggcgttcagatc

SEQ ID NO: 1010277 - DNA, 120 bp, Artificial Sequence
  ENSG00000278722_2 (sequence is synthesized)
cgcctcgaagaccgggctgttgtcgttggagtcaatcaccttcacgttgatctgtacggtggcggaacgtggaggctcgccaccgtccagggcagtcagcacgagcgtatggtgattctg

SEQ ID NO: 1010278 - DNA, 120 bp, Artificial Sequence
  ENSG00000278722_3 (sequence is synthesized)
ttgctcgcggtccagagccttctggatgaccagttctgggaacttggtgccgtcgccgcgggacttaacgtccagtccaaagaggccgtgatcgtcgcgcgtgagcagatctccttgtcg

SEQ ID NO: 1010279 - DNA, 120 bp, Artificial Sequence
  ENSG00000278722_4 (sequence is synthesized)
ttggcgaacacctcgagggacagctggcacttggcattgtggcggcacagggactcgcggtcgatgcgctgcttggtgtagaggagcccgctgtctgcgtccacgtccagcaggtgcggt

SEQ ID NO: 1010280 - DNA, 120 bp, Artificial Sequence
  ENSG00000278727_0 (sequence is synthesized)
ctacacactgtctgcgctgctcccagcacgttctgaaatgtcatatttatgagtgattatctgatcactgatttgggtatgaaaataagtaagagctcctgaatgctgcaaaaagagaag

SEQ ID NO: 1010281 - DNA, 120 bp, Artificial Sequence
  ENSG00000278727_1 (sequence is synthesized)
agtgcagaggagggtgtcaagaaatgattgggtcactgaatgtttcttgtgtacctgctattatttgcagggcaccagggagtgaggaatgcaaaggcgaataatctccaaagcgctttc

SEQ ID NO: 1010282 - DNA, 120 bp, Artificial Sequence
  ENSG00000278727_2 (sequence is synthesized)
agtgtagcccaataagcaaagggtcaggggtctgcgcagttatcacatcagtttgaagtatagaccacacatcaggataaatcaggcaagatctttgttcttgataaaatttatccttct

SEQ ID NO: 1010283 - DNA, 120 bp, Artificial Sequence
  ENSG00000278727_3 (sequence is synthesized)
gtgtaactacccagtgagcttcacagtctcctcacagataaatgtcatttttattttgaaatgtttatatctgctcaacaattaccgcgctcatgtcagtgtgctgaaatgagatcaacc

SEQ ID NO: 1010284 - DNA, 120 bp, Artificial Sequence
  ENSG00000278727_4 (sequence is synthesized)
cccaaaccagttatcttaattgcaagtacagattttgatactgaatgtatttcaacattctttttttgttgttgttctgttctttgggataaataatagataacacaaaacttccaagtc

SEQ ID NO: 1010285 - DNA, 120 bp, Artificial Sequence
  ENSG00000278727_5 (sequence is synthesized)
ccagtgcaggatttcgaggtggttgtgctactaggcgttatattagtgtcagagacctgacaaaaccagcctcttttctacaaatccaagaaaagccttctttgtatcagttctgcacat

SEQ ID NO: 1010286 - DNA, 120 bp, Artificial Sequence
  ENSG00000278727_6 (sequence is synthesized)
atttttgtataattaccattgctcattgcatcagcaaatcctgccagctctgtgttaaaaatctttctagactattaacgtatttcaccatctccctatcatcaccctggaccaagccac

SEQ ID NO: 1010287 - DNA, 120 bp, Artificial Sequence
  ENSG00000278727_7 (sequence is synthesized)
catcatctcttgcctggattattgcactggtctcctaactgcttctacttctgctcctacagtcttgtatcaccagaacaaaaacagggaccctgcttataatccaaggctggtatgtca

SEQ ID NO: 1010288 - DNA, 120 bp, Artificial Sequence
  ENSG00000278727_8 (sequence is synthesized)
ctctgctcagagcctgccagtggcttcctatctcagaaagagcaaaatccaaagtcctctcagtggcttacaagactctacatgtttggagttatcccaccagcacctctctgacacatc

SEQ ID NO: 1010289 - DNA, 120 bp, Artificial Sequence
  ENSG00000278727_9 (sequence is synthesized)
tcctgccctgcccccaggagctggctggctttagccacatagcccctttcttgttttctcagggcctttgcacatccttgtaaaagtctcatttctcctccctcccgtgttcctcacctt

SEQ ID NO: 1010290 - DNA, 120 bp, Artificial Sequence
  ENSG00000278727_10 (sequence is synthesized)
gttcaggtccctcccttctcaccttcttcaggtctgcccagcaagacctttccttgattccacttcttaatgcagcacagcctcactgcagcttcctcttccttgccttatttgttgact

SEQ ID NO: 1010291 - DNA, 120 bp, Artificial Sequence
  ENSG00000278727_11 (sequence is synthesized)
cttttcctacatcagaatataaactccaagacttcagcagtttttgtctgcttggttcactgccacacccccactgcctagaacagagctggtatattacaggcatttgataaatatctg

SEQ ID NO: 1010292 - DNA, 120 bp, Artificial Sequence
  ENSG00000278727_12 (sequence is synthesized)
ttgctcacgcaagcattcaaccactatttattcagggcctactactatattccaggctgcatgttaaaaaataatcactgcccactaggagcttatagtcttgcgagggagacaaataaa

SEQ ID NO: 1010293 - DNA, 120 bp, Artificial Sequence
  ENSG00000278727_13 (sequence is synthesized)
tatagtataaagataagtaagcctatttcaggtggtgataaatgccacaaagaaaataaaattataagatgtgatagagggactgagtgtggaatactactttatacagagtgcctgggg

SEQ ID NO: 1010294 - DNA, 120 bp, Artificial Sequence
  ENSG00000278727_14 (sequence is synthesized)
ggggcctgagttatgagtgagctcacattgaaagtttatgtattgtgtcatctacttgtatcctgtgaatctccaaagtacccttgagatgatcagtacagagtcaaatgtgagtgatac

SEQ ID NO: 1010295 - DNA, 120 bp, Artificial Sequence
  ENSG00000278727_15 (sequence is synthesized)
cgtgtgcttattcactacctgcagcctactatcatcattctctacatcttgacataaggtagtcatcaaccaccagctagtctactgcagaaaagccattggtatttccttatggaagcc

SEQ ID NO: 1010296 - DNA, 120 bp, Artificial Sequence
  ENSG00000278727_16 (sequence is synthesized)
aggtaatgcatgagagatataataatgaatgaaacaggtgatttgaaacacaaggaatgtttttctagttaattttgtgtgttctgtttcttgcctattggttggtatcacagaattcaa

SEQ ID NO: 1010297 - DNA, 120 bp, Artificial Sequence
  ENSG00000278727_17 (sequence is synthesized)
aaggaaatactactggggaactctgatgctgggacttgagggcctgagtgtttataagaagagagtcataactctttagcatctccagtatgttaaatatgcttgattgcaagggattgg

SEQ ID NO: 1010298 - DNA, 120 bp, Artificial Sequence
  ENSG00000278727_18 (sequence is synthesized)
ggaggatttggaaacccactagccctgtgtttagtctcaaaccagtttctaatgatggtcattgctaattgatggtcattgctccttttcaagtaactctttgtattttcctgaataaga

SEQ ID NO: 1010299 - DNA, 120 bp, Artificial Sequence
  ENSG00000278727_19 (sequence is synthesized)
tacagtgtgcctgcaagtaacctgtcctttgatcctaaagtggaggatactggaaacatctctggacctacattctcatctcatttgcatcttctcccccacctactgccttctcttcaa

SEQ ID NO: 1010300 - DNA, 120 bp, Artificial Sequence
  ENSG00000278727_20 (sequence is synthesized)
accagcttcccctcccactccccacagtaatccttcttatccaaagtttccattaccatggtttcagttacccatggtcagctgtggtttgaaaatattacatggaaattccagaaatat

SEQ ID NO: 1010301 - DNA, 120 bp, Artificial Sequence
  ENSG00000278727_21 (sequence is synthesized)
aactaattcataaattcaaaattgcacaccattcagagtagtgtgatgaaatctcccactgtcctgcttcgtcttgccctggacatgaatatccacacctctacactcccaacccatgag

SEQ ID NO: 1010302 - DNA, 120 bp, Artificial Sequence
  ENSG00000278727_22 (sequence is synthesized)
tcacttagtagccatctcagctgtcagatcaactgtcttagtatcaccctatcacagtgcttgtgttcaagtaacactcagtttacttaataaatggccacaaattacaagagtagtgat

SEQ ID NO: 1010303 - DNA, 120 bp, Artificial Sequence
  ENSG00000278727_23 (sequence is synthesized)
gctggcaattcagatatgccaaagagaagccataaaatgctgcctttaagtgaaaaggtgaaagttctcaatttaataagaaaaaaaaagttacatcccaaggttgctaagatctatgat

SEQ ID NO: 1010304 - DNA, 120 bp, Artificial Sequence
  ENSG00000278727_24 (sequence is synthesized)
aagaatgtagacattgtgaaatttctgtgaaattatgaaggaaaaatttgtgctagttttgctgtcacacctccaaacacaaaacgtatggcacagagtgcatgataagtgtgtagtgaa

SEQ ID NO: 1010305 - DNA, 120 bp, Artificial Sequence
  ENSG00000278727_25 (sequence is synthesized)
aatggaaaaggcattaaacttgtggattgaagacatgaagagaaacatgttccaatggacagcaatcaggttcagtactacctacggtttcagtcacccactgagggtcttggaatgtat

SEQ ID NO: 1010306 - DNA, 120 bp, Artificial Sequence
  ENSG00000278727_26 (sequence is synthesized)
accctttgtatgaaaggagactactgtattctgcataccaaagatttaaggaaaggaatgaggaacatgaagagaaatataaagttaaaggggaggaagaactggtgaaatgaagtgagt

SEQ ID NO: 1010307 - DNA, 120 bp, Artificial Sequence
  ENSG00000278727_27 (sequence is synthesized)
gcctttgagaattgaatgaatttaatatatgtgaaaatgatctgtacattgtaaaacaccattcaagtgtcagaatcattattttccaccacttatcatggtgcttgacaagtcttccca

SEQ ID NO: 1010308 - DNA, 120 bp, Artificial Sequence
  ENSG00000278727_28 (sequence is synthesized)
ataaatactgaatgaacaaatgaatggcagaaacattaaaatgaacactatggggaaaggggaagagaggcagaatcagaaattatcctgaataaatatttattccatttgtcatcctcc

SEQ ID NO: 1010309 - DNA, 120 bp, Artificial Sequence
  ENSG00000173862_0 (sequence is synthesized)
agtcagtgaaacggcagaatcagaagaggttccacaaccagaaaatcttggctggaatttcaccatcaggaataaaacagaaaaactaaaagagtgccccagatagcctttcttaggggc

SEQ ID NO: 1010310 - DNA, 120 bp, Artificial Sequence
  ENSG00000173862_1 (sequence is synthesized)
ctgtgtcaggtcgcaggaatcttgttggtgatccatccagatgttgtgtgttctggaagtggacatcgcggctctgtgtttttgaagtcagatctcattgctgtggtttctatgcctgac

SEQ ID NO: 1010311 - DNA, 120 bp, Artificial Sequence
  ENSG00000173862_2 (sequence is synthesized)
cccccgaagttcttgctcctgttgccacagggagccgggagagcacagagcgctgctcccggtgccctgcagccacacaaacatgctcctgctcctggcggaggcagagctgctgggaaa

SEQ ID NO: 1010312 - DNA, 120 bp, Artificial Sequence
  ENSG00000173862_3 (sequence is synthesized)
gacatttcggaagtttcctgtggctgcaacaaattgttcaaatctgcactggagcaccgctgtgacctgtctttctccatcttagggcaaacagctcctgaaactggaaactccccagca

SEQ ID NO: 1010313 - DNA, 120 bp, Artificial Sequence
  ENSG00000173862_4 (sequence is synthesized)
catgggtggtgcagactcagtttcccatgcaccttgccccagggaggaggtaggggttccttccatagagatggtgaagaataagggaggtagtgatcgtctctgggatccagttagatc

SEQ ID NO: 1010314 - DNA, 120 bp, Artificial Sequence
  ENSG00000173862_5 (sequence is synthesized)
tgcgtttgcaggcagaaagaggctggggcacatggagagagtgatcaactggaagattctagggtcctcaattttgaaaggtgacatgataccctggaaagggcatgaacttagttgtca

SEQ ID NO: 1010315 - DNA, 120 bp, Artificial Sequence
  ENSG00000173862_6 (sequence is synthesized)
gttcgtccttgccttttccaatcaatgctgtgtggccacggcaaattaatgaacatctctgagtttcggtctcctgtctaaaatgaggtgataatagcttcttgaaggttgtaaggcccc

SEQ ID NO: 1010316 - DNA, 120 bp, Artificial Sequence
  ENSG00000173862_7 (sequence is synthesized)
aaacatgctgcctggcacatagatggctaatcaatattttcctacccttcccttccttcccttctctggagttgctacctgtcttctcctggggccttgcaaataaacttctgaattaaa

SEQ ID NO: 1010317 - DNA, 120 bp, Artificial Sequence
  ENSG00000233953_0 (sequence is synthesized)
gtggtttgagagtttggagcttccctaaaagtcaaaatattctcaatgggccctcaatcagcacatacacacaaaaggttcaaggcaaggatttgagacagttaccccttctggaagagc

SEQ ID NO: 1010318 - DNA, 120 bp, Artificial Sequence
  ENSG00000233953_1 (sequence is synthesized)
caaccttgagtggagaggctgctgtgaaacagctctgggcagcacctgggccacagcatgtggaaggagacatgttcctaagctgcctggtactctgccatctgtcttctcttcctccta

SEQ ID NO: 1010319 - DNA, 120 bp, Artificial Sequence
  ENSG00000233953_2 (sequence is synthesized)
atccataagcaccagacctcaagccccatgtgcagctccggaagctgctagacctcaagcaggactaagattcggagagagcagccaccgacctggctcctcccaggcaggccagcccag

SEQ ID NO: 1010320 - DNA, 120 bp, Artificial Sequence
  ENSG00000277229_0 (sequence is synthesized)
ccaaccatcaccttcccaggccaaggtcttaggttcccctggaacccctttggctttactcccttcctgggctgggggaaagggtggggatataagctggtacttccaaagcagaaagct

SEQ ID NO: 1010321 - DNA, 120 bp, Artificial Sequence
  ENSG00000277229_1 (sequence is synthesized)
ggggtttggggctgacagagctgaccttgagcttgagctccatggagtacccagcccaggtcaaatggggtcaggaagccatctgtgccttctggatggctctgtctgaatgattcactt

SEQ ID NO: 1010322 - DNA, 120 bp, Artificial Sequence
  ENSG00000277229_2 (sequence is synthesized)
tggcaattttctagtcaacaggtggggttggggcctctgctacacacaagaggcttctttcttcaagtttaagacttctgatgctcacaagaccctcccatgcccttaccacgtgcagcg

SEQ ID NO: 1010323 - DNA, 120 bp, Artificial Sequence
  ENSG00000277229_3 (sequence is synthesized)
ctcacccccagggcctggggtttggtgagatgtgtcgcccacatgggctgggatcatattttccccagggaagatgaaagccctcaccctctcacaaagccaattgctaaattttcaaga

SEQ ID NO: 1010324 - DNA, 120 bp, Artificial Sequence
  ENSG00000277229_4 (sequence is synthesized)
attttgcaagctgatttttaaacatagccattattttaaaattacattatagaacttacaatgaaacaaatgtttaaaatgacagtaataaatactcaaaactcctctgttctcatttta

SEQ ID NO: 1010325 - DNA, 120 bp, Artificial Sequence
  ENSG00000231324_0 (sequence is synthesized)
agaaacacaaggatcagctagaaagtgttcaccaaatgctggacaagtataacaggttaaatttcaccccgggcacaattttgtgagatttcagaacactagacataaagagaagatcct

SEQ ID NO: 1010326 - DNA, 120 bp, Artificial Sequence
  ENSG00000231324_1 (sequence is synthesized)
aaaaactcacaaatacaaaaaaccaacacctacaaagggatgaatatcagatttgcattggattcttcatcagtaacactggatgctagaaaacagtgggataatgccttcaaagttctg

SEQ ID NO: 1010327 - DNA, 120 bp, Artificial Sequence
  ENSG00000231324_2 (sequence is synthesized)
aaggaggactcagctttaagaaacagtgaagcctttgaagaaggaagtctcccatttatcctactctaggaaggacctttacatgctccatgcattcaatgtttacaataacaaaagtgg

SEQ ID NO: 1010328 - DNA, 120 bp, Artificial Sequence
  ENSG00000231324_3 (sequence is synthesized)
ctctgatgtttcctgttgtgcaagagaaggtgaagtcaagagatattcggtgacttgccccagtcctccttcccaggaagtggccaaggggtctttacaggttgatgtaagattggccct

SEQ ID NO: 1010329 - DNA, 120 bp, Artificial Sequence
  ENSG00000231324_4 (sequence is synthesized)
gccacattctcctgatgggactcgtgtggccagactctgctcctgtcacttggagactgtgtagtggccatctccactcatcctgggactggtgctatgaagttgccaccaagaaggatg

SEQ ID NO: 1010330 - DNA, 120 bp, Artificial Sequence
  ENSG00000231324_5 (sequence is synthesized)
tttcccttttcttcctccccacacccacttccccacagggtgtggtggcagcaggtgcctcttctgcatggccagggtcccccatcgctcacagctgtcagtgtgcacatgctcagacct

SEQ ID NO: 1010331 - DNA, 120 bp, Artificial Sequence
  ENSG00000231324_6 (sequence is synthesized)
gcaccattcctgtccagcccctgcagttaccacctggaatcttcagccaggacttggaggctgtgaggtcagtcgggaagtggatcaggaggccacccccttctgtggcacttctgagat

SEQ ID NO: 1010332 - DNA, 120 bp, Artificial Sequence
  ENSG00000231324_7 (sequence is synthesized)
gacaacttgtttcacagttggatgggggtggggaaggaaagagcggccccattattccagaacattttatccacacaggctcagacaccctgtgatgaagagtccaagaacagcctgaga

SEQ ID NO: 1010333 - DNA, 120 bp, Artificial Sequence
  ENSG00000231324_8 (sequence is synthesized)
taaggatgtcattcttctttcacaggccccacgatgggtttatcttttgggaccaagacattgggtccctacatgttttcccctacccttcttaggaaataaaatatcaaacaacccaca

SEQ ID NO: 1010334 - DNA, 120 bp, Artificial Sequence
  ENSG00000253303_0 (sequence is synthesized)
gggggaaacattgtacagcccagcggttctcacagactctcctgcaaagcctctgatttcacttgtactggctacagcatgagcttggtccagcaggcttcatgacagggatttgtgtgg

SEQ ID NO: 1010335 - DNA, 120 bp, Artificial Sequence
  ENSG00000253303_1 (sequence is synthesized)
tgagttatcagggttactctccatgagtacaagtaaattaacagtcccaagcaacaccctttcaagtgcagtctaccttaaaatgaccaatgtgaaagccaaggacaagaccttgtatta

SEQ ID NO: 1010336 - DNA, 120 bp, Artificial Sequence
  ENSG00000253302_0 (sequence is synthesized)
tttgtttattctccagtcgcgtgtgagtcagccagatcatgatttgtggtggttttgcttgtgaaatcttacataattatattcctattgtcatgttgggtcgagcagttagaccatgta

SEQ ID NO: 1010337 - DNA, 120 bp, Artificial Sequence
  ENSG00000253302_1 (sequence is synthesized)
gtgttttctcattgcacaatgtttgcaaatcaataaggagaaagcctgaacaatgcgatgacgttggccaggaacccggcccgagtcacccaggaggcggctctgcagtttctcaggagg

SEQ ID NO: 1010338 - DNA, 120 bp, Artificial Sequence
  ENSG00000253302_2 (sequence is synthesized)
acgtctccgtttagaagactgcatcagcaaaaccatcctaccatgggaattaactgatggatgtgtctggacttcccagggggttctccatggacagtattgtgctggtaaatatttaac

SEQ ID NO: 1010339 - DNA, 120 bp, Artificial Sequence
  ENSG00000253302_3 (sequence is synthesized)
aactgactcttcgtggggagaaaatcactaagtgtagcatctgttaacacctccaccctggctgatgcgcagttgggaagacatgtgcacagctggcaccgtgagctggcaggagctgct

SEQ ID NO: 1010340 - DNA, 120 bp, Artificial Sequence
  ENSG00000253302_4 (sequence is synthesized)
cctagaggaagtcatttgtacaaggccatatggcttgctcctgatagatctggaatttggactcaggcagcctggttctggagctgaattctgaactacctatatcatcccacctcagtc

SEQ ID NO: 1010341 - DNA, 120 bp, Artificial Sequence
  ENSG00000253302_5 (sequence is synthesized)
cagtgagagaacgtgtcacctgagtgctcaagatacatcaagagcccgaccatgtcctggagcctcttaagagcgaagctcagggtgcaggacctgagagggtgttaatcagccgcttcc

SEQ ID NO: 1010342 - DNA, 120 bp, Artificial Sequence
  ENSG00000253302_6 (sequence is synthesized)
atttttttcttaatatgggaagaccagattttgcttggcttctggaaaccgctgccatcttgcttttcctcctacttcagctcttggtctcctgtgcagctggcttttccttcttcctga

SEQ ID NO: 1010343 - DNA, 120 bp, Artificial Sequence
  ENSG00000253302_7 (sequence is synthesized)
cttttcaagcccatccttggacctcttatcttctccatcaaaattctctccctggatgatttcactgaggccgatggcttaaatcccttagaaatactgatagctccaaatccctatctt

SEQ ID NO: 1010344 - DNA, 120 bp, Artificial Sequence
  ENSG00000253302_8 (sequence is synthesized)
tagcctggcctcctgccctagaattcacttgtctaagtgcctagtggatttctccacttagatgtctcataagcatttcaaacctgcccaaaacgaaacttgattaccatccccaaacca

SEQ ID NO: 1010345 - DNA, 120 bp, Artificial Sequence
  ENSG00000253302_9 (sequence is synthesized)
ttgctcaggcaaaaaccctagcaatcagcctcacttgctttcattctctctcatctcccacatcaaacccattagcaaattctgttggttcttttttgaaatgtactcggaggctacttc

SEQ ID NO: 1010346 - DNA, 120 bp, Artificial Sequence
  ENSG00000253302_10 (sequence is synthesized)
tcaccacatgctctgctatggttctagcccaagccactgtcagtctctcccagagacacaagctgtaccttcctaactcgcacccctgtgtgcatccctgtgtgcatccctgctcaccca

SEQ ID NO: 1010347 - DNA, 120 bp, Artificial Sequence
  ENSG00000253302_11 (sequence is synthesized)
aagccaaccctttgcatataaccagagtgatttttttgaaatgtaaataagaaccggtcaccaccctattcaaatcctccaggggcttctcatttctcttagaacaaaacccagactcct

SEQ ID NO: 1010348 - DNA, 120 bp, Artificial Sequence
  ENSG00000253302_12 (sequence is synthesized)
gactacagccccaaagccctacatgatcctgccccatttacagctccaggctcattacctacctcgtgctcccagcccacggatcatcgcctaccacatgctcccagcccccggatctcc

SEQ ID NO: 1010349 - DNA, 120 bp, Artificial Sequence
  ENSG00000253302_13 (sequence is synthesized)
agcacatcagcctcttggctcttcttagaactccctgaattcactcctgtctcaaggactttcctgtgcttttccttagacaggagacacccctcccagttcacatggctcactcgcttc

SEQ ID NO: 1010350 - DNA, 120 bp, Artificial Sequence
  ENSG00000253302_14 (sequence is synthesized)
atccaggtctcttctccagtgtcccctccttgtgacccctggatctaaaggagttgaaccaccccactcctacccttatattctcatagctcctcacgctgcctcacttttagcaagatt

SEQ ID NO: 1010351 - DNA, 120 bp, Artificial Sequence
  ENSG00000253302_15 (sequence is synthesized)
gcaagatttcattaaaattttattgctgtctaaaattctattatatatttaaccatttacttgtttagtatctgtgtcttccattagcaagtaagttctggccaggcgtggtggctcaca

SEQ ID NO: 1010352 - DNA, 120 bp, Artificial Sequence
  ENSG00000253301_0 (sequence is synthesized)
gaccaccgagaactgccgctgtcctgtctgactcctcctgttttggtactagaccccagatgaggatctcaggaagatccacaaagctgcgtccaggggaacgaacgtgtggaagctgca

SEQ ID NO: 1010353 - DNA, 120 bp, Artificial Sequence
  ENSG00000253301_1 (sequence is synthesized)
gcggagcctcctgctcaagagtaaaggaccggtctgaaacctacaagaacaggacacatattgcttgtctctgaacttctcagctgcctgcagatcttcctgtttttcagctgcagttag

SEQ ID NO: 1010354 - DNA, 120 bp, Artificial Sequence
  ENSG00000253301_2 (sequence is synthesized)
ggtttgtctgaggagaagcataacatccctccaggccaaatgctccacaaataaatgtgttgaatgaatgaacaaatgaataagcgaagtgaatggaacatcaaactgcataaaaatata

SEQ ID NO: 1010355 - DNA, 120 bp, Artificial Sequence
  ENSG00000253301_3 (sequence is synthesized)
tttattcataaatgagaggtgatgattgccaacatatcataatcagactctgaccttggttacttatgagtttgacaacgaagaggaaagaggatcagggtcggctttgttgcccacttg

SEQ ID NO: 1010356 - DNA, 120 bp, Artificial Sequence
  ENSG00000253301_4 (sequence is synthesized)
ggaaagaggatcagggtcggctttgttgcccacttggagtgtagtggcacaaccttggctcactgcaaccttctcctgaagtacatattagctcacctgggctcaagtgatcctcccacc

SEQ ID NO: 1010357 - DNA, 120 bp, Artificial Sequence
  ENSG00000253301_5 (sequence is synthesized)
attggcatgtgccaccaagccttgctaatttttgtattttttgtagacacaggattttgccacgttggccagatttgtcttgaactcctaagctccagtgatccacccaccttggcctcc

SEQ ID NO: 1010358 - DNA, 120 bp, Artificial Sequence
  ENSG00000253301_6 (sequence is synthesized)
attacacgtgtcaccatcgtggccaaccagcaagctctcttttaatgattcagagtctcaggccatagcagtataagtatcaaaacatctattcccaacttggagttgagatttctaata

SEQ ID NO: 1010359 - DNA, 120 bp, Artificial Sequence
  ENSG00000253301_7 (sequence is synthesized)
ctattttctccataatcataaaatagcatcaggaaaagtctcttgacatcttaaaatacatatcactggaaagtagatctttttgtccttcagataaacatactgtaaaatttgaaatga

SEQ ID NO: 1010360 - DNA, 120 bp, Artificial Sequence
  ENSG00000253301_8 (sequence is synthesized)
aaattattctttgtaccaccattctgattttacccagggttaacacaaaagttatagcagtacatgaagctctgaggcttcaatgggtgtagatatagacatccaaacctataattttac

SEQ ID NO: 1010361 - DNA, 120 bp, Artificial Sequence
  ENSG00000253301_9 (sequence is synthesized)
attaatcagaatactattcatataaatcacaaatggcaaaaccatttctgaaggtatttggttttatagattataaaattaaacttccttataattgtgtccaaactgaaatatgcttcc

SEQ ID NO: 1010362 - DNA, 89 bp, Artificial Sequence
  ENSG00000253301_10 (sequence is synthesized)
aaacttccttataattgtgtccaaactgaaatatgcttcctgtacaaaaaagctttcttctaacagtaaaggcctcctcccaacccacc

SEQ ID NO: 1010363 - DNA, 120 bp, Artificial Sequence
  ENSG00000253301_11 (sequence is synthesized)
agcactgatcttttctctcttagactaattattttaacattattttcagccactttattaattgtggggttaagggtaggatagatctaatgcccatttcacatgtgttgcaacatcaga

SEQ ID NO: 1010364 - DNA, 120 bp, Artificial Sequence
  ENSG00000253301_12 (sequence is synthesized)
gattatggttttcattaaaaacatcagagctaaattccttttcaaaaaagacattgttactgttagtaccttggggaatgttgtagtcttatgaatgctgatacgtttatttgagccaat

SEQ ID NO: 1010365 - DNA, 120 bp, Artificial Sequence
  ENSG00000253301_13 (sequence is synthesized)
tgaatattatctctaatataaactataatttactgtgtgattcctcttcctgttttacctatatatactcaaagtgaatgattgtgtttagtgaacatttctttaggtaataaaaattaa

SEQ ID NO: 1010366 - DNA, 120 bp, Artificial Sequence
  ENSG00000253301_14 (sequence is synthesized)
tttcatttaagaaagaagtacaaaatagttattagagcaaactttggtatttgtaattttgaagttacatacttttgaaataaacttgggctttcatgccatgttgggtttgaggaagat

SEQ ID NO: 1010367 - DNA, 120 bp, Artificial Sequence
  ENSG00000253301_15 (sequence is synthesized)
aacggctcttcttcgagtcttctcagaggttggagattccctgtcttctccaacctctgccaagtcttcagagaggttggagtgcgcctgtcggaggtactagaccccagatgaggatct

SEQ ID NO: 1010368 - DNA, 120 bp, Artificial Sequence
  ENSG00000253301_16 (sequence is synthesized)
tagacgaggagcctgtttttcagctagctgctgcaagggagctggaaatttctcccttcagataggacctagaaggtctgaaagcatctggagaagggtgcggctgggagtagagaaaca

SEQ ID NO: 1010369 - DNA, 120 bp, Artificial Sequence
  ENSG00000253301_17 (sequence is synthesized)
ggctacagactgaagcaggaggaagcgagagaggaagactcatggaaagccttgttgcgctcgccaaaagagctgccctcgcactcgagagggccatgtttaatgcctacctgaagaaag

SEQ ID NO: 1010370 - DNA, 120 bp, Artificial Sequence
  ENSG00000253301_18 (sequence is synthesized)
aggttggagattccctgtcttctccaacctctgccaagtcttcagagaggttggagtgcgcctgtcggaggtcggggccagcccaccttgctctctggtactagaccccagatgaggatc

SEQ ID NO: 1010371 - DNA, 120 bp, Artificial Sequence
  ENSG00000253301_19 (sequence is synthesized)
tgacggtgaaaacacgacacctctgatgaagatatatagtagccagttatttcagcatgagatggatttggtttaaatacatagaataaaaatggatttatttcattgaaatgtaactaa

SEQ ID NO: 1010372 - DNA, 120 bp, Artificial Sequence
  ENSG00000253301_20 (sequence is synthesized)
agaggcaggggagctgtcactcgcggcgagccgggcggcggccagggcgcaaagttgagagcagtctctagtctgagcctttcagtcgccttccagtatcatcagtaccacgggctccac

SEQ ID NO: 1010373 - DNA, 120 bp, Artificial Sequence
  ENSG00000253301_21 (sequence is synthesized)
cttgctgcggcccctcagcaacccagtgcacctgccactcgaccagatctggaggctggaactctgagatctgggtgccagcatgattgggttccagtgaggactctcttcctggcttgc

SEQ ID NO: 1010374 - DNA, 120 bp, Artificial Sequence
  ENSG00000253301_22 (sequence is synthesized)
agaggggcacagtcccctttcctagagggaaagcagtcaggagtgggaggcctctgaacaagctgtattttgtgtagccgccagcttccatctttctccaggcagaacgctggccctcag

SEQ ID NO: 1010375 - DNA, 120 bp, Artificial Sequence
  ENSG00000253301_23 (sequence is synthesized)
cctggaagcatctggagaagggcatggctgtgagtagagaaacagaggatacaggctaaagcaggaggaagcgagaggactcacggaaagccttgctgcactctccaaaagagctgccct

SEQ ID NO: 1010376 - DNA, 120 bp, Artificial Sequence
  ENSG00000253301_24 (sequence is synthesized)
tttcacgtgaagagctatgtgatcggatccccggtttggcagagtagacatgcgagaagactgaacgtttcatcgttgaaacctcttaaaggtggaatgtgtggcagaaagaacgtctga

SEQ ID NO: 1010377 - DNA, 120 bp, Artificial Sequence
  ENSG00000253301_25 (sequence is synthesized)
gaagctcacgcgatttgcagaaggaacatttgtagaagattccctgttttccgaaggaatgtcaagttccaaaggacacatattgcttgtctctgaacttctcagctgcctgcagatctt

SEQ ID NO: 1010378 - DNA, 120 bp, Artificial Sequence
  ENSG00000253301_26 (sequence is synthesized)
cctgtttttcagctgcagttagggtttgtctgaggagaagcataacatccctccaggcttaccctggttgctcagtgaagaataaagtacagggaacatgagagaatacatgggagatca

SEQ ID NO: 1010379 - DNA, 120 bp, Artificial Sequence
  ENSG00000253301_27 (sequence is synthesized)
gtgttttggatgtaattaagtaactgtataaaactaagtatgttttttctcctttccccagtgactggaaaactttcatacttttaaggtaataataaaataataatctttaaagagcaa

SEQ ID NO: 1010380 - DNA, 120 bp, Artificial Sequence
  ENSG00000253301_28 (sequence is synthesized)
ctgccgctgtcctgtctgactcctcctgttttgaagcagccccaattgaaaccagctccacctgtgatcctaggaagagagagcatcttctctgggaagaaatgccctggggaagactct

SEQ ID NO: 1010381 - DNA, 120 bp, Artificial Sequence
  ENSG00000253301_29 (sequence is synthesized)
tggtcatggggactgggcgctgtgacaggacttcgtgaactacatggattgtagctgttggggtgacaacatatccatacttcatcttgataagacatatcatttgatggttgaaagctg

SEQ ID NO: 1010382 - DNA, 120 bp, Artificial Sequence
  ENSG00000253301_30 (sequence is synthesized)
taattattttaagataatacacaatagattttaatagctttatcaagatataattcacataccataggacttacccatttaaagtgtacagttcaatggttttaatgtattcacagttgt

SEQ ID NO: 1010383 - DNA, 120 bp, Artificial Sequence
  ENSG00000253301_31 (sequence is synthesized)
gcagctatcaccactgtctaatctgtaacatttccatcaccaaaagaaactttgcacctattagcagtcactccccatttttcccaagcccctcagccttaagcaaccactcatctactt

SEQ ID NO: 1010384 - DNA, 120 bp, Artificial Sequence
  ENSG00000253301_32 (sequence is synthesized)
tctgtctctatagatttgcctatttcagacattttgtatgagtgggaatcatacgacatgcggtcttttgtgtctgacttctttcattagcatgttttcaaggtttgtctatctttgcat

SEQ ID NO: 1010385 - DNA, 120 bp, Artificial Sequence
  ENSG00000253301_33 (sequence is synthesized)
atcatcatgcatttcttattattgccaaacattccattatatggatataccacattttatttgtctgtctgttgatggacatttgggttgttttcacattttcgcaattatgaataatgc

SEQ ID NO: 1010386 - DNA, 120 bp, Artificial Sequence
  ENSG00000253301_34 (sequence is synthesized)
cactgtgaacatttgtgtagaagcttaagttttcagttcttttgtgtgtatacctggtagtggaattgctgggtcataggataactgtgcctaacattttgaggagctgttttcaaagtg

SEQ ID NO: 1010387 - DNA, 120 bp, Artificial Sequence
  ENSG00000253301_35 (sequence is synthesized)
actgtaccattttacattctcaccatcaatgtgtgatggttccagtttctttacattaaataatggcctgtttacttgtcttcttgccttgtattggagttctcccagtgggttctgaat

SEQ ID NO: 1010388 - DNA, 120 bp, Artificial Sequence
  ENSG00000253301_36 (sequence is synthesized)
ccagatccctggtttggcagaggagacatgcgagaagacggaacgttttggccgaggagacatctggcagggtggaacggagggaacaggtgtggcagagagaatatctgagaagctcgc

SEQ ID NO: 1010389 - DNA, 120 bp, Artificial Sequence
  ENSG00000253301_37 (sequence is synthesized)
aggattcccagaaggagcactgggagtagattgcctgttttcccgaaggaacggcaagttccaaagcgagaaagaagaaattccgtggatagggagccagccaggtttcctgcagagatt

SEQ ID NO: 1010390 - DNA, 120 bp, Artificial Sequence
  ENSG00000253301_38 (sequence is synthesized)
cacgggaagcttttgagcaggggagtcagaagatgagcgattctcacagtagacgaggagcctgtttttcagctagctgctgcaaggagctggacatttctcccttcaaataggacctgg

SEQ ID NO: 1010391 - DNA, 120 bp, Artificial Sequence
  ENSG00000253301_39 (sequence is synthesized)
ttacattggattaaccagagggaagaaagtagatggataggaaaggagaaggcaggcttagccaagccaaagaaagagactagactcaggaggcactgggagaaaaaggaactctgtcaa

SEQ ID NO: 1010392 - DNA, 120 bp, Artificial Sequence
  ENSG00000253301_40 (sequence is synthesized)
agaagagtaccattatagtttgaagagagctgagaggctgttaagtcccccatgtcgttcctaatccaaaaacacccgatcctaaacactataatcctgaatgttgaaatcctgaaacat

SEQ ID NO: 1010393 - DNA, 120 bp, Artificial Sequence
  ENSG00000253301_41 (sequence is synthesized)
caaaatccctaagtctaaaatccttatctaacatccagaagatcactatcacaggacagttgcaccatggtattgcatcatgttaaatgtaattatttccttgtttactctttattcgga

SEQ ID NO: 1010394 - DNA, 120 bp, Artificial Sequence
  ENSG00000253301_42 (sequence is synthesized)
aattaagcatggctaagaaggtatgtagaggtgccaagtcaacaaggggtggacccatggacttaattttaggtgtcaacttggctgggttaaggaatgtctggaaacttggtaaagcat

SEQ ID NO: 1010395 - DNA, 120 bp, Artificial Sequence
  ENSG00000253301_43 (sequence is synthesized)
tattttgggtatgcctcgagggtgttctcagaaaagattaatgtgtaggtctgagtggactaggtgggaaagatctgtcaatgtctggaatatagaaaaagtgaaaatgaaggtaaaaaa

SEQ ID NO: 1010396 - DNA, 120 bp, Artificial Sequence
  ENSG00000253301_44 (sequence is synthesized)
tgtgggcagtgtttacttcatgtctgctttgctggcgggccaagtagcaacagctgcagtcggcgtgttctctgaagcgagaaagaagaaattccgtggatagggagccagccaggtttc

SEQ ID NO: 1010397 - DNA, 120 bp, Artificial Sequence
  ENSG00000253301_45 (sequence is synthesized)
cgggatccgtggtttggcagaggagacatgcgagaagacggaacgttttgtccgaatagacatctggcagggtggaacggagagaacaggtatggtggagagaacgtctgagaaggtcgc

SEQ ID NO: 1010398 - DNA, 120 bp, Artificial Sequence
  ENSG00000253301_46 (sequence is synthesized)
cgagtagcaacagctgcagttggtgtgttctctgaaggcagtatccgaaggctggaggggttgcttttcttcccaggtgtcttttgaagaggcagtcaagtcagcagctcgcggtgaact

SEQ ID NO: 1010399 - DNA, 120 bp, Artificial Sequence
  ENSG00000253301_47 (sequence is synthesized)
tctgcgagaaagaagaaagaaattccgtggatagggagccagccaggtttcctgcagaaaatcatgggaagcttttgagcaggggagtcagaagatgagcgggctccgggatgtctcgtt

SEQ ID NO: 1010400 - DNA, 120 bp, Artificial Sequence
  ENSG00000253301_48 (sequence is synthesized)
cttactgtgtccctgccaaccctggtcccatctcgtcatgatcacccactgcagaagagaggaggttctcacagtagacgaggagcctgtttttcagctagctgccacaagggggctgga

SEQ ID NO: 1010401 - DNA, 120 bp, Artificial Sequence
  ENSG00000253301_49 (sequence is synthesized)
aatttctcccttcagagtggacctggaaggcttggaagcatctggagaagggcatggccacgagtagagaaatccaggctacaggcagaagtgggaggaagcgagagaggaagactcatg

SEQ ID NO: 1010402 - DNA, 120 bp, Artificial Sequence
  ENSG00000253301_50 (sequence is synthesized)
tgcttttccggtggactgagtagcaacagctgcagttggcgtgttgtctgaaggcagtatctgaagtgtggatgggttggtcttcttcccaggtgtcttttcaacaggcagtcaagtctg

SEQ ID NO: 1010403 - DNA, 120 bp, Artificial Sequence
  ENSG00000253301_51 (sequence is synthesized)
agaaatgatgaagaggcccagtcacagatgcaggaggaagtttaattgactgaatttgtctaggatgggagggattaaatgaggtttgaaatgaaatagaaattgctaaactcctgacta

SEQ ID NO: 1010404 - DNA, 120 bp, Artificial Sequence
  ENSG00000253301_52 (sequence is synthesized)
gacaattactgccatccatctcttacatgtgcccctaaataagcactaacagtgccttgggcagagaccccagtgactacctaatagtagccttcaagagcatcacttcccactctcctg

SEQ ID NO: 1010405 - DNA, 120 bp, Artificial Sequence
  ENSG00000253301_53 (sequence is synthesized)
ccctgcctcactttcctcctaggtcttatgggatggatgatagatgtcattccctggttccctaacgctcaagtctagcccctcatttcctggcaagcatcaagcttgattgtgtctgta

SEQ ID NO: 1010406 - DNA, 120 bp, Artificial Sequence
  ENSG00000253301_54 (sequence is synthesized)
acctctcagaagtcagacctcagaagtgtgcttttctgggaaatcggggtcagggaggaaagaaggagggaataaagacattgtaatagatttatatatatcattgtaactcatccacac

SEQ ID NO: 1010407 - DNA, 120 bp, Artificial Sequence
  ENSG00000253301_55 (sequence is synthesized)
aacaatcctgtaaggtgtggccactgtactcagaaaactgaggctcaaagagattgagtaacttaccaaaacttcacatgtactaaaagtggagcctagatttcaaacacctgtaagact

SEQ ID NO: 1010408 - DNA, 120 bp, Artificial Sequence
  ENSG00000253301_56 (sequence is synthesized)
ctgaaatctatattagctcttctatacatgagcctaaaatgcaactgtaaaccaataagactgacttcctcttgaggcttatcactagctctgaatagaagcattcccaaatgctgtcta

SEQ ID NO: 1010409 - DNA, 120 bp, Artificial Sequence
  ENSG00000253301_57 (sequence is synthesized)
agcaattgttgcgtcatgggaataagttgataaattctcagggttacatactcctttagatgcactggaacttttctcagtatgtagaatcaagtgtaaggaaaaaggatttgaagggga

SEQ ID NO: 1010410 - DNA, 120 bp, Artificial Sequence
  ENSG00000253301_58 (sequence is synthesized)
aggggagaaataaaacaggactgagccttacacgtgttgaccagaacagataatgtttggattttctttacttttttcccagagaaatcgaataaagaagtttgtttctgttacctaaaa

SEQ ID NO: 1010411 - DNA, 120 bp, Artificial Sequence
  ENSG00000253301_59 (sequence is synthesized)
ctaagaagataatcagaaaagtttacaaagatgaatagaaaagaagagtcactgcagccttatttgtaaaagtgaaaaatagcaacagcccaaatgtcatgaatggagaattaatatatg

SEQ ID NO: 1010412 - DNA, 120 bp, Artificial Sequence
  ENSG00000253301_60 (sequence is synthesized)
gtgcatccatacaaaaatactgtgcagcgagtaagccaatgaagcccaaaatttctgacatggacattgacatagcagagtgacaataacgaggttataaaacatcatcagtgaaaggtc

SEQ ID NO: 1010413 - DNA, 120 bp, Artificial Sequence
  ENSG00000253301_61 (sequence is synthesized)
gtgaaagcaaggataaatcaagatgcctcttggcatgaaactttactggacaaccttgaagtcatgccagtacccagtctgctgagaccaatgctcaatagacatttcagcacaggaagc

SEQ ID NO: 1010414 - DNA, 120 bp, Artificial Sequence
  ENSG00000253301_62 (sequence is synthesized)
ctcttaaatcccttcaaaggaaaatgggtgtcatgaaaatgtcaagcctggccttctcactacttactcaaaaagtacttcctaagcgcctactttgagtcacatctgggtcacaggaaa

SEQ ID NO: 1010415 - DNA, 120 bp, Artificial Sequence
  ENSG00000253301_63 (sequence is synthesized)
gtgtggtggaaagtctgcacatggcccagaaagctccttcagctccaacattcagaacctgcctgcctgccttctgagtatcccaagggcactgtctgactctttcatacccaccatttg

SEQ ID NO: 1010416 - DNA, 120 bp, Artificial Sequence
  ENSG00000253301_64 (sequence is synthesized)
tctccctggacttcttgctaaatccctgtcttcacttcctcacttagggaattcatgccagctctctgacttgatctatgaccctgctcatcactgtaggagaaaaaaaaaaaaatacaa

SEQ ID NO: 1010417 - DNA, 120 bp, Artificial Sequence
  ENSG00000253301_65 (sequence is synthesized)
agcctcctgctcaagagtaaaggaccggtctgaaacctacaagaacagggtctccctgttgcgcaggctggtcttgaagtattgagcccaagtgatcctcctgtctcagcctcccaaagt

SEQ ID NO: 1010418 - DNA, 120 bp, Artificial Sequence
  ENSG00000253301_66 (sequence is synthesized)
gaagaaacctctgtcagacgtgaacgtgtgacagaagggccatccaggaagattgcacactgggcagaaagaagacttaagaacattgcatggacagcagaaggagtgcttcgggagatt

SEQ ID NO: 1010419 - DNA, 120 bp, Artificial Sequence
  ENSG00000253301_67 (sequence is synthesized)
gcctggtgggcgccaggaacacctgagatgatgtcatggcaaacagtggaaatgagagaaagatgatggagctgctaaaccttgcccattttgatctgttatgtgagacttgcctttcgc

SEQ ID NO: 1010420 - DNA, 120 bp, Artificial Sequence
  ENSG00000253301_68 (sequence is synthesized)
attcctccttcaggagctggggtgggttgagggaacgataaagatcctgataaccttgcatttctccagcgagaaagaagaaattccgtggatagggagccagccaggtttcctgcagag

SEQ ID NO: 1010421 - DNA, 120 bp, Artificial Sequence
  ENSG00000253300_0 (sequence is synthesized)
ctttcacctcctttcccccctttctgctcctccctctctctctcattccctagtcttttgcaccctttctctctgcctgctagtggagtcaccatgacaacggcctccatgacaattaca

SEQ ID NO: 1010422 - DNA, 120 bp, Artificial Sequence
  ENSG00000253300_1 (sequence is synthesized)
gcccaggcagcagtgcctcttcccatgaggcactccaatactcacttggaatttgctccctgatttcatggcccaggcagtgaatttgcctcactccccaagtttccacaaggccacagg

SEQ ID NO: 1010423 - DNA, 120 bp, Artificial Sequence
  ENSG00000253300_2 (sequence is synthesized)
catcttcctcttctctgatggaacacaaaggactccagcaaaaacatctgctaagcacctaatatataccaagcttcaatcctggctttggatacacatggatggttaatgactttggga

SEQ ID NO: 1010424 - DNA, 120 bp, Artificial Sequence
  ENSG00000253300_3 (sequence is synthesized)
tctcttaatttaggagaactattatctggacttcatgaacaaaatcacagtacttaaaagtcacgaattaattatcttcatctctgatgcccagatggacattacaactctgagttatgg

SEQ ID NO: 1010425 - DNA, 120 bp, Artificial Sequence
  ENSG00000253300_4 (sequence is synthesized)
agagggggaactgaagctctcatcttcctcttctctgatggaacacaaaggactccagcaagctatacaggaagcatggaagcatagcagctgcttcttctgggaaggcctcaggaagct

SEQ ID NO: 1010426 - DNA, 120 bp, Artificial Sequence
  ENSG00000253300_5 (sequence is synthesized)
ttcaatcacgacagaaggcaaaggtggagccaacacttcacatgtccagagcaggaggaagacagagagccgggaggtgccattttaaacaaccagatctcagaagaacttactgtcacc

SEQ ID NO: 1010427 - DNA, 120 bp, Artificial Sequence
  ENSG00000253300_6 (sequence is synthesized)
acaaaatcaccaagggggatggtgttaaaccatgagaaaaccacctacacggcccaatcacctccaaccagcactggggatgacaatttaacaggagatttgggcagggacacagaccca

SEQ ID NO: 1010428 - DNA, 120 bp, Artificial Sequence
  ENSG00000253300_7 (sequence is synthesized)
tcattcactgtcactgtacctgggagaaataccaaaacaactttactaaaacttactaagatactattattgtgcccattaattgttttccagggagatgcacattttttagcacaaaat

SEQ ID NO: 1010429 - DNA, 120 bp, Artificial Sequence
  ENSG00000253300_8 (sequence is synthesized)
gcccagatagaattggtaaaactgaaaatattaattttaatacgtctttaacaatgtaatgttttaccaaaaacttctcttatctcatcctattctttaaatataaacttagctcacttg

SEQ ID NO: 1010430 - DNA, 120 bp, Artificial Sequence
  ENSG00000253300_9 (sequence is synthesized)
caaatggggccatgtctgccatataacctagttagtaacatcagtcacgactatcaaattatcagcccaatcagagtcactttatgtcataaaatgtctgacttcatttttgaatttaag

SEQ ID NO: 1010431 - DNA, 120 bp, Artificial Sequence
  ENSG00000253300_10 (sequence is synthesized)
taaatggactaatagacgtttcagaaatattgttaaaaattactcaaccatatatcgtggaacttgtgttttttaaggtagcatactaaaagcagtcaaatcaagattatgctgatacaa

SEQ ID NO: 1010432 - DNA, 120 bp, Artificial Sequence
  ENSG00000253300_11 (sequence is synthesized)
agcgaatatagtctattcatataatttataaaaacaacaaacacttatgctgcttctcactacttaatttgaagtaatgcagtgtaatctgcagcaaatatgtgttatttatggaccaag

SEQ ID NO: 1010433 - DNA, 120 bp, Artificial Sequence
  ENSG00000253300_12 (sequence is synthesized)
aagtataaaactctcgttagtcctttggtaaatatgggtgcatgtatgaattgaatctgtctctcagcttttgaaaatcattaaatcacaattatgaataaaatttcagaaataatgcca

SEQ ID NO: 1010434 - DNA, 120 bp, Artificial Sequence
  ENSG00000253307_0 (sequence is synthesized)
gcaggtgggcatgaaaacacggaaattcacagacacacaggtgggcatgaaaacacggaaattcacagacacgcaggtgggcatgaaaacacggaaattcacagacccgcaggtgggcgt

SEQ ID NO: 1010435 - DNA, 120 bp, Artificial Sequence
  ENSG00000253307_1 (sequence is synthesized)
ttcacagacgcgcaggtgggcgtgaaaacacggaaattaacagagacgcacaggttggcatgaccaggctcgcatgggcaagatgtggtgtctcttccagattaccgggcagcagagcgg

SEQ ID NO: 1010436 - DNA, 120 bp, Artificial Sequence
  ENSG00000253308_0 (sequence is synthesized)
ctagcaaagccccagcttttacaggttattcgcggcacggctcgagaaggaaggtaaattccgagagcaagtgaagccctgcacaaccccattaagcctgggcaatcccatgacagcgga

SEQ ID NO: 1010437 - DNA, 120 bp, Artificial Sequence
  ENSG00000253308_1 (sequence is synthesized)
gagggggtgatagcagctgaggtggaggccgctccaggcccggcggcttctcatttctcgcggcgggggacacccatcccccacctgccacacggcaggccccccgtcccttcccccgct

SEQ ID NO: 1010438 - DNA, 120 bp, Artificial Sequence
  ENSG00000253308_2 (sequence is synthesized)
ggggcgacgggctccggtccagccggctcctctcggattgaaattctccggacttcaaaagctcccagcttggcttccgccggggctgggctggcctggcccgggccggaggggggtggg

SEQ ID NO: 1010439 - DNA, 120 bp, Artificial Sequence
  ENSG00000253308_3 (sequence is synthesized)
ggtcgttttaaatggaatcggaagccgggcataggcccccagacgcgcgggtcagctggaacagcttcgctcctgaagaaaaccgggctcggaaaagcggcgcgtgtggggcctgcctcc

SEQ ID NO: 1010440 - DNA, 120 bp, Artificial Sequence
  ENSG00000253308_4 (sequence is synthesized)
gcagtctgcccgcccggctcgggggagatggcccgcggccccgatcaccctccccagcctgcagcgggcctttcaacggcgacagggccccgagaagggagagagcgaggagtcctgagc

SEQ ID NO: 1010441 - DNA, 120 bp, Artificial Sequence
  ENSG00000253308_5 (sequence is synthesized)
cgggggccaggagctggcttgtcggctcaggtgtcggtgaaaatgtgatcaggaaaaaaatgttttcgcttctctttggttaaaaagtaagaacaaagggagcttccttctaaacaataa

SEQ ID NO: 1010442 - DNA, 120 bp, Artificial Sequence
  ENSG00000257410_0 (sequence is synthesized)
atagctacctaaaattttattatatgcatgcatagtaattgattttactattcccctactggtgtcaatttacaaacaatactgcattgaaaaacgttgtacaaactcatttccttcata

SEQ ID NO: 1010443 - DNA, 120 bp, Artificial Sequence
  ENSG00000257410_1 (sequence is synthesized)
cataagcatatttacaggatatattccaagaagtgaaactgctaggtcaaaagaaaagacaattttgattgctgttgcccaattgccctccagatcagtcagctttcaatgcaggaaaca

SEQ ID NO: 1010444 - DNA, 120 bp, Artificial Sequence
  ENSG00000257410_2 (sequence is synthesized)
gaagccattatagatattttaaacaggaaggcactttttaaatggaatttggtgcttataaagttactggaagggttgaaggagcagggtttaggaatctaagttgagcctatgggaatg

SEQ ID NO: 1010445 - DNA, 120 bp, Artificial Sequence
  ENSG00000257410_3 (sequence is synthesized)
aatcccacagtgacacaaacatgattcactgggggaactacaacctctggtcaccatggagccctgctgggaaccagaggccagccactacaacctttcactcctgggaagctggagaaa

SEQ ID NO: 1010446 - DNA, 120 bp, Artificial Sequence
  ENSG00000257410_4 (sequence is synthesized)
gaagatgtaacaccacaatctaggggttggaatgtcagattaagaagctgctgccaccaccacagcctatccatattcaggaagctgaacgatagacacttgatcactgctgcatggaaa

SEQ ID NO: 1010447 - DNA, 120 bp, Artificial Sequence
  ENSG00000257410_5 (sequence is synthesized)
tcagactgcccccccatctgcataaaaagttctgggtaacagtttaataatttctcagcctctgcaacttgaagagtacattgggtaaataaattcagaattcactgtcatccttagcgg

SEQ ID NO: 1010448 - DNA, 120 bp, Artificial Sequence
  ENSG00000257410_6 (sequence is synthesized)
ttgttccagtttacccctctatcagcaaaaatacttgttccctccattcttaccaataatatctagaatattacaatgttttataaaactaaaaagtctttcttgattaataggttaaaa

SEQ ID NO: 1010449 - DNA, 120 bp, Artificial Sequence
  ENSG00000257410_7 (sequence is synthesized)
aactggtatctcagtatagttttgtcttatacttctcttagtaataaagttgaactttttttccggcttgaatcattttattcttttctgtgaaaactgtttacaattttgtaccttttt

SEQ ID NO: 1010450 - DNA, 120 bp, Artificial Sequence
  ENSG00000257410_8 (sequence is synthesized)
ctttttggatcattggactttttcatttctaggtgttctttataaattaagcaatgcatgatatgatttgaaaatattttttccaaatttgtcatttttctttagactatgcttatggtg

SEQ ID NO: 1010451 - DNA, 120 bp, Artificial Sequence
  ENSG00000257410_9 (sequence is synthesized)
gttttttgctgtgaggaatttattttatatagtgatataatttattgttatatgttgggcatggtgcctcacacctataatcccagcactttggcaggtcgaggtgggcagatcacttga

SEQ ID NO: 1010452 - DNA, 77 bp, Artificial Sequence
  ENSG00000257410_10 (sequence is synthesized)
ggtcaggaattcaagaccagactggccaacacttagtcttagcagagcagcaaatgtcagcctcaaggcaacatacc

SEQ ID NO: 1010453 - DNA, 120 bp, Artificial Sequence
  ENSG00000205174_0 (sequence is synthesized)
cagaaaacatatgttgatcccaaacatgcaatgacatccatataaaccttgcaaaatgatggctgtgatgacacccagtgatggtctttctcaactctctgtacctcatctcactcatca

SEQ ID NO: 1010454 - DNA, 120 bp, Artificial Sequence
  ENSG00000205174_1 (sequence is synthesized)
ccttctcaagtgtttttatgccctggacccattgcatccagtgatgtcagaggaattctcagctcaatatcgtcacatgatggatcagagatacagaactagaattcatgagggatacat

SEQ ID NO: 1010455 - DNA, 120 bp, Artificial Sequence
  ENSG00000205174_2 (sequence is synthesized)
atctcaagtgaaaggtgcatatctacggattgtccacaagaaaccaatcagttatgcaaaatcttttccaaaggaaatgggaaattaaggaaaaaagtgaataaaactttacaaaaatga

SEQ ID NO: 1010456 - DNA, 120 bp, Artificial Sequence
  ENSG00000245008_0 (sequence is synthesized)
ggtggtgctccacacctctctgtttctcacaactcacattcgtcagcgaagcctgttggatctgcttacaactctctggggcagccagcggcttctggctcctcatggcccccctgccag

SEQ ID NO: 1010457 - DNA, 120 bp, Artificial Sequence
  ENSG00000245008_1 (sequence is synthesized)
gatgagccccggctctgcctccctgggagttctgcagtggctctgtcgcccttctcaataccttcttgatgctattcctgctttcctgtcagctgcgtgtcctccaaagaagccagagca

SEQ ID NO: 1010458 - DNA, 120 bp, Artificial Sequence
  ENSG00000245008_2 (sequence is synthesized)
gagagaccatgattctcttctttcctccccgtcttcaaatcttttctcaaataccagctcttcaatatgcctgccttgaccactctgtgaggtggcagcatgctcctccgcccctcccaa

SEQ ID NO: 1010459 - DNA, 120 bp, Artificial Sequence
  ENSG00000245008_3 (sequence is synthesized)
atggtttgtcgtctgtcttccctcaccaggtcgcaagctctactttgagtctcaagagccttgtgacacatggcaggtgctctggagtggacacagcactgccacttttgacagctgtcc

SEQ ID NO: 1010460 - DNA, 120 bp, Artificial Sequence
  ENSG00000245008_4 (sequence is synthesized)
cctttgtcaccctcaggttgtgacccaaatgtcccttcctcaaggacggtcctgggcagagccggccccccctctgccaccctactgctctgtcccagcaccatctttcagaggtcgtca

SEQ ID NO: 1010461 - DNA, 120 bp, Artificial Sequence
  ENSG00000245008_5 (sequence is synthesized)
tcagcacttgtgaatgcacatttgcctcatgctcacgtgtttattgtccgtctcctacacccgcacccccagtcacagtgtttacttcattctctagggtcttcctagtgcttggcatag

SEQ ID NO: 1010462 - DNA, 120 bp, Artificial Sequence
  ENSG00000245008_6 (sequence is synthesized)
acctgcacggaatagacatgaattaagtaaatatttgttcactaactgggaagcactttatatatactcttgtatttgatgatcacagccatcctgtaaaatgagtattatttaaatgcc

SEQ ID NO: 1010463 - DNA, 120 bp, Artificial Sequence
  ENSG00000245008_7 (sequence is synthesized)
ctcttaccccagccatgtaatttgcacatcgttttatattttctattgggaaatcacaaagcatctaaaaggcaagcagtggttctcaagctgcagccaaagaaacaccagaggctttcg

SEQ ID NO: 1010464 - DNA, 120 bp, Artificial Sequence
  ENSG00000245008_8 (sequence is synthesized)
cacaatccctttttcctgaagccaactctgctgaggatgtgatgtggatacggatgtccgggaagctggtgtcggtggcgggctgtgttctcaggcccagggacgctgtggcagggactg

SEQ ID NO: 1010465 - DNA, 120 bp, Artificial Sequence
  ENSG00000245008_9 (sequence is synthesized)
gatgggaatgcagcagggccgtgtattagctgtgcagccttgggaaaagtacttcattgttctgagcctcattttcttatttgtctgttctgattgcctttcagtgacaccatagagatt

SEQ ID NO: 1010466 - DNA, 120 bp, Artificial Sequence
  ENSG00000245008_10 (sequence is synthesized)
atttttcagcttgctcctctgtgaggatcaaatctattgaagtatctaaagtacctggcacagggtcctgcacatacacctcatttaaatgatcaagtacatactaagcagctcatgttc

SEQ ID NO: 1010467 - DNA, 120 bp, Artificial Sequence
  ENSG00000245008_11 (sequence is synthesized)
tcagggggcctgggtctgcgccagagaacagaagggccggcagccaggcctctgtccccaagagctggggcgcacattaaagcctgtcatggctcaggaactgggcccgctgcgctgggc

SEQ ID NO: 1010468 - DNA, 120 bp, Artificial Sequence
  ENSG00000245008_12 (sequence is synthesized)
atctggatgttcttagatctctgtctggattccttctgcttgtcttgtggaattacttatcagcagcaggcagaccagaccctgggctttcctccccacatggcccagccccaggccttc

SEQ ID NO: 1010469 - DNA, 120 bp, Artificial Sequence
  ENSG00000245008_13 (sequence is synthesized)
ctatccgtaaacactagtgcaggggatgggggagttgcttcaggacctgtggatgaggcttccctgtgtgctcctcggccccctacggcagctgctgctgtctctgtacaaaagcaggac

SEQ ID NO: 1010470 - DNA, 120 bp, Artificial Sequence
  ENSG00000245008_14 (sequence is synthesized)
ctccagcctgtgcccagctgccctcagcaacctgcatcttcagatgagagatgtgtaggaatcagaagggaatttcaaaattatttgaaaagtgtgactgttgagggctgtcacttgtat

SEQ ID NO: 1010471 - DNA, 120 bp, Artificial Sequence
  ENSG00000245008_15 (sequence is synthesized)
ctactccctggaccatttttcccccacaatactcctgttatcacccccttccctccagggttgattccacttttctttggttagacccatggtgacatccctttgcgcttgtgaatccga

SEQ ID NO: 1010472 - DNA, 120 bp, Artificial Sequence
  ENSG00000245008_16 (sequence is synthesized)
aacactagccgccaggagcgttgcttctcaacctaggattcccgagggtctgtgccactctcatctggccaggagcgccctagcttgagatccacgagccgagagtagggcccacttcca

SEQ ID NO: 1010473 - DNA, 120 bp, Artificial Sequence
  ENSG00000245008_17 (sequence is synthesized)
cccctacccctttttcccggggaaagggaaaagggaccataggcccgggtggggtagaagctgggggtcatcacctgtttaaagacgctgccatgtcttaccttgatgtaagacgacgtg

SEQ ID NO: 1010474 - DNA, 120 bp, Artificial Sequence
  ENSG00000245008_18 (sequence is synthesized)
tcggggactgtctgaaacatcgtgggtagctaagggtcgggaacgcccaagaaccagcctgggagggagaagcctcggttacccgcgagtggagcgagggagagacggtgggatggtgat

SEQ ID NO: 1010475 - DNA, 120 bp, Artificial Sequence
  ENSG00000245008_19 (sequence is synthesized)
gaagtggggatgcagatggagagactgtaggggtttgggaagctcagatccgcctagtccggcgagggagggtccgagtggttgggtgttgagcactctccctacgcctcagtcccgtcc

SEQ ID NO: 1010476 - DNA, 120 bp, Artificial Sequence
  ENSG00000245008_20 (sequence is synthesized)
ccgggcttcaggccaggggacggtgagaactgagagccacctcacaccattgggtctcctccctacagtccttttactctcccctgcccgaaatcagactgccgcctcccccagggcctg

SEQ ID NO: 1010477 - DNA, 120 bp, Artificial Sequence
  ENSG00000245008_21 (sequence is synthesized)
ggcagtttcgaactggggatgcccgcagcttgttctggaaaccaggatgttctagttcttggtgcgtgttgaggagagaacgcgaccaggacagaggaggatatggccaactccctttgt

SEQ ID NO: 1010478 - DNA, 120 bp, Artificial Sequence
  ENSG00000245008_22 (sequence is synthesized)
cacctggagccttcaattcaccggaagaaaattgctgaaattggcaacagctgccatgaaacaggagcaagagagaggcagctgggggcagggaggactcattaaagccaacttacccct

SEQ ID NO: 1010479 - DNA, 120 bp, Artificial Sequence
  ENSG00000245008_23 (sequence is synthesized)
gagactctcgtgtggaggttacagcagcaagagattggaatccaagaagggcactccagtaggagagcaggagaagatatctgggcagtgcccctctgaatcatccatgcactccatcat

SEQ ID NO: 1010480 - DNA, 120 bp, Artificial Sequence
  ENSG00000245008_24 (sequence is synthesized)
tctgagcaagacaattaggacttagcttccttctttggcaaatgagagggctacattatatcatcatgaaatactttcaaatttgaacatgctatacttctgtaagattatttagcccgg

SEQ ID NO: 1010481 - DNA, 120 bp, Artificial Sequence
  ENSG00000245008_25 (sequence is synthesized)
ggaaaggatatgaacataaggcaaattaatgttctaggattaggaactttgggttccagtcttggttgtgctcctgatgacgggcactatgggctgaattttatcacttccaaattcaca

SEQ ID NO: 1010482 - DNA, 120 bp, Artificial Sequence
  ENSG00000245008_26 (sequence is synthesized)
agttgaagccctaagctccaatacttcagaatgtgacgctgatgggatacagggccttagaaagggtgaacaaggtaaaatgagatcatagggtgggccattatccactatgactggtgt

SEQ ID NO: 1010483 - DNA, 120 bp, Artificial Sequence
  ENSG00000245008_27 (sequence is synthesized)
ccttataagaagaggagattaggtcacagacatgtgcgattacagaggaaagcccgtgtgagcacacagtgcaaaagcagccaccgactagccaagaagggagacctcagaagacatcaa

SEQ ID NO: 1010484 - DNA, 120 bp, Artificial Sequence
  ENSG00000245008_28 (sequence is synthesized)
cttgctgataacttgatcatggactttcagcctccagaacttcgaggaaatcaatttctgatgctccagccacgaaatctatggtactctgtatggcagctctagtaaaccaatacaact

SEQ ID NO: 1010485 - DNA, 120 bp, Artificial Sequence
  ENSG00000245008_29 (sequence is synthesized)
gtggaataatattttgccatgatttggtttctccaagtaagtaaaagggaataaacaatggtgactcgtttcactcaacccttctagaacctactctgatgatcagtatctattatgaac

SEQ ID NO: 1010486 - DNA, 120 bp, Artificial Sequence
  ENSG00000245008_30 (sequence is synthesized)
ccacaatgtgttttgttttgtttgttttgctttgccatgtgtggctttgtgtataaagcaaagcagtgctcctgtctttatggttcttttcactccacataaaatccaaaaccaccctga

SEQ ID NO: 1010487 - DNA, 79 bp, Artificial Sequence
  ENSG00000245008_31 (sequence is synthesized)
agattgtaaacagaattctacctcttcgccaacactgtgaccagcaccccaggatccacttattgggaacaggttcctg

SEQ ID NO: 1010488 - DNA, 120 bp, Artificial Sequence
  ENSG00000245008_32 (sequence is synthesized)
catacattaagtgtgggagagagctatcctgctcaaaagagagtgctccccattctgacacatctggaaatcatctggcaaatgtcttctgaccgtctctgagtgaaaaagccttcgagt

SEQ ID NO: 1010489 - DNA, 120 bp, Artificial Sequence
  ENSG00000245008_33 (sequence is synthesized)
gaagcttacagagctgccaacactcgcccctcagtgcacagacctgcttgacttcctcaccaccctttctctgccagcatccagctgcgctgctcttccctgctggtggcccggggacgg

SEQ ID NO: 1010490 - DNA, 120 bp, Artificial Sequence
  ENSG00000277987_0 (sequence is synthesized)
gggttcccagatgccgtcagtggaattcccaaccttggaggacagagaaattgctctccaataatgcccagtctaagaagtaatgttttcacgaagaactagtgcaccttcagaagacct

SEQ ID NO: 1010491 - DNA, 120 bp, Artificial Sequence
  ENSG00000277987_1 (sequence is synthesized)
gcagtggatagggagtatgtaaggggctaattttgatgccagcaaccctaggattggttgctggggaaaggcatagaggtaagctgctagcccgagctgagctgtttcctccatagtgct

SEQ ID NO: 1010492 - DNA, 120 bp, Artificial Sequence
  ENSG00000277987_2 (sequence is synthesized)
gctaacaaggctctgcttgatctcagtcctctgctgtgtggctccccaccatgaaggcgagtctgacttgtgtacacaaggttgagaatccccaggctccaattgcacagaaacgtgggc

SEQ ID NO: 1010493 - DNA, 120 bp, Artificial Sequence
  ENSG00000277987_3 (sequence is synthesized)
aggtgtcataattagccatttcctgccaaaaccccacaaataagctacaatcctcgagacaaccctctggaaccttttacagaattgtttgcagaccaaataatattcatctgtaacctg

SEQ ID NO: 1010494 - DNA, 120 bp, Artificial Sequence
  ENSG00000277987_4 (sequence is synthesized)
cttaattacccaagccatatatttaactgccctggacttgctggtacacattttacagagaatcggatgtaaggggagttaatggcaggagggcctctagccaccatgtggaactcaaca

SEQ ID NO: 1010495 - DNA, 120 bp, Artificial Sequence
  ENSG00000277987_5 (sequence is synthesized)
aagcagaaaccaaggcttgtctgcccacagactagtcagatgggtgcgaggttgcagtttcctgttctattccttgcctgtcaagaccaataaacatgtcatgaagtgaccagaaacgtg

SEQ ID NO: 1010496 - DNA, 120 bp, Artificial Sequence
  ENSG00000277987_6 (sequence is synthesized)
tggatttggaaaggcaaacgttgacattgagcacactgtttcaatggtctgagcggcctctcctgtctctcttgaggggaagttaaggcactagattttttaaaaagtgcaaaaccccct

SEQ ID NO: 1010497 - DNA, 120 bp, Artificial Sequence
  ENSG00000277987_7 (sequence is synthesized)
ttccgcacatctcaggaaatatatgaactaaacgagtattttcccctctaaattaagaaaatcaaatttgatgttaaaaagtctaaatgatatttactgactaatggaggcaagggcttg

SEQ ID NO: 1010498 - DNA, 120 bp, Artificial Sequence
  ENSG00000277987_8 (sequence is synthesized)
gattatgcttgctgaggacatagatgaagtctttcctccccctcctcctgccgctatcagcaagacattgagggagccactgtgcgttctacactacaagagagatgcctgctggggaga

SEQ ID NO: 1010499 - DNA, 120 bp, Artificial Sequence
  ENSG00000277987_9 (sequence is synthesized)
gcgtcctgtgatctgccaaaatgtttagaggcggcactgttggataagcaattgttcgggttatccggagattcatgcaaatgtattttcatcacaaaatttatttttctaggtgcaatg

SEQ ID NO: 1010500 - DNA, 120 bp, Artificial Sequence
  ENSG00000277987_10 (sequence is synthesized)
ttttaaggggaagacttacactatgaagctagcccagaagagggtgactagagtactgaggagtttctacctggaagggctgtaagacaactgctatgttgtgagcggctctatggagag

SEQ ID NO: 1010501 - DNA, 120 bp, Artificial Sequence
  ENSG00000277987_11 (sequence is synthesized)
gcccatgtggagggaagtgaggaaggcctctggccaacagtccaggaggaagtgaagccctcagtccaacagcctgtgtggaactgaaccctgcaaacaactctgtgtgtgagcttggaa

SEQ ID NO: 1010502 - DNA, 120 bp, Artificial Sequence
  ENSG00000277987_12 (sequence is synthesized)
gtggatccatattcagtcaaaccttgagatgggacaccatgctctgctaacacttgattgtggtcccagctaggccactgctgaagtcttgactcagagaaacgatgatatagtaaatgt

SEQ ID NO: 1010503 - DNA, 120 bp, Artificial Sequence
  ENSG00000277987_13 (sequence is synthesized)
ttgttgtttcaagttggtaagttttgggataattttttatatagtgataattttttatatactttaaaataacacattgccctatcctttggttacacttttctcttggaactctgcttg

SEQ ID NO: 1010504 - DNA, 120 bp, Artificial Sequence
  ENSG00000277987_14 (sequence is synthesized)
cccatatattacagaaatatttttcagatcatgggctgaaaggtggattatggatgcaatgtttaaatttagcaatgtcatttatgactgttcatatgagctttgctgcataaaatgttg

SEQ ID NO: 1010505 - DNA, 120 bp, Artificial Sequence
  ENSG00000277987_15 (sequence is synthesized)
aattttgagaagcagtttgagctcatttcctgcatgtttagttctaggtgcaatgttttaaggggaagacttacactatgaagctagcccagaagagggtgactagagtactgaggagtt

SEQ ID NO: 1010506 - DNA, 120 bp, Artificial Sequence
  ENSG00000277987_16 (sequence is synthesized)
gcagctttgcaggcgctggggctcccaaaggacggagctttgaatccacctgggaggcttaagagaaagtgctgagtcccccatgccctacccctgagactgctgacaggcatcgctgag

SEQ ID NO: 1010507 - DNA, 120 bp, Artificial Sequence
  ENSG00000277987_17 (sequence is synthesized)
ggctgcagctttggaatcgggcatcttctgaggaagagaaaggcaccacagccacggcacagaagactaggggagccagcttcagcttttgccaagtgtttggttcatctgacgcttggt

SEQ ID NO: 1010508 - DNA, 120 bp, Artificial Sequence
  ENSG00000277987_18 (sequence is synthesized)
gaagtcacatgcatctgctgccctgacatccaggagaaggaaccatctggctcaagaatccattacagaagaggccgtcagcacccgtcacttgtgcctccccatgtccagctgagtttc

SEQ ID NO: 1010509 - DNA, 120 bp, Artificial Sequence
  ENSG00000236144_0 (sequence is synthesized)
aggcaacgggggcgggtccctgggtctgcagagcctgggggccagaacacgtggcttcccggtggccctcaccttgcagagttggacaaagaggactaagttggtggcctaggtgtggag

SEQ ID NO: 1010510 - DNA, 120 bp, Artificial Sequence
  ENSG00000236144_1 (sequence is synthesized)
gctggtggggccaccaccacagaccacaggaggggatgtgtgcaggccagggtccagccttgcctgagggttgcacagtgttttaagtgacttctgcactggtgggcctctcctcccgaa

SEQ ID NO: 1010511 - DNA, 120 bp, Artificial Sequence
  ENSG00000236144_2 (sequence is synthesized)
accagtctctccctcttaactccatacagtaagcaaggcccgggaagaagttgggtttccctgccatccttcctgccccagcccctcatcctcaactcaccatcaacccttccacgatcc

SEQ ID NO: 1010512 - DNA, 120 bp, Artificial Sequence
  ENSG00000236144_3 (sequence is synthesized)
caaatcgctcgtggatgactttggcgaggggagccaaacagttggtggtgcaggacgcgttgctgaaacagccaaggtgtgcacggacactgtgaggtggtgacctccccaactcagccc

SEQ ID NO: 1010513 - DNA, 120 bp, Artificial Sequence
  ENSG00000236144_4 (sequence is synthesized)
tcaacctcctcagaggcgccaatgctgactgctgtcagccagcccagaccctttctccatatgctgcccgggacgtggactctgtgactgtgaggcctgcccggctgctttctgcttccc

SEQ ID NO: 1010514 - DNA, 120 bp, Artificial Sequence
  ENSG00000236144_5 (sequence is synthesized)
agctctgacaacctcgccatgaaccctcctagaccctcagctcctgcaataggaagctggctgccaaaggccaggagggtccctgaaaacagacactgcattaaagaaaaagctcctgga

SEQ ID NO: 1010515 - DNA, 120 bp, Artificial Sequence
  ENSG00000236144_6 (sequence is synthesized)
atgagtaaccgggtgctttgcttctgtgattcttggccagtgtcggtctgtttcctttgccattgagcctgctcccctcaatggggggttcaatcaatgtttgtggggtttgtttgtttt

SEQ ID NO: 1010516 - DNA, 66 bp, Artificial Sequence
  ENSG00000236144_7 (sequence is synthesized)
ggtgcaatcagagctcactgcagccttgatcttcctggctccggccataagctaatttttaaattt

SEQ ID NO: 1010517 - DNA, 81 bp, Artificial Sequence
  ENSG00000236144_8 (sequence is synthesized)
catgccaatttgttgcccagggtgctttagaacccctgggctcaagtgatccttgacctcccacagtgctgggattacagg

SEQ ID NO: 1010518 - DNA, 120 bp, Artificial Sequence
  ENSG00000236144_9 (sequence is synthesized)
ttctcctgcctccgcctcccgagtagttggggttacaggcatgcgctaccacacctggctagttttttattgttgttgttttttgtatttttagtggtgacggggtttgctctgttggcc

SEQ ID NO: 1010519 - DNA, 72 bp, Artificial Sequence
  ENSG00000236144_10 (sequence is synthesized)
atgcgctaccacacctggctagttttttattgttgttgttttttgtatttttagtggtgacggggtttgctt

SEQ ID NO: 1010520 - DNA, 120 bp, Artificial Sequence
  ENSG00000236144_11 (sequence is synthesized)
cacctggcctcgtgttttttttttagttagccattttatacgtgtttactgaacacctgtcctgtgcccatattctaagtgccttacctgcattaaactcatgtaaccttcacaacccga

SEQ ID NO: 1010521 - DNA, 120 bp, Artificial Sequence
  ENSG00000236144_12 (sequence is synthesized)
agcgctttggggagtgacttccggccatgcggggcctctaccgctgccatcgcggtcccggtctcctgaagtggaacccggcttggagtcgagcgcgacccctcgcccgtgggcgcaggc

SEQ ID NO: 1010522 - DNA, 120 bp, Artificial Sequence
  ENSG00000236144_13 (sequence is synthesized)
cagccgtgagcactgttttttatttcaccatggacccatcggcgtggggcgcccgccccgggtgtccttcctcccccgggcagccagatgctggaacgggaggcacatgttccggccccg

SEQ ID NO: 1010523 - DNA, 120 bp, Artificial Sequence
  ENSG00000236144_14 (sequence is synthesized)
gcccctgggaaggaaagaaaggaccttcccgtttcacttgtctcggctgaacatgtagcggaggaggtcgaccacccggtgactgtagccatattcgttgtcgtacctgtggaggagggg

SEQ ID NO: 1010524 - DNA, 120 bp, Artificial Sequence
  ENSG00000236144_15 (sequence is synthesized)
tcgggaggttcaagggggttccttccgaccaccccttagttcccctccctctaagtctccagctccttcccccttaccatgaaatgagcttcacgaaattgtcattgagcgcaatgccgg

SEQ ID NO: 1010525 - DNA, 120 bp, Artificial Sequence
  ENSG00000236144_16 (sequence is synthesized)
ccttagcatcgaagatggacgagtgggtatcaccgaggaagtccgtagagacgacctggaagtcagaatttcaaagataagtgtgtccggcagagcaaggacctccaggagctgaggccc

SEQ ID NO: 1010526 - DNA, 120 bp, Artificial Sequence
  ENSG00000236144_17 (sequence is synthesized)
cgactcttaactctatcgcccatccatgcattcatctataatatttgatgtagccctactgtgtccagtctctggactggagggtatgaccaagtgcagggtatgaccaaggcactgtgt

SEQ ID NO: 1010527 - DNA, 120 bp, Artificial Sequence
  ENSG00000236144_18 (sequence is synthesized)
cagggtctggccaaagggcacaggtcacaaacaccctcatgctgtaccagtacatccctttcctaggaataatgcaagcgtttggaatgggccagcatggagggcctctctgaggggtgg

SEQ ID NO: 1010528 - DNA, 120 bp, Artificial Sequence
  ENSG00000236144_19 (sequence is synthesized)
ccatgagcctgggtctagatgactagaaagatctgaccggctggggccctcagcacagtgtctgaggtagaaggagctgcaggaagggaggacctgagggttttagccctagtgtcatga

SEQ ID NO: 1010529 - DNA, 120 bp, Artificial Sequence
  ENSG00000236144_20 (sequence is synthesized)
aaggccacaggagtgttttcaatcctgaaaacgggtgatgcaatgtgattccattaaaacaaaagatcccagtgactgtgggaaagtggacctgcaggagttaatgcagggagacagcac

SEQ ID NO: 1010530 - DNA, 120 bp, Artificial Sequence
  ENSG00000236144_21 (sequence is synthesized)
caaggtggatgtacaggggtccaccatgaccatggcatccactcctcacagagaaggcatctggccatggcctggccctgagcaagtattgaaaaaaatgggagctgttgtcttttgttc

SEQ ID NO: 1010531 - DNA, 120 bp, Artificial Sequence
  ENSG00000236144_22 (sequence is synthesized)
actaagcatgtattagtcacctgctgtatgccaggttggagccacaaaagtgaaaaggcagcccctaaatccctgttttcttggagtgcacacaccactggggccaacagtgactatgaa

SEQ ID NO: 1010532 - DNA, 120 bp, Artificial Sequence
  ENSG00000236144_23 (sequence is synthesized)
atgaaatttcaggtgaggaatatggccacaaaaagaacatattttgagggggtgccttgctgaagagggaggttcctccagagacttggaggaagtaaggacagactgtatggtcacctg

SEQ ID NO: 1010533 - DNA, 120 bp, Artificial Sequence
  ENSG00000236144_24 (sequence is synthesized)
gcaagggaagcattccagactaaaggaacagcaagtgcaaaggccctgaggcagggagatctcccttcctgccctgcagtttctgacttggcacattgagagcagctccctggcaagtgg

SEQ ID NO: 1010534 - DNA, 120 bp, Artificial Sequence
  ENSG00000236144_25 (sequence is synthesized)
agggctcctcccagggtctcctctcctcagcccctacctcatcctcggtgtaggcaaggatgccagccatgggccccttggctgctgcttttacagcctccttgatggctgagtaggggg

SEQ ID NO: 1010535 - DNA, 120 bp, Artificial Sequence
  ENSG00000236144_26 (sequence is synthesized)
caggctgggcgaggcggcaggtcaggtccacgacagacacatccggggttggtacccggaacgccatccctgtcagcttcctggagaatcccccatgaggaacaggagtcagaacttagg

SEQ ID NO: 1010536 - DNA, 120 bp, Artificial Sequence
  ENSG00000236144_27 (sequence is synthesized)
gacgttgccctccattccccctttccctgtggctgggccaggcccctgctttcctcttaaggactgagggccgggccagtccagtcctcctggcgtatgcccccaccctggttgcagctt

SEQ ID NO: 1010537 - DNA, 120 bp, Artificial Sequence
  ENSG00000236144_28 (sequence is synthesized)
cttgtcctcataccctttgagctctgggatgactttggtcacagctttcgcagccccagtggaggctgggatgatgttctggtgggcaccccgcccatctcgccaggccttccttgatgg

SEQ ID NO: 1010538 - DNA, 120 bp, Artificial Sequence
  ENSG00000236144_29 (sequence is synthesized)
cccgtccactgtcttctgggtggccgtgtaggaatggactgtggtcttggggaagagaaggaccaagatgaggccttcatgctcctaagctcccatgcctcttttttccaggactaagtt

SEQ ID NO: 1010539 - DNA, 120 bp, Artificial Sequence
  ENSG00000236144_30 (sequence is synthesized)
gggaggtttctggtttcctgttttataaatttatgtttttacttggtattttgacaaacatttgtatttgaagcacactaaacatctagtattgccgttttctacttggctttagcaaac

SEQ ID NO: 1010540 - DNA, 120 bp, Artificial Sequence
  ENSG00000236144_31 (sequence is synthesized)
cccctcttggggtatgcacgcagacttggttttatgaaacgtcaggatgagggtgagagggatctgtggggacactgtcagactgaaggaggcactgaggtgcagctggggaggctcccc

SEQ ID NO: 1010541 - DNA, 120 bp, Artificial Sequence
  ENSG00000236144_32 (sequence is synthesized)
aagcttgtcctctggaagtcatgcgtttttagcagatagtttcgggaaggagaagcagaagccaagcgaccaggaatccagtggggctgagggtggggaggacgagtctaccctcccttc

SEQ ID NO: 1010542 - DNA, 120 bp, Artificial Sequence
  ENSG00000236144_33 (sequence is synthesized)
cacacattgcaggatgtcactgcccacattacctcacaatgttcatggagccagggttatagtcattttcattgacacccatgacgaacattggtgcatccggtgagggcgcggagatga

SEQ ID NO: 1010543 - DNA, 120 bp, Artificial Sequence
  ENSG00000236144_34 (sequence is synthesized)
ccacacgttgagcacctgcagagatgtggtcctggggaggaagcgcaggtgtcaggggcttctggcaccatcatccccccagctagccctgggcacctctccccagcttaccgaagctgc

SEQ ID NO: 1010544 - DNA, 120 bp, Artificial Sequence
  ENSG00000236144_35 (sequence is synthesized)
ctgtatggagaggtacacgcctgtggactccaccacgtaggggctcccgacagccctccaggggatctgtttgggctctttgctgtggggaagtggcagggctgagtcagtctcccctgc

SEQ ID NO: 1010545 - DNA, 120 bp, Artificial Sequence
  ENSG00000236144_36 (sequence is synthesized)
ttgagccccaccttcatagtccatggctttcaccatttgacaggctgagcaggtaccggcccacctgcaaccacctgcgtcccctaccccacacacctacttgttccagatgggctccac

SEQ ID NO: 1010546 - DNA, 120 bp, Artificial Sequence
  ENSG00000236145_0 (sequence is synthesized)
aaacagagtaactaagatagcaaaactaaagaccgatggacaacatctaccacaaaactaggtataaacctggacatcagaacagaaaaattaccagaacaaaggcaaggccataaatca

SEQ ID NO: 1010547 - DNA, 120 bp, Artificial Sequence
  ENSG00000236145_1 (sequence is synthesized)
ggggtgaacaagtagaagaaataagtggatgagtaagagaatgaatgaacaatgagtctgggctgggctatgatcccaacactttgggaggccgaggagggaggattgcttgaggccagg

SEQ ID NO: 1010548 - DNA, 120 bp, Artificial Sequence
  ENSG00000236145_2 (sequence is synthesized)
aaagaaaaaagggggaaaaattagtctgaacactgcaaaattgcccctaggccaggtacatggtgatgttggctgtatcctggcgtagtgacaatttctgttgctgtagacatcccagga

SEQ ID NO: 1010549 - DNA, 120 bp, Artificial Sequence
  ENSG00000236145_3 (sequence is synthesized)
aattttctcctcctctgctcttcaggaagtttgaccactccaccacacgtggggacatttccaatgtcaaaaattataaccaaccataaaaccttttttaatccaagcaacaaccatctc

SEQ ID NO: 1010550 - DNA, 120 bp, Artificial Sequence
  ENSG00000236140_0 (sequence is synthesized)
agttctactgggcgctataggaagggcgcacgcacgaaacttcctccgtcccttgcatcctcagggcccgcccggcaggaggactgagcaaggccttggaaaactggagagattggagcg

SEQ ID NO: 1010551 - DNA, 120 bp, Artificial Sequence
  ENSG00000236140_1 (sequence is synthesized)
ggaaaatggagatagaacctgaaagagccccaaacgccagaacctgtagctccccaagaataagatcttccagaagaactagacccaaaactagccgttggggaacaccgaaatccttgg

SEQ ID NO: 1010552 - DNA, 120 bp, Artificial Sequence
  ENSG00000236140_2 (sequence is synthesized)
aggagcaacatccgcatgaccctctgtgtttctttaggcaaaaggacttgcttccattgtttgttcaattgtttgtgtttgttaaataaataaaacgattttcatgtatctttgaaatta

SEQ ID NO: 1010553 - DNA, 120 bp, Artificial Sequence
  ENSG00000236141_0 (sequence is synthesized)
aagaaagtgcttgacatgcaggaggaatgggaaagtcagtctccatgaaaggcagcagtggtggaaaatcagctttgagcaggagaattacagggcctgatcgacatgaggacaactctg

SEQ ID NO: 1010554 - DNA, 120 bp, Artificial Sequence
  ENSG00000236141_1 (sequence is synthesized)
gacatgagaataagaaggaaatcagcagtgggaaggcaatgggaaagatccagattccagcagaatatcaaatgagcagagcgaaatatctgttacataccactcactccactgacctca

SEQ ID NO: 1010555 - DNA, 120 bp, Artificial Sequence
  ENSG00000236141_2 (sequence is synthesized)
ggattcattaagtttccatttggcctcgccccagcctctcttgtactgcctttggccaataaccattcatcaagcatttgtttgccatgagcctatgagacaggatcgtctgcccaagtg

SEQ ID NO: 1010556 - DNA, 120 bp, Artificial Sequence
  ENSG00000236141_3 (sequence is synthesized)
gaatcagaagcatttcacctaagaattgggaagaatttcatgtctgcttgaaaatatgcttttccagggcagttttccctgctcatctataattatggaattgaacaatgctgatctctg

SEQ ID NO: 1010557 - DNA, 120 bp, Artificial Sequence
  ENSG00000236141_4 (sequence is synthesized)
aacaaaggatttataataagtccaagaaagctgaggtatcactggaattccctgtaagcaacactgacatactttatcacatgtaaaatcctcaaatttaatgtacagtactggaatatg

SEQ ID NO: 1010558 - DNA, 120 bp, Artificial Sequence
  ENSG00000236141_5 (sequence is synthesized)
tcccctaggtattttatgttttctgtggctctaagtcctaagcaactgccatcatgaaggagaatcaagactgctaagtaaaggagcttggtcacactcatttggttactgatacagaaa

SEQ ID NO: 1010559 - DNA, 120 bp, Artificial Sequence
  ENSG00000236141_6 (sequence is synthesized)
cacaagccatgcctggacacctccctccaccaaggctgccagtcaggggatttcaggtggtttcttcaatcggagtcttggcagttctacacctgtcctcactccacatgggatatacgt

SEQ ID NO: 1010560 - DNA, 120 bp, Artificial Sequence
  ENSG00000236141_7 (sequence is synthesized)
gtagagactacatcgtgctttaaccttgagcgctacttcttaaaccaaaagtaaatttaaactaaggacccatttcagccaaactttcccaagcaattctactttcttctctctcttatt

SEQ ID NO: 1010561 - DNA, 120 bp, Artificial Sequence
  ENSG00000287849_0 (sequence is synthesized)
acaccctgtctgtctgtgtgcatttagagcacgttctcaagatcgagtctgattctcacaacgaccccaagtaaccacaatgacaagtgtgatgagtttcccacagttcacagaacaaga

SEQ ID NO: 1010562 - DNA, 120 bp, Artificial Sequence
  ENSG00000287849_1 (sequence is synthesized)
tgggaagaatggtccagaatcatcccacagataaacttcaagctgacaacgccttggatttcaagaacttaagcctgcactttgcttctatgaggaactgccaatgttttgccctcaggc

SEQ ID NO: 1010563 - DNA, 120 bp, Artificial Sequence
  ENSG00000287849_2 (sequence is synthesized)
gaaacctgatttctttcccctgaccatgtctcagaatgtccagttccagccgttaagatctctcccctgctgcaatctgctaattaagaacatactctgtcacctctctcgctctccctc

SEQ ID NO: 1010564 - DNA, 120 bp, Artificial Sequence
  ENSG00000287849_3 (sequence is synthesized)
ttcatcttcctctccctttccctcttttcccctctctccacctcatttcttaatttttccctcctactcttcctccctttcataacattgcatcatttctgattgtcctgctttgtgata

SEQ ID NO: 1010565 - DNA, 120 bp, Artificial Sequence
  ENSG00000287849_4 (sequence is synthesized)
cagttcagggaggtttgacacagagaagaactgtcagttctttaatcacttctttattatcaagatagggagagaaatgccattatctttcacaacttcactttgtgggacagatgtatt

SEQ ID NO: 1010566 - DNA, 120 bp, Artificial Sequence
  ENSG00000287848_0 (sequence is synthesized)
agagcagaggcacaggttgaccgatgctgaccctgggtccactcaccctgtcagagaacagagctctggagtgaatccagaaggagagttccagagagttcctgtctcacctctcacttg

SEQ ID NO: 1010567 - DNA, 120 bp, Artificial Sequence
  ENSG00000287848_1 (sequence is synthesized)
cactggcctctgtctccctggtattgaggtcactttcaacacccatctgacattcctcctctaaaaataaactgggaaacccattttccaaagttacttacaaatccatgacaacatatc

SEQ ID NO: 1010568 - DNA, 120 bp, Artificial Sequence
  ENSG00000287848_2 (sequence is synthesized)
gataatttctgtttagaccatctagaactttcatatcctctgatgtcaactggaattcaaaaacctaccaaagaagtagaaaatgtttattcttagattgcataattgtcaacttggaat

SEQ ID NO: 1010569 - DNA, 120 bp, Artificial Sequence
  ENSG00000287848_3 (sequence is synthesized)
agccaagtatatcacacagtagggtgtagaggcaatatgtaaaatacttgataagtttccaaaagttatgaaagaccatctctaaactctcaagtgattaaagaatatcagataaaatat

SEQ ID NO: 1010570 - DNA, 120 bp, Artificial Sequence
  ENSG00000287848_4 (sequence is synthesized)
aaatctattcctagatattacatattgaaactgcacaaaactgaagaaaagatctcaacagaaactaaagatggaacgaagttgaccttatgtgcacatgattggttcatgtacttagat

SEQ ID NO: 1010571 - DNA, 120 bp, Artificial Sequence
  ENSG00000287848_5 (sequence is synthesized)
aaatgtataatttagacagtttgatggtgatacaatttggatatttgtcccctcctaatctcatgttaaaaagtaattccccaatgatggaagtgggtcctggtgggaggtgtttgtgcc

SEQ ID NO: 1010572 - DNA, 120 bp, Artificial Sequence
  ENSG00000287848_6 (sequence is synthesized)
ctgggggcatccctcatgaatggctgggtgccctccccatggtaatgagtgttcactgcattagttcacatgaaatctggtttaaaaaggagcctgacattttctttttttccctcttca

SEQ ID NO: 1010573 - DNA, 120 bp, Artificial Sequence
  ENSG00000287848_7 (sequence is synthesized)
tctcttgttatttgatatgtttcctcctctgtcaccttctaccacgagtaaatgcttcctgagccctcaccaaaactaaatgctggtgccatgatttttgtacagtctgcaaaatggact

SEQ ID NO: 1010574 - DNA, 120 bp, Artificial Sequence
  ENSG00000287848_8 (sequence is synthesized)
gtatctggtggaagaaatttctaagcaggaaaacattcaagagatagtgtgactgcttctaacagcctatgatcaggtatgggtgcaaaggaatgacctaatgttggaacttaaagcttc

SEQ ID NO: 1010575 - DNA, 120 bp, Artificial Sequence
  ENSG00000287848_9 (sequence is synthesized)
aggaatgacctaatgttggaacttaaagcttcctgaagcctctccagaatgagatgctggtgctatgctttttgtacagcctgcaaattgtgagccaaatatagctcttttctgtataaa

SEQ ID NO: 1010576 - DNA, 120 bp, Artificial Sequence
  ENSG00000231080_0 (sequence is synthesized)
tggcttgacattctcctgttgccatataataacaccccaatctgcagaacagcttaaaaatacatcatgacaaaatggattccatgtcactttatacactggaccctagaaataaaaaaa

SEQ ID NO: 1010577 - DNA, 120 bp, Artificial Sequence
  ENSG00000231080_1 (sequence is synthesized)
aaatacataggtatctaagtattgttcattatatgaacaagaacatttgtgaatatgaccttcttcagtgccagccaaatagatatttgtgtcctacaacacaaaacatcgaaatgcatt

SEQ ID NO: 1010578 - DNA, 120 bp, Artificial Sequence
  ENSG00000231080_2 (sequence is synthesized)
ggcttgtgatacattagtaagtgtgataaatagaagattagatatttctggatctattaaaatcaattcaagaacccaaaataaaaacactatcttgaatataccaatcttgtctttttc

SEQ ID NO: 1010579 - DNA, 120 bp, Artificial Sequence
  ENSG00000231080_3 (sequence is synthesized)
atcaaactacctgagagactactgtgcaaaagaaaatataaattggtcctttgctggaatcggggtagcatttaatatcctgtatggaaattacatagaaaaacactggcttaaaataaa

SEQ ID NO: 1010580 - DNA, 120 bp, Artificial Sequence
  ENSG00000231080_4 (sequence is synthesized)
taagaaactttctaacatttagagctacctgacaatggaactagcagtccagggaaatagtaagtgctctttcattacaactattccaagaaaagacagatatacactttcaaactacat

SEQ ID NO: 1010581 - DNA, 120 bp, Artificial Sequence
  ENSG00000231080_5 (sequence is synthesized)
gatattgaaaaaagaaaaaaataaattatatgataaagtataatttctcccaaattggtattaccaatacatattcccagacagtcgtatataaaagtgatctgactcacattctcttca

SEQ ID NO: 1010582 - DNA, 120 bp, Artificial Sequence
  ENSG00000231080_6 (sequence is synthesized)
acagttagttacatcagaaatattaaatgttgccattctattagatgtaaaattatatcacctgtttttaattcctaattatgtgaatatcaataaggtggagcactttacgttccttgg

SEQ ID NO: 1010583 - DNA, 120 bp, Artificial Sequence
  ENSG00000231081_0 (sequence is synthesized)
cctggaagcccgctggtcacacaaaggacaaaggcatttctatgttgggcctcggtcccttatcagtgcagctgaggaatgtctttaggacaaccccctttgctagttttccttctctgt

SEQ ID NO: 1010584 - DNA, 120 bp, Artificial Sequence
  ENSG00000231081_1 (sequence is synthesized)
gcctgcagcctgatttttctggctgtttctctgtttaaaggagttttaccaaggacccgctctaactccctaaaggtttttttctctcaaggggacacacaaagttccaatcacacacat

SEQ ID NO: 1010585 - DNA, 120 bp, Artificial Sequence
  ENSG00000231081_2 (sequence is synthesized)
tctaaagattttacaaacaatatctcttcttctagtttgcagtcattattgaaataacaaacatgtcctattgtcaggccttactctcagtaactgatttcattgatctgaataggaaac

SEQ ID NO: 1010586 - DNA, 120 bp, Artificial Sequence
  ENSG00000231081_3 (sequence is synthesized)
ttacttgattaatcagctactctttggtattacctgacatctcattaatgcatctttgaattgaattattgctcaataggagtgattgtgaaatagtggcaatgtattacatcactattg

SEQ ID NO: 1010587 - DNA, 120 bp, Artificial Sequence
  ENSG00000287847_0 (sequence is synthesized)
agttgcctggatacctcattcttcctggacacaggaagggaactggggacccaccaaatagtaggactgaaagagctgtaacacgtgggtggagccaagatggccaaataggaaaagctc

SEQ ID NO: 1010588 - DNA, 120 bp, Artificial Sequence
  ENSG00000287847_1 (sequence is synthesized)
gggtgatttctgcatttccatctgaggcttaaaaaacggcacaccaggatattacatcctgcacctggctcagagggtcgtacgcccacagcatctcgctgattgctagcacagcagtct

SEQ ID NO: 1010589 - DNA, 69 bp, Artificial Sequence
  ENSG00000287847_2 (sequence is synthesized)
caggatattacatcctgcacctggctcagagggtcgtacgcccacagccgaggctgggggaggggtgcc

SEQ ID NO: 1010590 - DNA, 70 bp, Artificial Sequence
  ENSG00000287847_3 (sequence is synthesized)
atcaccaatatccgctgttctacagccaccactgttctgcagccaccgctgctgatacccaggaaaacag

SEQ ID NO: 1010591 - DNA, 120 bp, Artificial Sequence
  ENSG00000287847_4 (sequence is synthesized)
ctcctccaaaggaacgcacctcctcaccagcaacggaacaaagctgtatggagaatgtctttgacgagttaagagaagaaggcttcagacaatcctccaagctacaggaggaaattcaaa

SEQ ID NO: 1010592 - DNA, 120 bp, Artificial Sequence
  ENSG00000231083_0 (sequence is synthesized)
tgtgtgtgtgtgtgtgtgtctgtctgtctaacgggagggacatgagcatgttttaaagttgacgcaagtagctgggagagaaggaagagaccagaggggaactgggttcatcaatgtgac

SEQ ID NO: 1010593 - DNA, 120 bp, Artificial Sequence
  ENSG00000231083_1 (sequence is synthesized)
aagagaccagaggggaactgggttcatcaatgtgacaaggactgtgcctgaaggaaataaaggaaaagaatgtcttgctaaatcaacaaagctgctgtatcattgttcatttggccaggc

SEQ ID NO: 1010594 - DNA, 120 bp, Artificial Sequence
  ENSG00000231083_2 (sequence is synthesized)
cagcacttctaagacctggttgaggagttcacgaacagcaggcagagctgggcagaagagatcaagacagacgggacctcagcgatcatgggttccagccttttcctttcacagagagtg

SEQ ID NO: 1010595 - DNA, 120 bp, Artificial Sequence
  ENSG00000231083_3 (sequence is synthesized)
aagtttcaaacttgatcttcaagaaaacagactatctatctgaggctctattagaaggactggtgctcagtgacttccgaattgggaaatctttaatacgcacgtggagacatggcatag

SEQ ID NO: 1010596 - DNA, 120 bp, Artificial Sequence
  ENSG00000287841_0 (sequence is synthesized)
agatcagagacagctacggaaggaagaagtttagagtggctcaatcaaatcatgaaactaggcaagtggaaaattgcattttgttgctttgaattaggttaccaaagtgtcaacttcagc

SEQ ID NO: 1010597 - DNA, 120 bp, Artificial Sequence
  ENSG00000287841_1 (sequence is synthesized)
aaagcctcagcaagattggtaatgattaagcacccatctgctgcagtctttgagactttatgaagatctgagaaaaggaaaaaaagtggataaagagtgtgcacttctgttggggcaatg

SEQ ID NO: 1010598 - DNA, 120 bp, Artificial Sequence
  ENSG00000287841_2 (sequence is synthesized)
actccggggcggaagaggctgaaagaaaggaccaatgcagggaggaaaagaaattgcccaactccttccagggaatgtagatgaaaacatatagacacaattgggagaaaatttggggca

SEQ ID NO: 1010599 - DNA, 120 bp, Artificial Sequence
  ENSG00000287841_3 (sequence is synthesized)
gctgatctgactatgaactgttttgataagatgaatgaccagaactcccaatactacttgagtagaatcttctcctgtcactacaagaagaggctgtgaagacactgtttgaactcagac

SEQ ID NO: 1010600 - DNA, 120 bp, Artificial Sequence
  ENSG00000287841_4 (sequence is synthesized)
catcacaaaagaacagtatgattattgactttcaatgagtttcttacaattttatacctaattactatgctgtacaataatgattatgtagaccattaaatgtttcattaacattttatg

SEQ ID NO: 1010601 - DNA, 120 bp, Artificial Sequence
  ENSG00000287841_5 (sequence is synthesized)
tcttttatttgattagtacaccaaattctactcatgtgtgctctgtgtgcatagttccttaaacatacaacaaggttttctgcccacagagcttgatcttcccttgtttggagataaaat

SEQ ID NO: 1010602 - DNA, 120 bp, Artificial Sequence
  ENSG00000287841_6 (sequence is synthesized)
tgaataatatgtagtctgtttttttaatctcctttttatagccttatgttggagtgtagagtatgaactaccagaaaaaaagttaccagaaattccacattagaatgtaataaatactaa

SEQ ID NO: 1010603 - DNA, 120 bp, Artificial Sequence
  ENSG00000287841_7 (sequence is synthesized)
tctaagtattttaagaaaatgaatattctgggtatttgaatagatggattgagtcttttggcaactcagctccagaacttaccagcatgtagcatgagtaggaatgttctcattctgagt

SEQ ID NO: 1010604 - DNA, 120 bp, Artificial Sequence
  ENSG00000287841_8 (sequence is synthesized)
tacacagttcagttaaatttagggtgtgttagctggcagcatgcattaatagtggtgacaacaaatagaaggatgtctttctaaacaacataaggtaacctgggcttgagaactttataa

SEQ ID NO: 1010605 - DNA, 120 bp, Artificial Sequence
  ENSG00000287841_9 (sequence is synthesized)
ttattcattctctttaacaaatataaaagatacagctctatattatagataaaaacatttcatgtacttgataagatgtagattttgggtaattgacttgtgattataaatttaaatcca

SEQ ID NO: 1010606 - DNA, 120 bp, Artificial Sequence
  ENSG00000287841_10 (sequence is synthesized)
tccagggcccaatatccatttgtttactagaaccacatcaatcactgccaaatataagttgttttaagatgatgagttaaaattgagattaaataatttgcatcgttaaattaagtttaa

SEQ ID NO: 1010607 - DNA, 120 bp, Artificial Sequence
  ENSG00000287841_11 (sequence is synthesized)
tgaaaattgtatttgaaccctcagcttttaaaacctagttctgcttagcctttgaattttgtaaataaatttgacataatgaatctgcaaccttttattcatttcccaaatttagttatt

SEQ ID NO: 1010608 - DNA, 120 bp, Artificial Sequence
  ENSG00000287841_12 (sequence is synthesized)
ttgaattctcttcatttctcagttattctgtcattctgttttgctagtttgttgatgtccttagtttcttcagaagagttttagtttctcatctaattgtttcagatctcctgtgaactt

SEQ ID NO: 1010609 - DNA, 120 bp, Artificial Sequence
  ENSG00000287841_13 (sequence is synthesized)
tctcttttctcatgcattctcattttcatcaatatttgacttgcattagaatttattcacaacactctctatagctcgaggtgctttatcttctttttttgacttggccatttgtaacaa

SEQ ID NO: 1010610 - DNA, 120 bp, Artificial Sequence
  ENSG00000287841_14 (sequence is synthesized)
taaaaataggagttatttaatttcttgcaatcctaaaacatctttttcctaacattgtcacatatcttgtaatgatgtaaatttcatttgttgaaagaatatgaaaacaatttgctaatg

SEQ ID NO: 1010611 - DNA, 86 bp, Artificial Sequence
  ENSG00000287841_15 (sequence is synthesized)
gaattgtaaaagaaaacatatacaagtgcatttctgtctgtcttgtcattcttaaataacaatatagaagcagactggatactaaa

SEQ ID NO: 1010612 - DNA, 120 bp, Artificial Sequence
  ENSG00000287841_16 (sequence is synthesized)
cattcttaaataacaatatagaagcagactggatactaaaatgctagaaaatataatcataagaagatgaaaaagacaacataggcttttcttctagagctttaagtagttagcagctca

SEQ ID NO: 1010613 - DNA, 120 bp, Artificial Sequence
  ENSG00000287841_17 (sequence is synthesized)
gcattaatataaaaaaacaagaatacttagtgactgtgataattaattttatgtgacaacttactacaccatagtgacaggtgtttagtcaaacttcatttagattttgttataaaaaga

SEQ ID NO: 1010614 - DNA, 120 bp, Artificial Sequence
  ENSG00000287841_18 (sequence is synthesized)
tgtgattaacatttacaatcagttgactttaaataaagcagattatccctcataatgtgcataggtctcatccgataaattgaagtacttaagagaaaagactgaggtttcctgaaaaag

SEQ ID NO: 1010615 - DNA, 120 bp, Artificial Sequence
  ENSG00000287841_19 (sequence is synthesized)
aatggatcctgcttctcttctgcaacatagaaattctacttgagtttctggctttcagacacaagactacaatttcaagttttacctgaatctccagcctgccagcttgccatacaggtt
